United States Patent Application Publication US 2006/0048240 A1 - sequence listing, part 6

SEQ ID NO: 21114 - protein, 193 aa, Zea mays subsp. mays
  misc_feature (1)..(193): Ceres Seq. ID no. 12401409
MANGIISKKFHEQRSDGNVIELSVHAFCPLLKGKRGGAVTKVGPWGGSGGSPMELTETETPMRLESITVRSGVAVNSISFSYVDSAGHKRSAGPWGGSGGQPDQVQLAESEVVTQVSGTYGTIDDDDRTVITSIKFVTNLDKTYGPFGAYGDGDDTSFTVPVQPGSGAIVGFFARVGGAGDYLDAIGVYVRPL

SEQ ID NO: 21115 - DNA, 973 bp, Zea mays subsp. mays
  misc_feature (1)..(973): Ceres Seq. ID no. 12401449
acacatccgccgccgtttcttctcccatcatcttcctcgcagcgccggcgctccctctcccgctcccttccttactcgcgctcggcacacaggcggcggcgctcgggctctcagcgacggcgtcagcggcttaccctcgcgccctcgcctccggtcctccgcacaccggccggtgaccctgcgacaacattgcatctgaactgcattggatcctaagagatgatggatgagtcttttcttgataggatggtttcccaacttcggtcaacatgcaagtactacactggatatcccaaggacttagggcgatcaagaattataccattcacatctgagcgtcagtttgtgcagctattacatgaaggcaggcctgtagtcgttgcctttactattaagtgcacatatacacagcatcttgataaagttctggaagaggccgcagctaaattttatccacatatcaagtttgtccgagttgagtgcccgaagtaccctgggttttgcctcacaaggcaaaggaacgaatatccatttgttgaagtattctacaacccagaacaggctgcaagcccaggaaagagcgtggatcctaacatcaccaagtattctgtaaaagtgctaccgttcaactatgaccaaagcgtgtatggatttcgagaatatttcaagaagcatggtttcaagtattctgaaacaaactagatctgttgttaaagatctgcctcgagagtagtcctagggacttgagtagcatgtggaggcagttgttgtatggagttgaaatggcgtgaggctctaatgggaggccttgactagttcattcgagaatgcctgtcatgtattcatttgtatacgggctactgctcatgcctagagatttgcttttccgtacctatgaaccattggatttggtaatgttttacctctcaaagcccggagtgagcaatttgcatcattttttcaagcactgtcg

SEQ ID NO: 21116 - protein, 160 aa, Zea mays subsp. mays
  misc_feature (1)..(160): Ceres Seq. ID no. 12401450
MMDESFLDRMVSQLRSTCKYYTGYPKDLGRSRIIPFTSERQFVQLLHEGRPVVVAFTIKCTYTQHLDKVLEEAAAKFYPHIKFVRVECPKYPGFCLTRQRNEYPFVEVFYNPEQAASPGKSVDPNITKYSVKVLPFNYDQSVYGFREYFKKHGFKYSETN

SEQ ID NO: 21117 - protein, 159 aa, Zea mays subsp. mays
  misc_feature (1)..(159): Ceres Seq. ID no. 12401451
MDESFLDRMVSQLRSTCKYYTGYPKDLGRSRIIPFTSERQFVQLLHEGRPVVVAFTIKCTYTQHLDKVLEEAAAKFYPHIKFVRVECPKYPGFCLTRQRNEYPFVEVFYNPEQAASPGKSVDPNITKYSVKVLPFNYDQSVYGFREYFKKHGFKYSETN

SEQ ID NO: 21118 - protein, 151 aa, Zea mays subsp. mays
  misc_feature (1)..(151): Ceres Seq. ID no. 12401452
MVSQLRSTCKYYTGYPKDLGRSRIIPFTSERQFVQLLHEGRPVVVAFTIKCTYTQHLDKVLEEAAAKFYPHIKFVRVECPKYPGFCLTRQRNEYPFVEVFYNPEQAASPGKSVDPNITKYSVKVLPFNYDQSVYGFREYFKKHGFKYSETN

SEQ ID NO: 21119 - DNA, 1003 bp, Zea mays subsp. mays
  misc_feature (1)..(1003): Ceres Seq. ID no. 12401535
accaaaagaaaagatcacgacgcgacccgctcgctctcgctctcgctctcgggccccagtccgatcgggtcggtgcctacccacccccgcagccccgctggccgccgcacccaggcgaggcaaggcgcgtcgcgaaccacggaaccaaccgcaccgaccgagtcaatcaatccggcgagtggccgagtggggtaggttgtgtgcggcatgacgaccacgcgcgaccgtggcgccggcggcggatcggcgtccagggtcggtgacggggacgtcgacctgggcgagggctgggactggggcgccatcccgcggctcctctcctccgcctgcctcttcctctgctccggagcagaggctgttttggttgctgcgataagactgtaaagcaactgggtgaactgtccagaaacttgatcacccaggaccaaataaccattggagagccattttggagcacaaccaccatcgaggttgaaccagcagatctcagcggtgttacttcagtcaatacatctaacttggcctctggaactggtagcagtcataaccttcctggacttggtaataatggacttattctgtgggaacatacaaggcaggagtggactgaaactagaagtctacggctgaaggcgaagcaggttcgtgaaccagtattgagttggaatgcagcatatgagagtctgcttggatcaaataagccatttcctcaacccattcctcttcatgagatggtcgatttccttgtggacatctgggagcaggaggggctgtatgactagcgcaaatgatttcatgggataacatctgggataacacatagttgttcctcaagagaggggaaaaagaatgacatagggggtgtaggcttgggatgaggtgatgagttggcctgtcatacttgtttttgtcaatggaggcctgctgtacttgcagaatacagagctgtggttgtaagcttgtaagaagtcctgatactaatagtggctttgtttaatttgcc

SEQ ID NO: 21120 - protein, 86 aa, Zea mays subsp. mays
  misc_feature (1)..(86): Ceres Seq. ID no. 12401536
QKKRSRRDPLALALALGPQSDRVGAYPPPQPRWPPHPGEARRVANHGTNRTDRVNQSGEWPSGVGCVRHDDHARPWRRRRIGVQGR

SEQ ID NO: 21121 - protein, 69 aa, Zea mays subsp. mays
  misc_feature (1)..(69): Ceres Seq. ID no. 12401537
PKEKITTRPARSRSRSRAPVRSGRCLPTPAAPLAAAPRRGKARREPRNQPHRPSQSIRRVAEWGRLCAA

SEQ ID NO: 21122 - protein, 64 aa, Zea mays subsp. mays
  misc_feature (1)..(64): Ceres Seq. ID no. 12401538
TKRKDHDATRSLSLSLSGPSPIGSVPTHPRSPAGRRTQARQGASRTTEPTAPTESINPASGRVG

SEQ ID NO: 21123 - protein, 58 aa, Zea mays subsp. mays
  misc_feature (1)..(58): Ceres Seq. ID no. 12401539
MTTTRDRGAGGGSASRVGDGDVDLGEGWDWGAIPRLLSSACLFLCSGAEAVLVAAIRL

SEQ ID NO: 21124 - DNA, 1189 bp, Zea mays subsp. mays
  misc_feature (1)..(1189): Ceres Seq. ID no. 12401601
acgagaaacaccccacgtctcaagctgcccctttctcaccgccgcggccgccacgcgcagcagcaaccgagcaggagcgcagccagcaagctcaggcccgagccctactgcaaccgccgctgctaccgcactgaacaccatggccgacccggcggagcaccgtccagcggaggaggacgaggaagccgcggcggccggcgaggatgaggacaccggcgctcaggtcgcgcccatcgtgaagctggaggaggtcgccgttaccaccggagaggaggacgaggacgtacttgtcgacatgaaggcgaagctctaccggttcgacaaggaggcgaaccagtggaaagaacgtggcacaggcactgtgaagctgcttaagcacaaggagaccgccaaggtccgcctcgtcatgcgtcaggcgaagacgcttaagatctgtgctaaccatcttgtggtggcgacgactaagatgcaggagcacgcagggagcgacaagtcgtgcgtgtggcacgcgctggacttcgccgacggtgagctcaaggaggagatgtttgctatccgttttggatctgtcgagaattgcaagaagttcaaggacactgttgaagagatagctgaagagcaaggaaagaccgaggtgaaagaaaacgaggaagtctccattgccgccgcagatttggtacagaagttaacagtgacagaggctagcaaggagggagatgcagaggaagaggaggctcctgcatctgaccataagaaggatgctaaagggtaaagattgaaggcaaacaaggccaaatgattatgattccattcatttcgttgtcaaggttcatcttccccacaaattttcattacaaagtttcattgcattttctcctgagatgatttgtgtgtgtgtgtgtgtgtgtgtgtgttgggtgaaatctgagttgtcagtcatctacatgtctttcttggttgttagacttattctcagtcgcctgtttatctgggatggctaggtacatcatgtttgtacaattatttggggttgattttggaatggctctaaagctcgagatgagatagatggtatcatggtagttattagtgatgatttcttttcgcttcttgttcgttcgttctgaaataatatgggatgctttgttatacttgttgatccattattagcttgatgcatcgttgatcc

SEQ ID NO: 21125 - protein, 256 aa, Zea mays subsp. mays
  misc_feature (1)..(256): Ceres Seq. ID no. 12401602
RETPHVSSCPFLTAAAATRSSNRAGAQPASSGPSPTATAAATALNTMADPAEHRPAEEDEEAAAAGEDEDTGAQVAPIVKLEEVAVTTGEEDEDVLVDMKAKLYRFDKEANQWKERGTGTVKLLKHKETAKVRLVMRQAKTLKICANHLVVATTKMQEHAGSDKSCVWHALDFADGELKEEMFAIRFGSVENCKKFKDTVEEIAEEQGKTEVKENEEVSIAAADLVQKLTVTEASKEGDAEEEEAPASDHKKDAKG

SEQ ID NO: 21126 - protein, 210 aa, Zea mays subsp. mays; identical to SEQ ID NO: 16758
  misc_feature (1)..(210): Ceres Seq. ID no. 12401603

SEQ ID NO: 21127 - protein, 158 aa, Zea mays subsp. mays; identical to SEQ ID NO: 16759
  misc_feature (1)..(158): Ceres Seq. ID no. 12401604

SEQ ID NO: 21128 - DNA, 692 bp, Zea mays subsp. mays
  misc_feature (1)..(692): Ceres Seq. ID no. 12401633
atcatcgcttgcacttgcagcgtcacaagcaaaccgaagctagtcagtcacacacagctctccagcttccatccacaaagaagaaggaaacaagctaaccatgatgatgagcgccaagaagattgctcatctcgccaagaaatggcagaggatggccgcgcaagggaggaagcgcctcaccttgggggcggcggcggcaaaggaagtcgacgagtgctgcggctctgtggcgagcaagggccattgtgcggtgtacacggccgacggggcacggttcgaggtgccgctggcgtgccttagcacccctgtcttcagggagctcctgcagatgtcacaggaggagttcggcttcgcgggcggcgatggcaggatcacgctgccctgcgacgcggcggtcatggagtacgccatgtgtttgctcaggagaggagcctctgctgagctagagcaggcgttccttagcaccatggccatgtcatgccactgtgccatctacatggcgccgtatgttggacgagccaggcagcagcagatcgttgtttagttagttgctgttccgtgtatgtagacgtgtagtgtagagcaatgattttaactaggtgggtactattattcaaagccttctgatccagcaaccgatcaagtgaggtgttgtaagtacaagagaataaagagatatgattcttgtttcg

SEQ ID NO: 21129 - protein, 147 aa, Zea mays subsp. mays
  misc_feature (1)..(147): Ceres Seq. ID no. 12401634
MMMSAKKIAHLAKKWQRMAAQGRKRLTLGAAAAKEVDECCGSVASKGHCAVYTADGARFEVPLACLSTPVFRELLQMSQEEFGFAGGDGRITLPCDAAVMEYAMCLLRRGASAELEQAFLSTMAMSCHCAIYMAPYVGRARQQQIVV

SEQ ID NO: 21130 - protein, 146 aa, Zea mays subsp. mays
  misc_feature (1)..(146): Ceres Seq. ID no. 12401635
MMSAKKIAHLAKKWQRMAAQGRKRLTLGAAAAKEVDECCGSVASKGHCAVYTADGARFEVPLACLSTPVFRELLQMSQEEFGFAGGDGRITLPCDAAVMEYAMCLLRRGASAELEQAFLSTMAMSCHCAIYMAPYVGRARQQQIVV

SEQ ID NO: 21131 - protein, 145 aa, Zea mays subsp. mays
  misc_feature (1)..(145): Ceres Seq. ID no. 12401636
MSAKKIAHLAKKWQRMAAQGRKRLTLGAAAAKEVDECCGSVASKGHCAVYTADGARFEVPLACLSTPVFRELLQMSQEEFGFAGGDGRITLPCDAAVMEYAMCLLRRGASAELEQAFLSTMAMSCHCAIYMAPYVGRARQQQIVV

SEQ ID NO: 21132 - DNA, 634 bp, Zea mays subsp. mays
  misc_feature (1)..(634): Ceres Seq. ID no. 12401717
gctgttcttgtttgttgtgtagccgccactagtacgaagccctcagtcctccctcacacaccgaaccgagcgcaccatgtcgtcggcggctggaggagtggaggagacggtgcgggcgtcgcacatcctcatcaagcacgagggttcccgccgcaaggcctcctggaaggaccctgacggccgcatcatctccgccaccacgcgcggcgacgccgcagcgcgcctcctggacctccgcaaccagattctctccggccaggccaacttcgccgacctcgccgctcggcactccgactgctcgtccgcgcgacgcggtggggacttaggtacctttgggaggaggcagatgcagaaacccttcgaggacgccacatatgccctcaaggttggtgagctcagcgacatcgtggacactgacagtggggttcacatcatcctgcggactgcctgaggaggggatcacactgtcctctcaggctttcagttagtgcttatggcgttctgttagaacctgtatttgtattcctgctgggagcctgagttccattccgtgcaaagataaatcatgtgtgacgacacgtttgcaacagcatttatgcttaaactgcattaatgatgatgcgttgagctcctg

SEQ ID NO: 21133 - protein, 124 aa, Zea mays subsp. mays
  misc_feature (1)..(124): Ceres Seq. ID no. 12401718
MSSAAGGVEETVRASHILIKHEGSRRKASWKDPDGRIISATTRGDAAARLLDLRNQILSGQANFADLAARHSDCSSARRGGDLGTFGRRQMQKPFEDATYALKVGELSDIVDTDSGVHIILRTA

SEQ ID NO: 21134 - DNA, 555 bp, Zea mays subsp. mays
  misc_feature (1)..(555): Ceres Seq. ID no. 12401753
aactgcctcttcgcggcggcgcaaaacaccaacacgtcttctctccggttgcgaggagggtataggatttcgccgcggcgagatgtcggcgtacgacgaggtggagatcgaggacatggagtggaacgcggagctgaaggcgtacacgtacccgtgcccctgcggcgacctcttccagatcacgctcgacgacctccgcatcggggaggagattgcgcgctgcccgtcgtgttctctcttcctcaccgtcgtttacaacgccgaggactttgctgacgccaaggagccgacccacaagccgtccccgagcccagtcgccgtcgcctgatgtggcccgtgcccggcgagatggacgcatggaaatggatctcagagcaggataacgaatgagtttttgtttggcacacaccactacgggagcatttgtactactcttaaatgagtcaacccactgcatattttcagagctcaggttgttgaactatcttttttttgtgcttgacattgtaaggtgacatggacagaacatgctatgaaaaaaattgtttagtcact

SEQ ID NO: 21135 - protein, 108 aa, Zea mays subsp. mays
  misc_feature (1)..(108): Ceres Seq. ID no. 12401754
TASSRRRKTPTRLLSGCEEGIGFRRGEMSAYDEVEIEDMEWNAELKAYTYPCPCGDLFQITLDDLRIGEEIARCPSCSLFLTVVYNAEDFADAKEPTHKPSPSPVAVA

SEQ ID NO: 21136 - protein, 91 aa, Zea mays subsp. mays
  misc_feature (1)..(91): Ceres Seq. ID no. 12401755
NCLFAAAQNTNTSSLRLRGGYRISPRRDVGVRRGGDRGHGVERGAEGVHVPVPLRRPLPDHARRPPHRGGDCALPVVFSLPHRRLQRRGLC

SEQ ID NO: 21137 - protein, 81 aa, Zea mays subsp. mays
  misc_feature (1)..(81): Ceres Seq. ID no. 12401756
MSAYDEVEIEDMEWNAELKAYTYPCPCGDLFQITLDDLRIGEEIARCPSCSLFLTVVYNAEDFADAKEPTHKPSPSPVAVA

SEQ ID NO: 21138 - DNA, 862 bp, Zea mays subsp. mays
  misc_feature (1)..(862): Ceres Seq. ID no. 12401768
gcacgagaccattacctagaacatcctaatcgaaaaatctgagatacagacagattaatcaacgcccgcacctcctatgggcacgaccggcgacgctccggctccggcgggggatccgcaggaccgccaccgtacccaccccccggcggcgaagcagcggacgacgctggtgttcacgtacgggacgctgaagcgcggcttctccaaccaccgcctcctggaggagctcttcgcgagcggggacgcgtcgctggtgggccccgcggtgacgtcggcgcggctgccgctggtgtgcgggccgtaccgggtgccgttcctgctgaacctccccggcgccggcgccggggcgcaccgcgtgcgcggggaggcgtacgcggtgacggcccgcgggcttgcgcggctggacgagctggagggcgtggagacggggcactacgagcggctggccgtggccgtggacctcgagggcggcggcggcggcggcggcggcgcggtggatgcgatcgcctacttcgcgcaccggagctacgccaacgacatgtggcggcgcagcggggagaagggcgtccccgagtacacccacggcgtggcagccgggtatgtccggcgcaaggaccggccgcaggggcagacgttcctggagcagatccggatcttcaattcgtctcctcccaatccgcttaataatccctcctagctcgcgctgcctcaactccttcaattcagtttctccgatccgtgtcatacatgatccatataatattatgggatgtatgtggtcagatcgagaaggtgtgttatgtttaatctagacatggtctatattttatttaattatgtcaaataaattttatatcttcgc

SEQ ID NO: 21139 - protein, 206 aa, Zea mays subsp. mays
  misc_feature (1)..(206): Ceres Seq. ID no. 12401769
MGTTGDAPAPAGDPQDRHRTHPPAAKQRTTLVFTYGTLKRGFSNHRLLEELFASGDASLVGPAVTSARLPLVCGPYRVPFLLNLPGAGAGAHRVRGEAYAVTARGLARLDELEGVETGHYERLAVAVDLEGGGGGGGGAVDAIAYFAHRSYANDMWRRSGEKGVPEYTHGVAAGYVRRKDRPQGQTFLEQIRIFNSSPPNPLNNPS

SEQ ID NO: 21140 - protein, 104 aa, Zea mays subsp. mays
  misc_feature (1)..(104): Ceres Seq. ID no. 12401770
MRSPTSRTGATPTTCGGAAGRRASPSTPTAWQPGMSGARTGRRGRRSWSRSGSSIRLLPIRLIIPPSSRCLNSFNSVSPIRVIHDPYNIMGCMWSDREGVLCLI

SEQ ID NO: 21141 - DNA, 1162 bp, Zea mays subsp. mays
  misc_feature (1)..(1162): Ceres Seq. ID no. 12401808
agtccgccacaagcacacgcgcacacaggggccaagcgcctacacctacagaggagagacaaggtctgccgtccgcgcgtgcgcggaagaggggacggaggaagaaggctgccagcaatcagagatggaggtggggttcttgggtctgggcatcatgggcaaggcaatggcgaccaacctcctccgccacggcttccgcgtcaccgtctggaacaggaccctcgccaagtgccaagagctcgccgcgctcggcgccaccgtcggggagacgcctgcctccgtcgtctccaagtgcagatacaccatcgccatgctctccgaccccagcgccgccctatcagtcgtcttcgacaaggatggcgtgctcgagcagatcggtagcgggaagggctatgtggacatgtccactgttgacgctgcaacttcgaccaagattagcgaggcagttaaacaaaaagggggagctttccttgaagctccagtttcagggagcaagaagccagctgaagatggccaattggtcattcttgctgcagggaacaagccattgtatgatggtatgattcctgcatttgatgtactggggaagaagtcattctttctgggagagattggaaatggggcaaagatgaagcttgtggtcaacatggtcatgggaagtatgatgaattctttgtccgagggactctgtttggccgacaaaagtgggctgagcccccaaacacttcttgatgtactggaccttggcgccatcgcaaacccaatgttcaagctgaaggggcctacaatgctgcaaggcagctacagccctgcgtttcccctgaagcatcagcagaaggacatgaggttagcgcttgctctgggagatgagaacgccgtcgccatgcccgtctcagcagctgccaatgaggcgttcaagaaggcgaggagcctggggctgggagaccaggatttttcggcggtctatgaggttgtgaagggcgcgggtggttctggatctggccagccgtgatagaaggaccatttgtgagttgtgactttgttagcccatttccatgccgatttgcaacatagcgacgtacgagtacgtgtgtattcgaaatttggaaccagaccatacgttgcaaaagaaataataaatcaaagagatggtgctagctcg

SEQ ID NO: 21142 - protein, 336 aa, Zea mays subsp. mays
  misc_feature (1)..(336): Ceres Seq. ID no. 12401809
VRHKHTRTQGPSAYTYRGETRSAVRACAEEGTEEEGCQQSEMEVGFLGLGIMGKAMATNLLRHGFRVTVWNRTLAKCQELAALGATVGETPASVVSKCRYTIAMLSDPSAALSVVFDKDGVLEQIGSGKGYVDMSTVDAATSTKISEAVKQKGGAFLEAPVSGSKKPAEDGQLVILAAGNKPLYDGMIPAFDVLGKKSFFLGEIGNGAKMKLVVNMVMGSMMNSLSEGLCLADKSGLSPQTLLDVLDLGAIANPMFKLKGPTMLQGSYSPAFPLKHQQKDMRLALALGDENAVAMPVSAAANEAFKKARSLGLGDQDFSAVYEVVKGAGGSGSGQP

SEQ ID NO: 21143 - protein, 295 aa, Zea mays subsp. mays
  misc_feature (1)..(295): Ceres Seq. ID no. 12401810
MEVGFLGLGIMGKAMATNLLRHGFRVTVWNRTLAKCQELAALGATVGETPASVVSKCRYTIAMLSDPSAALSVVFDKDGVLEQIGSGKGYVDMSTVDAATSTKISEAVKQKGGAFLEAPVSGSKKPAEDGQLVILAAGNKPLYDGMIPAFDVLGKKSFFLGEIGNGAKMKLVVNMVMGSMMNSLSEGLCLADKSGLSPQTLLDVLDLGAIANPMFKLKGPTMLQGSYSPAFPLKHQQKDMRLALALGDENAVAMPVSAAANEAFKKARSLGLGDQDFSAVYEVVKGAGGSGSGQP

SEQ ID NO: 21144 - protein, 285 aa, Zea mays subsp. mays
  misc_feature (1)..(285): Ceres Seq. ID no. 12401811
MGKAMATNLLRHGFRVTVWNRTLAKCQELAALGATVGETPASVVSKCRYTIAMLSDPSAALSVVFDKDGVLEQIGSGKGYVDMSTVDAATSTKISEAVKQKGGAFLEAPVSGSKKPAEDGQLVILAAGNKPLYDGMIPAFDVLGKKSFFLGEIGNGAKMKLVVNMVMGSMMNSLSEGLCLADKSGLSPQTLLDVLDLGAIANPMFKLKGPTMLQGSYSPAFPLKHQQKDMRLALALGDENAVAMPVSAAANEAFKKARSLGLGDQDFSAVYEVVKGAGGSGSGQP

SEQ ID NO: 21145 - DNA, 734 bp, Zea mays subsp. mays
  misc_feature (1)..(734): Ceres Seq. ID no. 12401914
acccacccacccaccgagctgcctgctacacccctgccaagatccatctttccggttccgccgcctgatcgaagtgaacaagcaagtaagagccatggcgagcgagcacgcggcggggggcgatgctaagcatcaccagaagcagagcctgatggacaaggcgaaggggttcgtcgcggagaagatcgcgcacatccccaagcccgaggccacgctggacggcgtgacgttcaagggcctgagccgggagtgcatcacgctgcacagcancgtgaacgtgtccaacccctacgaccaccgcctccccatctgcgaggtgacctacacgctccggtgcgccggcaaggaggtggcgtccggcaccatgccggaccccggctggatcgccgccagcggctccaccgcgctggagatccccgccaaggtgccctacgacttcctcgtctccctcgtcagggacgtcggccgggactgggacatcgactacgagctccaggtcgggctcaccgtngacctccccatngtcggcaacttcaccatcccgctntccacctctggcgagttcaagctccccaccctcaaggacttgttctgatctagtagtagctcgcttgccttgtgttctgtgcgggcgcgcaccagcgatctgtacgacgagcttttgcaaataaacgacgcagctcctctgttctatatatctcagtgaatgcctaagctaaggggatggatggttt

SEQ ID NO: 21146 - protein, 197 aa, Zea mays subsp. mays
  misc_feature (1)..(197): Ceres Seq. ID no. 12401915
  misc_feature (90)..(90): Xaa is any aa, unknown or other
  misc_feature (170)..(170): Xaa is any aa, unknown or other
  misc_feature (174)..(174): Xaa is any aa, unknown or other
  misc_feature (182)..(182): Xaa is any aa, unknown or other
PTHPPSCLLHPCQDPSFRFRRLIEVNKQVRAMASEHAAGGDAKHHQKQSLMDKAKGFVAEKIAHIPKPEATLDGVTFKGLSRECITLHSXVNVSNPYDHRLPICEVTYTLRCAGKEVASGTMPDPGWIAASGSTALEIPAKVPYDFLVSLVRDVGRDWDIDYELQVGLTXDLPXVGNFTIPXSTSGEFKLPTLKDLF

SEQ ID NO: 21147 - protein, 166 aa, Zea mays subsp. mays
  misc_feature (1)..(166): Ceres Seq. ID no. 12401916
  misc_feature (59)..(59): Xaa is any aa, unknown or other
  misc_feature (139)..(139): Xaa is any aa, unknown or other
  misc_feature (143)..(143): Xaa is any aa, unknown or other
  misc_feature (151)..(151): Xaa is any aa, unknown or other
MASEHAAGGDAKHHQKQSLMDKAKGFVAEKIAHIPKPEATLDGVTFKGLSRECITLHSXVNVSNPYDHRLPICEVTYTLRCAGKEVASGTMPDPGWIAASGSTALEIPAKVPYDFLVSLVRDVGRDWDIDYELQVGLTXDLPXVGNFTIPXSTSGEFKLPTLKDLF

SEQ ID NO: 21148 - protein, 147 aa, Zea mays subsp. mays
  misc_feature (1)..(147): Ceres Seq. ID no. 12401917
  misc_feature (40)..(40): Xaa is any aa, unknown or other
  misc_feature (120)..(120): Xaa is any aa, unknown or other
  misc_feature (124)..(124): Xaa is any aa, unknown or other
  misc_feature (132)..(132): Xaa is any aa, unknown or other
MDKAKGFVAEKIAHIPKPEATLDGVTFKGLSRECITLHSXVNVSNPYDHRLPICEVTYTLRCAGKEVASGTMPDPGWIAASGSTALEIPAKVPYDFLVSLVRDVGRDWDIDYELQVGLTXDLPXVGNFTIPXSTSGEFKLPTLKDLF

SEQ ID NO: 21149 - DNA, 1301 bp, Zea mays subsp. mays
  misc_feature (1)..(1301): Ceres Seq. ID no. 12401930
ctacaacgcaccctacggtggctacccaccgcagggaccgtcaagaggtggcatgggctgggaccagaggccgggcccaccaacccatccttcgtaccagggtggtggttctgactactacaagcagggatctcagccatatgatagccagccacccagctaccctcctgggccagggaattacaacagttatgggcaatcccagggccctaactatggccaacctcagtatccgcaacatgcacctcaacagaactacagccatggctatggtgatcctagatacaatgccccccctccgaaccagcagtactatggtcagccaccgatggccccgcagcaaggctatcctcaacagccagatccctatgctaggcctccatacagtggacctggtcaatggacccccaggggtgctcccgccgcagatggctcctaccaggcgccaccttcatcttatgggccaccgtctcagcaacctcctgcttatgggcaaacatatggtgcagcaacgggacctgatgggtatggtcaacagggttacccacagcagggtggccaggtaccagcttcatatggtcagagtgcaccagcagctccaggatatcctcagcaaggcacgcagcaaggtggctatgcacagtacccgcagacccaaccagcatatggtgatcaagcagctcaagccaatgcgaactatgggtaccagggagctccagcagatcccaactacggaagtgcgtacccacagcagccagggtatggtcctcctggtcaggcaactggtcaggctggttatgcatcctctgcgccagcggccagccagcctgtgtatggccaggctggatatacccagccacctacaaatcctccaagttatgatcagtctgcagcaccagcggcgactcagagcggttatgctgcgccccctgcaaatccacaacagcctgctgcagcaaaaggggtctcgccacagcctgctgctgctgctgctgctggatatggtgctagcgggcagtggacggcatgagcctcgtcttccgaacttcgatgacagcaaggtcaggttggatatccgcttttggcgcgtgtttgaatgtttgcatcttttggatgtctgtggacgcatcatgtagggcttgaccccgttatcgaaagagattgtaaccccttgagttgtgatactggacatcttctgtagtatctacgagtagttgcttaatgtgacttttaaacattctattcagtttggatgttccttgtcttgctacttcacagcttgccaagccagtaatctttgg

SEQ ID NO: 21150 - protein, 377 aa, Zea mays subsp. mays
  misc_feature (1)..(377): Ceres Seq. ID no. 12401931
TTHPTVATHRRDRQEVAWAGTRGRAHQPILRTRVVVLTTTSRDLSHMIASHPATLLGQGITTVMGNPRALTMANLSIRNMHLNRTTAMAMVILDTMPPLRTSSTMVSHRWPRSKAILNSQIPMLGLHTVDLVNGPPGVLPPQMAPTRRHLHLMGHRLSNLLLMGKHMVQQRDLMGMVNRVTHSRVARYQLHMVRVHQQLQDILSKARSKVAMHSTRRPNQHMVIKQLKPMRTMGTRELQQIPTTEVRTHSSQGMVLLVRQLVRLVMHPLRQRPASLCMARLDIPSHLQILQVMISLQHQRRLRAVMLRPLQIHNSLLQQKGSRHSLLLLLLLDMVLAGSGRHEPRLPNFDDSKVRLDIRFWRVFECLHLLDVCGRIM

SEQ ID NO: 21151 - protein, 342 aa, Zea mays subsp. mays
  misc_feature (1)..(342): Ceres Seq. ID no. 12401932
YNAPYGGYPPQGPSRGGMGWDQRPGPPTHPSYQGGGSDYYKQGSQPYDSQPPSYPPGPGNYNSYGQSQGPNYGQPQYPQHAPQQNYSHGYGDPRYNAPPPNQQYYGQPPMAPQQGYPQQPDPYARPPYSGPGQWTPRGAPAADGSYQAPPSSYGPPSQQPPAYGQTYGAATGPDGYGQQGYPQQGGQVPASYGQSAPAAPGYPQQGTQQGGYAQYPQTQPAYGDQAAQANANYGYQGAPADPNYGSAYPQQPGYGPPGQATGQAGYASSAPAASQPVYGQAGYTQPPTNPPSYDQSAAPAATQSGYAAPPANPQQPAAAKGVSPQPAAAAAAGYGASGQWTA

SEQ ID NO: 21152 - protein, 331 aa, Zea mays subsp. mays
  misc_feature (1)..(331): Ceres Seq. ID no. 12401933
MIASHPATLLGQGITTVMGNPRALTMANLSIRNMHLNRTTAMAMVILDTMPPLRTSSTMVSHRWPRSKAILNSQIPMLGLHTVDLVNGPPGVLPPQMAPTRRHLHLMGHRLSNLLLMGKHMVQQRDLMGMVNRVTHSRVARYQLHMVRVHQQLQDILSKARSKVAMHSTRRPNQHMVIKQLKPMRTMGTRELQQIPTTEVRTHSSQGMVLLVRQLVRLVMHPLRQRPASLCMARLDIPSHLQILQVMISLQHQRRLRAVMLRPLQIHNSLLQQKGSRHSLLLLLLLDMVLAGSGRHEPRLPNFDDSKVRLDIRFWRVFECLHLLDVCGRIM

SEQ ID NO: 21153 - DNA, 1296 bp, Zea mays subsp. mays
  misc_feature (1)..(1296): Ceres Seq. ID no. 12401934
atcatcagatcatcgtcatcaaccagcaggtgaccgctagctgtacctgtacgacgtgtgaaacgagtagttaagcatgacggagaggcgcgccggcatggcagtggcggtggcggtggcggtggcgctcctgctgtcttcgtcgttcggcgtggcgtcggcggcggggaggggacgacccaccaagaagacgctgaagccaggggagaagccctcgcccaaatccaagttcttcccgctcagccgcaccaagtttgggcacaagcgaaactacgaggcctcctgcgccgacgagggcgggccggcctgctacgtcggatgccccgctgattgccccaactcctgcctcgtcttctgcgaatactgcctcagcttctgccaatgtgacatcttccccggcacctcctgcggcgacccgcgcttcaccggcggcgacggcaacaccttctacttccacggaagcaaggaccaggacttctgcatcgtctccgacgcgggcctccacatcaacgcccacttcatcggcaaccacaacccggccctcaaccgcgacttcacctgggtgcaggcgctgggggtcaccttcgtcgcagcaggcggcgaccaccaccgcctctacgtcggcgcccgcagggccgcggagtgggacgaggacgaggaccacgtccaggtcacattcgacggcgagcccgtcgacgtggacgccgcccggaacgcgcggtgggcgtccaaggcgctcccggggctctccgtcaggcgcaccaaggacgtgaacgccgtcaccgtggagctggacggcgccttcgccatctccgcggcagccgtgcccgtcaccgacgaggacgaccgggtccaccgctacggcaagacgggccgcgacagcctcgtgcacctcgacctcggcttccagttccataacctcaccgccgacgtcgacggcgtgctgggacagacataccgccccggctacgtcaccaagctggacatcagcgccaagatgcccatcatgggcggcgcgcccaagtacctgtccgagggtctcttctccactgactgcgctgtctcccggttccaccaccgccgcgatgccgccggcgctgccgtcgtcaccacatatgcctcttaagttgcatgccgccatgcatgcatgcatgaggaacatgagaaataatcaacaaatggaggcagcccaacaattacatgtactcctaccctgcaagcaagaaataattaagtggtcattccattgaccaaacattatttatattaattataaggagctcaaccaattaattg

SEQ ID NO: 21154 - protein, 349 aa, Zea mays subsp. mays
  misc_feature (1)..(349): Ceres Seq. ID no. 12401935
MTERRAGMAVAVAVAVALLLSSSFGVASAAGRGRPTKKTLKPGEKPSPKSKFFPLSRTKFGHKRNYEASCADEGGPACYVGCPADCPNSCLVFCEYCLSFCQCDIFPGTSCGDPRFTGGDGNTFYFHGSKDQDFCIVSDAGLHINAHFIGNHNPALNRDFTWVQALGVTFVAAGGDHHRLYVGARRAAEWDEDEDHVQVTFDGEPVDVDAARNARWASKALPGLSVRRTKDVNAVTVELDGAFAISAAAVPVTDEDDRVHRYGKTGRDSLVHLDLGFQFHNLTADVDGVLGQTYRPGYVTKLDISAKMPIMGGAPKYLSEGLFSTDCAVSRFHHRRDAAGAAVVTTYAS

SEQ ID NO: 21155 - protein, 342 aa, Zea mays subsp. mays
  misc_feature (1)..(342): Ceres Seq. ID no. 12401936
MAVAVAVAVALLLSSSFGVASAAGRGRPTKKTLKPGEKPSPKSKFFPLSRTKFGHKRNYEASCADEGGPACYVGCPADCPNSCLVFCEYCLSFCQCDIFPGTSCGDPRFTGGDGNTFYFHGSKDQDFCIVSDAGLHINAHFIGNHNPALNRDFTWVQALGVTFVAAGGDHHRLYVGARRAAEWDEDEDHVQVTFDGEPVDVDAARNARWASKALPGLSVRRTKDVNAVTVELDGAFAISAAAVPVTDEDDRVHRYGKTGRDSLVHLDLGFQFHNLTADVDGVLGQTYRPGYVTKLDISAKMPIMGGAPKYLSEGLFSTDCAVSRFHHRRDAAGAAVVTTYAS

SEQ ID NO: 21156 - DNA, 1082 bp, Zea mays subsp. mays
  misc_feature (1)..(1082): Ceres Seq. ID no. 12401972
ccatcagcgatccttctctcttgagtgtcctcccatctcatccaatccatccccgccaccacaggcaaaggcaacccaaaaggagccgccatgggctcccgctacgaggtggaggtgacggtggggtcggcgagcaacctgaagaacgtcaactggcgcaacggcgacctccggccctacgccgtgctgtgggtggacgacgggcccaagtgctccacccgcgtcgaccccgacaacggcgaggaccccgtgtgggacgagaaggtggtggtccccgtcccgcccgcctccgccgcgcgcctgggcgacgccgtcctccacatcgacgtcgtccacgccgccggcgacgacgccgacgccgtcaagccgctcgtgggctccgcgcgcctcccgctccgcgacgtcctcgatgacgccggcggcgtcggcggcgccagggtctcgcgcacgctcaggctgaagcggccctcgggccgcccgcagggccggctcnaggcccgcgtcgccgtccgcgaggccgcgccgccgccgcgctactacgacccgaacccgtacccggcgcccgcgtacgggaaccccgnnnncgccnncgacccgtactacgcggcgccgccggcgtacggcggacangccgccgtacgccgcgccgccggtggggtacccggccnacgctcctcctcctacggcggtggttatggctacggagctgctgctccgacggcgtacggcgctgaggctgctccactacctgcccagcagcagaagagcagcaagatggggatggggacggggctggccgtgggcgccgcggcggggctgctgggcggcctcgcgctggcggaaggggcgagctacgtggaggacaagttcgaggatcgcgtcgccgagagggtggaggaggagacgttcggcgacggagattacgatgacgattactagaatgaagcaggtcggagaggagatcatgatcatgcatacggaaccgaaatccaggcaacaagtcgaagtcgagtagctcaaatgtattcaaataataagtgagatcaccccagtcgagaaaaaaaatcaaaacttgaaccatg

SEQ ID NO: 21157 - protein, 282 aa, Zea mays subsp. mays
  misc_feature (1)..(282): Ceres Seq. ID no. 12401973
  misc_feature (135)..(135): Xaa is any aa, unknown or other
  misc_feature (164)..(164): Xaa is any aa, unknown or other
  misc_feature (165)..(165): Xaa is any aa, unknown or other
  misc_feature (167)..(167): Xaa is any aa, unknown or other
  misc_feature (180)..(180): Xaa is any aa, unknown or other
  misc_feature (193)..(193): Xaa is any aa, unknown or other
MGSRYEVEVTVGSASNLKNVNWRNGDLRPYAVLWVDDGPKCSTRVDPDNGEDPVWDEKVVVPVPPASAARLGDAVLHIDVVHAAGDDADAVKPLVGSARLPLRDVLDDAGGVGGARVSRTLRLKRPSGRPQGRLXARVAVREAAPPPRYYDPNPYPAPAYGNPXXAXDPYYAAPPAYGGXAAVRRAAGGVPGXRSSSYGGGYGYGAAAPTAYGAEAAPLPAQQQKSSKMGMGTGLAVGAAAGLLGGLALAEGASYVEDKFEDRVAERVEEETFGDGDYDDDY

SEQ ID NO: 21158 - DNA, 1111 bp, Zea mays subsp. mays
  misc_feature (1)..(1111): Ceres Seq. ID no. 12401978
accaactccggcggccggtgcagcagctagcagtggacgtacttatacgtcttcccccagcttacctctaccttaggtagcatagtggtgcggccgcttggtttaaactagacacatggcgcctcaaagcttggatcttgggctgagtctcggcctgggcgtggcggcgttccagcccagcagcttctgccaccccggcaatgccgtcgtcgtccccgcggcggcggagcgggaggccagcccggccgcggcggaggagagggagcggaggtgctcgcccgccggcagcccggtgtcgagcggcagcggcagcgggaataagcgcgccgcggcggagaggtcgnccggcgccggcgccggtagcggcgacgaggacgacgacggtgccgcacgcaagaagctgcggctgtccaaagaccaggccgccgtgctcgaggagtgcttcaagacgcaccacacgctcactccgaagcagaaggtggcgctggccagcagcctgggcctccggccgcggcaggtggaggtgtggttccagaaccggcgcgcccggaccaagctgaagcagacggaggtggactgcgagtacctcaagcgctggtgcgagcagctcgccgaggagaaccgccgcctgggcaaggaggtcgccgagctcagggcgctcagcgccgcgccggcggccccgctcaccaccctcacgatgtgcctctcctgccggcgcgtcgcctcctcgtccccgtcgtcgtcgtcgtcgcccaggcctagcatccccggcgccgcagctgccagtggcgggagcatggcctctccggcggcggcggcgacgttgcccgcccacaggcagttcttctgcgggttcagagacgccggggcggcggccgcggcgtacgggacagcctcggcggggctcgcgaagcctgtcagggctgccagataggcttagttggcgtcgatgccatggaaatgcatgggtccgtttaagttacaactgcaaagcaagtgttgtggctgaaactgaaactgaaagctgaaagctgaaatttttttatgtatctttagagggaaaggaatgcatgcatgcaatgcaaatgtcttctttttaacaaggttaatt

SEQ ID NO: 21159 - protein, 272 aa, Zea mays subsp. mays
  misc_feature (1)..(272): Ceres Seq. ID no. 12401979
  misc_feature (77)..(77): Xaa is any aa, unknown or other
MAPQSLDLGLSLGLGVAAFQPSSFCHPGNAVVVPAAAEREASPAAAEERERRCSPAGSPVSSGSGSGNKRAAAERSXGAGAGSGDEDDDGAARKKLRLSKDQAAVLEECFKTHHTLTPKQKVALASSLGLRPRQVEVWFQNRRARTKLKQTEVDCEYLKRWCEQLAEENRRLGKEVAELRALSAAPAAPLTTLTMCLSCRRVASSSPSSSSSPRPSIPGAAAASGGSMASPAAAATLPAHRQFFCGFRDAGAAAAAYGTASAGLAKPVRAAR

SEQ ID NO: 21160 - DNA, 1036 bp, Zea mays subsp. mays
  misc_feature (1)..(1036): Ceres Seq. ID no. 12401998
actagtagtgctgtgtctaatagttctagtgtcgtgccgggccggacggcagtttggccatctataactgtacaccatatagcaccaatcactccgcagtgcagacgcagcgcatgcaggtagcaatggcgggggagacgaagaagggcctggtgctgctggacttctgggtgagcccgttcgggcagcgctgccgcatcgcgctggcggagaagggcatcgcctacgagtactcggagcaggagctgctgggcggcgccaagagcgacatcctcctccgctccaacccggtgcacaagaagatccccgtgctcctccacgacggccgccccgtctgcgagtccctcgtcatcctcgagtacctcgaggaggccttcccggaggcctcccccaggctgctccccgacgccgcctacgcgcgcgcgcaggcccgcttctgggcggcctactccgacaaggtctacaaggccggcacgcggctgtggaagctcaggggcgacgcgcgggcgcaggcgcgcgccgagatcgtgcaggtggtccggaacctcgacggcgagctaggggacaaggccttcttcggcggcgaggcgttcgggttcgtggacgtggcgctcgtgcccttcgtgccgtggctccccagctacgagcggtacggggacttcagcgtggcggagatcgcgcccaggctggcggcgtgggcgcgccggtgcgcgcagcgggagagcgtggccaggacccttcacccgccggaaaaggtggacgagttcatcaacctgctcaagaagacctacggcatcgagtagtagagcggactactactagcagaggagatggtaccggccgtacgtacgtggctgccatgcagtttttgtttcggtttgtttaaacgggactccatgaatggatggaactcttcttgggctccgtgtgctacatacacatctgtaaaggtgaactaaaatcacggtaaaaactcggaaattagtttgtaaagggtccagcccccctcctttataaatagagaggtatacggctg

SEQ ID NO: 21161 - protein, 229 aa, Zea mays subsp. mays
  misc_feature (1)..(229): Ceres Seq. ID no. 12401999
MQVAMAGETKKGLVLLDFWVSPFGQRCRIALAEKGIAYEYSEQELLGGAKSDILLRSNPVHKKIPVLLHDGRPVCESLVILEYLEEAFPEASPRLLPDAAYARAQARFWAAYSDKVYKAGTRLWKLRGDARAQARAEIVQVVRNLDGELGDKAFFGGEAFGFVDVALVPFVPWLPSYERYGDFSVAEIAPRLAAWARRCAQRESVARTLHPPEKVDEFINLLKKTYGIE

SEQ ID NO: 21162 - protein, 225 aa, Zea mays subsp. mays
  misc_feature (1)..(225): Ceres Seq. ID no. 12402000
MAGETKKGLVLLDFWVSPFGQRCRIALAEKGIAYEYSEQELLGGAKSDILLRSNPVHKKIPVLLHDGRPVCESLVILEYLEEAFPEASPRLLPDAAYARAQARFWAAYSDKVYKAGTRLWKLRGDARAQARAEIVQVVRNLDGELGDKAFFGGEAFGFVDVALVPFVPWLPSYERYGDFSVAEIAPRLAAWARRCAQRESVARTLHPPEKVDEFINLLKKTYGIE

SEQ ID NO: 21163 - DNA, 817 bp, Zea mays subsp. mays
  misc_feature (1)..(817): Ceres Seq. ID no. 12402013
atcttaaaccctagaaagctcttaaaaagcccccaggggccagggctagcagcggcggcgtatccctaatcccacctccagtctctgggcaccaaatttccggcggcgatggcggcggctgtggcgaggtcagggttccggcgcatgttctccgtctctgccttcgcgccgccgaaggcgcccgccgcgcgccccaaggccgacccatcccccaacctcttcgtctccggcttaagcaagcgtaccacaagtgaaggacttagagaagcctttgcggagtttggtgaagttttgcatgctcgagttgtgaccgatcgtgtcagtgggttttctaagggatttggctttgtaaggtatgctacgaccgaagaggcagccaagggaatagagggaaaggatggaaagttccttgatggatgggttatttttgcggaatacgctaaacccagaccaccaccggaggaaacagggatgaattcgcagccccagcagtcatggggagctccatcaggttcctggggtgcacagtagatgaagtgatattgtgagagcccctccctgtcccagccctagggctcgtagcggatcgtgagggatgattttgtgtggtgtgtcgcaggtgaaatgcctttgttgtcccaatattcctaccgtgttgggggtggtcgcttgctcgcgtccacgtctttcacatgaattggttactgtggtagttgtagttctggatacggtaccaaaacaaaagtattgctgtcaacaatctgcaacagccgggaaaacagtcgaaaacctttgcaaataatacctgctgccgtgg

SEQ ID NO: 21164 - protein, 140 aa, Zea mays subsp. mays; identical to SEQ ID NO: 16990
  misc_feature (1)..(140): Ceres Seq. ID no. 12402014

SEQ ID NO: 21165 - protein, 128 aa, Zea mays subsp. mays; identical to SEQ ID NO: 16991
  misc_feature (1)..(128): Ceres Seq. ID no. 12402015

SEQ ID NO: 21166 - DNA, 832 bp, Zea mays subsp. mays
  misc_feature (1)..(832): Ceres Seq. ID no. 12402043
ataaatcaaccgccggtgaagtctagtcgtctcgtcgctcggtccaccacctcagctccgccgcttgcccgcttttgctctctccctcccggctctcggcttcttctacacgctaccgtctcacagccgtaaacgcccctcccggatcccgctagttcgccaccgccgcccgcccgcccgcctttcgcctcatcatggccgcctcgtcgaccgccacctccgtccacgacttcatcgtcaaggatgcgagcggcaaagacgttgacctcagcacctacaaggggaaggttcttctcattgttaacgtcgcatcccagtgtggcttaaccaactccaactacactgagctggcccagctctatgagaagtacaaggaccaaggctttgaaatcctggctttcccatgcaaccagtttggtgggcaggagcctggtaccaataaggagattgtccagtttgcctgcacacgcttcaaggctgagtaccccatcttcgacaaggttgatgtcaacggtagcaatgctgcgcccatctacaagttcttgaaatctagcaaaggtggccttttcggcgacagcatcaagtggaacttttccaagttcttggttgacaaggagggacgtgttgtggatcgctatgctccaaccacttcacccctgagcattgagaaggatatcaagaagctgcttgggagctcttaatcagtatctgggtgcaaagctgtagaaaaacatgtatcaacaatgccctgagcgataaaatatatgataagttgtattaataaagtattgtcgtacttgagaggttgcagtatctgctctatttcccttgc

SEQ ID NO: 21167 - protein, 168 aa, Zea mays subsp. mays
  misc_feature (1)..(168): Ceres Seq. ID no. 12402044
MAASSTATSVHDFIVKDASGKDVDLSTYKGKVLLIVNVASQCGLTNSNYTELAQLYEKYKDQGFEILAFPCNQFGGQEPGTNKEIVQFACTRFKAEYPIFDKVDVNGSNAAPIYKFLKSSKGGLFGDSIKWNFSKFLVDKEGRVVDRYAPTTSPLSIEKDIKKLLGSS

SEQ ID NO: 21168 - DNA, 753 bp, Zea mays subsp. mays
  misc_feature (1)..(753): Ceres Seq. ID no. 12402061
acaagcacaaagagaggccccgaccgcgatggatcgtcagcgacagaccgaccgtgacacagccaacaactaacacgcacgcgcgcgagagagaaagagagctgcccgggagagagagagagaggaaatcaaacgaaggcgacgacgtacggagacggcatggccgatcaccaccaccaccaccaccacgggcatccgccggacgggcccggcggcgcgggggaccagctggaggtaatcaaggagcaggaccggctgctgcccatcgccaacgtcggccgcatcatgaagcagatcctgccgcccaacgccaagatctccaaggaggccaaggagacgatgcaggagtgcgtgtccgagttcatcagcttcgtcacgggcgaggcctccgacaagtgccacaaggagaagcgcaagaccgtcaacggcgacgacgtctgctgcgccttcggcgcgctcggcttcgacgactacgtcgaccccatgcgcaggtacctgcacaagtaccgcgagctcgagggcgaccgcgccgcgtcctcccgcggcggaggcggaggcggaccggccggcgccggagaccccgcgtccgcctcggccgccgccggtcccagccccagcgccgcatcagccggtcatttcatgttcggcgccgccatggaccggcccgacaacaactcatccgccggcgccaggcccttttaatccatccttcctcatcttgcttgttattattcatcagattcagatcaacaa

SEQ ID NO: 21169 - protein, 250 aa, Zea mays subsp. mays
  misc_feature (1)..(250): Ceres Seq. ID no. 12402062
KHKERPRPRWIVSDRPTVTQPTTNTHARERERELPGRERERKSNEGDDVRRRHGRSPPPPPPRASAGRARRRGGPAGGNQGAGPAAAHRQRRPHHEADPAAQRQDLQGGQGDDAGVRVRVHQLRHGRGLRQVPQGEAQDRQRRRRLLRLRRARLRRLRRPHAQVPAQVPRARGRPRRVLPRRRRRRTGRRRRPRVRLGRRRSQPQRRISRSFHVRRRHGPARQQLIRRRQALLIHPSSSCLLLFIRFRST

SEQ ID NO: 21170 - protein, 180 aa, Zea mays subsp. mays
  misc_feature (1)..(180): Ceres Seq. ID no. 12402063
MADHHHHHHHGHPPDGPGGAGDQLEVIKEQDRLLPIANVGRIMKQILPPNAKISKEAKETMQECVSEFISFVTGEASDKCHKEKRKTVNGDDVCCAFGALGFDDYVDPMRRYLHKYRELEGDRAASSRGGGGGGPAGAGDPASASAAAGPSPSAASAGHFMFGAAMDRPDNNSSAGARPF

SEQ ID NO: 21171 - protein, 138 aa, Zea mays subsp. mays
  misc_feature (1)..(138): Ceres Seq. ID no. 12402064
MKQILPPNAKISKEAKETMQECVSEFISFVTGEASDKCHKEKRKTVNGDDVCCAFGALGFDDYVDPMRRYLHKYRELEGDRAASSRGGGGGGPAGAGDPASASAAAGPSPSAASAGHFMFGAAMDRPDNNSSAGARPF

SEQ ID NO: 21172 - DNA, 1047 bp, Zea mays subsp. mays
  misc_feature (1)..(1047): Ceres Seq. ID no. 12402068
ttttagcaccacctctcatgactatcacatttctttcgggaaagtagaaaaaaatctattacccatgaggccatgatactttccacttggacgaagcgaaattgttaattcctcccttccagtatatagctcgctcgctcacactcggagctcgtaacaaagtcatcactcatcacatgagcttgcttgtgactgccagctttgcccagtgttcatcgcccatggaagagcgggcactgttcccggtgtccgattccagcaccacctgcagcagctctggctgtaccggccccaactcccctgtctcgtcgtcgcagtatttggacgacaccagcgacggcgccggcagctcgagcagccggaagcggccgcgccgggagctgaagcatccaacgtaccgcggcgtgcgcatgcgtgcgtggggcaagtgggtgtccgagatccgggagccccgcaagaagtcgcgcatctggctgggcaccttcgacactcccgagatggccgcgcgcgcgcatgacgtcgccgcgctcgccatcaagggccgcgccgcgcacctcaacttcccggagatgtcccacgagctgccccgcgccgcatcggcggcccccgaggacgtgcgtgcggcggcggcgctcgcggccgcgatggagatggagagcgtggcgccgcccacttctagcgagtctcgcgacggcgcccgcaatgacgaaaatgaagggccggccgcatctagctcgtccggcaacgacgccgacaatgcccagaccgaagagcgggctgcgccgtccgagcattcgatgctggctgacgggcacatccttaatctcgcggtcttcgagctgccggacgtcctactcgagttcggcttcgcgccgccgccgccgtcgacgtcttgtggctatgatttgtcctgggacgagccgttgctgctctgggagcactgacgagcaagagggggcaacgtgacatgcatgccaatgtgaagttagataggtgcagctgatgatccgcatacaagcatacttttactaatcagcattgatttgt

SEQ ID NO: 21173 - protein, 255 aa, Zea mays subsp. mays
  misc_feature (1)..(255): Ceres Seq. ID no. 12402069
MSLLVTASFAQCSSPMEERALFPVSDSSTTCSSSGCTGPNSPVSSSQYLDDTSDGAGSSSSRKRPRRELKHPTYRGVRMRAWGKWVSEIREPRKKSRIWLGTFDTPEMAARAHDVAALAIKGRAAHLNFPEMSHELPRAASAAPEDVRAAAALAAAMEMESVAPPTSSESRDGARNDENEGPAASSSSGNDADNAQTEERAAPSEHSMLADGHILNLAVFELPDVLLEFGFAPPPPSTSCGYDLSWDEPLLLWEH

SEQ ID NO: 21174 - protein, 240 aa, Zea mays subsp. mays
  misc_feature (1)..(240): Ceres Seq. ID no. 12402070
MEERALFPVSDSSTTCSSSGCTGPNSPVSSSQYLDDTSDGAGSSSSRKRPRRELKHPTYRGVRMRAWGKWVSEIREPRKKSRIWLGTFDTPEMAARAHDVAALAIKGRAAHLNFPEMSHELPRAASAAPEDVRAAAALAAAMEMESVAPPTSSESRDGARNDENEGPAASSSSGNDADNAQTEERAAPSEHSMLADGHILNLAVFELPDVLLEFGFAPPPPSTSCGYDLSWDEPLLLWEH

SEQ ID NO: 21175 - protein, 177 aa, Zea mays subsp. mays
  misc_feature (1)..(177): Ceres Seq. ID no. 12402071
MRAWGKWVSEIREPRKKSRIWLGTFDTPEMAARAHDVAALAIKGRAAHLNFPEMSHELPRAASAAPEDVRAAAALAAAMEMESVAPPTSSESRDGARNDENEGPAASSSSGNDADNAQTEERAAPSEHSMLADGHILNLAVFELPDVLLEFGFAPPPPSTSCGYDLSWDEPLLLWEH

SEQ ID NO: 21176 - DNA, 831 bp, Zea mays subsp. mays
  misc_feature (1)..(831): Ceres Seq. ID no. 12402108
attttgtggacctatagcatattcccgtggtctccccccttttgctttgcttgccgagacggcgaccatggcgaagcagcagaatcctatccccatcccgatgccctgtcgctgtcgctgcccctcgtcctcgtcgcgctgctcctgccggccgcccgcggcgccgcggagacgccgcagtacacgacggtgcacgcggagtcggacttcgaggtgcggctgtacggcgacaccgtctggatgtccgcccccaccccggacatcccttccttccacgtcgccaccaagctcggcttccacagattgttccagtacctgatgggcgcaaacctcaactcttcgaggatcaggatgaccacccctgtgctcacgagtgtggttccaggtgcagggcctctgcgctcctcggcctactccgtccggctgtacctgccggcgaagttccaggcttcccctccggttcctctcccagagctgaacctgcatccagatcggtggccaggccactgcgtcgcagcgaggagcttctcgggtcgtgcacgggacaagaacgtggtcgaggaagccgagaagctcgccatgagcctgagccggtcaccatgggctaactccacagactactccagcaagagcgcttactcggttgcacagtacagcagtccattccgcatcattggccgtgtcaatgaggtgtggttcgacgtcaactgcagatctactgctgctggtgttgagtcctactgaaaaaaaaactgccagatgtgatggataataataatttggatgtaaaacacaagctgtcctgctttattccatctcttactcctagcc

SEQ ID NO: 21177 - protein, 247 aa, Zea mays subsp. mays
  misc_feature (1)..(247): Ceres Seq. ID no. 12402109
ILWTYSIFPWSPPFCFACRDGDHGEAAESYPHPDALSLSLPLVLVALLLPAARGAAETPQYTTVHAESDFEVRLYGDTVWMSAPTPDIPSFHVATKLGFHRLFQYLMGANLNSSRIRMTTPVLTSVVPGAGPLRSSAYSVRLYLPAKFQASPPVPLPELNLHPDRWPGHCVAARSFSGRARDKNVVEEAEKLAMSLSRSPWANSTDYSSKSAYSVAQYSSPFRIIGRVNEVWFDVNCRSTAAGVESY

SEQ ID NO: 21178 - protein, 167 aa, Zea mays subsp. mays
  misc_feature (1)..(167): Ceres Seq. ID no. 12402110
MSAPTPDIPSFHVATKLGFHRLFQYLMGANLNSSRIRMTTPVLTSVVPGAGPLRSSAYSVRLYLPAKFQASPPVPLPELNLHPDRWPGHCVAARSFSGRARDKNVVEEAEKLAMSLSRSPWANSTDYSSKSAYSVAQYSSPFRIIGRVNEVWFDVNCRSTAAGVESY

SEQ ID NO: 21179 - protein, 141 aa, Zea mays subsp. mays
  misc_feature (1)..(141): Ceres Seq. ID no. 12402111
MGANLNSSRIRMTTPVLTSVVPGAGPLRSSAYSVRLYLPAKFQASPPVPLPELNLHPDRWPGHCVAARSFSGRARDKNVVEEAEKLAMSLSRSPWANSTDYSSKSAYSVAQYSSPFRIIGRVNEVWFDVNCRSTAAGVESY

SEQ ID NO: 21180 - DNA, 1075 bp, Zea mays subsp. mays
  misc_feature (1)..(1075): Ceres Seq. ID no. 12402112
ctctgaaagtgggcctatcctcgctggtcacgtctcctctccgcgcacgaaaaccctagcacgcaggcgcagccagccctgctccaattcccaaagcttctggaaaacacctactcgtctctcatcccttccccgccgtcgcgtcctcttcgaactgaatcgcgccgcgatcacccaccttatggcggacaaggagcctgtcgtggagcgatccgaggcgtctgaggaggaggacgcctccgccgcggccgccgcgggggaggaagaggacacgggtgcccaggtggcccccatcgtgcggcttgaggaggtactcgtcaccaccggtgaggaggacgaggacgtcctgctcgacatgaaggcgaagctgtaccggtttgataaagacgggaaccaatggaaggaacggggcacgggcaccgtcaagcttctcaagaacaaggagaccggcaaggtccgactggtcatgcgccagggccaagacgcttaagatatgcgcgaaccacctcgtggcccccaccacgagaatgcaggaacatgccggcagcgacaaatcgtgcgtctggcacgcttctgactttgcggatggcgaactcaaggaggagatgtttgccatcaggtttggttcggtagaaaactgcaagaagttcaaggagttggttgaggagattgctgagtcacttacagagaacgaggacaaggaaggtcaagatggctcatccacggccggattgctggagaagctcactgtgagcgagggcaaatctgaggaaagtggcaagtcggagtccactgattctggcaaagtgaccgaaaccaaagccgatgcagccccagccgagtagttggtgtggttgcacgcagatcctccccgtgctgaatcagttcctctgccctttagccatgaaatatgtttgctaatttttttggggcgagttggagcagtctcttgtgtttgggtttgttcttaaaaactttgagttaattggggttggaacgttcggtatgcaagtgtagtatttcactgcgtggatcgttatggattgcggtaaattcatataaggtgcatctattg

SEQ ID NO: 21181 - protein, 162 aa, Zea mays subsp. mays
  misc_feature (1)..(162): Ceres Seq. ID no. 12402113
SESGPILAGHVSSPRTKTLARRRSQPCSNSQSFWKTPTRLSSLPRRRVLFELNRAAITHLMADKEPVVERSEASEEEDASAAAAAGEEEDTGAQVAPIVRLEEVLVTTGEEDEDVLLDMKAKLYRFDKDGNQWKERGTGTVKLLKNKETGKVRLVMRQGQDA

SEQ ID NO: 21182 - protein, 105 aa, Zea mays subsp. mays
  misc_feature (1)..(105): Ceres Seq. ID no. 12402114
MQEHAGSDKSCVWHASDFADGELKEEMFAIRFGSVENCKKFKELVEEIAESLTENEDKEGQDGSSTAGLLEKLTVSEGKSEESGKSESTDSGKVTETKADAAPAE

SEQ ID NO: 21183 - protein, 102 aa, Zea mays subsp. mays
  misc_feature (1)..(102): Ceres Seq. ID no. 12402115
MADKEPVVERSEASEEEDASAAAAAGEEEDTGAQVAPIVRLEEVLVTTGEEDEDVLLDMKAKLYRFDKDGNQWKERGTGTVKLLKNKETGKVRLVMRQGQDA

SEQ ID NO: 21184 - DNA, 882 bp, Zea mays subsp. mays
  misc_feature (1)..(882): Ceres Seq. ID no. 12402126
gaatcaattcccacagcaccaccaaaccaataggcaggcagcaaacacaagccaataggcaacacccgcggcgacgcaagagggagaagcgagcgtgcagcggtcctcctctcgatccacatggccatggcggcagcggacggcaagagccggaggttcgcgctggcctgcggggtgctgagccagtacgtcaaggccgagcagcagcagcagcagcagatggcggccccgcgcgccccggccaccacgaccctgagcctgatgcccggcgcggacgtcggcgccgacgagcagcaggaggcggccgccgctggggccgaggagatgcccgggcccgcccccgccgcggcgccgccgctcaccatcttctacggcggcagggtggtggtgttcgaggacttcccggcggagaaggcggccgaggtcatgcgcctcgcggccggcgacgacctgcccatcgcccggaaggcgtcgctgcagcggttcctggccaagcgcaaagatcgcctcgtcgagcgcgcgccctacgcccgcccgtcgtcccccgcggaggcggtcaagccggcctcgggctcggcctcggcctcctggctcgggctccgcagcacggaagccgaccgcctcaccatcgcgctgtgatttactggatcgacctcgaccagtggcgatttaattggctaatgatgggttcatgatcatgcctgcctttggggctggaatgctggatggagatgggagacagagacaggattgtagagatgttttttttttcatttcttacgagagtttcgctgctgtcgtgagatctgattcgataatagagagaagatgaagatcgaacaatttgtgcctttcgttgtgcttgtgcacgtatattctcct

SEQ ID NO: 21185 - protein, 230 aa, Zea mays subsp. mays
  misc_feature (1)..(230): Ceres Seq. ID no. 12402127
INSHSTTKPIGRQQTQANRQHPRRRKREKRACSGPPLDPHGHGGSGRQEPEVRAGLRGAEPVRQGRAAAAAADGGPARPGHHDPEPDARRGRRRRRAAGGGRRWGRGDARARPRRGAAAHHLLRRQGGGVRGLPGGEGGRGHAPRGRRRPAHRPEGVAAAVPGQAQRSPRRARALRPPVVPRGGGQAGLGLGLGLLARAPQHGSRPPHHRAVIYWIDLDQWRFNWLMMGS

SEQ ID NO: 21186 - protein, 172 aa, Zea mays subsp. mays
  misc_feature (1)..(172): Ceres Seq. ID no. 12402128
MAMAAADGKSRRFALACGVLSQYVKAEQQQQQQMAAPRAPATTTLSLMPGADVGADEQQEAAAAGAEEMPGPAPAAAPPLTIFYGGRVVVFEDFPAEKAAEVMRLAAGDDLPIARKASLQRFLAKRKDRLVERAPYARPSSPAEAVKPASGSASASWLGLRSTEADRLTIAL

SEQ ID NO: 21187 - protein, 170 aa, Zea mays subsp. mays
  misc_feature (1)..(170): Ceres Seq. ID no. 12402129
MAAADGKSRRFALACGVLSQYVKAEQQQQQQMAAPRAPATTTLSLMPGADVGADEQQEAAAAGAEEMPGPAPAAAPPLTIFYGGRVVVFEDFPAEKAAEVMRLAAGDDLPIARKASLQRFLAKRKDRLVERAPYARPSSPAEAVKPASGSASASWLGLRSTEADRLTIAL

SEQ ID NO: 21188 - DNA, 741 bp, Zea mays subsp. mays
  misc_feature (1)..(741): Ceres Seq. ID no. 12402135
cattttctgggtgttcttcactccagttatggtcagtgtggctaaatctttcgatgctccaataaagcttctgtttccaactgcagacgctgaacggccattctccatgcttggccttggtgacattgtaatacctggtatattcgtcgcacttgccttgcgttttgatgtctcaagaggtaccaagaagcgttacttcaacagtgcatttttgggatacgctgtgggtatgacggtgaccatcgttgtaatgaactggtttcaagcggcgcagcctgctctactataccttgttcctggtgtgattggttttgtcgctgttccctgtctgtggtatggagaagtgaaacagctactggagtttgacgagtcaaaaactgagtcggaggaaggcagtacagaagagaagcaagatgatgatagttccaaaggcaacaaaaaggtggactagcaggatttagttccggaggtaaaaggacaggaagacagttttcgtgtaatgtcgtctggcagctaaaaaaacgggtctgatgaccctctaataccggattcgctcgccttacttaagaacttagaagaaatggttcagcatgatacaagttttattttattttttgtttcattttgcggattatttgccctgggctggagagtgggaattgaggggaacaaaatagatgctgttactcgcgatgtactccctgattcgttaaggaattcaccagaactttgacttggccg

SEQ ID NO: 21189 - protein, 149 aa, Zea mays subsp. mays
  misc_feature (1)..(149): Ceres Seq. ID no. 12402136
IFWVFFTPVMVSVAKSFDAPIKLLFPTADAERPFSMLGLGDIVIPGIFVALALRFDVSRGTKKRYFNSAFLGYAVGMTVTIVVMNWFQAAQPALLYLVPGVIGFVAVPCLWYGEVKQLLEFDESKTESEEGSTEEKQDDDSSKGNKKVD

SEQ ID NO: 21190 - protein, 140 aa, Zea mays subsp. mays
  misc_feature (1)..(140): Ceres Seq. ID no. 12402137
MVSVAKSFDAPIKLLFPTADAERPFSMLGLGDIVIPGIFVALALRFDVSRGTKKRYFNSAFLGYAVGMTVTIVVMNWFQAAQPALLYLVPGVIGFVAVPCLWYGEVKQLLEFDESKTESEEGSTEEKQDDDSSKGNKKVD

SEQ ID NO: 21191 - protein, 114 aa, Zea mays subsp. mays
  misc_feature (1)..(114): Ceres Seq. ID no. 12402138
MLGLGDIVIPGIFVALALRFDVSRGTKKRYFNSAFLGYAVGMTVTIVVMNWFQAAQPALLYLVPGVIGFVAVPCLWYGEVKQLLEFDESKTESEEGSTEEKQDDDSSKGNKKVD

SEQ ID NO: 21192 - DNA, 1112 bp, Zea mays subsp. mays
  misc_feature (1)..(1112): Ceres Seq. ID no. 12402142
gaaaccggccaccgggccggagcgaacccttagaagcgaccttggcccgtgaggaagccaatcagccagagacagaacaatccatccaccatgaacagcctgttctcgagctcatggaagcgcgacggcggggacatcgagtccggcggcgtggagatgtctgcgccgccgggcgccgcggcgggcgcgagcctggacaggttcttcgaggacgtggagtccatcaaggacgagctccgcgacctggagcgcatccagcggtcgctccacgacgccaacgaggggggaaagtcgatgcacgacgcggcggccgtgcgcggcctccgcgcgcggatggacgcggacgtggccgcggcgatcaagaaggccaaggtggtgaagctgcgcctcgagtcgctggaccgcgccaacgccgccaaccggtccgtgcccgggtgcgggccgggctcctccaccgaccgcacccggacgtccgtcgtggccgggctgcgcaagaagctccgggactcgatggagtccttctcgtcgctgcggtcccgcgtcgcggccgagtaccgggacacggtggcgcggcggtacttcacggtcacgggggcgcagcccgacgaggcgaccctggacgcgctggcggagtccggggaaggagagcggttcctgcagcgcgccatcgcggagcagggccaggggcgcggagaggtgctgggcgtggtggcggagatccaggancggcacggcgccgtggcggggctggagcgcagcctgctggagctgcagcaggtgttcaacgacatggccgtgctggtggccgcgcagggggagcagctggacgacatcgagggcaacgtcggccgcgccaggtccttcgtcgaccgcggacgcgagcagctgcaggtggcgcggaagcaccagaagagcacccgcaagtggaccttcatcgccatcatcatcctcctcgtcatcatcctcgtcatcgtcctccccatcgtgctcaagggcgtcaataagaactaggccgcctggcctgcgtaattcgttctagtttttcttttcgtggcctttgtatcatacatacggttcgttgatacggtcgtcttgattatatttttcttctt

SEQ ID NO: 21193 - protein, 333 aa, Zea mays subsp. mays
  misc_feature (1)..(333): Ceres Seq. ID no. 12402143
  misc_feature (242)..(242): Xaa is any aa, unknown or other
NRPPGRSEPLEATLAREEANQPETEQSIHHEQPVLELMEARRRGHRVRRRGDVCAAGRRGGREPGQVLRGRGVHQGRAPRPGAHPAVAPRRQRGGKVDARRGGRARPPRADGRGRGRGDQEGQGGEAAPRVAGPRQRRQPVRARVRAGLLHRPHPDVRRGRAAQEAPGLDGVLLVAAVPRRGRVPGHGGAAVLHGHGGAARRGDPGRAGGVRGRRAVPAARHRGAGPGARRGAGRGGGDPGXARRRGGAGAQPAGAAAGVQRHGRAGGRAGGAAGRHRGQRRPRQVLRRPRTRAAAGGAEAPEEHPQVDLHRHHHPPRHHPRHRPPHRAQGRQ

SEQ ID NO: 21194 - protein, 306 aa, Zea mays subsp. mays
  misc_feature (1)..(306): Ceres Seq. ID no. 12402144
  misc_feature (212)..(212): Xaa is any aa, unknown or other
MNSLFSSSWKRDGGDIESGGVEMSAPPGAAAGASLDRFFEDVESIKDELRDLERIQRSLHDANEGGKSMHDAAAVRGLRARMDADVAAAIKKAKVVKLRLESLDRANAANRSVPGCGPGSSTDRTRTSVVAGLRKKLRDSMESFSSLRSRVAAEYRDTVARRYFTVTGAQPDEATLDALAESGEGERFLQRAIAEQGQGRGEVLGVVAEIQXRHGAVAGLERSLLELQQVFNDMAVLVAAQGEQLDDIEGNVGRARSFVDRGREQLQVARKHQKSTRKWTFIAIIILLVIILVIVLPIVLKGVNKN

SEQ ID NO: 21195 - protein, 296 aa, Zea mays subsp. mays
  misc_feature (1)..(296): Ceres Seq. ID no. 12402145
  misc_feature (205)..(205): Xaa is any aa, unknown or other
MEARRRGHRVRRRGDVCAAGRRGGREPGQVLRGRGVHQGRAPRPGAHPAVAPRRQRGGKVDARRGGRARPPRADGRGRGRGDQEGQGGEAAPRVAGPRQRRQPVRARVRAGLLHRPHPDVRRGRAAQEAPGLDGVLLVAAVPRRGRVPGHGGAAVLHGHGGAARRGDPGRAGGVRGRRAVPAARHRGAGPGARRGAGRGGGDPGXARRRGGAGAQPAGAAAGVQRHGRAGGRAGGAAGRHRGQRRPRQVLRRPRTRAAAGGAEAPEEHPQVDLHRHHHPPRHHPRHRPPHRAQGRQ

SEQ ID NO: 21196 - DNA, 1045 bp, Zea mays subsp. mays
  misc_feature (1)..(1045): Ceres Seq. ID no. 12402172
gaagggtcgaactaggcccgtcagagaatcagagctctgaggctgctcacatcaggccaccaccaacccctcacgtcggcggtggcgtcgtcggcgaaggcagagatggcgtccgtggccgcggcggaggtcgcggcggcggcgctccggtcggtgctgtcgcgcgcgcagcaggcggcggcgcgggcggggcgcgcgccggggtccgtgcgcgtggtggcggtgagcaagaccaagccggtgcctgtcatccggggcgtntacgacgcgggccaccgctgcttcggcgagaactacgtccaggagctcatcgacaaggcgcctcagcttcctgaggatattgagtggcacttcattgggaatctgcaaagcaacaaagccagagccctacttgctggcgtgccaaaccttgatatggttgagagtgtcgatgatgagaagattgctaaccgtcttgatcgagtggtagctgacttggggagaaaacctcttaaggttttggtccaagtcaacactagtggagaagaatcgaaatttggagtagatccctcaggatgcatggaactagcaaagcatgtcaaactgaactgcccgaaccttgtgttctctggtctgatgacaattgggatgcttgattactcctcaacccctgagaatttcaaggcgctggctaactgccgggaagaggtgtgcaaggagcttggaatacccgaagagcagtgcgaattgtctatgggcatgtcggctgattttgaacaagcgattgaaatgggaagcacaaatgtaagagttgggtcaaccatatttggtgcaagagaatacccaaagaagaactagggtgtttaactatatttggtgcccaaagaactagggtgcttatgcattcctgtcatgatggtagtggcacagaatctgcaacagatccaaatctgatgatgcatcatatatgtgcagttgtgtgcccattctactcagcttaaaacattttgacacccttttttggcccaaagtatcaataaggaaagttaataaaaagcattagacc

SEQ ID NO: 21197 - protein, 243 aa, Zea mays subsp. mays
  misc_feature (1)..(243): Ceres Seq. ID no. 12402173
  misc_feature (52)..(52): Xaa is any aa, unknown or other
MASVAAAEVAAAALRSVLSRAQQAAARAGRAPGSVRVVAVSKTKPVPVIRGXYDAGHRCFGENYVQELIDKAPQLPEDIEWHFIGNLQSNKARALLAGVPNLDMVESVDDEKIANRLDRVVADLGRKPLKVLVQVNTSGEESKFGVDPSGCMELAKHVKLNCPNLVFSGLMTIGMLDYSSTPENFKALANCREEVCKELGIPEEQCELSMGMSADFEQAIEMGSTNVRVGSTIFGAREYPKKN

SEQ ID NO: 21198 - protein, 140 aa, Zea mays subsp. mays
  misc_feature (1)..(140): Ceres Seq. ID no. 12402174
MVESVDDEKIANRLDRVVADLGRKPLKVLVQVNTSGEESKFGVDPSGCMELAKHVKLNCPNLVFSGLMTIGMLDYSSTPENFKALANCREEVCKELGIPEEQCELSMGMSADFEQAIEMGSTNVRVGSTIFGAREYPKKN

SEQ ID NO: 21199 - DNA, 1325 bp, Zea mays subsp. mays
  misc_feature (1)..(1325): Ceres Seq. ID no. 12402203
gcacgagaccattacctagaacatcctaatcgaaaagacctgtgtacactcgtactcgtctcttcttcgccacacacacacacggctgctagtgtacacagaggcacagcagcaggaggatggccgtagtgccggcggcgccggtggttcttggagtggccatggtgctcgtcgtcctggccgccagcgccggcgcggccgggcagctcaggatggggttctacgccgagagctgcccgggcgtggagcgcgtggtgggcgacttcgtccggcagcacgtccgccgcgtgcccaccgtcgccgccgcgttgctccggctgcacttccacgactgcttcgtcaggggctgcgacgcctccgtcctgctcaactccaccgccggcagcgtggccgagaaggacgcgccgccgaacctgacgctgcgcggcttcgacctcgtcgaccgcgtcaaggcgctcgtcgaggatgcctgccccggcgtcgtctcctgcgccgacgtcctcgcgctcgccgcccgggacgcggtcgtcgccatcggcgggccgtcgtggcgcgtggcgacggggaggagggacggcacggtgtccgccatgcaggaggcgctcgacgacatccccaagcacaccatgaccttcccgcagctggccagcctgttcgccagcaaaggcctcggcgttcgtgacctcgtctggctctcaggcgcgcacacgatcggcatcgcgcactgctcctccttcgcggaccgcctgtacggctaccccggcggcggcgttggcgcggccggcaacgacacggccgacccggccctggacgcgacctacgcggccaacctgcggaggcgcaagtgccgggcggcgggcggcgggtacgcggaggacggcgtggtggagatggacccaggcagccacctgacgttcgacctgggctactaccgcgcgctgctcaagcgcaggggcctgctccgctccgacgccgcgctgctcaccgacgcggcggcgcgcgccgacgtcgagggcgtcgcggccgggcccgaggaggtcttcttccagctgttcgcgcggtccatggccaggctggcggcgctgcaggtcaagaccggcgccgagggggaggtcaggaggaactgcgctgtcgtcaacggcggctaatgcatgtagcttcttgcctttcttcttctttcccttcatggccattactgctagcgaatactgtgattttgctcttgcattttgggtgcttcacgctcgggtgcaattatcatgtcaaagaaattgttaccctcttgctccttttgttagagacttaatagaattgtttggactggc

SEQ ID NO: 21200 - protein, 342 aa, Zea mays subsp. mays
  misc_feature (1)..(342): Ceres Seq. ID no. 12402204
MAVVPAAPVVLGVAMVLVVLAASAGAAGQLRMGFYAESCPGVERVVGDFVRQHVRRVPTVAAALLRLHFHDCFVRGCDASVLLNSTAGSVAEKDAPPNLTLRGFDLVDRVKALVEDACPGVVSCADVLALAARDAVVAIGGPSWRVATGRRDGTVSAMQEALDDIPKHTMTFPQLASLFASKGLGVRDLVWLSGAHTIGIAHCSSFADRLYGYPGGGVGAAGNDTADPALDATYAANLRRRKCRAAGGGYAEDGVVEMDPGSHLTFDLGYYRALLKRRGLLRSDAALLTDAAARADVEGVAAGPEEVFFQLFARSMARLAALQVKTGAEGEVRRNCAVVNGG

SEQ ID NO: 21201 - protein, 328 aa, Zea mays subsp. mays
  misc_feature (1)..(328): Ceres Seq. ID no. 12402205
MVLVVLAASAGAAGQLRMGFYAESCPGVERVVGDFVRQHVRRVPTVAAALLRLHFHDCFVRGCDASVLLNSTAGSVAEKDAPPNLTLRGFDLVDRVKALVEDACPGVVSCADVLALAARDAVVAIGGPSWRVATGRRDGTVSAMQEALDDIPKHTMTFPQLASLFASKGLGVRDLVWLSGAHTIGIAHCSSFADRLYGYPGGGVGAAGNDTADPALDATYAANLRRRKCRAAGGGYAEDGVVEMDPGSHLTFDLGYYRALLKRRGLLRSDAALLTDAAARADVEGVAAGPEEVFFQLFARSMARLAALQVKTGAEGEVRRNCAVVNGG

SEQ ID NO: 21202 - protein, 311 aa, Zea mays subsp. mays
  misc_feature (1)..(311): Ceres Seq. ID no. 12402206
MGFYAESCPGVERVVGDFVRQHVRRVPTVAAALLRLHFHDCFVRGCDASVLLNSTAGSVAEKDAPPNLTLRGFDLVDRVKALVEDACPGVVSCADVLALAARDAVVAIGGPSWRVATGRRDGTVSAMQEALDDIPKHTMTFPQLASLFASKGLGVRDLVWLSGAHTIGIAHCSSFADRLYGYPGGGVGAAGNDTADPALDATYAANLRRRKCRAAGGGYAEDGVVEMDPGSHLTFDLGYYRALLKRRGLLRSDAALLTDAAARADVEGVAAGPEEVFFQLFARSMARLAALQVKTGAEGEVRRNCAVVNGG

SEQ ID NO: 21203 - DNA, 935 bp, Zea mays subsp. mays
  misc_feature (1)..(935): Ceres Seq. ID no. 12402277
aagctcactcaagaacccgccacgaccaaacagtacgtagtgcgcgtcgagctagcccggcaggtagacatggcgcccagcaaggccgtggtggcacacctcgtggtgctattagtgccctgcttgctctccgtgctgcccttctcctccctcgctctgacccaggacttatgcgtcgcgaacatgctcctcccagatacgccgtccggctacccgtgcaagcccaaaggtctcgtcagctccgacgacttctactccgacgccttggccaggcctggcccggtcatcgcccccttcaacaccagcctggcctccgccgccgttaaacagctccccggcctgaatggcctcggcatcgccgccacgcgtgtcgatgtccaaccaggtggggtcgtgcccatgcacaaccacccggaagcctcggagctcatcttcctcctcgaaggaacccttttcgctggcttcatcagcgccgaaaccaataaggcctatgtcaagagcctaaagaagggcgacctctacgtgttcccgcagggcttgctgcacttccagttcaacaccggcaacacgaccgccaccgccatcgccgcgtacagcaaccagaaccccggcctacagatcgctgtctatgcactcttcggcaacaccctcacagtggaaacggtgaataagaccaccttcgtaacaaaggaggaggtcatgaggctcaaggacctcttcggccagtcttcagtgccatcctgattaacgctcgccaggattaattaatatgcatgctcctagatgtacgtttatatatggggtgtaataataaattgcgtgtgtgtgcacgtacgttcaacctatatcgtcatcgtcatgtagtatatatttctcgactatatatattgtaccctcgggaaggaccgatgtttaaggcatcagtggctctattt

SEQ ID NO: 21204 - protein, 247 aa, Zea mays subsp. mays
  misc_feature (1)..(247): Ceres Seq. ID no. 12402278
KLTQEPATTKQYVVRVELARQVDMAPSKAVVAHLVVLLVPCLLSVLPFSSLALTQDLCVANMLLPDTPSGYPCKPKGLVSSDDFYSDALARPGPVIAPFNTSLASAAVKQLPGLNGLGIAATRVDVQPGGVVPMHNHPEASELIFLLEGTLFAGFISAETNKAYVKSLKKGDLYVFPQGLLHFQFNTGNTTATAIAAYSNQNPGLQIAVYALFGNTLTVETVNKTTFVTKEEVMRLKDLFGQSSVPS

SEQ ID NO: 21205 - protein, 224 aa, Zea mays subsp. mays
  misc_feature (1)..(224): Ceres Seq. ID no. 12402279
MAPSKAVVAHLVVLLVPCLLSVLPFSSLALTQDLCVANMLLPDTPSGYPCKPKGLVSSDDFYSDALARPGPVIAPFNTSLASAAVKQLPGLNGLGIAATRVDVQPGGVVPMHNHPEASELIFLLEGTLFAGFISAETNKAYVKSLKKGDLYVFPQGLLHFQFNTGNTTATAIAAYSNQNPGLQIAVYALFGNTLTVETVNKTTFVTKEEVMRLKDLFGQSSVPS

SEQ ID NO: 21206 - protein, 186 aa, Zea mays subsp. mays
  misc_feature (1)..(186): Ceres Seq. ID no. 12402280
MLLPDTPSGYPCKPKGLVSSDDFYSDALARPGPVIAPFNTSLASAAVKQLPGLNGLGIAATRVDVQPGGVVPMHNHPEASELIFLLEGTLFAGFISAETNKAYVKSLKKGDLYVFPQGLLHFQFNTGNTTATAIAAYSNQNPGLQIAVYALFGNTLTVETVNKTTFVTKEEVMRLKDLFGQSSVPS

SEQ ID NO: 21207 - DNA, 1079 bp, Zea mays subsp. mays
  misc_feature (1)..(1079): Ceres Seq. ID no. 12402285
agctctcacccatccacgtcttctcattcctcgacaatggagatccaggcacgacagctactggtgtctgtttttggcattctgatagcgataggtttcgccaatgccgcgctgggagagacagcaccgccggttgttgtcggcttggccaagtgctcggactgcgccaggaggaacatgaacgccgaggcagctttcagaggtcttcaggtggccatcaagtgcaagaacagcaagggggcctacgagagcgcagccgtgggacaggtgaacaagtccggggccttcagcgtcccgctggccgccgacgccgtcggcgaggacggggagctcaagtcggaatgcttcgcgcagctcatccacagcgcgtcgagtgcgccgtgccccgggcaggagccctccaggatcgtcgccgcgccacccggccacacggcccacaccaacggcaacgggaagacgttcctcgcgctcggcggcagggtctaccaaccgtcgcccgaatgcgcctcggcgttcctctgccaccctttcttccacagcatgcaccaccatcacgtaggagtccacacgcctgtggttatcccgcacctgcccgttcacggccactccgtgccgcctgtcaccaagccgccgccggtagacgttcctgagcacaaaccggcgccggtgcccgtgccggaccacaagcctccgtcgacgccgccggtagacgctcctgagcacaaaccggcgccggtgcccgagccggagcacaagcctccgtcgacgccggcgaacgctgcaccgtcgacgcccacggagccgtcagcgccggttaattcgccgccgaagccagcccccatctaccacccaccggcaaggcacgacgctgccactggcccgtagctcttcaagaggctgctcccgttcttcaagaagttgcccttctttcctccttctgcgatggagagtcagcactagaatgtttggacagtgtttcttggcttttgcaggttatgcagtttcctcggaataatttgtgacgttgattagttcagcatgaacgttgggtcagtttaagagtgtgtgttctacttccg

SEQ ID NO: 21208 - protein, 294 aa, Zea mays subsp. mays
  misc_feature (1)..(294): Ceres Seq. ID no. 12402286
SSHPSTSSHSSTMEIQARQLLVSVFGILIAIGFANAALGETAPPVVVGLAKCSDCARRNMNAEAAFRGLQVAIKCKNSKGAYESAAVGQVNKSGAFSVPLAADAVGEDGELKSECFAQLIHSASSAPCPGQEPSRIVAAPPGHTAHTNGNGKTFLALGGRVYQPSPECASAFLCHPFFHSMHHHHVGVHTPVVIPHLPVHGHSVPPVTKPPPVDVPEHKPAPVPVPDHKPPSTPPVDAPEHKPAPVPEPEHKPPSTPANAAPSTPTEPSAPVNSPPKPAPIYHPPARHDAATGP

SEQ ID NO: 21209 - protein, 282 aa, Zea mays subsp. mays
  misc_feature (1)..(282): Ceres Seq. ID no. 12402287
MEIQARQLLVSVFGILIAIGFANAALGETAPPVVVGLAKCSDCARRNMNAEAAFRGLQVAIKCKNSKGAYESAAVGQVNKSGAFSVPLAADAVGEDGELKSECFAQLIHSASSAPCPGQEPSRIVAAPPGHTAHTNGNGKTFLALGGRVYQPSPECASAFLCHPFFHSMHHHHVGVHTPVVIPHLPVHGHSVPPVTKPPPVDVPEHKPAPVPVPDHKPPSTPPVDAPEHKPAPVPEPEHKPPSTPANAAPSTPTEPSAPVNSPPKPAPIYHPPARHDAATGP

SEQ ID NO: 21210 - protein, 235 aa, Zea mays subsp. mays
  misc_feature (1)..(235): Ceres Seq. ID no. 12402288
MNAEAAFRGLQVAIKCKNSKGAYESAAVGQVNKSGAFSVPLAADAVGEDGELKSECFAQLIHSASSAPCPGQEPSRIVAAPPGHTAHTNGNGKTFLALGGRVYQPSPECASAFLCHPFFHSMHHHHVGVHTPVVIPHLPVHGHSVPPVTKPPPVDVPEHKPAPVPVPDHKPPSTPPVDAPEHKPAPVPEPEHKPPSTPANAAPSTPTEPSAPVNSPPKPAPIYHPPARHDAATGP

SEQ ID NO: 21211 - DNA, 868 bp, Zea mays subsp. mays
  misc_feature (1)..(868): Ceres Seq. ID no. 12402305
atcacccaatgacccaatcaatcgctaacaacccaataaaccgcggacgcagcagaaaagaggtagaggggcggcgaccgatggcgcggcggggcacggaggcgttccctaacctgggcgcgcactgcgacaagccggactgcaaccagctcgacttcctgcccttcgactgcgacggctgcggcaaggtcttctgcgccgcgcaccggacctacggggaccacggctgcgccaaggcggcggaccagggccgcaccgtcgtcgtctgcccggactgcggcgacgccatcgagaggctggttccggggcagggcgagcgggagatcctggaggcgcacgtgcggtcgcggcgctgcgacccgggcaagaagcgcaagccccggtgccccgcgcggcggtgcagggagcagctcaccttctccaacacccaggactgcaagggctgcggccggaaggtgtgcctcaagcaccaggttcccggccgaccacgactgcgccgccagcgcaccaggagctgccgcggcggcgaggagggccagcggggagtgcggccgcggcgcgcggaaggaagggagcggcggctgggcgctgccggcgtccatccggagcctcaagatcttctgaggcttgccaatttgccatactgtcacgttgcagccaggtcaccacagcgaaagaaactgttcctcgagatggatgcagcgaacgtatttcatatgttctttggttgatgtataaatgcattttcaggctaagaatctgaaatacagaaactggacattgaaatgttccatcaatactggtttttaaggcagatgtgaagacagacaaatttgcgttcaatatactacgggagttttttttttcc

SEQ ID NO: 21212 - protein, 242 aa, Zea mays subsp. mays
  misc_feature (1)..(242): Ceres Seq. ID no. 12402306
HPMTQSIANNPINRGRSRKEVEGRRPMARRGTEAFPNLGAHCDKPDCNQLDFLPFDCDGCGKVFCAAHRTYGDHGCAKAADQGRTVVVCPDCGDAIERLVPGQGEREILEAHVRSRRCDPGKKRKPRCPARRCREQLTFSNTQDCKGCGRKVCLKHQVPGRPRLRRQRTRSCRGGEEGQRGVRPRRAEGRERRLGAAGVHPEPQDLLRLANLPYCHVAARSPQRKKLFLEMDAANVFHMFFG

SEQ ID NO: 21213 - protein, 240 aa, Zea mays subsp. mays
  misc_feature (1)..(240): Ceres Seq. ID no. 12402307
MTQSIANNPINRGRSRKEVEGRRPMARRGTEAFPNLGAHCDKPDCNQLDFLPFDCDGCGKVFCAAHRTYGDHGCAKAADQGRTVVVCPDCGDAIERLVPGQGEREILEAHVRSRRCDPGKKRKPRCPARRCREQLTFSNTQDCKGCGRKVCLKHQVPGRPRLRRQRTRSCRGGEEGQRGVRPRRAEGRERRLGAAGVHPEPQDLLRLANLPYCHVAARSPQRKKLFLEMDAANVFHMFFG

SEQ ID NO: 21214 - protein, 216 aa, Zea mays subsp. mays
  misc_feature (1)..(216): Ceres Seq. ID no. 12402308
MARRGTEAFPNLGAHCDKPDCNQLDFLPFDCDGCGKVFCAAHRTYGDHGCAKAADQGRTVVVCPDCGDAIERLVPGQGEREILEAHVRSRRCDPGKKRKPRCPARRCREQLTFSNTQDCKGCGRKVCLKHQVPGRPRLRRQRTRSCRGGEEGQRGVRPRRAEGRERRLGAAGVHPEPQDLLRLANLPYCHVAARSPQRKKLFLEMDAANVFHMFFG

SEQ ID NO: 21215 - DNA, 882 bp, Zea mays subsp. mays
  misc_feature (1)..(882): Ceres Seq. ID no. 12402320
attcactcctcgcgcctcgtgatcccatccaaatcccgatcagtccccgcccaagcctagcagatccgccggcgagcgcgcgggggcaatgggtgtcgtctcggcagcggcggacgcgattgtcgcggttttctccctcaccatcgtcgtcgcggcgccgctactcgacgcgcagtccgtcctcccgcataccctctacccggcgccgctcctggaactcaagcgctggtacgccgccgagtttggcgactacctcatggcccagccccccggcttcttccgtggccttgtttgcctcgagctcgccttccaatggccgctcgccgtcgccacactctacggcatcctcacccgccgccgctggggctgccaccacctccctcatggccggcgttggcaccctcacctccatgtctgcaattcttggtgagatgttaggttcaggcaaatcaacaccaaagttgcttcagatgtatgttccttatgctgtttttgctgtcattgctattctacgtggactttgctcatgctctggacgcactactgctggttcatcacttgggccttctgcccggaagaagagggtctagatcagcagtgacacttggagaattttcggtttgagacagtggcgccagagcactaatgctggtcagaagacgattatctggatcaggtttctatccctggtatttagcacggatgttgaaaaatccagatagtgttagtggctgtttctctaggatttggtgttcgttttcccttaaatgtgatattcatcttgcctttatttccattttaccctttgattatatgtcttgctaactaagacattgatttgtttactggatgagctgattctactctggcattgttctggcc

SEQ ID NO: 21216 - protein, 195 aa, Zea mays subsp. mays
  misc_feature (1)..(195): Ceres Seq. ID no. 12402321
SLLAPRDPIQIPISPRPSLADPPASARGQWVSSRQRRTRLSRFSPSPSSSRRRYSTRSPSSRIPSTRRRSWNSSAGTPPSLATTSWPSPPASSVALFASSSPSNGRSPSPHSTASSPAAAGAATTSLMAGVGTLTSMSAILGEMLGSGKSTPKLLQMYVPYAVFAVIAILRGLCSCSGRTTAGSSLGPSARKKRV

SEQ ID NO: 21217 - protein, 113 aa, Zea mays subsp. mays
  misc_feature (1)..(113): Ceres Seq. ID no. 12402322
MGVVSAAADAIVAVFSLTIVVAAPLLDAQSVLPHTLYPAPLLELKRWYAAEFGDYLMAQPPGFFRGLVCLELAFQWPLAVATLYGILTRRRWGCHHLPHGRRWHPHLHVCNSW

SEQ ID NO: 21218 - DNA, 1254 bp, Zea mays subsp. mays
  misc_feature (1)..(1254): Ceres Seq. ID no. 12402364
gcacgagaccattacctagaacatcctaatcaaaaataacggaacgtcgtccagatctcgatcggccggtggccgccgtggtcagtaaggcaggcatggcatccgaggtagccggcctcgccgtggtctcggccgccgcgtccgtggccctggtctacgctcgtctcgccacctcgcggctggctcccggcaccccccgcctcgcggcgctgctcccggtgctcctactcctcccagtcctccccttcgccttctcctccatccacctccgcaccgtctccgccttcttcctcgtctggctctgcggcttcaagctcctcctcctcgccgcggggcacgacgggccgctccaccccgccctcccgctcgtgcgcttcgtcgcgtgcgccgcgctgcccatcaaggtccgggacgagaacgacaagcagcagcaaactcggataccccgctcctctctcccttcgggattcctgctgtcctacgcggccaaggcggcgctcttctccgcgctcgtctccgtccggtgctacagggcgcggatgcccgcgtacgccgtgcccgtgttcgacggcgcgcacgtgtacctcatgctggagctcttcctcgcgtccgccgcggcgctcgcgcgcgcgctgctgggcgcggagctggagccgcagttcgaccggccgtacctcgcttcctccctgcgcgacttctggggccggcggtggaacctcatggtccccggcgtgctccggccctgcgtgtaccgccccgtgcgcgcccgcttcggcgccgccgcgggcgtgctcgcggcgttcctcgtgtccggggccatgcacgaggtcatgttctactacatcacgctggaggccgggaccggggaggtgaccgcgttcttcgcgctgcacggcgcgtgcgcggtggccgagcggtggatggcgcggcagggcggcatgtggcggccgccgcggcccgtcgcgacggcgctgacgctggcgttcgtgacggggacggggtcgtggctattctttgcgcccgtgatccgaagccggctggacgaggccatcatcgcagagtgcgaggggatgcttgcgttcttggagcgcgctggccggaatctagccgcgatggcacatttcatttgaacctctgtaaggtagagttatttggaaccgtgatactcccaacactgggcttctgaaaatcagtatcccgaacagagcaattgtaattttagtattataattcatagaacttcagatttctggt

SEQ ID NO: 21219 - protein, 344 aa, Zea mays subsp. mays
  misc_feature (1)..(344): Ceres Seq. ID no. 12402365
MASEVAGLAVVSAAASVALVYARLATSRLAPGTPRLAALLPVLLLLPVLPFAFSSIHLRTVSAFFLVWLCGFKLLLLAAGHDGPLHPALPLVRFVACAALPIKVRDENDKQQQTRIPRSSLPSGFLLSYAAKAALFSALVSVRCYRARMPAYAVPVFDGAHVYLMLELFLASAAALARALLGAELEPQFDRPYLASSLRDFWGRRWNLMVPGVLRPCVYRPVRARFGAAAGVLAAFLVSGAMHEVMFYYITLEAGTGEVTAFFALHGACAVAERWMARQGGMWRPPRPVATALTLAFVTGTGSWLFFAPVIRSRLDEAIIAECEGMLAFLERAGRNLAAMAHFI

SEQ ID NO: 21220 - protein, 196 aa, Zea mays subsp. mays
  misc_feature (1)..(196): Ceres Seq. ID no. 12402366
MPAYAVPVFDGAHVYLMLELFLASAAALARALLGAELEPQFDRPYLASSLRDFWGRRWNLMVPGVLRPCVYRPVRARFGAAAGVLAAFLVSGAMHEVMFYYITLEAGTGEVTAFFALHGACAVAERWMARQGGMWRPPRPVATALTLAFVTGTGSWLFFAPVIRSRLDEAIIAECEGMLAFLERAGRNLAAMAHFI

SEQ ID NO: 21221 - protein, 180 aa, Zea mays subsp. mays
  misc_feature (1)..(180): Ceres Seq. ID no. 12402367
MLELFLASAAALARALLGAELEPQFDRPYLASSLRDFWGRRWNLMVPGVLRPCVYRPVRARFGAAAGVLAAFLVSGAMHEVMFYYITLEAGTGEVTAFFALHGACAVAERWMARQGGMWRPPRPVATALTLAFVTGTGSWLFFAPVIRSRLDEAIIAECEGMLAFLERAGRNLAAMAHFI

SEQ ID NO: 21222 - DNA, 849 bp, Zea mays subsp. mays
  misc_feature (1)..(849): Ceres Seq. ID no. 12402386
atccctcgtggcctctctcccctcctcacacaggcacacacgcactttctgtcagcttcctcccctgcgccgataagcaagcccgtgagccaacagtggtgccagcggcccgagcggcgaggatgcacagcggagcgaggaagctcatgtgggggaccagcccggacaggcccgacgaccacgacgtggtcatcgtgctcgcctcgctgctgtgcgcgctcatcaccgtcctcggcatcggcctcgtggcgcggtgcgcgtgcgcgcgcgggcccagcgcgcaggcggcggccgccgccaacaggggcgtcaagaagtcggtgctgcgcaggatccccaccgtgccctacgccgcctccgccgccgcctgcagccaaggggaaggggacgacgcggacgagtgcgccatctgcctggcggagttcgaggagggcgagcccacccgcgtgctgccccagtgcggccacgccttccacgccgcctgcgtcgacaggtggctgcgcgcccactcgtcctgcccctcctgccgccggatcctctccctccagctgccgcccggcgagcggtgccgccgctgcggcgcgcggcccctggacgacggggacgctgggtggaagcccacctactacagcgccatgccgccgttcctggcgtaagcggcggaggaatcgcccgatccggaagcaaagcaaagcaaacctgtatcaattaggggatcaattaggttgtttgttgcagctgaaaacactgcactgcagcgtgcgtagtagtagtactagtaccaggctggcgtgtacagtacagtttgtaaatactcaagtaattaatatgcatgcgatgagttttggt

SEQ ID NO: 21223 - protein, 283 aa, Zea mays subsp. mays
  misc_feature (1)..(283): Ceres Seq. ID no. 12402387
IPRGLSPLLTQAHTHFLSASSPAPISKPVSQQWCQRPERRGCTAERGSSCGGPARTGPTTTTWSSCSPRCCARSSPSSASASWRGARARAGPARRRRPPPTGASRSRCCAGSPPCPTPPPPPPAAKGKGTTRTSAPSAWRSSRRASPPACCPSAATPSTPPASTGGCAPTRPAPPAAGSSPSSCRPASGAAAAARGPWTTGTLGGSPPTTAPCRRSWRKRRRNRPIRKQSKANLYQLGDQLGCLLQLKTLHCSVRSSSTSTRLACTVQFVNTQVINMHAMSFG

SEQ ID NO: 21224 - protein, 217 aa, Zea mays subsp. mays
  misc_feature (1)..(217): Ceres Seq. ID no. 12402388
PSWPLSPPHTGTHALSVSFLPCADKQAREPTVVPAARAARMHSGARKLMWGTSPDRPDDHDVVIVLASLLCALITVLGIGLVARCACARGPSAQAAAAANRGVKKSVLRRIPTVPYAASAAACSQGEGDDADECAICLAEFEEGEPTRVLPQCGHAFHAACVDRWLRAHSSCPSCRRILSLQLPPGERCRRCGARPLDDGDAGWKPTYYSAMPPFLA

SEQ ID NO: 21225 - protein, 177 aa, Zea mays subsp. mays
  misc_feature (1)..(177): Ceres Seq. ID no. 12402389
MHSGARKLMWGTSPDRPDDHDVVIVLASLLCALITVLGIGLVARCACARGPSAQAAAAANRGVKKSVLRRIPTVPYAASAAACSQGEGDDADECAICLAEFEEGEPTRVLPQCGHAFHAACVDRWLRAHSSCPSCRRILSLQLPPGERCRRCGARPLDDGDAGWKPTYYSAMPPFLA

SEQ ID NO: 21226 - DNA, 1186 bp, Zea mays subsp. mays
  misc_feature (1)..(1186): Ceres Seq. ID no. 12402393
ctcctcctcatggctctgtcgtccgccggctcgttcgtggcctgcagcctccggccaagcggatagcatccatgccccgaggtcgacttcgcacctgaagccgggtgctgcggcggcgtcgttcacgaggacgccgcagcgccgggcgaacgcgaccaagggcggcgtgtccaccgtgtgcgagccgctgggccccgaccggccgatctggttccccggcagctcccctccgccgtggctcgacggaagccttccaggagactttggatttgaccctctcggactaggttcggagccggagctgctgcggtggttcgcgcaggcggagctgatgcacgggcggtgggcgatgctggcggcggcgggcatccttatcccggacctgctggcgcggtggggcttcatcgacgcggggttctcgtggttcgacgccgggtcccgcgagtacttcgcggacccctggacgctgttcgtgtcgcagatggcgctgatggggtgggcggaggggcggcggtgggcggactacctgaggcccgggtgcgtggacatcgagccgcgcttcccgaaccgcaagaacccggtccccgacgtggggtaccccggcgggctgtggttcgactgggccaactggggccgcgggtccccggagcccgtgatggtgctgcgcaccaaggagatcaagaacggccgcctcgccatgctcgccttcgtcggcttctggttccaggccgtgtacacggggcagggccccatcgacaacctgctcgcgcacctcgccgaccccggccactgcaacatcttctccggcgttcacgtcccactgatccgatgttgcttcggagctggcggagagactgcgaagaattaaaaaaaaaagtgcatcctgttgagggagaaagaacttcgcttggtcggtatcattttggccctgctggacatgtcaacattttgtttgtagtacctgcgtagaaatgtcaaaccacctgtacaaacgtacaaataccaccccagggatcgcgatgatgctagccagcagtccagcacacactagcttgtcctgaagatccatgcaacaccgtatacgagacaattgtatttttgggactacaaacagtgtgctttgcaataatgtcattccaaacaattagctcgcagaaatgggattataaagatcttataattgatt

SEQ ID NO: 21227 - protein, 288 aa, Zea mays subsp. mays
  misc_feature (1)..(288): Ceres Seq. ID no. 12402394
SSSWLCRPPARSWPAASGQADSIHAPRSTSHLKPGAAAASFTRTPQRRANATKGGVSTVCEPLGPDRPIWFPGSSPPPWLDGSLPGDFGFDPLGLGSEPELLRWFAQAELMHGRWAMLAAAGILIPDLLARWGFIDAGFSWFDAGSREYFADPWTLFVSQMALMGWAEGRRWADYLRPGCVDIEPRFPNRKNPVPDVGYPGGLWFDWANWGRGSPEPVMVLRTKEIKNGRLAMLAFVGFWFQAVYTGQGPIDNLLAHLADPGHCNIFSGVHVPLIRCCFGAGGETAKN

SEQ ID NO: 21228 - protein, 178 aa, Zea mays subsp. mays
  misc_feature (1)..(178): Ceres Seq. ID no. 12402395
MHGRWAMLAAAGILIPDLLARWGFIDAGFSWFDAGSREYFADPWTLFVSQMALMGWAEGRRWADYLRPGCVDIEPRFPNRKNPVPDVGYPGGLWFDWANWGRGSPEPVMVLRTKEIKNGRLAMLAFVGFWFQAVYTGQGPIDNLLAHLADPGHCNIFSGVHVPLIRCCFGAGGETAKN

SEQ ID NO: 21229 - protein, 172 aa, Zea mays subsp. mays
  misc_feature (1)..(172): Ceres Seq. ID no. 12402396
MLAAAGILIPDLLARWGFIDAGFSWFDAGSREYFADPWTLFVSQMALMGWAEGRRWADYLRPGCVDIEPRFPNRKNPVPDVGYPGGLWFDWANWGRGSPEPVMVLRTKEIKNGRLAMLAFVGFWFQAVYTGQGPIDNLLAHLADPGHCNIFSGVHVPLIRCCFGAGGETAKN

SEQ ID NO: 21230 - DNA, 1277 bp, Zea mays subsp. mays
  misc_feature (1)..(1277): Ceres Seq. ID no. 12402410
gcactcatccattccatcatcccctttgcaagtatagtctctctgctaagcgaannnagcttcaagctagtctcggcggctctagaagacgatgggcaaggacgacgtgatcgagagcggcgctggcggcggcgagttcgctgccaaggactacacggaccctcccccggcgccgctgatcgacgcggcggactgggggtcctggtcgctgtaccgcgccgtgatcgccgagttcatcgccacgctgctgttcctgtacatcacggtggccaccgtgatcgggtacaagcaccagacgnacgcgtcggcgtcgggcgccnacgcggcgtgcggcggcgtgggcgtnctgggcatcgcctgggccttcggcggcatgatcttcgtcctcgtctactgcaccgccggcatctcggggggccacatcaaccccgccgtcaccttcggcctcttcctggcgcggcaaggtctccctggtgcgcgcgctgctctacatcgtggcgcagtgcctcggcgccatctgcggcgtcggcctcgtcaaggcgttccagagcgcctacttcgacaggtacggcggcggcgccaactcgctcgcctccggctactcccgcggcaccggcctcggcgccgagatcatcggcaccttcgtgctcgtctacaccgtcttctccgccaccgaccccaagcgcaacgcccgcgactcccacgtcccggttctggctcccctccccatcggcttcgccgtgttcatggtgcacctggccaccatccccgtcaccggcaccggcatcaacccggccaggagcctgggcgccgccgtcatctacaacaaggacaagccctgggacgaccactggatcttctgggtgggccctctcgtgggcgctgccatcgcggccttctaccaccagtacatcctccgggctggcgccatcaaggccctcggctccttcaggagcaacgcgtgatgagcggggcttggctgtggagcaatggcgggcgacctacgggcggggggccgtgagcgaggagaatgccatcattcatcgatcgacttgggtgccggtggttggttcgggtcgcctttttttttgtttcagcagctgctgcgttgcgcgcgtgcgtgagatttggtttggtttcgttcccctgcaatgtaatcatgtcgtgactctcaagggattattccgctctgctcttatggtctctgttttctatttaatgattgttattaccatgtagcagtaaccatcgtcatcagtgagaaccttgttgcttct

SEQ ID NO: 21231 - protein, 412 aa, Zea mays subsp. mays
  misc_feature (1)..(412): Ceres Seq. ID no. 12402411
  misc_feature (19)..(19): Xaa is any aa, unknown or other
  misc_feature (100)..(100): Xaa is any aa, unknown or other
  misc_feature (107)..(107): Xaa is any aa, unknown or other
  misc_feature (116)..(116): Xaa is any aa, unknown or other
ALIHSIIPFASIVSLLSEXSFKLVSAALEDDGQGRRDRERRWRRRVRCQGLHGPSPGAADRRGGLGVLVAVPRRDRRVHRHAAVPVHHGGHRDRVQAPDXRVGVGRXRGVRRRGRXGHRLGLRRHDLRPRLLHRRHLGGPHQPRRHLRPLPGAARSPWCARCSTSWRSASAPSAASASSRRSRAPTSTGTAAAPTRSPPATPAAPASAPRSSAPSCSSTPSSPPPTPSATPATPTSRFWLPSPSASPCSWCTWPPSPSPAPASTRPGAWAPPSSTTRTSPGTTTGSSGWALSWALPSRPSTTSTSSGLAPSRPSAPSGATRDERGLAVEQWRATYGRGAVSEENAIIHRSTWVPVVGSGRLFFCFSSCCVARVREIWFGFVPLQCNHVVTLKGLFRSALMVSVFYLMIVITM

SEQ ID NO: 21232 - protein, 309 aa, Zea mays subsp. mays
  misc_feature (1)..(309): Ceres Seq. ID no. 12402412
  misc_feature (70)..(70): Xaa is any aa, unknown or other
  misc_feature (77)..(77): Xaa is any aa, unknown or other
  misc_feature (85)..(85): Xaa is any aa, unknown or other
MGKDDVIESGAGGGEFAAKDYTDPPPAPLIDAADWGSWSLYRAVIAEFIATLLFLYITVATVIGYKHQTXASASGAXAACGGVGXLGIAWAFGGMIFVLVYCTAGISGGHINPAVTFGLFLARQGLPGARAALHRGAVPRRHLRRRPRQGVPERLLRQVRRRRQLARLRLLPRHRPRRRDHRHLRARLHRLLRHRPQAQRPRLPRPGSGSPPHRLRRVHGAPGHHPRHRHRHQPGQEPGRRRHLQQGQALGRPLDLLGGPSRGRCHRGLLPPVHPPGWRHQGPRLLQEQRVMSGAWLWSNGGRPTGGGP

SEQ ID NO: 21233 - protein, 215 aa, Zea mays subsp. mays
  misc_feature (1)..(215): Ceres Seq. ID no. 12402413
MIFVLVYCTAGISGGHINPAVTFGLFLARQGLPGARAALHRGAVPRRHLRRRPRQGVPERLLRQVRRRRQLARLRLLPRHRPRRRDHRHLRARLHRLLRHRPQAQRPRLPRPGSGSPPHRLRRVHGAPGHHPRHRHRHQPGQEPGRRRHLQQGQALGRPLDLLGGPSRGRCHRGLLPPVHPPGWRHQGPRLLQEQRVMSGAWLWSNGGRPTGGGP

SEQ ID NO: 21234 - DNA, 1257 bp, Zea mays subsp. mays
  misc_feature (1)..(1257): Ceres Seq. ID no. 12402418
agtcctggctgatccggagcattcactcactgctgctgctcagtgctcgcgtccggctcccaccgctctgcagacgactgcctcctctgtccttccttcccttcccagtggcaggcagaggatctgcagtgcctgccgtccagcgccanccgaccgacccctcctgccgcacagcacagagggaggggggaaacgcaggatcatcagctagcatgggtgcagcagtcaaagaagaagaagttccgcggcgtcaggcagcgccactggggctcctggggtctccgagatcaggcacccgctgctcaagaggagggtgtggctgggcaccttcgagaccgcggaggaggcggcgcgggcgtacgacgaggccgccgtcctcatgagcggccgcaacgccaagaccaacttccccgtactgccctgcggcaggacgcgcggcggcggcggcggcggcggctcgtccggcaacaacaccaacgccagcgccagcaccagcaccagcaacctgtcgcaggtcctcagcgccaagctccgcaggtgctgcaaggcgccgtcgccgtcgctcacctgcctccgcctcgacccggagaggtcccacatcggcgtctggcacaagggcgccggcgcgcgcgccgactccagctgggtcatgaccgtccagctcagcgacaaggacgccgcgccggcgcccagcgccacgtcgtcggccacggccacgacgacgacggctgcctcgcatcctccgcctgccacggtggtggtggtggacgacgaggagaggatcgcgctgcagatgatcgaggagctgctgggcggcggcggcggcccggtctcgcaacaaccgcttgggaatgggatgctccagatcgcggcagcaggcggcggcctcgtcatctgaagaccggctaatgcaacaacggaaattgcattgcatgcatgcatggttcgttcagcaagctacaagtttgatcggccggatcaagtatttggtacacaacaagagtcgtcgaaagtagtgtggttggtgcagaaagcagttaagattgcatcataaatacatatgtatctctattactagctagctacatcagtcaagcttattaggagagagaccatatagtaagtaattaatcttaatcacttcatccctgtgaagctctgtatctattaaaaggcttacttgtatgtatatataagcatacagccctttgtataacatgttatacatgtatcaataatatcaggctatatatatct

SEQ ID NO: 21235 - protein, 172 aa, Zea mays subsp. mays
  misc_feature (1)..(172): Ceres Seq. ID no. 12402419
MSGRNAKTNFPVLPCGRTRGGGGGGGSSGNNTNASASTSTSNLSQVLSAKLRRCCKAPSPSLTCLRLDPERSHIGVWHKGAGARADSSWVMTVQLSDKDAAPAPSATSSATATTTTAASHPPPATVVVVDDEERIALQMIEELLGGGGGPVSQQPLGNGMLQIAAAGGGLVI

SEQ ID NO: 21236 - protein, 126 aa, Zea mays subsp. mays
  misc_feature (1)..(126): Ceres Seq. ID no. 12402420
  misc_feature (49)..(49): Xaa is any aa, unknown or other
SWLIRSIHSLLLLSARVRLPPLCRRLPPLSFLPFPVAGRGSAVPAVQRXPTDPSCRTAQREGGNAGSSASMGAAVKEEEVPRRQAAPLGLLGSPRSGTRCSRGGCGWAPSRPRRRRRGRTTRPPSS

SEQ ID NO: 21237 - DNA, 1037 bp, Zea mays subsp. mays
  misc_feature (1)..(1037): Ceres Seq. ID no. 12402421
gtaaaaacgtgtagtgcaggaggaggggtgggagaagaagaagaaatcaactgggggctgccggacgacaaccactacggcaaggcagtagagatacggcgtctcctcttctgacttggccagcgcaacggcagctagttcaattgaaccagagcgctttatagatagaacaaaaatatatactgtagaaatccatcgagaaacaaccgagaagacctgcggctgcggtgaagagagaactcagtggtgaagaagagggaaaaatcaccatgctggaccatctcgtcggactgctgaagctgcgcgtggtgaggggggtgaacctcgccgtccgcgacctccgatccagcgatccctacgtcgtcgttcgcatcggcaaacagaaattgaagacacgggtggtaaagaagagtgtcaatccggaatgggacgacgaactcaccctctctatcgaagaccctgctgttcctattagactggaagtttttgacaaggacactttcgtcgatgatacaatgggtaatgcagaggtggacatccgcccattagtcgagattgtgaagatgaaactccaggacgttgccgacagaaccgtggtaaagaaactggtgcccaacagacagaactgcctagccgaggagagctcgatatatatatcggaggggaaggtgaagcaagacatggttgtacggctgaggaacgtagagagcggggaaatagagctccagcttcagtggatcgacctccctggctctaagggtgtatgagtggggggcggctatgagctctgccttgccctgctgttttcgcggatctccaactctttttctacttgaaaagaagaactagtggtttgcgtgcgctcgctcgcgtagagctgtcagttgtatgtaagaagttatgattgcgttggcgtttagtaaaatatcgtcagggagatgtatgtgcatgaacatctgagaatcaagactataaaaatgtgtacaatgcatgtactaaaggagtgtttggtttctatagattaatttttagtccct

SEQ ID NO: 21238 - protein, 165 aa, Zea mays subsp. mays
  misc_feature (1)..(165): Ceres Seq. ID no. 12402422
MLDHLVGLLKLRVVRGVNLAVRDLRSSDPYVVVRIGKQKLKTRVVKKSVNPEWDDELTLSIEDPAVPIRLEVFDKDTFVDDTMGNAEVDIRPLVEIVKMKLQDVADRTVVKKLVPNRQNCLAEESSIYISEGKVKQDMVVRLRNVESGEIELQLQWIDLPGSKGV

SEQ ID NO: 21239 - protein, 83 aa, Zea mays subsp. mays
  misc_feature (1)..(83): Ceres Seq. ID no. 12402423
MGNAEVDIRPLVEIVKMKLQDVADRTVVKKLVPNRQNCLAEESSIYISEGKVKQDMVVRLRNVESGEIELQLQWIDLPGSKGV

SEQ ID NO: 21240 - DNA, 1420 bp, Zea mays subsp. mays
  misc_feature (1)..(1420): Ceres Seq. ID no. 12402424
gacccttcgtcccgcatcgtttcctcctcctttttccccgttcgtcccctggattggcgtctacccggcgcgacccggaccgaatcctaagtccgcctgccgccgccgccggctcccgttggaaacgagtttggagtaaagaaaccaaccttgcatctgtgttctgtctgtctatgctgctttgctttggattcacaaaaaaataagccttgcatctcactgacttgagataactatgcctaaggacaggagctcccgcgtttcctctcacgagagccgccgggctcgtgcctccccatacttgtcagcgtctcatggacagagcagttcttcacgccggtcacaagagtctcctgcggccgcggcagcgaagcaagctgcagagtgggaggatgttcggtgctcggtctgcatggaccacccgcacaacgctgtcctgctggtctgctcgtcgcacgagaagggctgccgccccttcatgtgcgacaccagctcgcggcactccaattgctatgaccagtaccggaaggcctccaaggactcctccaaggattcagggacagagtgcagcgagtgccagcagcaggtccagctctcgtgcccgctgtgccgtgggccagtcagcgactgcatcaaggactacgacgcacggaggtacatgaacaccaaggtccggtcctgcaccatggagtcgtgcgagttcaggggtgcctaccaggagctgaggaagcatgctagggtggagcacccagcggcgaggccgatggaggtagaccctgaacggcagcgggattggcgccggatggagcagcagcgggaccttggagacttgatgagcatgctgcgttcagggttcaacgccaacgttgaggacaacagcggcgaacttggagccaccgaagaaggggaagaggaagccgcaaggactccggcctccataacaatggtcttcatcatgccgtctagaggctcaatcatgcagtacttaacagaacgtagcagggcgatcattctggtcagccggaggcgagcaagcagtggcagtggtgatgctgaggccacagcaccagacagcgaggaaggtgatgaccctatgttgccatcggcagaggcgtctgctggttcgcagcgttcttccgaagaagaggctgacggtgaccacgcccaatgacagaagtcagctagcaggaggtgtgccatggcccatggcatcttcttggcctgaagatcccgacctgcttggtatgtgatgctgtatgctgggaagaaaacatggatgcaggtgccatcaagcaatggaaaggaaaaaaaacaattgagtggttgcatctatcttgtctgaatggatttctttttccatgcgttgtaattctctctcatatattatcatatgaaatagattcggccgtatttgcactgc

SEQ ID NO: 21241 - protein, 311 aa, Zea mays subsp. mays
  misc_feature (1)..(311): Ceres Seq. ID no. 12402425
MPKDRSSRVSSHESRRARASPYLSASHGQSSSSRRSQESPAAAAAKQAAEWEDVRCSVCMDHPHNAVLLVCSSHEKGCRPFMCDTSSRHSNCYDQYRKASKDSSKDSGTECSECQQQVQLSCPLCRGPVSDCIKDYDARRYMNTKVRSCTMESCEFRGAYQELRKHARVEHPAARPMEVDPERQRDWRRMEQQRDLGDLMSMLRSGFNANVEDNSGELGATEEGEEEAARTPASITMVFIMPSRGSIMQYLTERSRAIILVSRRRASSGSGDAEATAPDSEEGDDPMLPSAEASAGSQRSSEEEADGDHAQ

SEQ ID NO: 21242 - protein, 252 aa, Zea mays subsp. mays
  misc_feature (1)..(252): Ceres Seq. ID no. 12402426
MDHPHNAVLLVCSSHEKGCRPFMCDTSSRHSNCYDQYRKASKDSSKDSGTECSECQQQVQLSCPLCRGPVSDCIKDYDARRYMNTKVRSCTMESCEFRGAYQELRKHARVEHPAARPMEVDPERQRDWRRMEQQRDLGDLMSMLRSGFNANVEDNSGELGATEEGEEEAARTPASITMVFIMPSRGSIMQYLTERSRAIILVSRRRASSGSGDAEATAPDSEEGDDPMLPSAEASAGSQRSSEEEADGDHAQ

SEQ ID NO: 21243 - protein, 230 aa, Zea mays subsp. mays
  misc_feature (1)..(230): Ceres Seq. ID no. 12402427
MCDTSSRHSNCYDQYRKASKDSSKDSGTECSECQQQVQLSCPLCRGPVSDCIKDYDARRYMNTKVRSCTMESCEFRGAYQELRKHARVEHPAARPMEVDPERQRDWRRMEQQRDLGDLMSMLRSGFNANVEDNSGELGATEEGEEEAARTPASITMVFIMPSRGSIMQYLTERSRAIILVSRRRASSGSGDAEATAPDSEEGDDPMLPSAEASAGSQRSSEEEADGDHAQ

SEQ ID NO: 21244 - DNA, 1016 bp, Zea mays subsp. mays
  misc_feature (1)..(1016): Ceres Seq. ID no. 12402434
gtccgatgcctctcatcgccagaagaccttcccggtacgacgccaccgcaccacggaattaacacgagcactgcatcggtgaatctgcaagcccgcccgcccgtcgctcgccaccgccatgttcggcatcgtcttcccggaccacacctttcccctcgacgccaccgctttcgcgcaggtggcgcccaattcctgggtcctcgatctctccactctcgcgctcgccgccgcgccgcgctcggcagtcgtcttcctgctccccgctgccgtgacagcgctgccgcccggcaaggccgtctccgtctacttccaggccgccaccaaccgccccttcgcattcttaggtgcgctcgggcccacgcgcccctcggccagcttcccgcttccggaggccggcgacgagccggagcctgctgtgggccccgctaaactgggtgtcgccgtggaggacgcggccgcgttaccgccgccccctgacgagcagcgtgccgagcgtgtggcgctccgtgtcggcgagaacctgttcaacttcatgcaatcgttctgcggtgccgacggcggcaagctggtagtgcccacggacatcctggaccggtggttccgcaagttccaggagcgagccaagaaagatccagcgtacctcaagagcttcgacttttgagagcaaaggtcattttgcagataccatgtgggaagaatgttggatagcagtatagcagtgttttgtgtctcatctaggccctcctacattgcacacaatgttacgccgtgtcttaggggctgactgaatgaaggtgcatatgcagcttctctatctattgtagagaaggacaacgacaccaaaagcgaccagataggttagatggtggtgcttcaagtccttgcacccgaatgagaagtcttcttagaaacttttacaacaatacatcggatggttctgcttcgaatgtcagtattttgtggataatatctgggaatctcaggactaagatgaatgcgattgagttcttgtcgcg

SEQ ID NO: 21245 - protein, 180 aa, Zea mays subsp. mays
  misc_feature (1)..(180): Ceres Seq. ID no. 12402435
MFGIVFPDHTFPLDATAFAQVAPNSWVLDLSTLALAAAPRSAVVFLLPAAVTALPPGKAVSVYFQAATNRPFAFLGALGPTRPSASFPLPEAGDEPEPAVGPAKLGVAVEDAAALPPPPDEQRAERVALRVGENLFNFMQSFCGADGGKLVVPTDILDRWFRKFQERAKKDPAYLKSFDF

SEQ ID NO: 21246 - protein, 142 aa, Zea mays subsp. mays
  misc_feature (1)..(142): Ceres Seq. ID no. 12402436
VRCLSSPEDLPGTTPPHHGINTSTASVNLQARPPVARHRHVRHRLPGPHLSPRRHRFRAGGAQFLGPRSLHSRARRRAALGSRLPAPRCRDSAAARQGRLRLLPGRHQPPLRILRCARAHAPLGQLPASGGRRRAGACCGPR

SEQ ID NO: 21247 - DNA, 1038 bp, Zea mays subsp. mays
  misc_feature (1)..(1038): Ceres Seq. ID no. 12402461
ctcagccccttccccggccattcgagcgccgccctgctcttgctcggctgcccttgcccactacggcctcttgatttctccctccattccgatatataagcgaaaaaaatccgataagccaagccaaacccaaacccaaccatggcgtgcatgccggctgtgtctgcccccgtcgtcctcgcgccggcaccggcgtcgacccgcacccacctctgctactcaacggaaatgcgacgcggcgcgctctccctccgtcccgcccgcgctatccccacgttgaggctcggcggccaccgcgacgcccgtggcgctgtcgtcgtccgcgccactgcggcagagggagccgtggagctgcaggccaaggtgacgagcaagtgcttcttcgacgtggaggtcggcggggagcctgcgggccgcattgtcatcgggctcttcggagaggtcgtacctaagaccatcgacaacttccgtgcgctctgcactggtgagaaagggtacggctacaagggctgctccttccaccggatcatcaaggactttatgattcaaggcggagacttccagcaaaacaatggtactggtgggagaagtatttatggtgaatgctttgatgatgaaaattttacactgaagcatgttggtcctggtgtgctaagcatggcaaatgctggccccaacacaaatggaagtcaatttttcatttgcactgtgaagacaccgtggttggacaaccgtcacgtcgtgtttggacatgtattagaggggatggacgtggtgaagcagcttgaatcgcaagagaccagcaggtccgatactcccaagcagccttgccgaatcgttaactgcggcgaggtccccctggacagctgagcgagcgaaatgctcttggtgagtttgaacctgaggtcttcccttacgttagagcgtcgacgcccatttgtgctagcatcattcagtcagttgagttatgtgtacgtgccgtgacggaagtttaattactcagatgtggacacattaccagttaatagcaacgaattg

SEQ ID NO: 21248 - protein, 242 aa, Zea mays subsp. mays
  misc_feature (1)..(242): Ceres Seq. ID no. 12402462
MACMPAVSAPVVLAPAPASTRTHLCYSTEMRRGALSLRPARAIPTLRLGGHRDARGAVVVRATAAEGAVELQAKVTSKCFFDVEVGGEPAGRIVIGLFGEVVPKTIDNFRALCTGEKGYGYKGCSFHRIIKDFMIQGGDFQQNNGTGGRSIYGECFDDENFTLKHVGPGVLSMANAGPNTNGSQFFICTVKTPWLDNRHVVFGHVLEGMDVVKQLESQETSRSDTPKQPCRIVNCGEVPLDS

SEQ ID NO: 21249 - protein, 239 aa, Zea mays subsp. mays
  misc_feature (1)..(239): Ceres Seq. ID no. 12402463
MPAVSAPVVLAPAPASTRTHLCYSTEMRRGALSLRPARAIPTLRLGGHRDARGAVVVRATAAEGAVELQAKVTSKCFFDVEVGGEPAGRIVIGLFGEVVPKTIDNFRALCTGEKGYGYKGCSFHRIIKDFMIQGGDFQQNNGTGGRSIYGECFDDENFTLKHVGPGVLSMANAGPNTNGSQFFICTVKTPWLDNRHVVFGHVLEGMDVVKQLESQETSRSDTPKQPCRIVNCGEVPLDS

SEQ ID NO: 21250 - protein, 213 aa, Zea mays subsp. mays
  misc_feature (1)..(213): Ceres Seq. ID no. 12402464
MRRGALSLRPARAIPTLRLGGHRDARGAVVVRATAAEGAVELQAKVTSKCFFDVEVGGEPAGRIVIGLFGEVVPKTIDNFRALCTGEKGYGYKGCSFHRIIKDFMIQGGDFQQNNGTGGRSIYGECFDDENFTLKHVGPGVLSMANAGPNTNGSQFFICTVKTPWLDNRHVVFGHVLEGMDVVKQLESQETSRSDTPKQPCRIVNCGEVPLDS

SEQ ID NO: 21251 - DNA, 1017 bp, Zea mays subsp. mays
  misc_feature (1)..(1017): Ceres Seq. ID no. 12402465
aacccggctggagctcagcctcagctagcctggggaccgctgcacgaacagtagtccttcctcctcctataaagtaaccacacgacccgcctcctacccatccaccagcagctgaggtcgtcggccatggcggagcgggagcagcaagagcaggtggctagcgacgacgcggcggagtggaagcaggtggcggagctgagggccgtcacccaggcccaggacccttcctgcaaggatgaggacgactacacgctccggcgcttcctccgcgcgcgggaccacaacatcggcaaggcgtcggcgatgctgctcaagtacctcaagtggaagcccgcggccaagccccacggcgccatcgcagcggcggaggtggcgcgggaggcggcgcaggggaagctctacctgcagggccacgaccgggagggccgccccctcatctacggcttcggcgcgcgccaccacccggcgcgcagggacctcgacgagttcaagcgctacgtcgtccacgtcctcgacgccaccgtcgcgcgcctgccccctccccctccgggagatggtcgccaggagaagttcgccgccgtcgccgacctcgccggctggggctacgccaactgcgacatccgaggctacctggcggcgctcgacatcatgcagagctactacccggagcgcctcgcccgcgtcttcctcgtccacgtgccctacgtcttcatggccgcctggaagatcgtctacccttttatcgacgacaacaccaagaagaagttcgtcttcgtgccggacaaggacctggacaggacgctccgcgaggccatcgacgactcccagctgccggagatctatggtggcaagctcaagctcgtcacgccggccgcaaaattaccaagccactagctagggggcccggtgcatgacgattgtacgagttcttaactctcactggtatatcaccatccctagccggccgcattgattggggatgcaaaacctaccaaaagataagttcacaagttacat

SEQ ID NO: 21252 - protein, 255 aa, Zea mays subsp. mays
  misc_feature (1)..(255): Ceres Seq. ID no. 12402466
MAEREQQEQVASDDAAEWKQVAELRAVTQAQDPSCKDEDDYTLRRFLRARDHNIGKASAMLLKYLKWKPAAKPHGAIAAAEVAREAAQGKLYLQGHDREGRPLIYGFGARHHPARRDLDEFKRYVVHVLDATVARLPPPPPGDGRQEKFAAVADLAGWGYANCDIRGYLAALDIMQSYYPERLARVFLVHVPYVFMAAWKIVYPFIDDNTKKKFVFVPDKDLDRTLREAIDDSQLPEIYGGKLKLVTPAAKLPSH

SEQ ID NO: 21253 - protein, 220 aa, Zea mays subsp. mays
  misc_feature (1)..(220): Ceres Seq. ID no. 12402467
MRTTTRSGASSARGTTTSARRRRCCSSTSSGSPRPSPTAPSQRRRWRGRRRRGSSTCRATTGRAAPSSTASARATTRRAGTSTSSSATSSTSSTPPSRACPLPLREMVARRSSPPSPTSPAGATPTATSEATWRRSTSCRATTRSASPASSSSTCPTSSWPPGRSSTLLSTTTPRRSSSSCRTRTWTGRSARPSTTPSCRRSMVASSSSSRRPQNYQATS

SEQ ID NO: 21254 - protein, 196 aa, Zea mays subsp. mays
  misc_feature (1)..(196): Ceres Seq. ID no. 12402468
MLLKYLKWKPAAKPHGAIAAAEVAREAAQGKLYLQGHDREGRPLIYGFGARHHPARRDLDEFKRYVVHVLDATVARLPPPPPGDGRQEKFAAVADLAGWGYANCDIRGYLAALDIMQSYYPERLARVFLVHVPYVFMAAWKIVYPFIDDNTKKKFVFVPDKDLDRTLREAIDDSQLPEIYGGKLKLVTPAAKLPSH

SEQ ID NO: 21255 - DNA, 1353 bp, Zea mays subsp. mays
  misc_feature (1)..(1353): Ceres Seq. ID no. 12402491
acgctcatgactttgaagagtgtcccttggcttgggtccagccttcagacttcagaggcaaaccgccggccggcatgcagtagaggcaggctagctgcaagagagttcatctagctagctagctagtgtgtgtttagggtacctagctagctagcttcaacatatatatcttagttgcacacagagctcaaagaaaggaaccatcgatcgatcggcagggagcggggatggggctgagggagatcgagtccacattgccgccggggttcaggttctatcccagcgacgaggagctggtgtgccactacctctacaagaaggtggccaacgagcgcgccgcgcaggggacgctggtggaggtcgacctgcacgcgcgagagccatgggagcttccagacgcggccaagctgacggcgagcgagtggtacttcttcagcttccgggaccgcaagtacgccacggggtcgcgcaccaaccgcgccaccaagacggggtactggaaggccaccggcaaggaccgcgaggtgcgcagcccggccacccgcgccgtcgtcggcatgaggaagacgctcgtcttctaccagggccgcgcacccaacggcgtcaagtcctgctgggtcatgcacgagttccgcctcgactcgccgcatacgccaccaaaggaggactgggtgctctgcagggtgttccagaagcggaaagacagcgagcaagacaacggcggcggctcctcctcgccgacgacctttgccggcgcgtcgtcgcagggggtcgttctagatctgccggacgaccagcccagcatgacgatggccggcgcgtacgtagcagcggaccaccagccgggctcttccgccgccgtcgggttcgcactgccgccgcatgcgcaggacaacggcctcggcgatggcggcctggacgcgttgctgatgaacggagcgacgatgtggcagtacagctcagcatcggccctcgccgatcacttcccgccggaggaagtgaccgccgcgcccatgatggggctaggctccaggggaggaggaggtgacgggtgcagcttcttctacgacagcggcttcgacgacatggggttcccgcagggatggatgggctgaggaggcaaggcaccaactgcaacaacgccatgggatgatggattctgaaggaaacgattgaattgattccattagtggtagtattgtacagtaggtacgtagtgtgaggttaggttattggaaattattagagtgcacctccccaatccaaaacaacggaatgaaaagtagagcgcatgacgacaattgtatgtatccattcactcctactactatgcttgtacattaattaattagt

SEQ ID NO: 21256 - protein, 295 aa, Zea mays subsp. mays
  misc_feature (1)..(295): Ceres Seq. ID no. 12402492
MGLREIESTLPPGFRFYPSDEELVCHYLYKKVANERAAQGTLVEVDLHAREPWELPDAAKLTASEWYFFSFRDRKYATGSRTNRATKTGYWKATGKDREVRSPATRAVVGMRKTLVFYQGRAPNGVKSCWVMHEFRLDSPHTPPKEDWVLCRVFQKRKDSEQDNGGGSSSPTTFAGASSQGVVLDLPDDQPSMTMAGAYVAADHQPGSSAAVGFALPPHAQDNGLGDGGLDALLMNGATMWQYSSASALADHFPPEEVTAAPMMGLGSRGGGGDGCSFFYDSGFDDMGFPQGWMG

SEQ ID NO: 21257 - protein, 221 aa, Zea mays subsp. mays
  misc_feature (1)..(221): Ceres Seq. ID no. 12402493
MGASRRGQADGERVVLLQLPGPQVRHGVAHQPRHQDGVLEGHRQGPRGAQPGHPRRRRHEEDARLLPGPRTQRRQVLLGHARVPPRLAAYATKGGLGALQGVPEAERQRARQRRRLLLADDLCRRVVAGGRSRSAGRPAQHDDGRRVRSSGPPAGLFRRRRVRTAAACAGQRPRRWRPGRVADERSDDVAVQLSIGPRRSLPAGGSDRRAHDGARLQGRRR

SEQ ID NO: 21258 - protein, 185 aa, Zea mays subsp. mays
  misc_feature (1)..(185): Ceres Seq. ID no. 12402494
MRKTLVFYQGRAPNGVKSCWVMHEFRLDSPHTPPKEDWVLCRVFQKRKDSEQDNGGGSSSPTTFAGASSQGVVLDLPDDQPSMTMAGAYVAADHQPGSSAAVGFALPPHAQDNGLGDGGLDALLMNGATMWQYSSASALADHFPPEEVTAAPMMGLGSRGGGGDGCSFFYDSGFDDMGFPQGWMG

SEQ ID NO: 21259 - DNA, 853 bp, Zea mays subsp. mays
  misc_feature (1)..(853): Ceres Seq. ID no. 12402503
ctatatatccacacggacggagcccgcgtcattgtgcggtgccctccggagcgcacggcggcggcctcctgccgaccttcgcggtagcaagctagcagctagctagccgcagttagcgtctctttcgtccgtcctcctgcgccggccgtcatgaccttcccgctggtttgctactgcaacgcggtgccgcgccccgtggccgcgctgttcaagaccatccacgccgcggcgctggtggtcgtgctggtcctctgcttcctgggcctctacgagttcccctacgaccccgaggaccacgcgccggtgatcaacgggcgggcccgcggcgggcgggacgcccctgggccggaggcggtgaagcggcacctcccgctcgtcgagttcctggagctgatggtggtggctccgtcgtcgccgtcgggggcggaggcggctccgacgtgccgggtgtgcctggagaggctggaggcggcggacggggtgcggcggctgggcaactgcgcccacgcgttccacgcgcgctgcatcgaccgctggatcgacctgggcgaggtgacgtgcccgctgtgccgctcccacctgctgccgcgccggcgcgccggcctgcttgccatggcacggcttggcgacggctagtagtcgcccgtccgtccgtccgtacctggttgtttccttgccacgtgacgtgcgtgcccgtgcccgtgtccgtatatatgcttggctttcaggcggcgctggtgccggatgggggcggaccaaccgcgaactgatcgcgattagcaggacgatggactaaccaccaacctgatgttattaatgaatgggcgcaagttaaattaaccggaggaggttg

SEQ ID NO: 21260 - protein, 161 aa, Zea mays subsp. mays
  misc_feature (1)..(161): Ceres Seq. ID no. 12402504
MTFPLVCYCNAVPRPVAALFKTIHAAALVVVLVLCFLGLYEFPYDPEDHAPVINGRARGGRDAPGPEAVKRHLPLVEFLELMVVAPSSPSGAEAAPTCRVCLERLEAADGVRRLGNCAHAFHARCIDRWIDLGEVTCPLCRSHLLPRRRAGLLAMARLGDG

SEQ ID NO: 21261 - protein, 80 aa, Zea mays subsp. mays
  misc_feature (1)..(80): Ceres Seq. ID no. 12402505
MVVAPSSPSGAEAAPTCRVCLERLEAADGVRRLGNCAHAFHARCIDRWIDLGEVTCPLCRSHLLPRRRAGLLAMARLGDG

SEQ ID NO: 21262 - DNA, 1034 bp, Zea mays subsp. mays
  misc_feature (1)..(1034): Ceres Seq. ID no. 12402506
atataatagggtagacgcccaactcgaacctgagtacctgagaaatggcggccgtctcctccacctcaaccgcctcctcctacttctccccgcagccgcagctgccgatctccaccgccgaccctgccgccagcaaaagtaggttgatgcggcagccacggcggagcagcagcttcgtgatggtggaggcgtcctctgccagcggcagcgacggcggggtggccaggacgaagagcctcacggaggacgacctggaggagctcaagggctgcctcgacctcggcttcggattcgcgtacagcgagatacccgagctctgcgggacgctgcccgcgctcgaactctgctactccatgacccggaggttcctcgacgagcagaaggcgccggggcaggaggaggaattggagcctgcgtcgccgccgctccccaattggaggatctctggcccgggtgacgatccagaagaagtgaaggcgaggttgaagtattgggctcaagctgttgcatgcactgtcaagctctgcagctaaactaaaggtcggatagaggctgaagaatctggttatatggttttgggatacagggagcggaaggggggggtgcttctgctctctggcatggaagcgacatgagtgatctcatctgcttctacaaaaaacttgggaagggggaggaaccatgatacggaacagggacagacctcgattcagaatttgagatccatggtctgagcttctacgagagggttcggaagccttgccattcctcagggtgggtggtctgcatagtgcagcgtttccaaatgcatgacctgctggttctttttgctgtttccttgtaatgatcaataggtgctctaattgtcgcactcttgtaataatgtactgaatcgaattttgagttttggccttttgggtactgatccaagggttgattagttccaacattggtttattttgtgctactctgatattgccatgtgcattatgctgttctacacgttcgtagaagttaatagcgcgtttggtttc

SEQ ID NO: 21263 - protein, 162 aa, Zea mays subsp. mays
  misc_feature (1)..(162): Ceres Seq. ID no. 12402507
MAAVSSTSTASSYFSPQPQLPISTADPAASKSRLMRQPRRSSSFVMVEASSASGSDGGVARTKSLTEDDLEELKGCLDLGFGFAYSEIPELCGTLPALELCYSMTRRFLDEQKAPGQEEELEPASPPLPNWRISGPGDDPEEVKARLKYWAQAVACTVKLCS

SEQ ID NO: 21264 - protein, 128 aa, Zea mays subsp. mays
  misc_feature (1)..(128): Ceres Seq. ID no. 12402508
MRQPRRSSSFVMVEASSASGSDGGVARTKSLTEDDLEELKGCLDLGFGFAYSEIPELCGTLPALELCYSMTRRFLDEQKAPGQEEELEPASPPLPNWRISGPGDDPEEVKARLKYWAQAVACTVKLCS

SEQ ID NO: 21265 - protein, 117 aa, Zea mays subsp. mays
  misc_feature (1)..(117): Ceres Seq. ID no. 12402509
MVEASSASGSDGGVARTKSLTEDDLEELKGCLDLGFGFAYSEIPELCGTLPALELCYSMTRRFLDEQKAPGQEEELEPASPPLPNWRISGPGDDPEEVKARLKYWAQAVACTVKLCS

SEQ ID NO: 21266 - DNA, 1254 bp, Zea mays subsp. mays
  misc_feature (1)..(1254): Ceres Seq. ID no. 12402516
cagaagccaaattggtgctcctcttatctcgccgcgccgccaccgctccatttccgctcccccagcccccccaaaagaacctcgtaaccctactcgcgggattccgcaggccgccgcttgcttagggttcatcactcctgttcacacccgatggccgtgaacgaggcgagcagcagtggcggtggggaggaggggtgcgggtcgtggacccgcgagcaggagaaggcgttcgagaacgcggtggcgacgatgggcggggaggaggacggggacgcgaggtgggagaagctagcggaggccgtcgaggggaagacgccggaggaggtcaggcggcactacgagctgctggtggaggacgtcgacggcatcgagtcgggccgcgtcccgcttccggcgtacgcggctgacggcgctgccgaggaagggggcggtggcgggaagaagggaagtggcggaggagggacccatggggacaagcggtcggcgaagtccgccgagcaggagcgtaggaagggcatcgcctggacagaggacgagcacagattgttcctccttggacttgaaaagtatggcaaaggtgactggcggagcatctcgcggaactttgtgatctcaaggacgccgactcaagtagctagtcatgcacagaagtactttatccgtctgaactcaatgaacagagaaaggcggcgatcaagtatacatgacatcaccagtgtgaacaatggagatccatctactgcacagggtccaatcacaggccaaacaaatggtcaggctgcaaatcctggaaaaccatctaagcaatccccgcagccagcgaatacacctccaggcgtcgatgcttatggcacaacaattggacagccagttggtggcccccttgtctcagctgttggaactcccgttacactacctgtttccgctccacctcatctggcctatggcatgcgtgccccggttccaggagccgtagtacctggtgctccagtaaacattgctccgatgccctatccaatgccacccccaccatctcatgggtgacagggtgagggacacatttcaaatgctgtgtagcgtctaaacaaacccataatctccccctatgccagcattttgcgggtgtgctgctatgtctcaataaagcaatgccaataaacccttgtacattacaaactgttgtcacatgttgcattgaggacattgcagattgtgtactttgtgttgcatgcaaactttttcatgtacatctcc

SEQ ID NO: 21267 - protein, 297 aa, Zea mays subsp. mays
  misc_feature (1)..(297): Ceres Seq. ID no. 12402517
MAVNEASSSGGGEEGCGSWTREQEKAFENAVATMGGEEDGDARWEKLAEAVEGKTPEEVRRHYELLVEDVDGIESGRVPLPAYAADGAAEEGGGGGKKGSGGGGTHGDKRSAKSAEQERRKGIAWTEDEHRLFLLGLEKYGKGDWRSISRNFVISRTPTQVASHAQKYFIRLNSMNRERRRSSIHDITSVNNGDPSTAQGPITGQTNGQAANPGKPSKQSPQPANTPPGVDAYGTTIGQPVGGPLVSAVGTPVTLPVSAPPHLAYGMRAPVPGAVVPGAPVNIAPMPYPMPPPPSHG

SEQ ID NO: 21268 - protein, 264 aa, Zea mays subsp. mays
  misc_feature (1)..(264): Ceres Seq. ID no. 12402518
MGGEEDGDARWEKLAEAVEGKTPEEVRRHYELLVEDVDGIESGRVPLPAYAADGAAEEGGGGGKKGSGGGGTHGDKRSAKSAEQERRKGIAWTEDEHRLFLLGLEKYGKGDWRSISRNFVISRTPTQVASHAQKYFIRLNSMNRERRRSSIHDITSVNNGDPSTAQGPITGQTNGQAANPGKPSKQSPQPANTPPGVDAYGTTIGQPVGGPLVSAVGTPVTLPVSAPPHLAYGMRAPVPGAVVPGAPVNIAPMPYPMPPPPSHG

SEQ ID NO: 21269 - DNA, 1248 bp, Zea mays subsp. mays
  misc_feature (1)..(1248): Ceres Seq. ID no. 12402523
aagcataccagagcacacacagaacganncctcgatcgctcatagtctcctctgctccggtttcgttggagatccaggcaatggccgacgaatgcagcaactcaccagggccttctcaggccttggcgggctcggcgtggacgagccggcgatggtgtcggcgctggcacggtggcgcgggcagcccgagaagcggtccgcgttccgcaggggattcccgggcttcttcagcagccacggcggcgacatggaccggcgcgaggaggagtacatgctgcacctggccgccgagttcgcgcggttcagggacctggtggtgctgtgggcgacgcacccgtgggancgcgacgccggnctggcgcaccacgtcctgcaccaccaccaccaccacccgcccgccgtcgtcgtggaggtcgcctgcgcgcggtccgccgacgagctgctgggcgcgcgccgggcgtaccaggcgctcttccaccgctccctcgaggaggacgtcgcgcaccgcgcccgggacaagccctactgcagcctgctggtcgggctggtgagcgcgtacaggtacgagggcccgcgggtggacaaggaggtggcgaaggcggaggccgaggcgctgggtgccgccgtgaagcgcgccgggaacgggaagctggtggagaacgacgaggtgctccgcatcctgaccaccaggagcaagccccacctcgtgcagacgttcatgtactacaaggagatgcacngcaggcacntcgaggaggacctgggccaacgcggggaggagaccctgctgggaaaccgtgctctgcctcgtcgcgccgggnccagtacttcagccaggtgattgagggcgcgctgagggacggcgccgaccaccacgggaaggaggccctgacgagggtggcggtgacgcggtcggaccacgacatggacgacatcagagccgcctaccaccagcagttcggggccaagctggaggacgtcatcgcggccaaggcgcacggacactacagggnacgcgctgctctccttggtgggcgccggcaattcatcagtgtgaagcgctgcttcctgctcaggagtcgtcaggcccaataagatgtgcaagagtttctttattacgcactttcgcgaggaaaaaaagtcgcattttccactcgatgaggaaaggttgttgcttgttcttttgcttctcctatgcgtttcgtctatcattgactacaggattcccaataaacatttttaatttct

SEQ ID NO: 21270 - protein, 279 aa, Zea mays subsp. mays
  misc_feature (1)..(279): Ceres Seq. ID no. 12402524
  misc_feature (9)..(9): Xaa is any aa, unknown or other
  misc_feature (10)..(10): Xaa is any aa, unknown or other
  misc_feature (114)..(114): Xaa is any aa, unknown or other
  misc_feature (118)..(118): Xaa is any aa, unknown or other
  misc_feature (247)..(247): Xaa is any aa, unknown or other
  misc_feature (250)..(250): Xaa is any aa, unknown or other
  misc_feature (274)..(274): Xaa is any aa, unknown or other
SIPEHTQNXXSIAHSLLCSGFVGDPGNGRRMQQLTRAFSGLGGLGVDEPAMVSALARWRGQPEKRSAFRRGFPGFFSSHGGDMDRREEEYMLHLAAEFARFRDLVVLWATHPWXRDAXLAHHVLHHHHHHPPAVVVEVACARSADELLGARRAYQALFHRSLEEDVAHRARDKPYCSLLVGLVSAYRYEGPRVDKEVAKAEAEALGAAVKRAGNGKLVENDEVLRILTTRSKPHLVQTFMYYKEMHXRHXEEDLGQRGEETLLGNRALPRRAGXSTSAR

SEQ ID NO: 21271 - protein, 249 aa, Zea mays subsp. mays
  misc_feature (1)..(249): Ceres Seq. ID no. 12402525
  misc_feature (84)..(84): Xaa is any aa, unknown or other
  misc_feature (88)..(88): Xaa is any aa, unknown or other
  misc_feature (217)..(217): Xaa is any aa, unknown or other
  misc_feature (220)..(220): Xaa is any aa, unknown or other
  misc_feature (244)..(244): Xaa is any aa, unknown or other
MQQLTRAFSGLGGLGVDEPAMVSALARWRGQPEKRSAFRRGFPGFFSSHGGDMDRREEEYMLHLAAEFARFRDLVVLWATHPWXRDAXLAHHVLHHHHHHPPAVVVEVACARSADELLGARRAYQALFHRSLEEDVAHRARDKPYCSLLVGLVSAYRYEGPRVDKEVAKAEAEALGAAVKRAGNGKLVENDEVLRILTTRSKPHLVQTFMYYKEMHXRHXEEDLGQRGEETLLGNRALPRRAGXSTSAR

SEQ ID NO: 21272 - protein, 229 aa, Zea mays subsp. mays
  misc_feature (1)..(229): Ceres Seq. ID no. 12402526
  misc_feature (64)..(64): Xaa is any aa, unknown or other
  misc_feature (68)..(68): Xaa is any aa, unknown or other
  misc_feature (197)..(197): Xaa is any aa, unknown or other
  misc_feature (200)..(200): Xaa is any aa, unknown or other
  misc_feature (224)..(224): Xaa is any aa, unknown or other
MVSALARWRGQPEKRSAFRRGFPGFFSSHGGDMDRREEEYMLHLAAEFARFRDLVVLWATHPWXRDAXLAHHVLHHHHHHPPAVVVEVACARSADELLGARRAYQALFHRSLEEDVAHRARDKPYCSLLVGLVSAYRYEGPRVDKEVAKAEAEALGAAVKRAGNGKLVENDEVLRILTTRSKPHLVQTFMYYKEMHXRHXEEDLGQRGEETLLGNRALPRRAGXSTSAR

SEQ ID NO: 21273 - DNA, 988 bp, Zea mays subsp. mays
  misc_feature (1)..(988): Ceres Seq. ID no. 12402534
agcagcagcagcagcaagcttgagccactgctgcacgtatattattaagatcgaaagccaccaccatggccttggcctctaataagctcctcatcaacagcttcgtcacggtggcattcttagtcgccagcactcgtgggagtggcaccatccagctgatcttggtgaacaactgcgcggaatccatctggcccgggcttctgggcaccgccggccagccgacgccgcagtcgggcggcctccacctggcccccggcgacgaggcggccttcgacgtgccggtggggtggtccggccgcgtgtgnccgcggcgcggctgctccttcgaccagcgcgagcgggggcagtgcgcgacgggggactgtggcggcgtgctccgctgngacgggcggcccggcgccgccccggccacggtggtagagatgacgctgggcacccccaagtccccgntccacttnnacgacgtgtcgntggtggacggcttcaacgcgccggtgtccatggcccccgtgggcggcggcgccgggtgcggcgtgnncgggtgccagnnggacctgaacgtctgctgcccgtcggcgctcgaggnnagggaccgggaggggagggtggccggctgccggagcgcctgcaaggccatgggaggggacaggtactgctgcacgggggactacgcgtcgccggacnaggtgccgccccaccatcttngcccacgtcttcaaggccgtgtgccccaaggcctatcantacgcgtacgacgacgccacctcgctgaaccggtgcaaggccagccggtacctcatcaccttctgcccaccgccgacatccaggaaatgacgaccacatccatggattgcatcttcaaaataataatacttactaaatgtcctacggtttttatatatcagtcatgtagagcttgtttaattaggatacttatttaaacatattccaatccgagaggtctntatccaacgcatcaattgttcgt

SEQ ID NO: 21274 - protein, 291 aa, Zea mays subsp. mays
  misc_feature (1)..(291): Ceres Seq. ID no. 12402535
  misc_feature (80)..(80): Xaa is any aa, unknown or other
  misc_feature (106)..(106): Xaa is any aa, unknown or other
  misc_feature (129)..(129): Xaa is any aa, unknown or other
  misc_feature (131)..(131): Xaa is any aa, unknown or other
  misc_feature (132)..(132): Xaa is any aa, unknown or other
  misc_feature (136)..(136): Xaa is any aa, unknown or other
  misc_feature (158)..(158): Xaa is any aa, unknown or other
  misc_feature (162)..(162): Xaa is any aa, unknown or other
  misc_feature (174)..(174): Xaa is any aa, unknown or other
  misc_feature (207)..(207): Xaa is any aa, unknown or other
  misc_feature (214)..(214): Xaa is any aa, unknown or other
  misc_feature (227)..(227): Xaa is any aa, unknown or other
MALASNKLLINSFVTVAFLVASTRGSGTIQLILVNNCAESIWPGLLGTAGQPTPQSGGLHLAPGDEAAFDVPVGWSGRVXPRRGCSFDQRERGQCATGDCGGVLRXDGRPGAAPATVVEMTLGTPKSPXHXXDVSXVDGFNAPVSMAPVGGGAGCGVXGCQXDLNVCCPSALEXRDREGRVAGCRSACKAMGGDRYCCTGDYASPDXVPPHHLXPRLQGRVPQGLSXRVRRRHLAEPVQGQPVPHHLLPTADIQEMTTTSMDCIFKIIILTKCPTVFIYQSCRACLIRILI

SEQ ID NO: 21275 - protein, 172 aa, Zea mays subsp. mays
  misc_feature (1)..(172): Ceres Seq. ID no. 12402536
  misc_feature (10)..(10): Xaa is any aa, unknown or other
  misc_feature (12)..(12): Xaa is any aa, unknown or other
  misc_feature (13)..(13): Xaa is any aa, unknown or other
  misc_feature (17)..(17): Xaa is any aa, unknown or other
  misc_feature (39)..(39): Xaa is any aa, unknown or other
  misc_feature (43)..(43): Xaa is any aa, unknown or other
  misc_feature (55)..(55): Xaa is any aa, unknown or other
  misc_feature (88)..(88): Xaa is any aa, unknown or other
  misc_feature (95)..(95): Xaa is any aa, unknown or other
  misc_feature (108)..(108): Xaa is any aa, unknown or other
MTLGTPKSPXHXXDVSXVDGFNAPVSMAPVGGGAGCGVXGCQXDLNVCCPSALEXRDREGRVAGCRSACKAMGGDRYCCTGDYASPDXVPPHHLXPRLQGRVPQGLSXRVRRRHLAEPVQGQPVPHHLLPTADIQEMTTTSMDCIFKIIILTKCPTVFIYQSCRACLIRILI

SEQ ID NO: 21276 - protein, 146 aa, Zea mays subsp. mays
  misc_feature (1)..(146): Ceres Seq. ID no. 12402537
  misc_feature (13)..(13): Xaa is any aa, unknown or other
  misc_feature (17)..(17): Xaa is any aa, unknown or other
  misc_feature (29)..(29): Xaa is any aa, unknown or other
  misc_feature (62)..(62): Xaa is any aa, unknown or other
  misc_feature (69)..(69): Xaa is any aa, unknown or other
  misc_feature (82)..(82): Xaa is any aa, unknown or other
MAPVGGGAGCGVXGCQXDLNVCCPSALEXRDREGRVAGCRSACKAMGGDRYCCTGDYASPDXVPPHHLXPRLQGRVPQGLSXRVRRRHLAEPVQGQPVPHHLLPTADIQEMTTTSMDCIFKIIILTKCPTVFIYQSCRACLIRILI

SEQ ID NO: 21277 - DNA, 867 bp, Zea mays subsp. mays
  misc_feature (1)..(867): Ceres Seq. ID no. 12402556
actcgaagtcgaagccgcagcagctagctagctagcatggccgggaaagagcttacgctgctggggttatgggcgagcccgttcgtgctccgggcgcgcatcgcgctcagcctcaaaggcctcacctacgcatactccgaggagaacctcgacgacaagagcgagcttctcctcagctccaaccccgtgctcaagaaggtgcccgtgctcatccaccacggcaagcccgtctgcgagtcccagatcatcgtgcagtacgtcgacgaggctttccccgccgccgcacctaatttccttccatccgacccctacgaccgcgccattgctcgcttctgggcctcctacgtcgacgacaagttctacagcgcgtggatacccgtgttcaggggcaggacggcggaggagatggcggaggcggcgaggcaggccgtcgcggcgctggagacgctggagcaggcgttcagggagtgctccaaggggaaggccttcttcggaggggacagcgtggggctcgtcgacgtcgtgctcggcggccttgttgggtggctgtacgccaccgaggccatctgcggggtgaaggccctcgacgccggcaggacgccgctgctggcggcgtgggcggagcggttctgcgcgctggagggtgtcaaggggctgatcccggacgtggacaggcttctggagtataccaaggccaggcgggccgtatttggcctgccgccgctccgtccttaggcatagtggacatgtttcttttctttttttttcttttttaaaaaattatatgttctatgtttgtttgaaataaagtactgttatggtgttacacatgtattccaacgtcaactctacgtgctgctatttggc

SEQ ID NO: 21278 - protein, 232 aa, Zea mays subsp. mays
  misc_feature (1)..(232): Ceres Seq. ID no. 12402557
MAGKELTLLGLWASPFVLRARIALSLKGLTYAYSEENLDDKSELLLSSNPVLKKVPVLIHHGKPVCESQIIVQYVDEAFPAAAPNFLPSDPYDRAIARFWASYVDDKFYSAWIPVFRGRTAEEMAEAARQAVAALETLEQAFRECSKGKAFFGGDSVGLVDVVLGGLVGWLYATEAICGVKALDAGRTPLLAAWAERFCALEGVKGLIPDVDRLLEYTKARRAVFGLPPLRP

SEQ ID NO: 21279 - DNA, 1071 bp, Zea mays subsp. mays
  misc_feature (1)..(1071): Ceres Seq. ID no. 12402571
aactgcccaacaaacgatggccggcgtgtcagcaagcatcccgtgcgtggtgctcaacacgggccacgcgatgcccgtgctgggcttcgggaccggctcctccagcacgccggaggatctgccggcgaccatcctccacgccgtccgccttggctaccgccacatcgacacggcctccatgtacggcacggagggggcggtcggagccgccgtctccgacgccgtcgctgcgggggccgtcacctcccgcgctgacctcttcatcacctccaagctcgtgatgaaggacgcgcatccggaccgcgtgctccccgcgatccgggagtcgctggcccgcctaggcctggactacctcgacctcttcctcgtccactggcccgtcgccgccgacgagaacaacaagcccgtgccgttcgacatggaaggcgtctggcacgccatggaggagtgccaccgcatcggccttgctaggtccgtcggcgtcagcaacttctctgcggccaagatgtcccggctgctcgccttcgccgccgtaccgccggctgtgaaccaggtggaggtgaacgtcggctggcgtcaagagaaggtcagggaggcctgcgccaagaacggcgtcgtcgtcaccgccttctcgccgctgggcgcgatcggcacggcgtggggatccaacgccgtcatggaaagcggcgcgctggaggacatcgccgccaggagaggcaagaccattgctcaggtagcgttgaggtggcttcacgagcaaggggtgtgctttgtggcgaggagctttaacaaggagaggttgaagcaaaacatggagcttttcgattgggagttgagcgtcgatgacaaggagaagatcatggggattccacagaggagagcatgccgtgcagagttctttttgtcaccagacgggccgtacaagaccttggaggagctatgggacggggagatatgagataccatgtagctgttgtatctattgtttgtcgacatcgttgttgcttgctgctgtggggaaatatcttcggaatactctctgaatgaatgtggactaacagttggtcctgg

SEQ ID NO: 21280 - protein, 318 aa, Zea mays subsp. mays
  misc_feature (1)..(318): Ceres Seq. ID no. 12402572
TAQQTMAGVSASIPCVVLNTGHAMPVLGFGTGSSSTPEDLPATILHAVRLGYRHIDTASMYGTEGAVGAAVSDAVAAGAVTSRADLFITSKLVMKDAHPDRVLPAIRESLARLGLDYLDLFLVHWPVAADENNKPVPFDMEGVWHAMEECHRIGLARSVGVSNFSAAKMSRLLAFAAVPPAVNQVEVNVGWRQEKVREACAKNGVVVTAFSPLGAIGTAWGSNAVMESGALEDIAARRGKTIAQVALRWLHEQGVCFVARSFNKERLKQNMELFDWELSVDDKEKIMGIPQRRACRAEFFLSPDGPYKTLEELWDGEI

SEQ ID NO: 21281 - protein, 313 aa, Zea mays subsp. mays
  misc_feature (1)..(313): Ceres Seq. ID no. 12402573
MAGVSASIPCVVLNTGHAMPVLGFGTGSSSTPEDLPATILHAVRLGYRHIDTASMYGTEGAVGAAVSDAVAAGAVTSRADLFITSKLVMKDAHPDRVLPAIRESLARLGLDYLDLFLVHWPVAADENNKPVPFDMEGVWHAMEECHRIGLARSVGVSNFSAAKMSRLLAFAAVPPAVNQVEVNVGWRQEKVREACAKNGVVVTAFSPLGAIGTAWGSNAVMESGALEDIAARRGKTIAQVALRWLHEQGVCFVARSFNKERLKQNMELFDWELSVDDKEKIMGIPQRRACRAEFFLSPDGPYKTLEELWDGEI

SEQ ID NO: 21282 - protein, 295 aa, Zea mays subsp. mays
  misc_feature (1)..(295): Ceres Seq. ID no. 12402574
MPVLGFGTGSSSTPEDLPATILHAVRLGYRHIDTASMYGTEGAVGAAVSDAVAAGAVTSRADLFITSKLVMKDAHPDRVLPAIRESLARLGLDYLDLFLVHWPVAADENNKPVPFDMEGVWHAMEECHRIGLARSVGVSNFSAAKMSRLLAFAAVPPAVNQVEVNVGWRQEKVREACAKNGVVVTAFSPLGAIGTAWGSNAVMESGALEDIAARRGKTIAQVALRWLHEQGVCFVARSFNKERLKQNMELFDWELSVDDKEKIMGIPQRRACRAEFFLSPDGPYKTLEELWDGEI

SEQ ID NO: 21283 - DNA, 1104 bp, Zea mays subsp. mays
  misc_feature (1)..(1104): Ceres Seq. ID no. 12402575
gtcctccatcaaaagaaggcagggaaagatctgatctggggggtgagagagcaggaggagaaagccaagccattgccctcccctcttgaaggcttggagcttggttctacatcctcttctcttcccctccgtctctctctctctctctatttggtttgcttgcttgcctctactagactctagtcgtcgggtccggccatggccaccatcctggagaacatccagaaggcgaggttcctgccgaccaggccgctcaaggacgagctgcccaccttccagggcggcggcaagagcaaggaggagagccacctcatgggcctgaggaagcggctgtccagcttctccggcaagatccagcccatctcctccgcgtcggccgccgagtgggcgttccgccgctccaagtcggcgccctccctcggcgccgccttcgccgcggggggcggctccctgaggcagtggtggcagtggggcgtcggctggctcctgtccaagaagcccgggttcgcgggcgacctcgagatgaacgaggaggaggtcgccgcgctgggccgccagagcaggggcacctgggcccacgtcctcttcaagatgcggtccggcgtccgccgcctcgtcgcgtccgcgcactcgctccccaccacgcacaagcagcagtccctgccgtcgtcgtcggcctcggcggcgcacagcgtccagtgcaagccggcggcgtcgttcgcctacgcgcagcggcagagcttccaccacaccggccacgccatggcgcactaggcagcgtctcgcggttgccggtgccgtctgcggccggtctcctccagatccagagatggagggcgatgagaggcgcgggaagaagaagattcaggttacaggtgcgtgagatcgacggtgaagatgtcgttgaattgatgatgaatgaaatggaatgtaggattaccattctgttgtctgtgtagatctagtgcccctgtagaggtgaacaagtgttatactacatgctcgttctttatattattcttttgggttcgttcgttggacgatgtaaatgtaaaatgtttggttgatcttgtactgttcaataaaactgatgcaaattgtgcc

SEQ ID NO: 21284 - protein, 191 aa, Zea mays subsp. mays
  misc_feature (1)..(191): Ceres Seq. ID no. 12402576
MATILENIQKARFLPTRPLKDELPTFQGGGKSKEESHLMGLRKRLSSFSGKIQPISSASAAEWAFRRSKSAPSLGAAFAAGGGSLRQWWQWGVGWLLSKKPGFAGDLEMNEEEVAALGRQSRGTWAHVLFKMRSGVRRLVASAHSLPTTHKQQSLPSSSASAAHSVQCKPAASFAYAQRQSFHHTGHAMAH

SEQ ID NO: 21285 - protein, 153 aa, Zea mays subsp. mays
  misc_feature (1)..(153): Ceres Seq. ID no. 12402577
MGLRKRLSSFSGKIQPISSASAAEWAFRRSKSAPSLGAAFAAGGGSLRQWWQWGVGWLLSKKPGFAGDLEMNEEEVAALGRQSRGTWAHVLFKMRSGVRRLVASAHSLPTTHKQQSLPSSSASAAHSVQCKPAASFAYAQRQSFHHTGHAMAH

SEQ ID NO: 21286 - DNA, 838 bp, Zea mays subsp. mays
  misc_feature (1)..(838): Ceres Seq. ID no. 12402762
tcctcagcatttcagcacccagttcggcgttgcacatgtgacccgggcacccggcccccagcccccagctcccgaccatttctgcacatctacagctcgcgagctcagcaccagaacacgccaggccagcccaacctctccaagaacccaagcagcagcccccgaccgaccggccatgccaagggccatcggcggtggtgcggcctacaagggcggaatcaagggctactggaagcgccgcggctacgaccggatcgacgcggccgcggcgcagcgccgcccgcgcctccctacagcggagcttggcggcggcgaggcgcatcctcagccagcgggtcgtcggcgccgccgcgggtggcgcgttcgccggcgagcgggcgtcctcggccggcgcctcctccgcgcgctctccccgcggcggctgctggcgcggctccgcgacgcctacgtgaacgccatgctccgcctcgcgtcctccgccgccgtggccggntacggcggcgccgggccctactgcaccgccgccgacccgttcgcccggccgcgcccgctcaccagggagtacgacgagaaggcgctcgtcgagatctacaggtccatcctcgcgcgcggcgaggccgggccagtggtcgccgccgcgcggctgcncgcggtgctctgaggagctgatgacgacggggacggacgggcgctggcacgcacgcgcgctgggagcctggccggccctntggcgcgctccgtctactctccttgcctcatgcaaggctcgtgtacgctagaatctcgctttcatgtagcgcacagaatttgcatgtcggatgaaaagtttcaggtggtc

SEQ ID NO: 21287 - protein, 222 aa, Zea mays subsp. mays
  misc_feature (1)..(222): Ceres Seq. ID no. 12402763
  misc_feature (165)..(165): Xaa is any aa, unknown or other
  misc_feature (216)..(216): Xaa is any aa, unknown or other
SSAFQHPVRRCTCDPGTRPPAPSSRPFLHIYSSRAQHQNTPGQPNLSKNPSSSPRPTGHAKGHRRWCGLQGRNQGLLEAPRLRPDRRGRGAAPPAPPYSGAWRRRGASSASGSSAPPRVARSPASGRPRPAPPPRALPAAAAGAAPRRLRERHAPPRVLRRRGRXRRRRALLHRRRPVRPAAPAHQGVRREGARRDLQVHPRARRGRASGRRRAAXRGALRS

SEQ ID NO: 21288 - protein, 219 aa, Zea mays subsp. mays
  misc_feature (1)..(219): Ceres Seq. ID no. 12402764
  misc_feature (164)..(164): Xaa is any aa, unknown or other
  misc_feature (216)..(216): Xaa is any aa, unknown or other
PQHFSTQFGVAHVTRAPGPQPPAPDHFCTSTARELSTRTRQASPTSPRTQAAAPDRPAMPRAIGGGAAYKGGIKGYWKRRGYDRIDAAAAQRRPRLPTAELGGGEAHPQPAGRRRRRGWRVRRRAGVLGRRLLRALSPRRLLARLRDAYVNAMLRLASSAAVAXYGGAGPYCTAADPFARPRPLTREYDEKALVEIYRSILARGEAGPVVAAARLXAVL

SEQ ID NO: 21289 - protein, 161 aa, Zea mays subsp. mays
  misc_feature (1)..(161): Ceres Seq. ID no. 12402765
  misc_feature (106)..(106): Xaa is any aa, unknown or other
  misc_feature (158)..(158): Xaa is any aa, unknown or other
MPRAIGGGAAYKGGIKGYWKRRGYDRIDAAAAQRRPRLPTAELGGGEAHPQPAGRRRRRGWRVRRRAGVLGRRLLRALSPRRLLARLRDAYVNAMLRLASSAAVAXYGGAGPYCTAADPFARPRPLTREYDEKALVEIYRSILARGEAGPVVAAARLXAVL

SEQ ID NO: 21290 - DNA, 939 bp, Zea mays subsp. mays
  misc_feature (1)..(939): Ceres Seq. ID no. 12402805
agtcttccttccacctgaaaacccaacccacacgctcgcgcctccgcgaagaaaaacaccgaggcccatggcgccgagaacgtcagagagagcgatgacatcggcggccgcggggctcgcgcgtggcgccggcccgcactacagaggcgtcaggaagcggccgtggggccggtacgccgcggagatccgcgacccggccaagaagagccgcgtgtggctcggcacgttcgacacgcccgaggacgccgcgcgggcctacgacgccgccgcgcgcgagtaccgcggcgccaaggccaagaccaacttctccttcccttcgtgcctgccgctcgccgccgcggacgtggccggcggctgccggagcggcaacagcagcagcaccactaccaccaccaccgtcgactccttcggcggcgacgtgcaggcgccgcccatgcaggccatgccgctcccaccgtccttcagcgccagcgccgccgtacgcttccctttcagcggctaccccgtgacgcacccgtactacttcttcgggcaggcggcagcagggtgccatatgctgaagctgccaccgacgacggtgactgtggctcagagcgactctgactcctcgtccgtcgaggatctgtcgccgtcgccgccggccgccgtgtcagcgacgagagccgccgcgtttgatctcgacctaaactgcccaccgccggccgaggcggaggcatagtcgccggagttttgctgaatgactgcctgtagtttctttcgtcttttacccgtagagagaaaatcggtaggcttagggcccctttgtattcacacggtgtcacgggcacacccacctccgaactctggtactctgatctttagagtgaaactacgaacatgtggtttaaatagttcaaagttaactctataatttatggttcaaagttaactctatgattt

SEQ ID NO: 21291 - protein, 238 aa, Zea mays subsp. mays
  misc_feature (1)..(238): Ceres Seq. ID no. 12402806
VFLPPENPTHTLAPPRRKTPRPMAPRTSERAMTSAAAGLARGAGPHYRGVRKRPWGRYAAEIRDPAKKSRVWLGTFDTPEDAARAYDAAAREYRGAKAKTNFSFPSCLPLAAADVAGGCRSGNSSSTTTTTTVDSFGGDVQAPPMQAMPLPPSFSASAAVRFPFSGYPVTHPYYFFGQAAAGCHMLKLPPTTVTVAQSDSDSSSVEDLSPSPPAAVSATRAAAFDLDLNCPPPAEAEA

SEQ ID NO: 21292 - protein, 216 aa, Zea mays subsp. mays
  misc_feature (1)..(216): Ceres Seq. ID no. 12402807
MAPRTSERAMTSAAAGLARGAGPHYRGVRKRPWGRYAAEIRDPAKKSRVWLGTFDTPEDAARAYDAAAREYRGAKAKTNFSFPSCLPLAAADVAGGCRSGNSSSTTTTTTVDSFGGDVQAPPMQAMPLPPSFSASAAVRFPFSGYPVTHPYYFFGQAAAGCHMLKLPPTTVTVAQSDSDSSSVEDLSPSPPAAVSATRAAAFDLDLNCPPPAEAEA

SEQ ID NO: 21293 - protein, 207 aa, Zea mays subsp. mays
  misc_feature (1)..(207): Ceres Seq. ID no. 12402808
MTSAAAGLARGAGPHYRGVRKRPWGRYAAEIRDPAKKSRVWLGTFDTPEDAARAYDAAAREYRGAKAKTNFSFPSCLPLAAADVAGGCRSGNSSSTTTTTTVDSFGGDVQAPPMQAMPLPPSFSASAAVRFPFSGYPVTHPYYFFGQAAAGCHMLKLPPTTVTVAQSDSDSSSVEDLSPSPPAAVSATRAAAFDLDLNCPPPAEAEA

SEQ ID NO: 21294 - DNA, 644 bp, Zea mays subsp. mays
  misc_feature (1)..(644): Ceres Seq. ID no. 12402849
accacacccaccccacgaaaccgtaagaagcgcagagtgtgagagagagaggagcatcaaggacgacgtgggcaagatgatgcaggtgttcgtgaagacgctggcggggaagacgatcacgctggaggtggagggcagcgacgacgccgtcgagaacgtgaaggccatgatccagggcaaggaaggcatcccgccggaggagcagcgcctcgtcttcgcgggcaagcagctggacgacgacggccgcaccctggccgactacggcgtccagaaggagtcgacgctgcacctggagctgcgcctccgcggcggcagcaggggcggctaccccatggggatcccgcccagcctccgcgagctcgcgcagaagtacaacgagaacaagatggtctgccgcaagtgctatgcgcggcttccgcctagggcaaccaactgccgcaagaagaagtgtgggcacagtaacgagctgaggtcgaagaaaaggttcatgtccaagattggcgggaaatgatcggcttttgtcattgcgtgacatatatggagcatcagctgaaatttcttagacgcttaataatttttactttaacgccgtggttgtgatcttttactgaataaagttgtagtagaaacaaaaaattcgtgcc

SEQ ID NO: 21295 - protein, 169 aa, Zea mays subsp. mays
  misc_feature (1)..(169): Ceres Seq. ID no. 12402850
PHPPHETVRSAECERERSIKDDVGKMMQVFVKTLAGKTITLEVEGSDDAVENVKAMIQGKEGIPPEEQRLVFAGKQLDDDGRTLADYGVQKESTLHLELRLRGGSRGGYPMGIPPSLRELAQKYNENKMVCRKCYARLPPRATNCRKKKCGHSNELRSKKRFMSKIGGK

SEQ ID NO: 21296 - protein, 144 aa, Zea mays subsp. mays
  misc_feature (1)..(144): Ceres Seq. ID no. 12402851
MMQVFVKTLAGKTITLEVEGSDDAVENVKAMIQGKEGIPPEEQRLVFAGKQLDDDGRTLADYGVQKESTLHLELRLRGGSRGGYPMGIPPSLRELAQKYNENKMVCRKCYARLPPRATNCRKKKCGHSNELRSKKRFMSKIGGK

SEQ ID NO: 21297 - protein, 143 aa, Zea mays subsp. mays
  misc_feature (1)..(143): Ceres Seq. ID no. 12402852
MQVFVKTLAGKTITLEVEGSDDAVENVKAMIQGKEGIPPEEQRLVFAGKQLDDDGRTLADYGVQKESTLHLELRLRGGSRGGYPMGIPPSLRELAQKYNENKMVCRKCYARLPPRATNCRKKKCGHSNELRSKKRFMSKIGGK

SEQ ID NO: 21298 - DNA, 1102 bp, Zea mays subsp. mays
  misc_feature (1)..(1102): Ceres Seq. ID no. 12402877
aagagaccaggctggtggttgaggtgagaagctagaggagctagagcgatagagtcccatcgcaacacacaaagggaagaggaagaggaaggcgaggacgatgggcttgctcctgctgctccacgtcctcctcgtcgcggcggcggcgacagctcctgcagccgacgcatggggcaaggaggggcactacatggtgtgcaagatcgctgagagctttctgacgaaagaggcatcgacggcggtgaaggagctgctgccggggtgggccggcggcgagctcgcggagacgtgctcttgggcggacacgcagaggttccggtaccgctggtccagcccgctgcacttcgccgacacgccaggggactgcgagttcgactacgcccgggactgccacaacaccaaaggggagaagaacatgtgcgtggtcggagccatcaacaactacacggcggcgctgaaagactcatcaagtccatttgatccgacggagagcttgatgttcctggcgcacttcgtcggcgacgtccaccagcctctccactgcggccacaccgacgacctcggcggcaacaccatcgtcgtccactggtaccgaaggaagaccaacctgcaccacgtctgggacgtgaacgtcatcgagacggccatgaaggacttctacggcaacgaccagagcaccatgatacaggccatccagcagaacatcacggaggagtgggctgatgaggagaagaagtgggaggcctgccgtagccggacaaagacctgtgctgacaagtacgctgcagagagcgcgaagctggcctgcacggcgtacgagggtgtcgaccaggactccaccttggaagatgactacttcttcgccgcgctgccggtggttcagaagaggatcgcgcaaggaggcgtcaggctggccgcgatcctcaacaggatatttggtgggaacagcagatcaggcttcagagcagttgattgatcgatccataccagtagtagatatcaaacgattggacatgtggaggagtgggtggggaggggcagacatgatctgccatctgaattagaataataagaggtatcttgttgccgtctggcaatattg

SEQ ID NO: 21299 - protein, 291 aa, Zea mays subsp. mays
  misc_feature (1)..(291): Ceres Seq. ID no. 12402878
MGLLLLLHVLLVAAAATAPAADAWGKEGHYMVCKIAESFLTKEASTAVKELLPGWAGGELAETCSWADTQRFRYRWSSPLHFADTPGDCEFDYARDCHNTKGEKNMCVVGAINNYTAALKDSSSPFDPTESLMFLAHFVGDVHQPLHCGHTDDLGGNTIVVHWYRRKTNLHHVWDVNVIETAMKDFYGNDQSTMIQAIQQNITEEWADEEKKWEACRSRTKTCADKYAAESAKLACTAYEGVDQDSTLEDDYFFAALPVVQKRIAQGGVRLAAILNRIFGGNSRSGFRAVD

SEQ ID NO: 21300 - protein, 261 aa, Zea mays subsp. mays
  misc_feature (1)..(261): Ceres Seq. ID no. 12402879
MVCKIAESFLTKEASTAVKELLPGWAGGELAETCSWADTQRFRYRWSSPLHFADTPGDCEFDYARDCHNTKGEKNMCVVGAINNYTAALKDSSSPFDPTESLMFLAHFVGDVHQPLHCGHTDDLGGNTIVVHWYRRKTNLHHVWDVNVIETAMKDFYGNDQSTMIQAIQQNITEEWADEEKKWEACRSRTKTCADKYAAESAKLACTAYEGVDQDSTLEDDYFFAALPVVQKRIAQGGVRLAAILNRIFGGNSRSGFRAVD

SEQ ID NO: 21301 - protein, 186 aa, Zea mays subsp. mays
  misc_feature (1)..(186): Ceres Seq. ID no. 12402880
MCVVGAINNYTAALKDSSSPFDPTESLMFLAHFVGDVHQPLHCGHTDDLGGNTIVVHWYRRKTNLHHVWDVNVIETAMKDFYGNDQSTMIQAIQQNITEEWADEEKKWEACRSRTKTCADKYAAESAKLACTAYEGVDQDSTLEDDYFFAALPVVQKRIAQGGVRLAAILNRIFGGNSRSGFRAVD

SEQ ID NO: 21302 - DNA, 720 bp, Zea mays subsp. mays
  misc_feature (1)..(720): Ceres Seq. ID no. 12402889
ctcctgttcccgtccaaagtgtggcgttgtcacttgttgtcaggctaccggaccaaactgcgtgctccggcctccgtgagaggagagagggtagagccagaggagttgggcgcgcagcaggatgagcggggaggaggccgacggctccaagccccaaggaggcggtgtacactacggcaccttccaggggccgcccagctacccgcccccgcgcccgccgccgagcctctccgcccaccaccgcggcgactaccaggccgttcccgctcgagattacgaggcaggtgtgcggggacgtagccatgatcgacttccctgttgtggcattggttttggatggttcctgttcatagtcggtttcttccttggtgccattccctggtacgttggagcctttctgctgtgctgttccagagttgattacagggagaaaccaggttatgtcgcatgtgttgcagcggctatcctcgctacaattgctgttatcattggggcggcagctggaactcatgttctttgattttttttagcttacaaggctatcctcccaaactagcccttactgttatcatttgggcggcagctggaagtggaagtggaactcatgttttttttagcttacattgtattgtcattgtacatacatacagtagtacatggtgtccatgtgtcgaagaaatcgtgcaatcaacatcgtaatggatgtctgttctgcattcg

SEQ ID NO: 21303 - protein, 132 aa, Zea mays subsp. mays
  misc_feature (1)..(132): Ceres Seq. ID no. 12402890
MSGEEADGSKPQGGGVHYGTFQGPPSYPPPRPPPSLSAHHRGDYQAVPARDYEAGVRGRSHDRLPCCGIGFGWFLFIVGFFLGAIPWYVGAFLLCCSRVDYREKPGYVACVAAAILATIAVIIGAAAGTHVL

SEQ ID NO: 21304 - protein, 99 aa, Zea mays subsp. mays
  misc_feature (1)..(99): Ceres Seq. ID no. 12402891
LLFPSKVWRCHLLSGYRTKLRAPASVRGERVEPEELGAQQDERGGGRRLQAPRRRCTLRHLPGAAQLPAPAPAAEPLRPPPRRLPGRSRSRLRGRCAGT

SEQ ID NO: 21305 - protein, 83 aa, Zea mays subsp. mays
  misc_feature (1)..(83): Ceres Seq. ID no. 12402892
MCCSGYPRYNCCYHWGGSWNSCSLIFFSLQGYPPKLALTVIIWAAAGSGSGTHVFFSLHCIVIVHTYSSTWCPCVEEIVQSTS

SEQ ID NO: 21306 - DNA, 725 bp, Zea mays subsp. mays
  misc_feature (1)..(725): Ceres Seq. ID no. 12402897
attgtcatctggggcagggcaggggagggcaggagaagctatctattggccatctatccagcagccgctctccccagccccactctctccatctagagctccctaactgcaccggccgccacaccaccgtaccccgacccctcgacaacaatggccaccgtcctaggcagcccccgcgcgccggccttcttcttctcgccgtcctccctccgtgccgcgccggcgcccaccgccgtggcgctgcctgcggccaaggtgggcatcatgggccgtagcgccagcagcaggggcaggctgcgcgcgcaggccacctacaacgtgaagctgatcacgccggagggggaggtggagctgcaggtgcccgacgacgtgtacatcctggaccaggccgaggaggacggcatcgacctgccctactcctgccgcgcggggtcctgctcctcctgcgccggcaaggtcgtctccggctccgtggaccagtccgaccagagctacctcgacgacggccagatcgccgccggctgggtgctcacctgccacgcctaccccacctctgacgtcgtcatcgagacgcacaaggaggaggagctcaccggcgcataatcattcatgcccatccatctctatctctgtgggtcgtcgttgtgtgtaatttgagtacgcgcgtacacgtactgcttttgtttcatttgagcactgttcgtgtaagcgtcgagttgccctgc

SEQ ID NO: 21307 - protein, 150 aa, Zea mays subsp. mays
  misc_feature (1)..(150): Ceres Seq. ID no. 12402898
MATVLGSPRAPAFFFSPSSLRAAPAPTAVALPAAKVGIMGRSASSRGRLRAQATYNVKLITPEGEVELQVPDDVYILDQAEEDGIDLPYSCRAGSCSSCAGKVVSGSVDQSDQSYLDDGQIAAGWVLTCHAYPTSDVVIETHKEEELTGA

SEQ ID NO: 21308 - protein, 112 aa, Zea mays subsp. mays
  misc_feature (1)..(112): Ceres Seq. ID no. 12402899
MGRSASSRGRLRAQATYNVKLITPEGEVELQVPDDVYILDQAEEDGIDLPYSCRAGSCSSCAGKVVSGSVDQSDQSYLDDGQIAAGWVLTCHAYPTSDVVIETHKEEELTGA

SEQ ID NO: 21309 - protein, 90 aa, Zea mays subsp. mays
  misc_feature (1)..(90): Ceres Seq. ID no. 12402900
CHLGQGRGGQEKLSIGHLSSSRSPQPHSLHLELPNCTGRHTTVPRPLDNNGHRPRQPPRAGLLLLAVLPPCRAGAHRRGAACGQGGHHGP

SEQ ID NO: 21310 - DNA, 906 bp, Zea mays subsp. mays
  misc_feature (1)..(906): Ceres Seq. ID no. 12402928
attaatcagcaggctttggggccaaaagaaacggagaggagaaaagcgggggcggcaagcaaccacgggcggagctcggagcgtcctcctcctcccgtctataaattcccctccttttcttcctccatatataggggccatcagatccaagaagagggaagagcaccaaggaccttcggcgcccgttcaggatccacatcttcccgagcgagttcttggttgacctcttcctcttcggaccacctccaaggctcttggtgtagcttgccactctcaccaatcaagttttcatgtctgatctcgacattcagatcccaactgccttcgatcccttcgctgaggccaatgctggggactctggtgcggcagcagggtcaaaggactacgtacacgtgcgcatccagcagcgtaatggtcgcaagagcctgactaccgtccagggattgaagaaggagttcagctacagcaagatcctcaaagatctcaagaaagagttctgctgcaatggtacagtggtccaggacccagaacttggacaggtcattcagctccagggtgatcagaggaagaacgtctcgaatttcctcgtccaggccggcattgtgaagaaggagcacatcaagattcatggtttctgagcaaccgccgggtccatagcaaaccaaccctgcatgcagggccagcttattatatataatatctgaggtggagcatatctatctggctgtgtactacaagcaggcctagtacgccgcctgcgcgttcctcctattacacataacacatatagccccctccctgcgtgtatgcttgttgccgtcgtgtcgaatcttgtactacgaggctccgtcgaacctcgatggcttgcttctttatcagaacatgtttgaataaacgctatttggt

SEQ ID NO: 21311 - protein, 142 aa, Zea mays subsp. mays
  misc_feature (1)..(142): Ceres Seq. ID no. 12402929
INQQALGPKETERRKAGAASNHGRSSERPPPPVYKFPSFSSSIYRGHQIQEEGRAPRTFGARSGSTSSRASSWLTSSSSDHLQGSWCSLPLSPIKFSCLISTFRSQLPSIPSLRPMLGTLVRQQGQRTTYTCASSSVMVARA

SEQ ID NO: 21312 - protein, 115 aa, Zea mays subsp. mays
  misc_feature (1)..(115): Ceres Seq. ID no. 12402930
MSDLDIQIPTAFDPFAEANAGDSGAAAGSKDYVHVRIQQRNGRKSLTTVQGLKKEFSYSKILKDLKKEFCCNGTVVQDPELGQVIQLQGDQRKNVSNFLVQAGIVKKEHIKIHGF

SEQ ID NO: 21313 - protein, 73 aa, Zea mays subsp. mays
  misc_feature (1)..(73): Ceres Seq. ID no. 12402931
LISRLWGQKKRRGEKRGRQATTGGARSVLLLPSINSPPFLPPYIGAIRSKKREEHQGPSAPVQDPHLPERVLG

SEQ ID NO: 21314 - DNA, 718 bp, Zea mays subsp. mays
  misc_feature (1)..(718): Ceres Seq. ID no. 12403024
accttcgctaccattgcttcaccatcaccaccaccccgcggctgcagctcagcagctccagacctcaccagaggcacctaccacaccgcccgccgccgatcccgtcacccgtctcctccccgctgcggagcgtctccagccctgcccggtgcccgcccagatggcaaacgcggcgtcagggatggccgtggacgacgactgcaagcgccggttcctggagctcaaggccaagaggacgcaccgcttcatcatctacaggatcgacgagaagaagaagatggtggtggtggagcaggtgggcaagcccgtgctcggctacgacgacttcgccgccagcctccccgccaacgagtgcaggtacgccatcttcgactacgacttcgtcaccgaggagaactgccagaagagcaagatcttcttcatcgcctggtctcctgacacggcgcgcgtgaggagcaagatgatctacgccagctccaaggagaggttcaagcgggagctggacggcattcaggtggatctccaggccaccgactccgccgaggttggccttgacgtcatccagggccgtgcaagctgaggatgcccagcgatgaactgcccatgccagaggatgtatgagcatcatcagttcagatgagaacttgactgggcgggctatgtaaaaactgcatccaccgcagtgataaatcaatctaatcaatctaccaccccctcc

SEQ ID NO: 21315 - protein, 192 aa, Zea mays subsp. mays
  misc_feature (1)..(192): Ceres Seq. ID no. 12403025
PSLPLLHHHHHPAAAAQQLQTSPEAPTTPPAADPVTRLLPAAERLQPCPVPAQMANAASGMAVDDDCKRRFLELKAKRTHRFIIYRIDEKKKMVVVEQVGKPVLGYDDFAASLPANECRYAIFDYDFVTEENCQKSKIFFIAWSPDTARVRSKMIYASSKERFKRELDGIQVDLQATDSAEVGLDVIQGRAS

SEQ ID NO: 21316 - protein, 149 aa, Zea mays subsp. mays
  misc_feature (1)..(149): Ceres Seq. ID no. 12403026
LRYHCFTITTTPRLQLSSSRPHQRHLPHRPPPIPSPVSSPLRSVSSPARCPPRWQTRRQGWPWTTTASAGSWSSRPRGRTASSSTGSTRRRRWWWWSRWASPCSATTTSPPASPPTSAGTPSSTTTSSPRRTARRARSSSSPGLLTRRA

SEQ ID NO: 21317 - protein, 145 aa, Zea mays subsp. mays
  misc_feature (1)..(145): Ceres Seq. ID no. 12403027
TFATIASPSPPPRGCSSAAPDLTRGTYHTARRRSRHPSPPRCGASPALPGARPDGKRGVRDGRGRRLQAPVPGAQGQEDAPLHHLQDRREEEDGGGGAGGQARARLRRLRRQPPRQRVQVRHLRLRLRHRGELPEEQDLLHRLVS

SEQ ID NO: 21318 - protein, 139 aa, Zea mays subsp. mays
  misc_feature (1)..(139): Ceres Seq. ID no. 12403028
MANAASGMAVDDDCKRRFLELKAKRTHRFIIYRIDEKKKMVVVEQVGKPVLGYDDFAASLPANECRYAIFDYDFVTEENCQKSKIFFIAWSPDTARVRSKMIYASSKERFKRELDGIQVDLQATDSAEVGLDVIQGRAS

SEQ ID NO: 21319 - DNA, 964 bp, Zea mays subsp. mays
  misc_feature (1)..(964): Ceres Seq. ID no. 12403052
aaattctccctttccacaagaacatcacacggcgatagcaaaaccttccgtcggaggatggcttccgccggcgctggagaaggcaaggagacggggacggctgccgggagcagcctccacagcaagactctcctcaagagccaaccactgtaccagtacatactggaatccaccgtcttcccacgcgagccggactgcctgcgggagctccgcgtcgccaccgccacccaccccatggcgggcatggctgcgtcgccggacgaggtgcagctgctgcagctcctgatcgagattcttggcgtcaagaacgccatcgaggttggcgtcttcaccgggtactcgctgctcgccaccgccctcgccctccccgacgacggcaagattgtggccatcgacgttacccgcgagagctacgaccagattgggtcgccggtgatcgagaaggccggcgtggcgcacaagatcgacttccgcgtcgggctcgcgctgcccgtgctggaccagatggtttccgaggaggggaacaagggcaagttcgacttcgcgttcgtggacgcggacaaggtgaacttcctcaactaccacgagcggctgctgcagctgctcagggtcgggggcctcatcgcctacgacaacacgctgtggggcgggtccgtggccgcgccccacgacgagccgctctccgagcgggaccgcgcgctcgctgcggccaccagggagttcaacgcggccgtggccgccgatccccgcgttcacgtctgccaggtcgccatcgccgacgggctcacgctgtgccgccgcgtcgcctgatccgtatccggttatccgcctcgaaatgcagcagagctgtgggctgtcgctgacactgctgtgagctctgtgcttgaaatggccatggtctgtaatagcgaactgggcttgagtgaaaataaatccaccagcgcgctagcgtgtgtcagcgacc

SEQ ID NO: 21320 - protein, 269 aa, Zea mays subsp. mays
  misc_feature (1)..(269): Ceres Seq. ID no. 12403053
KFSLSTRTSHGDSKTFRRRMASAGAGEGKETGTAAGSSLHSKTLLKSQPLYQYILESTVFPREPDCLRELRVATATHPMAGMAASPDEVQLLQLLIEILGVKNAIEVGVFTGYSLLATALALPDDGKIVAIDVTRESYDQIGSPVIEKAGVAHKIDFRVGLALPVLDQMVSEEGNKGKFDFAFVDADKVNFLNYHERLLQLLRVGGLIAYDNTLWGGSVAAPHDEPLSERDRALAAATREFNAAVAADPRVHVCQVAIADGLTLCRRVA

SEQ ID NO: 21321 - protein, 250 aa, Zea mays subsp. mays
  misc_feature (1)..(250): Ceres Seq. ID no. 12403054
MASAGAGEGKETGTAAGSSLHSKTLLKSQPLYQYILESTVFPREPDCLRELRVATATHPMAGMAASPDEVQLLQLLIEILGVKNAIEVGVFTGYSLLATALALPDDGKIVAIDVTRESYDQIGSPVIEKAGVAHKIDFRVGLALPVLDQMVSEEGNKGKFDFAFVDADKVNFLNYHERLLQLLRVGGLIAYDNTLWGGSVAAPHDEPLSERDRALAAATREFNAAVAADPRVHVCQVAIADGLTLCRRVA

SEQ ID NO: 21322 - protein, 191 aa, Zea mays subsp. mays
  misc_feature (1)..(191): Ceres Seq. ID no. 12403055
MAGMAASPDEVQLLQLLIEILGVKNAIEVGVFTGYSLLATALALPDDGKIVAIDVTRESYDQIGSPVIEKAGVAHKIDFRVGLALPVLDQMVSEEGNKGKFDFAFVDADKVNFLNYHERLLQLLRVGGLIAYDNTLWGGSVAAPHDEPLSERDRALAAATREFNAAVAADPRVHVCQVAIADGLTLCRRVA

SEQ ID NO: 21323 - DNA, 770 bp, Zea mays subsp. mays
  misc_feature (1)..(770): Ceres Seq. ID no. 12403056
cagacttgcgcgcgcctccgctgctgcgacggcgagcccaagaaaaaatttcctctacgagcgcatggaggtgtccgctgggctccggccgccgcccgtcgctgcggcagcgtcgctccttggctgtcggtccgcgtcggtgccgccgcgcgtggcggcttcccattcggtgcggtccgtgtcccgcgcggttaagatcagagcagctgcaattaacggcctccaaagaaacagaagtaatttcgaatcattattccgctacgacaaatctgtccccgagcaggacattggagaaccatctggtctaaatctggaaaagaagaatgtcggggacaagcctccctgctcaagctgtgaagctaaaggtgccttgctgtgtgcaacgtgcgctggttcaggcttgtacgtcgactcgatactagagagccagggaatcatcgtgaaagtcagatgcctaggttgcggtggaactgggaacatcatgtgctccaaatgtggaggccgtgggcatacatgaacgcaaaagcttgcaccttgcagatcaaaggagttgactctatggagaattttctgtgttacatgttacggtgtgctgagctagctgctgtagctacatcgagacatgcttttattttgttcccctcattccgtgcttaaaagcatgatgcgtcataggatttcatgtgatgttgtaatcgtaaaggtgtaatggtatgtgaaagacacacttcgttcatggaggagaatgagagattaaattcagttgtgcc

SEQ ID NO: 21324 - protein, 171 aa, Zea mays subsp. mays
  misc_feature (1)..(171): Ceres Seq. ID no. 12403057
RLARASAAATASPRKNFLYERMEVSAGLRPPPVAAAASLLGCRSASVPPRVAASHSVRSVSRAVKIRAAAINGLQRNRSNFESLFRYDKSVPEQDIGEPSGLNLEKKNVGDKPPCSSCEAKGALLCATCAGSGLYVDSILESQGIIVKVRCLGCGGTGNIMCSKCGGRGHT

SEQ ID NO: 21325 - protein, 150 aa, Zea mays subsp. mays
  misc_feature (1)..(150): Ceres Seq. ID no. 12403058
MEVSAGLRPPPVAAAASLLGCRSASVPPRVAASHSVRSVSRAVKIRAAAINGLQRNRSNFESLFRYDKSVPEQDIGEPSGLNLEKKNVGDKPPCSSCEAKGALLCATCAGSGLYVDSILESQGIIVKVRCLGCGGTGNIMCSKCGGRGHT

SEQ ID NO: 21326 - protein, 101 aa, Zea mays subsp. mays
  misc_feature (1)..(101): Ceres Seq. ID no. 12403059
DLRAPPLLRRRAQEKISSTSAWRCPLGSGRRPSLRQRRSLAVGPRRCRRAWRLPIRCGPCPARLRSEQLQLTASKETEVISNHYSATTNLSPSRTLENHLV

SEQ ID NO: 21327 - DNA, 1099 bp, Zea mays subsp. mays
  misc_feature (1)..(1099): Ceres Seq. ID no. 12403084
acacttctccattccattgcggttctgcgagcccctacctccctgtggtgcttggccatggcggactaccacttcgtgtataaggacgtggagggggcgagcacagagtgggacgacatccagcgccgcctcgggaacttgcccccgaagccggagcccttcaagccgccgcccttcgccccgaaggttgacgccgacgagcagcccaagtccaaggaatggcttgacgtgcgcgagcccgaagagctcgaggaactagaggacgatctggatgacgaccgcttcctcgagaagtacaggaagatgaggctcgcagagctgagggaagccgcaaaagccgcgcgatttggtactatacttcccatcactggctccgacttcgtgcgggaggtatcgcaggcacaatcagatgtttgggttgtggtcttcctctacaaggatgggatacctgaatgtggattgcttcagaattgtttggaagaattggctactaggtatccagcgacgaagtttgttaaaattatctccacagactgcatccccaactacccagataggaatgttcctacaatactggtgtataacaacagtgctgtcaaagggacttatgttggtttgcagaagtttggtggaaagagatgcacacctgaatctgttgcgttagccctttgccagtcagacccggtactgaatgatgggcatggtggcagcgattcatctcggggcaatgtcttcgaaggtgttcgcaggaagttcatagagaaggttgtggcccagcatgaagagcgggaagaagaggacagtgactaagctaatacttgtgtttgttttccgcagctggcggatccaatttggttccaatgtttactgatcttatgtgatttttgtgggtgaaatttgccagagttttctgatacctggctgtgcggctgaagtttttgaaagttcacgggtcttattgcctacctttcagctgtaacacagctccattattatattgttaagagatcagagatgattagtgcacttgtataattgcatgagaaaaaatccagccaaactttgaatccacagtatttcactatcttgaacatttccc

SEQ ID NO: 21328 - protein, 269 aa, Zea mays subsp. mays
  misc_feature (1)..(269): Ceres Seq. ID no. 12403085
TLLHSIAVLRAPTSLWCLAMADYHFVYKDVEGASTEWDDIQRRLGNLPPKPEPFKPPPFAPKVDADEQPKSKEWLDVREPEELEELEDDLDDDRFLEKYRKMRLAELREAAKAARFGTILPITGSDFVREVSQAQSDVWVVVFLYKDGIPECGLLQNCLEELATRYPATKFVKIISTDCIPNYPDRNVPTILVYNNSAVKGTYVGLQKFGGKRCTPESVALALCQSDPVLNDGHGGSDSSRGNVFEGVRRKFIEKVVAQHEEREEEDSD

SEQ ID NO: 21329 - protein, 250 aa, Zea mays subsp. mays
  misc_feature (1)..(250): Ceres Seq. ID no. 12403086
MADYHFVYKDVEGASTEWDDIQRRLGNLPPKPEPFKPPPFAPKVDADEQPKSKEWLDVREPEELEELEDDLDDDRFLEKYRKMRLAELREAAKAARFGTILPITGSDFVREVSQAQSDVWVVVFLYKDGIPECGLLQNCLEELATRYPATKFVKIISTDCIPNYPDRNVPTILVYNNSAVKGTYVGLQKFGGKRCTPESVALALCQSDPVLNDGHGGSDSSRGNVFEGVRRKFIEKVVAQHEEREEEDSD

SEQ ID NO: 21330 - protein, 168 aa, Zea mays subsp. mays
  misc_feature (1)..(168): Ceres Seq. ID no. 12403087
MRLAELREAAKAARFGTILPITGSDFVREVSQAQSDVWVVVFLYKDGIPECGLLQNCLEELATRYPATKFVKIISTDCIPNYPDRNVPTILVYNNSAVKGTYVGLQKFGGKRCTPESVALALCQSDPVLNDGHGGSDSSRGNVFEGVRRKFIEKVVAQHEEREEEDSD

SEQ ID NO: 21331 - DNA, 751 bp, Zea mays subsp. mays
  misc_feature (1)..(751): Ceres Seq. ID no. 12403104
acagccccgactgggctatattcgttctcccggcgtgctccgtctctcctctcagcgcgacgattacggtaacgccgtcgccgccctacggctcagatcttcgtcgtcatcttctccggcaacgagcacccaaagatggtggtccttcaaccagatcggttcctgagcgagctgacgagcatgtacgagcggagcacgggagaagggctccgtctgggtcaccatgaagcgatcaactctcaagggcaaggcacagttgcggaagatggagaataaggggcaggaggtagagcacaggtgcctcgtccgcgcctccaatggcaagaagaacatctccacctcggtttctctaaaggagtacacaaagtttcaagcttcatacgcaacagttcttaaggcccatatgcatgctctgaagaaaagggagaggaaagacaagaagaagactgcagatgctgagaaggcaattgagaccgcacccaagaagcagaagaaagcatnttcaaagaaatnttcagggtccaagtcataaggcgctcacagaactcagtgtgtcttctcctttatgttgtttaccgccagactaattagagtgtcgtgaagttttacttatctggtttttattcgaattcgtgtctggaagatgaaagcctgtgaatacacctttatagagccgtgtcatcgatgctaacattttttgaagcagagttttgaggtgaatgtgaggcgctgtgctgccctgattggcatt

SEQ ID NO: 21332 - protein, 102 aa, Zea mays subsp. mays
  misc_feature (1)..(102): Ceres Seq. ID no. 12403105
  misc_feature (93)..(93): Xaa is any aa, unknown or other
  misc_feature (97)..(97): Xaa is any aa, unknown or other
MKRSTLKGKAQLRKMENKGQEVEHRCLVRASNGKKNISTSVSLKEYTKFQASYATVLKAHMHALKKRERKDKKKTADAEKAIETAPKKQKKAXSKKXSGSKS

SEQ ID NO: 21333 - protein, 88 aa, Zea mays subsp. mays
  misc_feature (1)..(88): Ceres Seq. ID no. 12403106
  misc_feature (79)..(79): Xaa is any aa, unknown or other
  misc_feature (83)..(83): Xaa is any aa, unknown or other
MENKGQEVEHRCLVRASNGKKNISTSVSLKEYTKFQASYATVLKAHMHALKKRERKDKKKTADAEKAIETAPKKQKKAXSKKXSGSKS

SEQ ID NO: 21334 - protein, 74 aa, Zea mays subsp. mays
  misc_feature (1)..(74): Ceres Seq. ID no. 12403107
SPDWAIFVLPACSVSPLSATITVTPSPPYGSDLRRHLLRQRAPKDGGPSTRSVPERADEHVRAEHGRRAPSGSP

SEQ ID NO: 21335 - DNA, 909 bp, Zea mays subsp. mays
  misc_feature (1)..(909): Ceres Seq. ID no. 12403151
ctccgctccgcagctcatggcttcctcggtctccctccgtggcgccatcctccagcgcccccacctcaggccccgccccgacgcccgccgcgcgcccacgacgaggcgccgcgccgtgcctgcaaagatctgctgcatcggatgggaaccccgagggcatcctgggcgcgccgcagggcggccacatcgcgcgcctcgagttccgccgccgcctcgagagggactccgaggcgcgcgaggacttcgagcgccaggtgcgcgaggagaaggagcggcggcgcagcgagcgcgaggcgcgggtgatcccggacacggacgccggcctcgtcgagttcttcctcgacaccgacgcgcgcgagatcgagatcgagatcggcaggctgcggcccaggctcagccaggacttcttcggccacgtctcgcgcgagatagcgcagatcaaatttgcagtcaccaggacagcggagatggaagacagactgatcgagctggaggcgatgcagaaggttcttctcgagggagttgaggcgtacgacaagttgcagaacgaccttgttacagcgaaagaacggctcatgaagattctgcagtcaagtgacagaaaatcgacactgctggaaatggtggagcggaacgagctcaatatatccatactaacacttctcgatgagaacattgcgagcgcgaagacgagtaatcaggatgaggcggccgctttcatggaggacgtgagatcatctcttgtgaaatatataacaatatagatctgggacgcttttacataccaatggttcgttcattgcttgggcatggtttgatcgtttttagaagtgtggttgctgttcgttcattgtgaaatatataacaatataaatctggattatttccgcctgtttgtagttgggctgc

SEQ ID NO: 21336 - protein, 253 aa, Zea mays subsp. mays
  misc_feature (1)..(253): Ceres Seq. ID no. 12403152
PLRSSWLPRSPSVAPSSSAPTSGPAPTPAARPRRGAAPCLQRSAASDGNPEGILGAPQGGHIARLEFRRRLERDSEAREDFERQVREEKERRRSEREARVIPDTDAGLVEFFLDTDAREIEIEIGRLRPRLSQDFFGHVSREIAQIKFAVTRTAEMEDRLIELEAMQKVLLEGVEAYDKLQNDLVTAKERLMKILQSSDRKSTLLEMVERNELNISILTLLDENIASAKTSNQDEAAAFMEDVRSSLVKYITI

SEQ ID NO: 21337 - protein, 174 aa, Zea mays subsp. mays
  misc_feature (1)..(174): Ceres Seq. ID no. 12403153
SAPQLMASSVSLRGAILQRPHLRPRPDARRAPTTRRRAVPAKICCIGWEPRGHPGRAAGRPHRAPRVPPPPREGLRGARGLRAPGARGEGAAAQRARGAGDPGHGRRPRRVLPRHRRARDRDRDRQAAAQAQPGLLRPRLARDSADQICSHQDSGDGRQTDRAGGDAEGSSRGS

SEQ ID NO: 21338 - protein, 169 aa, Zea mays subsp. mays
  misc_feature (1)..(169): Ceres Seq. ID no. 12403154
MASSVSLRGAILQRPHLRPRPDARRAPTTRRRAVPAKICCIGWEPRGHPGRAAGRPHRAPRVPPPPREGLRGARGLRAPGARGEGAAAQRARGAGDPGHGRRPRRVLPRHRRARDRDRDRQAAAQAQPGLLRPRLARDSADQICSHQDSGDGRQTDRAGGDAEGSSRGS

SEQ ID NO: 21339 - DNA, 1061 bp, Zea mays subsp. mays
  misc_feature (1)..(1061): Ceres Seq. ID no. 12403200
aacattaggtccagtccacccctccagccaacccaagtctccatccacaagagctcgagaacctggccacgagcccatgacggcaagaagcggtcatggccggtgatgaggaggaccacctagcagacgcgccgcgggtggtgggcgtcctctccgcgctcctggaacgtgtcgtggagcgcaacgacgcggttggccgatgagctcgccgccgggaccgagtccgcggcgccgccgtcggcgttccgggcgacggcgaggcccgacatctcggtgcgctcgtacatggcgcgcatcgcgcggttcgcagggtgcagcccggcttgctacgtcgtggcgtacgtctacctcgaccgcctcctgcgccgcgcccgcagcgcgcccgccgtggactcgtacaccgtgcaccgnctcctcatcaccgccgtgctcgcggccgtcaagttcatggatgacgtatgctacaacaacgcctacttcgccagggtcggcggcatcagcctgtcggagatgaactacctggaggtggacttcctcttcgccgtcgggttcgacctcaacgtgtcgccggagacgttcggccactactgcacggtcctccgggccgagatgctgtacctggagctggagggtcctcctcctccagccgccagtacaagtctgcacaggtgctgcttgtcagaagacgacgacggtagcagcagcaccagcagcagctagctgcatagagacaggtacagcggttgcttccaagcaagcaaccatgtatgaatgtgtccgtgtacactgtacagtacagacatgcttgcttgaaagcaaacacggagtacgtgacgtaggcatctgcgtgtgatcggtttgctatctggcggctggcgcttagttgtttttagctttgttattaggtaatctgttgctcttgtagtcttgtatagctgcattgctgttgttcatgtggaaatcggaaaaccgtaaggaacggtataaattgcagtcttggggcagtgtaattgttttcttgtccagcagtttatccatagtttatctaaaatattgttttt

SEQ ID NO: 21340 - protein, 144 aa, Zea mays subsp. mays
  misc_feature (1)..(144): Ceres Seq. ID no. 12403201
  misc_feature (42)..(42): Xaa is any aa, unknown or other
MARIARFAGCSPACYVVAYVYLDRLLRRARSAPAVDSYTVHXLLITAVLAAVKFMDDVCYNNAYFARVGGISLSEMNYLEVDFLFAVGFDLNVSPETFGHYCTVLRAEMLYLELEGPPPPAASTSLHRCCLSEDDDGSSSTSSS

SEQ ID NO: 21341 - protein, 104 aa, Zea mays subsp. mays
  misc_feature (1)..(104): Ceres Seq. ID no. 12403202
  misc_feature (71)..(71): Xaa is any aa, unknown or other
MSSPPGPSPRRRRRRSGRRRGPTSRCARTWRASRGSQGAARLATSWRTSTSTASCAAPAARPPWTRTPCTXSSSPPCSRPSSSWMTYATTTPTSPGSAASACRR

SEQ ID NO: 21342 - protein, 90 aa, Zea mays subsp. mays
  misc_feature (1)..(90): Ceres Seq. ID no. 12403203
MDDVCYNNAYFARVGGISLSEMNYLEVDFLFAVGFDLNVSPETFGHYCTVLRAEMLYLELEGPPPPAASTSLHRCCLSEDDDGSSSTSSS

SEQ ID NO: 21343 - DNA, 997 bp, Zea mays subsp. mays
  misc_feature (1)..(997): Ceres Seq. ID no. 12403223
aaaaatagaaagaaaaaggaaaaaaagaaaaaccagacagccgccctaacggccaaacctccttggacacgactcgccgcacccatcccaatccgccgccgctgccatggccgacgagattgacacgaggccggctcccgcgggctcccgcggccgtcctgcgcacgctaccgaggacgacgacagggaggagggcgagatcgccaccgacgccccctcgcccgccctccccgccgcgcacccgctcgagcactcgtggaccttctggttcgacaacccgcacggcaagaacaagatggccgcctgggggagctccatacgacccatccacaccttctccaccgtagaggacttctggggcctctacaataatatccatcaccctagcaagttgatcggcggagctgacttccattgcttcaagaacaagattgagccaaaatgggaagatcctatttgtgctaatggcggtaaatggaccatcagctgtggaagaggaaaatctgacacgctttggctgcacaccctgttggctatgatcggcgaacaattcgactatggtgatgaaatttgtggagcagtggtcagcgtgcgtagcaagcaggaaagaatagctatctggacaaaaaatgctgctaatgaagctgctcagataagcatcgggaagcagtggaaggaatttctggattacaaggactccattggattcattgttcatgacgatgcaaagaagatggacaagggactgaagaaccgttacacggtttgatcccagagagtagtagcatgtagggtggttctttccgattctgtagcaccttgcagagtgtgttgaaggttctctatttgctgaggagttgcttaagcataatctaacatgatgtcgaatgtattcctgtatgttccataggtcagtcacctaggtgttgtttttgtctcagctttgtgtatttggagccctggtttctaataactaaataactagataaggcatgtc

SEQ ID NO: 21344 - protein, 220 aa, Zea mays subsp. mays
  misc_feature (1)..(220): Ceres Seq. ID no. 12403224
MADEIDTRPAPAGSRGRPAHATEDDDREEGEIATDAPSPALPAAHPLEHSWTFWFDNPHGKNKMAAWGSSIRPIHTFSTVEDFWGLYNNIHHPSKLIGGADFHCFKNKIEPKWEDPICANGGKWTISCGRGKSDTLWLHTLLAMIGEQFDYGDEICGAVVSVRSKQERIAIWTKNAANEAAQISIGKQWKEFLDYKDSIGFIVHDDAKKMDKGLKNRYTV

SEQ ID NO: 21345 - protein, 157 aa, Zea mays subsp. mays
  misc_feature (1)..(157): Ceres Seq. ID no. 12403225
MAAWGSSIRPIHTFSTVEDFWGLYNNIHHPSKLIGGADFHCFKNKIEPKWEDPICANGGKWTISCGRGKSDTLWLHTLLAMIGEQFDYGDEICGAVVSVRSKQERIAIWTKNAANEAAQISIGKQWKEFLDYKDSIGFIVHDDAKKMDKGLKNRYTV

SEQ ID NO: 21346 - DNA, 1251 bp, Zea mays subsp. mays
  misc_feature (1)..(1251): Ceres Seq. ID no. 12403316
actgacagctcgccgaggggccgcgccgcgctcgagacccgtcgatggcgaggcggagcctggcggtcgacgcaaccgcaggcgccgcatcccgggttcggttcgcgcccacctccaataacctgctcgtctcctcatgggattcggggctgcggttgtacgatgccgacgagggcacgctcagggtcaacgtggagtcagaggcggcattcctcgactgctgcttcgaggatgagtctgcagcgtttgcctgcggctctgatggatctgtgagaaggtacgacttccactcaggttcgcaggatacggtggggctccatgaagatgcactagcctgcattgagttctcttcactgaccggtcagattatgacaggcagccttgacaagaagctaaagctttgggattcaaaaacaagaaatgtaagcccgagcggcaccataaccttaaattcagatgtggcctcaatttctatatgcggcatttacatattagctgcagttgagagaaatgtttatctttatgacatgaggaatctaacaagaccagttgatgaaaaagactgtcctctggattatcaaattcgatgccttcatacttctctagagtggaatgcttatgttgctggctctgtggatggagttgttgcattgaagtatcttgatcgtggaacagatagagatttgggatatgcatttcgttgtcatccaaattccagaaacggaaaatggaatctggtccctgtaaattgcatctcagttcatccctgcaacagaactttcgttacgggagatgataaaggatgcactattgtttgggatgctcaattgaaaaagaagctgattgagcttccaatgtatttgggcagtgtggcgtcagtggcatacaaccataatggccaacttctggcggttgcctcaaactattttttagaagtggataaagaggagcaacaccaccaggtattcattgaaactgtggagaacttcaaaggcaagtcccgtgtgggatagagccttctaacaaaacatgttctgttcatctgttgtattgtattttgtctaccatacatgttaaaggtcaccaagatgtgacagcatgttgtattatgttgtatgactaagcattttttttaggaaacgacataatatggctaagcaatacttgtatatattggttacatctagtctgagacagctgtggtgtgttgtaactcttttgagcttttgcaaccagtattgctgttctggt

SEQ ID NO: 21347 - protein, 322 aa, Zea mays subsp. mays
  misc_feature (1)..(322): Ceres Seq. ID no. 12403317
MARRSLAVDATAGAASRVRFAPTSNNLLVSSWDSGLRLYDADEGTLRVNVESEAAFLDCCFEDESAAFACGSDGSVRRYDFHSGSQDTVGLHEDALACIEFSSLTGQIMTGSLDKKLKLWDSKTRNVSPSGTITLNSDVASISICGIYILAAVERNVYLYDMRNLTRPVDEKDCPLDYQIRCLHTSLEWNAYVAGSVDGVVALKYLDRGTDRDLGYAFRCHPNSRNGKWNLVPVNCISVHPCNRTFVTGDDKGCTIVWDAQLKKKLIELPMYLGSVASVAYNHNGQLLAVASNYFLEVDKEEQHHQVFIETVENFKGKSRVG

SEQ ID NO: 21348 - protein, 214 aa, Zea mays subsp. mays
  misc_feature (1)..(214): Ceres Seq. ID no. 12403318
MTGSLDKKLKLWDSKTRNVSPSGTITLNSDVASISICGIYILAAVERNVYLYDMRNLTRPVDEKDCPLDYQIRCLHTSLEWNAYVAGSVDGVVALKYLDRGTDRDLGYAFRCHPNSRNGKWNLVPVNCISVHPCNRTFVTGDDKGCTIVWDAQLKKKLIELPMYLGSVASVAYNHNGQLLAVASNYFLEVDKEEQHHQVFIETVENFKGKSRVG

SEQ ID NO: 21349 - protein, 161 aa, Zea mays subsp. mays
  misc_feature (1)..(161): Ceres Seq. ID no. 12403319
MRNLTRPVDEKDCPLDYQIRCLHTSLEWNAYVAGSVDGVVALKYLDRGTDRDLGYAFRCHPNSRNGKWNLVPVNCISVHPCNRTFVTGDDKGCTIVWDAQLKKKLIELPMYLGSVASVAYNHNGQLLAVASNYFLEVDKEEQHHQVFIETVENFKGKSRVG

SEQ ID NO: 21350 - DNA, 721 bp, Zea mays subsp. mays
  misc_feature (1)..(721): Ceres Seq. ID no. 12403367
acggagtcaccacgaacctatcgactttttatctccagatccagattagctaccacggcaccgccagcccggacggctataaagacgaggcccacctcgaaatcgacggcgatgaagaagaccagttcccctctcctgatcgtcctgttcctcacagcagcagccatggcggccgagccggagaagcaggcggcccccgcggcacaggagacggccgtgcacatcgtgtacgttgaccgccccgaggacgccgaccctgaggagttccacatccgcaccctcacccccgtcctcggcagcgaacagaaggccagggacgcagtgctctaccactacaagaacgccgccagcggcttctccgcgaagctcaccccccagcaggtcaaggatctcaaggagcaaccaggtgttctccaggttgtgccgagccagacttaccagctacatggtcctgggtctggcactcaccagggcacgacacacaccttgggccttatgtgaaggcgtatgagaatcaagaagactgtgtttagtatggctgtatggcacaggtctgacgaatgtgtatagtacagtactatgtaagaataagggacgtatcgtctatatactgctttgcgcatgttcagccctgttctaaagcttgtaatgcaccaatgcgtatgtttcaatacaatgacaagtatgctatcttgtttggtgcttgttcgatccgtgtttc

SEQ ID NO: 21351 - protein, 166 aa, Zea mays subsp. mays
  misc_feature (1)..(166): Ceres Seq. ID no. 12403368
TESPRTYRLFISRSRLATTAPPARTAIKTRPTSKSTAMKKTSSPLLIVLFLTAAAMAAEPEKQAAPAAQETAVHIVYVDRPEDADPEEFHIRTLTPVLGSEQKARDAVLYHYKNAASGFSAKLTPQQVKDLKEQPGVLQVVPSQTYQLHGPGSGTHQGTTHTLGLM

SEQ ID NO: 21352 - protein, 129 aa, Zea mays subsp. mays
  misc_feature (1)..(129): Ceres Seq. ID no. 12403369
MKKTSSPLLIVLFLTAAAMAAEPEKQAAPAAQETAVHIVYVDRPEDADPEEFHIRTLTPVLGSEQKARDAVLYHYKNAASGFSAKLTPQQVKDLKEQPGVLQVVPSQTYQLHGPGSGTHQGTTHTLGLM

SEQ ID NO: 21353 - protein, 111 aa, Zea mays subsp. mays
  misc_feature (1)..(111): Ceres Seq. ID no. 12403370
MAAEPEKQAAPAAQETAVHIVYVDRPEDADPEEFHIRTLTPVLGSEQKARDAVLYHYKNAASGFSAKLTPQQVKDLKEQPGVLQVVPSQTYQLHGPGSGTHQGTTHTLGLM

SEQ ID NO: 21354 - DNA, 765 bp, Zea mays subsp. mays
  misc_feature (1)..(765): Ceres Seq. ID no. 12403404
ttccaaaacccaacgcggcaaacggcttcctcatccccctcccctcgccatggccgtccccacctccacctcctccccgctccccctcctcttcctccatcgctgcaccgcaaactctagcccctcggttctctccttcccgtcctccctccgcggcgcgtccctccgctcccgggccgcggccgcaccgcccgcagagaccctctctgccgacggcatccccgacgcgccaccggaaggggcgggaacgggaattccgttgccatcgtcgattggggatgatggggagcagcttgcacccaagcagaagatcagaatcaagctgcggtcctactgggtgccgttgatagaggactcgtgcaagaagataaccgaagctgccaaaacaaccaacgcaaagaccatgggtcccgttcctctgcccactaagaggagagtctattgtgtgcttaactctcctcacgtgcacaaggactcacggttccatttcgagatccggacgcatcagcggctgattgatatcatgtatccaactgcccaaacaattgattcgttgatgcaactccagctccctgccggtgtggatgttgaggttaagctatgattctgttggagctgaacttttcgaagtttgatgtaatgaggtattcattttctgcagcttttctctgggactgaaagaaatgtagtgcctgtactaggaaagaagatgttcagaattgaatgtacttgatttgaagtatatcagatgatatggttcatgcc

SEQ ID NO: 21355 - protein, 200 aa, Zea mays subsp. mays
  misc_feature (1)..(200): Ceres Seq. ID no. 12403405
SKTQRGKRLPHPPPLAMAVPTSTSSPLPLLFLHRCTANSSPSVLSFPSSLRGASLRSRAAAAPPAETLSADGIPDAPPEGAGTGIPLPSSIGDDGEQLAPKQKIRIKLRSYWVPLIEDSCKKITEAAKTTNAKTMGPVPLPTKRRVYCVLNSPHVHKDSRFHFEIRTHQRLIDIMYPTAQTIDSLMQLQLPAGVDVEVKL

SEQ ID NO: 21356 - protein, 184 aa, Zea mays subsp. mays
  misc_feature (1)..(184): Ceres Seq. ID no. 12403406
MAVPTSTSSPLPLLFLHRCTANSSPSVLSFPSSLRGASLRSRAAAAPPAETLSADGIPDAPPEGAGTGIPLPSSIGDDGEQLAPKQKIRIKLRSYWVPLIEDSCKKITEAAKTTNAKTMGPVPLPTKRRVYCVLNSPHVHKDSRFHFEIRTHQRLIDIMYPTAQTIDSLMQLQLPAGVDVEVKL

SEQ ID NO: 21357 - protein, 114 aa, Zea mays subsp. mays
  misc_feature (1)..(114): Ceres Seq. ID no. 12403407
PKPNAANGFLIPLPSPWPSPPPPPPRSPSSSSIAAPQTLAPRFSPSRPPSAARPSAPGPRPHRPQRPSLPTASPTRHRKGREREFRCHRRLGMMGSSLHPSRRSESSCGPTGCR

SEQ ID NO: 21358 - DNA, 621 bp, Zea mays subsp. mays
  misc_feature (1)..(621): Ceres Seq. ID no. 12403452
atgagaggagagaagaaaggccatcagtgatgaacgctttcgagttaatctctacgtctcagggcctcaatctcgggacgctcttcgagaagcaaacgggttctgttaagcgagaaacaaggtttgcgtcaaggcttcctgcaaatgagatactgtcgaagatcgaagcagcagcgggacccatgggcttcaacgttcagaagcgcaactataagctgaagctgcaaggggagaaccctggaaggaaaggtcagctggccatcgcaacagaggttttcgaggtcacgccttccctgtacatggttgagctgcgcaagtccaacggcgacacccttgaattccacaagttctaccacaacatctcaaatggactgaaggacgtgatgtggaagccggagagcggcatcgtggaaggcgacgaggcgcggcaaaggaggtccccgtgatgggggtctgcaaccaagttttagaagtagcgctgcagataactagtcatcagggagcctggcgggaactgagcctgtgactgcttcctgtttgtttggatgttttgtttttgtctaaggtgctttctgactaaagtatgctggataatgtgaatgaagaatgtgcagagttttc

SEQ ID NO: 21359 - protein, 147 aa, Zea mays subsp. mays
  misc_feature (1)..(147): Ceres Seq. ID no. 12403453
ERREERPSVMNAFELISTSQGLNLGTLFEKQTGSVKRETRFASRLPANEILSKIEAAAGPMGFNVQKRNYKLKLQGENPGRKGQLAIATEVFEVTPSLYMVELRKSNGDTLEFHKFYHNISNGLKDVMWKPESGIVEGDEARQRRSP

SEQ ID NO: 21360 - protein, 138 aa, Zea mays subsp. mays
  misc_feature (1)..(138): Ceres Seq. ID no. 12403454
MNAFELISTSQGLNLGTLFEKQTGSVKRETRFASRLPANEILSKIEAAAGPMGFNVQKRNYKLKLQGENPGRKGQLAIATEVFEVTPSLYMVELRKSNGDTLEFHKFYHNISNGLKDVMWKPESGIVEGDEARQRRSP

SEQ ID NO: 21361 - protein, 87 aa, Zea mays subsp. mays
  misc_feature (1)..(87): Ceres Seq. ID no. 12403455
MGFNVQKRNYKLKLQGENPGRKGQLAIATEVFEVTPSLYMVELRKSNGDTLEFHKFYHNISNGLKDVMWKPESGIVEGDEARQRRSP

SEQ ID NO: 21362 - DNA, 1035 bp, Zea mays subsp. mays
  misc_feature (1)..(1035): Ceres Seq. ID no. 12403456
aacatataaattacgtgctccctcttcgccgccgtctctcgcgccgccacttccctcccgacccactcgcccaaaaccgtagcgccctcgcctgctcgccgccgccgtcgttgcgagctccccatcttcctccgttaaccatggcgacccagatcagcaagaagaagaagttcgtcagcgacggcgtgttctacgccgagctcaatgagatgctgacgcgggagctcgcggaggacggctactccggcgtggaggtgcgtgtcacaccgatgcgcacggagatcatcatccgcgcaacgcgcacgcagaacgtgctcggcgagaagggccgcaggatcagggagctcacgtctgtggtccagaagaggttcaacttccccgagaacggcgtcgagctctacgccgagaaggtcgtcaaccgcggcctctgcgccatcgcgcaggctgagtccctccgctacaagctcctcggaggccttgccgtccggagggcctgctatggtgttcttcgctttgttatggagagtggtgccgagggttgtgaggtcattgtgagtggaaagctcagggctcaaagagccaagtccatgaagttcaaggatggctacatgatctcatctggtcagccagtgaatgagtacatcgactcagctgtgagacacgtcctcctcagacagggtgttctgggtatcaaggtgaagatcatgcttgactgggacccgaagggcaaggttggcccgatcacccctcttccggacctggtgaccatccataccccgaaggaggaggacgagctgcgccctcctgtcttggcagctgaggtctaaggtcccaacagcgtcctcgaaatggcagtttgatcgggtcctagctaggtttgatcttatgataagggcagtgctaagacagttcgttccgtgtcacttctgtttaaaattaagttttgccgagacaagctatatgtaccggatgaaagtgtggttccttattgtatgctctggaattttatttttggtatgtttatttttttgccct

SEQ ID NO: 21363 - protein, 274 aa, Zea mays subsp. mays
  misc_feature (1)..(274): Ceres Seq. ID no. 12403457
HINYVLPLRRRLSRRHFPPDPLAQNRSALACSPPPSLRAPHLPPLTMATQISKKKKFVSDGVFYAELNEMLTRELAEDGYSGVEVRVTPMRTEIIIRATRTQNVLGEKGRRIRELTSVVQKRFNFPENGVELYAEKVVNRGLCAIAQAESLRYKLLGGLAVRRACYGVLRFVMESGAEGCEVIVSGKLRAQRAKSMKFKDGYMISSGQPVNEYIDSAVRHVLLRQGVLGIKVKIMLDWDPKGKVGPITPLPDLVTIHTPKEEDELRPPVLAAEV

SEQ ID NO: 21364 - protein, 228 aa, Zea mays subsp. mays
  misc_feature (1)..(228): Ceres Seq. ID no. 12403458
MATQISKKKKFVSDGVFYAELNEMLTRELAEDGYSGVEVRVTPMRTEIIIRATRTQNVLGEKGRRIRELTSVVQKRFNFPENGVELYAEKVVNRGLCAIAQAESLRYKLLGGLAVRRACYGVLRFVMESGAEGCEVIVSGKLRAQRAKSMKFKDGYMISSGQPVNEYIDSAVRHVLLRQGVLGIKVKIMLDWDPKGKVGPITPLPDLVTIHTPKEEDELRPPVLAAEV

SEQ ID NO: 21365 - protein, 205 aa, Zea mays subsp. mays
  misc_feature (1)..(205): Ceres Seq. ID no. 12403459
MLTRELAEDGYSGVEVRVTPMRTEIIIRATRTQNVLGEKGRRIRELTSVVQKRFNFPENGVELYAEKVVNRGLCAIAQAESLRYKLLGGLAVRRACYGVLRFVMESGAEGCEVIVSGKLRAQRAKSMKFKDGYMISSGQPVNEYIDSAVRHVLLRQGVLGIKVKIMLDWDPKGKVGPITPLPDLVTIHTPKEEDELRPPVLAAEV

SEQ ID NO: 21366 - DNA, 725 bp, Zea mays subsp. mays
  misc_feature (1)..(725): Ceres Seq. ID no. 12403489
aaaccaacatctgggcaaggaacagataaggactgcaaaccttgtcagggcttcggggacagccaaagaagacggacggacccagtgaggcgagcacgggcgctcaccggcgatggcgacgagggcatgggtggccgcggcggtggccttgaaccctcaactgctgcctctccgctcctgctcgcccacgcagtcggtctccccagcgcagcgctcgccgtcgatggggctccggctgcgcagcggccggccgtgcctggggaagttcgtgtgccgccgcgccaagaacgcgggatacgaggactacaagttcccggaccccatcccggagttcgccgagcaggagacgagcaagttcagggagcacatggcgtggcggctggagcagaagaaagaggactacttcggggaccatgtcgaggagatcgttgacgtctgcaccgagatcttggggacattcctggagaacgattaccgtggaccagggacgctcctggttcacccgttcctggacatgaagggcgagatcaaggagagggggctccccggcgcacctcaggcggcacgggcggcgatagcatgggccgaaaagaacgtggataaggactggaaggcctggactggggaatactagcactagttatgttgtttgacgttcccagcagctagctattgtgacacaaaattttgtccgcttcaaatgttcctctgtctgtcgtcatgcc

SEQ ID NO: 21367 - protein, 173 aa, Zea mays subsp. mays
  misc_feature (1)..(173): Ceres Seq. ID no. 12403490
MATRAWVAAAVALNPQLLPLRSCSPTQSVSPAQRSPSMGLRLRSGRPCLGKFVCRRAKNAGYEDYKFPDPIPEFAEQETSKFREHMAWRLEQKKEDYFGDHVEEIVDVCTEILGTFLENDYRGPGTLLVHPFLDMKGEIKERGLPGAPQAARAAIAWAEKNVDKDWKAWTGEY

SEQ ID NO: 21368 - protein, 143 aa, Zea mays subsp. mays
  misc_feature (1)..(143): Ceres Seq. ID no. 12403491
KPTSGQGTDKDCKPCQGFGDSQRRRTDPVRRARALTGDGDEGMGGRGGGLEPSTAASPLLLAHAVGLPSAALAVDGAPAAQRPAVPGEVRVPPRQERGIRGLQVPGPHPGVRRAGDEQVQGAHGVAAGAEERGLLRGPCRGDR

SEQ ID NO: 21369 - protein, 136 aa, Zea mays subsp. mays
  misc_feature (1)..(136): Ceres Seq. ID no. 12403492
MGLRLRSGRPCLGKFVCRRAKNAGYEDYKFPDPIPEFAEQETSKFREHMAWRLEQKKEDYFGDHVEEIVDVCTEILGTFLENDYRGPGTLLVHPFLDMKGEIKERGLPGAPQAARAAIAWAEKNVDKDWKAWTGEY

SEQ ID NO: 21370 - DNA, 1124 bp, Zea mays subsp. mays
  misc_feature (1)..(1124): Ceres Seq. ID no. 12403543
actgttgcagctgcaaaatactgttgcagctgcaatcactagagagaaaatactgtagaagccgcagccgcagtcggattaaagccgcagcgaacaagcccatatatcgccgtcagagccatcaccccgatggatccctgcgcttcgtgctcaggttcagcggaaactgagccgtgagcaccgccgccgccaccanntttgcgtttgcggtgacgacacgacaccaataatggcggcggcaaggacaaggagcctgctcgcggcggcgttcctggcgctggcggcggtgccggcggtgctctgccaggcgccaggccccgcggcggcggcgccgnccaacaagggcccgccgaacgttacggcgatcctggagaagnncgggcagtacnngacgttcatncggctgatgaagtngacgcagcagnacacncagctgaacgnccagctgaacaactcgttcggcagcgggtacacggtgttcgcgcccaccgacagcgccttctccagcctcaagcccggcacgctgaacaagctgtcgcagcagnagcaggtgtcgntggtgcagtaccacgtcctgccgcagttctactcgctcgactnnttcgagaccgccagcaaccccgtgcgtacgcaggcgtcnngctcnnacgggccctacacgctcaacatcaccgccgacagcagcggccaggccaacgtgtccacgggcctcgtcgccaccngcgtcnnccannccctgcgcgcgcagcagcccctcgccgtctactccgtcgaccaggtgctgctggccaacgacctgttcggcgtcaagcccccggcgtccgcgccgcccgccgccaggaagccggccaagggcgggtccgtcgccgaggcgcncgccgccggctcgntgacgcgccgccctccgnncggccgcgcgcggcgccagcaggaccgccggatggagctcgctgcnccgctctgctgttcctggccgccgcggcctccttcctgtccctgttgtgagaatgtaaacatggttcgtgcttgtcgagcacaaaagagctcgtcttcttgcggtttgtttctcttctggagttctagtaacctggatctgtccctgaatgttgatgaagccagctgtt

SEQ ID NO: 21371 - protein, 298 aa, Zea mays subsp. mays
  misc_feature (1)..(298): Ceres Seq. ID no. 12403544
  misc_feature (36)..(36): Xaa is any aa, unknown or other
  misc_feature (50)..(50): Xaa is any aa, unknown or other
  misc_feature (54)..(54): Xaa is any aa, unknown or other
  misc_feature (57)..(57): Xaa is any aa, unknown or other
  misc_feature (62)..(62): Xaa is any aa, unknown or other
  misc_feature (66)..(66): Xaa is any aa, unknown or other
  misc_feature (67)..(67): Xaa is any aa, unknown or other
  misc_feature (71)..(71): Xaa is any aa, unknown or other
  misc_feature (106)..(106): Xaa is any aa, unknown or other
  misc_feature (110)..(110): Xaa is any aa, unknown or other
  misc_feature (124)..(124): Xaa is any aa, unknown or other
  misc_feature (137)..(137): Xaa is any aa, unknown or other
  misc_feature (138)..(138): Xaa is any aa, unknown or other
  misc_feature (139)..(139): Xaa is any aa, unknown or other
  misc_feature (140)..(140): Xaa is any aa, unknown or other
  misc_feature (165)..(165): Xaa is any aa, unknown or other
  misc_feature (167)..(167): Xaa is any aa, unknown or other
  misc_feature (168)..(168): Xaa is any aa, unknown or other
  misc_feature (169)..(169): Xaa is any aa, unknown or other
  misc_feature (216)..(216): Xaa is any aa, unknown or other
  misc_feature (221)..(221): Xaa is any aa, unknown or other
  misc_feature (227)..(227): Xaa is any aa, unknown or other
  misc_feature (242)..(242): Xaa is any aa, unknown or other
MAAARTRSLLAAAFLALAAVPAVLCQAPGPAAAAPXNKGPPNVTAILEKXGQYXTFXRLMKXTQQXXQLNXQLNNSFGSGYTVFAPTDSAFSSLKPGTLNKLSQQXQVSXVQYHVLPQFYSLDXFETASNPVRTQAXXXXGPYTLNITADSSGQANVSTGLVATXVXXXLRAQQPLAVYSVDQVLLANDLFGVKPPASAPPAARKPAKGGSVAEAXAAGSXTRRPPXGRARRQQDRRMELAXPLCCSWPPRPPSCPCCENVNMVRACRAQKSSSSCGLFLFWSSSNLDLSLNVDEASC

SEQ ID NO: 21372 - protein, 239 aa, Zea mays subsp. mays
  misc_feature (1)..(239): Ceres Seq. ID no. 12403545
  misc_feature (3)..(3): Xaa is any aa, unknown or other
  misc_feature (7)..(7): Xaa is any aa, unknown or other
  misc_feature (8)..(8): Xaa is any aa, unknown or other
  misc_feature (12)..(12): Xaa is any aa, unknown or other
  misc_feature (47)..(47): Xaa is any aa, unknown or other
  misc_feature (51)..(51): Xaa is any aa, unknown or other
  misc_feature (65)..(65): Xaa is any aa, unknown or other
  misc_feature (78)..(78): Xaa is any aa, unknown or other
  misc_feature (79)..(79): Xaa is any aa, unknown or other
  misc_feature (80)..(80): Xaa is any aa, unknown or other
  misc_feature (81)..(81): Xaa is any aa, unknown or other
  misc_feature (106)..(106): Xaa is any aa, unknown or other
  misc_feature (108)..(108): Xaa is any aa, unknown or other
  misc_feature (109)..(109): Xaa is any aa, unknown or other
  misc_feature (110)..(110): Xaa is any aa, unknown or other
  misc_feature (157)..(157): Xaa is any aa, unknown or other
  misc_feature (162)..(162): Xaa is any aa, unknown or other
  misc_feature (168)..(168): Xaa is any aa, unknown or other
  misc_feature (183)..(183): Xaa is any aa, unknown or other
MKXTQQXXQLNXQLNNSFGSGYTVFAPTDSAFSSLKPGTLNKLSQQXQVSXVQYHVLPQFYSLDXFETASNPVRTQAXXXXGPYTLNITADSSGQANVSTGLVATXVXXXLRAQQPLAVYSVDQVLLANDLFGVKPPASAPPAARKPAKGGSVAEAXAAGSXTRRPPXGRARRQQDRRMELAXPLCCSWPPRPPSCPCCENVNMVRACRAQKSSSSCGLFLFWSSSNLDLSLNVDEASC

SEQ ID NO: 21373 - DNA, 1240 bp, Zea mays subsp. mays
  misc_feature (1)..(1240): Ceres Seq. ID no. 12403575
tggatggttggaacggacaaccgtggaggatatggacattgctgttagggcacatctccatggctggaagtttatattcctgaatgacgttgagtgccagtgcgaattgcccgagtcttatgaggcttacaggaagcagcagcatcggtggcattcgggtccaatgcagctattcaggctttgtttaccggacatcatcaaatgcaagattgcattttggaagaaggcgaacctgatattccttttcttcctgctccggaagctcatactgcctttctactccttcacgctgttctgcatcatcctcccgatgacgatgttcgtgccggaggccgagctccccgactgggtggtgtgctacgtcccggccctgatgtccctgctgaacatcctgccgtcccccaagtcgttccccttcatcatcccgtacctgctcttcgagaacaccatgtccgtgaccaagttcaacgcgatgatctccgggctgttccagctggggagcgcgtacgagtgggtggtaccaagaagtcgggccgctcgtcggagggcgacctcatcgcgctggccccgcccaaggagcccgtgaagcttcacgcgacgaggacgggctccgcgccgaacctcgacgccgtcgccaaggaggagcacctggcggcggcatcgaggaaggacgctgccgccgccgccgccaccgtgaagaagaagaaggagaagcacaaccggatatacaagaaggagctggcgctgtcgatgctgctcctgaccgcggccgcccggagcctgctgtcgaagcagggcatacacttctacttcctcctgttccagggcgtgtccttcttgctagtaggccttgacctcataggcgagcaggtcgagtgaaatgtgtaaaacaggaaattgataggtgtggggaaaaaaaaacggtgagtcaccatggatggaagtgctgggagaggagggggatgtgttatttctggctggctgccatggcacggcggcatggcatggcatggcagcagctcttgggcgcttcttggctgagattcggaacatgcgttgtgcggttgagccttcccggatctgtcctggctgcacggcatggtatcccacacgtgaggagagcaacctcctccgcctgtacggaggtgtagatacagttttctcttgttttttcatgtgtgtgggcctgttcgcctgtacgaatggtgaaggtaaacagagagtcgccgctggattaggg

SEQ ID NO: 21374 - protein, 225 aa, Zea mays subsp. mays
  misc_feature (1)..(225): Ceres Seq. ID no. 12403576
MQDCILEEGEPDIPFLPAPEAHTAFLLLHAVLHHPPDDDVRAGGRAPRLGGVLRPGPDVPAEHPAVPQVVPLHHPVPALREHHVRDQVQRDDLRAVPAGERVRVGGTKKSGRSSEGDLIALAPPKEPVKLHATRTGSAPNLDAVAKEEHLAAASRKDAAAAAATVKKKKEKHNRIYKKELALSMLLLTAAARSLLSKQGIHFYFLLFQGVSFLLVGLDLIGEQVE

SEQ ID NO: 21375 - protein, 194 aa, Zea mays subsp. mays
  misc_feature (1)..(194): Ceres Seq. ID no. 12403577
GWLERTTVEDMDIAVRAHLHGWKFIFLNDVECQCELPESYEAYRKQQHRWHSGPMQLFRLCLPDIIKCKIAFWKKANLIFLFFLLRKLILPFYSFTLFCIILPMTMFVPEAELPDWVVCYVPALMSLLNILPSPKSFPFIIPYLLFENTMSVTKFNAMISGLFQLGSAYEWVVPRSRAARRRATSSRWPRPRSP

SEQ ID NO: 21376 - protein, 184 aa, Zea mays subsp. mays
  misc_feature (1)..(184): Ceres Seq. ID no. 12403578
MDIAVRAHLHGWKFIFLNDVECQCELPESYEAYRKQQHRWHSGPMQLFRLCLPDIIKCKIAFWKKANLIFLFFLLRKLILPFYSFTLFCIILPMTMFVPEAELPDWVVCYVPALMSLLNILPSPKSFPFIIPYLLFENTMSVTKFNAMISGLFQLGSAYEWVVPRSRAARRRATSSRWPRPRSP

SEQ ID NO: 21377 - DNA, 904 bp, Zea mays subsp. mays
  misc_feature (1)..(904): Ceres Seq. ID no. 12403630
aattctggttctagggagcccgcaggaaggcacctctgcggcgaccagcgtgaagaaaggggatcggaacgcctccatctcaaaccccacgaaggcacgaaccctctcttcctaggttcatcgttcctcctccgcgtccttccttccctccgcagcgcggcgcggcgcggcgcgatgatacagctgctcttcacgctgctagcggcggagggcgccgtggcggcggtgctactcttcaagacgccgctgcggaggctggccgtgctcgcgctcgaccacctcaagcggggccgcgggcccgtcatggtgcgcaccatcgcggccaccgtgcttgtcgtgctcgcatccagtctccacagcatggccaagatccgcggccacgccgagggggagctcgacggctccggggtcgtggggctcacccccaccgaccaggtccttcttgcgcgacacctcctcgaggcgtcactcatgggatactccttattccttgctttagtcattgaccggctgcacaactatgtcaaagaaaatcgaaggctcaggaagaaattggaagaggtgttgaaacagaataaggcactagaagaagcaacaaatggaaagctagaagagaacaggcctgaccagaaagacctttcccatgccaaggataattaacaatgacatgcgctcaagaaactccctgccatcactgcctatgcctgaataggatgccggtcactgatgttctccctgttgagaattagcattggtaaatgaatgctcggttacaacgtgctaaatcctttgcatctggccaaatttgtaaataagcactgggtgatgcccatcagtaaacacatgatgctactgctgttaaactaaatgtggcaaatttcataatgctaggtattgttctcgg

SEQ ID NO: 21378 - protein, 219 aa, Zea mays subsp. mays
  misc_feature (1)..(219): Ceres Seq. ID no. 12403631
NSGSREPAGRHLCGDQREERGSERLHLKPHEGTNPLFLGSSFLLRVLPSLRSAARRGAMIQLLFTLLAAEGAVAAVLLFKTPLRRLAVLALDHLKRGRGPVMVRTIAATVLVVLASSLHSMAKIRGHAEGELDGSGVVGLTPTDQVLLARHLLEASLMGYSLFLALVIDRLHNYVKENRRLRKKLEEVLKQNKALEEATNGKLEENRPDQKDLSHAKDN

SEQ ID NO: 21379 - protein, 161 aa, Zea mays subsp. mays
  misc_feature (1)..(161): Ceres Seq. ID no. 12403632
MIQLLFTLLAAEGAVAAVLLFKTPLRRLAVLALDHLKRGRGPVMVRTIAATVLVVLASSLHSMAKIRGHAEGELDGSGVVGLTPTDQVLLARHLLEASLMGYSLFLALVIDRLHNYVKENRRLRKKLEEVLKQNKALEEATNGKLEENRPDQKDLSHAKDN

SEQ ID NO: 21380 - protein, 118 aa, Zea mays subsp. mays
  misc_feature (1)..(118): Ceres Seq. ID no. 12403633
MVRTIAATVLVVLASSLHSMAKIRGHAEGELDGSGVVGLTPTDQVLLARHLLEASLMGYSLFLALVIDRLHNYVKENRRLRKKLEEVLKQNKALEEATNGKLEENRPDQKDLSHAKDN

SEQ ID NO: 21381 - DNA, 1287 bp, Zea mays subsp. mays
  misc_feature (1)..(1287): Ceres Seq. ID no. 12403690
aaacacccagtggttcaggctggccaaagttatgagttatctgccctgtcctcccaaactaatctagtcccaggaaactaatttcaacacacaactggacgacggtgcgttgcgttggtggccgccggcgacgatgtcgtcgtccgcgggcgacaagaggaagaagacggcgtgcgtgaccggagggaacgggtacatcggctccgcgctcatcaagatgctgctggaggacggatacgccgtcaagacgacggtcaggaacccagacgacatggacaagaactcccacctcaagggcctgcagcagctcgggccgctgacggtcctccgcggcgacatggacgaggagggcagcttcgacgacgccgtcgccggctgcgactacgtcttcctcgtcgccgcaccggtgaacctcgcagcacaggatccagagaaagagcagatcgagccgtccgtccgaggcacgctgaacgcgatgaggtcgtgcgcgaaggccgggacggtgcggcgcgtgatcctgacctcgtcggtggccggagtctacatcaggccggacctgctgcaactgcgaggcgacgggcacgtgctggacgaggagtcctggtccgacgtcgagtacctcagagccaacaggccaccgacctgggggtactgcgtgtcgaaggtgctcctcgagaaggaggcgtgcaggttcgcgggcgagcacggcatcagcctggtcaccgtctgccccgtcatcaccgtgggcgcggcgccggcgcccaaggtccgcacgagcatcatcgacagcctctccatgctgtccggcgacgagcgagggctcgccgtgctcaaaggcatcgagaagacctccggcgcggtgcagctggtccacgtcgacgacctctgccgcgccgagctgttcctggcagaggcggcggcggccgacgggaggtacatctgctgcggcctcaacacgaccgtcctcgagctcgcgcgtttcctggcacacaagtacccgcagtacggcgtgaaaacaaacctccacgacgatgaacagcagctactcgagaagccgagggtgaaggtgtcgtcggagaagctcgtccgggaagggtttgagtacaggcacaacacgctggacgagatctacgacaatgtggtcgagtacgtcaaggcgttagggattctgccctactgatacttagatgcccgagcttaattaagtaggagggcagcatatatgttgtcggacatatacgagtcttggaaagtacttaaataatttatggacatatttttcattgg

SEQ ID NO: 21382 - protein, 348 aa, Zea mays subsp. mays
  misc_feature (1)..(348): Ceres Seq. ID no. 12403691
MSSSAGDKRKKTACVTGGNGYIGSALIKMLLEDGYAVKTTVRNPDDMDKNSHLKGLQQLGPLTVLRGDMDEEGSFDDAVAGCDYVFLVAAPVNLAAQDPEKEQIEPSVRGTLNAMRSCAKAGTVRRVILTSSVAGVYIRPDLLQLRGDGHVLDEESWSDVEYLRANRPPTWGYCVSKVLLEKEACRFAGEHGISLVTVCPVITVGAAPAPKVRTSIIDSLSMLSGDERGLAVLKGIEKTSGAVQLVHVDDLCRAELFLAEAAAADGRYICCGLNTTVLELARFLAHKYPQYGVKTNLHDDEQQLLEKPRVKVSSEKLVREGFEYRHNTLDEIYDNVVEYVKALGILPY

SEQ ID NO: 21383 - protein, 320 aa, Zea mays subsp. mays
  misc_feature (1)..(320): Ceres Seq. ID no. 12403692
MLLEDGYAVKTTVRNPDDMDKNSHLKGLQQLGPLTVLRGDMDEEGSFDDAVAGCDYVFLVAAPVNLAAQDPEKEQIEPSVRGTLNAMRSCAKAGTVRRVILTSSVAGVYIRPDLLQLRGDGHVLDEESWSDVEYLRANRPPTWGYCVSKVLLEKEACRFAGEHGISLVTVCPVITVGAAPAPKVRTSIIDSLSMLSGDERGLAVLKGIEKTSGAVQLVHVDDLCRAELFLAEAAAADGRYICCGLNTTVLELARFLAHKYPQYGVKTNLHDDEQQLLEKPRVKVSSEKLVREGFEYRHNTLDEIYDNVVEYVKALGILPY

SEQ ID NO: 21384 - protein, 302 aa, Zea mays subsp. mays
  misc_feature (1)..(302): Ceres Seq. ID no. 12403693
MDKNSHLKGLQQLGPLTVLRGDMDEEGSFDDAVAGCDYVFLVAAPVNLAAQDPEKEQIEPSVRGTLNAMRSCAKAGTVRRVILTSSVAGVYIRPDLLQLRGDGHVLDEESWSDVEYLRANRPPTWGYCVSKVLLEKEACRFAGEHGISLVTVCPVITVGAAPAPKVRTSIIDSLSMLSGDERGLAVLKGIEKTSGAVQLVHVDDLCRAELFLAEAAAADGRYICCGLNTTVLELARFLAHKYPQYGVKTNLHDDEQQLLEKPRVKVSSEKLVREGFEYRHNTLDEIYDNVVEYVKALGILPY

SEQ ID NO: 21385 - DNA, 1006 bp, Zea mays subsp. mays
  misc_feature (1)..(1006): Ceres Seq. ID no. 12403719
ctagggtttacatcccttataaaatctcgtcttccacccctgcctccctcagtcgcacttcctccggcggcggcaactcgacggccaaccgcgccaccctgccgcggcagccatggtgcatgttaacttctaccgcaactatgggaagactttcaagaagccaaggcggccgtatgagaaggagcgcctagatgctgagctgaagctggttggtgagtatggcctgcggtgcaagcgcgagctgtggcgcgtgcagtatgccctgagccgtatcaggaatgcagccagggagctgctcaccctggatgagaagaacccacgccgtatctttgagggcgaggcgctcctccgccgcatgaacagatatggtcttcttggtgagggacagaacaagcttgattacgtgcttgctctcactgttgagaacttcctccagcgccgcctccagaccatcgtcttcaagaatggcatggccaagtccatccaccatgctcgtgtcctgatcaggcagcgccacatcagggtgggaaggcagctcgtcaacatcccctcgttcatggtcagggtcgaatcagagaagcacatcgacttctccctcaccagccctctgggtggtggtcctgccggaagggtgaagcggaagaaccagaagaaggcctcagggggcggcgacgctgaggaggacgaggagtaaagggggggggggcacgtaggattctgggacggcaattggtttaaatgtgaggtggacactttagttgttgtgcctgagtgtgtttgtgttgtaatgaatacaaattctactgtggtagacaattttgcacccccactactgacactcgtgtttaaatttaaacattggcatcgtgtctggacacgatgaattgtattctggtttgggtggctatttgctagtttggtctttaggccaatgtttaagactgaaacaaattggtagccaactttactatcttatgctctgctggtctgtttggtgatttttttt

SEQ ID NO: 21386 - protein, 193 aa, Zea mays subsp. mays
  misc_feature (1)..(193): Ceres Seq. ID no. 12403720
MVHVNFYRNYGKTFKKPRRPYEKERLDAELKLVGEYGLRCKRELWRVQYALSRIRNAARELLTLDEKNPRRIFEGEALLRRMNRYGLLGEGQNKLDYVLALTVENFLQRRLQTIVFKNGMAKSIHHARVLIRQRHIRVGRQLVNIPSFMVRVESEKHIDFSLTSPLGGGPAGRVKRKNQKKASGGGDAEEDEE

SEQ ID NO: 21387 - protein, 112 aa, Zea mays subsp. mays
  misc_feature (1)..(112): Ceres Seq. ID no. 12403721
MNRYGLLGEGQNKLDYVLALTVENFLQRRLQTIVFKNGMAKSIHHARVLIRQRHIRVGRQLVNIPSFMVRVESEKHIDFSLTSPLGGGPAGRVKRKNQKKASGGGDAEEDEE

SEQ ID NO: 21388 - DNA, 1069 bp, Zea mays subsp. mays
  misc_feature (1)..(1069): Ceres Seq. ID no. 12403740
gccccaagccgcaaccgcaaccaccttcccaaatctcagtagtcgcctctcgtcgtcttcgtctagcccggcccgttccaaaacctccgtagccgccgccgccaccccggcgaccgaagatgatctccccggacgcagcccgcaacgtagtcggcatcatcggcaatgtcatctccttcggcctcttcctgtccccagtgctgacgttctggcggatctacaaggccaaggacgtggaggagttcaagccggacccttacctggcgacgctgctcaactgcatgctctgggtgttctatggcatccccgtcgtccaccccaacagcattctcgtcgtcaccatcaacggcatcggcctcgtcatcgaggccgtctacctcactatcttcttcctctattccgacagccagaagcgcaagaaggcgttcgcgatcctggccgtggagattctgttcatggtcgccgtggtgctcggtgtgatcctcggcgcgcacactcacgagaaacgttccatgatcgtcggcatcctctgcgtcatcttcggctcgatgatgtacgcctcaccactcactatcatgagtcgagtgatcaagaccaagagcgttgagtacatgcccttcctcctgtcgctggtgagcttcctcaacggctgctgctggacggcctacgcgctcatccgcttcgacctctacgtcacgatcccgaacgccctgggcgcattcttcggcctcgtccagctgatcctctacttctgctactacaagtcgacccccaagaaggagaagaacgtggagctgcccaccgtctccagcaacgtcggcggcggcaacgtcaccgtcagcgttgagcgatagatgatgtagctgccgccgcccgtcgagaacgaactcgacgagacgtgctttacccacaagtagttttggccttgtctaattgctcttctcggatgatcgtttaagtgagtgttagttagttttgccctgcgtgtgatgtcaggaacaattaatatatccatgtggctgtgtttgccattctagataattaagaacaatcgtatctgattgctacc

SEQ ID NO: 21389 - protein, 244 aa, Zea mays subsp. mays; identical to SEQ ID NO: 16951
  misc_feature (1)..(244): Ceres Seq. ID no. 12403741

SEQ ID NO: 21390 - protein, 201 aa, Zea mays subsp. mays
  misc_feature (1)..(201): Ceres Seq. ID no. 12403742
PQAATATTFPNLSSRLSSSSSSPARSKTSVAAAATPATEDDLPGRSPQRSRHHRQCHLLRPLPVPSADVLADLQGQGRGGVQAGPLPGDAAQLHALGVLWHPRRPPQQHSRRHHQRHRPRHRGRLPHYLLPLFRQPEAQEGVRDPGRGDSVHGRRGARCDPRRAHSRETFHDRRHPLRHLRLDDVRLTTHYHESSDQDQER

SEQ ID NO: 21391 - protein, 190 aa, Zea mays subsp. mays; identical to SEQ ID NO: 16953
  misc_feature (1)..(190): Ceres Seq. ID no. 12403743

SEQ ID NO: 21392 - DNA, 1029 bp, Zea mays subsp. mays
  misc_feature (1)..(1029): Ceres Seq. ID no. 12403756
gcacgagaccattacctagaacatcctaatcgaaaaagactatcatgtctcggtactgcgtcaacgagcagtcgagcacccggcctcatcctgcctcggcaggcagttggcacggcagcaccccagcaggcagcagcccctccaatttaaagcaagcaacgacgggcaaagagcagctcggcgggggctgctgcagcgccgcgcgtttgcgagtccgggacgacgacatggggaggggccgcagcgagataaagcggatcgagaacccgacgcagcggcagtccaccttctacaagcgcagggacgggctcttcaagaaggcaagggagctcgccgtcctgtgcgacgtcgacctgctgctgctcctcttctccggctccgggaagctgtaccactacctctcgcccaccgtgcccactgtcaaggacctggtcgagaggtacgaggccgcgacgcacagcaaggtctgggccgacgttcgccaggagcggcgcgcggagctggagaaggcggagcggatgtgcgagctcatggagaaggagctgcggttcatgacggtggacgacggggagcagtacacggtgccgtcgctggagctgctggagcacagcctggaggcggccgtgcacagggtgcgctccgagaaggaccgcaagatcggcggcgagatcgactgcctccagaacattatcagaggacgccacgaggagcgctacgggttgtgcgacaagcttgctcattctcaggcctggaacaacggcggggaaggtggagggtcgaccccaccaagcggcggcggcggcctggaactcaaactgggtttcaactgacgctggctggcttggaagctcgaggatggatcgaagactatgagctccttcattgtgccctgtcaggctacctacccctgcaccctgttggttatggtttaaaatggttattgaccaaagttgtcctgcatcaaacaaggctcagcttgatgttaatgtgctgagggatctaatgtattattagcgttatccagctctt

SEQ ID NO: 21393 - protein, 261 aa, Zea mays subsp. mays
  misc_feature (1)..(261): Ceres Seq. ID no. 12403757
MSRYCVNEQSSTRPHPASAGSWHGSTPAGSSPSNLKQATTGKEQLGGGCCSAARLRVRDDDMGRGRSEIKRIENPTQRQSTFYKRRDGLFKKARELAVLCDVDLLLLLFSGSGKLYHYLSPTVPTVKDLVERYEAATHSKVWADVRQERRAELEKAERMCELMEKELRFMTVDDGEQYTVPSLELLEHSLEAAVHRVRSEKDRKIGGEIDCLQNIIRGRHEERYGLCDKLAHSQAWNNGGEGGGSTPPSGGGGLELKLGFN

SEQ ID NO: 21394 - protein, 200 aa, Zea mays subsp. mays
  misc_feature (1)..(200): Ceres Seq. ID no. 12403758
MGRGRSEIKRIENPTQRQSTFYKRRDGLFKKARELAVLCDVDLLLLLFSGSGKLYHYLSPTVPTVKDLVERYEAATHSKVWADVRQERRAELEKAERMCELMEKELRFMTVDDGEQYTVPSLELLEHSLEAAVHRVRSEKDRKIGGEIDCLQNIIRGRHEERYGLCDKLAHSQAWNNGGEGGGSTPPSGGGGLELKLGFN

SEQ ID NO: 21395 - DNA, 876 bp, Zea mays subsp. mays
  misc_feature (1)..(876): Ceres Seq. ID no. 12403778
gcaccagcaccagcacggcgaccaaccctctcccaacccgactagtcggactcgcagctccgccccaagtccaggtccaagcatggaagtcgcggcggcgtcggcgaggcccgtcctgcgcgtggctgccatctgcggctccctccgcaaggcctccttcaaccgcggcctcctccgcgccgccgcggaggtgtgcgaggactccatcccggggctccgcatcgacgagctcgacatctccgacctgcccatcatcaacaccgaccttgagaccggcagcggcagcggcaccgtcttcccgcccgccgtcgaggccttccgcgccaaggtctgccaggccgactgcttcctcttcggcgcgcccgagtacaactactccatcgccacccccctgaagaacgtgcttgactgggcctctagaggaaagaactgttgggcagacaaacctgctgcgatcgtgagtgcaggcggcggctttggaggagggaggtcgcagtaccatctccgtcaggtcggggttttcctggatctccatttcatcaacaagccagaactgtgcgtccaagccttccagcagccacccaagtttgacagcgatggaaatctggtcgatgctgaaatcagagagcggctcaagaaagtgctcctatcccttcaggccttcacgctcaggcttcagaaggaggactgaatcaactcggtaccattgtagtacgtgcttccctgagaagcgtttattgctcttggaagtttgtaacgcgttgctgggtggcctggaagtttgtaataaatccaagaagtgttctcgctgaatatttaagatttgatcgcatctatatataataaagattgtgttctagcgtttttgcgtttccc

SEQ ID NO: 21396 - protein, 229 aa, Zea mays subsp. mays
  misc_feature (1)..(229): Ceres Seq. ID no. 12403779
HQHQHGDQPSPNPTSRTRSSAPSPGPSMEVAAASARPVLRVAAICGSLRKASFNRGLLRAAAEVCEDSIPGLRIDELDISDLPIINTDLETGSGSGTVFPPAVEAFRAKVCQADCFLFGAPEYNYSIATPLKNVLDWASRGKNCWADKPAAIVSAGGGFGGGRSQYHLRQVGVFLDLHFINKPELCVQAFQQPPKFDSDGNLVDAEIRERLKKVLLSLQAFTLRLQKED

SEQ ID NO: 21397 - protein, 202 aa, Zea mays subsp. mays
  misc_feature (1)..(202): Ceres Seq. ID no. 12403780
MEVAAASARPVLRVAAICGSLRKASFNRGLLRAAAEVCEDSIPGLRIDELDISDLPIINTDLETGSGSGTVFPPAVEAFRAKVCQADCFLFGAPEYNYSIATPLKNVLDWASRGKNCWADKPAAIVSAGGGFGGGRSQYHLRQVGVFLDLHFINKPELCVQAFQQPPKFDSDGNLVDAEIRERLKKVLLSLQAFTLRLQKED

SEQ ID NO: 21398 - protein, 130 aa, Zea mays subsp. mays
  misc_feature (1)..(130): Ceres Seq. ID no. 12403781
TSTSTATNPLPTRLVGLAAPPQVQVQAWKSRRRRRGPSCAWLPSAAPSARPPSTAASSAPPRRCARTPSRGSASTSSTSPTCPSSTPTLRPAAAAAPSSRPPSRPSAPRSARPTASSSARPSTTTPSPPP

SEQ ID NO: 21399 - DNA, 642 bp, Zea mays subsp. mays
  misc_feature (1)..(642): Ceres Seq. ID no. 12403812
aacacctcatcagcctatcaccagcgacctaaaaagcacagcacctagtagctgaacagcaccatatacaatccgaatctctgaatattcagttgagccaaaaaggcaggaagaaggaggaaccatgatcagttccaagaggcttgttcagatggcgaagaagtggcaggcaacggctgccatggctaggaggcggctcacggcgacgctggcgaaagaggccgacggttcgtgcggcacgtcgatgccggtggccgtcaggggccactgcgtcgtgtactcctccgacgggacgaggttcgaggtcccgctggcgtacctcggcacggcggtgttcggcgagctcctgagcatgtcgcgggaggagttcggatttaccggcgacgatggcggcaggatcacgctgccctgcgatgccgcggtgatggagtacgcgatgtgtttgctcaggcgagacgcctccgaagaggttgtgagggcgttcttgagctccatggtcagaccctgccaccacagcgtcggtggctcggtgccaccgatgggactcgggcgccaaccagccatctgtgtatagctagctatatgattagctccatgatgtacaatattattaggtgtgtatgtatgtagccggatggaatc

SEQ ID NO: 21400 - protein, 149 aa, Zea mays subsp. mays
  misc_feature (1)..(149): Ceres Seq. ID no. 12403813
MISSKRLVQMAKKWQATAAMARRRLTATLAKEADGSCGTSMPVAVRGHCVVYSSDGTRFEVPLAYLGTAVFGELLSMSREEFGFTGDDGGRITLPCDAAVMEYAMCLLRRDASEEVVRAFLSSMVRPCHHSVGGSVPPMGLGRQPAICV

SEQ ID NO: 21401 - protein, 140 aa, Zea mays subsp. mays
  misc_feature (1)..(140): Ceres Seq. ID no. 12403814
MAKKWQATAAMARRRLTATLAKEADGSCGTSMPVAVRGHCVVYSSDGTRFEVPLAYLGTAVFGELLSMSREEFGFTGDDGGRITLPCDAAVMEYAMCLLRRDASEEVVRAFLSSMVRPCHHSVGGSVPPMGLGRQPAICV

SEQ ID NO: 21402 - protein, 130 aa, Zea mays subsp. mays
  misc_feature (1)..(130): Ceres Seq. ID no. 12403815
MARRRLTATLAKEADGSCGTSMPVAVRGHCVVYSSDGTRFEVPLAYLGTAVFGELLSMSREEFGFTGDDGGRITLPCDAAVMEYAMCLLRRDASEEVVRAFLSSMVRPCHHSVGGSVPPMGLGRQPAICV

SEQ ID NO: 21403 - DNA, 1032 bp, Zea mays subsp. mays
  misc_feature (1)..(1032): Ceres Seq. ID no. 12403846
gcacgagaccattacctagaacatcctaatcgaaaaccaccacatctaatccttcctcccagctggtccctgcggccgctgctgctcgtccctacaagtatatcaaccaacagtgctcacatcatgcactctgtggtgtcttggtagtagttgttggggtagctagctagagagagcagcaggccagcacagcagcatggggaggtcgccgtgctgcgagaaggcgcacacgaacaagggcgcctggaccaaggaggaggaccagcggctcgtcgcctacatcaaggcccacggcgaaggctgctggaggtcgctccccaaggccgcgggcctgctgcgctgcggcaagagctgccgcctccggtggatcaactacctgcgccccgacctcaagcgcggcaacttcacccaggaggaggacgacgtcatcatcaagctccaccaggtcctcggaaacaagtggtcgctgatcgccgcccagctgccggggcggacggacaacgagatcaagaactactggaacacgcacatcaagcgcaagctcatcgcccggggcatcgacccacggacgcaccagccggcgagtgccgccgcagttgcccccgccgccgccgcgcaaagcagctttcgccaccatggcgacgacgaggcggtggcgcggcgcagctgctcgcgagacagcggctgcatcgcggcgcacagcagcgacgacgacgacagcacgtccgggtccctgccacaccaacatgctgtcggcggcatcgacctcaacctctcgctaagcccaccgacgagccaaccgtcatcgccggccgccgccaagggagttgtagctagcggatatggccaagggagtgagagctagctgtacctcctctgcactgccacgatgatggttgtcaattgttgttagctcctcctcctcgtcttatgttcttccatgcaggccggaagatcctaaagagaacgtgtgcgtgcgtgtgagaattaaactcgtgtctgttgttcgatcgggcgctctaagatttggcc

SEQ ID NO: 21404 - protein, 222 aa, Zea mays subsp. mays
  misc_feature (1)..(222): Ceres Seq. ID no. 12403847
MGRSPCCEKAHTNKGAWTKEEDQRLVAYIKAHGEGCWRSLPKAAGLLRCGKSCRLRWINYLRPDLKRGNFTQEEDDVIIKLHQVLGNKWSLIAAQLPGRTDNEIKNYWNTHIKRKLIARGIDPRTHQPASAAAVAPAAAAQSSFRHHGDDEAVARRSCSRDSGCIAAHSSDDDDSTSGSLPHQHAVGGIDLNLSLSPPTSQPSSPAAAKGVVASGYGQGSES

SEQ ID NO: 21405 - DNA, 818 bp, Zea mays subsp. mays
  misc_feature (1)..(818): Ceres Seq. ID no. 12403859
ggaggattggtcctataaataacctgccacgcacaggttgctgcaacctacgccaaggagaaattgcaaacctgtcactagcgaagcatacttcgtcgagcacactcttgcaattaatccaccgagttcggtttagtagcatagcatcgacaataaatgtcgctcgtgagtcggcgcagcagcaacgtgttcgaccccttctccctcgacctctgggaccccttcgacatgttccgctccatcgtcccgtcggcggcctcctccggcggcggttccgagaccgccgccttcgccaacgcccgcgtggactggaaggagacgcccgaggcgcacgtgttcaaggccgacctccccggcatcaagaaggaggaggtcaaggtcgaggtggaggacggcaacgtgctcgtcatcagcggcaagcgcagcagggaggaggaggacaagaacgacaagtggcaccgcgtcgagcgcagcagcggccagttcatgaggcgcttccgcctgcctgagaacgccaaggtcgacgaggtgaaggctggcctcgagaacggcgtgctcacggtcaccgtgcccaagacggaggtgaagaagcccgaggtgaaggctatcgagatctctggttgaccgtccgttggacgtcgattggagctccgttgtactgctactggtccgtggatgtcctgcatgttgcactgcagcggaggatgttcgctgcgtcttctacgcatttgctctgtttgtgctgtggtcgtcttccccgtatatggtttgtgtattgtcccttatcgataataataaataaaatcaggctttacgtc

SEQ ID NO: 21406 - protein, 168 aa, Zea mays subsp. mays
  misc_feature (1)..(168): Ceres Seq. ID no. 12403860
RIGPINNLPRTGCCNLRQGEIANLSLAKHTSSSTLLQLIHRVRFSSIASTINVARESAQQQRVRPLLPRPLGPLRHVPLHRPVGGLLRRRFRDRRLRQRPRGLEGDARGARVQGRPPRHQEGGGQGRGGGRQRARHQRQAQQGGGGQERQVAPRRAQQRPVHEALPPA

SEQ ID NO: 21407 - protein, 155 aa, Zea mays subsp. mays
  misc_feature (1)..(155): Ceres Seq. ID no. 12403861
MSLVSRRSSNVFDPFSLDLWDPFDMFRSIVPSAASSGGGSETAAFANARVDWKETPEAHVFKADLPGIKKEEVKVEVEDGNVLVISGKRSREEEDKNDKWHRVERSSGQFMRRFRLPENAKVDEVKAGLENGVLTVTVPKTEVKKPEVKAIEISG

SEQ ID NO: 21408 - protein, 131 aa, Zea mays subsp. mays
  misc_feature (1)..(131): Ceres Seq. ID no. 12403862
MFRSIVPSAASSGGGSETAAFANARVDWKETPEAHVFKADLPGIKKEEVKVEVEDGNVLVISGKRSREEEDKNDKWHRVERSSGQFMRRFRLPENAKVDEVKAGLENGVLTVTVPKTEVKKPEVKAIEISG

SEQ ID NO: 21409 - DNA, 1220 bp, Zea mays subsp. mays
  misc_feature (1)..(1220): Ceres Seq. ID no. 12404052
acaacagcatcatggcgctcaccacgagcactaacaaccaagccttgcttgacgctcagctagagctctggcacacatcctttgctttcatcaagtccatggctctcaagtctgcagtggaccttggcatagccgacgccatccacagccacggtggcaacgccaccctgccccagatagtttccagggccgcgctccacccgtccaagatcccctgcctgcgtcgcctcatgcgggtgctcacagccgccggcatcttcagcgccgcccaccgctcgccggacgacggcggcggcgagctcgtctatggactcacaccggcgtctcagctcttggttggcggctcttcaagcctggctcccttcatgtccctggtgttacaccaggtctacgtgtcgcctttccttggcctcggcacatggttacagcacgagcgctcagacccgaccctgtttgagatgacgcatgggctcactgcctgggacctgaatgaccacaagccagccttcggcgagctcttcaaccaaggtatggtctgcgacagcagcttcgtcatggacatcgtcgtcaaggagtgcggcgacgtcttccggggtctgagctcccttgtcgacgtcgccggagggcttggcgcggcggccctggctatctcgaccgcgttcccgcatgtccagtgcagtgtgctggatctcccgcatgtcgccgccaatgctcccgctaacaccagtgtcaagtatattgctggcgacatgtttgagagcattccaccggcagacgccgtcttccttaagtgggttttgcatgactggggcgatgctgattgcatcaagatacttaagaactgtaagaaagctataccttctagggatgcaggaggaaaggtgataatcgttgatatggttgttggaggccagtcgtcaaacaataagcacaaagagactcaggtcttgtttgatctcttcatcatgacgatcaatggcgccgagcgagacgaacatgagtggaaaaagataatttctgaagctgggtttagcgactacaaaatcatacctgttctaggtgttcgatccatcattgaggtctacccatgattatttggcgaatacgtgtttcgctttttttctgaataagttgtttgcttaactagcatgggacgagtgtccatgagatcatgtgtgatgaaaactttgtttgtgatgaagtaagcactttgcaatgtc

SEQ ID NO: 21410 - protein, 362 aa, Zea mays subsp. mays
  misc_feature (1)..(362): Ceres Seq. ID no. 12404053
NSIMALTTSTNNQALLDAQLELWHTSFAFIKSMALKSAVDLGIADAIHSHGGNATLPQIVSRAALHPSKIPCLRRLMRVLTAAGIFSAAHRSPDDGGGELVYGLTPASQLLVGGSSSLAPFMSLVLHQVYVSPFLGLGTWLQHERSDPTLFEMTHGLTAWDLNDHKPAFGELFNQGMVCDSSFVMDIVVKECGDVFRGLSSLVDVAGGLGAAALAISTAFPHVQCSVLDLPHVAANAPANTSVKYIAGDMFESIPPADAVFLKWVLHDWGDADCIKILKNCKKAIPSRDAGGKVIIVDMVVGGQSSNNKHKETQVLFDLFIMTINGAERDEHEWKKIISEAGFSDYKIIPVLGVRSIIEVYP

SEQ ID NO: 21411 - protein, 359 aa, Zea mays subsp. mays
  misc_feature (1)..(359): Ceres Seq. ID no. 12404054
MALTTSTNNQALLDAQLELWHTSFAFIKSMALKSAVDLGIADAIHSHGGNATLPQIVSRAALHPSKIPCLRRLMRVLTAAGIFSAAHRSPDDGGGELVYGLTPASQLLVGGSSSLAPFMSLVLHQVYVSPFLGLGTWLQHERSDPTLFEMTHGLTAWDLNDHKPAFGELFNQGMVCDSSFVMDIVVKECGDVFRGLSSLVDVAGGLGAAALAISTAFPHVQCSVLDLPHVAANAPANTSVKYIAGDMFESIPPADAVFLKWVLHDWGDADCIKILKNCKKAIPSRDAGGKVIIVDMVVGGQSSNNKHKETQVLFDLFIMTINGAERDEHEWKKIISEAGFSDYKIIPVLGVRSIIEVYP

SEQ ID NO: 21412 - protein, 330 aa, Zea mays subsp. mays
  misc_feature (1)..(330): Ceres Seq. ID no. 12404055
MALKSAVDLGIADAIHSHGGNATLPQIVSRAALHPSKIPCLRRLMRVLTAAGIFSAAHRSPDDGGGELVYGLTPASQLLVGGSSSLAPFMSLVLHQVYVSPFLGLGTWLQHERSDPTLFEMTHGLTAWDLNDHKPAFGELFNQGMVCDSSFVMDIVVKECGDVFRGLSSLVDVAGGLGAAALAISTAFPHVQCSVLDLPHVAANAPANTSVKYIAGDMFESIPPADAVFLKWVLHDWGDADCIKILKNCKKAIPSRDAGGKVIIVDMVVGGQSSNNKHKETQVLFDLFIMTINGAERDEHEWKKIISEAGFSDYKIIPVLGVRSIIEVYP

SEQ ID NO: 21413 - DNA, 998 bp, Zea mays subsp. mays
  misc_feature (1)..(998): Ceres Seq. ID no. 12404088
acggggagaagtcgaacagcggccgcgcgcgggaagttgctcggaggcggcggcggatctcggaggcagcgacgcgcgggtggaggagctcagtgacagcgccagtgcctatcgagctagcgaatcgaggagattttccccactgtttctttcctgctgattccgatttcacgttgaaacaccggggggagaagaattgcgggcgaccataactcggcaagaagcggctccaaaaagggcatctacctttgccgattccggcaccgatggataccgcggcgtcggggaggttcgacaagctccagagctcgttcaagctctccatccagtgcctcctcacggcctgctcccgcgaggatgtcaatgacgctttctcgtccttcactgatgctgagaaggagcgtttgcaccggatgctcacccttgtgatgaagaatctgcatgccaacgtagtggatgagtttgacgacttctgccaagaaacacaggtggctgctgcccttgaaaagatagatgactttgttgaaaagcagaatcttgatgcattatcttcagagaagactactgttgaagaaatcgaagaaaaggtatcaagagcaaaaaaggatgaaattgaatatttgactggtttactgaaaaaggttgaagaaagtaacaatgctatgaaagctcgaattgacctcctaaagaaaggggaggatctaactgctgcaagagatgtcctcaataagatgacgcagtggaactctgcactcgtggagaacattaacccttgaatctgtgtgatgacgattcattggcgtcaaaggacatctttgtataggggtgtgttagattggatgacatgtgaatgtgattcatggatcagcctggatgttctgttatgattaagaactgctatgtatcgtgcaatagacacatcgtctgtacttttgatgttattatcaggtcccaaacttctttatatccaatatgttacaatatcattttggtgactc

SEQ ID NO: 21414 - protein, 169 aa, Zea mays subsp. mays
  misc_feature (1)..(169): Ceres Seq. ID no. 12404089
MDTAASGRFDKLQSSFKLSIQCLLTACSREDVNDAFSSFTDAEKERLHRMLTLVMKNLHANVVDEFDDFCQETQVAAALEKIDDFVEKQNLDALSSEKTTVEEIEEKVSRAKKDEIEYLTGLLKKVEESNNAMKARIDLLKKGEDLTAARDVLNKMTQWNSALVENINP

SEQ ID NO: 21415 - protein, 120 aa, Zea mays subsp. mays
  misc_feature (1)..(120): Ceres Seq. ID no. 12404090
MLTLVMKNLHANVVDEFDDFCQETQVAAALEKIDDFVEKQNLDALSSEKTTVEEIEEKVSRAKKDEIEYLTGLLKKVEESNNAMKARIDLLKKGEDLTAARDVLNKMTQWNSALVENINP

SEQ ID NO: 21416 - protein, 115 aa, Zea mays subsp. mays
  misc_feature (1)..(115): Ceres Seq. ID no. 12404091
MKNLHANVVDEFDDFCQETQVAAALEKIDDFVEKQNLDALSSEKTTVEEIEEKVSRAKKDEIEYLTGLLKKVEESNNAMKARIDLLKKGEDLTAARDVLNKMTQWNSALVENINP

SEQ ID NO: 21417 - DNA, 797 bp, Zea mays subsp. mays
  misc_feature (1)..(797): Ceres Seq. ID no. 12404125
cagaagggggcaaagctcgcggcctcgcgtcgcgccggtcgttccggtccaacgcggcgacgccaaaggctgccgtccccgggcttcctcctccccctcaccccttcccctcgccaaaccacaggaagaagcgagcagggcatcgagttttctcgatcgatggcatcggcgcctgccgattcctacgggtgcgcggcgtgcggcgcgcccctgaacctgtcggcggcgcacctgtacccggcggacttctacttcgaggccgggaacaagggcacgctgtccttctcgtgggtggacgagtcgcgcctgcggttcgcgcccgaggaccgcatccgccccttcttcgagaccctcaactactggggcatccagcggaagcgcacgcgcatcagctgcgacgcctgcggccacctgcttggccacgtctacgacgacggtccgccggccatgcagggcaccggccagttcgggatggggcccagccaggtcatcccgcgccgccccaggtaccgcttcaagatcaaggccatcgccgccagctcctcggcacctgccgccgccgcctatgaaaagtgatgctccatagatttcttcatctggttgcgtgtcctgtgtgctgtcggtgctgtggttcgtgacttcctgtaaattacgtagcttcctgcaattcgcgtcctgcgttgttttctttagaaacagtgtgtttgaaatggcatgcgactgaaactatgattgaaatggcatgcgacttctaatatacacacaagacagaagatataaataaaaaactatgattg

SEQ ID NO: 21418 - protein, 191 aa, Zea mays subsp. mays
  misc_feature (1)..(191): Ceres Seq. ID no. 12404126
QKGAKLAASRRAGRSGPTRRRQRLPSPGFLLPLTPSPRQTTGRSEQGIEFSRSMASAPADSYGCAACGAPLNLSAAHLYPADFYFEAGNKGTLSFSWVDESRLRFAPEDRIRPFFETLNYWGIQRKRTRISCDACGHLLGHVYDDGPPAMQGTGQFGMGPSQVIPRRPRYRFKIKAIAASSSAPAAAAYEK

SEQ ID NO: 21419 - protein, 188 aa, Zea mays subsp. mays
  misc_feature (1)..(188): Ceres Seq. ID no. 12404127
EGGKARGLASRRSFRSNAATPKAAVPGLPPPPHPFPSPNHRKKRAGHRVFSIDGIGACRFLRVRGVRRAPEPVGGAPVPGGLLLRGREQGHAVLLVGGRVAPAVRARGPHPPLLRDPQLLGHPAEAHAHQLRRLRPPAWPRLRRRSAGHAGHRPVRDGAQPGHPAPPQVPLQDQGHRRQLLGTCRRRL

SEQ ID NO: 21420 - protein, 138 aa, Zea mays subsp. mays
  misc_feature (1)..(138): Ceres Seq. ID no. 12404128
MASAPADSYGCAACGAPLNLSAAHLYPADFYFEAGNKGTLSFSWVDESRLRFAPEDRIRPFFETLNYWGIQRKRTRISCDACGHLLGHVYDDGPPAMQGTGQFGMGPSQVIPRRPRYRFKIKAIAASSSAPAAAAYEK

SEQ ID NO: 21421 - DNA, 1092 bp, Zea mays subsp. mays
  misc_feature (1)..(1092): Ceres Seq. ID no. 12404178
aaaaagaaaagagagggagaggaagcgagcggctgggcgccccaagccccacatggtgcagcgaggtccacgctaacaacttctcgaccttggcctcccacggctctgccgcattgccgcgcgccgccggccggcactcgccgtcctgacgcgagaaggaagatgctctaggaagttgggggcctggctagggacagcctgtgtcccgccgtgggatcggtgggagagggggaggcaggcatgtgtgatctggtggcccgcacgggccggcacctgcagcgctacgagaacggccgtcgccttgtggccgggtgcataccattcagatatagggatattaatgatggagcttctgatgatgaacaaaagaaacttgttgaagttctcatgatcagctcccaaagtggaccgggtcttctatttccaaagggaggctgggagaatgatgaaactgttgaagaggcagctgcaagggaagctatcgaagaagctggagtgcgaggagatttagtgcaactgctggggttctacgatttcaagagcaagcagcccgaagcaacgtgcagagccgcaatcttcgccctgcacgtgaaggaagagctagcctcctggccagaacagagcacccggcagaggagctggctcaccgttcccgaggcggcggagcggagccgctacccgtggatgcaggaggccctcgtgacaggcttctccgcctggctcgagaactggagaaacggtggtggcggcggcggcggctgcgtggaccgaactgagagatgacaccaccttaaagcatcaggggggcccccggcggagaagccatctgctagctatttcttggcgttgtatcttgcttggactagaattttcttccagaggctgactgcctggcatacatgcatgagggctctctgatgctcggtagcttttgtttactttgtcgctttattacaccgtcgtcttcaggatgacagtctcctcagctgatgatggcccgaggtttgttaaattgtaagcttgctgattctcgcggtcgccagctatatttaactgtcttgtattgagccttgagacaaagcaagctttgtg

SEQ ID NO: 21422 - protein, 180 aa, Zea mays subsp. mays
  misc_feature (1)..(180): Ceres Seq. ID no. 12404179
MCDLVARTGRHLQRYENGRRLVAGCIPFRYRDINDGASDDEQKKLVEVLMISSQSGPGLLFPKGGWENDETVEEAAAREAIEEAGVRGDLVQLLGFYDFKSKQPEATCRAAIFALHVKEELASWPEQSTRQRSWLTVPEAAERSRYPWMQEALVTGFSAWLENWRNGGGGGGGCVDRTER

SEQ ID NO: 21423 - protein, 131 aa, Zea mays subsp. mays
  misc_feature (1)..(131): Ceres Seq. ID no. 12404180
MISSQSGPGLLFPKGGWENDETVEEAAAREAIEEAGVRGDLVQLLGFYDFKSKQPEATCRAAIFALHVKEELASWPEQSTRQRSWLTVPEAAERSRYPWMQEALVTGFSAWLENWRNGGGGGGGCVDRTER

SEQ ID NO: 21424 - DNA, 929 bp, Zea mays subsp. mays
  misc_feature (1)..(929): Ceres Seq. ID no. 12404208
gccagtccccccgggcggcggcgcggcgctaccctcagctagctccgtaaaccagcgagtacggccgaccagaccaatggcactgcggctacccatctcctcgacccacgggctggcctcctcgccagcgcccatctcctccacgacgacgtgccggccggccgccgccagtgggagcttgatcccgccagctgccctggtcgcagttgccatccgctgggcgtcggcgtcggcgtcccaaaagaggggcctgctgctgacgacggcgaggggcggcggagtcgcgccggtgaggtcgagcgggatcgagacgacgtcgacctcggtgggagctgaggccgtcaccgggcaggtcacggaggtcaacaaggacaccttctggcctatcgtcgaggccgccggcgacaaggtcgtcgtcctcgacatgtacaccgaatggtgcgggccttgcaaagtgatggctcccaagttccaggagatgtccgagaagaacctggacgtcgtgttcctcaagctggactgcaaccaggacaacaagcctctcgcgaaggagctgggcataaaggttgtgccgacgttcaagatcctcaagggcgggaaggtcgtgaaggaggtcaccggcgccaagatcgacgagctagcggaagccatcgagatagccaacaagaagtcaggctgacaaaggaatagcaagatcgacgtgcagtgcaagcaaggatgaatggatgatcgatgaactagctagtgaagactgcgaaagaatgcgccccggccgcgcatttgtgggaccggcaacatgcatgcagaaaacaagctattctagttcttctgcttaggctgtccgcaattgctatctcaaatagctagctgatatgaagctgagagaagaatacaaatagtaatttatctcagcactagtatttgatccg

SEQ ID NO: 21425 - protein, 225 aa, Zea mays subsp. mays
  misc_feature (1)..(225): Ceres Seq. ID no. 12404209
PVPPGGGAALPSASSVNQRVRPTRPMALRLPISSTHGLASSPAPISSTTTCRPAAASGSLIPPAALVAVAIRWASASASQKRGLLLTTARGGGVAPVRSSGIETTSTSVGAEAVTGQVTEVNKDTFWPIVEAAGDKVVVLDMYTEWCGPCKVMAPKFQEMSEKNLDVVFLKLDCNQDNKPLAKELGIKVVPTFKILKGGKVVKEVTGAKIDELAEAIEIANKKSG

SEQ ID NO: 21426 - protein, 200 aa, Zea mays subsp. mays
  misc_feature (1)..(200): Ceres Seq. ID no. 12404210
MALRLPISSTHGLASSPAPISSTTTCRPAAASGSLIPPAALVAVAIRWASASASQKRGLLLTTARGGGVAPVRSSGIETTSTSVGAEAVTGQVTEVNKDTFWPIVEAAGDKVVVLDMYTEWCGPCKVMAPKFQEMSEKNLDVVFLKLDCNQDNKPLAKELGIKVVPTFKILKGGKVVKEVTGAKIDELAEAIEIANKKSG

SEQ ID NO: 21427 - DNA, 733 bp, Zea mays subsp. mays
  misc_feature (1)..(733): Ceres Seq. ID no. 12404215
agatcccgccgcgcgtctccttccgcgacacgctctcagtctcacgccacagctcgtcgcgttcgtcaacggtcgacccatcgcctatggaaggaaggcgcgaaccggaggcggacggcggaaaggccgggggcctcccgccgtcggagccgccgcacctgcagggccagccgccgcaggagtacgggtacggcacgttccagggccctcgacatcctcccgtcgggttcccgcagcctgccccgcctcccgggctcggcggcggcggctatcacaaccagcagcagccgtacgcgcctgcggagacgtactacgcccaggggtaccaggccgtaccaggctatggtcctgttgctgaaggaagacctgtgagaatgagggcgtctcccatgttgtggcctcggcttaggctggtgtctgttcataaccgggtttttcttggctgccattccatggttcattggagctttcgttcttatatgtgtgcgggtacatgaccaacgagagaaaccaggatacgttgcttgcacaattgctgccgttgttgctgccgttgccatcctcctgggggtaactaaaggaacgcacgtgtggtgaattgcctccagagaaggcaatcaatgtgtatttgcgttgtatatctgtgtgtgctaaaaagtgtggagcaacatccatgtgaatgtgatcttatgtccatatatattctactttgcaatgaaatttgaaatgtagt

SEQ ID NO: 21428 - protein, 164 aa, Zea mays subsp. mays
  misc_feature (1)..(164): Ceres Seq. ID no. 12404216
IPPRVSFRDTLSVSRHSSSRSSTVDPSPMEGRREPEADGGKAGGLPPSEPPHLQGQPPQEYGYGTFQGPRHPPVGFPQPAPPPGLGGGGYHNQQQPYAPAETYYAQGYQAVPGYGPVAEGRPVRMRASPMLWPRLRLVSVHNRVFLGCHSMVHWSFRSYMCAGT

SEQ ID NO: 21429 - protein, 136 aa, Zea mays subsp. mays
  misc_feature (1)..(136): Ceres Seq. ID no. 12404217
MEGRREPEADGGKAGGLPPSEPPHLQGQPPQEYGYGTFQGPRHPPVGFPQPAPPPGLGGGGYHNQQQPYAPAETYYAQGYQAVPGYGPVAEGRPVRMRASPMLWPRLRLVSVHNRVFLGCHSMVHWSFRSYMCAGT

SEQ ID NO: 21430 - protein, 123 aa, Zea mays subsp. mays
  misc_feature (1)..(123): Ceres Seq. ID no. 12404218
RSRRASPSATRSQSHATARRVRQRSTHRLWKEGANRRRTAERPGASRRRSRRTCRASRRRSTGTARSRALDILPSGSRSLPRLPGSAAAAITTSSSRTRLRRRTTPRGTRPYQAMVLLLKEDL

SEQ ID NO: 21431 - DNA, 825 bp, Zea mays subsp. mays
  misc_feature (1)..(825): Ceres Seq. ID no. 12404319
actctattcccattccaagcccccgctctcggattcccgacgacgagctcagagctcctcctctcctcccctgctcggtgttcgacgcaacagctgccgccatgtctgccgccaaccagctcgccgccctcgtcagcaacatgtacgccacgggtttgcttgacgatcagttccagcagctccagatgctccagaacgccagtactcctgacttcgtctccgaggtcgtcacgctcttctgccaggacggcgagcggatcatcggagagctggccaaactgttggagaaacccaacgtggattttgacagggttgacgcctttgtgcatcagctcaaaggaagcagtgcaagtattggtgctcagaaggttaagaacacttgcattcagttccgcgaatcctgtcagcagaagagcaaagatgggtgcctcaagacactggagacagtgaagattaacttctatgacctgcgtgacaagtttcagaccatgcttcagctgcagcgtcaggtcaatggctgtccccccagcaagtgaacaagatggtggagtggagcttcatgttgggatgatgcgtgcatctttcaagttccagaacattctgaataagctcctcaattggcttctaggaagtctgtaatagcttagcagcaagattagcgttgacaccaccgtagcagaagtcaatgtcgtcgtttttgtgtcaccgtcttagtcgtaagtgtccgtgctgggtgatggatctcctgcaagcagttgcaagtggtccatttactatgtagtagtggctctgaataatctatatcttagcaatgaatttggcaac

SEQ ID NO: 21432 - protein, 177 aa, Zea mays subsp. mays
  misc_feature (1)..(177): Ceres Seq. ID no. 12404320
SIPIPSPRSRIPDDELRAPPLLPCSVFDATAAAMSAANQLAALVSNMYATGLLDDQFQQLQMLQNASTPDFVSEVVTLFCQDGERIIGELAKLLEKPNVDFDRVDAFVHQLKGSSASIGAQKVKNTCIQFRESCQQKSKDGCLKTLETVKINFYDLRDKFQTMLQLQRQVNGCPPSK

SEQ ID NO: 21433 - protein, 149 aa, Zea mays subsp. mays
  misc_feature (1)..(149): Ceres Seq. ID no. 12404321
TLFPFQAPALGFPTTSSELLLSSPARCSTQQLPPCLPPTSSPPSSATCTPRVCLTISSSSSRCSRTPVLLTSSPRSSRSSARTASGSSESWPNCWRNPTWILTGLTPLCISSKEAVQVLVLRRLRTLAFSSANPVSRRAKMGASRHWRQ

SEQ ID NO: 21434 - protein, 144 aa, Zea mays subsp. mays
  misc_feature (1)..(144): Ceres Seq. ID no. 12404322
MSAANQLAALVSNMYATGLLDDQFQQLQMLQNASTPDFVSEVVTLFCQDGERIIGELAKLLEKPNVDFDRVDAFVHQLKGSSASIGAQKVKNTCIQFRESCQQKSKDGCLKTLETVKINFYDLRDKFQTMLQLQRQVNGCPPSK

SEQ ID NO: 21435 - DNA, 997 bp, Zea mays subsp. mays
  misc_feature (1)..(997): Ceres Seq. ID no. 12404376
gcacgagaccattacctagaacatcctaatcgaaaaattatttataagccatttgcattgcgctccagcttgggagcaaaggcaaagcagccaacaacaatcagaggcaacgaagctcgcgaatcgagagcgccgggaacaacaacaagaagaagatgatgataatggagcaggaggaggaggcgtgctcgacttgttgctcctctccgctgcggcagtgcaggatttgccatgacgaggaggacgagcggcgctccgccatggagtcgccctgcgcctgctccggttccctcaagtatgctcacaggggatgcgtgcagagatggtgcgacgagaagggcagcaccgtctgcgagatttgccttcagaacttcgagacgggctacaccgttcctcccaagaaaacccaaccagctgatgtcgcggtgaccatcagagacagcgtggcggtacccaggcagcagaacgagcccgaggacgaggaggagcaggtggccgcggcgctgataggagccagcgatccggagtacgccgagtgcgcccgcgccgccggcaggagcgcgtcctggtcctgctgccgctccgtggccgtcacgttcacgattgtcctgctgctgaggcacctggtcaccgtggtgacgctcggagcggccaaccagcagcagttcgccttcagcctcctcacagtgtacttgctgcgggcgagcgggatcttgcttccgttctacgttgtcatgaggctcatctgcgtgatccatcagggacagaggcagtaccggctgcatctgcttcaggagcagaggagacacgcgttgaggcggttggcctggctgcacggccagggacagcaccagcaaccgcatgccattctggttcgttgaggaacaaggcattcgtctagtgctcatacgctcgttcatccaaccatccatcacgtacaagactgtaaatttgtaaaagggacaaaataaagaagaaacggagaaagaaaggtggc

SEQ ID NO: 21436 - protein, 241 aa, Zea mays subsp. mays
  misc_feature (1)..(241): Ceres Seq. ID no. 12404377
MMIMEQEEEACSTCCSSPLRQCRICHDEEDERRSAMESPCACSGSLKYAHRGCVQRWCDEKGSTVCEICLQNFETGYTVPPKKTQPADVAVTIRDSVAVPRQQNEPEDEEEQVAAALIGASDPEYAECARAAGRSASWSCCRSVAVTFTIVLLLRHLVTVVTLGAANQQQFAFSLLTVYLLRASGILLPFYVVMRLICVIHQGQRQYRLHLLQEQRRHALRRLAWLHGQGQHQQPHAILVR

SEQ ID NO: 21437 - protein, 240 aa, Zea mays subsp. mays
  misc_feature (1)..(240): Ceres Seq. ID no. 12404378
MIMEQEEEACSTCCSSPLRQCRICHDEEDERRSAMESPCACSGSLKYAHRGCVQRWCDEKGSTVCEICLQNFETGYTVPPKKTQPADVAVTIRDSVAVPRQQNEPEDEEEQVAAALIGASDPEYAECARAAGRSASWSCCRSVAVTFTIVLLLRHLVTVVTLGAANQQQFAFSLLTVYLLRASGILLPFYVVMRLICVIHQGQRQYRLHLLQEQRRHALRRLAWLHGQGQHQQPHAILVR

SEQ ID NO: 21438 - protein, 238 aa, Zea mays subsp. mays
  misc_feature (1)..(238): Ceres Seq. ID no. 12404379
MEQEEEACSTCCSSPLRQCRICHDEEDERRSAMESPCACSGSLKYAHRGCVQRWCDEKGSTVCEICLQNFETGYTVPPKKTQPADVAVTIRDSVAVPRQQNEPEDEEEQVAAALIGASDPEYAECARAAGRSASWSCCRSVAVTFTIVLLLRHLVTVVTLGAANQQQFAFSLLTVYLLRASGILLPFYVVMRLICVIHQGQRQYRLHLLQEQRRHALRRLAWLHGQGQHQQPHAILVR

SEQ ID NO: 21439 - DNA, 982 bp, Zea mays subsp. mays
  misc_feature (1)..(982): Ceres Seq. ID no. 12404445
gttttgtttccattccatcggtggcacgagacaggagacgccaaggccatagctagagcctagagcagcagcagaggcttgacctgaagctccacccgccatggcattcacgcccgctacggcctgctgcaaggcttccctggcgctggcaccgcgggcgtcgccccgcggcccggcggcctgcgcgcaggcggcgctcctctgcacgccctccacctccgtgttccgcggcctccgggcgcccgcatccgccgcgccggccccgcgccggcgccgctcggcggcgtccacgggcatagtctgcggcaaggtcgccaagggcagcgtgccgccgaacttcaccctcaaggaccagaacggcaagcccgtgtcgctgaacaagttcaagggcaagcccgtcgtggtttacttctaccccgccgacgagacgcccggatgcacaaagcaggcgtgcgcgttcagggactcgtacgagaagttcaagaaggccggggcggaggtgatcggcatcagcggcgacgacgcggcgtcgcacaaggcgttcgcgcagaagtaccggctgccgttcacgctgctgagcgacgaggggaaccgcgtgcgcaaggagtggggcgtcccctcggacctgttcgggacgctgccggggcgccagacgtacgtgctggacaagcagggcgtcgtgcagtacgtctacaacaaccagttccagcccgagaagcacatcggcgagacgctcaagatcctgcagaccctctgatccgatcaacctcctcactgttctgggccatgctctgcattcgtcgctgtaaaagtaccggactatgtagtagtgtagtgtatgtaaccaagagctgatgacctgatgttttgttccatccttcagtgagtctatctatcacacgattctggctcgtttgatcgaccagcatcttcctgtttgtcatggtcagtttcacttgtattacaactgtacttttggtcg

SEQ ID NO: 21440 - protein, 218 aa, Zea mays subsp. mays
  misc_feature (1)..(218): Ceres Seq. ID no. 12404446
MAFTPATACCKASLALAPRASPRGPAACAQAALLCTPSTSVFRGLRAPASAAPAPRRRRSAASTGIVCGKVAKGSVPPNFTLKDQNGKPVSLNKFKGKPVVVYFYPADETPGCTKQACAFRDSYEKFKKAGAEVIGISGDDAASHKAFAQKYRLPFTLLSDEGNRVRKEWGVPSDLFGTLPGRQTYVLDKQGVVQYVYNNQFQPEKHIGETLKILQTL

SEQ ID NO: 21441 - protein, 139 aa, Zea mays subsp. mays
  misc_feature (1)..(139): Ceres Seq. ID no. 12404447
MHKAGVRVQGLVREVQEGRGGGDRHQRRRRGVAQGVRAEVPAAVHAAERRGEPRAQGVGRPLGPVRDAAGAPDVRAGQAGRRAVRLQQPVPAREAHRRDAQDPADPLIRSTSSLFWAMLCIRRCKSTGLCSSVVYVTKS

SEQ ID NO: 21442 - DNA, 1133 bp, Zea mays subsp. mays
  misc_feature (1)..(1133): Ceres Seq. ID no. 12404468
aagtaggcaactaagacaaagtggcgaactcttctctgtactagctttcttcttcttcctcctcttcctcctcccaaacagactggatttcatcaagataatcctgaaactggagccaacaagcagacagagaaagaagagcaagaagaccggctcccagccgatacaaggtaggagtgagcagcgttagatcagttttcatctcaggatcgatatggtgacagtgagagaggagactcgcaaggggccatggacagagcaggaggacctgcaactggtatgcactgtccgtctgttcggtgaacgtcgttgggatttcattgccaaagtatcagggctcaaccggacaggcaagagctgccggctgcgctgggtcaactacctccaccctggcctcaagcgtgggcgcatgtctccccatgaagagcgactcatcctagagctgcacgctcggtggggaaacaggtggtccaggatagcacgccgcttgccagggcgcactgacaatgagatcaagaactactggaggacacacatgagaaagaaggcacaggagaggaagaggaacatgtctccatcgtcgtcctcgtcttcgctgacttaccagtcaggctacccagatactccatcaaccattggagttgagggacaggagcttcatggtggcagtggctgcatcacaagcatcctgaagggcacccctccggacatggatggctatcccatggaccagatatggatggaaattgaggcgccacagatgccctcggaggagagctttgttggggggaaccataatgtgtgcagcagccttgccaccccgctgccaccaccaactgtctgggaatactacccagaggcctgctggaaggttgacgatgagatcaagatggcaccacaatttcaatttggttatagtgaaggagttgggcccctgcttctgatgccataaatattgggtcagattactaagttatacacctacctagcagaagtgaagtgcttttgtagaaacaagctttagcatggatctgaatatttatctccgcgcttagaattgcaggtctatggatctatgcatggttgctatgtatctatctagtgtgcaagacaagatcatcttaatttgtcct

SEQ ID NO: 21443 - protein, 245 aa, Zea mays subsp. mays
  misc_feature (1)..(245): Ceres Seq. ID no. 12404469
MVTVREETRKGPWTEQEDLQLVCTVRLFGERRWDFIAKVSGLNRTGKSCRLRWVNYLHPGLKRGRMSPHEERLILELHARWGNRWSRIARRLPGRTDNEIKNYWRTHMRKKAQERKRNMSPSSSSSSLTYQSGYPDTPSTIGVEGQELHGGSGCITSILKGTPPDMDGYPMDQIWMEIEAPQMPSEESFVGGNHNVCSSLATPLPPPTVWEYYPEACWKVDDEIKMAPQFQFGYSEGVGPLLLMP

SEQ ID NO: 21444 - protein, 180 aa, Zea mays subsp. mays
  misc_feature (1)..(180): Ceres Seq. ID no. 12404470
MSPHEERLILELHARWGNRWSRIARRLPGRTDNEIKNYWRTHMRKKAQERKRNMSPSSSSSSLTYQSGYPDTPSTIGVEGQELHGGSGCITSILKGTPPDMDGYPMDQIWMEIEAPQMPSEESFVGGNHNVCSSLATPLPPPTVWEYYPEACWKVDDEIKMAPQFQFGYSEGVGPLLLMP

SEQ ID NO: 21445 - protein, 138 aa, Zea mays subsp. mays
  misc_feature (1)..(138): Ceres Seq. ID no. 12404471
MRKKAQERKRNMSPSSSSSSLTYQSGYPDTPSTIGVEGQELHGGSGCITSILKGTPPDMDGYPMDQIWMEIEAPQMPSEESFVGGNHNVCSSLATPLPPPTVWEYYPEACWKVDDEIKMAPQFQFGYSEGVGPLLLMP

SEQ ID NO: 21446 - DNA, 739 bp, Zea mays subsp. mays
  misc_feature (1)..(739): Ceres Seq. ID no. 12404547
gtggtgggttccgatccaatcgacgtcgacgactccgcagccaccgctcctctcctctcgtcgcttcttctatctctcggcgtcgaatctcatccggccagtgaccacactctactagccgcccggaaggagttcttccgggattcgagccgttgctgccctcacctctgcaggcccagcgtcgagcggagatccaatcggaaattgaactgacttcatcttttgtcgcatcccagtcaggagaagcaatgtcaggagtgatcacaaagttcgcggttacatccatggtgatgtggatggcccctgttgcgatcatgtatgggttttactaccaggtgtttccaggtgtgagtcagatgtcatcctcggcgcagacacttgccagtgggttcctggctgtcatatcagttaatctagtgatcggcttttacatattcatggcgatgaaggagactccacaccaagagccacagccagatcccaccttcctggagaaagccaaagcgagtatcaaccagccaacatcctctcgagtgagtgatgattccaaggggaagggaaaggtcgagtaagctgtagcatgttggcttaggtctcgtgtatgttaagtgcatgttatttaggaggaatagttatgccacaccatcacaaggaccgcaacctttcacaatttatgattttgctgtaaatcttgacagttatggctatggagcaatatgaagttgaaccttttgtaccg

SEQ ID NO: 21447 - protein, 107 aa, Zea mays subsp. mays
  misc_feature (1)..(107): Ceres Seq. ID no. 12404548
MSGVITKFAVTSMVMWMAPVAIMYGFYYQVFPGVSQMSSSAQTLASGFLAVISVNLVIGFYIFMAMKETPHQEPQPDPTFLEKAKASINQPTSSRVSDDSKGKGKVE

SEQ ID NO: 21448 - protein, 95 aa, Zea mays subsp. mays
  misc_feature (1)..(95): Ceres Seq. ID no. 12404549
MVMWMAPVAIMYGFYYQVFPGVSQMSSSAQTLASGFLAVISVNLVIGFYIFMAMKETPHQEPQPDPTFLEKAKASINQPTSSRVSDDSKGKGKVE

SEQ ID NO: 21449 - protein, 93 aa, Zea mays subsp. mays
  misc_feature (1)..(93): Ceres Seq. ID no. 12404550
MWMAPVAIMYGFYYQVFPGVSQMSSSAQTLASGFLAVISVNLVIGFYIFMAMKETPHQEPQPDPTFLEKAKASINQPTSSRVSDDSKGKGKVE

SEQ ID NO: 21450 - DNA, 915 bp, Zea mays subsp. mays
  misc_feature (1)..(915): Ceres Seq. ID no. 12404563
gccacacacacagtacgtacaagcctctcatcagcaatggagtccaccaagctctccgcgctgctggtgctcgccatgctcgcgctctcctcgtccccgctcgctctcgcgtgggagaaggcggaaccggagtgccactcgtgcgagtccggctcgccaccctcgaccggcggcgtccccctgcctcccgtcagcataccgtcagtcccgctgccccctgtcagcataccgtcggtccccctgccccctgtcagcataccgtcagtgcccctgccgccggtgaccctccctcccattccgatcgttgggggaagcccgagcccgacgaagaagggacaccggaaggcgtgcccaccgcctccgtctcccccgacgccgacacccacgcccacgccgtcctcggacaagtgccccatcgacgcgctcaagctcggcgcctgcgtggacgttctcgggaacgaggtgcacgtcggcgacgccaacgtccagtgctgcccgctcgtgaagggcatcgccgggctctccgcggcggcgtgcctttgcaccgccatcaaggccaaggtgctcgacatctccgtctacgtgcccatcgcgctcgaggtgctcgtcaactgcggctgcgccgtcccgccaggctacaaatgcacttgaacgattccatcccattccatttccatttccacacagcacacgtgcacagcaaaacgtctccttttaccctcccgatgcaaagtttgaaaaggctcgtcgacggatttgggtggtagccgcccgcgcgccgccgggctgttcagcaagtgcattccttcatttgttttgctattctcgttgcatgcctgtatatgcatccggtgtctcctcaaattccacttgtactttgtgtgattttgtatcaaactattctctttttttggc

SEQ ID NO: 21451 - protein, 254 aa, Zea mays subsp. mays
  misc_feature (1)..(254): Ceres Seq. ID no. 12404564
HTHSTYKPLISNGVHQALRAAGARHARALLVPARSRVGEGGTGVPLVRVRLATLDRRRPPASRQHTVSPAAPCQHTVGPPAPCQHTVSAPAAGDPPSHSDRWGKPEPDEEGTPEGVPTASVSPDADTHAHAVLGQVPHRRAQARRLRGRSRERGARRRRQRPVLPAREGHRRALRGGVPLHRHQGQGARHLRLRAHRARGARQLRLRRPARLQMHLNDSIPFHFHFHTAHVHSKTSPFTLPMQSLKRLVDGFGW

SEQ ID NO: 21452 - protein, 216 aa, Zea mays subsp. mays
  misc_feature (1)..(216): Ceres Seq. ID no. 12404565
ATHTVRTSLSSAMESTKLSALLVLAMLALSSSPLALAWEKAEPECHSCESGSPPSTGGVPLPPVSIPSVPLPPVSIPSVPLPPVSIPSVPLPPVTLPPIPIVGGSPSPTKKGHRKACPPPPSPPTPTPTPTPSSDKCPIDALKLGACVDVLGNEVHVGDANVQCCPLVKGIAGLSAAACLCTAIKAKVLDISVYVPIALEVLVNCGCAVPPGYKCT

SEQ ID NO: 21453 - protein, 204 aa, Zea mays subsp. mays
  misc_feature (1)..(204): Ceres Seq. ID no. 12404566
MESTKLSALLVLAMLALSSSPLALAWEKAEPECHSCESGSPPSTGGVPLPPVSIPSVPLPPVSIPSVPLPPVSIPSVPLPPVTLPPIPIVGGSPSPTKKGHRKACPPPPSPPTPTPTPTPSSDKCPIDALKLGACVDVLGNEVHVGDANVQCCPLVKGIAGLSAAACLCTAIKAKVLDISVYVPIALEVLVNCGCAVPPGYKCT

SEQ ID NO: 21454 - DNA, 1376 bp, Zea mays subsp. mays
  misc_feature (1)..(1376): Ceres Seq. ID no. 12404602
aaaatcaactcgagcaaagcagctagctagctagcgctagtaccatcgtgcgagtgtgagcaagctactgagagatctcggaacgtttgcttgacagcttgagtaggtaaataatctatggcgcgccgacagtggagcagcggcggcctcgcggtcgcggtgctcgccgtgctgtcgtccgtgctcatctgctcatggggccacccggtgccgggcgggcacggcggcgggctccccctgcagccgcacttctacggccacgcgtgcccgcagatggaggccatcgtggggtccctcgtggcgaaggcgcacgcggaggacccgcgcatggcggcgtccctgctgcggatgcacttccacgactgcttcgtgcaggggctgcgacgcctccgtgctgctggacgccgacggcagcggcaggttcgtcaccgagaagcggtccaaccccaacaaggactcgctccgggggttcgaggtcatcgacgagatcaaggccgcgctggagcacgcctgcccgcacaccgtctcctgcgccgacatcgtcgccgtcgccgccagggactccgtcgtcctgaccggcggacctggctgggaggtgccactggggaggagggactcgctgacggccagcctgagcggctccaacaacctcatccctgctcccaacgactccctccccaccatcatcggcaagttcgccaaccaaggcctcgacatcgtcgacctcgtcgcactctcaggggggcacaccatcggcgactcgcggtgcgtgagcttccggcagcggctgtacggccagaacaacaacgggcaggtggaccggacgctgaacccggcgtacgcggcggagctgcggggccggtgcccgccggtcgggcggcgaccagaacctgttcgcgctggacctggtgacccagttccggttcgacaaccagtactaccacaacatcctggccatgaacgggctgctcagctccgacgagatcctgctcacgcagagccgcgagaccatggacctcgtccaccgctacgccgccgaccagggcctcttcttcgaccacttcgccaagtccatggtcaagatgggcaacatctcgccgctcaccgggagcgccggcgagatcaggcacaactgcaggagggtcaaccacttctagcttccatggagtggccatccgtgcagtggtgttcttgctttggtttcatttctggatgcatgcgtcatctttcatacttggatttaagtgtgcagtagtcgtaaatgattggaatttctgttttagtttggtgcccattcgatctcgagtcgattttcactcatgtaatttgcaaatcttgtacgaagaaatgatccaataaaattcagcatttgtgtc

SEQ ID NO: 21455 - protein, 264 aa, Zea mays subsp. mays
  misc_feature (1)..(264): Ceres Seq. ID no. 12404603
MARRQWSSGGLAVAVLAVLSSVLICSWGHPVPGGHGGGLPLQPHFYGHACPQMEAIVGSLVAKAHAEDPRMAASLLRMHFHDCFVQGLRRLRAAGRRRQRQVRHREAVQPQQGLAPGVRGHRRDQGRAGARLPAHRLLRRHRRRRRQGLRRPDRRTWLGGATGEEGLADGQPERLQQPHPCSQRLPPHHHRQVRQPRPRHRRPRRTLRGAHHRRLAVRELPAAAVRPEQQRAGGPDAEPGVRGGAAGPVPAGRAATRTCSRWTW

SEQ ID NO: 21456 - protein, 212 aa, Zea mays subsp. mays
  misc_feature (1)..(212): Ceres Seq. ID no. 12404604
MEAIVGSLVAKAHAEDPRMAASLLRMHFHDCFVQGLRRLRAAGRRRQRQVRHREAVQPQQGLAPGVRGHRRDQGRAGARLPAHRLLRRHRRRRRQGLRRPDRRTWLGGATGEEGLADGQPERLQQPHPCSQRLPPHHHRQVRQPRPRHRRPRRTLRGAHHRRLAVRELPAAAVRPEQQRAGGPDAEPGVRGGAAGPVPAGRAATRTCSRWTW

SEQ ID NO: 21457 - protein, 194 aa, Zea mays subsp. mays
  misc_feature (1)..(194): Ceres Seq. ID no. 12404605
MAASLLRMHFHDCFVQGLRRLRAAGRRRQRQVRHREAVQPQQGLAPGVRGHRRDQGRAGARLPAHRLLRRHRRRRRQGLRRPDRRTWLGGATGEEGLADGQPERLQQPHPCSQRLPPHHHRQVRQPRPRHRRPRRTLRGAHHRRLAVRELPAAAVRPEQQRAGGPDAEPGVRGGAAGPVPAGRAATRTCSRWTW

SEQ ID NO: 21458 - DNA, 743 bp, Zea mays subsp. mays
  misc_feature (1)..(743): Ceres Seq. ID no. 12404618
atttttcttccgcacgcatccctcgccgcctcgcgcctgcaccggagaatcggtcccattgcccgcgaacctgcgtgtgtgaggtatcgaacaccccaagatggcaactttcgcctcaccactcctctgcaacttcatggccatcgaacagaagaacgcgcctcagctgaccaacagcagaaagccgtccctgcgcctgagcttcccaacgacaaggagcatgccaacattgccgttgccgtgcttcagagcgaggccagactggcgcgtcgccgccgtctacaaggtgaagctcatcggccccgaaggacaggagagcgtgatccaagtgccagaggacagctacatcctggacgcggccgaggaggccggtatagacctgccctactcctgccgcgctggtgcgtgctccacgtgcgccggcaaggtgctggagggctccgtcgaccaggcggaccagtcgttcctggacgacgcgcaggtcggtgccgggtatgcgctcacctgcgtcgcgtacccgacgtctgactgcgtcatccagacgcacagggaggccgacctgtactaggcagcccagtcccacgcgtaaccggatcaacgactgtgcacttccatagctcccattcggattcgatcttgagttcttgacactgattcgcacttgtgcttttgtccttgcaggtagctggaactagtagtgcattctttaatcgttattgttcaagtgtaggttgctttggttt

SEQ ID NO: 21459 - protein, 175 aa, Zea mays subsp. mays
  misc_feature (1)..(175): Ceres Seq. ID no. 12404619
IFLPHASLAASRLHRRIGPIAREPACVRYRTPQDGNFRLTTPLQLHGHRTEERASADQQQKAVPAPELPNDKEHANIAVAVLQSEARLARRRRLQGEAHRPRRTGERDPSARGQLHPGRGRGGRYRPALLLPRWCVLHVRRQGAGGLRRPGGPVVPGRRAGRCRVCAHLRRVPDV

SEQ ID NO: 21460 - protein, 155 aa, Zea mays subsp. mays
  misc_feature (1)..(155): Ceres Seq. ID no. 12404620
MATFASPLLCNFMAIEQKNAPQLTNSRKPSLRLSFPTTRSMPTLPLPCFRARPDWRVAAVYKVKLIGPEGQESVIQVPEDSYILDAAEEAGIDLPYSCRAGACSTCAGKVLEGSVDQADQSFLDDAQVGAGYALTCVAYPTSDCVIQTHREADLY

SEQ ID NO: 21461 - protein, 143 aa, Zea mays subsp. mays
  misc_feature (1)..(143): Ceres Seq. ID no. 12404621
MAIEQKNAPQLTNSRKPSLRLSFPTTRSMPTLPLPCFRARPDWRVAAVYKVKLIGPEGQESVIQVPEDSYILDAAEEAGIDLPYSCRAGACSTCAGKVLEGSVDQADQSFLDDAQVGAGYALTCVAYPTSDCVIQTHREADLY

SEQ ID NO: 21462 - DNA, 729 bp, Zea mays subsp. mays
  misc_feature (1)..(729): Ceres Seq. ID no. 12404622
atcaacaacagccctacaacttactgcttgctctagctagctagctgctcccggcccatatctactacacaagtaggctagcagcagcagcagcaatggcctcggtgacgaggttcccggccgtggccctcgtcctgctgctcgccgccagcgccttcctggccagcgaggtggcggcgtgcggcggctgcccgaaaccaactcctcctccatcgccaccaccgccgtcgcccaccagcacgccgtgccctccgccgccgtccagctccggcggcaagtgccccaagaacgcgctgaaactgggcgtgtgcgccaacgtgctgggcctcgtcaaggtgtccatcggcaaggtgcccaccgactcgtgctgcccactgctggacgggctcgccgacctggaggccgccgtctgcctctgcaccgcgctcaaggccaacgtgctcggcgtcaacctcgacgtccccgtcaagctcaccctgctcctcaactactgcgggaagagcgtccctcagggcttcctgtgcgcctaatatatatactagtggctagttcgtcactagcttcagttgccatgcatatttgtgattcttcttctttccttctagttcaccactgtatgtacgagcctcctccggatgttttctttggtattgccttctcttctactcttctcctaacttgcttgcattatacattgcgtgagcatgataatatataaatcattgggtg

SEQ ID NO: 21463 - protein, 144 aa, Zea mays subsp. mays
  misc_feature (1)..(144): Ceres Seq. ID no. 12404623
MASVTRFPAVALVLLLAASAFLASEVAACGGCPKPTPPPSPPPPSPTSTPCPPPPSSSGGKCPKNALKLGVCANVLGLVKVSIGKVPTDSCCPLLDGLADLEAAVCLCTALKANVLGVNLDVPVKLTLLLNYCGKSVPQGFLCA

SEQ ID NO: 21464 - DNA, 860 bp, Zea mays subsp. mays
  misc_feature (1)..(860): Ceres Seq. ID no. 12404667
attacccaccataccaaccccgcgttgcggttatatagggccgtatttcccccgcgtctccgcgtcagtggaagcgatcgacaccattcaagctaaagctgctttcttgggaaacgcttcatcgccacagctcgatcgatggcttcttcctggggttctcggttgccgctcgcagtagtgctgctgctcgtggcactgctcctcctccacggcagccgccacaagctacaccgtcggcgacgggtccggctggacaaccggcgtcgactacacatcttgggccgcctccaaaaacttcaaagtcggggacaatctcgtgttcaactacgcgaaagggctgcacacggtggtggaggtgagcgcggccgagtacatggcgtgcacggccgccaactcgctgggctccgacagcagcggcgcgaccaccgtggccctcaggacgccaggcacccactacttcgtgtgcagcatcacggggcactgcggcgccgggatgaagctggcggtgaccctcggcggctccaactcccctgctgccacgccgcggacgtcgtccccgacccctaccacgccgtacacgacgccggccaccaccacgccgtacacgacgccgacgtgctctggcggcggcggcaccacggcgaccccgggcatgactccgttcacgtcataccccagcgcggccggccttgggtcggcggcgttggctggatttagtctggtttggtgtgtgagtgtccggctagcgctgctctaggcaaagggcggccatggaccgtggtcgaccagggtatgtaacagtgtaacgtatgtgtttgttctttgttccggatcgagctagctggggtatagtatacttg

SEQ ID NO: 21465 - protein, 192 aa, Zea mays subsp. mays
  misc_feature (1)..(192): Ceres Seq. ID no. 12404668
MASSWGSRLPLAVVLLLVALLLLHGSRHKLHRRRRVRLDNRRRLHILGRLQKLQSRGQSRVQLRERAAHGGGGERGRVHGVHGRQLAGLRQQRRDHRGPQDARHPLLRVQHHGALRRRDEAGGDPRRLQLPCCHAADVVPDPYHAVHDAGHHHAVHDADVLWRRRHHGDPGHDSVHVIPQRGRPWVGGVGWI

SEQ ID NO: 21466 - protein, 127 aa, Zea mays subsp. mays
  misc_feature (1)..(127): Ceres Seq. ID no. 12404669
MACTAANSLGSDSSGATTVALRTPGTHYFVCSITGHCGAGMKLAVTLGGSNSPAATPRTSSPTPTTPYTTPATTTPYTTPTCSGGGGTTATPGMTPFTSYPSAAGLGSAALAGFSLVWCVSVRLALL

SEQ ID NO: 21467 - DNA, 740 bp, Zea mays subsp. mays
  misc_feature (1)..(740): Ceres Seq. ID no. 12404680
aacacaggcaccacagctgagagacgatagaagcacgcagcagctgaaagggaggggaactaggaatgaaggggagcaaggtccacgagcacgaggcagacgtccccgcctccgacctctgggcgatctacggctccctccgcgccgcgagactcctgccggagctgctcccgcacgtgctcgccaaggtggagctcgtcagcggcgacggcggtgttggtaccatcttgcagctaatatttcctcccggtgagtataagatacgtgtgtatgctgccataatatctttgatgttggatatgctaagatactagtagtaaagttttaattgctctgctccgctccgctcctagggattcctgggctacagagttacaaggagaagttcatcaaagttgacaacgagaactatatcaaggaggcagaagccattgatggcgacattttgaagctggggttcgaggcatacatgatacggtttgagatcattccaaaaggggccaattcgtctgtcatcaggtcgactatcgagtatgtgattgctgatgcgcacccggagctcgaagctatggtgagcacagcaactttggctgaaactgctcagaaattttccgagtttgctaaggcgaagtaggtcccataaggaatgtcttgaaatatatatatatatatctcgagagcggagtttatgtttatcatgaaacaagtgaaatacagtttcagcgctttcgtgttgcgcc

SEQ ID NO: 21468 - protein, 83 aa, Zea mays subsp. mays
  misc_feature (1)..(83): Ceres Seq. ID no. 12404681
TQAPQLRDDRSTQQLKGRGTRNEGEQGPRARGRRPRLRPLGDLRLPPRRETPAGAAPARARQGGARQRRRRCWYHLAANISSR

SEQ ID NO: 21469 - protein, 82 aa, Zea mays subsp. mays
  misc_feature (1)..(82): Ceres Seq. ID no. 12404682
MKGSKVHEHEADVPASDLWAIYGSLRAARLLPELLPHVLAKVELVSGDGGVGTILQLIFPPGEYKIRVYAAIISLMLDMLRY

SEQ ID NO: 21470 - protein, 54 aa, Zea mays subsp. mays
  misc_feature (1)..(54): Ceres Seq. ID no. 12404683
MIRFEIIPKGANSSVIRSTIEYVIADAHPELEAMVSTATLAETAQKFSEFAKAK

SEQ ID NO: 21471 - DNA, 834 bp, Zea mays subsp. mays
  misc_feature (1)..(834): Ceres Seq. ID no. 12404684
gaaccaagaaagaatcacacaacagcagctcaaaaacctaacacacctcaacaagcagagcaaagacccgggattcgccggcgcggtagcgagagcgagagatggacgggaggatgttcggtctcgagacccccctgatggtggcgctgcagcaccttctggacgtgcccgacggcgacgccggcgcgggcggcgacaaggcgagtggtgccgcggcgggcggcgggcccacgcgcacctacgtccgcgacgcgcgcgccatggcggccaccccggccgacgtcaaggagctcccgggcgcgtacgcgttcgtggtggacatgccggggctgggcacgggcgacatcaaggtgcaggtggaggacgagcgggtgctggtgatcagcggcgagcggcgccgggcaggagcgcgaggacgccaagtacctgcgcatggagcggcggatgggcaagttcatgcgcaagttcgtgctgccggacaacgccgacatggacaagatctcggcggtgtgcagggacggcgtgctcaccgtgaccgtcgagaagctgcccccgcccgagcccaagaaacccaagaccatcgaggtcaaggtcgcctgaggtgggactaggtcgaccgatcgtggctctgaagatgtgggagcagtgccagcgagttgtgaggacctctacctgtgtggaatgtggcgaggaataatcgtagtctgtagtgggggtgcttctggtgtgcgtgtttgcgttccttcggtctcggtgtctgtctaccaattcctatctgatgtatcggcttcggtttcgtatgaaccatgccggatgctttcagtatgttcatcg

SEQ ID NO: 21472 - protein, 177 aa, Zea mays subsp. mays
  misc_feature (1)..(177): Ceres Seq. ID no. 12404685
NQERITQQQLKNLTHLNKQSKDPGFAGAVARARDGREDVRSRDPPDGGAAAPSGRARRRRRRGRRQGEWCRGGRRAHAHLRPRRARHGGHPGRRQGAPGRVRVRGGHAGAGHGRHQGAGGGRAGAGDQRRAAPGRSARTPSTCAWSGGWASSCASSCCRTTPTWTRSRRCAGTACSP

SEQ ID NO: 21473 - protein, 169 aa, Zea mays subsp. mays
  misc_feature (1)..(169): Ceres Seq. ID no. 12404686
MDGRMFGLETPLMVALQHLLDVPDGDAGAGGDKASGAAAGGGPTRTYVRDARAMAATPADVKELPGAYAFVVDMPGLGTGDIKVQVEDERVLVISGERRRAGARGRQVPAHGAADGQVHAQVRAAGQRRHGQDLGGVQGRRAHRDRREAAPARAQETQDHRGQGRLRWD

SEQ ID NO: 21474 - protein, 165 aa, Zea mays subsp. mays
  misc_feature (1)..(165): Ceres Seq. ID no. 12404687
MFGLETPLMVALQHLLDVPDGDAGAGGDKASGAAAGGGPTRTYVRDARAMAATPADVKELPGAYAFVVDMPGLGTGDIKVQVEDERVLVISGERRRAGARGRQVPAHGAADGQVHAQVRAAGQRRHGQDLGGVQGRRAHRDRREAAPARAQETQDHRGQGRLRWD

SEQ ID NO: 21475 - DNA, 656 bp, Zea mays subsp. mays
  misc_feature (1)..(656): Ceres Seq. ID no. 12404694
atcaccaatctcaactcagcgagctctccaccagttttacagccaagaaagaaccaaccatgatcagcaccaagaggatcgctcagctggccaagaagtggcagaggatggaagcgctcgggaggaagcgccgcctcgcctgggggacggcggcggcggcaaagaaagccgacaggtgctgcgcctccgtggcgagcaagggccactgcgcggtgtacacgactgacggggcacggttcgaggtgccattggcgtgcctcgggacggaagtcttcgccgagctcctgcacatgtccagagaggagttcggcttcgcgggcggccacggcaggatcttgctgccctgcgacgccatggtcatggagtacgccctgtgcttgctgcggaggggcgcctctgcggacctggagaaggcgttcctcagcaccatggcgatgtcgtgccactctgcagaccacgcggcggcgccatatgtggcggcttgctgttagtttgcagctgtataagtagtggcagagagttcatcactgtatatagtaggacaaagagaggtgttgttcagatcctgcgacccattaaggaaggtagcgattagcaagttagcgccagtgctcttgtttgagcagtgagcatattacagcttaatttcacgcccg

SEQ ID NO: 21476 - protein, 162 aa, Zea mays subsp. mays
  misc_feature (1)..(162): Ceres Seq. ID no. 12404695
HQSQLSELSTSFTAKKEPTMISTKRIAQLAKKWQRMEALGRKRRLAWGTAAAAKKADRCCASVASKGHCAVYTTDGARFEVPLACLGTEVFAELLHMSREEFGFAGGHGRILLPCDAMVMEYALCLLRRGASADLEKAFLSTMAMSCHSADHAAAPYVAACC

SEQ ID NO: 21477 - protein, 143 aa, Zea mays subsp. mays
  misc_feature (1)..(143): Ceres Seq. ID no. 12404696
MISTKRIAQLAKKWQRMEALGRKRRLAWGTAAAAKKADRCCASVASKGHCAVYTTDGARFEVPLACLGTEVFAELLHMSREEFGFAGGHGRILLPCDAMVMEYALCLLRRGASADLEKAFLSTMAMSCHSADHAAAPYVAACC

SEQ ID NO: 21478 - protein, 127 aa, Zea mays subsp. mays
  misc_feature (1)..(127): Ceres Seq. ID no. 12404697
MEALGRKRRLAWGTAAAAKKADRCCASVASKGHCAVYTTDGARFEVPLACLGTEVFAELLHMSREEFGFAGGHGRILLPCDAMVMEYALCLLRRGASADLEKAFLSTMAMSCHSADHAAAPYVAACC

SEQ ID NO: 21479 - DNA, 907 bp, Zea mays subsp. mays
  misc_feature (1)..(907): Ceres Seq. ID no. 12404717
gcacgagaccattacctagaacatcctaatcgaaaaaaactcgtctcccgtctcctccgcgttcccgctttccacccgccgccgccgccgcccaccttaccgtcacctgctccttgcccagcatgtggggtagcaccgacggcggaacgccggaggtcaccctcgagacctccatgggcgctgtctctgttgagatgtactacaggcacgcgcccaagacttgccggaacttcgtcgagctcgcgcgacgtggctactacgacaacgttatcttccaccgcatcatcaaagatttcattgtgcaaggtggggatcctacaggaaccggcagaggtggcgagtccatctatggagcaaagtttgaggatgagataaagactgagttaaagcacactggggctggaattctgtccatggcaaacgctggcccaaacacgaatggaagccagttcttcataactcttgccccttgtcagtcacttgatgggaaacatacaatttttgggagggtatgcagaggaatggaaattgttaagcgccttggaagtgtgcagactgacaaaaatgataggcctatccatgaagtgaaaatcttgcgtgccgttgtcaaagactgaagcattatccagatgtaactccgagtgttggtttaggctttaataatggccatgttcatgtaagtggtacctttgcgaaaaggtgaaaagtgcagctagttccagcctatatgagtatggtctcaagatgtggctgacctgaaaccctacctgatgagtagattggaccttttgatcaagaaggtatttgaaacagtttatatgcgtgtgtggtttgagtttctctgcgaggtatttgaaacaaatagttccagactatgttcgcttcaatcttaaagtcagttgtttgg

SEQ ID NO: 21480 - protein, 164 aa, Zea mays subsp. mays
  misc_feature (1)..(164): Ceres Seq. ID no. 12404718
MWGSTDGGTPEVTLETSMGAVSVEMYYRHAPKTCRNFVELARRGYYDNVIFHRIIKDFIVQGGDPTGTGRGGESIYGAKFEDEIKTELKHTGAGILSMANAGPNTNGSQFFITLAPCQSLDGKHTIFGRVCRGMEIVKRLGSVQTDKNDRPIHEVKILRAVVKD

SEQ ID NO: 21481 - protein, 147 aa, Zea mays subsp. mays
  misc_feature (1)..(147): Ceres Seq. ID no. 12404719
MGAVSVEMYYRHAPKTCRNFVELARRGYYDNVIFHRIIKDFIVQGGDPTGTGRGGESIYGAKFEDEIKTELKHTGAGILSMANAGPNTNGSQFFITLAPCQSLDGKHTIFGRVCRGMEIVKRLGSVQTDKNDRPIHEVKILRAVVKD

SEQ ID NO: 21482 - protein, 140 aa, Zea mays subsp. mays
  misc_feature (1)..(140): Ceres Seq. ID no. 12404720
MYYRHAPKTCRNFVELARRGYYDNVIFHRIIKDFIVQGGDPTGTGRGGESIYGAKFEDEIKTELKHTGAGILSMANAGPNTNGSQFFITLAPCQSLDGKHTIFGRVCRGMEIVKRLGSVQTDKNDRPIHEVKILRAVVKD

SEQ ID NO: 21483 - DNA, 1517 bp, Zea mays subsp. mays
  misc_feature (1)..(1517): Ceres Seq. ID no. 12404731
acacaatcacgctacagagcgcagagctgcacgctccaccggcgaactcacctcggccgccctcctctgccagatagcctccctctactattcaagcccaaaccctaaatcctcggttcccaaatggcgacgccgccgactgcgctgctgttgctcctcgcggcggcagcggcattccacggcgcgacggcgaagacgacgatcgagccgtgctctggcgcggacgcgtgcccggctcttctgggctacaagctctacgcggacatgaaggtgtccgaggtggcggcgctcttcggcgccgacccggcagcggtactggctgccaacgcgctcgacttcgcctctccaggcgccgccaaccgcatcctccccgcgggaacacccctccgcgtgcccacccgctgcgcctgcgccgacggcgtccgcaagtccgtcgccatccgctacgccgcccggccttccgacacgctcggctccatctccgaggtcgtcttcgccggcctcccctcggccgaccagatccgcaccgccaacgggctcgccgccgaggaccccgacgcgccgctcaacccgggccaggagctcgtcatcccgctcccctgcgtctgcttcaactccaccgacaacaacctccccgctgtgtacctctcctatgtcgtgcaggtcggggacaccgtggaatccatcgccgccagccacacaaccaccgtcactgatatcagcaatgtgaacgccatggggagccccattgtcgcaccaggcgacatccttgccataccattgtctgcttgtgcctcagcatttcctaactctgcttcggactatggattgcttgtggcaaatggaacctatgcactgactgctggtaactgtgtggagtgcagttgtgggccagcgaatctcaatttgtattgcatgccgtcttcactatcagcatcatgttcaagtatgcaatgctctaatagcagcctaattcttggtaatgtgactgcacaacccaccactggtggctgcagtgtctcatcttgcaactatggtggctatgtcaatggaaccattgcaacatcgctatcctcaggtcttcaacccatgtgtccaggaccgcatcaatttcccccactcacggcggtgccaactgcggcaaaccatgggtcttattccccatcacctgcaccaggacctggagatgctggtggtgccaccccaggaggttccagcctttctccatcaaatgagcctgctgggaacagctcacaagcggctgcgataaatcaaccatgccgtttcctcctcattttcattctttctgtgacattgtccttgcgggtgtggattcctgtgtagagtattgttttttttaaataactatgtagagtatttgttggctgtatttgtattgagcgtggaaggccttatttggggccaggtggaacctgaatgaagaatgcagtagcctgtcttcgttagtgtccggtgaaactttggtatgattttggtttctccagaatttgtatatg

SEQ ID NO: 21484 - protein, 406 aa, Zea mays subsp. mays
  misc_feature (1)..(406): Ceres Seq. ID no. 12404732
MATPPTALLLLLAAAAAFHGATAKTTIEPCSGADACPALLGYKLYADMKVSEVAALFGADPAAVLAANALDFASPGAANRILPAGTPLRVPTRCACADGVRKSVAIRYAARPSDTLGSISEVVFAGLPSADQIRTANGLAAEDPDAPLNPGQELVIPLPCVCFNSTDNNLPAVYLSYVVQVGDTVESIAASHTTTVTDISNVNAMGSPIVAPGDILAIPLSACASAFPNSASDYGLLVANGTYALTAGNCVECSCGPANLNLYCMPSSLSASCSSMQCSNSSLILGNVTAQPTTGGCSVSSCNYGGYVNGTIATSLSSGLQPMCPGPHQFPPLTAVPTAANHGSYSPSPAPGPGDAGGATPGGSSLSPSNEPAGNSSQAAAINQPCRFLLIFILSVTLSLRVWIPV

SEQ ID NO: 21485 - protein, 359 aa, Zea mays subsp. mays
  misc_feature (1)..(359): Ceres Seq. ID no. 12404733
MKVSEVAALFGADPAAVLAANALDFASPGAANRILPAGTPLRVPTRCACADGVRKSVAIRYAARPSDTLGSISEVVFAGLPSADQIRTANGLAAEDPDAPLNPGQELVIPLPCVCFNSTDNNLPAVYLSYVVQVGDTVESIAASHTTTVTDISNVNAMGSPIVAPGDILAIPLSACASAFPNSASDYGLLVANGTYALTAGNCVECSCGPANLNLYCMPSSLSASCSSMQCSNSSLILGNVTAQPTTGGCSVSSCNYGGYVNGTIATSLSSGLQPMCPGPHQFPPLTAVPTAANHGSYSPSPAPGPGDAGGATPGGSSLSPSNEPAGNSSQAAAINQPCRFLLIFILSVTLSLRVWIPV

SEQ ID NO: 21486 - DNA, 1452 bp, Zea mays subsp. mays
  misc_feature (1)..(1452): Ceres Seq. ID no. 12404819
  misc_feature (243)..(243): n is a, c, t, g, unknown, or other
  misc_feature (417)..(417): n is a, c, t, g, unknown, or other
  misc_feature (1029)..(1029): n is a, c, t, g, unknown, or other
  misc_feature (1032)..(1032): n is a, c, t, g, unknown, or other
  misc_feature (1035)..(1035): n is a, c, t, g, unknown, or other
  misc_feature (1038)..(1038): n is a, c, t, g, unknown, or other
  misc_feature (1041)..(1041): n is a, c, t, g, unknown, or other
  misc_feature (1044)..(1044): n is a, c, t, g, unknown, or other
  misc_feature (1187)..(1187): n is a, c, t, g, unknown, or other
  misc_feature (1381)..(1381): n is a, c, t, g, unknown, or other
ataacctcgcgcacacagcccagcacaagcacgcagcagccctccagctccagccaagcaaagcacaggggtccattgcactgcattgtattgcagcatttctctgcttcgcttcgcttgcttcaggaaagcttgagctagctcgaagtagaaggacaagacagcaaagtcacgcaccatgagaaccatcggggcgaggaacacgcacgactcgctctccttctccaggcgccacttcaagtngcccgtcctcggcaagagcaagagccacggcgccgcgacgttcggggacgaggagtacatgaagagctcggaggcggaggacgacgacgagacgaccatggccttctcctccgcctgcccgtccttccactccgatggcttcgtgtcccctccgctgaagccggcgccgtcggnccagcagcagcaggtggcggcggcggcggcggggcagaggaggaggatgaaggtccggactgccgtgtcgcgcctgcgctcggcgctggccaacgccgtggccgggcggcaccgacaggtgggcatgggcgcgcggctcaccggcacgctctacggccaccggcgcggccacgtgcacctggcgttccaggtggacccgcgcgcgtgcccggcgctgctgctggagctggcggcgcccacggcggcgctggtgcgggagatggcctcgggcctggtgcgcatcgcgctggagtgcgaccgcgccagggccagggggtcgcccgccgccgcgctgccgtccccgtccccgggcgccggcaagaggctggtggaggagacggtgtggcgcgcctactgcaacggcaagagctgcgggtacgcggtgcggcgcgagtgcggcgccgcggactggcgcgtgctccgcgcgctcgagcccgtgtccatgggcgccggagtcatccccgccgccagctgcggcggcggcgagggcgacgtcatgtacatgcgcgcgcggttcgagcgcgtcgtggggtctcgcgactcggaggccttctacatgatgaatccggacgncancgncgncgnagncggtcatgtcgggcccgagctcagcgtctacctcctcagagtctgatcggctcggccgccatggcagtggcagtgacatctgcacctcggccctgatcgtttttttctgtgcatgccaagctgtgaaaatggattagtaggcncctaggtgtagctgttagcacttctagggggtgtttgataaagtggctaagtccctaggttcacatcgaatgtttgatgctagattaaagtattaaatatattttaagtataaaaaataattaaatagataagaactgaacggcaacacaaacctattagcctaattagttcgtgatctgcctatacgatggtncaataaacatctgctaatcacgaattaattaggtttaataaattatgtcgctgtttagtcatcatctttgt

SEQ ID NO: 21487 - protein, 303 aa, Zea mays subsp. mays
  misc_feature (1)..(303): Ceres Seq. ID no. 12404820
  misc_feature (22)..(22): Xaa is any aa, unknown or other
  misc_feature (80)..(80): Xaa is any aa, unknown or other
  misc_feature (284)..(284): Xaa is any aa, unknown or other
  misc_feature (285)..(285): Xaa is any aa, unknown or other
  misc_feature (286)..(286): Xaa is any aa, unknown or other
  misc_feature (287)..(287): Xaa is any aa, unknown or other
  misc_feature (288)..(288): Xaa is any aa, unknown or other
  misc_feature (289)..(289): Xaa is any aa, unknown or other
MRTIGARNTHDSLSFSRRHFKXPVLGKSKSHGAATFGDEEYMKSSEAEDDDETTMAFSSACPSFHSDGFVSPPLKPAPSXQQQQVAAAAAGQRRRMKVRTAVSRLRSALANAVAGRHRQVGMGARLTGTLYGHRRGHVHLAFQVDPRACPALLLELAAPTAALVREMASGLVRIALECDRARARGSPAAALPSPSPGAGKRLVEETVWRAYCNGKSCGYAVRRECGAADWRVLRALEPVSMGAGVIPAASCGGGEGDVMYMRARFERVVGSRDSEAFYMMNPDXXXXXXGHVGPELSVYLLRV

SEQ ID NO: 21488 - protein, 262 aa, Zea mays subsp. mays
  misc_feature (1)..(262): Ceres Seq. ID no. 12404821
  misc_feature (39)..(39): Xaa is any aa, unknown or other
  misc_feature (243)..(243): Xaa is any aa, unknown or other
  misc_feature (244)..(244): Xaa is any aa, unknown or other
  misc_feature (245)..(245): Xaa is any aa, unknown or other
  misc_feature (246)..(246): Xaa is any aa, unknown or other
  misc_feature (247)..(247): Xaa is any aa, unknown or other
  misc_feature (248)..(248): Xaa is any aa, unknown or other
MKSSEAEDDDETTMAFSSACPSFHSDGFVSPPLKPAPSXQQQQVAAAAAGQRRRMKVRTAVSRLRSALANAVAGRHRQVGMGARLTGTLYGHRRGHVHLAFQVDPRACPALLLELAAPTAALVREMASGLVRIALECDRARARGSPAAALPSPSPGAGKRLVEETVWRAYCNGKSCGYAVRRECGAADWRVLRALEPVSMGAGVIPAASCGGGEGDVMYMRARFERVVGSRDSEAFYMMNPDXXXXXXGHVGPELSVYLLRV

SEQ ID NO: 21489 - protein, 249 aa, Zea mays subsp. mays
  misc_feature (1)..(249): Ceres Seq. ID no. 12404822
  misc_feature (26)..(26): Xaa is any aa, unknown or other
  misc_feature (230)..(230): Xaa is any aa, unknown or other
  misc_feature (231)..(231): Xaa is any aa, unknown or other
  misc_feature (232)..(232): Xaa is any aa, unknown or other
  misc_feature (233)..(233): Xaa is any aa, unknown or other
  misc_feature (234)..(234): Xaa is any aa, unknown or other
  misc_feature (235)..(235): Xaa is any aa, unknown or other
MAFSSACPSFHSDGFVSPPLKPAPSXQQQQVAAAAAGQRRRMKVRTAVSRLRSALANAVAGRHRQVGMGARLTGTLYGHRRGHVHLAFQVDPRACPALLLELAAPTAALVREMASGLVRIALECDRARARGSPAAALPSPSPGAGKRLVEETVWRAYCNGKSCGYAVRRECGAADWRVLRALEPVSMGAGVIPAASCGGGEGDVMYMRARFERVVGSRDSEAFYMMNPDXXXXXXGHVGPELSVYLLRV

SEQ ID NO: 21490 - DNA, 1171 bp, Zea mays subsp. mays
  misc_feature (1)..(1171): Ceres Seq. ID no. 12404842
accaacgccaccaaaaccaacactccgatggatgttttcaccaagcaactcctccccatgcctcaccagcgggaccccaactacccttcctcttccacctcttcctcctcgtcgtcgtcctcctccacgcccccatctcgccctcaccaccgtgcgcaaccccagccccacaacctcccccagtcccccagacccgtcccgcgcaccatcgacaccaccccgttccccaccaccttcgtccaggccgacaccacctcgttcaagcaggtcgtccagatgctcaccggcgccgagcagccggccaacaacgacgcgacgacggcgggcgcagccgctgccgctgccgccaacggcggtggcgccggcgcccaggcggccagcggtggaccgtgctgccggcccaagaagccgtcgttcaagctgtacgagcggcggagcagcctgaagaacctgaagatgatcgcgccgctggcgatgggctcgccgccgtcgccgtcgccgcggagggcggcgccggagatcctgtcgccgagcgtgctggacttcccgtccctcacgctcagcccggtgacgccgctcgccggcgacccctttaaccgctcgccggcgtcggcgtcgtcctccgaggaggccgagcgcgcggccatcgccgagaggggcttcttcctccacccgtccccgaggggcgccgagcccccgcgcctgctcccgctcttccccgtcgtctcgccccggatggccggcgccgcggcggcgccgtcgtccgagtgaagatcccccgacgcgggcgcgcgcctgctctaccgtagccgccgccgccgccaccaccaccaccatcagtactactactactacaacaaccgtcgccgtcgccgtaccgtccgtccttgtttcgtgaggtgcttgctttgctgttcttcttgatcgacgccgctgtaatttttgcccccttcttgcttttcttggaacgggcgaggaagggagttctctctctctctctctttttttttgcttcgtttcggagcggcgacacgcgagcgatcagcgatctgacgatccaggctcgctcggttcctgatcgctcgcgtcgcgggagcctccggccgggatgaaatgatgggatggatgaattagacagttaataattaatgaagcctaatctgaagatttg

SEQ ID NO: 21491 - protein, 256 aa, Zea mays subsp. mays
  misc_feature (1)..(256): Ceres Seq. ID no. 12404843
TNATKTNTPMDVFTKQLLPMPHQRDPNYPSSSTSSSSSSSSSTPPSRPHHRAQPQPHNLPQSPRPVPRTIDTTPFPTTFVQADTTSFKQVVQMLTGAEQPANNDATTAGAAAAAAANGGGAGAQAASGGPCCRPKKPSFKLYERRSSLKNLKMIAPLAMGSPPSPSPRRAAPEILSPSVLDFPSLTLSPVTPLAGDPFNRSPASASSSEEAERAAIAERGFFLHPSPRGAEPPRLLPLFPVVSPRMAGAAAAPSSE

SEQ ID NO: 21492 - protein, 247 aa, Zea mays subsp. mays
  misc_feature (1)..(247): Ceres Seq. ID no. 12404844
MDVFTKQLLPMPHQRDPNYPSSSTSSSSSSSSSTPPSRPHHRAQPQPHNLPQSPRPVPRTIDTTPFPTTFVQADTTSFKQVVQMLTGAEQPANNDATTAGAAAAAAANGGGAGAQAASGGPCCRPKKPSFKLYERRSSLKNLKMIAPLAMGSPPSPSPRRAAPEILSPSVLDFPSLTLSPVTPLAGDPFNRSPASASSSEEAERAAIAERGFFLHPSPRGAEPPRLLPLFPVVSPRMAGAAAAPSSE

SEQ ID NO: 21493 - protein, 237 aa, Zea mays subsp. mays
  misc_feature (1)..(237): Ceres Seq. ID no. 12404845
MPHQRDPNYPSSSTSSSSSSSSSTPPSRPHHRAQPQPHNLPQSPRPVPRTIDTTPFPTTFVQADTTSFKQVVQMLTGAEQPANNDATTAGAAAAAAANGGGAGAQAASGGPCCRPKKPSFKLYERRSSLKNLKMIAPLAMGSPPSPSPRRAAPEILSPSVLDFPSLTLSPVTPLAGDPFNRSPASASSSEEAERAAIAERGFFLHPSPRGAEPPRLLPLFPVVSPRMAGAAAAPSSE

SEQ ID NO: 21494 - DNA, 1380 bp, Zea mays subsp. mays
  misc_feature (1)..(1380): Ceres Seq. ID no. 12404892
atcgttcaccgaaccggtgcttctccgtgcatatatatataagcncgcgaccccggccgggcggcatcacagcacagcagtgcgccgtcattcattcatcgctgccatggcttcccctgtcctgctcgtcgccgcgctctgctgtctctgcgcgctgctcggagcggcgggggagccggcgaggggagcggcggcggaagcgtcggcactccgcagcaaggcggccacggaccccaacatggaggtgaagttcgacttcacgccgttcctgatccagtacaagagcggccgcgttgcaccggttcatgggcacgtcgttcgtcccggcgtccgtggacccgcgcaccggggtggcctccagggacgtggtcgtggaccacgggactggcctcgcggtgcggctgtaccggccgagccgccaagccgtcgccgccggcgtcggnngcaggctcaccgtgctggtgtacttccacggcggcgcgttcgtggtggagtcggcgttcgaccccgtgtaccacggctacctgaacgcgctgacggccaaggccggggtcatcgcggtgtcggtgaactaccgcctggcgccggagcacccgctcccggcggcgtacgaggacgcgtgggcggcgctggcgtgggtggtggcgaacgcgaacgcgcgacgcggcggggccggggccggggccggggacccctggctgtccaggcacggcgacgcgtcccgcctgttcctcgccggcgacagcgccggcggcaacatcgcgcagaacctggcgatgcgcgcggcggggcagcagcagaggatcagggggctggcgctgctggacccctacttcctggggcggtacgtgggcggggtcgcggcgcgcgcgtgggacttcatctgcgcgggaaggtacgggatggaccacccgtacgtggacccgatggcgctgnnggcggagnngctgcggcggctgccgtcgccgcgcgtgctgatgacggtntcggagcaggaccggctcggccccttccagcgcgcgtacgtggacgcgctccggggcagcgggtggcgcgggcgggcgcggctgtacgtgacgcccggcgagggccactgctacttcctcaacaacctcgcctcgcccaaggccgccatgcacatggccacgctcgccgcgttcatcaacggcagctgatagcttgtcggcagcgtggtagtgctgctcacccgatcgatcagccagccctctgtacgtagctatagtggtctgtctatctcactggtgagtggagacatctgtaaccaccataccgtatactgtattttgtcagtggccgcccgagagagaggtgtttagcatgcatgttatgtaatgtaatactacgcgcacgtttttgttc

SEQ ID NO: 21495 - protein, 411 aa, Zea mays subsp. mays
  misc_feature (1)..(411): Ceres Seq. ID no. 12404893
  misc_feature (15)..(15): Xaa is any aa, unknown or other
  misc_feature (148)..(148): Xaa is any aa, unknown or other
  misc_feature (312)..(312): Xaa is any aa, unknown or other
  misc_feature (315)..(315): Xaa is any aa, unknown or other
  misc_feature (329)..(329): Xaa is any aa, unknown or other
SFTEPVLLRAYIYKXATPAGRHHSTAVRRHSFIAAMASPVLLVAALCCLCALLGAAGEPARGAAAEASALRSKAATDPNMEVKFDFTPFLIQYKSGRVAPVHGHVVRPGVRGPAHRGGLQGRGRGPRDWPRGAAVPAEPPSRRRRRRXQAHRAGVLPRRRVRGGVGVRPRVPRLPERADGQGRGHRGVGELPPGAGAPAPGGVRGRVGGAGVGGGERERATRRGRGRGRGPLAVQARRRVPPVPRRRQRRRQHRAEPGDARGGAAAEDQGAGAAGPLLPGAVRGRGRGARVGLHLRGKVRDGPPVRGPDGAXGGXAAAAAVAARADDGXGAGPARPLPARVRGRAPGQRVARAGAAVRDARRGPLLLPQQPRLAQGRHAHGHARRVHQRQLIACRQRGSAAHPIDQPALCT

SEQ ID NO: 21496 - protein, 376 aa, Zea mays subsp. mays
  misc_feature (1)..(376): Ceres Seq. ID no. 12404894
  misc_feature (113)..(113): Xaa is any aa, unknown or other
  misc_feature (277)..(277): Xaa is any aa, unknown or other
  misc_feature (280)..(280): Xaa is any aa, unknown or other
  misc_feature (294)..(294): Xaa is any aa, unknown or other
MASPVLLVAALCCLCALLGAAGEPARGAAAEASALRSKAATDPNMEVKFDFTPFLIQYKSGRVAPVHGHVVRPGVRGPAHRGGLQGRGRGPRDWPRGAAVPAEPPSRRRRRRXQAHRAGVLPRRRVRGGVGVRPRVPRLPERADGQGRGHRGVGELPPGAGAPAPGGVRGRVGGAGVGGGERERATRRGRGRGRGPLAVQARRRVPPVPRRRQRRRQHRAEPGDARGGAAAEDQGAGAAGPLLPGAVRGRGRGARVGLHLRGKVRDGPPVRGPDGAXGGXAAAAAVAARADDGXGAGPARPLPARVRGRAPGQRVARAGAAVRDARRGPLLLPQQPRLAQGRHAHGHARRVHQRQLIACRQRGSAAHPIDQPALCT

SEQ ID NO: 21497 - protein, 332 aa, Zea mays subsp. mays
  misc_feature (1)..(332): Ceres Seq. ID no. 12404895
  misc_feature (69)..(69): Xaa is any aa, unknown or other
  misc_feature (233)..(233): Xaa is any aa, unknown or other
  misc_feature (236)..(236): Xaa is any aa, unknown or other
  misc_feature (250)..(250): Xaa is any aa, unknown or other
MEVKFDFTPFLIQYKSGRVAPVHGHVVRPGVRGPAHRGGLQGRGRGPRDWPRGAAVPAEPPSRRRRRRXQAHRAGVLPRRRVRGGVGVRPRVPRLPERADGQGRGHRGVGELPPGAGAPAPGGVRGRVGGAGVGGGERERATRRGRGRGRGPLAVQARRRVPPVPRRRQRRRQHRAEPGDARGGAAAEDQGAGAAGPLLPGAVRGRGRGARVGLHLRGKVRDGPPVRGPDGAXGGXAAAAAVAARADDGXGAGPARPLPARVRGRAPGQRVARAGAAVRDARRGPLLLPQQPRLAQGRHAHGHARRVHQRQLIACRQRGSAAHPIDQPALCT

SEQ ID NO: 21498 - protein, 289 aa, Zea mays subsp. mays
  misc_feature (1)..(289): Ceres Seq. ID no. 12404896
  misc_feature (46)..(46): Xaa is any aa, unknown or other
  misc_feature (47)..(47): Xaa is any aa, unknown or other
  misc_feature (211)..(211): Xaa is any aa, unknown or other
  misc_feature (214)..(214): Xaa is any aa, unknown or other
  misc_feature (227)..(227): Xaa is any aa, unknown or other
MGTSFVPASVDPRTGVASRDVVVDHGTGLAVRLYRPSRQAVAAGVXXRLTVLVYFHGGAFVVESAFDPVYHGYLNALTAKAGVIAVSVNYRLAPEHPLPAAYEDAWAALAWVVANANARRGGAGAGAGDPWLSRHGDASRLFLAGDSAGGNIAQNLAMRAAGQQQRIRGLALLDPYFLGRYVGGVAARAWDFICAGRYGMDHPYVDPMALXAEXLRRLPSPRVLMTXSEQDRLGPFQRAYVDALRGSGWRGRARLYVTPGEGHCYFLNNLASPKAAMHMATLAAFINGS

SEQ ID NO: 21499 - DNA, 1255 bp, Zea mays subsp. mays
  misc_feature (1)..(1255): Ceres Seq. ID no. 12404948
atggcagatgcacaggtagtagtaactgcagctgcaaagctggcagtgtcggtgtcggtgtcgtcgtcggcgtcggtgctggggagcgggcgagcggcgcgtcgcatgattctgtcctcctgacgtggcagctaacgattccgattccctttggttgcagtgcgacgacattgacatggacatggcgcagctggagtggctgtcggggctcttcgacgacgcatccatcccgcacgagccggcgttccccggcgcggcgcccatcatcaagagctccgcgctggcggccggcgcgctgctgccgccggacaagatgggggacgcgctgctgttccgcagctccagccccatctcggtgctggagcacggcagcttcaacaacgccaacggcggtggcggcggctgctccgcgtcgtcggagtcgtcctcggcgtcctcgtcctcggagtctttctccggcagcgggagcggcgaaggccatgcgtggtcggcgcccgtgtcgccgccacccgtgctcgtcataccggcgcgcgcgcggagcaagcgctcccgcccgtccgcgttcacgcgcgccggggcggaggcgcccaccatcctcgtgccgacgcccatgtactcgtccgggccgtcccactcggaccccgagagcatcgctgagtccagcccgcacccggcgccgcccatgaagaaaaagaagaaggccaagaagccgccggcgccgcccgcgcccgcctcttccgacgacaacgacggcgacgccgactacgaggaaggcggcgagcgcacggagccgcagggctgcgccgtcaggaggtgcacgcactgccagatcgagaagacgccgcagtggcgcgcggggccgctggggcccaagaccctctgcaacgcctgtggcgtgcgctacaagtccggccgcctgttcccggagtaccgtcccgcggcgagccccaccttcgtgccgtccatccactccaactcgcacaagaaggtggtggagatgcgccagaaggctgtccggagcggtgacccgtcgtgcgacctcctgcagttcatccgccgccgggattgacgtcccggcacggtgtcgccggactgtcggtcggtctcgtcccccttatagctagctatatagtatatgtatacatgctagtatgtatgcatgcatggttgcttcagcagtcgttggtcgtcgtcgtccatcatggtcatcatcaccacttcaccggtcaccgccatggcatggatcccacccctc

SEQ ID NO: 21500 - protein, 297 aa, Zea mays subsp. mays
  misc_feature (1)..(297): Ceres Seq. ID no. 12404949
MDMAQLEWLSGLFDDASIPHEPAFPGAAPIIKSSALAAGALLPPDKMGDALLFRSSSPISVLEHGSFNNANGGGGGCSASSESSSASSSSESFSGSGSGEGHAWSAPVSPPPVLVIPARARSKRSRPSAFTRAGAEAPTILVPTPMYSSGPSHSDPESIAESSPHPAPPMKKKKKAKKPPAPPAPASSDDNDGDADYEEGGERTEPQGCAVRRCTHCQIEKTPQWRAGPLGPKTLCNACGVRYKSGRLFPEYRPAASPTFVPSIHSNSHKKVVEMRQKAVRSGDPSCDLLQFIRRRD

SEQ ID NO: 21501 - protein, 295 aa, Zea mays subsp. mays
  misc_feature (1)..(295): Ceres Seq. ID no. 12404950
MAQLEWLSGLFDDASIPHEPAFPGAAPIIKSSALAAGALLPPDKMGDALLFRSSSPISVLEHGSFNNANGGGGGCSASSESSSASSSSESFSGSGSGEGHAWSAPVSPPPVLVIPARARSKRSRPSAFTRAGAEAPTILVPTPMYSSGPSHSDPESIAESSPHPAPPMKKKKKAKKPPAPPAPASSDDNDGDADYEEGGERTEPQGCAVRRCTHCQIEKTPQWRAGPLGPKTLCNACGVRYKSGRLFPEYRPAASPTFVPSIHSNSHKKVVEMRQKAVRSGDPSCDLLQFIRRRD

SEQ ID NO: 21502 - protein, 251 aa, Zea mays subsp. mays
  misc_feature (1)..(251): Ceres Seq. ID no. 12404951
MGDALLFRSSSPISVLEHGSFNNANGGGGGCSASSESSSASSSSESFSGSGSGEGHAWSAPVSPPPVLVIPARARSKRSRPSAFTRAGAEAPTILVPTPMYSSGPSHSDPESIAESSPHPAPPMKKKKKAKKPPAPPAPASSDDNDGDADYEEGGERTEPQGCAVRRCTHCQIEKTPQWRAGPLGPKTLCNACGVRYKSGRLFPEYRPAASPTFVPSIHSNSHKKVVEMRQKAVRSGDPSCDLLQFIRRRD

SEQ ID NO: 21503 - DNA, 1868 bp, Zea mays subsp. mays
  misc_feature (1)..(1868): Ceres Seq. ID no. 12404960
cccgtcactcttgtgtcctcctaaaaccctaaccctccgccgcccctcggacccccaaccagcagctgccgcggccatccgccggcgagatggcgctgtacctgctgttcgagtcggcgtccggctacggtctattccacgcgtacggcatcgatgagatcgggcagagcgtggaggccgttcgctcctccgtgctggacctcgatcgcttcggcaaggccgtcaagctcaccgccttcaaccctttctcctctgccgtcgatgcactcaatcagtgcaacgcttatatccgaaggatcatgaccgatgaactgaggagtttcctggagctgaacctgccgaagcccaaggaggggaagaaggccaaatacagcctcggggtcgtcgagcccaaggtcggttctcacatctccgaggtcaccggcattccctgccagagcaacgaattcgtccaggagctgctccgcggtgtccgcctccacttcgaccgtttcatcaacgagcttaaggattctgacttggagaaggcccagcttggcctggggcatagctacagcagggccaaggtgaagttcaatgtgaatcgtgttgacaacatggtgatccaggcaatctttctattggatacgcttgacaaggacatcaattccttctccatgagagtcagggaatggttctcatggcacttccctgagcttgtcaagattgtgaacgacaattacctatatgccaagcttgctaagtttatcgtgaacaaatctgatttgacggaaaaagatattcctgctttggctgatatagttggcgacgaggacaaggctaaagaaattgttgaagcagcaaaggcttcaatgggccaggatctgtcaccagttgatttgatcaatgtccagcaatttgcccaaagggttatgaatctctctgagtatcgcaaaaacctttatgagtatcttgtgactaagatgaatgatattgcacccaacctgacatcgttgattggtgaagtagttggagctcgcctaatctctcatgctggcagtctttcaaaccttgctaagtgtgcagcctccacccttcaaatacttggtgctgagaaggccctattcagagcactgaaaactcgagggaacacaccaaagtatgggcttatattccactcctcctttattggccgtgcttcaactaagaacaagggcagaatggctcgttacctggcaaacaaatgctcgattgcttcacgcattgactgctactcggaggctagcacctctgtctttgggcaaaagttgcgtgagcaagtcgaggagagactggaattctatgacaagggtgttgcgcctcgtaaaaaccttgatgtgatgaaagccgctattgacagcatggtcaatggcacctcaatggatgatgatgatatcgagaagaccgatgcatctcccaagaaaagcaagaaaaagaagaccaaaaccaaggctgatggtgatgcaatggacgtggataaaccctccaacgttgctggtggagaagctgagcctggaactgagaagaagaagaagaaaaagaagcataagctggaggaggaggcacaggaggagaacggtgcagcagatactacccctaagaaaaagaaaaagaagagccgtgaagcttccgaagaagctgaacctaagaccgccaccgatggtaagaagaagaaaaagaaggctaaggccgaggatgatgagtagccaagttatttgttgtatggcgtatgaatccgagagtatttgttgaaaaacagagatgaacgcctgcctaactcaactagcttgtagttcatgaggcgtttgatgcaaacccaactcaaagtacgaagttttcctatcgtcttt

SEQ ID NO: 21504 - protein, 544 aa, Zea mays subsp. mays
  misc_feature (1)..(544): Ceres Seq. ID no. 12404961
MALYLLFESASGYGLFHAYGIDEIGQSVEAVRSSVLDLDRFGKAVKLTAFNPFSSAVDALNQCNAYIRRIMTDELRSFLELNLPKPKEGKKAKYSLGVVEPKVGSHISEVTGIPCQSNEFVQELLRGVRLHFDRFINELKDSDLEKAQLGLGHSYSRAKVKFNVNRVDNMVIQAIFLLDTLDKDINSFSMRVREWFSWHFPELVKIVNDNYLYAKLAKFIVNKSDLTEKDIPALADIVGDEDKAKEIVEAAKASMGQDLSPVDLINVQQFAQRVMNLSEYRKNLYEYLVTKMNDIAPNLTSLIGEVVGARLISHAGSLSNLAKCAASTLQILGAEKALFRALKTRGNTPKYGLIFHSSFIGRASTKNKGRMARYLANKCSIASRIDCYSEASTSVFGQKLREQVEERLEFYDKGVAPRKNLDVMKAAIDSMVNGTSMDDDDIEKTDASPKKSKKKKTKTKADGDAMDVDKPSNVAGGEAEPGTEKKKKKKKHKLEEEAQEENGAADTTPKKKKKKSREASEEAEPKTATDGKKKKKKAKAEDDE

SEQ ID NO: 21505 - protein, 474 aa, Zea mays subsp. mays
  misc_feature (1)..(474): Ceres Seq. ID no. 12404962
MTDELRSFLELNLPKPKEGKKAKYSLGVVEPKVGSHISEVTGIPCQSNEFVQELLRGVRLHFDRFINELKDSDLEKAQLGLGHSYSRAKVKFNVNRVDNMVIQAIFLLDTLDKDINSFSMRVREWFSWHFPELVKIVNDNYLYAKLAKFIVNKSDLTEKDIPALADIVGDEDKAKEIVEAAKASMGQDLSPVDLINVQQFAQRVMNLSEYRKNLYEYLVTKMNDIAPNLTSLIGEVVGARLISHAGSLSNLAKCAASTLQILGAEKALFRALKTRGNTPKYGLIFHSSFIGRASTKNKGRMARYLANKCSIASRIDCYSEASTSVFGQKLREQVEERLEFYDKGVAPRKNLDVMKAAIDSMVNGTSMDDDDIEKTDASPKKSKKKKTKTKADGDAMDVDKPSNVAGGEAEPGTEKKKKKKKHKLEEEAQEENGAADTTPKKKKKKSREASEEAEPKTATDGKKKKKKAKAEDDE

SEQ ID NO: 21506 - protein, 375 aa, Zea mays subsp. mays
  misc_feature (1)..(375): Ceres Seq. ID no. 12404963
MVIQAIFLLDTLDKDINSFSMRVREWFSWHFPELVKIVNDNYLYAKLAKFIVNKSDLTEKDIPALADIVGDEDKAKEIVEAAKASMGQDLSPVDLINVQQFAQRVMNLSEYRKNLYEYLVTKMNDIAPNLTSLIGEVVGARLISHAGSLSNLAKCAASTLQILGAEKALFRALKTRGNTPKYGLIFHSSFIGRASTKNKGRMARYLANKCSIASRIDCYSEASTSVFGQKLREQVEERLEFYDKGVAPRKNLDVMKAAIDSMVNGTSMDDDDIEKTDASPKKSKKKKTKTKADGDAMDVDKPSNVAGGEAEPGTEKKKKKKKHKLEEEAQEENGAADTTPKKKKKKSREASEEAEPKTATDGKKKKKKAKAEDDE

SEQ ID NO: 21507 - DNA, 3550 bp, Zea mays subsp. mays
  misc_feature (1)..(3550): Ceres Seq. ID no. 12404984
gcacgagaccattacctagaacatcctaatcgaaaagccacgctaccaccgcttcctttcctcttcggctgctccgcctcgcctcccagttcacagcccctcccaggctccgaatcggcggccacttctcattcctcacttccgtcctcgcgcaccaccccctccatccgttccggatggtgccttcggaatcccgtccggcgccctagcgtagctcgggctcggccaggctccgggcccgccgcgccgttccgcagtccagctccacctccagtggttactagtggaagtttagcacactgattccgtcatagtgggatccttgccaaatgaagtgtccatccaaccaacccaactaactgtactgaaatctcattgctttcagaatggtacggttagtaaattgaggttggtggtgggttggtggccatactaggggaagatcttttcttgagtttaaggaagatgcttgcctttatttgagaaggccctttttggtacgtcagcagtgttctttcctataggagtaaatgccattccgtagcatcgtgcgtgatgtaagggatggtttcgggagcttgtctaggaggggatttgaggtcaggtttctgagtcatcgcagagggaaatctcatggtgctgtccatgagctgcacgacccagtgcttgtggtacagagtagctgctgggctagcttgcctcctgaattacttcgagatgtgattgagaggttggagaccagtgaggatacatggccttctaggaaacatgtagttgcttgtgcagctgtctgcagaacatggagagagatgtgtagagagattgtcaagagcccagagttttctggaaaaatcacttttcctgtttccttgaagcagcctgggcctcgagatggaactattcagtgttttattaagagggataaatctacccaaatctacagtctgtaccttagttttagctctgccgtgcctgtcgaaaatggcaaattccttctatccgcaaaaaggaactgccgtgcaacatatacagaatatataatatcaataaattctggtgatacatctaggtgtacaagtaacaacacatacattgggaaattaaggtcaaatttccttggcacaaaatttgtaatatacgatactcatccgccatacaatggaactagtcaaacagtggcagggaaaacaagtcagagattctactccaagaagggatcaaccaaggtttcttgcaggtggtacagtattgcacaaatctcatacgagctgaatgtcttgggaactcgaggcccaaggcggatgaactgtgtaatgcactccatcccagcttcatgccttgaggctggtggcagtgtcccttgccagccggacagcattgcagcccactctgttggcggatcattcagcagtgtgtccttgtcaaagtcatcgactatggaccactctatgcatttcaccagttcccggctctctgatgccataacaggagatggcattgtgaacagaggccaggcattgaatgatgctgacgatgaagagtgcaaggacatgcctttgatcctccgcaacaaggccccaaggtggcacgagcagcttcagtgctggtgcctcaacttccggggccgggtgactgtcgcctcggtcaagaacttccagctagtcgcggcgacacagcctgccgccggagccctgaccccatcacaggcagccccgcagccagctccgcctcctccgccggaccaagagaaggtcatactgcagtttgggaaggtcggcaaggacatcttcaccatggactactgctacccgctgttagccttccaggccttcgccatctgcctgagcagcttcgacaccaagttggcctgcgaataaatcctacctacaattctggtacctaccaaataatcaaaaacactgattgtcgtggtgttcgtccaagaaccgagtttagctgagacgccattgggcaccatgtgctggtgccttgttaactcagaaacgcgtgggggctgaatctgtttcagcagcttccttgtgataatctgtagctgctgcttcgctgctgttgtatcctatgctttcatttctttccggttccgctgtagcttcttaccccccggtgacattagttcggtacccgtatctggatatttttttagccttcttcgttggattgttcaccggtgatggcatgtattaacagagatagttacatacagatgtaatgaattcatgacatctgatcactcatatgtatcacggaagcatgaggaggataaggtgatcatctttgagagaggagatttggtcttcgtgttcaacttccactggagcaatagctattttgactatcgcgttggttgtttcaagcctgggaagtacaagatcgttttagattctgacgatggccttttcggtggatttattaataaacaccccgttcaaaagtagtcatcgataccagaccatattcaagagcgccactacaaaaatactcctaaaggcttatttcaaggagaaccatccgtcctctagattgctagctacatcaaaattgcacaccatgcttgcaacttcaaacatacattcgcacctagagcttgaggaaaacaaactcttcgatcgctggaatctccccgatcttcgtcagtgtgccattgcttggttcctcatcaacaccaattgccatgacagcatgcttgcgaggagcaattcttccgacactcatgaaactgacattaacattctcctcacccaagacgcttccgactgacccaatcatacctggttgatcaacctgcctgcaaaggatgaggcttccttccaagctcacatccacctggaatgctccaacctttgttagatgaggaacaccatccttcactctgccctccacagtgatctctccagtctcagatatcgcactgggaaatttggactcgacattggcaatctgaacttgaatgtatcacggaagcatgaggaggataaggtgatcatctttgagagaggagatttggtcttcgtgttcaacttccactggagcaatagctattttgactatcgcgttggttgtttcaagcctgggaagtacaagatcgttttagattctgacgatggccttttcggtggatttagtcggcttgatcatgatgctgagtacttcactgctgactggccgcatgacaacaggccgtgttctttctcggtctatgcacccagcagaacagccgtcgtatatgcacctgcaggtgcagaggacgaatagggcacaacagcggttgttggggaagaacttcagagggatgtactgctggtggactgacaccactgccacgcgcgatgctgccagatgttgccctcgagaccacgtggcaggacgatcagctattcaggtggataggttagcttaccgatgagctctcgctttcgagtgactggaaggaaatggacctcgcacaccgcattttcactatgcaatctgaaaatgtaccgtgtggttttgtacatatggatcagtaggcattatatcattcatctctctg

SEQ ID NO: 21508 - protein, 448 aa, Zea mays subsp. mays
  misc_feature (1)..(448): Ceres Seq. ID no. 12404985
MPFRSIVRDVRDGFGSLSRRGFEVRFLSHRRGKSHGAVHELHDPVLVVQSSCWASLPPELLRDVIERLETSEDTWPSRKHVVACAAVCRTWREMCREIVKSPEFSGKITFPVSLKQPGPRDGTIQCFIKRDKSTQIYSLYLSFSSAVPVENGKFLLSAKRNCRATYTEYIISINSGDTSRCTSNNTYIGKLRSNFLGTKFVIYDTHPPYNGTSQTVAGKTSQRFYSKKGSTKVSCRWYSIAQISYELNVLGTRGPRRMNCVMHSIPASCLEAGGSVPCQPDSIAAHSVGGSFSSVSLSKSSTMDHSMHFTSSRLSDAITGDGIVNRGQALNDADDEECKDMPLILRNKAPRWHEQLQCWCLNFRGRVTVASVKNFQLVAATQPAAGALTPSQAAPQPAPPPPPDQEKVILQFGKVGKDIFTMDYCYPLLAFQAFAICLSSFDTKLACE

SEQ ID NO: 21509 - protein, 355 aa, Zea mays subsp. mays
  misc_feature (1)..(355): Ceres Seq. ID no. 12404986
MCREIVKSPEFSGKITFPVSLKQPGPRDGTIQCFIKRDKSTQIYSLYLSFSSAVPVENGKFLLSAKRNCRATYTEYIISINSGDTSRCTSNNTYIGKLRSNFLGTKFVIYDTHPPYNGTSQTVAGKTSQRFYSKKGSTKVSCRWYSIAQISYELNVLGTRGPRRMNCVMHSIPASCLEAGGSVPCQPDSIAAHSVGGSFSSVSLSKSSTMDHSMHFTSSRLSDAITGDGIVNRGQALNDADDEECKDMPLILRNKAPRWHEQLQCWCLNFRGRVTVASVKNFQLVAATQPAAGALTPSQAAPQPAPPPPPDQEKVILQFGKVGKDIFTMDYCYPLLAFQAFAICLSSFDTKLACE

SEQ ID NO: 21510 - DNA, 1466 bp, Zea mays subsp. mays
  misc_feature (1)..(1466): Ceres Seq. ID no. 12404987
aaggacagcctcctcgtcccgtcctcccgcgccgccgcgacgaatgggccccaccaccgccgcgccacgctcgcgccgggaactggcgccggaggcccatgtggcggagccggcggcgtgtccatcgacgtcaacggcctgaagcggcgtggcggcgggaggcgctcgtgggtgcgcgtggacgcggcgacgggcgccgcggaggccgtcgaggtcgccaagccggcgttgatgcggcggctggacctgcccgcgcgggacctccgcctcctcgaccccctcttcgtctacccgtccgccatcctaggccgcgagcgcgccgtcgtctgcaacctcgagcacctgcggtgcatcatcaccgccgatgaggcgctcgttctgcgcgaacccgacgccgctgggggcgccgcagcggaggaggccgtgcggaggtacgtcgacgagctgcagcgacgcctcgtcgaccgcgccgacgacctgcctttcgagttcatcgcgctggaggtcgcgctggaggccgcttgctctttcctagactcgcaggctattgaattagaggctgaagcttacccattactagatgagctgacagcaaaaattagtaccctcaatttggaacgagtccgacgcctaaagagcaagctggttgcattgacaaggagagtacagaagagatgagatagagcaactgatggatgacgatggtgatatggctgaaatgtatctcactgagaagaagataagaatggaagcatcaatgttagatgatgaggaccttcagggaattggcaatagtcataatgggtttggttcatctctatcggctccagtttcaccagtttcgacaacccctgcaactcggaggcttgagaaggaattcagttttgccagaagcaggcacagcagcttcaagagctcagatagcagccagtacaatatagaagaactggaaatgttgttggaggcctactttgttgttatcgattacaccctcagcaagttgacttcgctaaaggagtatattgatgacacagaagatttcatcaacatacaactggataacgtccggaaccagctgatccaattcgagctgctcctgaccaccgccacgttcgtggtggccatcttcggggtggtctcgggggttttcggcatgaacttcgaggtccctctgttctcggttccgcacgcgttcgagtggaccctcgccataactggggtctgcggcgccgtcgtattctgctgcttcatctggtacttcaagaagaggaggtttttccccttgtaggtgaaagcttctcttctctcgccctgtcaccagagtccagacagcagcgtacgtatgagactgggtacggcaattgtacatgctgcattgttctcgaaatgcgctgtctgttcacgtgagcttttctccctttttaagctcacgccgctgatcgtgtgtagcttcaccggtctgctgt

SEQ ID NO: 21511 - protein, 225 aa, Zea mays subsp. mays
  misc_feature (1)..(225): Ceres Seq. ID no. 12404988
KDSLLVPSSRAAATNGPHHRRATLAPGTGAGGPCGGAGGVSIDVNGLKRRGGGRRSWVRVDAATGAAEAVEVAKPALMRRLDLPARDLRLLDPLFVYPSAILGRERAVVCNLEHLRCIITADEALVLREPDAAGGAAAEEAVRRYVDELQRRLVDRADDLPFEFIALEVALEAACSFLDSQAIELEAEAYPLLDELTAKISTLNLERVRRLKSKLVALTRRVQKR

SEQ ID NO: 21512 - protein, 198 aa, Zea mays subsp. mays
  misc_feature (1)..(198): Ceres Seq. ID no. 12404989
MDDDGDMAEMYLTEKKIRMEASMLDDEDLQGIGNSHNGFGSSLSAPVSPVSTTPATRRLEKEFSFARSRHSSFKSSDSSQYNIEELEMLLEAYFVVIDYTLSKLTSLKEYIDDTEDFINIQLDNVRNQLIQFELLLTTATFVVAIFGVVSGVFGMNFEVPLFSVPHAFEWTLAITGVCGAVVFCCFIWYFKKRRFFPL

SEQ ID NO: 21513 - protein, 192 aa, Zea mays subsp. mays
  misc_feature (1)..(192): Ceres Seq. ID no. 12404990
MAEMYLTEKKIRMEASMLDDEDLQGIGNSHNGFGSSLSAPVSPVSTTPATRRLEKEFSFARSRHSSFKSSDSSQYNIEELEMLLEAYFVVIDYTLSKLTSLKEYIDDTEDFINIQLDNVRNQLIQFELLLTTATFVVAIFGVVSGVFGMNFEVPLFSVPHAFEWTLAITGVCGAVVFCCFIWYFKKRRFFPL

SEQ ID NO: 21514 - DNA, 1426 bp, Zea mays subsp. mays
  misc_feature (1)..(1426): Ceres Seq. ID no. 12404995
aactctcgtatcgccggcgtatttagcttgcttcagggggcacgtggcggtggaagcttccctggcggtggtggtggtgcttggttgatgtcgatggcgcaggtctgctgtgactcggctgtagcggtgacggcggcaccggtggttggtgcggaggcggaggccagggccagggcgcgcgccgagaggcggagccgggccggagagtccggggcgtggaagcacgcggcggccgctggcacggccgatgccacgaggaagcggagtctcgggtcgggggagctgctgctggcgcggaagcacggggcggcgtcggtggccggccgcaggagggagatggaggacgccgtgtccgtgcgtgacgcgttctgcgcggagggcacggccgacggcgggaggcgcgacttctacggagtgttcgacggccacggctgctcgcacgtggccgaggcgtgccgggaccggatgcacgagctggtcgccgaggagctcgccgccaccgccgccgacagctccgtctccgcagcagcggcctggaccgcggcgatggaacgcagcttcgcgcggatggacgccgaggtgacgtcggccggagggcgcgccgccgccgccagaagcagcacctgccgctgcgacgcgcacaggtgcgaccatgtgggctctacggccgtggtggccgtcgtggaggagcacccgccgtccgtggtggccaactgcggcgacagccgcgccgtgctctgccgtggggacggcgcgccgccgctgccgctgtcgtcggaccacaagcccgaccgccccgacgagctggagcgcatcgagtccgccggcgggcgcgtcatcttctgggagggcgcgcgcgttctgggcgtcctcgccatgtcccgcgccgtcggggacggatacctgaagccgtacgtgtcgtccgttcctgaggtgactgtgaccgaccggtccgacggcgacgagtgcctcatcctgggcagcgacgggctctgggacgtggtgagcaacgaggccgcgtgcgaggtggcgcgcgcctgcctccgcaggggccgggccaagtggtgcgccgaggccgccgcgttgctcaccaagctggccctcgcgaggagaagctccgacaacgtctcggtggtcgtcgtcgatctccggaggaggaatcactagttctgtgcagttgtcaactagtactagtacagtaggatggctggtgcgcacaagggatttcgcgggggtgcgctaattgggtttttttttcttgcgttttcattcaaaaagtttttttttttttttgctgtactctccctgaatcaaaaagttcagaggagcccttagattaattattgtggtagagccggaatttggtccggataccattcggagaggtggtcgcgtagaaaaaaactcagaaaggggagacggtctc

SEQ ID NO: 21515 - protein, 388 aa, Zea mays subsp. mays
  misc_feature (1)..(388): Ceres Seq. ID no. 12404996
NSRIAGVFSLLQGARGGGSFPGGGGGAWLMSMAQVCCDSAVAVTAAPVVGAEAEARARARAERRSRAGESGAWKHAAAAGTADATRKRSLGSGELLLARKHGAASVAGRRREMEDAVSVRDAFCAEGTADGGRRDFYGVFDGHGCSHVAEACRDRMHELVAEELAATAADSSVSAAAAWTAAMERSFARMDAEVTSAGGRAAAARSSTCRCDAHRCDHVGSTAVVAVVEEHPPSVVANCGDSRAVLCRGDGAPPLPLSSDHKPDRPDELERIESAGGRVIFWEGARVLGVLAMSRAVGDGYLKPYVSSVPEVTVTDRSDGDECLILGSDGLWDVVSNEAACEVARACLRRGRAKWCAEAAALLTKLALARRSSDNVSVVVVDLRRRNH

SEQ ID NO: 21516 - protein, 359 aa, Zea mays subsp. mays
  misc_feature (1)..(359): Ceres Seq. ID no. 12404997
MSMAQVCCDSAVAVTAAPVVGAEAEARARARAERRSRAGESGAWKHAAAAGTADATRKRSLGSGELLLARKHGAASVAGRRREMEDAVSVRDAFCAEGTADGGRRDFYGVFDGHGCSHVAEACRDRMHELVAEELAATAADSSVSAAAAWTAAMERSFARMDAEVTSAGGRAAAARSSTCRCDAHRCDHVGSTAVVAVVEEHPPSVVANCGDSRAVLCRGDGAPPLPLSSDHKPDRPDELERIESAGGRVIFWEGARVLGVLAMSRAVGDGYLKPYVSSVPEVTVTDRSDGDECLILGSDGLWDVVSNEAACEVARACLRRGRAKWCAEAAALLTKLALARRSSDNVSVVVVDLRRRNH

SEQ ID NO: 21517 - protein, 357 aa, Zea mays subsp. mays
  misc_feature (1)..(357): Ceres Seq. ID no. 12404998
MAQVCCDSAVAVTAAPVVGAEAEARARARAERRSRAGESGAWKHAAAAGTADATRKRSLGSGELLLARKHGAASVAGRRREMEDAVSVRDAFCAEGTADGGRRDFYGVFDGHGCSHVAEACRDRMHELVAEELAATAADSSVSAAAAWTAAMERSFARMDAEVTSAGGRAAAARSSTCRCDAHRCDHVGSTAVVAVVEEHPPSVVANCGDSRAVLCRGDGAPPLPLSSDHKPDRPDELERIESAGGRVIFWEGARVLGVLAMSRAVGDGYLKPYVSSVPEVTVTDRSDGDECLILGSDGLWDVVSNEAACEVARACLRRGRAKWCAEAAALLTKLALARRSSDNVSVVVVDLRRRNH

SEQ ID NO: 21518 - DNA, 932 bp, Zea mays subsp. mays
  misc_feature (1)..(932): Ceres Seq. ID no. 12405069
gatcggcacagccacaacctccttctccaatactctctccctcgccgccggccacctccgcctcctcccacgcgccacctccgcctcctcccacgcgccacctccgcctcctcccacgcgccacctccgcgacaaaccactgaaggagggagaggactcgctcatatcgtccgatggaggaggactcgatcaaggggatgatctccgcgatatcctgggtgcccaggggcgccgccaagagcgtgcccgtcgttgccgacccgcccactcaggaggagatcgccgaggccatgaagaccttcgacctgggcagagactccgggagcgacgctgacgaggatgatgatgctgccaccatggaactcgacggtgcggcggaaacggtggaggaggttgatgaggctgcccgagccaaggccgtagccaaggcgctctgcaagggctctagcaaggcggacgacgtcgctgatgagctccgcgaactcaacatggacgcgtacgatgatgaagatgaagaggtcgatattttcggctctgggctgggggacttgtactatccgagcaacgcaatggacccatatctgaagaagaacaatgaggatgatgaggaggacgacgatgatgatgaggaaatcgaagataagatgatcatgcctactgattttgttattgtctgcacatagtgaggacgatatcttctctcttcaggtcaacattcttgaagaaacaaatgatggtgaacaaaatatctttgtgcatcatgacgttcctctcgctgattttccgctatgcacagcttggatggattttaatctgaaaggtggtgaaaaagggaattttgtagccgttggaaccatggatcctgccatagaaatatgggacttagatatggttgatgaagtgcaaccgcacatggtgctaggaggacttcc

SEQ ID NO: 21519 - protein, 169 aa, Zea mays subsp. mays
  misc_feature (1)..(169): Ceres Seq. ID no. 12405070
MEEDSIKGMISAISWVPRGAAKSVPVVADPPTQEEIAEAMKTFDLGRDSGSDADEDDDAATMELDGAAETVEEVDEAARAKAVAKALCKGSSKADDVADELRELNMDAYDDEDEEVDIFGSGLGDLYYPSNAMDPYLKKNNEDDEEDDDDDEEIEDKMIMPTDFVIVCT

SEQ ID NO: 21520 - protein, 161 aa, Zea mays subsp. mays
  misc_feature (1)..(161): Ceres Seq. ID no. 12405071
MISAISWVPRGAAKSVPVVADPPTQEEIAEAMKTFDLGRDSGSDADEDDDAATMELDGAAETVEEVDEAARAKAVAKALCKGSSKADDVADELRELNMDAYDDEDEEVDIFGSGLGDLYYPSNAMDPYLKKNNEDDEEDDDDDEEIEDKMIMPTDFVIVCT

SEQ ID NO: 21521 - protein, 130 aa, Zea mays subsp. mays
  misc_feature (1)..(130): Ceres Seq. ID no. 12405072
MKTFDLGRDSGSDADEDDDAATMELDGAAETVEEVDEAARAKAVAKALCKGSSKADDVADELRELNMDAYDDEDEEVDIFGSGLGDLYYPSNAMDPYLKKNNEDDEEDDDDDEEIEDKMIMPTDFVIVCT

SEQ ID NO: 21522 - DNA, 1749 bp, Zea mays subsp. mays
  misc_feature (1)..(1749): Ceres Seq. ID no. 12405080
atctataacagccgccaccttcccccttatactcgccggaggccaaccagtactcgtgccacgactgccacccctcctcttccttgtgatctccgaatacccatctcagattccaagggccgcgccgtgtaatccccggctctccccacccaccatatatctagtatccgcgcctcaaatccctcgcgaaacgccccgccgtaagcagttgttgtctgccgtgatttgagccgggcggacggattgatcccgggacgaggtgtctcagctcttgatcttgatcctgatcctgggaggcgttcctggtttattggtgggagcgaagaagccatgataccttccgtgaggctctctcctggtcctgcagccttctcaggctccagcctacgctcaaaattaccgtcaattccatccatctccagtctcaaaccctccaaatatgtggtctcctcgctgaaaccactctacctagcaccgctagatggtccgcgcactgccgagcttaagtctcggagacagccacttgagttccgttgttctgcttctgctgctgatgacaaggagtcaaagactcaggtggtgccagttcagtcggaaggcgcacagaggttgaagatctccatctatttcgccacctggtgggcgcttaatgtgatatttaacatttacaacaagaaggttctcaatgcattcccttacccctggctcacctccacactctccctcgcctgtggctctgctatgatgcttttctcgtgggccacccgtcttgttgaggcccctaagaccgacctggacttctggaaagttcttttcccggttgctgtggcgcatacaattggccatgttgctgctacagtgagcatgtctaaggtggcagtgtcattcacacacataattaaaagcgcagaacctgcattcagtgttttggtgtcaaggttcttccttggggagacgtttccaattccagtatatctttctcttcttccaatcattggtggttgtgctctagctgctgtcacagagctgaactttaatatggttggatttatgggtgccatgatatccaaccttgcatttgttttccgcaacatcttctcgaagaggggcatgaaggggaagtccgtcagtggcatgaattactacgcttgcctgtcaattatgtccctggtcatactgactccatttgctatagctatggaaggccctcaaatgtgggctgctggttggcaaaaggctcttgcagaagttggacccaatgttgtctggtggattgctgcacagagcgtgttctaccacttatataaccaggtgtcctacatgtctctcgatcagatttctccattgacattcagcattggcaatacaatgaagcgtatatcagtgattgtttcatcaatcattatcttccacactcctgtccgcgctgtcaatgcactgggagctgccattgccatccttggcacattcctgtactctcaggcaaaggcgtgaggcgggccatgatgacgaacgtctgcagaatcagtagcaagcactaaatccaattttgcttgttccagtggcatgtaaatatcgggttaggtttccgtatgagagtttgtaataatggatgaatggctctgctgtttcgttcttgtttgttggccagactcaaatccataggccatgaactgcggtcgagtgtacctgaataatactgtaacggagaattcgccgatgctgtttctttatgggtatatatatagt

SEQ ID NO: 21523 - protein, 387 aa, Zea mays subsp. mays
  misc_feature (1)..(387): Ceres Seq. ID no. 12405081
MIPSVRLSPGPAAFSGSSLRSKLPSIPSISSLKPSKYVVSSLKPLYLAPLDGPRTAELKSRRQPLEFRCSASAADDKESKTQVVPVQSEGAQRLKISIYFATWWALNVIFNIYNKKVLNAFPYPWLTSTLSLACGSAMMLFSWATRLVEAPKTDLDFWKVLFPVAVAHTIGHVAATVSMSKVAVSFTHIIKSAEPAFSVLVSRFFLGETFPIPVYLSLLPIIGGCALAAVTELNFNMVGFMGAMISNLAFVFRNIFSKRGMKGKSVSGMNYYACLSIMSLVILTPFAIAMEGPQMWAAGWQKALAEVGPNVVWWIAAQSVFYHLYNQVSYMSLDQISPLTFSIGNTMKRISVIVSSIIIFHTPVRAVNALGAAIAILGTFLYSQAKA

SEQ ID NO: 21524 - protein, 250 aa, Zea mays subsp. mays
  misc_feature (1)..(250): Ceres Seq. ID no. 12405082
MMLFSWATRLVEAPKTDLDFWKVLFPVAVAHTIGHVAATVSMSKVAVSFTHIIKSAEPAFSVLVSRFFLGETFPIPVYLSLLPIIGGCALAAVTELNFNMVGFMGAMISNLAFVFRNIFSKRGMKGKSVSGMNYYACLSIMSLVILTPFAIAMEGPQMWAAGWQKALAEVGPNVVWWIAAQSVFYHLYNQVSYMSLDQISPLTFSIGNTMKRISVIVSSIIIFHTPVRAVNALGAAIAILGTFLYSQAKA

SEQ ID NO: 21525 - protein, 249 aa, Zea mays subsp. mays
  misc_feature (1)..(249): Ceres Seq. ID no. 12405083
MLFSWATRLVEAPKTDLDFWKVLFPVAVAHTIGHVAATVSMSKVAVSFTHIIKSAEPAFSVLVSRFFLGETFPIPVYLSLLPIIGGCALAAVTELNFNMVGFMGAMISNLAFVFRNIFSKRGMKGKSVSGMNYYACLSIMSLVILTPFAIAMEGPQMWAAGWQKALAEVGPNVVWWIAAQSVFYHLYNQVSYMSLDQISPLTFSIGNTMKRISVIVSSIIIFHTPVRAVNALGAAIAILGTFLYSQAKA

SEQ ID NO: 21526 - DNA, 1354 bp, Zea mays subsp. mays
  misc_feature (1)..(1354): Ceres Seq. ID no. 12405084
atcgaaaagctcgttcagtcgtcctcttcctccaaacctttccgctgccggtgaacttcctccacctgaagcccctaccacgataagccctaatcccagcgccacctcgatggcgaccacctctttctttcatccgctcgccgccccgatggaccgcggtaggtgtgtgttttcgtcgctgcccgttcagcctaaccatccccgcccgtacagcgccccggcgaccggcgccgnttctcgtcgtcngcgctaagcgcgcnnggcagccagcnccctgntgcngcngcntcgcgtnanccgcgaatcccagcgcnggtcccgaagccgggacgtggnaagaagaggaggaggaggtcgagggaggagatgccctggatccaggacaaggcgctggacctcgtggagttcactggcaccgtcacacaggccatcccagggccccgtgttggctctagccctgttccatggcttctcgcggttcccctcgcctacgtcggggtctcctttgtgctcgcggtcgtccgcaccgtgcgcaagttcacctcgccgcacactaagaagaagcgaagggtgagtaagaatatattcttgttgaagtcactagatgatctgtttcagaagggcagggaggcaataaattatcctgctcttcaggacctaatgcaaaagacaggatttgacatggatgatgtagtaaggaagtacatccgttacacactgaatgaaaaacagttcagtcctgatgtggttgtggatctcatacatcttaggaaggcatcaatgctggaagatgcagaagttgctgaaattttaaatgagatttcaagacgaattgtccgggaaaaagggccagtagttatggacttattctggttttacagagcaaggttttaagcggaagcttgctgtacaagcactgtttggaaaaatcctatacttatcagaacttccggagttctgttcacgggacagctcacttgtagtcaaagaaatctttggagttacagatgaggatgcagacagcctgcggattcacaccctatcancaacaggtgatatcgaatctatacagaagatggtggacgatctagacctagaacaaggtcccccatcatcgtcttgagttatggtggtggaataatgctaaacatcttcgttgatagtgttgcaattttagattgatgtgagtttctcgaatcttttcgtttagttttttcagctgctgaagtaggacttgggcctgtgaacacaggatactttcggctggagcctggaggttttgtaaattgcctctcgattaggataacgtatgtcagacctgcccatgatttgagtaaacgagaatactattatt

SEQ ID NO: 21527 - protein, 175 aa, Zea mays subsp. mays
  misc_feature (1)..(175): Ceres Seq. ID no. 12405085
MPWIQDKALDLVEFTGTVTQAIPGPRVGSSPVPWLLAVPLAYVGVSFVLAVVRTVRKFTSPHTKKKRRVSKNIFLLKSLDDLFQKGREAINYPALQDLMQKTGFDMDDVVRKYIRYTLNEKQFSPDVVVDLIHLRKASMLEDAEVAEILNEISRRIVREKGPVVMDLFWFYRARF

SEQ ID NO: 21528 - DNA, 1460 bp, Zea mays subsp. mays
  misc_feature (1)..(1460): Ceres Seq. ID no. 12405090
acagccagctgcccagctccgtccggcggaactcggaagccctacgctacgcctaccctcgctgtactactagctgccttcctacccgcttcccctctcctcccgacgccgtctccctccctccctccgcctccgccgtcgccgccgggacacgcgaagcttccaggtcttgtctttgggtagaacatgtcgtgctttgcgtgctgtggtgatgaagatacccaagtaccagacaccagggctcaatacccaggacaccatccagcgagggctgatgcataccgcccttctgatcaacctcccaagggtcctcagcctgtgaaaatgcaaccaatcgcagtccctgctattcctgtggatgagattagggaggtgaccaagggttttggtgatgaagctttgattggtgagggatcctttggcagagtatacttgggtgttctaagaaatggtaggagtgccgcggtcaaaaagttggattctaacaagcagccagaccaagagttcttggcccaggtgtctatggtgtcaaggctgaagcatgaaaatgttgtcgagttgcttggttactgtgctgatgggacactccgcgtccttgcttatgagttcgctacaatgggttcccttcatgatatgcttcatggaaggaaaggggttaaaggggctcaacccggtccagtcttatcgtggtcgcaacgtgtgaagatagcggttggggcagcgaaaggcctcgagtatcttcatgagaaagcgcagccccatatcatacaccgagacatcaagtctagcaacgtccttcttttcgatgacgatgtagctaagatcgctgactttgatctgtcgaaccaagctcctgacatggcagctcggcttcactcaactagggttctcggaacattcggataccatgcgcctgagtatgcgatgacggggcaactcagctctaagagtgatgtatatagttttggggttgttcttcttgagctgttgactgggaggaaacctgtcgaccatacattgccaaggggacagcagagtcttgtgacctgggctacaccaagacttagcgaagacaaggttagacagtgtgttgactcaagacttggaggggactatcctcctaaagctgttgcgaagtttgcggctgtcgccgccttgtgtgttcaatacgaagcggacttccggccgaacatgagcattgttgtcaaggcgctacaacccctgctgaatgcgcatgcgcgggcgactaaccctggagaacatgctgggtcataagctttgcgtttgcttctctccctcctcttgttcttgtatgataggtaaggtatatgactcgtcgatgtcgttgttgcggacatgtggctggcagcgtgtaatgtctgtgattattcttcccctgagctgtaaacaagattcttgtatccccacagtatttgattctttctattggtgccgttttt

SEQ ID NO: 21529 - protein, 362 aa, Zea mays subsp. mays
  misc_feature (1)..(362): Ceres Seq. ID no. 12405091
MSCFACCGDEDTQVPDTRAQYPGHHPARADAYRPSDQPPKGPQPVKMQPIAVPAIPVDEIREVTKGFGDEALIGEGSFGRVYLGVLRNGRSAAVKKLDSNKQPDQEFLAQVSMVSRLKHENVVELLGYCADGTLRVLAYEFATMGSLHDMLHGRKGVKGAQPGPVLSWSQRVKIAVGAAKGLEYLHEKAQPHIIHRDIKSSNVLLFDDDVAKIADFDLSNQAPDMAARLHSTRVLGTFGYHAPEYAMTGQLSSKSDVYSFGVVLLELLTGRKPVDHTLPRGQQSLVTWATPRLSEDKVRQCVDSRLGGDYPPKAVAKFAAVAALCVQYEADFRPNMSIVVKALQPLLNAHARATNPGEHAGS

SEQ ID NO: 21530 - protein, 316 aa, Zea mays subsp. mays
  misc_feature (1)..(316): Ceres Seq. ID no. 12405092
MQPIAVPAIPVDEIREVTKGFGDEALIGEGSFGRVYLGVLRNGRSAAVKKLDSNKQPDQEFLAQVSMVSRLKHENVVELLGYCADGTLRVLAYEFATMGSLHDMLHGRKGVKGAQPGPVLSWSQRVKIAVGAAKGLEYLHEKAQPHIIHRDIKSSNVLLFDDDVAKIADFDLSNQAPDMAARLHSTRVLGTFGYHAPEYAMTGQLSSKSDVYSFGVVLLELLTGRKPVDHTLPRGQQSLVTWATPRLSEDKVRQCVDSRLGGDYPPKAVAKFAAVAALCVQYEADFRPNMSIVVKALQPLLNAHARATNPGEHAGS

SEQ ID NO: 21531 - protein, 250 aa, Zea mays subsp. mays
  misc_feature (1)..(250): Ceres Seq. ID no. 12405093
MVSRLKHENVVELLGYCADGTLRVLAYEFATMGSLHDMLHGRKGVKGAQPGPVLSWSQRVKIAVGAAKGLEYLHEKAQPHIIHRDIKSSNVLLFDDDVAKIADFDLSNQAPDMAARLHSTRVLGTFGYHAPEYAMTGQLSSKSDVYSFGVVLLELLTGRKPVDHTLPRGQQSLVTWATPRLSEDKVRQCVDSRLGGDYPPKAVAKFAAVAALCVQYEADFRPNMSIVVKALQPLLNAHARATNPGEHAGS

SEQ ID NO: 21532 - DNA, 1421 bp, Zea mays subsp. mays
  misc_feature (1)..(1421): Ceres Seq. ID no. 12405097
gaagctagaggctctctggcgccgacggtcgacccacacgcgcgtccagcgatttcgccggggggagatcttgccattccgtggagcaccatccgcggtagcctagccgcgactggagatcggggcttgcgggccgtggagccacccaagaaggtagccgcgaaaatcttgatccggccggggacggggcctttggaggttcgtccctcgatcgggtgtcgtctgcgaaagccgggtcgaacaaatcgtcgcgactggaggcggcgcgggggcatgggggcgtgggtctcggtcctgctcgggatggacggagccgcggcggccgggcctgctgctgtgggcctgggcgacctgccggagctctgcgccgcccaggtgctgctccggctcgacccgccggagatctgcaggctcgcgcaggtcaaccacgcgttccgcggcgccgcgggggctgacttcgtgtgggaagccaagctgccggagaactacagctacctgatggagttcgtggggagcggcgacgaggggaggcggaggcggcggcggaccgggaagaaggagatctacgcgaggctcgccaggcctgtgcctttttgtgacggcaagaaggaattctggttggacaagaacaaaggcatgatctgtatggcactgtcgtccaaagcactggtgattactgggattgatgacagaagatactggcaacacatgccaacttcagaatcgagattccagtctgtagcctaccttcagcaaatctggtggtttgaggtggttggtgaagtcgatttctgcttccctgttggaacatatagcttgtacttcagggtccatcttgggaagttctacagacgatttggccgccgccagtgcacctcagagcatgttcatggttgggacaagaagcctgttcgcttccagctatcgacctctgacgggcagcaggcattgtctcagtgctacctggaggagcccgggagctgggtcctgtaccatgctggcgattttgtggcctcaaagcctgaccagctgatgaagctgaagttctccatggcacagatcgactgcacgcacacaaaaggcggactgtgcatcgactcggttcttatctatccaaaagggaaggggtttcaccaggagagggtggtcaggtctcagaaatgagggttgtagatgttgtggaggtactcacattaggatgttagagcaaatgcagcttgcagcctgatcttatttttactttgggctctagttcgcagcagaggtgaagtgtatgtggttgtagaactcaggtattgtgtggtcaggtgaccaccagagtgctctgtcagtcctttggcaaggtcgttttcgccccccttcagctgaatttggacagcgagatagccatgaaactgtactgaaatgagttcgaaggtgcc

SEQ ID NO: 21533 - protein, 387 aa, Zea mays subsp. mays
  misc_feature (1)..(387): Ceres Seq. ID no. 12405098
EARGSLAPTVDPHARPAISPGGDLAIPWSTIRGSLAATGDRGLRAVEPPKKVAAKILIRPGTGPLEVRPSIGCRLRKPGRTNRRDWRRRGGMGAWVSVLLGMDGAAAAGPAAVGLGDLPELCAAQVLLRLDPPEICRLAQVNHAFRGAAGADFVWEAKLPENYSYLMEFVGSGDEGRRRRRRTGKKEIYARLARPVPFCDGKKEFWLDKNKGMICMALSSKALVITGIDDRRYWQHMPTSESRFQSVAYLQQIWWFEVVGEVDFCFPVGTYSLYFRVHLGKFYRRFGRRQCTSEHVHGWDKKPVRFQLSTSDGQQALSQCYLEEPGSWVLYHAGDFVASKPDQLMKLKFSMAQIDCTHTKGGLCIDSVLIYPKGKGFHQERVVRSQK

SEQ ID NO: 21534 - protein, 296 aa, Zea mays subsp. mays
  misc_feature (1)..(296): Ceres Seq. ID no. 12405099
MGAWVSVLLGMDGAAAAGPAAVGLGDLPELCAAQVLLRLDPPEICRLAQVNHAFRGAAGADFVWEAKLPENYSYLMEFVGSGDEGRRRRRRTGKKEIYARLARPVPFCDGKKEFWLDKNKGMICMALSSKALVITGIDDRRYWQHMPTSESRFQSVAYLQQIWWFEVVGEVDFCFPVGTYSLYFRVHLGKFYRRFGRRQCTSEHVHGWDKKPVRFQLSTSDGQQALSQCYLEEPGSWVLYHAGDFVASKPDQLMKLKFSMAQIDCTHTKGGLCIDSVLIYPKGKGFHQERVVRSQK

SEQ ID NO: 21535 - protein, 286 aa, Zea mays subsp. mays
  misc_feature (1)..(286): Ceres Seq. ID no. 12405100
MDGAAAAGPAAVGLGDLPELCAAQVLLRLDPPEICRLAQVNHAFRGAAGADFVWEAKLPENYSYLMEFVGSGDEGRRRRRRTGKKEIYARLARPVPFCDGKKEFWLDKNKGMICMALSSKALVITGIDDRRYWQHMPTSESRFQSVAYLQQIWWFEVVGEVDFCFPVGTYSLYFRVHLGKFYRRFGRRQCTSEHVHGWDKKPVRFQLSTSDGQQALSQCYLEEPGSWVLYHAGDFVASKPDQLMKLKFSMAQIDCTHTKGGLCIDSVLIYPKGKGFHQERVVRSQK

SEQ ID NO: 21536 - DNA, 1789 bp, Zea mays subsp. mays
  misc_feature (1)..(1789): Ceres Seq. ID no. 12405101
attgccagccagctgcgcagtgcgcttgcctctgctgcgtataaagtttcttccttccttggccgcttctgcgctcgcctcccttctcctcccccatcctctcccttgtggttctagatccactcctccccgtgctcactgctcatccgcgaacaggttgagcggggacgccgtggaggggcgagggggagccagattgagccatggcctcctcctgggttcttgccctggttcttgcgctgtcggcaggcgcaagcctggcgcgtggctccgagccgtggtggaacgagacgcaggtgtacgccaccaccgccaactccggtggcggcaacggcgtcttcgtcggcctcacgctcatccagtcggcggcggccaagggagcggtgtgcttggatggaagcttaccaggttaccacctccacagagggtttggatcaggagcaaacagttggctcgtcaatctcgagggcggaggctggtgcaatgatcgcagcagctgtgtgttccgcaagggcagtcgtcgtggatcatcaaatcacatggagaggcaactccagtttacagggatattgagtaacaaacctgaagagaatcccgatttctacaactggaatagagtgaaggtccggtactgtgatggtggatctttcactggtgatggctctgatgcggctgcaggcctttatttccgaggtcagcgcatttggcaggccgctatggatgacctaatggcccaaggaatgcgttatgctaatcaggcccttctttctggatgctctgccggtggtgtttctaccatacttcactgtgatgaattccgtggactgttcccatcaaataccagagtcaaatgcttagctgatgctggaatgtttcttgacactgttgatgtttctggccgccgggaaatgagatcctttttcaatggtattgtgagattgcagggttctggaagaagcttgcctaggtcttgcacctcacacatggacaaaacctcgtgctttttcccccagaatgtgttgccaaccatccgaaccccaacttttgttttgaacactgcctatgacgtgtggcagcttcaacaaagtgtggcccctagaacagctgatccccaaggtctttggtcaaagtgtaggacgaaccatgccttctgtaatagcaaccagctccagtttttgcaagggttcaggaaccagatgcttgatgccgtgaggggtttctctgcatcaaggcaaaatggtctgttcatcaactcatgttttgctcattgccagagcgagagacaggatacttggtacgcgaacaactctccacgtcttggtaacaagaaaatcgctgacgctgtcggggactggttcttcgagagggggaatgccaagtacacagactgcccatacccttgcgatggcacttgccatcaccttgtgttcaggggagaccactaagatcattcttcagcaccaacaaattcatcagatggtacaaggatcaaaccccaatgggtacagaatggaaaacaaggtatagatacagataaggtgcaagtggtcggcttgcccatgtttgttcatcagtgagtcatatgattgatagtgcgaggacctcacccgcgaacgcgcggaggaggcctctgcattagattcacataccgtcatgatatcgaattttcattggaaaagtgtccatgattacgtaccagaacatttgagttacatactcatttcgtgtactgtattaataacactagaacgttacatattcatttgtcctgaagatcgtactacttggc

SEQ ID NO: 21537 - protein, 413 aa, Zea mays subsp. mays
  misc_feature (1)..(413): Ceres Seq. ID no. 12405102
MASSWVLALVLALSAGASLARGSEPWWNETQVYATTANSGGGNGVFVGLTLIQSAAAKGAVCLDGSLPGYHLHRGFGSGANSWLVNLEGGGWCNDRSSCVFRKGSRRGSSNHMERQLQFTGILSNKPEENPDFYNWNRVKVRYCDGGSFTGDGSDAAAGLYFRGQRIWQAAMDDLMAQGMRYANQALLSGCSAGGVSTILHCDEFRGLFPSNTRVKCLADAGMFLDTVDVSGRREMRSFFNGIVRLQGSGRSLPRSCTSHMDKTSCFFPQNVLPTIRTPTFVLNTAYDVWQLQQSVAPRTADPQGLWSKCRTNHAFCNSNQLQFLQGFRNQMLDAVRGFSASRQNGLFINSCFAHCQSERQDTWYANNSPRLGNKKIADAVGDWFFERGNAKYTDCPYPCDGTCHHLVFRGDH

SEQ ID NO: 21538 - protein, 301 aa, Zea mays subsp. mays
  misc_feature (1)..(301): Ceres Seq. ID no. 12405103
MERQLQFTGILSNKPEENPDFYNWNRVKVRYCDGGSFTGDGSDAAAGLYFRGQRIWQAAMDDLMAQGMRYANQALLSGCSAGGVSTILHCDEFRGLFPSNTRVKCLADAGMFLDTVDVSGRREMRSFFNGIVRLQGSGRSLPRSCTSHMDKTSCFFPQNVLPTIRTPTFVLNTAYDVWQLQQSVAPRTADPQGLWSKCRTNHAFCNSNQLQFLQGFRNQMLDAVRGFSASRQNGLFINSCFAHCQSERQDTWYANNSPRLGNKKIADAVGDWFFERGNAKYTDCPYPCDGTCHHLVFRGDH

SEQ ID NO: 21539 - protein, 242 aa, Zea mays subsp. mays
  misc_feature (1)..(242): Ceres Seq. ID no. 12405104
MDDLMAQGMRYANQALLSGCSAGGVSTILHCDEFRGLFPSNTRVKCLADAGMFLDTVDVSGRREMRSFFNGIVRLQGSGRSLPRSCTSHMDKTSCFFPQNVLPTIRTPTFVLNTAYDVWQLQQSVAPRTADPQGLWSKCRTNHAFCNSNQLQFLQGFRNQMLDAVRGFSASRQNGLFINSCFAHCQSERQDTWYANNSPRLGNKKIADAVGDWFFERGNAKYTDCPYPCDGTCHHLVFRGDH

SEQ ID NO: 21540 - DNA, 1462 bp, Zea mays subsp. mays
  misc_feature (1)..(1462): Ceres Seq. ID no. 12405153
aaccgagacgggacgagaccagcagccggccaccagcccatccgaaccctgctgctcccctctccgggttcgcgtgaggctgtgtgctgctgggaggagggggaagcggcggcggggcgccatggaggccgagaagaaggcgccggcggtgtcagacgtgggcgcgtgggcgatgaacgtcgtcagctccgtcagcctcatcatggccaacaagcagctcatgtcctcctccggctacgccttcgccttcgccaccacgctgaccgggttccacttcacggtcacggcgctcgtcgggtggatctccaacgccaccggctactccgtctccaagcacgtaccgctctgggagctcgtctggttctctctcgtcgccaacacctccatcaccgggatgaacctcagcctcatgctcaactccgtcggcttctaccagatctccaaactgagcatgattccggtggtctgcctcatggaatgggtgctgaacagcaagcactacaccaccaaggtcatctcggcagtggttgtcgtggccgccggtgtcgggatttgcacggtcacggatgtcgaggtcaatgccaaggggttcatctgcgcttgcgtggcagtgttctgcacgtcgcttcaacagattacaattggttcctttcaaaagaagtacaacattgggtcatttgagctgctgagcaaaactgcaccaatccaggcaatttcactcattatactgggcccctttgtggactactatctaaatggacggtcattgttgaactaccctttttcgggaggggcaactttcttcatcttgctttcctgctcccttgccgtcttctgcaacatgagccaatacctctgcatcggccggttctcagcgacctcgtttcaggtcctgggccacatgaagaccgtgtgcgtgctgatcctcggctggatcctgtttgactcggccctcaccgtgaagaacatcctcgggatgctgctcgccgtgatgggcatggtggtctacagctgggccgtggaagcggagaagaaggcggcagccccggtcccccggatcaagagcgaaatgctcgacggcgaggacgtacctctcaaggccagggtgagcggcgtgcccgcagtcgacctcgaggacggcgagatgaagagctagctgctgcggctgccgcagctgccgctgattcgttcattcttcttgttcttttgtaactgtgcgcgcgcgatcgctcgatccaaagttgcttgtccgtcagccctcagctatcgacactacactgttatttttggccccttgttggggagagtccagttcctacgtgacgacgaccacccccagttcggcgtagatgaaacacaaactagcagaatgcagattttaggatttttttttcaggcggcggggtggagccattcattgtcatggtgacaggactcataatagaaatacaggtaacatgtc

SEQ ID NO: 21541 - protein, 384 aa, Zea mays subsp. mays
  misc_feature (1)..(384): Ceres Seq. ID no. 12405154
TETGRDQQPATSPSEPCCSPLRVRVRLCAAGRRGKRRRGAMEAEKKAPAVSDVGAWAMNVVSSVSLIMANKQLMSSSGYAFAFATTLTGFHFTVTALVGWISNATGYSVSKHVPLWELVWFSLVANTSITGMNLSLMLNSVGFYQISKLSMIPVVCLMEWVLNSKHYTTKVISAVVVVAAGVGICTVTDVEVNAKGFICACVAVFCTSLQQITIGSFQKKYNIGSFELLSKTAPIQAISLIILGPFVDYYLNGRSLLNYPFSGGATFFILLSCSLAVFCNMSQYLCIGRFSATSFQVLGHMKTVCVLILGWILFDSALTVKNILGMLLAVMGMVVYSWAVEAEKKAAAPVPRIKSEMLDGEDVPLKARVSGVPAVDLEDGEMKS

SEQ ID NO: 21542 - protein, 344 aa, Zea mays subsp. mays
  misc_feature (1)..(344): Ceres Seq. ID no. 12405155
MEAEKKAPAVSDVGAWAMNVVSSVSLIMANKQLMSSSGYAFAFATTLTGFHFTVTALVGWISNATGYSVSKHVPLWELVWFSLVANTSITGMNLSLMLNSVGFYQISKLSMIPVVCLMEWVLNSKHYTTKVISAVVVVAAGVGICTVTDVEVNAKGFICACVAVFCTSLQQITIGSFQKKYNIGSFELLSKTAPIQAISLIILGPFVDYYLNGRSLLNYPFSGGATFFILLSCSLAVFCNMSQYLCIGRFSATSFQVLGHMKTVCVLILGWILFDSALTVKNILGMLLAVMGMVVYSWAVEAEKKAAAPVPRIKSEMLDGEDVPLKARVSGVPAVDLEDGEMKS

SEQ ID NO: 21543 - protein, 327 aa, Zea mays subsp. mays
  misc_feature (1)..(327): Ceres Seq. ID no. 12405156
MNVVSSVSLIMANKQLMSSSGYAFAFATTLTGFHFTVTALVGWISNATGYSVSKHVPLWELVWFSLVANTSITGMNLSLMLNSVGFYQISKLSMIPVVCLMEWVLNSKHYTTKVISAVVVVAAGVGICTVTDVEVNAKGFICACVAVFCTSLQQITIGSFQKKYNIGSFELLSKTAPIQAISLIILGPFVDYYLNGRSLLNYPFSGGATFFILLSCSLAVFCNMSQYLCIGRFSATSFQVLGHMKTVCVLILGWILFDSALTVKNILGMLLAVMGMVVYSWAVEAEKKAAAPVPRIKSEMLDGEDVPLKARVSGVPAVDLEDGEMKS

SEQ ID NO: 21544 - DNA, 904 bp, Zea mays subsp. mays
  misc_feature (1)..(904): Ceres Seq. ID no. 12405189
atcaacaacatacacacaagcaaaacaaaaagctaagaagctccgtagctaaattcagatattacaaacacaaaaaaggagtgcagaaccaaaatggctgcctcgaccttccttctcattgcttttctagcattgatcacttctcaggccattgcctctgatcctagcccgctccaagacttctgtgttgccgataaagactctccggtgaaggtgaatggatttgtttgcaaggaccctatggctgtgaacgctgacgacttcttcaaggctgcaaaacttgaccagccaagggacaccaccaaaagcaaggtgggatccaacgttactctaatcaatgtcatgcagctgcctggactcaacacgttggggatctcgttggctcgcattgactacgcaccattaggtcagaatcctccacacacacacccacgtgccactgagatcctcactgtgcttgaggggacactctacgtcggatttgtcacctccaaccaagctgatagaagcaacaggctatttgccaaggttctcaacaagggcgatgtgtttgtattcccccaaggactaatccacttccagttcaacccagtacatgacaagccagcagtcgcgctcgctgctctaagtagccagaaccctggagctattactattgccaatgcagtctttggatcaaagccacctatctcggatgatgtcctagctaaggcctttcaagtgcaaaaggggacaattgattggcttcaagctcagttctgggagaacaaccactactgaaaaaatcaagtctgagttcaacatatgagaataaagaaatgtacttgtattttacatactactctatgtgttaacctttttctaggttgcgactgataataaaataaatgttcagtatttatgt

SEQ ID NO: 21545 - protein, 228 aa, Zea mays subsp. mays
  misc_feature (1)..(228): Ceres Seq. ID no. 12405190
MAASTFLLIAFLALITSQAIASDPSPLQDFCVADKDSPVKVNGFVCKDPMAVNADDFFKAAKLDQPRDTTKSKVGSNVTLINVMQLPGLNTLGISLARIDYAPLGQNPPHTHPRATEILTVLEGTLYVGFVTSNQADRSNRLFAKVLNKGDVFVFPQGLIHFQFNPVHDKPAVALAALSSQNPGAITIANAVFGSKPPISDDVLAKAFQVQKGTIDWLQAQFWENNHY

SEQ ID NO: 21546 - protein, 179 aa, Zea mays subsp. mays
  misc_feature (1)..(179): Ceres Seq. ID no. 12405191
MAVNADDFFKAAKLDQPRDTTKSKVGSNVTLINVMQLPGLNTLGISLARIDYAPLGQNPPHTHPRATEILTVLEGTLYVGFVTSNQADRSNRLFAKVLNKGDVFVFPQGLIHFQFNPVHDKPAVALAALSSQNPGAITIANAVFGSKPPISDDVLAKAFQVQKGTIDWLQAQFWENNHY

SEQ ID NO: 21547 - protein, 145 aa, Zea mays subsp. mays
  misc_feature (1)..(145): Ceres Seq. ID no. 12405192
MQLPGLNTLGISLARIDYAPLGQNPPHTHPRATEILTVLEGTLYVGFVTSNQADRSNRLFAKVLNKGDVFVFPQGLIHFQFNPVHDKPAVALAALSSQNPGAITIANAVFGSKPPISDDVLAKAFQVQKGTIDWLQAQFWENNHY

SEQ ID NO: 21548 - DNA, 1257 bp, Zea mays subsp. mays
  misc_feature (1)..(1257): Ceres Seq. ID no. 12405217
atcatcgtttccctaccgcaatcgaagaaagggccgggctcaaccgagccctcaaatcgccgcatcgcgcccctagctctctccgtctccctcatcctgacctcgattagagctagtttcgggaagcaaaggtatcggatcaacccccttgatcacccatggtgcccagggatagggcgcacagcgccgctgctgccaccgcgcccccgacggagaagcccgttcaagggcctatccagaacaacaagtgcgaaaagaaggctccaaagaaggtgcataaatctgagagagagaaacgtaagcgggacaagcagaatgatctctttggtgagctgggaaacatgctagaacctgatagacagaacaatggaaaggcatgcatattaagtgacactacacgaatacttaaagatctactttcacaagtagaatctcttcgaaaggagaacaacacgctgaagaatgagtctcattatgtcgctttggagagaaatgaactactggatgaaaccaatatgatccgtggcgaaatatcagaccttcaaaacgagatgaggatgcggctagaaggcaactctatctggagtcatgacacttccagaccaaatcttacagcaccccatccagcgaccacagtatttacattgcagcattcaccacatccacaagtcattgcaacaatgacacttcctctgcaacagccagcagtcgttgagcaatcttacgctgccccacggcgggagctacagctattccctgaagctgcacccactgaagacactgagccaccacaaaaccaggggatctctaatcatgtgatgcggccgcaggcgaggtacccaccagcaacgaccactttgcctgggcatgtatatccagtccttccaagagtggaagatgagcaacgcagcagcggcactactggtagcagagaggaaggcggggtaggcaaccgttaacagctcgagtacaaaacgagagatctggctcacagtttgaaaagctctcgtagtttcaactttaatgtttccattctagctgatgtgctaaagaaaccttaaaacctatgcggctgtgcctgcacatgtaaatatcattccactctgtattacccgaacttaatcttcaactagttacttcgatgggtgcaatctatctttgttagttcgtacacttcgtagtttatctgtagtacttgtaccaagcagaagttcaaggagtacctgattcgagaaaacatgttaatcactctttgtc

SEQ ID NO: 21549 - protein, 266 aa, Zea mays subsp. mays
  misc_feature (1)..(266): Ceres Seq. ID no. 12405218
MVPRDRAHSAAAATAPPTEKPVQGPIQNNKCEKKAPKKVHKSEREKRKRDKQNDLFGELGNMLEPDRQNNGKACILSDTTRILKDLLSQVESLRKENNTLKNESHYVALERNELLDETNMIRGEISDLQNEMRMRLEGNSIWSHDTSRPNLTAPHPATTVFTLQHSPHPQVIATMTLPLQQPAVVEQSYAAPRRELQLFPEAAPTEDTEPPQNQGISNHVMRPQARYPPATTTLPGHVYPVLPRVEDEQRSSGTTGSREEGGVGNR

SEQ ID NO: 21550 - protein, 205 aa, Zea mays subsp. mays
  misc_feature (1)..(205): Ceres Seq. ID no. 12405219
MLEPDRQNNGKACILSDTTRILKDLLSQVESLRKENNTLKNESHYVALERNELLDETNMIRGEISDLQNEMRMRLEGNSIWSHDTSRPNLTAPHPATTVFTLQHSPHPQVIATMTLPLQQPAVVEQSYAAPRRELQLFPEAAPTEDTEPPQNQGISNHVMRPQARYPPATTTLPGHVYPVLPRVEDEQRSSGTTGSREEGGVGNR

SEQ ID NO: 21551 - protein, 147 aa, Zea mays subsp. mays
  misc_feature (1)..(147): Ceres Seq. ID no. 12405220
MIRGEISDLQNEMRMRLEGNSIWSHDTSRPNLTAPHPATTVFTLQHSPHPQVIATMTLPLQQPAVVEQSYAAPRRELQLFPEAAPTEDTEPPQNQGISNHVMRPQARYPPATTTLPGHVYPVLPRVEDEQRSSGTTGSREEGGVGNR

SEQ ID NO: 21552 - DNA, 1266 bp, Zea mays subsp. mays
  misc_feature (1)..(1266): Ceres Seq. ID no. 12405230
agttcctaccaactcccgttgttgcctacggcgattccaaattcccatctgccctcctgctgctccactccactccactccaggctcttttccctgctcctgtgggctgtggcgagcgcaaaccagcctcgcttcccaaaccctagctcctcgctctcccgcccgcgtggcctgccaggcaaccacccccggatcaactccgtacagcgtgcctccgcctcccggactccagcggcggcgggatgtggtctcactccaaggacttgctcgagatcgagcccctcgagctccgattcccattcgagacaaagaagcagatctcgtgctctatgcagttgacaaaccgaacagatgactacatcggctttaaggttaagacgacgagcccgaagaagtactgtgtccggcccaacagcggcatcgtgccacctcggtccaccagcgatgtcattgtgacaatgcaagcacaaaaggaggcgccaccggacatgcagtgcaaggacaagtttcttgtgcaaagtgtcgttgtggcggaagggaccttagtcaaggacatcactggcgatatgtttaccaaagaatcagctaatgtggtggatgaggttaagctgaaggtcgtctacatcccaccacccaaaccgccatccccagtgcatgaggaatctgaagaaggctcatcaccccgaccttcattgtccgatggaattaacttgaattatcaagagacaacgagggaatctgataagtcactgttgttctcggctgtaaaaactcatatagatcaaaaggactacacctccgagacatctgctttgatttcaaagttgacagaagagagaaactctgccattcagcagaacaataagcttcgagaggaactggaccttacgaggagggaagccaacaagcagaatggtggattctcctttgtggtcgtggtggccattgctctcctgggaatgctactgggatatatcatgaagagatagatgggctcataatgactcggcctcatgttagaccgttttcctcacagtattgaatattgtctaatgcacttatcacatgcacactgctactccatagcatattcatctggtgtcttacgtgatctgtttcgtgcttgggattgggatgactagtcaccagtcgcaacacaggctgtcaaacaatggtctgtgtgcttaatcttgttttagctgttatgttagtgtgtgcaactaaaactgggtaattaatgatgtcgttttggtcgaccgtttgtgc

SEQ ID NO: 21553 - protein, 248 aa, Zea mays subsp. mays
  misc_feature (1)..(248): Ceres Seq. ID no. 12405231
MWSHSKDLLEIEPLELRFPFETKKQISCSMQLTNRTDDYIGFKVKTTSPKKYCVRPNSGIVPPRSTSDVIVTMQAQKEAPPDMQCKDKFLVQSVVVAEGTLVKDITGDMFTKESANVVDEVKLKVVYIPPPKPPSPVHEESEEGSSPRPSLSDGINLNYQETTRESDKSLLFSAVKTHIDQKDYTSETSALISKLTEERNSAIQQNNKLREELDLTRREANKQNGGFSFVVVVAIALLGMLLGYIMKR

SEQ ID NO: 21554 - protein, 219 aa, Zea mays subsp. mays
  misc_feature (1)..(219): Ceres Seq. ID no. 12405232
MQLTNRTDDYIGFKVKTTSPKKYCVRPNSGIVPPRSTSDVIVTMQAQKEAPPDMQCKDKFLVQSVVVAEGTLVKDITGDMFTKESANVVDEVKLKVVYIPPPKPPSPVHEESEEGSSPRPSLSDGINLNYQETTRESDKSLLFSAVKTHIDQKDYTSETSALISKLTEERNSAIQQNNKLREELDLTRREANKQNGGFSFVVVVAIALLGMLLGYIMKR

SEQ ID NO: 21555 - protein, 176 aa, Zea mays subsp. mays
  misc_feature (1)..(176): Ceres Seq. ID no. 12405233
MQAQKEAPPDMQCKDKFLVQSVVVAEGTLVKDITGDMFTKESANVVDEVKLKVVYIPPPKPPSPVHEESEEGSSPRPSLSDGINLNYQETTRESDKSLLFSAVKTHIDQKDYTSETSALISKLTEERNSAIQQNNKLREELDLTRREANKQNGGFSFVVVVAIALLGMLLGYIMKR

SEQ ID NO: 21556 - DNA, 1422 bp, Zea mays subsp. mays
  misc_feature (1)..(1422): Ceres Seq. ID no. 12405251
cggattaagcgataattaaggcaaagaatctccaagtttgcttcgttcttgcattgaaccatggagtctggacggctcatcttcaacgcgccgggctctggcgccgggcagatgctcttcctcgactgcggcgcaggcggcggtcccggcggcggcttgttccatcgaggcgggagaccgatgcttggccttgaagaagggcgcggcgtaaaacggcccttcttcacctcgcccgacgagctcctcgaggaagagtactacgacgagcagctgccggagaagaagcgccgcctcaccccagagcaggtgcttctgctggagaggagcttcgaggaggagaacaagctggagccggagcgcaagacggagctggcgcgcaagctgggcctgcagcctcgccaggtggccgtctggttccagaaccgccgcgcccggtggaagaccaagcagctcgagcgcgacttcgaccgcctcaaggcctccttcgacgctctccgagcggaccacgacgccctcctccaggacaacaaccgcctccgctcacaggttgtgtcgttgaccgagaagctgcaagagaaggaggatgcgacggagggcggcgccaccgctgacaccgccgcgccggcggtggacgtcgaggcttccctggccgacgacgtcgaggagccagcagagcctgcggcgacgttcgaggtgctgcaggaggtgaagtccgaggacaggctgagcaccggcagcggcgggagcgcggtggtggacgcggacgcgctgctgtacggcaggttcgccgcggcagttgatagcagcgtggagtcgtacttccccggcggcgaggaccactaccacgactgcgggacgatgggccccgtgaaccatggcgccggaggaggcatccagtcggacgacgacggcgccggcagcgacgaggggtgcagctactacgccgacgaagccgccgccgccgccgccgccgcgttcttcgccggacacgccacccaccaccacgcggacgaggacgaggacgccggccagatcagctggtggatgtggaactagacgttcgatcttcccacgccgatcgatcgaccgtcttcgaatcctgtgtcaacaagaagaaaaaagaatcgtgccgtgatttttctttgcgcaacgctgctgtaagcctgtaatggtgaatttctagctatggttatgccgttatgaaggaagaaagtgtatgcatgcatggtagggtaaagagtgggtaattaatatcgttgatcatcccagtcactcgtggtgttccagaagatcaatggagttgggggagaaataagtgcgcatagaggcaagtactactctttttatggcacagtgcctatgtcaaatcagggtgttattaccagttggttttttttaaaaaaaaatactgtactattacgc

SEQ ID NO: 21557 - protein, 331 aa, Zea mays subsp. mays
  misc_feature (1)..(331): Ceres Seq. ID no. 12405252
MESGRLIFNAPGSGAGQMLFLDCGAGGGPGGGLFHRGGRPMLGLEEGRGVKRPFFTSPDELLEEEYYDEQLPEKKRRLTPEQVLLLERSFEEENKLEPERKTELARKLGLQPRQVAVWFQNRRARWKTKQLERDFDRLKASFDALRADHDALLQDNNRLRSQVVSLTEKLQEKEDATEGGATADTAAPAVDVEASLADDVEEPAEPAATFEVLQEVKSEDRLSTGSGGSAVVDADALLYGRFAAAVDSSVESYFPGGEDHYHDCGTMGPVNHGAGGGIQSDDDGAGSDEGCSYYADEAAAAAAAAFFAGHATHHHADEDEDAGQISWWMWN

SEQ ID NO: 21558 - protein, 314 aa, Zea mays subsp. mays
  misc_feature (1)..(314): Ceres Seq. ID no. 12405253
MLFLDCGAGGGPGGGLFHRGGRPMLGLEEGRGVKRPFFTSPDELLEEEYYDEQLPEKKRRLTPEQVLLLERSFEEENKLEPERKTELARKLGLQPRQVAVWFQNRRARWKTKQLERDFDRLKASFDALRADHDALLQDNNRLRSQVVSLTEKLQEKEDATEGGATADTAAPAVDVEASLADDVEEPAEPAATFEVLQEVKSEDRLSTGSGGSAVVDADALLYGRFAAAVDSSVESYFPGGEDHYHDCGTMGPVNHGAGGGIQSDDDGAGSDEGCSYYADEAAAAAAAAFFAGHATHHHADEDEDAGQISWWMWN

SEQ ID NO: 21559 - protein, 291 aa, Zea mays subsp. mays
  misc_feature (1)..(291): Ceres Seq. ID no. 12405254
MLGLEEGRGVKRPFFTSPDELLEEEYYDEQLPEKKRRLTPEQVLLLERSFEEENKLEPERKTELARKLGLQPRQVAVWFQNRRARWKTKQLERDFDRLKASFDALRADHDALLQDNNRLRSQVVSLTEKLQEKEDATEGGATADTAAPAVDVEASLADDVEEPAEPAATFEVLQEVKSEDRLSTGSGGSAVVDADALLYGRFAAAVDSSVESYFPGGEDHYHDCGTMGPVNHGAGGGIQSDDDGAGSDEGCSYYADEAAAAAAAAFFAGHATHHHADEDEDAGQISWWMWN

SEQ ID NO: 21560 - DNA, 1558 bp, Zea mays subsp. mays
  misc_feature (1)..(1558): Ceres Seq. ID no. 12405255
aaccaaagccgccaccgttgccgtagccgtgttcttggactctgttacgtgctgccattttgccaaggctagccccctcctcctcttcttcctcttcttcttttcgcgacgatcagagaagaagatgacgatcaccattgaacagccccagctcgatgcggtggcggagaggaaagtccccggcggaggcgaccccgcggagctggtgctcgacgccggcttcgtcgtgccggacgccaacgccttcggcaataccttcaggaactacgacgcggagtcggagcggaagcagacggtagaggagttctaccgggtgaaccacgtgaggcagacgcacgagttcgtggcgcggatgcgggcggagtacgggcggctggacaagacggagatgggcatctgggagtgcatcgagctgctgaacgagttcatcgacgacagcgacccggacctggacatgccccagatcgagcacctgctgcagaccgccgaggccatccgcaaggactaccccgacgaggactggctccacctcaccggactcatccacgacctgggcaaggtgctgctgcacccaagcttcggggagctccctcagtgggctgtcgtcggtgacaccttccccgtcggctgcgcatacgacgagtgcaacgtccacttcaagtacttcaaggagaaccccgactaccacaacccgaagctcaacaccaagttgggggtctactcggagggctgcggcctcgacaaggtgctcatgtcatggggccacgacgactacatgtacctggtggccaaggagaacaagtgcacccttccttccgcggggctgttcatcatcagataccactcgttctacccactgcacaagcatggagcctacacgcacctgatggacgatgaggacaaggagaacctcaagtggctgcatgtgttcaacaagtatgacctgtacagcaagagcaacagcaggatcgacgtggaggaggtgaagccctactacatgtccctaatcgacaagtacttcccggccaagctaagatggtgagaaggggcggcctggcctggacctggatgatagatggaaccccaaggccccaccaagagctgtcgttccaagtgtccatgtaccatatacatatctctactactctataagactctattgtagaccatccgtgcaccgcggttctgccactctctgttccgcccaccaccggtcgtatgacaggtgggtcccatgtgtcagtccatcacgcttccgtccgaccgtcatccagatttccgtgatacagccgtctccacgacgagattggcgacgtcctccctgcgcccgcagcccccccccccccccggctgccgcacgcatgcccctgcttcactcacgcccggctcctccctcttcgctcgactccccacacggtcgtcggtcgtcgctcctccttgagtagaactagtatatagactacgaatacagtatgtgtgccatgtacggtcattttttacagagttgagaagagtacccatgccgtttcgaataaaagttgcctgcgtttgttccttc

SEQ ID NO: 21561 - protein, 346 aa, Zea mays subsp. mays
  misc_feature (1)..(346): Ceres Seq. ID no. 12405256
TKAATVAVAVFLDSVTCCHFAKASPLLLFFLFFFSRRSEKKMTITIEQPQLDAVAERKVPGGGDPAELVLDAGFVVPDANAFGNTFRNYDAESERKQTVEEFYRVNHVRQTHEFVARMRAEYGRLDKTEMGIWECIELLNEFIDDSDPDLDMPQIEHLLQTAEAIRKDYPDEDWLHLTGLIHDLGKVLLHPSFGELPQWAVVGDTFPVGCAYDECNVHFKYFKENPDYHNPKLNTKLGVYSEGCGLDKVLMSWGHDDYMYLVAKENKCTLPSAGLFIIRYHSFYPLHKHGAYTHLMDDEDKENLKWLHVFNKYDLYSKSNSRIDVEEVKPYYMSLIDKYFPAKLRW

SEQ ID NO: 21562 - protein, 305 aa, Zea mays subsp. mays
  misc_feature (1)..(305): Ceres Seq. ID no. 12405257
MTITIEQPQLDAVAERKVPGGGDPAELVLDAGFVVPDANAFGNTFRNYDAESERKQTVEEFYRVNHVRQTHEFVARMRAEYGRLDKTEMGIWECIELLNEFIDDSDPDLDMPQIEHLLQTAEAIRKDYPDEDWLHLTGLIHDLGKVLLHPSFGELPQWAVVGDTFPVGCAYDECNVHFKYFKENPDYHNPKLNTKLGVYSEGCGLDKVLMSWGHDDYMYLVAKENKCTLPSAGLFIIRYHSFYPLHKHGAYTHLMDDEDKENLKWLHVFNKYDLYSKSNSRIDVEEVKPYYMSLIDKYFPAKLRW

SEQ ID NO: 21563 - protein, 229 aa, Zea mays subsp. mays
  misc_feature (1)..(229): Ceres Seq. ID no. 12405258
MRAEYGRLDKTEMGIWECIELLNEFIDDSDPDLDMPQIEHLLQTAEAIRKDYPDEDWLHLTGLIHDLGKVLLHPSFGELPQWAVVGDTFPVGCAYDECNVHFKYFKENPDYHNPKLNTKLGVYSEGCGLDKVLMSWGHDDYMYLVAKENKCTLPSAGLFIIRYHSFYPLHKHGAYTHLMDDEDKENLKWLHVFNKYDLYSKSNSRIDVEEVKPYYMSLIDKYFPAKLRW

SEQ ID NO: 21564 - DNA, 1073 bp, Zea mays subsp. mays
  misc_feature (1)..(1073): Ceres Seq. ID no. 12405278
aatccccacccgcaacaaaccaaacccaaccgcaactgcaacacagaggcatctctctccgcctccacgccgccgcccccagaccctcctcgatccaggcggtgattcgccgggctcccggcccggccatggatttgctggcgtccttggccgccgaggagcggtggctgttcccggcgttcctcgccatgtacgccgccatctactgcgccggccagctcgtcgtgttccggcggtgggcgccgcggcagaggctcgacggcgccagctgcctcatctcgctattccacggcacccccgccgcgctggccgccgcgggggccatcctcgcgcttcccgcggagtcccgctccttcgccgcgcccaacgcgcgcctccaggaccacgtcctcgactacagcgtcgcctacttcaccatggacctgctccactacctcgcctttctgccgggcgacgtcctcttcatcgcgcaccacctcgccacgctcttcgtcttcctgacctgccgctacctcgtccgccacggcgcctacgcgctcctcgtcctcctcgtcctcgccgaggtcaccagcctgctgcagaacgtctggacgctcgccgggatctggcgggaccagtcccccgccgccgcccgcgtcctacggcgccctctcgccgcccttctacgcgctctacacgctcgtcaggggcgtcgccggcccgctcttcctcctcaagatggccgccttctacctgtccggccaggccgtcgacgtcattccgtggtgggtgcggatctcctggatcctggaggaactgagcggtggggcccgcgcggccaagttatcctgttcgctaccgtgatgtttaccctagtccagagggtttatcttcgttcgtgtcgtgtttgttgttgcccatctgtgtttttgattgcaaggtcgctctgtgtcagttgttagtgctgtgttcatcctcggtttcagcagacccatgcatcaaacagcatggactgcggatcgatggatgctgttacccccgtcaggctttatttctaagttaatcttaaggnaaaaatggtgcttcttggtgct

SEQ ID NO: 21565 - protein, 312 aa, Zea mays subsp. mays
  misc_feature (1)..(312): Ceres Seq. ID no. 12405279
SPPATNQTQPQLQHRGISLRLHAAAPRPSSIQAVIRRAPGPAMDLLASLAAEERWLFPAFLAMYAAIYCAGQLVVFRRWAPRQRLDGASCLISLFHGTPAALAAAGAILALPAESRSFAAPNARLQDHVLDYSVAYFTMDLLHYLAFLPGDVLFIAHHLATLFVFLTCRYLVRHGAYALLVLLVLAEVTSLLQNVWTLAGIWRDQSPAAARVLRRPLAALLRALHARQGRRRPALPPQDGRLLPVRPGRRRHSVVGADLLDPGGTERWGPRGQVILFATVMFTLVQRVYLRSCRVCCCPSVFLIARSLCVSC

SEQ ID NO: 21566 - protein, 270 aa, Zea mays subsp. mays
  misc_feature (1)..(270): Ceres Seq. ID no. 12405280
MDLLASLAAEERWLFPAFLAMYAAIYCAGQLVVFRRWAPRQRLDGASCLISLFHGTPAALAAAGAILALPAESRSFAAPNARLQDHVLDYSVAYFTMDLLHYLAFLPGDVLFIAHHLATLFVFLTCRYLVRHGAYALLVLLVLAEVTSLLQNVWTLAGIWRDQSPAAARVLRRPLAALLRALHARQGRRRPALPPQDGRLLPVRPGRRRHSVVGADLLDPGGTERWGPRGQVILFATVMFTLVQRVYLRSCRVCCCPSVFLIARSLCVSC

SEQ ID NO: 21567 - protein, 265 aa, Zea mays subsp. mays
  misc_feature (1)..(265): Ceres Seq. ID no. 12405281
IPTRNKPNPTATATQRHLSPPPRRRPQTLLDPGGDSPGSRPGHGFAGVLGRRGAVAVPGVPRHVRRHLLRRPARRVPAVGAAAEARRRQLPHLAIPRHPRRAGRRGGHPRASRGVPLLRRAQRAPPGPRPRLQRRLLHHGPAPLPRLSAGRRPLHRAPPRHALRLPDLPLPRPPRRLRAPRPPRPRRGHQPAAERLDARRDLAGPVPRRRPRPTAPSRRPSTRSTRSSGASPARSSSSRWPPSTCPARPSTSFRGGCGSPGSWRN

SEQ ID NO: 21568 - DNA, 1242 bp, Zea mays subsp. mays
  misc_feature (1)..(1242): Ceres Seq. ID no. 12405303
aactcccatatggacgccaagccgcgcaacctgggcggctcgctgccggtgcccaacgtgcaggacctggccgcgcgccccggcgacgaactcacgccgcccgtgctaagccgctacctccgcgacgacgtcgacggcgcagacgccaacggcgacgcggcctcctcggtgccggtagttgacctcgcgaggctcctggacccgtcgtcgcacggagacgaggagtccgccaaactgaaggcggcctgcgaggagtggggcttcttccaggtgatcaaccacggggtgcccgacgcggtggtcgcggacgtgaagcagacctgcaggccttcttccgcctcccgctcgccgacaagcgcgcggtggcgcaggagcccggcgggatcgaggggtacgggcaggccttcgtggtctccgaggaccagaagctggactgggccgacatgcttttcctgtccacgcagccgcccgagtaccgggccccgcgcttcttgccggcgcgcccggccacgttcggggactcgctggcgcgctactctgccgaggtgcagcgcgtggccgcccgcctgctggcgtccatggccgcgaacctgggcgtggcggacgccgcgaggctggccagggtcgccgacgcgcaggccgtgcgcgtcaactactacccggcgtgcccgcacggcaggggcagggtgctgggcctgtcgccgcactcggacgccgccggcctcacgctgctgctccaggtcagcgccgtcccggggctgcagatcaggaggcncggcgcgtggatcagcgtcgaccccatccccggagcgctggtggccaacgtcggcgacgtcgtcgaggtgctcaccaacggcaggtacaagagcatcgagcaccgggcgctggttagccccacccaccaccgggtgtccgtcgcagccttccactccgccaggttcggcgacacttacgcgccgcttgaggagacgatggtcgatggtgatgagccagcgaggtacaggagcattggcgtcgaggactacgtccgcctggtgctgtctagtaagctccaaggaaagaacataatggacgccatgaagatcaatccggtcactgaatgaatgagtgaatcagaggatttgggaacaaaagttctgatttgtgtgtgtcgttttgaatcgtctttacatttacaataagagcagcgggcggattgctcttggtcaaacttgaagtaaaccatgaacatgttccgaattg

SEQ ID NO: 21569 - protein, 355 aa, Zea mays subsp. mays
  misc_feature (1)..(355): Ceres Seq. ID no. 12405304
  misc_feature (259)..(259): Xaa is any aa, unknown or other
NSHMDAKPRNLGGSLPVPNVQDLAARPGDELTPPVLSRYLRDDVDGADANGDAASSVPVVDLARLLDPSSHGDEESAKLKAACEEWGFFQVINHGVPDAVVADVKQTCRPSSASRSPTSARWRRSPAGSRGTGRPSWSPRTRSWTGPTCFSCPRSRPSTGPRASCRRARPRSGTRWRATLPRCSAWPPACWRPWPRTWAWRTPRGWPGSPTRRPCASTTTRRARTAGAGCWACRRTRTPPASRCCSRSAPSRGCRSGGXARGSASTPSPERWWPTSATSSRCSPTAGTRASSTGRWLAPPTTGCPSQPSTPPGSATLTRRLRRRWSMVMSQRGTGALASRTTSAWCCLVSSKERT

SEQ ID NO: 21570 - protein, 352 aa, Zea mays subsp. mays
  misc_feature (1)..(352): Ceres Seq. ID no. 12405305
  misc_feature (256)..(256): Xaa is any aa, unknown or other
MDAKPRNLGGSLPVPNVQDLAARPGDELTPPVLSRYLRDDVDGADANGDAASSVPVVDLARLLDPSSHGDEESAKLKAACEEWGFFQVINHGVPDAVVADVKQTCRPSSASRSPTSARWRRSPAGSRGTGRPSWSPRTRSWTGPTCFSCPRSRPSTGPRASCRRARPRSGTRWRATLPRCSAWPPACWRPWPRTWAWRTPRGWPGSPTRRPCASTTTRRARTAGAGCWACRRTRTPPASRCCSRSAPSRGCRSGGXARGSASTPSPERWWPTSATSSRCSPTAGTRASSTGRWLAPPTTGCPSQPSTPPGSATLTRRLRRRWSMVMSQRGTGALASRTTSAWCCLVSSKERT

SEQ ID NO: 21571 - protein, 219 aa, Zea mays subsp. mays
  misc_feature (1)..(219): Ceres Seq. ID no. 12405306
  misc_feature (111)..(111): Xaa is any aa, unknown or other
MLFLSTQPPEYRAPRFLPARPATFGDSLARYSAEVQRVAARLLASMAANLGVADAARLARVADAQAVRVNYYPACPHGRGRVLGLSPHSDAAGLTLLLQVSAVPGLQIRRXGAWISVDPIPGALVANVGDVVEVLTNGRYKSIEHRALVSPTHHRVSVAAFHSARFGDTYAPLEETMVDGDEPARYRSIGVEDYVRLVLSSKLQGKNIMDAMKINPVTE

SEQ ID NO: 21572 - DNA, 1472 bp, Zea mays subsp. mays
  misc_feature (1)..(1472): Ceres Seq. ID no. 12405326
aatgcttcgaaaattgtgtcatcccacaccgtgttcacctcctcacacggtctagagtcaagtcaactcactctcctagtcttcgatccagatcccatcgggttggactgtgtacactcttaaaacttcatcagctcccgagcaatctcagcccgtacatcaggttcttggatctctcccgagctgggatccgtcaagttttctgctccagcggcgacaattcgtcaggaatggccaacaagccgagtcttctgagcactctgccgactaacccaccagcacagtttctgaaagatatcacggacggcttctctgaaactcaaatgcttggtgaaggtgcatttggaactgtttacaagggcattctgcaagatgggcagccaattgcggtgaagaagcttgcagagaatgcgccggtggcacctgagaagcagttcaagattggggttgggaacccttatggccatgcagcatccgaatatagtcaggatactcggctactgccgtgaaccgcaaaggaaagtgattgagcagagtggaagatacattattgtagacgtggttgagagcttactgtactatgaatacgttcctaatggaaaccttgaaaagtatatttccgatgcatcagcttctagacctgattggaagacatgcttcgagataatcaagggcatctgccagggcttacgttacctacataaggaaatggataggccaattgttcatttggatcttcatcctaccaacatattgttggatgagaacatggtgccgaaaatcacggatttcggcctgtccagactctttggtgaagaacaaaccagaataaacacaattaatgttgtgggaaagaaagggtacatggctccagaatatctatataggggtgaaatttcaacccggtcagatatatatagcttaggtctagtaatcatggagattataacaggcaagaacagttcttcaagcgacaaagatatgtctgcaagggactttgtagataaaggtgcgtgagacgtggacagatgagcacatagcatccaagcactcagcactagatgcagtcagcctccaggaagtaagaacatgcattgaaattgggctaaaatgtgtggatattgatcagaacaagagaccttctatagttgaaattgttgacaagctcaatggaaggcatgctcactgaatgatgaactcctgcatactatacatgcaagtgaaaattatgttgcggacccatggagatttgctctagatggaatcatggacaaaataattgtatgtgttaccgattatgtacttttgaataatgtgttcctcgtgttgtgtcactttttcaggagttccttgatttgtcattgtgtttttctttcttttgacacaaatctgcatgcataacctgttgaaaaattgtgtgcatactagttatttgttttttctcatgttatgtgaatactatttttttacct

SEQ ID NO: 21573 - protein, 202 aa, Zea mays subsp. mays
  misc_feature (1)..(202): Ceres Seq. ID no. 12405327
MRRWHLRSSSRLGLGTLMAMQHPNIVRILGYCREPQRKVIEQSGRYIIVDVVESLLYYEYVPNGNLEKYISDASASRPDWKTCFEIIKGICQGLRYLHKEMDRPIVHLDLHPTNILLDENMVPKITDFGLSRLFGEEQTRINTINVVGKKGYMAPEYLYRGEISTRSDIYSLGLVIMEIITGKNSSSSDKDMSARDFVDKGA

SEQ ID NO: 21574 - protein, 185 aa, Zea mays subsp. mays
  misc_feature (1)..(185): Ceres Seq. ID no. 12405328
MAMQHPNIVRILGYCREPQRKVIEQSGRYIIVDVVESLLYYEYVPNGNLEKYISDASASRPDWKTCFEIIKGICQGLRYLHKEMDRPIVHLDLHPTNILLDENMVPKITDFGLSRLFGEEQTRINTINVVGKKGYMAPEYLYRGEISTRSDIYSLGLVIMEIITGKNSSSSDKDMSARDFVDKGA

SEQ ID NO: 21575 - protein, 183 aa, Zea mays subsp. mays
  misc_feature (1)..(183): Ceres Seq. ID no. 12405329
MQHPNIVRILGYCREPQRKVIEQSGRYIIVDVVESLLYYEYVPNGNLEKYISDASASRPDWKTCFEIIKGICQGLRYLHKEMDRPIVHLDLHPTNILLDENMVPKITDFGLSRLFGEEQTRINTINVVGKKGYMAPEYLYRGEISTRSDIYSLGLVIMEIITGKNSSSSDKDMSARDFVDKGA

SEQ ID NO: 21576 - DNA, 1064 bp, Zea mays subsp. mays
  misc_feature (1)..(1064): Ceres Seq. ID no. 12405342
gaaaactacccacaccacaaagaaatcgaagaggggaacagagaggagagagaagggagatggcggaggcgacggcgtacgaggagcagcgccggaggcaggtggaggcgaacaagcgaaagctggaggagcttcagctccactacctctccgccgccgtcagagaggccgcagccgccgccaagccctcgccggtcaagaagcggaaggcgcgggtgccgcttgacgccgccgactccgtgatggagccactacggcggtccggccggctcgccaacctccccgataagtccgtgcaccgcgaggaggttccaactttttggagaaagattaggaggacgtatggatcagtgagaaaagatctggaaaaccgggtgtacgcgaccgacgaggcgaggggctacgccatctgtaaggcggaagaagtggagcaagagctggactccagcttccccgtcttcatcaaacccatgacccagtcccatgtcaccggaggcttctggctgggcctcccaaatcatttctgccggaagtacctgcccaagcgtgacgagacgatcaccctgctggatgaggatgacaacgagtcctacacgctatacctcgcattgaagcgaggcctcagcgctggatggagagggttcgctatccagcacaagctggttgatggagattgcttggtcttccagctgactgagagaacaaagttcaaggtaatcataattagagcaagttcttactatgaaagtgaggactgatgaaactaatagcttgtaatgcggtgattggagcacagtttatggaggtgggctgcattggacaagctcgcatctggaaattgctgggtgtcttgaaccttttgggtgacagaaagttatctcatgtacaaaatgtttacacagcccagttgctaccaattgctgatttgtgtacttcttgggctttaccacttgcacggttcagaaacctgcactatgtaaggggatgttgatggcaattgacctcattttgtaaatgatcctcgtttatcttggattcatttttagtgttcagtttggcagttg

SEQ ID NO: 21577 - protein, 251 aa, Zea mays subsp. mays
  misc_feature (1)..(251): Ceres Seq. ID no. 12405343
KLPTPQRNRRGEQRGERREMAEATAYEEQRRRQVEANKRKLEELQLHYLSAAVREAAAAAKPSPVKKRKARVPLDAADSVMEPLRRSGRLANLPDKSVHREEVPTFWRKIRRTYGSVRKDLENRVYATDEARGYAICKAEEVEQELDSSFPVFIKPMTQSHVTGGFWLGLPNHFCRKYLPKRDETITLLDEDDNESYTLYLALKRGLSAGWRGFAIQHKLVDGDCLVFQLTERTKFKVIIIRASSYYESED

SEQ ID NO: 21578 - protein, 232 aa, Zea mays subsp. mays
  misc_feature (1)..(232): Ceres Seq. ID no. 12405344
MAEATAYEEQRRRQVEANKRKLEELQLHYLSAAVREAAAAAKPSPVKKRKARVPLDAADSVMEPLRRSGRLANLPDKSVHREEVPTFWRKIRRTYGSVRKDLENRVYATDEARGYAICKAEEVEQELDSSFPVFIKPMTQSHVTGGFWLGLPNHFCRKYLPKRDETITLLDEDDNESYTLYLALKRGLSAGWRGFAIQHKLVDGDCLVFQLTERTKFKVIIIRASSYYESED

SEQ ID NO: 21579 - protein, 171 aa, Zea mays subsp. mays
  misc_feature (1)..(171): Ceres Seq. ID no. 12405345
MEPLRRSGRLANLPDKSVHREEVPTFWRKIRRTYGSVRKDLENRVYATDEARGYAICKAEEVEQELDSSFPVFIKPMTQSHVTGGFWLGLPNHFCRKYLPKRDETITLLDEDDNESYTLYLALKRGLSAGWRGFAIQHKLVDGDCLVFQLTERTKFKVIIIRASSYYESED

SEQ ID NO: 21580 - DNA, 1222 bp, Zea mays subsp. mays
  misc_feature (1)..(1222): Ceres Seq. ID no. 12405362
aaaagtctgtcccgttctgttcgtgaacgtgggcctcctcaaccctttcccaccaaaaaatgcggtggcacacacatactgtactgtagcatcggccatggtcgcggccgccgccaccaccacctccaactcggactgacctctccccggtcccagctcccgaacaaaaccctagctaaccctatccgccgatggcgttcgcgacgccgcgcctcctcccgctgccccctcctccggcggcggcatccacgcgggccgtctccgcgcgcaaccacggggggcgcacggcgcccgagctctcgggcccgaccccgcgcgtggtggtcgtcacctccggcaagggcggcgtcggaaagacgaccaccaccgncaacttcgccgcctctctcgcgcgcctcggcctcccagccgtcgccgtcgacgccgatgctggcctccgcaacctcgacctcctgctcggcctcgagaaccgcgtccacctcaccgccgccgacgtcctcgcgggagactgccgactcgaccaggcgctcgtccgccaccgcgcgctccacgacctccacctcctctgcctctccaagccccgctccaagctgcccctcgcgttcggatccaagaccctcacctgggtcgcggacgcgctacgacgctcgaccagcccacccgcattcatcctcatcgactgccccgcaggtgttgatgctgggtttgtcactgccattgcacccgcagaagaggcggtgctcgttaccactcccgacattacggctctccgcgatgctgaccgtgtcgcgggactgctggagtgcgatggcatcaaagacatcaagatcgttgtcaaccgagtgcggccagacctggtgaagggggaggacatgatgtcagcgctggacgtgcaggaaatgctcgggttgcctttactaggcgtggtgccagaggacacggaggtgatccggagtacgaataggggcgtgccgctggtgctgaatgacccgcccacgcctgctggccttgctctggagcaggctacttggagattggtggaaagagatgcgatgacggcggtcatggtcgaagagcaggagaggcccgagaagaaaggaggcggaggcggcttcttctcgttcttcggcggcaggtgatgagtcaagtcagtctttaggctgtagatggtgtacaggctcggagtttatgaatgctttctaggctagtgcccgattcattc

SEQ ID NO: 21581 - protein, 315 aa, Zea mays subsp. mays
  misc_feature (1)..(315): Ceres Seq. ID no. 12405363
  misc_feature (60)..(60): Xaa is any aa, unknown or other
MAFATPRLLPLPPPPAAASTRAVSARNHGGRTAPELSGPTPRVVVVTSGKGGVGKTTTTXNFAASLARLGLPAVAVDADAGLRNLDLLLGLENRVHLTAADVLAGDCRLDQALVRHRALHDLHLLCLSKPRSKLPLAFGSKTLTWVADALRRSTSPPAFILIDCPAGVDAGFVTAIAPAEEAVLVTTPDITALRDADRVAGLLECDGIKDIKIVVNRVRPDLVKGEDMMSALDVQEMLGLPLLGVVPEDTEVIRSTNRGVPLVLNDPPTPAGLALEQATWRLVERDAMTAVMVEEQERPEKKGGGGGFFSFFGGR

SEQ ID NO: 21582 - protein, 286 aa, Zea mays subsp. mays
  misc_feature (1)..(286): Ceres Seq. ID no. 12405364
  misc_feature (124)..(124): Xaa is any aa, unknown or other
KSLSRSVRERGPPQPFPTKKCGGTHILYCSIGHGRGRRHHHLQLGLTSPRSQLPNKTLANPIRRWRSRRRASSRCPLLRRRHPRGPSPRATTGGARRPSSRARPRAWWSSPPARAASERRPPPXTSPPLSRASASQPSPSTPMLASATSTSCSASRTASTSPPPTSSRETADSTRRSSATARSTTSTSSASPSPAPSCPSRSDPRPSPGSRTRYDARPAHPHSSSSTAPQVLMLGLSLPLHPQKRRCSLPLPTLRLSAMLTVSRDCWSAMASKTSRSLSTECGQTW

SEQ ID NO: 21583 - DNA, 1452 bp, Zea mays subsp. mays
  misc_feature (1)..(1452): Ceres Seq. ID no. 12405369
gttctacgcccatttggcgagcaacgacatgagccccgcgccgaggaacagggcgacgtacgccgccagctggagcttggcgttcgtctgcagcctcgggttgctgaagtccgcggcgaggagatcgaccagggacatgtacaccaggatccctgcggcggccgcgttgaagacgccctccacgaccagggcggtggcgccgtgcctgctgtagccggaagcgatggcgatgcccagcgcgatgcccgcgggagcggtgagcgagaagaaggccgccatgaccacggccgccctcgccttgaactctgcctggataggtatcgacggattgtgctcagggaaaaggacaggttgtttgtttgttttttcttcatggcatggcgtgtgttcttgtcgaggaggtgccccaagtgggcgttcggaatgctgggaaggtgctcacctgagagatcaccctgtgcctgatggacacggcgacggcggaggcatcctgaggcgaggcaccggnngtggccgtgccctccgtgggcgtgcgtgtgcgcgtgcacgtggcccgcgggctcggcggcggcgccctcntcgtccgcgggcgccgcgcggccctggcctccgtcgacggcgtcgtcgtcgacggggcgcgccttgcggatgtgcgcgcgctggtagtagcccgcggcggcggagtcgaccatcatggtggccatggcagagcacatggcgacgagtcccgcgtaggggaacccgccggccctggcgccgccgccgcaggggggcgcgagcgcgtcgaaggccgcgggcaggatgtgcaccatgccggtggcgaggatgacccccgcggcgaacgccttgacggcgaagaagacgtccccgtcggggcgcagcgccgaggcggagcggcccagcagcgggaccagcacccccgccgcgcccgacgccaggatggacgccaccgcgacgagcttcagccgcagcgccccgcgcgcgtcctcctccttgatcgccgccgcctcgccgccgccacaatcgcaccccacgcccgccgctgccgccgcgccgaccccgggcgtcacctgaacgaggagcagtagcacagcgagccacgccggcagagacgggggaagaggaacccgaactcgcgtggcgtccatggcgtgcgcgcacgtgcgcctggcgtgggagagagggccggtgcggtgagtgacggagggagggagtcggcgccgcgcgcgcgctgagctatataaagctccgcggccgcgagtgtggtgacatggtgagctcacactccggcaacgccgctttgaagcgtggtgggccctgagcagtgtgcaccgtccgatctgggtgtgtgggcacgctctccaactggcagcaagtgttggtgttgccgtggaccttttgtcgtgattgtttggaaaaaacggatcaggtttgccaaaaaaaaaaaaaaaa

SEQ ID NO: 21584 - protein, 201 aa, Zea mays subsp. mays
  misc_feature (1)..(201): Ceres Seq. ID no. 12405370
  misc_feature (95)..(95): Xaa is any aa, unknown or other
  misc_feature (96)..(96): Xaa is any aa, unknown or other
  misc_feature (119)..(119): Xaa is any aa, unknown or other
MAMPSAMPAGAVSEKKAAMTTAALALNSAWIGIDGLCSGKRTGCLFVFSSWHGVCSCRGGAPSGRSECWEGAHLRDHPVPDGHGDGGGILRRGTXXGRALRGRACARARGPRARRRRPXRPRAPRGPGLRRRRRRRRGAPCGCARAGSSPRRRSRPSWWPWQSTWRRVPRRGTRRPWRRRRRGARARRRPRAGCAPCRWRG

SEQ ID NO: 21585 - protein, 199 aa, Zea mays subsp. mays
  misc_feature (1)..(199): Ceres Seq. ID no. 12405371
  misc_feature (93)..(93): Xaa is any aa, unknown or other
  misc_feature (94)..(94): Xaa is any aa, unknown or other
  misc_feature (117)..(117): Xaa is any aa, unknown or other
MPSAMPAGAVSEKKAAMTTAALALNSAWIGIDGLCSGKRTGCLFVFSSWHGVCSCRGGAPSGRSECWEGAHLRDHPVPDGHGDGGGILRRGTXXGRALRGRACARARGPRARRRRPXRPRAPRGPGLRRRRRRRRGAPCGCARAGSSPRRRSRPSWWPWQSTWRRVPRRGTRRPWRRRRRGARARRRPRAGCAPCRWRG

SEQ ID NO: 21586 - protein, 195 aa, Zea mays subsp. mays
  misc_feature (1)..(195): Ceres Seq. ID no. 12405372
  misc_feature (89)..(89): Xaa is any aa, unknown or other
  misc_feature (90)..(90): Xaa is any aa, unknown or other
  misc_feature (113)..(113): Xaa is any aa, unknown or other
MPAGAVSEKKAAMTTAALALNSAWIGIDGLCSGKRTGCLFVFSSWHGVCSCRGGAPSGRSECWEGAHLRDHPVPDGHGDGGGILRRGTXXGRALRGRACARARGPRARRRRPXRPRAPRGPGLRRRRRRRRGAPCGCARAGSSPRRRSRPSWWPWQSTWRRVPRRGTRRPWRRRRRGARARRRPRAGCAPCRWRG

SEQ ID NO: 21587 - DNA, 1343 bp, Zea mays subsp. mays
  misc_feature (1)..(1343): Ceres Seq. ID no. 12405393
aaccaaagctagctactttgttgctgtttttattcgtttgtcacataagcagtggtggtcggtcggccggcgacaatgagcggccgtgtgttcgtcctggccgctgccttcggcgtgctgctcgccgcagccgccgtgtcctcgaggcccgtcctgactccgctgggtactagccgccctgctgccggcgacctgtccgtgtacttccacgcggactcgtgcccgcagctggagacgatcgtgcggtccagcgtggacgcgggcgctccagcagaacgtccgtctgacggcgggtctcctccgcctcttgttccacgactgcttcccgcagggctgcgacgcgtccatcctcctggacaacggcgagcgcggcctcccgcccaacgtggggctgcagcaggaggccgtgcagctggtggaggacatccgcgggaaggtgcacgcggcgtgcgggcccaccgtgtcgtgcgccgacatcacggtgctggccacccgcgacgccgtgagcctgtccggcgggccttccttcacggtgccgctggggcggctggacagcgcggcgccggcgtccagcaacgacgtgttcacgctgccgccgccgacggcgacggtggacgagctgctgacggcgttcgggagcaagaacctgtcggacccggcggacctggtggcgctgtcgggcgcgcacacggtggggaaggcgcggtgcagctcgttcggcgacgtggcgggcccggccaccgacgacgtgacgcggtgcgtgacggcgacgtgctcggcccccgggagcggcgacacgctgcgggacctggacttcctgacgcccgccgtgttcgacaacctctacttcgtggagctgacgctgaggaagaacaagggggtgatgctgccgtcggaccaagggctggtgagcgacccgcgcacgagctggctcgtccagggcttcgccgacaaccactggtggttcttcgaccagttcaggacctccatgatcaagatgagccagctcaggggaccccaggggaacgtcggcgagatccgccgtaactgcttccgccccaacaccaacggcatcgccgcctctgcttgagttgactgaccaggcaccgatccatccgccggtgaggactcatcacttcactttcactgtgtctgtgtgtaataattaataataataaaacaacaacaacaaccccagcccgtacgtgccgtgtgaggggggcacgtggttgtgccgtcaccaccatgtcggcgtcgtccatgcatgtcgcattaccgatttttgttcatgttccgatctcatctcatcatctcgctatcaataacaattatactagtgtttt

SEQ ID NO: 21588 - protein, 323 aa, Zea mays subsp. mays
  misc_feature (1)..(323): Ceres Seq. ID no. 12405394
MSGRVFVLAAAFGVLLAAAAVSSRPVLTPLGTSRPAAGDLSVYFHADSCPQLETIVRSSVDAGAPAERPSDGGSPPPLVPRLLPAGLRRVHPPGQRRARPPAQRGAAAGGRAAGGGHPREGARGVRAHRVVRRHHGAGHPRRREPVRRAFLHGAAGAAGQRGAGVQQRRVHAAAADGDGGRAADGVREQEPVGPGGPGGAVGRAHGGEGAVQLVRRRGGPGHRRRDAVRDGDVLGPRERRHAAGPGLPDARRVRQPLLRGADAEEEQGGDAAVGPRAGERPAHELARPGLRRQPLVVLRPVQDLHDQDEPAQGTPGERRRDPP

SEQ ID NO: 21589 - DNA, 1770 bp, Zea mays subsp. mays
  misc_feature (1)..(1770): Ceres Seq. ID no. 12405403
aacacctccctcttttcctcgagcggtctaaccccaaaccctaaaccatggcgccgccggccccatccgtcggtccccgcctcctactccgccgcctcctctctacggctaccgaagcggcggcggagacacctgcgcccaccgcccccagctccgccgccgccgcgaagccggcgaaacaggacccgaggctgctctaccgtcgtttgtcggcgcttggaagcgccggggaggggagcgtgtcgcgggttttgaacaagtgggtgcgggagggcggcgcgacgcgaagcgacgacctcgtcaagcatgtcaaggagctccgcaagtacaagcgtcacgcccacgccctcgagttgatggattggatggtcaatgcaaggggtatgaacatgtcacacactaaccatgcaatacgtctggaactcatctataaagtgcgtggtcttgaggcagctgagaattattttgctaaccttcctgatccagcgaaaaatcatcgaacttacggctcccttcttagttgttattgctcagcaaaaatggaagagaaagcaacaaatctctaccgccagatggatgaacttggcatctggtccagtacactacccatcaacaatcttatgtccctttacatgaagttagaccagtataggaaggttgttagtctctttgaggagatgaaactgaagaatgttaaaccgaatagcctcacatgctgcattttaatgaccagctatgcagcattgaacaagatagatgacattgaagaacttctaacaaatggtagaaaaagatgtgactcttgggtggtctgcatacagcacacttgcttctatctatgtaaatgctggacaatttggaaaagcagaatctgctctgaagaaacttgagggccttatcagtgctcatgatgacagacagccttttgatttccttctgagcctatacgcttcactaggaaatttgagcgaggtcaatagggtatggaatgtgataaagtccaaattctcgaaggtaactaacacaagctaccttggcatgcttcacgctctttacaagctcaatgatattgaccgtatgaagcagatctatatggagtgggaatctaattatgaaacctttgatgtaaagctgacgaatatgatgattcgcagccatctgaaggttggcatgaccgaggaagcagaaatgttggtggagaaggtcaaggaaaatggtgcagagtttgacaccaaaacatgtgagttgtttcttgatcactacatgggcactgaggacatgaactcagcactgaactggttagagaatatgactaaactctccaagaaagcagagaagctcgatcaggacaggatctacaagttccagaagtatttcgaagaacacaaggatgctgacggtgcagagaggttctgcaactgcctgaggacgctagggtgcattgacgggaaagcatacgagtctctcttacgcacatacttggcagccggtaagaaaagctgttcactccgccaacagataaaaaacgataaggttgagatctgctatgacattgggaagctatctcaagaggttgggcgacaaggggcgatgagatacatatttatcttcgtttttaatttgagagagattagttctgttgatcctgtacgtccatgagcatcagaaaccaaatgtcggtccaacggttgaaaatgtatcagttctttcgttgttcatgaaaaggatagctcatggctgggctggtatcgttccggcttttgcgttcct

SEQ ID NO: 21590 - protein, 292 aa, Zea mays subsp. mays
  misc_feature (1)..(292): Ceres Seq. ID no. 12405404
MVEKDVTLGWSAYSTLASIYVNAGQFGKAESALKKLEGLISAHDDRQPFDFLLSLYASLGNLSEVNRVWNVIKSKFSKVTNTSYLGMLHALYKLNDIDRMKQIYMEWESNYETFDVKLTNMMIRSHLKVGMTEEAEMLVEKVKENGAEFDTKTCELFLDHYMGTEDMNSALNWLENMTKLSKKAEKLDQDRIYKFQKYFEEHKDADGAERFCNCLRTLGCIDGKAYESLLRTYLAAGKKSCSLRQQIKNDKVEICYDIGKLSQEVGRQGAMRYIFIFVFNLREISSVDPVRP

SEQ ID NO: 21591 - protein, 280 aa, Zea mays subsp. mays
  misc_feature (1)..(280): Ceres Seq. ID no. 12405405
MAPPAPSVGPRLLLRRLLSTATEAAAETPAPTAPSSAAAAKPAKQDPRLLYRRLSALGSAGEGSVSRVLNKWVREGGATRSDDLVKHVKELRKYKRHAHALELMDWMVNARGMNMSHTNHAIRLELIYKVRGLEAAENYFANLPDPAKNHRTYGSLLSCYCSAKMEEKATNLYRQMDELGIWSSTLPINNLMSLYMKLDQYRKVVSLFEEMKLKNVKPNSLTCCILMTSYAALNKIDDIEELLTNGRKRCDSWVVCIQHTCFYLCKCWTIWKSRICSEET

SEQ ID NO: 21592 - protein, 206 aa, Zea mays subsp. mays
  misc_feature (1)..(206): Ceres Seq. ID no. 12405406
MLHALYKLNDIDRMKQIYMEWESNYETFDVKLTNMMIRSHLKVGMTEEAEMLVEKVKENGAEFDTKTCELFLDHYMGTEDMNSALNWLENMTKLSKKAEKLDQDRIYKFQKYFEEHKDADGAERFCNCLRTLGCIDGKAYESLLRTYLAAGKKSCSLRQQIKNDKVEICYDIGKLSQEVGRQGAMRYIFIFVFNLREISSVDPVRP

SEQ ID NO: 21593 - DNA, 1171 bp, Zea mays subsp. mays
  misc_feature (1)..(1171): Ceres Seq. ID no. 12405407
agtcctctcctcccatccatctcatgcttcggtccacgcacccacccagccccaccagcggcagctccgcggcgccggcgtccagctccgacgccgcggcgatggtcgggggcggcgcggcggcgggcagcggcggcgcaccgagcggcgccaagctgctgcagatcctcaacgtgcgggtcgtgggcagcggcgaccgcgtggtggtgctgtcccacgggttcggcacggaccagtcggcgtggagccgcgtgctcccctacctcacccgcgaccaccgcgtggtgctctacgacctcgtctgcgccggcagcgtcaacccggagcacttcgacttccgccgctacgacacgctagactcgtacgtcgacgacctcctcgccatcctcgacgcgctccgcatcgcgcgctgcgccttcgtcggccactccgtctccgccatgatcggcatcctcgcctccatccgccgccccgagctcttcgccaagctcgtactcatcggcgcgtcgcccaggttcctgaacgaccacgactaccacggcgggttcgagctgccggagatccagcaggtgttcgacgcgatggcggccaactactcggcgtgggcgaccgggtacgccccgctggcggtgggcgcggacgtgccggcggcggtgcaggagttcagccgcaccctgttcaacatgcggccggacatctccctccacgtgtgccgcaccgtgttcaacaccgacctccgcggcgtgctgggcatggtgcggtccccctgcgtggtggtgcagaccacccgcgacgtctccgtcccggcctccgtcgccgcctacctcaaggcccacctcggcggccgcaccgccgtcgagttcctccagaccgagggccacctcccgcacctcagcgcccccggcctcctcgcgcaggtgctccgccgcgcgctcgcccggtactagcggagcgcctgccacctacggtcctggtggtcatcggtattttttaccgcctcgatttaccccgtgccgagaccggggacggggatcagataatgtggcgacccgcgccgtttgctgtgcgcgccatgactgtagactgtagtacgagtgtacgacttgttctggacttctggtacccgatttttttactgctttttaatggagagccgagcagtagcactggt

SEQ ID NO: 21594 - protein, 390 aa, Zea mays subsp. mays
  misc_feature (1)..(390): Ceres Seq. ID no. 12405408
VLSSHPSHASVHAPTQPHQRQLRGAGVQLRRRGDGRGRRGGGQRRRTERRQAAADPQRAGRGQRRPRGGAVPRVRHGPVGVEPRAPLPHPRPPRGALRPRLRRQRQPGALRLPPLRHARLVRRRPPRHPRRAPHRALRLRRPLRLRHDRHPRLHPPPRALRQARTHRRVAQVPERPRLPRRVRAAGDPAGVRRDGGQLLGVGDRVRPAGGGRGRAGGGAGVQPHPVQHAAGHLPPRVPHRVQHRPPRRAGHGAVPLRGGADHPRRLRPGLRRRLPQGPPRRPHRRRVPPDRGPPPAPQRPRPPRAGAPPRARPVLAERLPPTVLVVIGIFYRLDLPRAETGDGDQIMWRPAPFAVRAMTVDCSTSVRLVLDFWYPIFLLLFNGEPSSSTG

SEQ ID NO: 21595 - protein, 314 aa, Zea mays subsp. mays
  misc_feature (1)..(314): Ceres Seq. ID no. 12405409
SSPPIHLMLRSTHPPSPTSGSSAAPASSSDAAAMVGGGAAAGSGGAPSGAKLLQILNVRVVGSGDRVVVLSHGFGTDQSAWSRVLPYLTRDHRVVLYDLVCAGSVNPEHFDFRRYDTLDSYVDDLLAILDALRIARCAFVGHSVSAMIGILASIRRPELFAKLVLIGASPRFLNDHDYHGGFELPEIQQVFDAMAANYSAWATGYAPLAVGADVPAAVQEFSRTLFNMRPDISLHVCRTVFNTDLRGVLGMVRSPCVVVQTTRDVSVPASVAAYLKAHLGGRTAVEFLQTEGHLPHLSAPGLLAQVLRRALARY

SEQ ID NO: 21596 - protein, 307 aa, Zea mays subsp. mays; identical to SEQ ID NO: 18585
  misc_feature (1)..(307): Ceres Seq. ID no. 12405410

SEQ ID NO: 21597 - DNA, 1628 bp, Zea mays subsp. mays
  misc_feature (1)..(1628): Ceres Seq. ID no. 12405418
ccctcctccccgcgccgccataccctccaacccgagaggaaccctaacaccaaaacgcccccggaggcagctaggagagctcgaatcaccagccatgtcggagcacgacctcacggcgctgatggcggcgcagctggaccgccacctggtgttccccctgctggagttcctccaggagcggcagctctactcggagtcggagatcctggaggccaagatccgcctcctcagcggcaccaacatggtcgactacgccatggacatccacaagtccctctacggcaccgacgacgtgcccgaggacatggtgaagcgccgcgccgaggtcgtctccaggctcaggtcgctcgaggaggccgcagccccgctcgtcgccttcctccagaacccgcagctcgtgcaggagttcaggcccgacaaacagtacaacatccacatgctccaggagcgataccagattggtcctgaccagattgaagctctgtatcagtatgccaaatttcagtttgagtgcggtaactactcaggggctgctgattacctgtaccagtatcgtgctttgtgcacaaacagtgagcgaaatgtgagtgccctctggggaaagctggcagcagaaatcctaatgcagaactgggacgtagctttggaggaactcaaccgcttgaaggaaataattgattcaaagaacttctcatcacctctgaatcagctccagaacaggatatggctgatgcattgggctctgttcatcttctttaaccatgaaaatggtagaaatgggatcattgatctgttcttccaggacaggtacttgaatgctatacagacaaatgcacaccatcttattaggtatctagctactgcagttgttgtcaacaaaaggagaaggaatatgcttaaagagttgattaaggtcattcaacaggagcaccatagctacaaggatcccgtaactgaatttctggaatgcttatatgttaactatgattttgatggtgctcaacagaaactcatagagtgtgagcaggttatactcaatgatccattcctgggaaagcgcattgaagagggaaattttgtcagtgttcctttgagagatgagttccttgagaatgctaggctgtttattttcgagacatactgccgtatccatcggtgcatcgatatcagcatgctttctcagaagttgaacatgagctacgatgaggccgagttgtggatcatgaatttggttagaagctcaaaactggatgccaggatcgattcagtatcaggaactctcatcatgacaaccaatcacgtcaatgtccatgagcagattgttgagagcttgaagggccttaatatgaggacctacatgctcgcaaagaacatcgttgagccagctcagcaggcaactcggtgaggatagcagacttcacagttttgagacgccaaggactagtttagagacaactgtaaacttttcgagctctattgtgtggcattggatttcaacacatggaaggtggcttgccgtttgatacagcttggaatattatgctgacattttcaatattttgtaatcggaatttcgtaacagtggatccttctcaatgtattgctattattttatgctgacattttct

SEQ ID NO: 21598 - protein, 467 aa, Zea mays subsp. mays
  misc_feature (1)..(467): Ceres Seq. ID no. 12405419
PPPRAAIPSNPRGTLTPKRPRRQLGELESPAMSEHDLTALMAAQLDRHLVFPLLEFLQERQLYSESEILEAKIRLLSGTNMVDYAMDIHKSLYGTDDVPEDMVKRRAEVVSRLRSLEEAAAPLVAFLQNPQLVQEFRPDKQYNIHMLQERYQIGPDQIEALYQYAKFQFECGNYSGAADYLYQYRALCTNSERNVSALWGKLAAEILMQNWDVALEELNRLKEIIDSKNFSSPLNQLQNRIWLMHWALFIFFNHENGRNGIIDLFFQDRYLNAIQTNAHHLIRYLATAVVVNKRRRNMLKELIKVIQQEHHSYKDPVTEFLECLYVNYDFDGAQQKLIECEQVILNDPFLGKRIEEGNFVSVPLRDEFLENARLFIFETYCRIHRCIDISMLSQKLNMSYDEAELWIMNLVRSSKLDARIDSVSGTLIMTTNHVNVHEQIVESLKGLNMRTYMLAKNIVEPAQQATR

SEQ ID NO: 21599 - protein, 436 aa, Zea mays subsp. mays
  misc_feature (1)..(436): Ceres Seq. ID no. 12405420
MSEHDLTALMAAQLDRHLVFPLLEFLQERQLYSESEILEAKIRLLSGTNMVDYAMDIHKSLYGTDDVPEDMVKRRAEVVSRLRSLEEAAAPLVAFLQNPQLVQEFRPDKQYNIHMLQERYQIGPDQIEALYQYAKFQFECGNYSGAADYLYQYRALCTNSERNVSALWGKLAAEILMQNWDVALEELNRLKEIIDSKNFSSPLNQLQNRIWLMHWALFIFFNHENGRNGIIDLFFQDRYLNAIQTNAHHLIRYLATAVVVNKRRRNMLKELIKVIQQEHHSYKDPVTEFLECLYVNYDFDGAQQKLIECEQVILNDPFLGKRIEEGNFVSVPLRDEFLENARLFIFETYCRIHRCIDISMLSQKLNMSYDEAELWIMNLVRSSKLDARIDSVSGTLIMTTNHVNVHEQIVESLKGLNMRTYMLAKNIVEPAQQATR

SEQ ID NO: 21600 - protein, 427 aa, Zea mays subsp. mays
  misc_feature (1)..(427): Ceres Seq. ID no. 12405421
MAAQLDRHLVFPLLEFLQERQLYSESEILEAKIRLLSGTNMVDYAMDIHKSLYGTDDVPEDMVKRRAEVVSRLRSLEEAAAPLVAFLQNPQLVQEFRPDKQYNIHMLQERYQIGPDQIEALYQYAKFQFECGNYSGAADYLYQYRALCTNSERNVSALWGKLAAEILMQNWDVALEELNRLKEIIDSKNFSSPLNQLQNRIWLMHWALFIFFNHENGRNGIIDLFFQDRYLNAIQTNAHHLIRYLATAVVVNKRRRNMLKELIKVIQQEHHSYKDPVTEFLECLYVNYDFDGAQQKLIECEQVILNDPFLGKRIEEGNFVSVPLRDEFLENARLFIFETYCRIHRCIDISMLSQKLNMSYDEAELWIMNLVRSSKLDARIDSVSGTLIMTTNHVNVHEQIVESLKGLNMRTYMLAKNIVEPAQQATR

SEQ ID NO: 21601 - DNA, 1391 bp, Zea mays subsp. mays
  misc_feature (1)..(1391): Ceres Seq. ID no. 12405442
attgctaccactgccacttctcccgatcgattcgtcgctgaggaatacctggtcaccacctgcgggctcaccccagcgcaagcgggcagggcgtccaaggggctcacccacctcaagtctccggttaagcccgacgccgtcgtcgcctttctcgtgggcgtcggtctcgccaaagacgacatcaccgccggtatcgccaggtacccgcggctcctctgctccaaggtggacaaaaccctaacccctcgcttcgctcagctcatgagccttgggctatccccttcccaaatctcccgcctcattaccatcgtccccaacatcttcgtcgctcccaaaaagatctcccacctccagttctatctctccttcatgggttgcttcgatcgggttcactccgccatcaggatcaatccaatgctcctcagtcggaaccttgaggatgtggtcaagcctaacatagcattcctactgcagtgcggtctaactgtttctaatgttctagagttcccattgctgataggcatgaggcccgagagtgtcagggaaagggtggcatgcgctgagaagcttggtgtgccgcgcaatacagggatgttcaagagtgccctgtgggccgtctattgcgttggtcccaactccattggtgcaaaattggatgtcatcaaggcgactcttggatgctctgaggcggagctgacccttgtggtgcgcaagtcacctccaattctgaggatgtcagaaggcaagctgagtcgcgcattgaagttcctgaaggtggatgttgggttgaagcttcagtacatcttgcttaggccagcaatacttgcctttagcatgcagaggcggctgatgcccagacattatttcatcaagattctgaaggcgaaggggcttgtgaaggaaaatgttgacttttataatgctctttgtttaactgaaaagagatttgcccagaagtttattgatccttacaaccagagtattgcagggcttgcagatgcttatgctgctgcttgtgctgggaaaatgcctcatgaagattaggcgcattagcagcagcatgctagggatcatggtgaagcaaaggcagagatagtcggttcaggtcttctctgcatgtacttgaacagcccctcgccaaactattgtgcagttccttgatgcataccaatgcttgcaacagatgctgcctttgtgtgttgaaatgaaattagttcttccttaagaccggtgttgtgacctatcatttcaggtaagccattggctattttcagatgggtataatgatatgttactctgttctttctgtgtttcaggtctaaatattgtctgtacttgaagtcttgaattaattatgtattgaacttgtcacacagttaattatttgattt

SEQ ID NO: 21602 - protein, 347 aa, Zea mays subsp. mays
  misc_feature (1)..(347): Ceres Seq. ID no. 12405443
IATTATSPDRFVAEEYLVTTCGLTPAQAGRASKGLTHLKSPVKPDAVVAFLVGVGLAKDDITAGIARYPRLLCSKVDKTLTPRFAQLMSLGLSPSQISRLITIVPNIFVAPKKISHLQFYLSFMGCFDRVHSAIRINPMLLSRNLEDVVKPNIAFLLQCGLTVSNVLEFPLLIGMRPESVRERVACAEKLGVPRNTGMFKSALWAVYCVGPNSIGAKLDVIKATLGCSEAELTLVVRKSPPILRMSEGKLSRALKFLKVDVGLKLQYILLRPAILAFSMQRRLMPRHYFIKILKAKGLVKENVDFYNALCLTEKRFAQKFIDPYNQSIAGLADAYAAACAGKMPHED

SEQ ID NO: 21603 - protein, 260 aa, Zea mays subsp. mays
  misc_feature (1)..(260): Ceres Seq. ID no. 12405444
MSLGLSPSQISRLITIVPNIFVAPKKISHLQFYLSFMGCFDRVHSAIRINPMLLSRNLEDVVKPNIAFLLQCGLTVSNVLEFPLLIGMRPESVRERVACAEKLGVPRNTGMFKSALWAVYCVGPNSIGAKLDVIKATLGCSEAELTLVVRKSPPILRMSEGKLSRALKFLKVDVGLKLQYILLRPAILAFSMQRRLMPRHYFIKILKAKGLVKENVDFYNALCLTEKRFAQKFIDPYNQSIAGLADAYAAACAGKMPHED

SEQ ID NO: 21604 - protein, 224 aa, Zea mays subsp. mays
  misc_feature (1)..(224): Ceres Seq. ID no. 12405445
MGCFDRVHSAIRINPMLLSRNLEDVVKPNIAFLLQCGLTVSNVLEFPLLIGMRPESVRERVACAEKLGVPRNTGMFKSALWAVYCVGPNSIGAKLDVIKATLGCSEAELTLVVRKSPPILRMSEGKLSRALKFLKVDVGLKLQYILLRPAILAFSMQRRLMPRHYFIKILKAKGLVKENVDFYNALCLTEKRFAQKFIDPYNQSIAGLADAYAAACAGKMPHED

SEQ ID NO: 21605 - DNA, 1572 bp, Zea mays subsp. mays
  misc_feature (1)..(1572): Ceres Seq. ID no. 12405446
attgggttccccgctctgctcctcagctcagccctcttgctcctgacctgccgtcctcctccttccctccccgtgagtcgccgtacggcggtacggggatcgccaccgcggcgtccagggatggcggacgggagcctctacgcctggtggtgttgtgccttgggctgggcgctggcgcttgtcgcagcggacggcttcctcgtggacatcacctatgtggaaagcgccgtggccaaaggagcagtgtgtttggatggtagtgcgccggcgtaccatctcgcccgcggctccggctccggtgagaagagctggctggtccatttcgaggggggaggctggtgcaacaatgtcaccacctgcctgcaacggaagcgcactcggttgggttcgtccaaggagatggcgacggcagattgccttctccggaatcctgagtgacacgccggatgacaacccagatttttacaattggaacaaggtcaaggttcggtactgtgatggttcatctttcactggagatgttgaagaagttgaccctgcaacaaagctacattatagaggtgcgaggatatggcaagctgtcatggacgacctgcttgccaaagggatggacaaagctgaaaatgctctaatttcaggctgttctgctggtggtttaacctccatactacactgtgacagatttcatgaccttctgccgccggctgcgagggttaagtgcctttctgatgctgggttcttcattaatgagaaagacgttgcaggagttgggtacattgctgcctttttcaacgacgtcgttacaacacatgggtcagcaaagaatttgccgccttcatgcacttcgacgttacctccaggaacgtgctttttcccccagaacgaggtgaaacagatacagacacctctgttcatcctcaacgcagcatatgattcatggcaggtaaggaacattttggtgccaggagtagctgaccctcatggaaaatggcatagctgtaagcatgatatagaccagtgctctgcatcgcagctacgggtattgcagggattcaggggtgattttctgaaggaagtggcagaactagggaactccgactcgagagggttgttcataaactcatgcttcgtgcactgccagtctgagatacaggagctatggttctcatctgactcccccgtgctcggaaacacaacagtagcaaacgctgttggcgactggttcttcgaccgcagctccttccagaagatagactgcccatacccttgtgactcgacctgtcacaatcggatctacgatgactcatcacaagcatagcaattacagtggcctcacttcgtactgccattcaccatgttattacatttgacgcttccagcattgctaacagtagggcaatgcgttgatagccattgattttttttttctttttacgaataagatcaggtgccggcggctttaactcggttgctaccggaaagtgagcgtgcatcttccgacggtacatggcatggtttatctggatggatgaatcgataatcataaattcttaaaaacacaataaatattct

SEQ ID NO: 21606 - protein, 367 aa, Zea mays subsp. mays
  misc_feature (1)..(367): Ceres Seq. ID no. 12405447
MWKAPWPKEQCVWMVVRRRTISPAAPAPVRRAGWSISRGEAGATMSPPACNGSALGWVRPRRWRRQIAFSGILSDTPDDNPDFYNWNKVKVRYCDGSSFTGDVEEVDPATKLHYRGARIWQAVMDDLLAKGMDKAENALISGCSAGGLTSILHCDRFHDLLPPAARVKCLSDAGFFINEKDVAGVGYIAAFFNDVVTTHGSAKNLPPSCTSTLPPGTCFFPQNEVKQIQTPLFILNAAYDSWQVRNILVPGVADPHGKWHSCKHDIDQCSASQLRVLQGFRGDFLKEVAELGNSDSRGLFINSCFVHCQSEIQELWFSSDSPVLGNTTVANAVGDWFFDRSSFQKIDCPYPCDSTCHNRIYDDSSQA

SEQ ID NO: 21607 - protein, 354 aa, Zea mays subsp. mays
  misc_feature (1)..(354): Ceres Seq. ID no. 12405448
MVVRRRTISPAAPAPVRRAGWSISRGEAGATMSPPACNGSALGWVRPRRWRRQIAFSGILSDTPDDNPDFYNWNKVKVRYCDGSSFTGDVEEVDPATKLHYRGARIWQAVMDDLLAKGMDKAENALISGCSAGGLTSILHCDRFHDLLPPAARVKCLSDAGFFINEKDVAGVGYIAAFFNDVVTTHGSAKNLPPSCTSTLPPGTCFFPQNEVKQIQTPLFILNAAYDSWQVRNILVPGVADPHGKWHSCKHDIDQCSASQLRVLQGFRGDFLKEVAELGNSDSRGLFINSCFVHCQSEIQELWFSSDSPVLGNTTVANAVGDWFFDRSSFQKIDCPYPCDSTCHNRIYDDSSQA

SEQ ID NO: 21608 - protein, 323 aa, Zea mays subsp. mays
  misc_feature (1)..(323): Ceres Seq. ID no. 12405449
MSPPACNGSALGWVRPRRWRRQIAFSGILSDTPDDNPDFYNWNKVKVRYCDGSSFTGDVEEVDPATKLHYRGARIWQAVMDDLLAKGMDKAENALISGCSAGGLTSILHCDRFHDLLPPAARVKCLSDAGFFINEKDVAGVGYIAAFFNDVVTTHGSAKNLPPSCTSTLPPGTCFFPQNEVKQIQTPLFILNAAYDSWQVRNILVPGVADPHGKWHSCKHDIDQCSASQLRVLQGFRGDFLKEVAELGNSDSRGLFINSCFVHCQSEIQELWFSSDSPVLGNTTVANAVGDWFFDRSSFQKIDCPYPCDSTCHNRIYDDSSQA

SEQ ID NO: 21609 - DNA, 1596 bp, Zea mays subsp. mays
  misc_feature (1)..(1596): Ceres Seq. ID no. 12405494
gaccgtgctggaaacttctaaccaaaacccctaatgtctcgaggtggcgcaccccaacaaactggctccgcctccttcctcctcccctccggcctccgccgctgccttcttttccccgtgcgcatagtcgctcgcagaggcgccgacatcacttcgtccggaccggaaacacgcacgaagtgaggaccagcaccaaacaccgcgccgcttctcctatatttgttcctctcccggagccgcatcgtgtgtaagcgtgtggcggatccatggcagcggcggcggatacctcggaggcgtccgcggcaggaatcgcgctcgcagaggccaatatcaactgggagaggttggacaagacgaggtttcatgtgattggagctatcctgttcacggcccagcaaggtgctctgcacccaacagctgttgtgaagactaggatgcaggttgctgaaggtgggcttgcacatatgtctgggtttgctgtttttaggaggatattgagaagcgatggcatccctggcattttcagaggatttggcaccgctgctgttggagctctgcctgggcgagtgctagctctaacatcactggagatctctaaagaaatgacatttaagtattgtgaacattttgatctgtcagaggcgtcacaaattgctatagcaaatggcattgcaggtctaatgtcgagtatctgttcatgctcatactttgtgcctctagatgtgatttgccaaaggctcatggttcaaggattgccagggatggcaacatacaggggcccattcgatgtgataaataaggttgtcagaacagaagggatccgggggctttatcgaggttttggtatcactatgttgactcagtcgccagcttcagccctttggtggagtgcatatggtggtgctcaacatgctatttggaggagtttgggttatggaaatgactcacaaacaaaaccatctcaatcagaacttgttgttgtccaagtaacagcaggaacaattgctggtgcttgctcgtcgattatcaccactccagtagataccatcaagactcggcttcaggttatggacaactatggtaaaggcaggccttcagtcatgaaaactaccaggctgctgcttgatgaagatggctggaggggattctatagaggttttggaccgaggtttcttaacatgtctgtctggggcacatcaatgatcgtgacatatgagctcataaaaaggctatccgtgaagtctgaatgacacattttggtggattctcaactaaggtgatttactgttcaaaatcatctatacagatataggcaatcaagtcagtttgcctcgcgaagagtataggcgagtattatgatcgggtgggatgcagaattatggtttagttgcataggataacatgcttctgtatgacacttgcgatgtatatatttttgctaaagagccctcctttcaggatgtttgtagccagcttcttttggatgtaacagatggaggccaagacgcctgttctgtctaatgaggcacattatatgtagctgtactattcgtggtccaacaaaattttggcaaagaactctgcatccttttcgtt

SEQ ID NO: 21610 - protein, 327 aa, Zea mays subsp. mays
  misc_feature (1)..(327): Ceres Seq. ID no. 12405495
MAAAADTSEASAAGIALAEANINWERLDKTRFHVIGAILFTAQQGALHPTAVVKTRMQVAEGGLAHMSGFAVFRRILRSDGIPGIFRGFGTAAVGALPGRVLALTSLEISKEMTFKYCEHFDLSEASQIAIANGIAGLMSSICSCSYFVPLDVICQRLMVQGLPGMATYRGPFDVINKVVRTEGIRGLYRGFGITMLTQSPASALWWSAYGGAQHAIWRSLGYGNDSQTKPSQSELVVVQVTAGTIAGACSSIITTPVDTIKTRLQVMDNYGKGRPSVMKTTRLLLDEDGWRGFYRGFGPRFLNMSVWGTSMIVTYELIKRLSVKSE

SEQ ID NO: 21611 - protein, 271 aa, Zea mays subsp. mays
  misc_feature (1)..(271): Ceres Seq. ID no. 12405496
MQVAEGGLAHMSGFAVFRRILRSDGIPGIFRGFGTAAVGALPGRVLALTSLEISKEMTFKYCEHFDLSEASQIAIANGIAGLMSSICSCSYFVPLDVICQRLMVQGLPGMATYRGPFDVINKVVRTEGIRGLYRGFGITMLTQSPASALWWSAYGGAQHAIWRSLGYGNDSQTKPSQSELVVVQVTAGTIAGACSSIITTPVDTIKTRLQVMDNYGKGRPSVMKTTRLLLDEDGWRGFYRGFGPRFLNMSVWGTSMIVTYELIKRLSVKSE

SEQ ID NO: 21612 - protein, 261 aa, Zea mays subsp. mays
  misc_feature (1)..(261): Ceres Seq. ID no. 12405497
MSGFAVFRRILRSDGIPGIFRGFGTAAVGALPGRVLALTSLEISKEMTFKYCEHFDLSEASQIAIANGIAGLMSSICSCSYFVPLDVICQRLMVQGLPGMATYRGPFDVINKVVRTEGIRGLYRGFGITMLTQSPASALWWSAYGGAQHAIWRSLGYGNDSQTKPSQSELVVVQVTAGTIAGACSSIITTPVDTIKTRLQVMDNYGKGRPSVMKTTRLLLDEDGWRGFYRGFGPRFLNMSVWGTSMIVTYELIKRLSVKSE

SEQ ID NO: 21613 - DNA, 1280 bp, Zea mays subsp. mays
  misc_feature (1)..(1280): Ceres Seq. ID no. 12405502
cattccatccgagattacttaacaagaacattcttgctctacccacatcacataattgacgctctgagccctgcttttgtttaacaccgatagatccatccatcagcagcatggcattcaggtcttgtctagtacggctgctgctccctatggcagcactgcttctgctcgctgcaagctcgcccgccgcggctcagctggtggccggctactacagcaagacatgcccggacgccgaggccatcgtccgcaacgagacggagaagatcatcgccgccgcgcccagcctcgccggcccacttctcaggctccatttccacgactgcttcgtcaggggttgtgatgcctcggtcctgctcgacgaccccaacgggggtaacaaggccgagaaggacgccaagccgaacaggagcctgcggggcttcggctccgtggagagagtgaaggccaagctggaagccgcatgccccagcacggtttcctgcgccgacgtcctggccctgatggcccgcgacgccgtggtgctcgccaagggcccatcctggccagtggccctggggaggcgagacggcagggtgtcgagcgccacggaagcggccgacagcctgcctcccgccttcggcgacgtcccgctgctcgccgagatcttcgccgccaacggcctcgacctcaaggacctggcccgtgctctctggcgcgcacaccctcggcacggcgcactgcccgtcgtacgccgggcggctctacaacttcagcaccgcctacggcggcgcggacccgtccctcgacagcgagtacgccgaccggctgaggacgcgctgccggagcgccgacgacacggccacgctctccgagatggaccccggcagctacaagaccttcgacacgagctactaccgccacgtcgccaagcggaggggcctcttccagtccgacgccgcgctgctcgccgacgccaccaccagggagtacgtcctgcgcatggccaccggcaggttcgacggcgtgttcttccaggacttcggcgagtccatgatcaagatgggcaacgctggcgtgctcatcggtgctgctcagggggagatcaggaagaaatgctacatcgtcaactaactagctagttattatatatacaagctagctatactacgaaagcttttaatttgtttgtttgccgcaacggaattgtagcttgctgtattaattaatcaatcagttctctacatatgttatttgcatgcttatgtatagcctattattaatggacgatagactataat

SEQ ID NO: 21614 - protein, 336 aa, Zea mays subsp. mays
  misc_feature (1)..(336): Ceres Seq. ID no. 12405503
MAFRSCLVRLLLPMAALLLLAASSPAAAQLVAGYYSKTCPDAEAIVRNETEKIIAAAPSLAGPLLRLHFHDCFVRGCDASVLLDDPNGGNKAEKDAKPNRSLRGFGSVERVKAKLEAACPSTVSCADVLALMARDAVVLAKGPSWPVALGRRDGRVSSATEAADSLPPAFGDVPLLAEIFAANGLDLKDLARALWRAHPRHGALPVVRRAALQLQHRLRRRGPVPRQRVRRPAEDALPERRRHGHALRDGPRQLQDLRHELLPPRRQAEGPLPVRRRAARRRHHQGVRPAHGHRQVRRRVLPGLRRVHDQDGQRWRAHRCCSGGDQEEMLHRQLTS

SEQ ID NO: 21615 - protein, 323 aa, Zea mays subsp. mays
  misc_feature (1)..(323): Ceres Seq. ID no. 12405504
MAALLLLAASSPAAAQLVAGYYSKTCPDAEAIVRNETEKIIAAAPSLAGPLLRLHFHDCFVRGCDASVLLDDPNGGNKAEKDAKPNRSLRGFGSVERVKAKLEAACPSTVSCADVLALMARDAVVLAKGPSWPVALGRRDGRVSSATEAADSLPPAFGDVPLLAEIFAANGLDLKDLARALWRAHPRHGALPVVRRAALQLQHRLRRRGPVPRQRVRRPAEDALPERRRHGHALRDGPRQLQDLRHELLPPRRQAEGPLPVRRRAARRRHHQGVRPAHGHRQVRRRVLPGLRRVHDQDGQRWRAHRCCSGGDQEEMLHRQLTS

SEQ ID NO: 21616 - protein, 205 aa, Zea mays subsp. mays
  misc_feature (1)..(205): Ceres Seq. ID no. 12405505
MARDAVVLAKGPSWPVALGRRDGRVSSATEAADSLPPAFGDVPLLAEIFAANGLDLKDLARALWRAHPRHGALPVVRRAALQLQHRLRRRGPVPRQRVRRPAEDALPERRRHGHALRDGPRQLQDLRHELLPPRRQAEGPLPVRRRAARRRHHQGVRPAHGHRQVRRRVLPGLRRVHDQDGQRWRAHRCCSGGDQEEMLHRQLTS

SEQ ID NO: 21617 - DNA, 1274 bp, Zea mays subsp. mays
  misc_feature (1)..(1274): Ceres Seq. ID no. 12405506
gtccgcctcgctgtgcctgtgttgtacttgtactactgctactgctaggtagccaactcatttcctcccccaacccaaatgggcgactccaccgccaccaacccctcctcggcgaccgcagccatggatcccgactccgaggtcgtcttcgacttccagccctacctctgccagtacaagagcggccgcatccaccggcccggcggcgcccccaccgtccccgccggcacggacccggccaccggcgtcgtctccaaggacatccgctccggccccgcctccgcgcgcgtctacctccctcccggcgccaccggcaagatcccggtgatcgtctacttccacggcggcggcttcgtggtcggctcgccggcgcggccgggcacgcacagctacctgaacgacctcgtcgcccggtcgggcgccatcggcgtgtccgtctactaccgcctcgcgccggagcacaagctgcccgccgcgtacgacgacgcgtgggcggcgctgcggtgggcggtgacgctcggcggcgaggacccgtggctgctggagcacgccgacctgtcccgcgtgttcctggcgggctgcagcgccggcgccaacatcgcgcacgacacggccgtgcgagcctccgcggccggcgcgctccccgacggcgtggccatccgcgggctcgccctggtgcacccgtacttcactggcagggaggccgtgggcggcgagacggcggcgttcggccccgagatccggccgtccatggaccggacttggcggttcgtggtgtcggacacggtggggctggacgacccgcgcgtgaacccgttcgtggacgacgcggcgcgcaaggcctccgccgggatcccgtgccagcgcgtgctggtgtgtgtggccgagaacgacttcctgctcaaggagcgcgcgctgtggtaccaccgggagatcaaggccagtggctacgccggcgaggtcgagctgttcgagtctaagggcgtcggccacgcgttccacttcgacatgctggactcggagcagggcgtcgcactccaggagcggatcgtggctttcataaataaatgaaaaccgagacgataaataagagttttcttttttttgtccactatcgattcacggagtaaatcgattgtttggtttggtccattttatccgctgtcggtccacggagtaattcgttgtctcgttttttgttagaacaatttgtatcgattcacagagctatcagtgcggtgattgatcaccagcggtatgtaactccattcctg

SEQ ID NO: 21618 - protein, 330 aa, Zea mays subsp. mays
  misc_feature (1)..(330): Ceres Seq. ID no. 12405507
MGDSTATNPSSATAAMDPDSEVVFDFQPYLCQYKSGRIHRPGGAPTVPAGTDPATGVVSKDIRSGPASARVYLPPGATGKIPVIVYFHGGGFVVGSPARPGTHSYLNDLVARSGAIGVSVYYRLAPEHKLPAAYDDAWAALRWAVTLGGEDPWLLEHADLSRVFLAGCSAGANIAHDTAVRASAAGALPDGVAIRGLALVHPYFTGREAVGGETAAFGPEIRPSMDRTWRFVVSDTVGLDDPRVNPFVDDAARKASAGIPCQRVLVCVAENDFLLKERALWYHREIKASGYAGEVELFESKGVGHAFHFDMLDSEQGVALQERIVAFINK

SEQ ID NO: 21619 - protein, 325 aa, Zea mays subsp. mays
  misc_feature (1)..(325): Ceres Seq. ID no. 12405508
PPRCACVVLVLLLLLGSQLISSPNPNGRLHRHQPLLGDRSHGSRLRGRLRLPALPLPVQERPHPPARRRPHRPRRHGPGHRRRLQGHPLRPRLRARLPPSRRHRQDPGDRLLPRRRLRGRLAGAAGHAQLPERPRRPVGRHRRVRLLPPRAGAQAARRVRRRVGGAAVGGDARRRGPVAAGARRPVPRVPGGLQRRRQHRARHGRASLRGRRAPRRRGHPRARPGAPVLHWQGGRGRRDGGVRPRDPAVHGPDLAVRGVGHGGAGRPAREPVRGRRGAQGLRRDPVPARAGVCGRERLPAQGARAVVPPGDQGQWLRRRGRAVRV

SEQ ID NO: 21620 - protein, 315 aa, Zea mays subsp. mays
  misc_feature (1)..(315): Ceres Seq. ID no. 12405509
MDPDSEVVFDFQPYLCQYKSGRIHRPGGAPTVPAGTDPATGVVSKDIRSGPASARVYLPPGATGKIPVIVYFHGGGFVVGSPARPGTHSYLNDLVARSGAIGVSVYYRLAPEHKLPAAYDDAWAALRWAVTLGGEDPWLLEHADLSRVFLAGCSAGANIAHDTAVRASAAGALPDGVAIRGLALVHPYFTGREAVGGETAAFGPEIRPSMDRTWRFVVSDTVGLDDPRVNPFVDDAARKASAGIPCQRVLVCVAENDFLLKERALWYHREIKASGYAGEVELFESKGVGHAFHFDMLDSEQGVALQERIVAFINK

SEQ ID NO: 21621 - DNA, 2035 bp, Zea mays subsp. mays
  misc_feature (1)..(2035): Ceres Seq. ID no. 12405514
actctctttcccaccgccttcttccactactcttcaccctcccctcctccccatcgcgaactcacaagagaaccaagtagacgagggagaaggagatggcgaagaagaaggagaaggcggtgaacgtgtcgggcaagccgcggcactcgaacgacgtcaaccgccccaatgacaagaagggcgcgggcggcggcgccggtggcgggagccggtccgcggctaccgtgcggcggctcaagatgtacaagacgcggcccaagagggaccgctcctggaaggtgctcaggaacgattttcagtctaaagagctccccaacacccgcatcgagcccgaccgccggtggttcggcaatactcgcgttgtgggccagccacagcttgaaatgttccgggaggaactccagagtcggctttccgacaacttcagtgtcatcctgaaagaacggaagctgccactatcgctcctgcaagatcatcaaaagcaagcgaaggcacatctgcttgaagttgaaccttttgagcatgcttttgggccaaagggcaagaggaaacgtccgaaactaactgctcttgactacgaatctttgctgaagagagctgatgattcccaagatgtgtttgagcaaaagtatgcttcatcaaagttgccaagggaggaagaagaagatggcttacgtgatctagtgaggcatacaatgtttgagaagggacagagcaaaagaatctggggtgaactatacaaagttattgactcttcggacgttgttgtgcaggtgttggacgccagggatccaatgggcactcgatgctaccatctagagagacatctaaaagagaactgcaagcacaaacacttggttttcttgctaaataagtgtgatctaatccctgcttgggctacaaaaggatggttaaggaccctttcgaaggactatcccaccctagcattccatgcaagcatcaacaagtcatttggcaaaggatctcttctgtcagtattgaggcaatttgctcgtttgaagaatgacaaacaagctatttctgtcgggtttgttgggtaccccaatgttgggaagtcatcaattattaacacactacggtcgaagagtgtctgcaaggttgctccaatacctggagagacaaaagtgtggcagtacatcactctcactaaaaagatatttttgattcattgtcccggtgttgtatatcaaaacaatgattcagaaactgatatagttctgaagggtgtggtccgggtgacaaatttggcggatgctgctgagcacattggtgaagttcttaggcgtgttaaaaaggagcatctccaaagagcgtacaaaattcaagattggtctgatgataacgattttcttgtccagctgtgcaggaccactggaaaacttctcaagggcggggagcctgatctgacaacagcagccaagatggtacttcatgactggcagaggggtaaaatccccttctttgtaccccctccgcagcaaagcgacggcggtgcatctgaaagtgctgaacaacctattgggattaccaaagaggacggagtaagcagcgacaggactgccgcagccatgaaagccattgcaggaataatctcgtcacagcagaacatgaatgtgccctgccataaggaaaacaatgcagacaatgaagacactgaaaatgcagataacgaagacattgagagttcagataacgaagacaatgatgacatcgagcctgcaggagcgatctgagtgatctttgggtacagatgtggattattagagttgatatgtcaaggctaatgaatttgtcagccccaggtgttgtgtagctacttgaccatatcactggcgtgccaggaaaaaaaggatcatgttgagttgcactttttgtaactatcgtacctgaatctttgtaatagggcaagaagagagttttgctaggtacctggttgtatcgggatgcttatctgtgctgtctactacagatacagttacatctattttacttaaatcaagtggaagttatctcc

SEQ ID NO: 21622 - protein, 552 aa, Zea mays subsp. mays
  misc_feature (1)..(552): Ceres Seq. ID no. 12405515
MAKKKEKAVNVSGKPRHSNDVNRPNDKKGAGGGAGGGSRSAATVRRLKMYKTRPKRDRSWKVLRNDFQSKELPNTRIEPDRRWFGNTRVVGQPQLEMFREELQSRLSDNFSVILKERKLPLSLLQDHQKQAKAHLLEVEPFEHAFGPKGKRKRPKLTALDYESLLKRADDSQDVFEQKYASSKLPREEEEDGLRDLVRHTMFEKGQSKRIWGELYKVIDSSDVVVQVLDARDPMGTRCYHLERHLKENCKHKHLVFLLNKCDLIPAWATKGWLRTLSKDYPTLAFHASINKSFGKGSLLSVLRQFARLKNDKQAISVGFVGYPNVGKSSIINTLRSKSVCKVAPIPGETKVWQYITLTKKIFLIHCPGVVYQNNDSETDIVLKGVVRVTNLADAAEHIGEVLRRVKKEHLQRAYKIQDWSDDNDFLVQLCRTTGKLLKGGEPDLTTAAKMVLHDWQRGKIPFFVPPPQQSDGGASESAEQPIGITKEDGVSSDRTAAAMKAIAGIISSQQNMNVPCHKENNADNEDTENADNEDIESSDNEDNDDIEPAGAI

SEQ ID NO: 21623 - protein, 504 aa, Zea mays subsp. mays
  misc_feature (1)..(504): Ceres Seq. ID no. 12405516
MYKTRPKRDRSWKVLRNDFQSKELPNTRIEPDRRWFGNTRVVGQPQLEMFREELQSRLSDNFSVILKERKLPLSLLQDHQKQAKAHLLEVEPFEHAFGPKGKRKRPKLTALDYESLLKRADDSQDVFEQKYASSKLPREEEEDGLRDLVRHTMFEKGQSKRIWGELYKVIDSSDVVVQVLDARDPMGTRCYHLERHLKENCKHKHLVFLLNKCDLIPAWATKGWLRTLSKDYPTLAFHASINKSFGKGSLLSVLRQFARLKNDKQAISVGFVGYPNVGKSSIINTLRSKSVCKVAPIPGETKVWQYITLTKKIFLIHCPGVVYQNNDSETDIVLKGVVRVTNLADAAEHIGEVLRRVKKEHLQRAYKIQDWSDDNDFLVQLCRTTGKLLKGGEPDLTTAAKMVLHDWQRGKIPFFVPPPQQSDGGASESAEQPIGITKEDGVSSDRTAAAMKAIAGIISSQQNMNVPCHKENNADNEDTENADNEDIESSDNEDNDDIEPAGAI

SEQ ID NO: 21624 - protein, 456 aa, Zea mays subsp. mays
  misc_feature (1)..(456): Ceres Seq. ID no. 12405517
MFREELQSRLSDNFSVILKERKLPLSLLQDHQKQAKAHLLEVEPFEHAFGPKGKRKRPKLTALDYESLLKRADDSQDVFEQKYASSKLPREEEEDGLRDLVRHTMFEKGQSKRIWGELYKVIDSSDVVVQVLDARDPMGTRCYHLERHLKENCKHKHLVFLLNKCDLIPAWATKGWLRTLSKDYPTLAFHASINKSFGKGSLLSVLRQFARLKNDKQAISVGFVGYPNVGKSSIINTLRSKSVCKVAPIPGETKVWQYITLTKKIFLIHCPGVVYQNNDSETDIVLKGVVRVTNLADAAEHIGEVLRRVKKEHLQRAYKIQDWSDDNDFLVQLCRTTGKLLKGGEPDLTTAAKMVLHDWQRGKIPFFVPPPQQSDGGASESAEQPIGITKEDGVSSDRTAAAMKAIAGIISSQQNMNVPCHKENNADNEDTENADNEDIESSDNEDNDDIEPAGAI

SEQ ID NO: 21625 - DNA, 784 bp, Zea mays subsp. mays
  misc_feature (1)..(784): Ceres Seq. ID no. 12405529
accaaccactcccaccaccctctcaccgttgtccgttacatatccagcggccacccgttcctcttcctcgtccgcctccacgaccaccatccatcgccatggctggccccaccaccacgctcctcctcctgctgctgtgctccgctgggctcgcgtccggcgccacggcggctgacgacagcgggttcactaccttcaaggtatacttccacgacatcgtggcggggacgagcccgacggccatccgcatcgcgcagggggcggcgtccaacacctcgtccaccagcttcggcgcgatggtggccatcgacgacccgctgacgacgggccccacgcgcgccgcgggcaccgaggtgggccgcgcccagggcacctacacgttcgcggaccagcagacgttcggcctcctcatggtgatggacttcgtgttcacggccggggagcacaagggcagcacgctctccatcctcggccgcaacgaggtgctcagcgacgtccgcgagatgagcatcgtcggcggcagcggaaagttccgcatggcgcgtgggtacgtccaggcgcacaccatcgactccggcttcaaatccggcgagaccgtcgtccagtacaccgtcaacgtcagggcctagctacccgctcgatctaccttgcttgctcctccggcccatggccgactgcccgcccggcttcttgtgcgtcgatccatctccggatgctttgtacacaccttgtcgttcttcgatgttactacatgacatgtatttagtagactgcgatttcagac

SEQ ID NO: 21626 - protein, 208 aa, Zea mays subsp. mays
  misc_feature (1)..(208): Ceres Seq. ID no. 12405530
QPLPPPSHRCPLHIQRPPVPLPRPPPRPPSIAMAGPTTTLLLLLLCSAGLASGATAADDSGFTTFKVYFHDIVAGTSPTAIRIAQGAASNTSSTSFGAMVAIDDPLTTGPTRAAGTEVGRAQGTYTFADQQTFGLLMVMDFVFTAGEHKGSTLSILGRNEVLSDVREMSIVGGSGKFRMARGYVQAHTIDSGFKSGETVVQYTVNVRA

SEQ ID NO: 21627 - protein, 176 aa, Zea mays subsp. mays
  misc_feature (1)..(176): Ceres Seq. ID no. 12405531
MAGPTTTLLLLLLCSAGLASGATAADDSGFTTFKVYFHDIVAGTSPTAIRIAQGAASNTSSTSFGAMVAIDDPLTTGPTRAAGTEVGRAQGTYTFADQQTFGLLMVMDFVFTAGEHKGSTLSILGRNEVLSDVREMSIVGGSGKFRMARGYVQAHTIDSGFKSGETVVQYTVNVRA

SEQ ID NO: 21628 - protein, 110 aa, Zea mays subsp. mays
  misc_feature (1)..(110): Ceres Seq. ID no. 12405532
MVAIDDPLTTGPTRAAGTEVGRAQGTYTFADQQTFGLLMVMDFVFTAGEHKGSTLSILGRNEVLSDVREMSIVGGSGKFRMARGYVQAHTIDSGFKSGETVVQYTVNVRA

SEQ ID NO: 21629 - DNA, 1256 bp, Zea mays subsp. mays
  misc_feature (1)..(1256): Ceres Seq. ID no. 12405546
aatcttcttcttcctccttcagtcacccggcctgtcgtgtcgatctcactctcagggtccggtccggtccggtgcatcatatatacccttggtcgatcgatcgaccagatagatacactagatagctaggattgcattgtgttccaccaaaagccagccacaacacatcgacatgatgcaggacttgttctcggtcccttcgtgtttctcggcgggcgagaagcttccggacgtcccggcgtccgctgcggccaccaccaggtccgggcagagcgcggcgacgctggtctaccgcgcgggaatcgccggccacgaccgcctggtgacggtgacgtggtgcaggaacctgctcacccacgggctgaccgtgtcgatcgaagggtcggcgggcggcggcaaggacaagagcggcggcggcagggagtggggcgacgccgacggtggcgcggcctcgtcctccaacaagggctgcagcaccgcctgcaaggtggagatgcagccgtggcacttttggcgcaagtacggcgccaagcagttccacgtcgacggcagggccgtggacgtggtctgggacctcaggagcgcgaggtactccgacgagcccgagccgctgtccgactactacgtcgccgtggtgtcggacgaggaggtggtcctcctcctcggcaacctcaagaaggaggcgttccggcgcaccgggtcccggccgtcgctgcgggacgccgcactggtgtgcaagaaggagcacgtctttagcaagaagcggttcctcaccaaggccaggttccacgacaggggcaagctgcacgacatcagcatcgagtgcagcagcagcaacctcggcggcggcggcgtcgacgtcgacatggtcatcaagatcgacggctacgtcaacgtcctcgtcaggcacctgcagtggaagttcaggggcaacgagtgcatctccatcaaccagctcaaggtgcaggtgtactgggacgcgcacgactggatctttggcacgggggtgaggaacgcgctgttcatcttcaagcccgagccgctgccgtccgccaccaatgagtactctgatttctgcctgtttctgtacgcatggaagcttgagtgagctaggattcctgttcctgcattatactggacacctcaccatatatgttatgaaccaataattcatacgtatcatgtaactgatggattattgggcgatggaagtgtatgcgaaatgaatgattggggccgttttccctttcccttcc

SEQ ID NO: 21630 - protein, 311 aa, Zea mays subsp. mays
  misc_feature (1)..(311): Ceres Seq. ID no. 12405547
MMQDLFSVPSCFSAGEKLPDVPASAAATTRSGQSAATLVYRAGIAGHDRLVTVTWCRNLLTHGLTVSIEGSAGGGKDKSGGGREWGDADGGAASSSNKGCSTACKVEMQPWHFWRKYGAKQFHVDGRAVDVVWDLRSARYSDEPEPLSDYYVAVVSDEEVVLLLGNLKKEAFRRTGSRPSLRDAALVCKKEHVFSKKRFLTKARFHDRGKLHDISIECSSSNLGGGGVDVDMVIKIDGYVNVLVRHLQWKFRGNECISINQLKVQVYWDAHDWIFGTGVRNALFIFKPEPLPSATNEYSDFCLFLYAWKLE

SEQ ID NO: 21631 - protein, 310 aa, Zea mays subsp. mays
  misc_feature (1)..(310): Ceres Seq. ID no. 12405548
MQDLFSVPSCFSAGEKLPDVPASAAATTRSGQSAATLVYRAGIAGHDRLVTVTWCRNLLTHGLTVSIEGSAGGGKDKSGGGREWGDADGGAASSSNKGCSTACKVEMQPWHFWRKYGAKQFHVDGRAVDVVWDLRSARYSDEPEPLSDYYVAVVSDEEVVLLLGNLKKEAFRRTGSRPSLRDAALVCKKEHVFSKKRFLTKARFHDRGKLHDISIECSSSNLGGGGVDVDMVIKIDGYVNVLVRHLQWKFRGNECISINQLKVQVYWDAHDWIFGTGVRNALFIFKPEPLPSATNEYSDFCLFLYAWKLE

SEQ ID NO: 21632 - protein, 204 aa, Zea mays subsp. mays
  misc_feature (1)..(204): Ceres Seq. ID no. 12405549
MQPWHFWRKYGAKQFHVDGRAVDVVWDLRSARYSDEPEPLSDYYVAVVSDEEVVLLLGNLKKEAFRRTGSRPSLRDAALVCKKEHVFSKKRFLTKARFHDRGKLHDISIECSSSNLGGGGVDVDMVIKIDGYVNVLVRHLQWKFRGNECISINQLKVQVYWDAHDWIFGTGVRNALFIFKPEPLPSATNEYSDFCLFLYAWKLE

SEQ ID NO: 21633 - DNA, 2017 bp, Zea mays subsp. mays
  misc_feature (1)..(2017): Ceres Seq. ID no. 12405563
aatcaggctcgcggccgagccaccgaggagcaaagcaaagctctcgttggtcgtggcggcagcggcggcgcgcggtgtcgagctgcggcgctgaaggcaagagagccgcgcgccgtgaagagtcgtcgtcgatccccgtccgagctccgtcgcttcattgatgaatgccgaagctatagcggtccttgctcgttccaaggttcgatgccccggtcgccgcccggatgacactgccaaccccggtggtagccggcgttgcggctggcgccgccgcgctgctactggccgccgccctcgccgtggcgtggtggtggctcgtgatcgtgaggcggcgccggcgccgtgaccggagctccgacaccggatcctcgtcggaggctcctcctcccacgctggcggagtggggccggtgcggccgcacctcgtcggcgcccgagttccacggcgccaggcagttctcgctggaggagctggcgcacgccaccaacggcttcgccgaggccaacctggtcggcgcgggggcctttggcctggtgtacaagggcctgctgctagacggcaccgtcgtcgccatcaagcgccgcgcgggcgcgccgcgccaggacttcgcaaacgagatcaggaggctgtcagagatctggcaccgcaacgtcgtgacgttgatcggcttctgccaagaaggcggtctacagatgctggtgttcgaatacctgcccaacgccagtgtcagcggccacttgtacgacaccggcaaggagaggatgaccaggctggagttcaagcagaggctgtcaatagccattggagcagctaaaggtctgagtcacctccacagcctggcgccgccgctgatccacagggacttcaagacgagcaacgtgctggtcgacgagaacttcatcgccaaggtgtccgacgccgggatccacaggctgctgcgagggactgatggtggcgccgtcgccgctccggcgagtcgcggtgtcttccaagacccggagtgagtagtagcaaaccagcccggcctggatgaaatgtacgttctgctgccatctggattcttaccatgcatgcatgcactgcgttcctggcgtgctcgcttgcactgcagggtacattcatcggcgcaggcgcagctctctgagagcagcgacgtgtacagcttcggggtgttccttgtggagctggtcacaggcagggaggctgcggggctgatgccgccggggtccagcaaggactctctcgctcaatggatggaggcgcgtttcggctcgaacgagctggtcgacccgaggctgggagggagcttcacctcggagggtatggcggaggtggtgggcctggcgtccagctgcctgagcccgtcggcgaggcggcggcccaggatgcggctggtggcggcggagctggaccggatcctggagaaggagatggccctgaccaccgtcatgggcgatggcggcaccgccatcgtcacgctcggcagccagctcttcacgtcctgactgaccgggatccgatggctggcatggcatcatcgacccaaggaggaagcatggtcgccgacgacgagacccccgcgttgcttccttcgtgtcctgggccgggagctgaacgacgcaacgcaacgcgatgcaagcagttcgtggccggtgattctccagctcactgctccacctcaggaaatttcaagagaccgcgacaggcgcgcgaacctgtgtcctgcattttcttcagtcttccatgttcagagttccgttggatttcatccagcagctcagccaaaatatgtgcatatgtaaaaattcacatctggaattggaagatggaatttatactagtactagattagacgcagaggctgagaggcatattttggggtgtggaacctcatcagccagggtcacttatttccatttgtttattctttctctgaaacaacaacatgcgatgcgacactgcagctctcccaaaccgaactgtacccaaccgaagcgtgtcagtccagttcaatttt

SEQ ID NO: 21634 - protein, 259 aa, Zea mays subsp. mays
  misc_feature (1)..(259): Ceres Seq. ID no. 12405564
MTLPTPVVAGVAAGAAALLLAAALAVAWWWLVIVRRRRRRDRSSDTGSSSEAPPPTLAEWGRCGRTSSAPEFHGARQFSLEELAHATNGFAEANLVGAGAFGLVYKGLLLDGTVVAIKRRAGAPRQDFANEIRRLSEIWHRNVVTLIGFCQEGGLQMLVFEYLPNASVSGHLYDTGKERMTRLEFKQRLSIAIGAAKGLSHLHSLAPPLIHRDFKTSNVLVDENFIAKVSDAGIHRLLRGTDGGAVAAPASRGVFQDPE

SEQ ID NO: 21635 - protein, 200 aa, Zea mays subsp. mays
  misc_feature (1)..(200): Ceres Seq. ID no. 12405565
MDGGAFRLERAGRPEAGRELHLGGYGGGGGPGVQLPEPVGEAAAQDAAGGGGAGPDPGEGDGPDHRHGRWRHRHRHARQPALHVLTDRDPMAGMASSTQGGSMVADDETPALLPSCPGPGAERRNATRCKQFVAGDSPAHCSTSGNFKRPRQAREPVSCIFFSLPCSEFRWISSSSSAKICAYVKIHIWNWKMEFILVLD

SEQ ID NO: 21636 - protein, 156 aa, Zea mays subsp. mays
  misc_feature (1)..(156): Ceres Seq. ID no. 12405566
MYVLLPSGFLPCMHALRSWRARLHCRVHSSAQAQLSESSDVYSFGVFLVELVTGREAAGLMPPGSSKDSLAQWMEARFGSNELVDPRLGGSFTSEGMAEVVGLASSCLSPSARRRPRMRLVAAELDRILEKEMALTTVMGDGGTAIVTLGSQLFTS

SEQ ID NO: 21637 - DNA, 1164 bp, Zea mays subsp. mays
  misc_feature (1)..(1164): Ceres Seq. ID no. 12405567
aaaaaagtaccactacgactccgcctccggctccgagagcagcagcctcagtaccaccagtccagtccagcctccagctaggggaagaagaagaagagcgaaggaaggggacgggggcgaggaaggagccagagcagacccaatccctcaatggcttcctctcgcgctctcgctctcgctctcttcctcctctgcgccctgctgcccgcgccccctgtctcggccacattgctgttcggcggcggcgagtcggccaagaaggcgggcgtcgacgcggagtggcggccggccactgcgacgtggtacggcgaggcagagggcgacggcagcgacggcggcgcgtgcgggtacgggacgctggtggacgtggtgccgatgaaggcgcgggtggggtcggtgagccccgtgctgttcaaggacggcgagggctgcggcgcctgctacaaggtcaggtgcctggaccgcggcgtgtgctcgcgccgtgccgtcacggtggtcgtcacggactagtgccccggcgggctgtgcgcgttcggccgcacccacttcgacctcagcggcgccgcgttcagcaggatggccgtcgccggggccggcggccggctgcgcgaccggggccagctgtccgtcgtgtacaggaggacggcctgcaagtacggcgggaagaacatcgcgttccgtgtgaacgagggctcgactaacttctggctctcgctgctcgtcgagttcgaggacggcgagggcgacataggatccatgcagataaagcaggccaactcggtggagtggctggacatgcggcacgtgtggggggcaacctggtgcctggtgcggggcccgctcgtgggccccttctccgtgaggctcaccacgctgtccgcgcggaagacgctcacgggcccgcgacgtgatccccaggaactggacgcccaaggccacctacacctcgcgcctcaacttccagccgtctctctaggtctaggacgagggagggacccaccgcggcgactggggcccacgttttatcggccccggacactgccctgtgggcccgttgcaaaacgaggaatcagtcagtccagagtgtttttttttttttttccctgtatgcagatgcaggcaaccttcgtatggtttggtttttatcttatcgtagtcgtagct

SEQ ID NO: 21638 - protein, 232 aa, Zea mays subsp. mays
  misc_feature (1)..(232): Ceres Seq. ID no. 12405568
KSTTTTPPPAPRAAASVPPVQSSLQLGEEEEERRKGTGARKEPEQTQSLNGFLSRSRSRSLPPLRPAARAPCLGHIAVRRRRVGQEGGRRRGVAAGHCDVVRRGRGRRQRRRRVRVRDAGGRGADEGAGGVGEPRAVQGRRGLRRLLQGQVPGPRRVLAPCRHGGRHGLVPRRAVRVRPHPLRPQRRRVQQDGRRRGRRPAARPGPAVRRVQEDGLQVRREEHRVPCERGLD

SEQ ID NO: 21639 - protein, 196 aa, Zea mays subsp. mays
  misc_feature (1)..(196): Ceres Seq. ID no. 12405569
MAVAGAGGRLRDRGQLSVVYRRTACKYGGKNIAFRVNEGSTNFWLSLLVEFEDGEGDIGSMQIKQANSVEWLDMRHVWGATWCLVRGPLVGPFSVRLTTLSARKTLTGPRRDPQELDAQGHLHLAPQLPAVSLGLGRGRDPPRRLGPTFYRPRTLPCGPVAKRGISQSRVFFFFFPCMQMQATFVWFGFYLIVVVA

SEQ ID NO: 21640 - protein, 136 aa, Zea mays subsp. mays
  misc_feature (1)..(136): Ceres Seq. ID no. 12405570
MQIKQANSVEWLDMRHVWGATWCLVRGPLVGPFSVRLTTLSARKTLTGPRRDPQELDAQGHLHLAPQLPAVSLGLGRGRDPPRRLGPTFYRPRTLPCGPVAKRGISQSRVFFFFFPCMQMQATFVWFGFYLIVVVA

SEQ ID NO: 21641 - DNA, 1703 bp, Zea mays subsp. mays
  misc_feature (1)..(1703): Ceres Seq. ID no. 12405583
atcacaagcaatcgatcaagctagcatggcggtgaaggtgtgggtgttcgccgtggcactgatgatgtgcgctggtgtagggcttggagctgacgacgacggcggcagccgccttattagccgctgtcgtctgagctcgcccaactaccgcggcgccctggcaaaggccatcctcttcttcgaggggcagcggtcggggcggctgccggcaaaccagagagtcaggtggcgcggggactcggcgctcaccgagcggccaacccgaaaacgtgaacttgacgggtggctactacgacgccggagacaacgtcaagttcgggtttccccgatggcgttcagcgtcaccctcctgagctggagcgccgtcgagtaccgcgacgaggtggcggcggcgggtcagctccgccacctccggtccgccatccagtggggcgccgacttccttctccgtgcccacaccacgccgaccaccctctacactcaggttggcgacggcaacgccgaccaccaatgctgggagcggccagaggacatggacacgccgcggacgctgtacaagatcacccggagctcgcccgggtccgaggccgccggcgaggcggcggcagcgctcgccgccgcgtacctggtgttcagggacgaccgggacaagaccttagccacgcagctcctggccgcgtccagatccctcttcgacttcgcaaacgactacaggggatcctaccagttgtcctgcccattctactgctcctactcaggctaccaggacgagctccagtgggcgtcggcatggctctaccgggcaaccaaggacagcaagtacctcgacttcctgcagaacaaccagggcggcagcgccaccgagttcagctgggacaacaagtatcccggagctcagctgcttgcaacacaggagtacttggctggaaggacagcagctggaaggctacaagaggggcctggactcgttcgtctgcgccgtgatgcccaacagcggcaacacgcagatccgcaccacccctggagggcttctcttcacccgcgactccgttaacctgcagtacacaaccaccgccaccctgctgctgtcgatctacgcgaaggccctcctcgcttctgcagcaggagcagtccagtgcagcgccgcgaccttctctccggaccagatcagttcatttcgacgtcacaggtggactacatcctgggagacaaccccaggagcgcgtcctacatggtcggcttcagctccaagttcccgaggcgcatccaccaccgcggctcctccattccgtccatcaaggtcctcccccggaaggtcacctgcagcgagggcttctcgtcgtggttcccgacggccaaccccaaccccaacgtccacgtcggcgccatcgtcggcgggcccgacgggaacgaccagttcggcgacaacagggaggactccacgcactccgagccggcaacgtacatcaacgcggcatttgtgggcgcctgcgctgctgcactggggcgcagccagcaggtgcctgtggacgaaacagcctcagccccacagtgatgttatgtaactagctacaacggaggagtatgcaagggcgggcaaccaaaccatgatatcgctttgtgtaacatcccaaggcccctacccccactaccactcttgatcatcctgataagaagagataaataaataattaaatacaatg

SEQ ID NO: 21642 - protein, 350 aa, Zea mays subsp. mays
  misc_feature (1)..(350): Ceres Seq. ID no. 12405584
SQAIDQASMAVKVWVFAVALMMCAGVGLGADDDGGSRLISRCRLSSPNYRGALAKAILFFEGQRSGRLPANQRVRWRGDSALTERPTRKRELDGWLLRRRRQRQVRVSPMAFSVTLLSWSAVEYRDEVAAAGQLRHLRSAIQWGADFLLRAHTTPTTLYTQVGDGNADHQCWERPEDMDTPRTLYKITRSSPGSEAAGEAAAALAAAYLVFRDDRDKTLATQLLAASRSLFDFANDYRGSYQLSCPFYCSYSGYQDELQWASAWLYRATKDSKYLDFLQNNQGGSATEFSWDNKYPGAQLLATQEYLAGRTAAGRLQEGPGLVRLRRDAQQRQHADPHHPWRASLHPRLR

SEQ ID NO: 21643 - protein, 342 aa, Zea mays subsp. mays
  misc_feature (1)..(342): Ceres Seq. ID no. 12405585
MAVKVWVFAVALMMCAGVGLGADDDGGSRLISRCRLSSPNYRGALAKAILFFEGQRSGRLPANQRVRWRGDSALTERPTRKRELDGWLLRRRRQRQVRVSPMAFSVTLLSWSAVEYRDEVAAAGQLRHLRSAIQWGADFLLRAHTTPTTLYTQVGDGNADHQCWERPEDMDTPRTLYKITRSSPGSEAAGEAAAALAAAYLVFRDDRDKTLATQLLAASRSLFDFANDYRGSYQLSCPFYCSYSGYQDELQWASAWLYRATKDSKYLDFLQNNQGGSATEFSWDNKYPGAQLLATQEYLAGRTAAGRLQEGPGLVRLRRDAQQRQHADPHHPWRASLHPRLR

SEQ ID NO: 21644 - protein, 330 aa, Zea mays subsp. mays
  misc_feature (1)..(330): Ceres Seq. ID no. 12405586
MMCAGVGLGADDDGGSRLISRCRLSSPNYRGALAKAILFFEGQRSGRLPANQRVRWRGDSALTERPTRKRELDGWLLRRRRQRQVRVSPMAFSVTLLSWSAVEYRDEVAAAGQLRHLRSAIQWGADFLLRAHTTPTTLYTQVGDGNADHQCWERPEDMDTPRTLYKITRSSPGSEAAGEAAAALAAAYLVFRDDRDKTLATQLLAASRSLFDFANDYRGSYQLSCPFYCSYSGYQDELQWASAWLYRATKDSKYLDFLQNNQGGSATEFSWDNKYPGAQLLATQEYLAGRTAAGRLQEGPGLVRLRRDAQQRQHADPHHPWRASLHPRLR

SEQ ID NO: 21645 - DNA, 1898 bp, Zea mays subsp. mays
  misc_feature (1)..(1898): Ceres Seq. ID no. 12405599
gaggcgatcgcatcggagactcggagccggcaaaaccctaaggggaaggtttctgcaaggaggagggagatgcagggcgccagccacatgctcctggaggagcccttccgcctcgcctccgtcctctcccccgccaagcctaaagtattcccatcactcaccaagatagttgggacgctcgggcccaattcacactcggttgagattattcaggaatgcctcactgctggaatgtcagttgcacgatttgatttctcatggatggatgctgcgtatcaccaggagacccttgataatttgaggaaagcggcacagaatgtgaagaagttgtgccctgtaatgttggatactcttggtccagaaattcaggttcacaattccactggtgagccaattgagttgaaagctgggaatcatgttatcataactccagatatttctaaagctctctctgctgagatcctaccaattaagtttggtgatctggcaaaagctgtgaagaagggtgatactctttttatgggccaatatctcttcacaggaagtgaaacaacatctgtctggctagaagttgtggaaacttctggggaaaatgtaaattgtctagtgaagaatgcagctacacttgccggccccatattcactctgcatgcttcacaagttcacatcaatttgcccactttgagtgaatatgataaacatgtcatttcaacttggggttcatgtaacagtgttgacattatatcactttcccatacccgctctgctgaagatgtcagggagctcagggcctttttacaagcacacgcccttcctgacacacaaatatacgcgaagattgaaaattctgagggtttggataattttgatgacattctcaacgcggcagatggtatcattatttctcgaggagacctgggtattgaccttcctccagaaaacgttttcatgttccaaaagacagctattcataaatgcaatctggagggtaaacctgtgatcatcactagagttgtggacagcatgattgacaatctacgccctacccgtgcagaggcaactgatgttgcaaatgctgtcctagatggcactgatggcattttgcttggtgcggagacacttcgagggctttatcctgttgatgcagtgagtactgtggggagaatatgtgcagaagctgagactgtgtataatcagccgcttcaattcaagaaagtaatgtggcatgtaggtgacccaatgccccacgaggaatctgtggcatcagcagcggttggttctgcaatcaaagtaaaagctgctgccattgttgtgttcacattctcagggagagctgcgaggttagttgccaagtataggccaacaatgccaattttagcagttatcttcccacgtcaaggatccgatccatcaaagtggcgttcttatggcacaacacaggcaagacaatgtttcgcagtgagaggcgtgtaccctttgatggggagtactgatgaggccgaaactggtgggctaacaaaggaagagtatgggataaaacttgcgatgagctatggtcggtcggtcggcatagtgaagcctttcgacagggtgataatctttgaaaagattggtgattcttctgttgtcaagatcattgagtgtgaaggttaggcattagatgattgatacctacaaggctacaacccatgctgtagtttcatgtatcgcatgggagattacctccagttccatctcacttatttaaccaacaagtagagtacagcaagagcacaagatatcttgttagggaattttgccctcttttcagattgtcttttgatttgacgcaataaattatgatgtcacagatttatactggaattatgatttgattatgcaaatataggattgttggc

SEQ ID NO: 21646 - protein, 550 aa, Zea mays subsp. mays
  misc_feature (1)..(550): Ceres Seq. ID no. 12405600
EAIASETRSRQNPKGKVSARRREMQGASHMLLEEPFRLASVLSPAKPKVFPSLTKIVGTLGPNSHSVEIIQECLTAGMSVARFDFSWMDAAYHQETLDNLRKAAQNVKKLCPVMLDTLGPEIQVHNSTGEPIELKAGNHVIITPDISKALSAEILPIKFGDLAKAVKKGDTLFMGQYLFTGSETTSVWLEVVETSGENVNCLVKNAATLAGPIFTLHASQVHINLPTLSEYDKHVISTWGSCNSVDIISLSHTRSAEDVRELRAFLQAHALPDTQIYAKIENSEGLDNFDDILNAADGIIISRGDLGIDLPPENVFMFQKTAIHKCNLEGKPVIITRVVDSMIDNLRPTRAEATDVANAVLDGTDGILLGAETLRGLYPVDAVSTVGRICAEAETVYNQPLQFKKVMWHVGDPMPHEESVASAAVGSAIKVKAAAIVVFTFSGRAARLVAKYRPTMPILAVIFPRQGSDPSKWRSYGTTQARQCFAVRGVYPLMGSTDEAETGGLTKEEYGIKLAMSYGRSVGIVKPFDRVIIFEKIGDSSVVKIIECEG

SEQ ID NO: 21647 - protein, 527 aa, Zea mays subsp. mays
  misc_feature (1)..(527): Ceres Seq. ID no. 12405601
MQGASHMLLEEPFRLASVLSPAKPKVFPSLTKIVGTLGPNSHSVEIIQECLTAGMSVARFDFSWMDAAYHQETLDNLRKAAQNVKKLCPVMLDTLGPEIQVHNSTGEPIELKAGNHVIITPDISKALSAEILPIKFGDLAKAVKKGDTLFMGQYLFTGSETTSVWLEVVETSGENVNCLVKNAATLAGPIFTLHASQVHINLPTLSEYDKHVISTWGSCNSVDIISLSHTRSAEDVRELRAFLQAHALPDTQIYAKIENSEGLDNFDDILNAADGIIISRGDLGIDLPPENVFMFQKTAIHKCNLEGKPVIITRVVDSMIDNLRPTRAEATDVANAVLDGTDGILLGAETLRGLYPVDAVSTVGRICAEAETVYNQPLQFKKVMWHVGDPMPHEESVASAAVGSAIKVKAAAIVVFTFSGRAARLVAKYRPTMPILAVIFPRQGSDPSKWRSYGTTQARQCFAVRGVYPLMGSTDEAETGGLTKEEYGIKLAMSYGRSVGIVKPFDRVIIFEKIGDSSVVKIIECEG

SEQ ID NO: 21648 - protein, 521 aa, Zea mays subsp. mays
  misc_feature (1)..(521): Ceres Seq. ID no. 12405602
MLLEEPFRLASVLSPAKPKVFPSLTKIVGTLGPNSHSVEIIQECLTAGMSVARFDFSWMDAAYHQETLDNLRKAAQNVKKLCPVMLDTLGPEIQVHNSTGEPIELKAGNHVIITPDISKALSAEILPIKFGDLAKAVKKGDTLFMGQYLFTGSETTSVWLEVVETSGENVNCLVKNAATLAGPIFTLHASQVHINLPTLSEYDKHVISTWGSCNSVDIISLSHTRSAEDVRELRAFLQAHALPDTQIYAKIENSEGLDNFDDILNAADGIIISRGDLGIDLPPENVFMFQKTAIHKCNLEGKPVIITRVVDSMIDNLRPTRAEATDVANAVLDGTDGILLGAETLRGLYPVDAVSTVGRICAEAETVYNQPLQFKKVMWHVGDPMPHEESVASAAVGSAIKVKAAAIVVFTFSGRAARLVAKYRPTMPILAVIFPRQGSDPSKWRSYGTTQARQCFAVRGVYPLMGSTDEAETGGLTKEEYGIKLAMSYGRSVGIVKPFDRVIIFEKIGDSSVVKIIECEG

SEQ ID NO: 21649 - DNA, 1366 bp, Zea mays subsp. mays
  misc_feature (1)..(1366): Ceres Seq. ID no. 12405611
gtgtaggcatggcactaggttcgatttgggcctaaacaggctttggtgggacatccacatccttgtccgcggcgaaacaaaatttcccacagtgagcgaggttcccctcccgactcggtgatggcggcgccggcggcggacgaggcatggtgccggaagacggtgccacgggtgatggaactggtgtgtccgcgccttccgcagcgggacgcatgcgcgctgctcgctgtcagtccctggtgctaccgtgccctcgttgctaactccaggctctgggaggtacttgatctacgtgagatgaagaatgctggaaaccgacttatttcagcactttcactggcaaggtatcgtcacctcaaagtattaaaccttgaatttgctcaagatattgaggatcgatattttgttcatctaaaagaaacgagtggcatctcactggaaaatttggaattcctgaacctaaatgcatgtcagaagatctctgataaaggaattgaagctgttaccagtctttgtcctaatcttcagcgccttgctatctattggattgtaggactgacagactcaagtattgggcacattacaaagaactgcaagcatctagtgcaccttaacttgagcggttgtaagaatatcacggataaaggaatgcagttgattgctaataattaccaaggactaaagacattgaacataaccaggtgtgttaagttgacagatgatgggcttaaccaagttcttctgaagtgttcttcacttgaaagcctaaacctttttgccctttcaagttttactgacagtgtttatagggagataggatcattaagtaatcttacatttctagacctatgtggtgctcagaatctaacggacgatggccttgcatgcatatcaagatgtggacgtctaacatacctcaatttgacttggtgtgtacgtgttactgacgctggcattttagctattgcgcaaggttgtcgagccctcgaactgttaagtttgtttggaatagttggggtgaccgatgcatgccttgaggctttatcaaaatcttgctcgtccagcctcacaacactcgacgtaaatggctgcataggtattaagaggaggagccgggatgacctgctgaagctcttcccatcactgagttgcttcaaagtgcacagctagcaggcacggtggttctcgatggctttgtattctacatctaggaaggggaagggagatgttgaggtgtgtcttgacttcatgttcttgtgttagtatatactttctttgtttcggattttctatgttcgttgattttgctatgtatggagacattgtgtatatctaagttcgtatcaagagaagttctacagcagct

SEQ ID NO: 21650 - protein, 349 aa, Zea mays subsp. mays
  misc_feature (1)..(349): Ceres Seq. ID no. 12405612
MAAPAADEAWCRKTVPRVMELVCPRLPQRDACALLAVSPWCYRALVANSRLWEVLDLREMKNAGNRLISALSLARYRHLKVLNLEFAQDIEDRYFVHLKETSGISLENLEFLNLNACQKISDKGIEAVTSLCPNLQRLAIYWIVGLTDSSIGHITKNCKHLVHLNLSGCKNITDKGMQLIANNYQGLKTLNITRCVKLTDDGLNQVLLKCSSLESLNLFALSSFTDSVYREIGSLSNLTFLDLCGAQNLTDDGLACISRCGRLTYLNLTWCVRVTDAGILAIAQGCRALELLSLFGIVGVTDACLEALSKSCSSSLTTLDVNGCIGIKRRSRDDLLKLFPSLSCFKVHS

SEQ ID NO: 21651 - protein, 331 aa, Zea mays subsp. mays
  misc_feature (1)..(331): Ceres Seq. ID no. 12405613
MELVCPRLPQRDACALLAVSPWCYRALVANSRLWEVLDLREMKNAGNRLISALSLARYRHLKVLNLEFAQDIEDRYFVHLKETSGISLENLEFLNLNACQKISDKGIEAVTSLCPNLQRLAIYWIVGLTDSSIGHITKNCKHLVHLNLSGCKNITDKGMQLIANNYQGLKTLNITRCVKLTDDGLNQVLLKCSSLESLNLFALSSFTDSVYREIGSLSNLTFLDLCGAQNLTDDGLACISRCGRLTYLNLTWCVRVTDAGILAIAQGCRALELLSLFGIVGVTDACLEALSKSCSSSLTTLDVNGCIGIKRRSRDDLLKLFPSLSCFKVHS

SEQ ID NO: 21652 - protein, 290 aa, Zea mays subsp. mays
  misc_feature (1)..(290): Ceres Seq. ID no. 12405614
MKNAGNRLISALSLARYRHLKVLNLEFAQDIEDRYFVHLKETSGISLENLEFLNLNACQKISDKGIEAVTSLCPNLQRLAIYWIVGLTDSSIGHITKNCKHLVHLNLSGCKNITDKGMQLIANNYQGLKTLNITRCVKLTDDGLNQVLLKCSSLESLNLFALSSFTDSVYREIGSLSNLTFLDLCGAQNLTDDGLACISRCGRLTYLNLTWCVRVTDAGILAIAQGCRALELLSLFGIVGVTDACLEALSKSCSSSLTTLDVNGCIGIKRRSRDDLLKLFPSLSCFKVHS

SEQ ID NO: 21653 - DNA, 1217 bp, Zea mays subsp. mays
  misc_feature (1)..(1217): Ceres Seq. ID no. 12405631
acgccgctgctccaagaaaccaccgccgagcccaaccgcacaagcgcgcgaggcaggagagagagagagagagagagagagagagagaggcggggagcaaaacaatggaggggaaagaggaggacgtgcgcctgggcgccaacaagttctcggagcgccagcccatcgggacggcggcgcagggcgccgctgacgacaaggactacaaggagcccccgccggcgccgctgttcgagcccggggagctcaagtcctggtccttctaccgcgcgggcatcgccgagttcgtcgccaccttcctcttcctctacatcaccatcctcaccgtcatgggcgtctccaagtccacctccaagtgcgccaccgtcggcatccagggcatcgcctggtccttcggaggaatgatcttcgcgctcgtctactgcaccgccggcatctccggaggacacatcaacccagctgtgactttcgggctgttcttagccaggaagctgtccctgactaggggccctcttctacatcatcatgcaatgcctgggtgccatctgtggagctggagtggtgaagggcttccagcagggactttacatgggcaacggtggtggcgccaatgttgtcgcacctggctacaccaagggtgatggccttggcgctgagattgttggcaccttcatcctagtctacaccgtcttctcagccaccgatgccaagaggaatgccagggactcccatgttcctatccttgccccactgccaattgggttcgcggtgttcctggtccaccttgccaccatccccattactggcactggcatcaacccagctaggagccttggcgctgccatcatctacaacagggatcacgcctggaacgaccattggatcttctgggtcggccccttcattggcgctgccctggctgccatctaccaccaggtgatcatcagagccatcccgttcaagagcaggtcttaagctgccgtggccgtgccgagacatgccagtccgaagaacgggcgtcttcctgtgatgtcttcttgtctgcccacgcctagtttctctgtcgattcctattcgtcgtctcttcagggctggtgctcactgctgcgccgttctgttaaccgaaacaagaactctgtgtattcctgtaccgagctgtgcatgtttttttttttttctttccatcgtggagaatttaagttattatccgtttgctg

SEQ ID NO: 21654 - protein, 212 aa, Zea mays subsp. mays
  misc_feature (1)..(212): Ceres Seq. ID no. 12405632
AAAPRNHRRAQPHKRARQEREREREREREAGSKTMEGKEEDVRLGANKFSERQPIGTAAQGAADDKDYKEPPPAPLFEPGELKSWSFYRAGIAEFVATFLFLYITILTVMGVSKSTSKCATVGIQGIAWSFGGMIFALVYCTAGISGGHINPAVTFGLFLARKLSLTRGPLLHHHAMPGCHLWSWSGEGLPAGTLHGQRWWRQCCRTWLHQG

SEQ ID NO: 21655 - protein, 178 aa, Zea mays subsp. mays
  misc_feature (1)..(178): Ceres Seq. ID no. 12405633
MEGKEEDVRLGANKFSERQPIGTAAQGAADDKDYKEPPPAPLFEPGELKSWSFYRAGIAEFVATFLFLYITILTVMGVSKSTSKCATVGIQGIAWSFGGMIFALVYCTAGISGGHINPAVTFGLFLARKLSLTRGPLLHHHAMPGCHLWSWSGEGLPAGTLHGQRWWRQCCRTWLHQG

SEQ ID NO: 21656 - protein, 149 aa, Zea mays subsp. mays
  misc_feature (1)..(149): Ceres Seq. ID no. 12405634
MQCLGAICGAGVVKGFQQGLYMGNGGGANVVAPGYTKGDGLGAEIVGTFILVYTVFSATDAKRNARDSHVPILAPLPIGFAVFLVHLATIPITGTGINPARSLGAAIIYNRDHAWNDHWIFWVGPFIGAALAAIYHQVIIRAIPFKSRS

SEQ ID NO: 21657 - DNA, 1500 bp, Zea mays subsp. mays
  misc_feature (1)..(1500): Ceres Seq. ID no. 12405643
taagagagaaaaggaagagagatggagatgacgatgccatggatgtttcagaaaatggccatggcgattcttcattctgcaagaagccgaaggaaggtgatgttcatgtctcttccagttcaactgaagtggtaggaaccattccagagatgaatggaggcgatcatcatatacctggaagctccttttcatgtctagtgaagatctatgacatgcctgatagtcaagtgaaattaaatgatgttattgagtttattggcgtatatacatttgacccagaacttgctgctcctagtgacaacccagatgatataatgttagacctcatcgaagatgtaacagttcagttgcctccgagcaaggtgccacgtcttcactgtttggtatggagaaaattatcattccatgattttatttcaaggcctgttgttgagccttcacccagcctgttaagaggcattcggcaatctttgctctcacacctcacccttgtattaggcaatgacgagcttgcagcccagtgcttgctgttgcatcttctatccagacttcgtaatagggtggatgtggtcaccgttggcagactctccttgaatttcactggcttcaacagggaaagtgcttccatatttgggaatcagctgtattctttgatccagaaattggtgccgtattcacaagccatacctctgtcaattgagtatctcaacacagctacacttcaacctagaaaggacaacaagtcaggaaggttggtcacaggagttctgcagctacctcaaggcactcatctgatctttgatgagactcttctgcagacaggatcattgacatccaaaggtgtggagaataccatgctgctcaagaacctgatggagtcgcagaaggttgactacgattttgagtactacaagctggaaatggcagctgatgtgcagctactcactctctctgaggggaaatcaaacatccttccttcagatttggtagtgcctttccggccatcctctgttcccacaattaatgcaggtgctgaggaaactgagagctggaggtggtttttgaccacagtaaggtctcttcctcagtccactgaacctgaaacttaccagatgattcaggatgaaatggtcagtgccatgcgtgatgataggagcttgggttgttctgaacttagcagatggctaacaatggcacaaataatggcctccagctttggcgagaagagtctttctttggagcactggcagatggtgaaggagcttgagaggcttagaaagcagaggatgcaatgagatgacttaccattagcatgtgtttttgcactctaattgtttatgttggtatgctgttatgtgtatagtactagacgtttgaatcaagacatggatccaagtcatttctgtaacaactgacaacttctatgatcgtatgcatgtgtatctgctgcgcattttctttgctcaaatttgagatttactctgggagctatggaatgcc

SEQ ID NO: 21658 - protein, 430 aa, Zea mays subsp. mays
  misc_feature (1)..(430): Ceres Seq. ID no. 12405644
REKRKRDGDDDAMDVSENGHGDSSFCKKPKEGDVHVSSSSTEVVGTIPEMNGGDHHIPGSSFSCLVKIYDMPDSQVKLNDVIEFIGVYTFDPELAAPSDNPDDIMLDLIEDVTVQLPPSKVPRLHCLVWRKLSFHDFISRPVVEPSPSLLRGIRQSLLSHLTLVLGNDELAAQCLLLHLLSRLRNRVDVVTVGRLSLNFTGFNRESASIFGNQLYSLIQKLVPYSQAIPLSIEYLNTATLQPRKDNKSGRLVTGVLQLPQGTHLIFDETLLQTGSLTSKGVENTMLLKNLMESQKVDYDFEYYKLEMAADVQLLTLSEGKSNILPSDLVVPFRPSSVPTINAGAEETESWRWFLTTVRSLPQSTEPETYQMIQDEMVSAMRDDRSLGCSELSRWLTMAQIMASSFGEKSLSLEHWQMVKELERLRKQRMQ

SEQ ID NO: 21659 - protein, 418 aa, Zea mays subsp. mays
  misc_feature (1)..(418): Ceres Seq. ID no. 12405645
MDVSENGHGDSSFCKKPKEGDVHVSSSSTEVVGTIPEMNGGDHHIPGSSFSCLVKIYDMPDSQVKLNDVIEFIGVYTFDPELAAPSDNPDDIMLDLIEDVTVQLPPSKVPRLHCLVWRKLSFHDFISRPVVEPSPSLLRGIRQSLLSHLTLVLGNDELAAQCLLLHLLSRLRNRVDVVTVGRLSLNFTGFNRESASIFGNQLYSLIQKLVPYSQAIPLSIEYLNTATLQPRKDNKSGRLVTGVLQLPQGTHLIFDETLLQTGSLTSKGVENTMLLKNLMESQKVDYDFEYYKLEMAADVQLLTLSEGKSNILPSDLVVPFRPSSVPTINAGAEETESWRWFLTTVRSLPQSTEPETYQMIQDEMVSAMRDDRSLGCSELSRWLTMAQIMASSFGEKSLSLEHWQMVKELERLRKQRMQ

SEQ ID NO: 21660 - protein, 381 aa, Zea mays subsp. mays
  misc_feature (1)..(381): Ceres Seq. ID no. 12405646
MNGGDHHIPGSSFSCLVKIYDMPDSQVKLNDVIEFIGVYTFDPELAAPSDNPDDIMLDLIEDVTVQLPPSKVPRLHCLVWRKLSFHDFISRPVVEPSPSLLRGIRQSLLSHLTLVLGNDELAAQCLLLHLLSRLRNRVDVVTVGRLSLNFTGFNRESASIFGNQLYSLIQKLVPYSQAIPLSIEYLNTATLQPRKDNKSGRLVTGVLQLPQGTHLIFDETLLQTGSLTSKGVENTMLLKNLMESQKVDYDFEYYKLEMAADVQLLTLSEGKSNILPSDLVVPFRPSSVPTINAGAEETESWRWFLTTVRSLPQSTEPETYQMIQDEMVSAMRDDRSLGCSELSRWLTMAQIMASSFGEKSLSLEHWQMVKELERLRKQRMQ

SEQ ID NO: 21661 - DNA, 1531 bp, Zea mays subsp. mays
  misc_feature (1)..(1531): Ceres Seq. ID no. 12405655
attaacggagtcaggcccaggcctaacctcagttcatccgagcagccgaacacgcccgccgccattctacgccctgctgcccaggtcggacggaccctttgccggagacgagcacacgccacagcaggaattatcgggcgtagagcagcgcgaagcgagagatccaatggcggcggcggaggggcagtgggtgctcatggcaacggggcggacgccgactaacattgcggtgatcaagtactgggggaagcgggacgaggcgctcatcctccccatcaacgacagcatcagcgtaacgctcgaccctgaccatctctccgccaccaccactgtcgccgtcagcccctcattcccttccgaccgcatgtggctcaatggcaaggagatctcgctattaggaggaaggtttcagagctgcctcagagaaatcagaaagcgtgctcgtgactttgaggacaaggagaagggcgtcaagatcaagaaagaggactgggacaagttgcatgttcacatagcctcgtacaacaacttccccactgctgctggtttggcctcttcggctgctggccttgcctgtttcgttttcacccttggaaagctgatgaatgtgaaagaagattatggagaactttcttcaatagcaaggcagggatctgggagtgcatgccgcagtatatatggtggttttgtgaaatggtgcatgggagaaaaagatgatggaagtgacagtattgccgtgcagcttgctgacgaaacacactggaatgatcttgtaattattattgcagtggtcagttcaaagcagaaggaaaccagtagcaccagtgggatgcgagatagtgttgaaacaagtcctctcttgcagtacagggcccagacagtggtgccaggtcgggtgttgaaaatggaagaagctatcaagaaccgtgactttgaatcatttgccaaattaacttgtgcagatagcaaccagtttcatgctgtatgcttagacacgagccctcccatcttctatatgaatgacacgtcacaccggataattagccttgtggaaaaatggaaccactcagaaggaaccccacaggtcgcttacaccttcgatgctgggccaaacgctgttctaatcgcccaaaaccgtaaaactgcagcacatttcctccagaagctcctatactatttccctccacaggataatgatttgagcagctatctggttggcgataaatcaattctaggtgacgccggattgcattccatgaaagacgtcgaggctcttccagcacctccagatacgaagataccggatcagaaattcaagggcgatgttagctacttcatctgcagcaggcttggggcaggtccaaaggttgttgttgacgaaggtcaagcactgatcgattcagtcaccggacttccaaaaggcgtgtagttctagatttaggttggaataatggtttaagctggggattaaagacaatggtatcatacaagcaacctgggccggccaataaagatagaacacgttctcgcc

SEQ ID NO: 21662 - protein, 475 aa, Zea mays subsp. mays
  misc_feature (1)..(475): Ceres Seq. ID no. 12405656
LTESGPGLTSVHPSSRTRPPPFYALLPRSDGPFAGDEHTPQQELSGVEQREARDPMAAAEGQWVLMATGRTPTNIAVIKYWGKRDEALILPINDSISVTLDPDHLSATTTVAVSPSFPSDRMWLNGKEISLLGGRFQSCLREIRKRARDFEDKEKGVKIKKEDWDKLHVHIASYNNFPTAAGLASSAAGLACFVFTLGKLMNVKEDYGELSSIARQGSGSACRSIYGGFVKWCMGEKDDGSDSIAVQLADETHWNDLVIIIAVVSSKQKETSSTSGMRDSVETSPLLQYRAQTVVPGRVLKMEEAIKNRDFESFAKLTCADSNQFHAVCLDTSPPIFYMNDTSHRIISLVEKWNHSEGTPQVAYTFDAGPNAVLIAQNRKTAAHFLQKLLYYFPPQDNDLSSYLVGDKSILGDAGLHSMKDVEALPAPPDTKIPDQKFKGDVSYFICSRLGAGPKVVVDEGQALIDSVTGLPKGV

SEQ ID NO: 21663 - protein, 420 aa, Zea mays subsp. mays
  misc_feature (1)..(420): Ceres Seq. ID no. 12405657
MAAAEGQWVLMATGRTPTNIAVIKYWGKRDEALILPINDSISVTLDPDHLSATTTVAVSPSFPSDRMWLNGKEISLLGGRFQSCLREIRKRARDFEDKEKGVKIKKEDWDKLHVHIASYNNFPTAAGLASSAAGLACFVFTLGKLMNVKEDYGELSSIARQGSGSACRSIYGGFVKWCMGEKDDGSDSIAVQLADETHWNDLVIIIAVVSSKQKETSSTSGMRDSVETSPLLQYRAQTVVPGRVLKMEEAIKNRDFESFAKLTCADSNQFHAVCLDTSPPIFYMNDTSHRIISLVEKWNHSEGTPQVAYTFDAGPNAVLIAQNRKTAAHFLQKLLYYFPPQDNDLSSYLVGDKSILGDAGLHSMKDVEALPAPPDTKIPDQKFKGDVSYFICSRLGAGPKVVVDEGQALIDSVTGLPKGV

SEQ ID NO: 21664 - protein, 410 aa, Zea mays subsp. mays
  misc_feature (1)..(410): Ceres Seq. ID no. 12405658
MATGRTPTNIAVIKYWGKRDEALILPINDSISVTLDPDHLSATTTVAVSPSFPSDRMWLNGKEISLLGGRFQSCLREIRKRARDFEDKEKGVKIKKEDWDKLHVHIASYNNFPTAAGLASSAAGLACFVFTLGKLMNVKEDYGELSSIARQGSGSACRSIYGGFVKWCMGEKDDGSDSIAVQLADETHWNDLVIIIAVVSSKQKETSSTSGMRDSVETSPLLQYRAQTVVPGRVLKMEEAIKNRDFESFAKLTCADSNQFHAVCLDTSPPIFYMNDTSHRIISLVEKWNHSEGTPQVAYTFDAGPNAVLIAQNRKTAAHFLQKLLYYFPPQDNDLSSYLVGDKSILGDAGLHSMKDVEALPAPPDTKIPDQKFKGDVSYFICSRLGAGPKVVVDEGQALIDSVTGLPKGV

SEQ ID NO: 21665 - DNA, 1984 bp, Zea mays subsp. mays
  misc_feature (1)..(1984): Ceres Seq. ID no. 12405663
agtccgtagccgcttgccctgttcgcatcttcgcgcgtggcgcacaccgctccagctctccttcgacgggcacggccgagccgccttcgtcttggccgcagcggtgcgcgctctccatggcgtcctaattagcctagccgcaacgccgcgcccgtgcctgcgaagtagggtgtaaagttttgtatatgatgccaggcatggatgaaccccttcttggcaatggtcttaagaccagcgggaaaagagagagcctggtagtggccgaggtcagaaaacagatgtaccttgctgggccactcatcgctgcatggatcctacagaacattgtccagatgatatctatcatgtttgtcggtcaccttggtgagcttgccctctccagtgcctccatcgccacctcctttgcaggcgttactggcttcagcttattgtctggcatggcgagcagcttggacacactgtgtgggcaatcgttcggggcaaagcagtactatcttcttggcatctacaagcagagggcaatccttgtgctcactctagtcagccttgtggttgcgattatttggtcatacactggacagatccttctactctttggtcaggatccagagattgcagctggggcagggagctatatccggtggatgattcctgcgctatttgtgtatggtccactacagtgccatgtccggtttctgcaaacgcagaacatagtcctcccagtgatgctgagctcaggtgccacagcactgaaccatctgctggtgtgctggctgctggtgtacaagattggtatgggcaacaagggtgctgccttggccaatgccatctcatactttaccaatgtatcaatcctggcaatttacgtcaggcttgcaccagcctgtagaaacacctggagagggttctcaaaggaggcttttcatgacataaccagcttcttgaggcttggtattccatctgcgctgatggtttgcttggagtggtggtcatttgagctcctggtacttctttctggacttctccccaatccaaagcttgagacatcggttttgtccatttccttaaacacaggctctttagcgtttatgatcccttttgggcttagcgcagccataagcacccgtgtttcaaatgaacttggtgctgggcgaccccatgctgcccatctggctacccgtgtggtcatggtgctggccatcgtggttggcgtattaatcggactagctatgattttggtgcgcaatatctgggggtatgcatacagtaatgagaaggaggtggtcaaatacatctccaaaatgatgccgatcctagccgtgtcattcttgttcgattgcgtgcagtgtgttctttcaggtgttgctaggggctgtggatggcaaaagattggggcttgtgttaatcttggtgcatactaccttataggaattccagctgccttctgtttcgcctttatgtaccatctaggtggaatgggactttggttgggaataatctgcgcactcgtcatacagatgctattgcttctcacaattaccttgtgcagcaactgggagaaagaagctttgaaggcaaaggacagagtatttagtacatccgtaccagctgacatgatgacatgatatttctgaagatatttttttgaaggaaatgcccatgaaactttgccaaggaacatactaagaattggttgttcagattcaaggcctttctccatgccatcagaatgatgcttgggtctagtaatagctcctgagcagtctgttttttacttttggtcaatactcaatacatggaagatgtttggtttgaagaaccacgccatcctagatgaggtggtatattataagttgatataacggctccatactagttattgaggaatgagacgatgattatctcatgtaataataatgcttttccccctctagttattgatgtaagacaattgaggcaaatgaacaaaatgtcacatttgatt

SEQ ID NO: 21666 - protein, 479 aa, Zea mays subsp. mays
  misc_feature (1)..(479): Ceres Seq. ID no. 12405664
MMPGMDEPLLGNGLKTSGKRESLVVAEVRKQMYLAGPLIAAWILQNIVQMISIMFVGHLGELALSSASIATSFAGVTGFSLLSGMASSLDTLCGQSFGAKQYYLLGIYKQRAILVLTLVSLVVAIIWSYTGQILLLFGQDPEIAAGAGSYIRWMIPALFVYGPLQCHVRFLQTQNIVLPVMLSSGATALNHLLVCWLLVYKIGMGNKGAALANAISYFTNVSILAIYVRLAPACRNTWRGFSKEAFHDITSFLRLGIPSALMVCLEWWSFELLVLLSGLLPNPKLETSVLSISLNTGSLAFMIPFGLSAAISTRVSNELGAGRPHAAHLATRVVMVLAIVVGVLIGLAMILVRNIWGYAYSNEKEVVKYISKMMPILAVSFLFDCVQCVLSGVARGCGWQKIGACVNLGAYYLIGIPAAFCFAFMYHLGGMGLWLGIICALVIQMLLLLTITLCSNWEKEALKAKDRVFSTSVPADMMT

SEQ ID NO: 21667 - protein, 478 aa, Zea mays subsp. mays
  misc_feature (1)..(478): Ceres Seq. ID no. 12405665
MPGMDEPLLGNGLKTSGKRESLVVAEVRKQMYLAGPLIAAWILQNIVQMISIMFVGHLGELALSSASIATSFAGVTGFSLLSGMASSLDTLCGQSFGAKQYYLLGIYKQRAILVLTLVSLVVAIIWSYTGQILLLFGQDPEIAAGAGSYIRWMIPALFVYGPLQCHVRFLQTQNIVLPVMLSSGATALNHLLVCWLLVYKIGMGNKGAALANAISYFTNVSILAIYVRLAPACRNTWRGFSKEAFHDITSFLRLGIPSALMVCLEWWSFELLVLLSGLLPNPKLETSVLSISLNTGSLAFMIPFGLSAAISTRVSNELGAGRPHAAHLATRVVMVLAIVVGVLIGLAMILVRNIWGYAYSNEKEVVKYISKMMPILAVSFLFDCVQCVLSGVARGCGWQKIGACVNLGAYYLIGIPAAFCFAFMYHLGGMGLWLGIICALVIQMLLLLTITLCSNWEKEALKAKDRVFSTSVPADMMT

SEQ ID NO: 21668 - protein, 475 aa, Zea mays subsp. mays
  misc_feature (1)..(475): Ceres Seq. ID no. 12405666
MDEPLLGNGLKTSGKRESLVVAEVRKQMYLAGPLIAAWILQNIVQMISIMFVGHLGELALSSASIATSFAGVTGFSLLSGMASSLDTLCGQSFGAKQYYLLGIYKQRAILVLTLVSLVVAIIWSYTGQILLLFGQDPEIAAGAGSYIRWMIPALFVYGPLQCHVRFLQTQNIVLPVMLSSGATALNHLLVCWLLVYKIGMGNKGAALANAISYFTNVSILAIYVRLAPACRNTWRGFSKEAFHDITSFLRLGIPSALMVCLEWWSFELLVLLSGLLPNPKLETSVLSISLNTGSLAFMIPFGLSAAISTRVSNELGAGRPHAAHLATRVVMVLAIVVGVLIGLAMILVRNIWGYAYSNEKEVVKYISKMMPILAVSFLFDCVQCVLSGVARGCGWQKIGACVNLGAYYLIGIPAAFCFAFMYHLGGMGLWLGIICALVIQMLLLLTITLCSNWEKEALKAKDRVFSTSVPADMMT

SEQ ID NO: 21669 - DNA, 1276 bp, Zea mays subsp. mays
  misc_feature (1)..(1276): Ceres Seq. ID no. 12405671
tctctctctctctctctcgtgcgtgtcgaagactcgaagtcgaactcaaaacacgcaacacgcaagtcacgaacgcacgacaaaaggaagaaaaacccaagaaatatctctgcggccctgctcgtcccgagccgagccggcgagatggcggggatgtctcgcgcgatccgcaacttcgccgccgcgtcccggcgaaccctgaccgctgcttcggggccggcgctgccgaaggaggcggcggcgcgggtgagggcgggggcgcccgggcgcatggggcgggatcaggaggacgggaggcgcgtgcagtgggtgttcctcgggtgccccggggtggggaagggcacctacgccagccgcctctcgcagctgctcggcgtcccgcacatcgccaccggcgacctcgtccgcgacgccctggccacccctggccccttctccaacaagcttgctgagattgtcaatcatggaaaactggtgtctgatgagatcatcataaatctgctgtcaagacgtctggaagagggagaggaaaagggtgaattggggttcatccttgatggctttcctcgaaccataggacaagcggagatacttgaaggagtcacagacattgatttggtgatcaatctcaaactccgagaagaagctctgcttgcgaaatgccttggcaggaggatgtgcagccagtgtggagggaacttcaatgtggcctccattgatattgagggtgaagacggcgggcctcgaatgtacatgcccccactgttgcctcctccacagtgtgaatcgaagctgattgctagagcagacgatactgaagaagtggtaaaagagcggctgcgtgtgtaccatgatttgactgaaccagtggaggagttctacagagcacgtgggaaactgctggagttcaatctgcctggtgggatacccgaatcatggccgaagttactgcaggccctgaacatagaagaccccgacaataagcgatctgcagcagcatgattcttgttttgttataggaatgcacattctaaattgaacatctgtagactatgtcaaagctagtcaaattggtgggcattccttacatctttgggaagcctactccattctggatccagattattgtggcatggcactcaactgtacagtagattgatcatcgattggcaaggtcgatcgatggatgtgctgactgtgatcctcgaacgtaaggtgtgtaaaaaggcaagaaaataattgttgggcgtcgagacattcacttgtaggtcgtacc

SEQ ID NO: 21670 - protein, 333 aa, Zea mays subsp. mays
  misc_feature (1)..(333): Ceres Seq. ID no. 12405672
SLSLSLVRVEDSKSNSKHATRKSRTHDKRKKNPRNISAALLVPSRAGEMAGMSRAIRNFAAASRRTLTAASGPALPKEAAARVRAGAPGRMGRDQEDGRRVQWVFLGCPGVGKGTYASRLSQLLGVPHIATGDLVRDALATPGPFSNKLAEIVNHGKLVSDEIIINLLSRRLEEGEEKGELGFILDGFPRTIGQAEILEGVTDIDLVINLKLREEALLAKCLGRRMCSQCGGNFNVASIDIEGEDGGPRMYMPPLLPPPQCESKLIARADDTEEVVKERLRVYHDLTEPVEEFYRARGKLLEFNLPGGIPESWPKLLQALNIEDPDNKRSAAA

SEQ ID NO: 21671 - protein, 285 aa, Zea mays subsp. mays
  misc_feature (1)..(285): Ceres Seq. ID no. 12405673
MAGMSRAIRNFAAASRRTLTAASGPALPKEAAARVRAGAPGRMGRDQEDGRRVQWVFLGCPGVGKGTYASRLSQLLGVPHIATGDLVRDALATPGPFSNKLAEIVNHGKLVSDEIIINLLSRRLEEGEEKGELGFILDGFPRTIGQAEILEGVTDIDLVINLKLREEALLAKCLGRRMCSQCGGNFNVASIDIEGEDGGPRMYMPPLLPPPQCESKLIARADDTEEVVKERLRVYHDLTEPVEEFYRARGKLLEFNLPGGIPESWPKLLQALNIEDPDNKRSAAA

SEQ ID NO: 21672 - protein, 282 aa, Zea mays subsp. mays
  misc_feature (1)..(282): Ceres Seq. ID no. 12405674
MSRAIRNFAAASRRTLTAASGPALPKEAAARVRAGAPGRMGRDQEDGRRVQWVFLGCPGVGKGTYASRLSQLLGVPHIATGDLVRDALATPGPFSNKLAEIVNHGKLVSDEIIINLLSRRLEEGEEKGELGFILDGFPRTIGQAEILEGVTDIDLVINLKLREEALLAKCLGRRMCSQCGGNFNVASIDIEGEDGGPRMYMPPLLPPPQCESKLIARADDTEEVVKERLRVYHDLTEPVEEFYRARGKLLEFNLPGGIPESWPKLLQALNIEDPDNKRSAAA

SEQ ID NO: 21673 - DNA, 1477 bp, Zea mays subsp. mays
  misc_feature (1)..(1477): Ceres Seq. ID no. 12405682
aaaagactgcgagtgcgcatccttcgtccttccccttcccagccgccctctccccccctctcccggtcgcctctaacgtcgctggtgactcacgaagacctccatcgacggcggtgaaactggggccgacttctggagggtttgacttgttggatacagcgctggctcttccaatcgccgggtgctctctgccactctgtcttgcggagccctcaccgcggaaaccagttggtgcgcgtggccatggcggtggcgaaggtcaaatcggtcgccctctccgtcagtcacaagtgccggaacatcttggccgccggttgggaagcccacctcaacactgtcaaggctgacaacaagggaagcaagaatgagatttacacgtcgagggtgcactacatgatccataagggcacgccctacttgattgtccccgagaacgacatgcacaacattaacattataatcgatgagcgggggtctcttgcagtattcagtccgatccgtggccgagttgcgagcttattgaagccatcgaagacacctcctcgtgttgctatgactggtgatgttctgcgcctgaaagactcaaaggttccaattattgccgatagcctgaagcaaactattctgaaggaacatgaagctgctagtaaagctagttatggagtgtcagcaatactgtcttcggcaggtgctacctgcaggtcccggagtgagggcctccttagtctactcagtgaggagagctcttacaacatcttaaaatttgacataggttcctgtgtctacatagacttcaatgggagcagccataatattgaattggacagctttgaagcaccaaaagcagatctgctaatgccattctctgcgaagcttgtggatggtatcaaccaaaatgactctaggaggagggcactggtgatgttctgttttgcgtattttaatagcgctgtcatgctttccattgaccaccatggttttgatgtcctcgccaaagtgcctcaaggagacatccttactaatccacaataccactggaaggagttcaggttcacattcaaggaacctgccaaggatgctgaggacttctgccgcatgctggttgggttagaggaagagggtttgcagaccgtgaagagctgtagcggttacggttgacaacccacttgcaaggttcacattcaaggaaccagccaaggatgctgaggactctgccgcatgctggttcgattagagggattttgcagcgcgtgaagagctatagcggtctaggtgacagctcacttgccacaaaaccagtgagaaactatatatccgttattttggaactttgaaatatggttttagattgctatgttttattcgaagatctatggcttctcgaatttaatagagtagatgatgtttgaacatggagccgtaaactatcaatatctgtttgaatggtatttatataaataataaaactggtaacggc

SEQ ID NO: 21674 - protein, 304 aa, Zea mays subsp. mays
  misc_feature (1)..(304): Ceres Seq. ID no. 12405683
MAVAKVKSVALSVSHKCRNILAAGWEAHLNTVKADNKGSKNEIYTSRVHYMIHKGTPYLIVPENDMHNINIIIDERGSLAVFSPIRGRVASLLKPSKTPPRVAMTGDVLRLKDSKVPIIADSLKQTILKEHEAASKASYGVSAILSSAGATCRSRSEGLLSLLSEESSYNILKFDIGSCVYIDFNGSSHNIELDSFEAPKADLLMPFSAKLVDGINQNDSRRRALVMFCFAYFNSAVMLSIDHHGFDVLAKVPQGDILTNPQYHWKEFRFTFKEPAKDAEDFCRMLVGLEEEGLQTVKSCSGYG

SEQ ID NO: 21675 - protein, 254 aa, Zea mays subsp. mays
  misc_feature (1)..(254): Ceres Seq. ID no. 12405684
MIHKGTPYLIVPENDMHNINIIIDERGSLAVFSPIRGRVASLLKPSKTPPRVAMTGDVLRLKDSKVPIIADSLKQTILKEHEAASKASYGVSAILSSAGATCRSRSEGLLSLLSEESSYNILKFDIGSCVYIDFNGSSHNIELDSFEAPKADLLMPFSAKLVDGINQNDSRRRALVMFCFAYFNSAVMLSIDHHGFDVLAKVPQGDILTNPQYHWKEFRFTFKEPAKDAEDFCRMLVGLEEEGLQTVKSCSGYG

SEQ ID NO: 21676 - protein, 239 aa, Zea mays subsp. mays
  misc_feature (1)..(239): Ceres Seq. ID no. 12405685
MHNINIIIDERGSLAVFSPIRGRVASLLKPSKTPPRVAMTGDVLRLKDSKVPIIADSLKQTILKEHEAASKASYGVSAILSSAGATCRSRSEGLLSLLSEESSYNILKFDIGSCVYIDFNGSSHNIELDSFEAPKADLLMPFSAKLVDGINQNDSRRRALVMFCFAYFNSAVMLSIDHHGFDVLAKVPQGDILTNPQYHWKEFRFTFKEPAKDAEDFCRMLVGLEEEGLQTVKSCSGYG

SEQ ID NO: 21677 - DNA, 1864 bp, Zea mays subsp. mays
  misc_feature (1)..(1864): Ceres Seq. ID no. 12405693
aaccacgcctcgaaatataaccccccgccacaccgtacgagacgagggcagatatggaagctgatgctgctgctgccagtggcggcctggccctgctgcccgccgtgctgctcctcgtggcgctctccaccctcgtcttctccacatggagcaaccgcaacagcaggctgcccccgaggcccgatggccctcccgctgatcggacacctgcacctcatccgcccgccgccgcacagggccttcgaccgcatcctggcacgctacgggccgctcgtctacctccgcctcgggccctccacgcactgcgtcgtcgcgggcaccgcggacgcgcgcgggacctcctcaagcacgaggccagcatcccggagcggccgctcacggccgtcacgcgccacctcgcctacgacgacgccggcttcgccttcgcgccctacggcccgcactggcgcttcatgaagcgcctctgcatgtcggagctgctgggcccgcggaccgtggaccagctgcgccccgtgcgggaggccgagctggcggccgtgctggaggcggcgcgccaggcggccgccgctcgggagcccatcgacgtcagccgccacctcatcagcatgtccaacaacgccatcatgcgcatggtggccagcgcgctgccgggccacatgacggaggcggccagggactgcgccaagcacgtcgccgagctcgtgggggccttcaacgtcgaggactacgtcggcctctgccgcggctgggacctgcaggggctcacgcggaggacgcgcgaggtgcgtgacaagttcgacgcgctgctggagatcatgatcacgggcaaggaggagagtcgccgtcgtcgccacgccaccaccgacaccggcggcggcaccaaggacctgctggacatcctcatggacgcggcggaggacgccaacgccgaggtcaggctcaccagggagaacatcaaggcgttcgtcctcgacatcttcacggccggctccgacaccaccgccaccagcgtggagtggatgctggcgctgctcatcaaccacccggcctgcatggacaagctgcgcgcggagctggacgccgtggtgggcgcgtcgcgcctggtcggggagcaggacgtcccgcgccttccctacctgcaggccgtcttcaaggagacgctgcggctgcagccccccgcggtgttcgctcagcgggagaccatcgagccggtccacgtccgcggctacgtcatcccgcccaagacctccgtcttcttcaacatcttctccatcggccgcgacccggggctgctgggaggacccgctccagttccggcccgagcgcttcatgcccggcggcgccggcgccggccgtggaccccaaggggcagcacatgcagctcatgccgtttggaagcggccgccgcgcctgccccggcatgggcctagccatgcaggccgtgccggccttcctcgccgcgctggtgcagtgcttccactgggaggtgcccatcccgccgggccaatccactgcgccgcccttgtacatggaggaggcagcggggctcgtcaccgcccggaagaaccatctcctcctcatccccacaccgcgcctcaatccgctaccggcaagagcggctacgtagttagtacctgcgaatccagtctcagttcatcggtccatccaaattcagacgtgtcctccattattgcaagccgcgcactaagatcatatttctgtttgtttatatttctcggtcacacatacgtttgcaatcaccttcaggaaaagtgacctttgtacccgttcgatgttggtacatccagatccgtgtgctcaggaattacgtattactactatatatatactggtccgtttgagt

SEQ ID NO: 21678 - protein, 458 aa, Zea mays subsp. mays
  misc_feature (1)..(458): Ceres Seq. ID no. 12405694
MEADAAAASGGLALLPAVLLLVALSTLVFSTWSNRNSRLPPRPDGPPADRTPAPHPPAAAQGLRPHPGTLRAARLPPPRALHALRRRGHRGRARDLLKHEASIPERPLTAVTRHLAYDDAGFAFAPYGPHWRFMKRLCMSELLGPRTVDQLRPVREAELAAVLEAARQAAAAREPIDVSRHLISMSNNAIMRMVASALPGHMTEAARDCAKHVAELVGAFNVEDYVGLCRGWDLQGLTRRTREVRDKFDALLEIMITGKEESRRRRHATTDTGGGTKDLLDILMDAAEDANAEVRLTRENIKAFVLDIFTAGSDTTATSVEWMLALLINHPACMDKLRAELDAVVGASRLVGEQDVPRLPYLQAVFKETLRLQPPAVFAQRETIEPVHVRGYVIPPKTSVFFNIFSIGRDPGLLGGPAPVPARALHARRRRRRPWTPRGSTCSSCRLEAAAAPAPAWA

SEQ ID NO: 21679 - protein, 325 aa, Zea mays subsp. mays
  misc_feature (1)..(325): Ceres Seq. ID no. 12405695
MKRLCMSELLGPRTVDQLRPVREAELAAVLEAARQAAAAREPIDVSRHLISMSNNAIMRMVASALPGHMTEAARDCAKHVAELVGAFNVEDYVGLCRGWDLQGLTRRTREVRDKFDALLEIMITGKEESRRRRHATTDTGGGTKDLLDILMDAAEDANAEVRLTRENIKAFVLDIFTAGSDTTATSVEWMLALLINHPACMDKLRAELDAVVGASRLVGEQDVPRLPYLQAVFKETLRLQPPAVFAQRETIEPVHVRGYVIPPKTSVFFNIFSIGRDPGLLGGPAPVPARALHARRRRRRPWTPRGSTCSSCRLEAAAAPAPAWA

SEQ ID NO: 21680 - protein, 320 aa, Zea mays subsp. mays
  misc_feature (1)..(320): Ceres Seq. ID no. 12405696
MSELLGPRTVDQLRPVREAELAAVLEAARQAAAAREPIDVSRHLISMSNNAIMRMVASALPGHMTEAARDCAKHVAELVGAFNVEDYVGLCRGWDLQGLTRRTREVRDKFDALLEIMITGKEESRRRRHATTDTGGGTKDLLDILMDAAEDANAEVRLTRENIKAFVLDIFTAGSDTTATSVEWMLALLINHPACMDKLRAELDAVVGASRLVGEQDVPRLPYLQAVFKETLRLQPPAVFAQRETIEPVHVRGYVIPPKTSVFFNIFSIGRDPGLLGGPAPVPARALHARRRRRRPWTPRGSTCSSCRLEAAAAPAPAWA

SEQ ID NO: 21681 - DNA, 1512 bp, Zea mays subsp. mays
  misc_feature (1)..(1512): Ceres Seq. ID no. 12405701
gaaaatccttcactcgtccctctctcggtctgtccctttggagcgaaggcgaaccgcgtcgcgaacccaggatcccatcgagggcaggcgggcagatcccggcgtccgacggcgatgggcgaggaggacgcgagcgccgggggagatccgcagcggctgaagcggatcgccgctgcggcgtacgactacgagaacgatgcgcggtgggccgggtactggtccaacgtcctcgtgccgcccccacctcgcctcccgccccgacgtcgtcgaccacttcaagcgcaaagttctaccagcgatacatcgatcctggtttggttgttgaaccgatgtcctcccatgacttcaactcagtctagcagaccagcagcgaagtcttcagctacaccatctagtgagaatgtcagagctcgggactcaggctctagcacgagatcaactgggacctcccaacatccaccagcagagaggactgcaaattcattacagctagacggacggacaataaacttttctatcaatgcctgggtactggttgtagctagtctcggaatactcccagttctacccaaccatatctcgagtaaagcataccgtctttcattgctaggaacaatatgctcgtctgcatattctttatatggcacttatgggaaaccaagagcatggaatatgcctgcaattcagtcctggttgcagtctattattgtagctaaggactttgttcacttgatgttctctcttatgatgttcacatctaatgtgcactttaagattgctctacttcctgtgctttgctgggcgcttgatcatgttgctcgattcctaaggcgtaattttacacactcttctttatacaggaagtacttagaggacccttgcctatgggtagagacaaacaacactacactcagcctactttgttcgaatgctgaaatcaccctggggtttctcatgatcatctcgcttttctcgtcgagacgcaatataatccagacatttatgtactttcatcttttgaagttgatgtaccattctcctgtgacatctggttaccaccagagcgtgtgggcaagaataggccgggctgtaaacccgtacatttaccgctatgcgccattcctgaacacacctatttcggcagtccagagatggtggctgaggtaggaaagcatggaccgcagcacagtgaaaatatgcctaaacagctactctgatctcagcgcctcgatcttttagaaggcgtgcttgcacggcgtgttcttttcttgtaaaggttgtattctcagttcatgtcttactgagctactgaaggcataacactagagaatttcttacgatgagcagtagcgcttgagcaaactgtcgatttgatgggatacagttacaggcataaagtgattgcacagaattttcataaggatgcttgctgcagtcaataggatggaacatgcgagtggcactattgattcttgaagtaataaatgatgttcttgtctattttattttgcc

SEQ ID NO: 21682 - protein, 388 aa, Zea mays subsp. mays
  misc_feature (1)..(388): Ceres Seq. ID no. 12405702
ENPSLVPLSVCPFGAKANRVANPGSHRGQAGRSRRPTAMGEEDASAGGDPQRLKRIAAAAYDYENDARWAGYWSNVLVPPPPRLPPRRRRPLQAQSSTSDTSILVWLLNRCPPMTSTQSSRPAAKSSATPSSENVRARDSGSSTRSTGTSQHPPAERTANSLQLDGRTINFSINAWVLVVASLGILPVLPNHISSKAYRLSLLGTICSSAYSLYGTYGKPRAWNMPAIQSWLQSIIVAKDFVHLMFSLMMFTSNVHFKIALLPVLCWALDHVARFLRRNFTHSSLYRKYLEDPCLWVETNNTTLSLLCSNAEITLGFLMIISLFSSRRNIIQTFMYFHLLKLMYHSPVTSGYHQSVWARIGRAVNPYIYRYAPFLNTPISAVQRWWLR

SEQ ID NO: 21683 - protein, 350 aa, Zea mays subsp. mays
  misc_feature (1)..(350): Ceres Seq. ID no. 12405703
MGEEDASAGGDPQRLKRIAAAAYDYENDARWAGYWSNVLVPPPPRLPPRRRRPLQAQSSTSDTSILVWLLNRCPPMTSTQSSRPAAKSSATPSSENVRARDSGSSTRSTGTSQHPPAERTANSLQLDGRTINFSINAWVLVVASLGILPVLPNHISSKAYRLSLLGTICSSAYSLYGTYGKPRAWNMPAIQSWLQSIIVAKDFVHLMFSLMMFTSNVHFKIALLPVLCWALDHVARFLRRNFTHSSLYRKYLEDPCLWVETNNTTLSLLCSNAEITLGFLMIISLFSSRRNIIQTFMYFHLLKLMYHSPVTSGYHQSVWARIGRAVNPYIYRYAPFLNTPISAVQRWWLR

SEQ ID NO: 21684 - protein, 275 aa, Zea mays subsp. mays
  misc_feature (1)..(275): Ceres Seq. ID no. 12405704
MTSTQSSRPAAKSSATPSSENVRARDSGSSTRSTGTSQHPPAERTANSLQLDGRTINFSINAWVLVVASLGILPVLPNHISSKAYRLSLLGTICSSAYSLYGTYGKPRAWNMPAIQSWLQSIIVAKDFVHLMFSLMMFTSNVHFKIALLPVLCWALDHVARFLRRNFTHSSLYRKYLEDPCLWVETNNTTLSLLCSNAEITLGFLMIISLFSSRRNIIQTFMYFHLLKLMYHSPVTSGYHQSVWARIGRAVNPYIYRYAPFLNTPISAVQRWWLR

SEQ ID NO: 21685 - DNA, 1838 bp, Zea mays subsp. mays
  misc_feature (1)..(1838): Ceres Seq. ID no. 12405709
gctgttcccctccctcctttttttcgtcgtctcgcacgctctctttctctctctctctctctcttgcccatccccccacctcggctgggctcagctcagctcctaaaccggcacctacctctctgcctgctgccccggcccctgatcctgatttccccaatcgagagtccgagacccgagaggaggcacaggcacctgcgctagctgcagctgcaaatcgtcttccccagatccggcgccgcctagttcgctcctgctcgcgacagcgcccagagccgtccgcgtgcgcccgcagagatcgtttcggggacagccgagcagagcagagctgactctgccgcttgttgcccgttcttggctgctgttgctggcgagagcgcgcaggaggagcggttgatttttgattctctctgtccctccctcccttgcttcgcttcgctcgcgcggggtgcgtgcacgtaccatgagaagatgatgcgcgccaggcccaaaggtacattcgccgacgcgatgagggagagctcccctcctcctcctccccctccccctccggctccggcttcggcagcggtgaaagaggacgagtgggaggtgcggcccggcgggatgctggtgcagaagcggagccccgacgccgacgcccccgccggggcgcccgtccctaccatccgcgtcaaggtcaagttcaacggcgtgtaccacgagatctacatcaactcccaggcctccttcggtgagctgaagaagatgctgtcggcgcggaccgggctgcaccccgaggaccagaagctggtgtacaaggacaaggagcgggactccaaggcgttcctggacatggccggcgtcaaggaccgctccaagttggtgctgctcgaggaccccgccgcgcaggccaagcgcctcctcgagcagcgccgcaccgacaaggcggagcgcgccgccaagtccatctctcgcatcggcctcgacgtcgacaagctcgccaccaaggtgtcggcgctggaggccatcgtcagcaagggcggcaaggtggtggacgctgacgtggtcgccctcaccgaggcgctcatgaacgagctggtcaagctggactccatcgccgccgacggcgaagtcaaggtgcagcgacgaatgcaggagaagcgggtgcagaagtacgtggagacgctggacgctatccgcgccaagaacgcggcggcgcccaaggccaaggccaaggccaacgacgacatgaatgggcacgccaaggcccgcgcgccgcaactcccgccgcgcccgccgcccgtgtcgcagaggcggaacttccagcagccctccccggcgccagcgccgcccacgcagggctgggagtcgttcgacctgctgtcgtcggtgccgtccacgtcctcggccaccgtgaccaccaccatggcggccgcgaccaccaccacctcgccggccggcgtctccccgatcccgcggttcgactgggagctcttctgaagccctccctcctcgcggcgcgtcggcgtgccggttggtcgatcagacggtacctacctcccttgtccatggatcttccctgctctcatcagtagtgccattgtttcttctgtggattctttccatttcttttcgcctcattctctcttcttttcttccatttcctttcgaatttgtatatctactatatgtctacaaaaagaacagagagaccgacgcggtgcggtgagtgtgttcactgggtcaaaagtccgtcagttgacaactcctcctcgtgaggatccatccatgcatgttgttgttcagtcacagcaaataagtggtggtcttattatgatggcgatgaagaagtttcc

SEQ ID NO: 21686 - protein, 336 aa, Zea mays subsp. mays
  misc_feature (1)..(336): Ceres Seq. ID no. 12405710
MMRARPKGTFADAMRESSPPPPPPPPPAPASAAVKEDEWEVRPGGMLVQKRSPDADAPAGAPVPTIRVKVKFNGVYHEIYINSQASFGELKKMLSARTGLHPEDQKLVYKDKERDSKAFLDMAGVKDRSKLVLLEDPAAQAKRLLEQRRTDKAERAAKSISRIGLDVDKLATKVSALEAIVSKGGKVVDADVVALTEALMNELVKLDSIAADGEVKVQRRMQEKRVQKYVETLDAIRAKNAAAPKAKAKANDDMNGHAKARAPQLPPRPPPVSQRRNFQQPSPAPAPPTQGWESFDLLSSVPSTSSATVTTTMAAATTTTSPAGVSPIPRFDWELF

SEQ ID NO: 21687 - protein, 335 aa, Zea mays subsp. mays
  misc_feature (1)..(335): Ceres Seq. ID no. 12405711
MRARPKGTFADAMRESSPPPPPPPPPAPASAAVKEDEWEVRPGGMLVQKRSPDADAPAGAPVPTIRVKVKFNGVYHEIYINSQASFGELKKMLSARTGLHPEDQKLVYKDKERDSKAFLDMAGVKDRSKLVLLEDPAAQAKRLLEQRRTDKAERAAKSISRIGLDVDKLATKVSALEAIVSKGGKVVDADVVALTEALMNELVKLDSIAADGEVKVQRRMQEKRVQKYVETLDAIRAKNAAAPKAKAKANDDMNGHAKARAPQLPPRPPPVSQRRNFQQPSPAPAPPTQGWESFDLLSSVPSTSSATVTTTMAAATTTTSPAGVSPIPRFDWELF

SEQ ID NO: 21688 - protein, 323 aa, Zea mays subsp. mays
  misc_feature (1)..(323): Ceres Seq. ID no. 12405712
MRESSPPPPPPPPPAPASAAVKEDEWEVRPGGMLVQKRSPDADAPAGAPVPTIRVKVKFNGVYHEIYINSQASFGELKKMLSARTGLHPEDQKLVYKDKERDSKAFLDMAGVKDRSKLVLLEDPAAQAKRLLEQRRTDKAERAAKSISRIGLDVDKLATKVSALEAIVSKGGKVVDADVVALTEALMNELVKLDSIAADGEVKVQRRMQEKRVQKYVETLDAIRAKNAAAPKAKAKANDDMNGHAKARAPQLPPRPPPVSQRRNFQQPSPAPAPPTQGWESFDLLSSVPSTSSATVTTTMAAATTTTSPAGVSPIPRFDWELF

SEQ ID NO: 21689 - DNA, 748 bp, Zea mays subsp. mays
  misc_feature (1)..(748): Ceres Seq. ID no. 12405725
aacttaaccactactccgcatctactgacgccgccgccgccgccgccgcgctctctccgtcggactagtcagagcatccgtcatggcgaagaaccccaaggtgttcttcgacatcctcatcggcaagtccaaggccgggcgggtcgtgatggagctcttcgccgacaaggtgcccaagacggccgagaacttccgctgcctgtgcacgggcgagaagggcctgggctccgcggggaagccgctgcactacaagggctcggccttccaccgcgtcatcccgggcttcatgtgccagggcggcgacttcacccggggcaacggcacgggcggcgagtccatctacggcgccaggttcgccgacgagaacttcaagctgcgccacacgggacccggcgtgctctccatggccaacgcggggcccgacaccaacggctcccagttcttcatctgcaccgcgcagacgccctggcttgacggcaagcacgtcgtcttcggcaaggtcgtcgatggctacgccgtcgtggacaagatggaggctgtcggttctcagtcaggtgccacggccgagagcgtacgcatcgaggactgcggccagcttgccgacgactgagggcctcgctgtgtccgattgtaaccaaatgaatgatcaataaatttctttctttcattcttttgtttctgtggagatggataccggcctgtagttaattaaccaatataaactatggatggatggggcggtgatttg

SEQ ID NO: 21690 - protein, 175 aa, Zea mays subsp. mays
  misc_feature (1)..(175): Ceres Seq. ID no. 12405726
MAKNPKVFFDILIGKSKAGRVVMELFADKVPKTAENFRCLCTGEKGLGSAGKPLHYKGSAFHRVIPGFMCQGGDFTRGNGTGGESIYGARFADENFKLRHTGPGVLSMANAGPDTNGSQFFICTAQTPWLDGKHVVFGKVVDGYAVVDKMEAVGSQSGATAESVRIEDCGQLADD

SEQ ID NO: 21691 - protein, 157 aa, Zea mays subsp. mays
  misc_feature (1)..(157): Ceres Seq. ID no. 12405727
NLTTTPHLLTPPPPPPRSLRRTSQSIRHGEEPQGVLRHPHRQVQGRAGRDGALRRQGAQDGRELPLPVHGREGPGLRGEAAALQGLGLPPRHPGLHVPGRRLHPGQRHGRRVHLRRQVRRRELQAAPHGTRRALHGQRGARHQRLPVLHLHRADALA

SEQ ID NO: 21692 - protein, 153 aa, Zea mays subsp. mays
  misc_feature (1)..(153): Ceres Seq. ID no. 12405728
MELFADKVPKTAENFRCLCTGEKGLGSAGKPLHYKGSAFHRVIPGFMCQGGDFTRGNGTGGESIYGARFADENFKLRHTGPGVLSMANAGPDTNGSQFFICTAQTPWLDGKHVVFGKVVDGYAVVDKMEAVGSQSGATAESVRIEDCGQLADD

SEQ ID NO: 21693 - DNA, 1544 bp, Zea mays subsp. mays
  misc_feature (1)..(1544): Ceres Seq. ID no. 12405741
aaaggacgggcaaagagccggagccgcgaccgacgactcatcagacatggcgaagccggcggcggcgaggaagccctctgcggcgtcgaccgtcgcactgacactggttctggccctggcttcggctgtcctcctcttcctcctgctccgcttctctccctcctccccgtcccccaacccgcacccgcaccgccgcctccgcctccgcccccgcgcgcatgcgcaccaccaccagatcccattcgaccctgtcgtcgcggacatagagcgccgcctcgaagaccacgagtgggagcgcctcgccgctgcagggctgcacgctccgggcatggaggcggcgccagtcccagaggatctcaccgacggtgaggtcgacgccgacgaggactacatcaatgacgctgcgcgcttcaacgtcacgcttcgcgtggaggcgctgttcccaaagatcgacgtcgaccctgccgatggcgccgtcacgggcgctgagctggccgcgtggaacctcgcaaatgcgcggcgggaggtgctacaccgcaccgcccgggagctcgagctgcacgaccgcgatcacgacggccgggtcgcctacggcgaatacgagcggcccagctgggcctggcgtttcgacgatcataactcaaccgatgacggagcgggatggtggaaggaggagcattttagtgctgcagatatggatggtgatggctttctaaatcttactgagtttaatgactttttacatccagctgatactaccaacccaaagctaatacattggttgtgcaaagaagaagtcagggaaagagataaagacaatgatgggaagctcaatttccaagagttcttcaacggattattttactcaattcgacactatgatgatgaaggcttaacagatgacaccggtggctctgatgcaccagctaaaaagtcattttcacaccttgatctggataatgatgggctcttatcagcagatgagctaaagcctgtaattggtaatctccatccatcagaatacttctatgccaagcaacaagccgactatgtaatatctcaggctgacacgaacaaagatggacaattgagcatgaatgagatgatcgagaacccctatgtcttttacaatgctttattcacagaagatgattatggctttcatgacgagctccgttagttcccaattcaacacaaagctttatggaatcaccactgtaggaagtcggaagactttgttatgcactgctaagaccatttccgttttctgtctgaaatcatccatcatttgacggtgattccatgtaaaacaagcatgtttttagatgcacctattctagaagctgtgttcttttgtactacccttgagccttttttatagtttgttgtttttttaatcatatatgtacggtgaggatgtgagtgagttttgttctttcaacttcttgaatcttgatacgatacaaaactagcgtcttccagaatcacaatttgtaaaccatacaaacccaggaaagcattactgtaagccatgaattgacgtt

SEQ ID NO: 21694 - protein, 392 aa, Zea mays subsp. mays
  misc_feature (1)..(392): Ceres Seq. ID no. 12405742
KDGQRAGAATDDSSDMAKPAAARKPSAASTVALTLVLALASAVLLFLLLRFSPSSPSPNPHPHRRLRLRPRAHAHHHQIPFDPVVADIERRLEDHEWERLAAAGLHAPGMEAAPVPEDLTDGEVDADEDYINDAARFNVTLRVEALFPKIDVDPADGAVTGAELAAWNLANARREVLHRTARELELHDRDHDGRVAYGEYERPSWAWRFDDHNSTDDGAGWWKEEHFSAADMDGDGFLNLTEFNDFLHPADTTNPKLIHWLCKEEVRERDKDNDGKLNFQEFFNGLFYSIRHYDDEGLTDDTGGSDAPAKKSFSHLDLDNDGLLSADELKPVIGNLHPSEYFYAKQQADYVISQADTNKDGQLSMNEMIENPYVFYNALFTEDDYGFHDELR

SEQ ID NO: 21695 - protein, 377 aa, Zea mays subsp. mays
  misc_feature (1)..(377): Ceres Seq. ID no. 12405743
MAKPAAARKPSAASTVALTLVLALASAVLLFLLLRFSPSSPSPNPHPHRRLRLRPRAHAHHHQIPFDPVVADIERRLEDHEWERLAAAGLHAPGMEAAPVPEDLTDGEVDADEDYINDAARFNVTLRVEALFPKIDVDPADGAVTGAELAAWNLANARREVLHRTARELELHDRDHDGRVAYGEYERPSWAWRFDDHNSTDDGAGWWKEEHFSAADMDGDGFLNLTEFNDFLHPADTTNPKLIHWLCKEEVRERDKDNDGKLNFQEFFNGLFYSIRHYDDEGLTDDTGGSDAPAKKSFSHLDLDNDGLLSADELKPVIGNLHPSEYFYAKQQADYVISQADTNKDGQLSMNEMIENPYVFYNALFTEDDYGFHDELR

SEQ ID NO: 21696 - protein, 283 aa, Zea mays subsp. mays
  misc_feature (1)..(283): Ceres Seq. ID no. 12405744
MEAAPVPEDLTDGEVDADEDYINDAARFNVTLRVEALFPKIDVDPADGAVTGAELAAWNLANARREVLHRTARELELHDRDHDGRVAYGEYERPSWAWRFDDHNSTDDGAGWWKEEHFSAADMDGDGFLNLTEFNDFLHPADTTNPKLIHWLCKEEVRERDKDNDGKLNFQEFFNGLFYSIRHYDDEGLTDDTGGSDAPAKKSFSHLDLDNDGLLSADELKPVIGNLHPSEYFYAKQQADYVISQADTNKDGQLSMNEMIENPYVFYNALFTEDDYGFHDELR

SEQ ID NO: 21697 - DNA, 1348 bp, Zea mays subsp. mays
  misc_feature (1)..(1348): Ceres Seq. ID no. 12405745
catcatacctttctgttctaattaacaatgccaaattattgaaaggaaatgttcatttgttgacttcagctctaagtgtgattacatcaacaatgaggttgtctatgaaaaggaagatataccaaccacattttaccttgtccctccatggtgtatttaatctgtgccaaactattggtggtagctcaagaagtacagagcataagcttgtaatggaacttggtatcgatgccattctgatgaatggtcctataccaattttatctgaaatggataagtcaagaatatcaatggttgtttcatgggcaacttcaagcatcttctggttgtactctaaccaaagatcgctgttggaaatatcctgcaaagagccaccaagaaatgagtctctactttcaaagattttgcgcttgttagccgcttctgtaatacttggaaagatatctagcatctttcatggaaagagtgtagatcttgcagggaacaccagtgaaactctttgctctttcttggacaatgcatatgaaagggctgaaacggcaaagagttgcagtatgaatgatactctagctgtcattatactacaccttcaagaccatatgccaaagaacagtgattccttgccatcagttattgcagccctttgcttgttgcttcttgacagatccagtaagcaagtgaacaaacacctggccaacaaccgagggaaaattgaaatgctttgctcaaagataggctgcccggctgaatcaaatcctgcatggagatggcattactatcaaccatggaaggattctgctttgcagcgcacggggatggagcgactggaagaagagcaggcctgccgaagcctcctggtcctattttccagtgccttcagtgcctgcctgtcagagttcccggtgttgtccctagatgatgttgagaagtctggccttttccagtgggaaagagacttaatggctaaacaatcttccacttagcacgctgaagaactaggatgacccacatttgagctgtgtgtacaatcatgctcgtacgattgatcttgtttagaacttggaagaagagaatgcttcgaccctcagctggattggatggatgaacctacggtgctgcacaagccgaaccggccctgcgcccctgcctaacaccaatatgttggacacttccactactgttcttcacttcccatttgtataacgggacctgcattattgtagcatgggtgcagcgtttcctatgtaatttctgtgacattaccaactcacaatattgatttcatctgaaatgtaacatattttttcacagaaatgcttgcagcccatgcggccatgcctgtttgttc

SEQ ID NO: 21698 - protein, 326 aa, Zea mays subsp. mays
  misc_feature (1)..(326): Ceres Seq. ID no. 12405746
SYLSVLINNAKLLKGNVHLLTSALSVITSTMRLSMKRKIYQPHFTLSLHGVFNLCQTIGGSSRSTEHKLVMELGIDAILMNGPIPILSEMDKSRISMVVSWATSSIFWLYSNQRSLLEISCKEPPRNESLLSKILRLLAASVILGKISSIFHGKSVDLAGNTSETLCSFLDNAYERAETAKSCSMNDTLAVIILHLQDHMPKNSDSLPSVIAALCLLLLDRSSKQVNKHLANNRGKIEMLCSKIGCPAESNPAWRWHYYQPWKDSALQRTGMERLEEEQACRSLLVLFSSAFSACLSEFPVLSLDDVEKSGLFQWERDLMAKQSST

SEQ ID NO: 21699 - protein, 296 aa, Zea mays subsp. mays
  misc_feature (1)..(296): Ceres Seq. ID no. 12405747
MRLSMKRKIYQPHFTLSLHGVFNLCQTIGGSSRSTEHKLVMELGIDAILMNGPIPILSEMDKSRISMVVSWATSSIFWLYSNQRSLLEISCKEPPRNESLLSKILRLLAASVILGKISSIFHGKSVDLAGNTSETLCSFLDNAYERAETAKSCSMNDTLAVIILHLQDHMPKNSDSLPSVIAALCLLLLDRSSKQVNKHLANNRGKIEMLCSKIGCPAESNPAWRWHYYQPWKDSALQRTGMERLEEEQACRSLLVLFSSAFSACLSEFPVLSLDDVEKSGLFQWERDLMAKQSST

SEQ ID NO: 21700 - protein, 292 aa, Zea mays subsp. mays
  misc_feature (1)..(292): Ceres Seq. ID no. 12405748
MKRKIYQPHFTLSLHGVFNLCQTIGGSSRSTEHKLVMELGIDAILMNGPIPILSEMDKSRISMVVSWATSSIFWLYSNQRSLLEISCKEPPRNESLLSKILRLLAASVILGKISSIFHGKSVDLAGNTSETLCSFLDNAYERAETAKSCSMNDTLAVIILHLQDHMPKNSDSLPSVIAALCLLLLDRSSKQVNKHLANNRGKIEMLCSKIGCPAESNPAWRWHYYQPWKDSALQRTGMERLEEEQACRSLLVLFSSAFSACLSEFPVLSLDDVEKSGLFQWERDLMAKQSST

SEQ ID NO: 21701 - DNA, 1859 bp, Zea mays subsp. mays
  misc_feature (1)..(1859): Ceres Seq. ID no. 12405760
accaccggtctcggcgcctccgcgacgatagcctctccgacctcgagcgcggtccggttcctccctgcgtcagcacgcgagcccttggagcttcgagtcagatcccggcgggcgcccatggtggctctggtgccgttgagccgcgcgatgtagggttttcgcgcgccgcatagtaggagcgatggggcgccggaagatgtccgcggcggcaccgccgtctcggagctggtccaacgttggcggaagcgtcatcccggaacttccgagctaaacacaaaacagacttggagaatttgacgctgaccaaacagccactcagaacattgcattttttcctattagccatgttacaatacttgaaaagattagcaacatatatcctgagtaagggtggtttcttctttctcctaattgttttattggtagcttctggaatcttgctcgtcgtttcggatggtctgcataagaagcatgtgcaggaattccttaattatgctaaatttgtgtcgtggtgggtttcattaggtgtggcttcatcaattggactaggttctggtttgcatacatttgtgctgtatctgggtcctcatattgctctgttcactattaaggctgttcaatgtggtcgaattgatctaaaaattgctccatatgataccatacagctaaaggttgggccatcatggcttgacaagaaatgttcagaatttggaccgcctgtgtatccagcatcagctcattcagttaggatcccagtcttcgacctactacctcagatacagctggaggcagttctttggggaattgggactgcgcttggtgagctccctccttattttatatcacgagcagctcgcttatcaggaagcgagtcaaaagctgttcaggagcttgatccagctacttccaaagaagatgggccagtagcatcatctcttaatcgaaccaagcgttggcttctctctcactcccaacatctcaacttcttctctatcttgattcttgcttcggttccaaatccactctttgaccttgctggtattatgtgtgggcaatttggtgtgcctttctgggagttcttgtttgctactttgatcgggaaagccatcatcaagactcatattcagacactatttatcgtgtccctgtgcaacaatcagctcttgtatcttattgaaaaggagttaatctggatatttggtcacgttcctgggttttctgccacccttccgtctgtgattgccagactccatgctgccaaggacaagtatctatcaccaccagccccagtctcaccgtcatcacaaatggaggagaaacagtggaatttctcttttacatctgtctggaactctatagtgtggcttgtgcttttgaacttcttcattaagatagtcacgtcaacagcacaggattatctcaaaaagcagcaggatacggagatggaacttatttcggattccccgatccacgaccattctaaaactaactagtggcgcagctagtggtgtttatacacagctgctagcagcaaagattctcctctgtagcttaagcccctgcagatgatttcaagttccaacaattagtattagtagttattcatctgcgcagtggacaaaaacatggacacatggtcttggttaacttgtcagttgacgaccttttgtcattgagcctgtacctgtactggcagctcctggtggagtcattctgtttatttttcggacatctacacggataaacagtaggaattgtttatggagcacggttggctttgtgagatgtatcattcatacctgttcctatgtattctgggaacttgaaatgcaatagaaacctgggaggatttaacaagg

SEQ ID NO: 21702 - protein, 382 aa, Zea mays subsp. mays
  misc_feature (1)..(382): Ceres Seq. ID no. 12405761
MLQYLKRLATYILSKGGFFFLLIVLLVASGILLVVSDGLHKKHVQEFLNYAKFVSWWVSLGVASSIGLGSGLHTFVLYLGPHIALFTIKAVQCGRIDLKIAPYDTIQLKVGPSWLDKKCSEFGPPVYPASAHSVRIPVFDLLPQIQLEAVLWGIGTALGELPPYFISRAARLSGSESKAVQELDPATSKEDGPVASSLNRTKRWLLSHSQHLNFFSILILASVPNPLFDLAGIMCGQFGVPFWEFLFATLIGKAIIKTHIQTLFIVSLCNNQLLYLIEKELIWIFGHVPGFSATLPSVIARLHAAKDKYLSPPAPVSPSSQMEEKQWNFSFTSVWNSIVWLVLLNFFIKIVTSTAQDYLKKQQDTEMELISDSPIHDHSKTN

SEQ ID NO: 21703 - DNA, 1236 bp, Zea mays subsp. mays
  misc_feature (1)..(1236): Ceres Seq. ID no. 12405803
aatagaggttactgctctcctgggctgtgaggctgtgaggctgtgaccaaacgctctacgctcccacttcccaccaactcccaaatcctccctgaaaataagaatacgagggtgagcgatcgagcggtcgagggggttgtgcttgtgcgtcagatcaaccgactggtggcgaggctgcgggaggagatggccggcgaagggaatggggatgaagggtggaggcggagcggcatcgaggtcagcgccctgcagttcggctacgacgggcagccgccgctcttcgcgcgcttcaacctctgcgtcgcacccggctcccgctgcctcctcgtcggcgccaacggatcaggcaagaccacactcttgaagattcttgcgggaaagcatatggttggaggaagagatgtggtccgtgtcctcaatggttccgcttttcatgatacacagctagtgtgcaatggtgacctttcgtacttgggtggttcttggagccgtactattggttcagctggggatgttccactgcaaggcgacttctctgctgagcacatgatttttggagttgatggggttgatcctgtcaggcgagagaagctggttgatctgctagacattgatctgcagtggcgcatgcataaagtttcagatgggcagcgccgcagggtgcaaatctgcatgggtcttcttcatccatacaaggtgcttttgctcgatgagatcacggttgatctggacgtggtgaccaggatggacctgcttggtttcttcaaggaagagtgcgagcagagggaagctaccatcgtgtacgccacccatatatttgacggactcgagacgtgggctaccgactttgcgtacatccaagaaggcgagctgagaaggtccgggagatactccgacatcgaggagctaaggagcgccaagaacttgctgtcggtagtcgagtcgtggctgaggtcagagaccaaactcccgaagaaggaacccccaccacgtcctgagacccaggccaggcgttcctcgccgttcgatgcttctcctttccgttcgtcacgccacatggcctactaccgttgatggtttcccaactcgtactacaccattgcctcttgttattttgttgtcactcatatcgtatagtagctgtggagtttaatatgtgtcctcttcacggcccttgtagacatcaatcaatatatagcaggcagcacagaaataaaagtttggttcggttggtct

SEQ ID NO: 21704 - protein, 295 aa, Zea mays subsp. mays
  misc_feature (1)..(295): Ceres Seq. ID no. 12405804
MAGEGNGDEGWRRSGIEVSALQFGYDGQPPLFARFNLCVAPGSRCLLVGANGSGKTTLLKILAGKHMVGGRDVVRVLNGSAFHDTQLVCNGDLSYLGGSWSRTIGSAGDVPLQGDFSAEHMIFGVDGVDPVRREKLVDLLDIDLQWRMHKVSDGQRRRVQICMGLLHPYKVLLLDEITVDLDVVTRMDLLGFFKEECEQREATIVYATHIFDGLETWATDFAYIQEGELRRSGRYSDIEELRSAKNLLSVVESWLRSETKLPKKEPPPRPETQARRSSPFDASPFRSSRHMAYYR

SEQ ID NO: 21705 - protein, 229 aa, Zea mays subsp. mays
  misc_feature (1)..(229): Ceres Seq. ID no. 12405805
MVGGRDVVRVLNGSAFHDTQLVCNGDLSYLGGSWSRTIGSAGDVPLQGDFSAEHMIFGVDGVDPVRREKLVDLLDIDLQWRMHKVSDGQRRRVQICMGLLHPYKVLLLDEITVDLDVVTRMDLLGFFKEECEQREATIVYATHIFDGLETWATDFAYIQEGELRRSGRYSDIEELRSAKNLLSVVESWLRSETKLPKKEPPPRPETQARRSSPFDASPFRSSRHMAYYR

SEQ ID NO: 21706 - protein, 175 aa, Zea mays subsp. mays
  misc_feature (1)..(175): Ceres Seq. ID no. 12405806
MIFGVDGVDPVRREKLVDLLDIDLQWRMHKVSDGQRRRVQICMGLLHPYKVLLLDEITVDLDVVTRMDLLGFFKEECEQREATIVYATHIFDGLETWATDFAYIQEGELRRSGRYSDIEELRSAKNLLSVVESWLRSETKLPKKEPPPRPETQARRSSPFDASPFRSSRHMAYYR

SEQ ID NO: 21707 - DNA, 1520 bp, Zea mays subsp. mays
  misc_feature (1)..(1520): Ceres Seq. ID no. 12405811
actccactctccagtctccaccttttgctgtcgccttcctccccttgccttccctgtgccctcccctccctcgcgccgcaaaaaacgccgcagggaggaagagagagagagagggccaggctgagcttactggcggcgagctggagaagaaggaaggagcatggccatgccggcggcgctgcttctcttcctcctagtcctctccgccttcgaggccggggagcttccacgctgctcggctgctgctgcaggtaaaccggcagtcctcgtccatgatgacttgagtccggttcaagacaccagccccatcgcaacagtcccctccacgaacccgtcgcccgccatcatcaccgtgccttccacgaatcccaccatcaccatcccttccttgaaccctctgcctacacccatcacagccccctcaacaaacatcccttctccttccaccatgctgccgccggttccggtcatatatccgctgccaacgccgtctatgtcctccccaccagctgtgccggtcaccaatcctgctgtcaccacgccttccacgtcccctccgtcgacaccaacaccattcaacaacccaccattgttgaacccaacgccgacccctgctcctacagtcacggccccagctgcttctggccggcaggtctggtgtgtggccaaggctgctggctcaagtgaagccgcgctccagaacgcgttggactatgcgtgcggcattggaggagtagattgttcggcgattcagccgtcagggagctgctactatccaaataccatccaagcccatgcatcctacgcgttcaacacttattaccagagaaaccctgtttcttccagctgcgactttggggggacggcaatgctcgtcactgctaatccaagctctgggagctgtgtctttgcatcatcattgccatcgtcgtcaagctctactgttggatatgatcccgcgtccacggctactccattgtcaccgtcgtctggttccgactcgggagcacccgtgctgaatgccagtggggcaggttcttctgaatcatcagattttggctttgacatcccaggagctgtcaatttcggcagcggttggaggtcagtctcaccacccaactggccctgggcagccctggtctggattctagtagcattgtgtgtgcacaaagaagggatggtctgaacctgtgagagcatctgcagtattttggagacagattgcaaagtagccaggtggtgtagagaccagtagagagctacaaagctagagaatcgggccttagcatggctaagtttgtcgatgtatgtgtgaagtatggtgctccagttcgtagtaggaactgatgtagtcctgatggatggacttggactcaccctgatcagtcactcaggtactctgaagtgtagatgtaggcatgtagctgctgctagtagtagtagtaatgcaagtactgctttgcctcgtatgggtgagtgagttgaacaactaatggaatgcaaatgtgctgttttgtttt

SEQ ID NO: 21708 - protein, 341 aa, Zea mays subsp. mays
  misc_feature (1)..(341): Ceres Seq. ID no. 12405812
MAMPAALLLFLLVLSAFEAGELPRCSAAAAGKPAVLVHDDLSPVQDTSPIATVPSTNPSPAIITVPSTNPTITIPSLNPLPTPITAPSTNIPSPSTMLPPVPVIYPLPTPSMSSPPAVPVTNPAVTTPSTSPPSTPTPFNNPPLLNPTPTPAPTVTAPAASGRQVWCVAKAAGSSEAALQNALDYACGIGGVDCSAIQPSGSCYYPNTIQAHASYAFNTYYQRNPVSSSCDFGGTAMLVTANPSSGSCVFASSLPSSSSSTVGYDPASTATPLSPSSGSDSGAPVLNASGAGSSESSDFGFDIPGAVNFGSGWRSVSPPNWPWAALVWILVALCVHKEGMV

SEQ ID NO: 21709 - protein, 339 aa, Zea mays subsp. mays
  misc_feature (1)..(339): Ceres Seq. ID no. 12405813
MPAALLLFLLVLSAFEAGELPRCSAAAAGKPAVLVHDDLSPVQDTSPIATVPSTNPSPAIITVPSTNPTITIPSLNPLPTPITAPSTNIPSPSTMLPPVPVIYPLPTPSMSSPPAVPVTNPAVTTPSTSPPSTPTPFNNPPLLNPTPTPAPTVTAPAASGRQVWCVAKAAGSSEAALQNALDYACGIGGVDCSAIQPSGSCYYPNTIQAHASYAFNTYYQRNPVSSSCDFGGTAMLVTANPSSGSCVFASSLPSSSSSTVGYDPASTATPLSPSSGSDSGAPVLNASGAGSSESSDFGFDIPGAVNFGSGWRSVSPPNWPWAALVWILVALCVHKEGMV

SEQ ID NO: 21710 - protein, 245 aa, Zea mays subsp. mays
  misc_feature (1)..(245): Ceres Seq. ID no. 12405814
MLPPVPVIYPLPTPSMSSPPAVPVTNPAVTTPSTSPPSTPTPFNNPPLLNPTPTPAPTVTAPAASGRQVWCVAKAAGSSEAALQNALDYACGIGGVDCSAIQPSGSCYYPNTIQAHASYAFNTYYQRNPVSSSCDFGGTAMLVTANPSSGSCVFASSLPSSSSSTVGYDPASTATPLSPSSGSDSGAPVLNASGAGSSESSDFGFDIPGAVNFGSGWRSVSPPNWPWAALVWILVALCVHKEGMV

SEQ ID NO: 21711 - DNA, 1469 bp, Zea mays subsp. mays
  misc_feature (1)..(1469): Ceres Seq. ID no. 12405815
aggcgcgcgtgccgcctctctcgctcgctcctccggttaatcccccatcgccaggagcccaggactcgcagccagcccttcacattattcgcgcgcgcgcgaacggccgtagcgtgtgggtggcgtcgccgtgcggtctcttggtgccggtgcgggccgcgtgacggtgtgtgagtgtgtgacgcccacgcggaggaggtcgttctgttggttggttggtccgcggccatgatggcggtacgcggccggagaggcggtctccgtagcgctcctcttctccctcgttttcttctggcgcccgcttcctgctcgacctcctcgtctacaagccattggcagtctaccttttcaacactaaagcttctaagttgatgagtgatgaggccaggcaagcaaagattgtcaaattctcggagtccatttggaaacttacatactatgcttctgttcaagcatgggtcctcatgataataaagcaagaaccatggtcgttggatatggtgcagtactttgatggctggccaaatcaacccatcgtgtcctcgttgatgcttttctatatgtgccagtgtggattttatatctacagcattggtgctcttgttgcttgggaaacccgcagaaaagattttgctgtaatgatgtctcatcatgtaataacatctactcttattggagtttcatatctgacaggattttttcgaattgggaccatcgttcttgctcttcatgatacaagtgatgtgtttcttgagactgccaaattgtgcaagtacacagaaaaggagttgggggctagcttgtttttcggtctcttcgctatctcctggcttctattgcgtttgatttacttcccgttttggataatcaaagcctctagctatcattccatcacattctggaggaagctggatgaattccctacagctttgtactatatcttcaatacaatgcttctcacattgcttgtattccatatgtactggtggaaactcatatgtttgatgataatgagacaattgaataataaaggacaggttacagatgatgttcgatctgattctgaggatgacgagtaatgggggagattcattctttgacatctgcaatgtgtcatttcttcgccaatacttatctacgcctgcttccagaattgattgttttgatcgtggcaagtctcgggcatggataggaaagtttatcctctgtatattgccttgtgatatcaaacatggctagaacgagaatggagcaggtcctatacattacgggtatagctagcaagcttacttgaaggttccttcaaaaaattttggttcaccttttctgatatatggggaaagatatgagagggcgtacagcttttttcctgaaacttacagaacccctctgtaccatgttcagtatacttcactcgtgagtagatttagttctaattgacggtaataaactgattctttttgactggg

SEQ ID NO: 21712 - protein, 235 aa, Zea mays subsp. mays; identical to SEQ ID NO: 17080
  misc_feature (1)..(235): Ceres Seq. ID no. 12405816

SEQ ID NO: 21713 - protein, 204 aa, Zea mays subsp. mays; identical to SEQ ID NO: 17081
  misc_feature (1)..(204): Ceres Seq. ID no. 12405817

SEQ ID NO: 21714 - protein, 193 aa, Zea mays subsp. mays
  misc_feature (1)..(193): Ceres Seq. ID no. 12405818
MVQYFDGWPNQPIVSSLMLFYMCQCGFYIYSIGALVAWETRRKDFAVMMSHHVITSTLIGVSYLTGFFRIGTIVLALHDTSDVFLETAKLCKYTEKELGASLFFGLFAISWLLLRLIYFPFWIIKASSYHSITFWRKLDEFPTALYYIFNTMLLTLLVFHMYWWKLICLMIMRQLNNKGQVTDDVRSDSEDDE

SEQ ID NO: 21715 - DNA, 1339 bp, Zea mays subsp. mays
  misc_feature (1)..(1339): Ceres Seq. ID no. 12405822
cggttctttaattgcgcgccaatctgttttatatatacggagagagcactcctgttttgtggcaaattctattactagctgcaaaagggcgtgtttgagactagcggaccgaccttgaagttgaagttgaaaaggccggcctgcgcggcgatggatgtcaagtgccggcgtctggaggggaaggtggccatcgtgacggcgtccacgatggggatcggcctcgccatcgccgagcgcctcggtctggagggcgccgccgtcgtcatctcctcccgcaagcagaagaacgtgaacgaggcggtggaggggctcagggccaagggtatcaccgcggttggtgccgtctgccacgtctccgacgcacagcagcgcaagagcctcatcgagacggccgtcaagagctttgggcacatagatattcttgtctccaatgctgccgcaaatccttctgtagatagcatacttgaaatgaaagagtctgttctcgataagttgtgggatattaacgtcaaggcttctatccttcttatccaggatgctgctcctcacctacggaaggggtcatctgtgattattatttcttcaattgctggttacaatccagaacaaggattgacaatgtatagtgtcacaaagactgctctctttggtctcacgaaggctcttgctggtgagatgggacccgatactcgtgttaactgtatagcccctggttttgttcctacacggtttgctagtttcctcacagaaaatgagaccattaggaaagagcttaacgagaggaccaagcttaagagattgggtactgtggaagacatggctgcggctgcggctttcctggcatctgacgacgcatcatacattacggctgaaaccattgttgttgctggaggggtgcagtctaggctgtaaatctggctgaagtttatatttacttggttaataatgtgtactagtgccctaggcgtggctaataatgtgtactagtgccgctagagcatcaggctaccttctatatatgacaggcaactctaaaatattttctatatcttattcctcttcaataatgtcctctctatcagcatcttctatatgtcgttctccagtctccacgcttaaaaaaatttgtattaaggatatattttgttttcagttttttttaagcgtggagaacataagtagcctcggttcatgaatcagatgtatggattattgtaacgcattcttgaaagggaaaaacatgtattatagcgtgataactgtaccttttgtgtttgttgtacagaaccatagaattgtacttcattttaggtgaagacgcctttgaacatttaagccc

SEQ ID NO: 21716 - protein, 253 aa, Zea mays subsp. mays
  misc_feature (1)..(253): Ceres Seq. ID no. 12405823
MDVKCRRLEGKVAIVTASTMGIGLAIAERLGLEGAAVVISSRKQKNVNEAVEGLRAKGITAVGAVCHVSDAQQRKSLIETAVKSFGHIDILVSNAAANPSVDSILEMKESVLDKLWDINVKASILLIQDAAPHLRKGSSVIIISSIAGYNPEQGLTMYSVTKTALFGLTKALAGEMGPDTRVNCIAPGFVPTRFASFLTENETIRKELNERTKLKRLGTVEDMAAAAAFLASDDASYITAETIVVAGGVQSRL

SEQ ID NO: 21717 - protein, 234 aa, Zea mays subsp. mays
  misc_feature (1)..(234): Ceres Seq. ID no. 12405824
MGIGLAIAERLGLEGAAVVISSRKQKNVNEAVEGLRAKGITAVGAVCHVSDAQQRKSLIETAVKSFGHIDILVSNAAANPSVDSILEMKESVLDKLWDINVKASILLIQDAAPHLRKGSSVIIISSIAGYNPEQGLTMYSVTKTALFGLTKALAGEMGPDTRVNCIAPGFVPTRFASFLTENETIRKELNERTKLKRLGTVEDMAAAAAFLASDDASYITAETIVVAGGVQSRL

SEQ ID NO: 21718 - protein, 147 aa, Zea mays subsp. mays
  misc_feature (1)..(147): Ceres Seq. ID no. 12405825
MKESVLDKLWDINVKASILLIQDAAPHLRKGSSVIIISSIAGYNPEQGLTMYSVTKTALFGLTKALAGEMGPDTRVNCIAPGFVPTRFASFLTENETIRKELNERTKLKRLGTVEDMAAAAAFLASDDASYITAETIVVAGGVQSRL

SEQ ID NO: 21719 - DNA, 1341 bp, Zea mays subsp. mays
  misc_feature (1)..(1341): Ceres Seq. ID no. 12405842
acccgaaattccaaacccacttcgtcaagcaacaacaccggctaaaaattaaaggaggcagcgcgtagcagttggtcgccaccgtcacgtacacacgctcacgttggaggctggactccgcccccgtgctgctcttcgccttgcctttctccgccggagaccccgccgcctcagctgccacaggaggaggaggcaaccatggcggggaggtacgaccgcaatccgttcgaggaggatgacgtcaacccctttgcgggaggaagtgtacctcctgcttctaattctcggatgtcagcacttcctcatgaaccagctggcttctacaatgatcgtggtgcaacagtggacatacctcttgattcaacgaaggacctaagtaaaaaggagaaagaactgcaggcaaaggaagctgagctaaacaaacgggaaagggagctgaaaagaaaggaggaagctgcagccagagctggtattgtcattgaagataagaattggccaccctttatgcccattattcatcatgacatttcgaacgagataccaattcacctgcaaaggatgcagtacctggcgttttcttcactattgggattgacagcttgcctcttttggaacatcattgcaactacagcagcatggattaaatcagaaggtgtcatgatctggttgctagcaatcatctacttcatctctggtgtccctggggcctatgtgctttggtatcgcccgctttacaatgcgatgaggactgaaagtgctttgaagtttgggtggtttttcttgttttaccttctccatatcttattctgtgtctggtcagctgtggctcctccatttccattcaaaggaaaatccttggctgggattttgccggctattgatatcataggcaggagtgctattgtggggatattttacttcattggatttggaatgttctgccttgaatcactgctcagcatcgttgtcattcagcaagtatacatgtacttccgtggaagtggaaaagctgcagagatgaagcgagaggcggcccgtgggtgctatgaggaatgccttttgatagagcgacctaggcgactggaagagacacggtgtgacaatgggtaactacgttatgtacatatgctgttcgtctctgagattacttatactagcttatagccttcttgccttcatgcaatgtataccacctaccaccggagcttgatctcttacctaggttcagatgtgcttataggtaactagttttttttatacatttcctacatgatttgtactcttaactcgcgagacaattgttgttgttctttggatctcgagtgattctttgcacggccc

SEQ ID NO: 21720 - protein, 303 aa, Zea mays subsp. mays
  misc_feature (1)..(303): Ceres Seq. ID no. 12405843
MAGRYDRNPFEEDDVNPFAGGSVPPASNSRMSALPHEPAGFYNDRGATVDIPLDSTKDLSKKEKELQAKEAELNKRERELKRKEEAAARAGIVIEDKNWPPFMPIIHHDISNEIPIHLQRMQYLAFSSLLGLTACLFWNIIATTAAWIKSEGVMIWLLAIIYFISGVPGAYVLWYRPLYNAMRTESALKFGWFFLFYLLHILFCVWSAVAPPFPFKGKSLAGILPAIDIIGRSAIVGIFYFIGFGMFCLESLLSIVVIQQVYMYFRGSGKAAEMKREAARGCYEECLLIERPRRLEETRCDNG

SEQ ID NO: 21721 - protein, 273 aa, Zea mays subsp. mays
  misc_feature (1)..(273): Ceres Seq. ID no. 12405844
MSALPHEPAGFYNDRGATVDIPLDSTKDLSKKEKELQAKEAELNKRERELKRKEEAAARAGIVIEDKNWPPFMPIIHHDISNEIPIHLQRMQYLAFSSLLGLTACLFWNIIATTAAWIKSEGVMIWLLAIIYFISGVPGAYVLWYRPLYNAMRTESALKFGWFFLFYLLHILFCVWSAVAPPFPFKGKSLAGILPAIDIIGRSAIVGIFYFIGFGMFCLESLLSIVVIQQVYMYFRGSGKAAEMKREAARGCYEECLLIERPRRLEETRCDNG

SEQ ID NO: 21722 - protein, 201 aa, Zea mays subsp. mays
  misc_feature (1)..(201): Ceres Seq. ID no. 12405845
MPIIHHDISNEIPIHLQRMQYLAFSSLLGLTACLFWNIIATTAAWIKSEGVMIWLLAIIYFISGVPGAYVLWYRPLYNAMRTESALKFGWFFLFYLLHILFCVWSAVAPPFPFKGKSLAGILPAIDIIGRSAIVGIFYFIGFGMFCLESLLSIVVIQQVYMYFRGSGKAAEMKREAARGCYEECLLIERPRRLEETRCDNG

SEQ ID NO: 21723 - DNA, 1413 bp, Zea mays subsp. mays
  misc_feature (1)..(1413): Ceres Seq. ID no. 12405846
atcgaaaaatcggcgtcgccatctccggagtgccacgcctaggagctattctctctagtactgcggcgacttcactccaagcctcccccttcagcgatcagcacacatcacgtaaagcgcaaccaaatgatttccaccaccgtcgctgctcaccccgccaccgtcacagcgctgcggcgaatgtacccgcttcgccctcgccagccactctgtgctccaatcttcacggcggcgacgaggcagtgcatggctacggcgaagccctcggtcacaaacgcgctcgctaacctatccgttgagagcgcccccgcggcgcttcccaagctttcgttcccgatactggtgaatagttgcactgggaaaatggggaaggctgttgctgaagcagctgtctcggctggtcttcagttagttcctgtatcattcagtgccattgaggtccctgatcgaaagattgaaatatgtgatagagaaatttttattcatgacccatctgaaagtgaaaaaattctgcctaccattgttaaagaatacccaaatgtcatagttgtagattacactgtgcctgatgctgttaatgcaaatgctgaactctattgcaaatttggtttgccatttgtaatgggcacaactggtggaaataggcaactcttgcacaaaactgtgcatgatgcgaatatctacgctgtgatatcccctcagatggggaagcaggttgttgcttttcttgctgccatggaaattatgtcagagcaatttcctggtgcattttcaggttacaagctggaggtcatggagtctcatcaagcaacaaaattggacatttctgggactgccaaggctgttatctcttgttttcagaagttgggtgtatcgtttgacatgaatgaggtaaagcaagttagggatcctgaggagcaggtaacgttagtgggtgtcccagaagaacatctcgggggccatgccttccacatgtaccatctcacttcgcctgatgggacagtttcgtttgagttccagcacaatgtatgtggccgttcaatatacgcagaaggaactgttgatgcagctatgtttctctacacaaagattcaatcgggtgcgagcaagaaattgtatgacatgattgatgtcttgagagaagggaacatgagatgaggtccatgttggcgtcagatgagctttcatgtaccaatttgcaagctcaattccaccgtgaattaggttacttttacaatgtacccttcccaatttaccagttaactcactttcagttttgaattggctgcttcaatgatggaaggtactccgttccagagtgtatgcaattttagtttctctaggtatattgattttggcgttttgctatacacctatatgcaatctatagattgtagtaaaaaaaatgtattc

SEQ ID NO: 21724 - protein, 343 aa, Zea mays subsp. mays
  misc_feature (1)..(343): Ceres Seq. ID no. 12405847
MISTTVAAHPATVTALRRMYPLRPRQPLCAPIFTAATRQCMATAKPSVTNALANLSVESAPAALPKLSFPILVNSCTGKMGKAVAEAAVSAGLQLVPVSFSAIEVPDRKIEICDREIFIHDPSESEKILPTIVKEYPNVIVVDYTVPDAVNANAELYCKFGLPFVMGTTGGNRQLLHKTVHDANIYAVISPQMGKQVVAFLAAMEIMSEQFPGAFSGYKLEVMESHQATKLDISGTAKAVISCFQKLGVSFDMNEVKQVRDPEEQVTLVGVPEEHLGGHAFHMYHLTSPDGTVSFEFQHNVCGRSIYAEGTVDAAMFLYTKIQSGASKKLYDMIDVLREGNMR

SEQ ID NO: 21725 - protein, 325 aa, Zea mays subsp. mays
  misc_feature (1)..(325): Ceres Seq. ID no. 12405848
MYPLRPRQPLCAPIFTAATRQCMATAKPSVTNALANLSVESAPAALPKLSFPILVNSCTGKMGKAVAEAAVSAGLQLVPVSFSAIEVPDRKIEICDREIFIHDPSESEKILPTIVKEYPNVIVVDYTVPDAVNANAELYCKFGLPFVMGTTGGNRQLLHKTVHDANIYAVISPQMGKQVVAFLAAMEIMSEQFPGAFSGYKLEVMESHQATKLDISGTAKAVISCFQKLGVSFDMNEVKQVRDPEEQVTLVGVPEEHLGGHAFHMYHLTSPDGTVSFEFQHNVCGRSIYAEGTVDAAMFLYTKIQSGASKKLYDMIDVLREGNMR

SEQ ID NO: 21726 - protein, 303 aa, Zea mays subsp. mays
  misc_feature (1)..(303): Ceres Seq. ID no. 12405849
MATAKPSVTNALANLSVESAPAALPKLSFPILVNSCTGKMGKAVAEAAVSAGLQLVPVSFSAIEVPDRKIEICDREIFIHDPSESEKILPTIVKEYPNVIVVDYTVPDAVNANAELYCKFGLPFVMGTTGGNRQLLHKTVHDANIYAVISPQMGKQVVAFLAAMEIMSEQFPGAFSGYKLEVMESHQATKLDISGTAKAVISCFQKLGVSFDMNEVKQVRDPEEQVTLVGVPEEHLGGHAFHMYHLTSPDGTVSFEFQHNVCGRSIYAEGTVDAAMFLYTKIQSGASKKLYDMIDVLREGNMR

SEQ ID NO: 21727 - DNA, 1515 bp, Zea mays subsp. mays
  misc_feature (1)..(1515): Ceres Seq. ID no. 12405850
agtcagtcgcagttcacaactgcgactaaaaaccatctttggggcccttcgccgcgatttgcttcgcttctcggactaggttaagttgccttttcgattctcagaaaaagactggctctgcactcggataattttaaaatggatagtgcacagcagcccactggggaattgaacaattcgttcgatactcttatggtttctggaggtgaccagagtcgacagcctcaggatgctggcaatgaaacgagcttcacgaattggaaagacctccccatggagctgctcctgcgtatcatttcactagttggagatgacaggatagtcattgtggcctccggtgtatgcacaggatggcgtgacaccttggggtggggggttgcaaatctttcactatcatggtgccaggaccgcatgaatgacttggtgatatcactggctcacaaattcacgaagctgcaagttctatctctacgccagatcaggcctcagctagaagacagcggcgtggaggccgtggcaaaccactgccacgacctgcgcgagctggatctcagcagaagcttcaggctgagcgaccggtccttgtacgccctggcgcacgggtgccctcagcttaccaggctcaacatcagcgggtgctccagtttcagcgacgtggcgctcgtgttcctctccagccagtgcgggaacctgagatgcctgaacctgtgcgggtgtgtgagggcggcctctgacagagcgctacaggccatcgcctgttactgtggccagctgcagtcgttgaacctgggctggtgtgatggcatcactgacaagggggtgaccagcctggcttcgggatgccctgaactcagggccgtcgacctgtgcggctgtgttcttataacagatgagagcgtggttgcgctggcgaacggctgccttcacctgcgctccctgggtctctactactgccagaacatcacggaccgcgccatgtactccctggccgccaacagccgcgtgaggagtcggggccggggctgggacgcgacagcgaagagcggcggcggtggcaaggaccgggagcgggacggactggcgagcctgaacatcagccagtgcacggcgctgaccccgcccgcggtgcaggcggtgtgcgactcgttcccggcgctgcacacgtgcccggagcggcactcgctcaacatcagcgggtgcctcagcctaacctccgtgcactgcgcctgtgcgctgcaccctcaccggggccgggcgagtcatcctctccaaccacgcctactgaacgcaatgcgtgaataggcggcgatgctcagatgtgtggataggccgttcaaccgtgagcgacggtgtccgctgtttatgtgaggtgcttgttttgtgtttaggcgtcaaggcgtgtacttggggtctctactctctagggaaccgtgtagaagcaaccgagttgagttcatcgtctgtaaaaacatggactgtatctgactatctgttgtcatgtcttttgagatcttt

SEQ ID NO: 21728 - protein, 387 aa, Zea mays subsp. mays
  misc_feature (1)..(387): Ceres Seq. ID no. 12405851
MDSAQQPTGELNNSFDTLMVSGGDQSRQPQDAGNETSFTNWKDLPMELLLRIISLVGDDRIVIVASGVCTGWRDTLGWGVANLSLSWCQDRMNDLVISLAHKFTKLQVLSLRQIRPQLEDSGVEAVANHCHDLRELDLSRSFRLSDRSLYALAHGCPQLTRLNISGCSSFSDVALVFLSSQCGNLRCLNLCGCVRAASDRALQAIACYCGQLQSLNLGWCDGITDKGVTSLASGCPELRAVDLCGCVLITDESVVALANGCLHLRSLGLYYCQNITDRAMYSLAANSRVRSRGRGWDATAKSGGGGKDRERDGLASLNISQCTALTPPAVQAVCDSFPALHTCPERHSLNISGCLSLTSVHCACALHPHRGRASHPLQPRLLNAMRE

SEQ ID NO: 21729 - protein, 369 aa, Zea mays subsp. mays
  misc_feature (1)..(369): Ceres Seq. ID no. 12405852
MVSGGDQSRQPQDAGNETSFTNWKDLPMELLLRIISLVGDDRIVIVASGVCTGWRDTLGWGVANLSLSWCQDRMNDLVISLAHKFTKLQVLSLRQIRPQLEDSGVEAVANHCHDLRELDLSRSFRLSDRSLYALAHGCPQLTRLNISGCSSFSDVALVFLSSQCGNLRCLNLCGCVRAASDRALQAIACYCGQLQSLNLGWCDGITDKGVTSLASGCPELRAVDLCGCVLITDESVVALANGCLHLRSLGLYYCQNITDRAMYSLAANSRVRSRGRGWDATAKSGGGGKDRERDGLASLNISQCTALTPPAVQAVCDSFPALHTCPERHSLNISGCLSLTSVHCACALHPHRGRASHPLQPRLLNAMRE

SEQ ID NO: 21730 - protein, 342 aa, Zea mays subsp. mays
  misc_feature (1)..(342): Ceres Seq. ID no. 12405853
MELLLRIISLVGDDRIVIVASGVCTGWRDTLGWGVANLSLSWCQDRMNDLVISLAHKFTKLQVLSLRQIRPQLEDSGVEAVANHCHDLRELDLSRSFRLSDRSLYALAHGCPQLTRLNISGCSSFSDVALVFLSSQCGNLRCLNLCGCVRAASDRALQAIACYCGQLQSLNLGWCDGITDKGVTSLASGCPELRAVDLCGCVLITDESVVALANGCLHLRSLGLYYCQNITDRAMYSLAANSRVRSRGRGWDATAKSGGGGKDRERDGLASLNISQCTALTPPAVQAVCDSFPALHTCPERHSLNISGCLSLTSVHCACALHPHRGRASHPLQPRLLNAMRE

SEQ ID NO: 21731 - DNA, 1347 bp, Zea mays subsp. mays
  misc_feature (1)..(1347): Ceres Seq. ID no. 12405869
accaatacagcactggaccactatatatccccccgccccgcgctggggccggtccccagctagcgagcgccgccggtgccagtgcaacagaacacgcaccacacgggcgcagactgcagagacaacagatcgatcgtccaatggcgatcggcgggtcggaggccggcgggggaggcgcggggagcatgaggagcgtgctggtgacgggcggcgcggggttcatcggcacgcacacggtgctgcgcctgctggagcagggctacatcgtcaccgtcgtcgacaacttccacaactccgtccccgaggcgctcgaccgcgtccgcctcatcgccggccccgcgctctccacccgcctcgacttcatccgcggggacctgaggaacaccgatgacttggagaaggtgttcgctgccaggaggtacgacgccgtcatccacttcgctgggctgaaggccgtgggggagagcgtcgcgcacccggagatgtactacgagaacaacctcatcggcaccatcaacctctacaagagcatgaaggagcacggctgcaagaagctggttttctcgtcatccgccaccgtgtacggctggccggaggtgatcccatgcgtcgaggactccaagctgcaggccgccaacccatacggcaggaccaagcttatccttgaggatatggcgcgtgactaccaccgcgcggacacggagtggagcatcgtcctgctgcgctacttcaaccccatcggtgcgcacagctccggcgagatcggagaggaccccaaggggataccgaacaacctgctgccctacatccagcaggtcgccgtcggcaggctccccgagctcaacgtctacggccacgattaccccacccgggacggcaccgcgatcagggactacatacacgtcgtcgacctcgccgatgggcacatcgcagcgctcaagaagctcttcgactctcctgatataggttgtgtggcctacaatctgggtacagggcgcggcacatccgttctggagatggtggcggcgttcaagaaggcctccggcaaggagattcccaccaagttgtgccccaggagaccgggtgacgcgacggaggtttacgcgtccactgagaaggctgaaagagagcttgcatggagggcccaatatggaatcgaggagatgtgcagggaccaatggaactgggccaagaagaacccgtatggctactgcggcggtgcaaaaaaatagcgtaggttcgtcgcaatgaagaattgtcgatagtagttctcttctctacactaatcaatggaacatgtaataaacacggaccacctaatctctactagtttctatggtttccact

SEQ ID NO: 21732 - protein, 409 aa, Zea mays subsp. mays
  misc_feature (1)..(409): Ceres Seq. ID no. 12405870
QYSTGPLYIPPPRAGAGPQLASAAGASATEHAPHGRRLQRQQIDRPMAIGGSEAGGGGAGSMRSVLVTGGAGFIGTHTVLRLLEQGYIVTVVDNFHNSVPEALDRVRLIAGPALSTRLDFIRGDLRNTDDLEKVFAARRYDAVIHFAGLKAVGESVAHPEMYYENNLIGTINLYKSMKEHGCKKLVFSSSATVYGWPEVIPCVEDSKLQAANPYGRTKLILEDMARDYHRADTEWSIVLLRYFNPIGAHSSGEIGEDPKGIPNNLLPYIQQVAVGRLPELNVYGHDYPTRDGTAIRDYIHVVDLADGHIAALKKLFDSPDIGCVAYNLGTGRGTSVLEMVAAFKKASGKEIPTKLCPRRPGDATEVYASTEKAERELAWRAQYGIEEMCRDQWNWAKKNPYGYCGGAKK

SEQ ID NO: 21733 - protein, 363 aa, Zea mays subsp. mays
  misc_feature (1)..(363): Ceres Seq. ID no. 12405871
MAIGGSEAGGGGAGSMRSVLVTGGAGFIGTHTVLRLLEQGYIVTVVDNFHNSVPEALDRVRLIAGPALSTRLDFIRGDLRNTDDLEKVFAARRYDAVIHFAGLKAVGESVAHPEMYYENNLIGTINLYKSMKEHGCKKLVFSSSATVYGWPEVIPCVEDSKLQAANPYGRTKLILEDMARDYHRADTEWSIVLLRYFNPIGAHSSGEIGEDPKGIPNNLLPYIQQVAVGRLPELNVYGHDYPTRDGTAIRDYIHVVDLADGHIAALKKLFDSPDIGCVAYNLGTGRGTSVLEMVAAFKKASGKEIPTKLCPRRPGDATEVYASTEKAERELAWRAQYGIEEMCRDQWNWAKKNPYGYCGGAKK

SEQ ID NO: 21734 - protein, 348 aa, Zea mays subsp. mays
  misc_feature (1)..(348): Ceres Seq. ID no. 12405872
MRSVLVTGGAGFIGTHTVLRLLEQGYIVTVVDNFHNSVPEALDRVRLIAGPALSTRLDFIRGDLRNTDDLEKVFAARRYDAVIHFAGLKAVGESVAHPEMYYENNLIGTINLYKSMKEHGCKKLVFSSSATVYGWPEVIPCVEDSKLQAANPYGRTKLILEDMARDYHRADTEWSIVLLRYFNPIGAHSSGEIGEDPKGIPNNLLPYIQQVAVGRLPELNVYGHDYPTRDGTAIRDYIHVVDLADGHIAALKKLFDSPDIGCVAYNLGTGRGTSVLEMVAAFKKASGKEIPTKLCPRRPGDATEVYASTEKAERELAWRAQYGIEEMCRDQWNWAKKNPYGYCGGAKK

SEQ ID NO: 21735 - DNA, 1671 bp, Zea mays subsp. mays
  misc_feature (1)..(1671): Ceres Seq. ID no. 12405914
gtttccacattttgttgcgctcctttagcgccggcggcccgtagcctcatcatcatttccattccatccggtttcttccgacgacggtgtgtacagagagcaggatcggacaagtctctgctggtagaagcatggcgcagcgccggctgttgggcacggcgccggcgcccgcgggcgatgcggcgtcgcacggctcgggctccagccccgacgcgatgcggatcatggtgggcgtgctggtaacggtcatcgtctgcacgctgctctactgcgtctactgctggcggtggcggaagcgcaatggtgaaactgcgctctgctgccatccgagatccctgctggacagcctatggcggcggtcgagctcggacctgccgctcatggacctcgcctccatcctcgctgccaccgacaacttctccaaggccaacaagctcggcgagggcggcttcggccccgtctacagaggcgtgctgagcggcggctccgagatcgccgtgaagcgtctgtcggcgcggtcgcggcagggcgcggcggagttccggaacgaggtggagctcatcgccaagctgcagcaccgcaacctagtgcggctgctgggctggtgcgccgagcgcgaggagaagctgctggtgtacgagtacctccccaaccgcagcctcgacgccttcctcttcgatccgagcaagagtgcgcagcttgggtggagcacccggcacaacgtgatcctgggcatcgcccgcggcctgctgtacctccacgaggactcgctgctgaaggtggtccaccgggacctcaaggccagcaacgtgctgctcgaccacaagatgagcccaaagatctccgacttcggcatggccaagatcttcgaggacgactccgacgcgatcaacacgggccgcgtcgtcgggacctacgggtacatggcgcccgagttcgcgttggacggcgtcttctcggtgaagtcggacgtgttcagcttcggggtcctcctgctggagatcttgagcgggcaacggaacggcgctttgtacctcgaggaacaccagcagtccctcatccaagacgcatggaagctgtggagtgaagaccgcgcggccgagttcatggaccagtcgctggggcggtcctactccaaggacgaggcgtggcggtgctaccacgtcggcctgctctgcgtgcaggaggaccccgacgtccgccccaccatgtccaacgtcctgctcatgctcatcagcgaccacaccaagttacccgagccagccatgccgcccttgttcgcgcggctcaggaacatctccttgctggcgccgccactcactaccaaaaccgagtccaccacgtctccgctgtcgatcaacgacgtctccatcaccatgatcgaaccgcgatgagctcatgcgttttctacttctgacaactgagggagaggcttcgagtgtaaatttataagactgcaatcgttcagaatgactactcctatgtactagtaagtttttttttatgctgtgcacaagtgtgggatttaactactagactagaacatgcggcgcccgtaatcgggtcataacagatttttttttatgtttatgcattctcctatgtgatccaatggactaaaatgtgtcaccactgctagcaaagaccatataactattttaattagtttgt

SEQ ID NO: 21736 - protein, 420 aa, Zea mays subsp. mays
  misc_feature (1)..(420): Ceres Seq. ID no. 12405915
MAQRRLLGTAPAPAGDAASHGSGSSPDAMRIMVGVLVTVIVCTLLYCVYCWRWRKRNGETALCCHPRSLLDSLWRRSSSDLPLMDLASILAATDNFSKANKLGEGGFGPVYRGVLSGGSEIAVKRLSARSRQGAAEFRNEVELIAKLQHRNLVRLLGWCAEREEKLLVYEYLPNRSLDAFLFDPSKSAQLGWSTRHNVILGIARGLLYLHEDSLLKVVHRDLKASNVLLDHKMSPKISDFGMAKIFEDDSDAINTGRVVGTYGYMAPEFALDGVFSVKSDVFSFGVLLLEILSGQRNGALYLEEHQQSLIQDAWKLWSEDRAAEFMDQSLGRSYSKDEAWRCYHVGLLCVQEDPDVRPTMSNVLLMLISDHTKLPEPAMPPLFARLRNISLLAPPLTTKTESTTSPLSINDVSITMIEPR

SEQ ID NO: 21737 - protein, 392 aa, Zea mays subsp. mays
  misc_feature (1)..(392): Ceres Seq. ID no. 12405916
MRIMVGVLVTVIVCTLLYCVYCWRWRKRNGETALCCHPRSLLDSLWRRSSSDLPLMDLASILAATDNFSKANKLGEGGFGPVYRGVLSGGSEIAVKRLSARSRQGAAEFRNEVELIAKLQHRNLVRLLGWCAEREEKLLVYEYLPNRSLDAFLFDPSKSAQLGWSTRHNVILGIARGLLYLHEDSLLKVVHRDLKASNVLLDHKMSPKISDFGMAKIFEDDSDAINTGRVVGTYGYMAPEFALDGVFSVKSDVFSFGVLLLEILSGQRNGALYLEEHQQSLIQDAWKLWSEDRAAEFMDQSLGRSYSKDEAWRCYHVGLLCVQEDPDVRPTMSNVLLMLISDHTKLPEPAMPPLFARLRNISLLAPPLTTKTESTTSPLSINDVSITMIEPR

SEQ ID NO: 21738 - protein, 389 aa, Zea mays subsp. mays
  misc_feature (1)..(389): Ceres Seq. ID no. 12405917
MVGVLVTVIVCTLLYCVYCWRWRKRNGETALCCHPRSLLDSLWRRSSSDLPLMDLASILAATDNFSKANKLGEGGFGPVYRGVLSGGSEIAVKRLSARSRQGAAEFRNEVELIAKLQHRNLVRLLGWCAEREEKLLVYEYLPNRSLDAFLFDPSKSAQLGWSTRHNVILGIARGLLYLHEDSLLKVVHRDLKASNVLLDHKMSPKISDFGMAKIFEDDSDAINTGRVVGTYGYMAPEFALDGVFSVKSDVFSFGVLLLEILSGQRNGALYLEEHQQSLIQDAWKLWSEDRAAEFMDQSLGRSYSKDEAWRCYHVGLLCVQEDPDVRPTMSNVLLMLISDHTKLPEPAMPPLFARLRNISLLAPPLTTKTESTTSPLSINDVSITMIEPR

SEQ ID NO: 21739 - DNA, 1404 bp, Zea mays subsp. mays
  misc_feature (1)..(1404): Ceres Seq. ID no. 12405937
acctttcgccgattccaccggccaccgtgccttcctccaccaccagccgcggcacacccgcggaaccgccgctcgagctcgcgcctgaaccccccaaactctgccaaatttcgccaaatccagccggtcggaccccgcaacacatcgccaaaaccaaccgggccggccgacacaagccgcagcccgtggcgatggacctggcgtcgagcgaccttgcggcgctgggcgcggcggagctggtccgcgtctcggcgtcgatcccgcgcgcggctccccgcaccttcgcgctgctcaccgcctgctctcgtcttcccgctctccttcgccgtgctcgcgcactccctcttcacccaccccatcctgctccgcatccagcgcgccacccactccgagctagcgcagtggctcaggctcttcgcctaccagttcctctacctcatcgtcctcttcaccttctccctcctctccaccgccgccgccgtcttcaccgtcgcctccctctacgccaacaagcccgcgtccatctcctcctcgctcaccgcgctgccccccatcctgccccgcctcctccgcaccttcctctgggtctcccttctcatgctcgcctaccacctcgtcttcgcgctcaccgtcctcctgctcatcgtcgtcttcatccccaacgcgtccgagtccgagtccgcgccgccctccctcgccttcgtactcttcctcgtcgtcgtcgtcttcgtcttcctcgggatccacgtctacatctccgcgctgtggcacctcgccagcgtcatctccgtgctcgagccgctctgcggactcgccgccatggccaagagcaaggatctgctccagggccgcaccggcaccgcagccacgcttgtcgtctcctacttcgcggtctgcggcgtcacctccgtgctgttccgtgccgccgtcgttaaggggcgcgccgaggaggggagcttcggtctggccttgcccgggcggctgcttgtcggcgccgtgctgctgtgcgttcttgtctgtgtcaatttgctgggactgctcgtgcagagcgtcttctactacgcctgcaaggccttccacaaccagcagattgaccggactgcgttgtatgagcaccttggagggtaccttggggagtacgtgccactcaagagcaatatccagatggagaacctttgagattggagcataggacaagggtaagttactcacctcattgcttcatactagcagtttcatgtggatctttatcagaatatgagtatggcttacaaggggctatctggtcttgttgattctagtaccatgtagtagtttataatctgtataagtggtaatgcacagtatggaaccaatctgtggaatggaagtatggaacagagatgcatgaacaaggttgccttt

SEQ ID NO: 21740 - protein, 392 aa, Zea mays subsp. mays
  misc_feature (1)..(392): Ceres Seq. ID no. 12405938
TFRRFHRPPCLPPPPAAAHPRNRRSSSRLNPPNSAKFRQIQPVGPRNTSPKPTGPADTSRSPWRWTWRRATLRRWARRSWSASRRRSRARLPAPSRCSPPALVFPLSFAVLAHSLFTHPILLRIQRATHSELAQWLRLFAYQFLYLIVLFTFSLLSTAAAVFTVASLYANKPASISSSLTALPPILPRLLRTFLWVSLLMLAYHLVFALTVLLLIVVFIPNASESESAPPSLAFVLFLVVVVFVFLGIHVYISALWHLASVISVLEPLCGLAAMAKSKDLLQGRTGTAATLVVSYFAVCGVTSVLFRAAVVKGRAEEGSFGLALPGRLLVGAVLLCVLVCVNLLGLLVQSVFYYACKAFHNQQIDRTALYEHLGGYLGEYVPLKSNIQMENL

SEQ ID NO: 21741 - protein, 310 aa, Zea mays subsp. mays
  misc_feature (1)..(310): Ceres Seq. ID no. 12405939
LSPIPPATVPSSTTSRGTPAEPPLELAPEPPKLCQISPNPAGRTPQHIAKTNRAGRHKPQPVAMDLASSDLAALGAAELVRVSASIPRAAPRTFALLTACSRLPALLRRARALPLHPPHPAPHPARHPLRASAVAQALRLPVPLPHRPLHLLPPLHRRRRLHRRLPLRQQARVHLLLAHRAAPHPAPPPPHLPLGLPSHARLPPRLRAHRPPAHRRLHPQRVRVRVRAALPRLRTLPRRRRLRLPRDPRLHLRAVAPRQRHLRARAALRTRRHGQEQGSAPGPHRHRSHACRLLLRGLRRHLRAVPCRRR

SEQ ID NO: 21742 - protein, 247 aa, Zea mays subsp. mays
  misc_feature (1)..(247): Ceres Seq. ID no. 12405940
MDLASSDLAALGAAELVRVSASIPRAAPRTFALLTACSRLPALLRRARALPLHPPHPAPHPARHPLRASAVAQALRLPVPLPHRPLHLLPPLHRRRRLHRRLPLRQQARVHLLLAHRAAPHPAPPPPHLPLGLPSHARLPPRLRAHRPPAHRRLHPQRVRVRVRAALPRLRTLPRRRRLRLPRDPRLHLRAVAPRQRHLRARAALRTRRHGQEQGSAPGPHRHRSHACRLLLRGLRRHLRAVPCRRR

SEQ ID NO: 21743 - DNA, 1753 bp, Zea mays subsp. mays
  misc_feature (1)..(1753): Ceres Seq. ID no. 12405941
agcaatagactggtcaccactcacgagagcagaaaacaaacaatgcctccttacctgctcgctgccggcgcgcttatcgtcttcctgtacatcatcaagaaccgcaggagcagaaagctcccgccatccccgccgtcgctaccgctgatcggccaccttcacctcatcggccgcgtcgcgcaccgatccttgctagagctgcaggttcgctatggcggcggcggcggtctcctcttcctgcaactcgggcgcagaccgaccttggtcgtgtccactgcggccgcggccgcggatctgttcaagaaccacgacctcgctttcgcctcccgcccacgcagcgtgggaggggataagctgatgtatgagtgcagcaacgtgtcgttcgcgccttacggcgagaactggcgccggggcaagaagatcgctgtggtccacctcctctctccacggcgcgtggaatcgttcgcgcccgtaagggccgccgaggtagccgcgctcgtcgcacggacacgccgcaccgcggaggctggggaggccgtggagttgagggagctcctgaacggctacgccaacgcggtggccacccgcgcggccaccggtgccgctggggcgacagcagagaagctgaaagagctgatggggaactccgagcccgaggcgctgatggcgggcttccaacccgaagacgtgctgccggacgcaccggcgaggttcgtgagatgggtgacgggcctcaataagaagctcgaagacttggtggagtcgtgggacaagttcctgtccgatatagtggccgcacacaaggagaaggggggtggcgacgcagaggaggatgaggacttcttggatgtcttgcttcggctgcgggaagaaggcgcagatgggctcgagctcacagacgatcgcatcaaagctaccgtcaaggacatgatagcggctgcaactgaaacatcgtcccaaacgctggaatggaccatggccgaactcattgccaacccgcgggtgatgagcaagctccaaggcgagatagcgcgagtcgtcagcgccgatcagacgaccatcgctgaaccggacctgaacaaaatggagtacctgagggcagtgttcaaagaggtgcttcggctccacccaccagcgccgctcctcgtcccgcacgaatcaacaacgcccgcggttgtgcagggctacgagatcccggccaagacggctctcttcgtcaacgtgtgggccatcgggcgggaccctgctgtgtgggacgcaccggacgagttccgcccagagcggttcgtgggcggcagtccctcggtggacttcagaggtactactaccagctcatcccgttcggcgccggccggaggatctgccccggcatcaacttcgcgctgccggtcttggagctcgcgcttgtcagccttctgcaccacttcgaatgggagctccccgccggcgtgggaaaagcggacctcgacgtgggcgaggcgccggggatgacgacgccgcggcggattccgctcgtccttgtccccaagtgcaggacgctcgttcagccagcgctgcagtagcgcgaggaatttcatgtgtctccatgcagtggcggaaccagaaatatttaagagcttgggtaaaaaataatacttatactgtaaatatgtagctttgtctaatttttacctgtgtttaactatattttactacttgttgtatgtgtataagttcactagcaataatggaggagcctatgctcttgcccccg

SEQ ID NO: 21744 - protein, 496 aa, Zea mays subsp. mays
  misc_feature (1)..(496): Ceres Seq. ID no. 12405942
SNRLVTTHESRKQTMPPYLLAAGALIVFLYIIKNRRSRKLPPSPPSLPLIGHLHLIGRVAHRSLLELQVRYGGGGGLLFLQLGRRPTLVVSTAAAAADLFKNHDLAFASRPRSVGGDKLMYECSNVSFAPYGENWRRGKKIAVVHLLSPRRVESFAPVRAAEVAALVARTRRTAEAGEAVELRELLNGYANAVATRAATGAAGATAEKLKELMGNSEPEALMAGFQPEDVLPDAPARFVRWVTGLNKKLEDLVESWDKFLSDIVAAHKEKGGGDAEEDEDFLDVLLRLREEGADGLELTDDRIKATVKDMIAAATETSSQTLEWTMAELIANPRVMSKLQGEIARVVSADQTTIAEPDLNKMEYLRAVFKEVLRLHPPAPLLVPHESTTPAVVQGYEIPAKTALFVNVWAIGRDPAVWDAPDEFRPERFVGGSPSVDFRGTTTSSSRSAPAGGSAPASTSRCRSWSSRLSAFCTTSNGSSPPAWEKRTSTWARRRG

SEQ ID NO: 21745 - protein, 482 aa, Zea mays subsp. mays
  misc_feature (1)..(482): Ceres Seq. ID no. 12405943
MPPYLLAAGALIVFLYIIKNRRSRKLPPSPPSLPLIGHLHLIGRVAHRSLLELQVRYGGGGGLLFLQLGRRPTLVVSTAAAAADLFKNHDLAFASRPRSVGGDKLMYECSNVSFAPYGENWRRGKKIAVVHLLSPRRVESFAPVRAAEVAALVARTRRTAEAGEAVELRELLNGYANAVATRAATGAAGATAEKLKELMGNSEPEALMAGFQPEDVLPDAPARFVRWVTGLNKKLEDLVESWDKFLSDIVAAHKEKGGGDAEEDEDFLDVLLRLREEGADGLELTDDRIKATVKDMIAAATETSSQTLEWTMAELIANPRVMSKLQGEIARVVSADQTTIAEPDLNKMEYLRAVFKEVLRLHPPAPLLVPHESTTPAVVQGYEIPAKTALFVNVWAIGRDPAVWDAPDEFRPERFVGGSPSVDFRGTTTSSSRSAPAGGSAPASTSRCRSWSSRLSAFCTTSNGSSPPAWEKRTSTWARRRG

SEQ ID NO: 21746 - protein, 377 aa, Zea mays subsp. mays
  misc_feature (1)..(377): Ceres Seq. ID no. 12405944
MYECSNVSFAPYGENWRRGKKIAVVHLLSPRRVESFAPVRAAEVAALVARTRRTAEAGEAVELRELLNGYANAVATRAATGAAGATAEKLKELMGNSEPEALMAGFQPEDVLPDAPARFVRWVTGLNKKLEDLVESWDKFLSDIVAAHKEKGGGDAEEDEDFLDVLLRLREEGADGLELTDDRIKATVKDMIAAATETSSQTLEWTMAELIANPRVMSKLQGEIARVVSADQTTIAEPDLNKMEYLRAVFKEVLRLHPPAPLLVPHESTTPAVVQGYEIPAKTALFVNVWAIGRDPAVWDAPDEFRPERFVGGSPSVDFRGTTTSSSRSAPAGGSAPASTSRCRSWSSRLSAFCTTSNGSSPPAWEKRTSTWARRRG

SEQ ID NO: 21747 - DNA, 1989 bp, Zea mays subsp. mays
  misc_feature (1)..(1989): Ceres Seq. ID no. 12405971
gcacgagaccttacctagaacatcctaatcgaaaaggaaacatctcgtcgacccaaacccatccacccacaaggcggaatacacgatccagtccgatcctcgccccgcgcgctgctccaaaccctggcgatgtcgacggcggcggccgcgaagactccgatcaaggccctgggctccgcggccgcgggtgccatgactccgaccaaatctcagccccccgcggcggccaagacgccctgtacctctcgcgcgcggtcctcccacgcatccgagaattccaaccccaacatcccgggcacgccgcctcccccgcagtcgacgccgtccaagcccagcctgaactccccggcgggcgcgggagccaggtccgccaccgcgaagaaaaagccctccacgcccgcgcccgccgcgccaccgctggagcgggagcggcgattcctcgtggcgaagaagggcgcgcggcggaggcgcaacgtcgggaccatgggacgcggcgggggcggccgcgggggagagatcgacttcgacaagtgccgcgaggcccgctcgcgaggcgctacgcgcgtcgcagggggagttcttccgcaaggagctcgccgcatccacagccaccggagaggatcaattgggacaggaggaggaggggaagccgctggctgaagaggatgtgaaaggtggagcattcgaggagcggcaggaggaggagaccgacgcggagctggaggggagcagcaaggttagggcgatgaggacgaaggcgatggctaaggcgatgagcagcgttccgaatcctggctctggccgcgtcaagcacatggtgcaggccttcgagagcctgctcaacatctccggcgccacctccgacgctgaaagggccggtgagggctcatgggcgctgcccgggttgcagctatggaaggaggatgataagggtgatctggggttcccaccagtgtcggtgttctcttctgctgatttccagaatgcagggtctaatcgactctgctcgtcactagatggaaacaccgtcaggtcgagctgggacagcagaacatcgactggcgagtgcagcaggagaaattcatctgagtcactaaggagaagaacatcggctggcggggcgcagaagcaggagaaactcatctgagtcactaaggagcagctggaacaaaaagctcaaggtcaccagccagcatccattcaagttgaggacagagcaaaggggaaagtttaaggaacagcagttcgtccaaaaggtgcaagagatgcttgcagaggaagagaagaagcgtattcatattgcgcaaggattgccatggactaccgatgaacccgagtgcttgataaagcctgcagtcaaagaaagaactgagcctatagaccttgttttgcatagcgatgtgcgtgctcttgaacgtgcagaatttgatcagcatgttttggataggaacaagttcgctgagcaacaaagattagaatgggaaaggcaacaggaattagacgaacaagaaaggataaggcaactgaggagaaccgagctgattcctaaagctcagcccatgccatactttgaccgcccattcatccccaaaaggtccacaaaacctgctacagttcccatggaaccgaaattctacctcaggccagaaaagctatcctgttactatcgacagcaatgtatggagcttggaaagctgaatccacaacatcagtgccaacatccgctcgcaatcgagaaatgcagagcatcgacacacatgatcaaacaactgtttccatttcctggcatcgtcttattcattcttgattcgtcttcttccatgtgcgaagaaattgctatcaagcgtgtttttgtagctttgcttggatcgccttgcctccaagttctgttaatcgctggctctgtgcttcagatgcaatcccaccgaggtttgaaatttgtcgttcaagaaactgataaggaaattcaaggatgaattttctgtggtc

SEQ ID NO: 21748 - protein, 236 aa, Zea mays subsp. mays
  misc_feature (1)..(236): Ceres Seq. ID no. 12405972
MLAEEEKKRIHIAQGLPWTTDEPECLIKPAVKERTEPIDLVLHSDVRALERAEFDQHVLDRNKFAEQQRLEWERQQELDEQERIRQLRRTELIPKAQPMPYFDRPFIPKRSTKPATVPMEPKFYLRPEKLSCYYRQQCMELGKLNPQHQCQHPLAIEKCRASTHMIKQLFPFPGIVLFILDSSSSMCEEIAIKRVFVALLGSPCLQVLLIAGSVLQMQSHRGLKFVVQETDKEIQG

SEQ ID NO: 21749 - protein, 222 aa, Zea mays subsp. mays
  misc_feature (1)..(222): Ceres Seq. ID no. 12405973
TRPYLEHPNRKGNISSTQTHPPTRRNTRSSPILAPRAAPNPGDVDGGGREDSDQGPGLRGRGCHDSDQISAPRGGQDALYLSRAVLPRIREFQPQHPGHAASPAVDAVQAQPELPGGRGSQVRHREEKALHARARRATAGAGAAIPRGEEGRAAEAQRRDHGTRRGRPRGRDRLRQVPRGPLARRYARRRGSSSARSSPHPQPPERINWDRRRRGSRWLKRM

SEQ ID NO: 21750 - protein, 176 aa, Zea mays subsp. mays
  misc_feature (1)..(176): Ceres Seq. ID no. 12405974
MSTAAAAKTPIKALGSAAAGAMTPTKSQPPAAAKTPCTSRARSSHASENSNPNIPGTPPPPQSTPSKPSLNSPAGAGARSATAKKKPSTPAPAAPPLERERRFLVAKKGARRRRNVGTMGRGGGGRGGEIDFDKCREARSRGATRVAGGVLPQGARRIHSHRRGSIGTGGGGEAAG

SEQ ID NO: 21751 - DNA, 1674 bp, Zea mays subsp. mays
  misc_feature (1)..(1674): Ceres Seq. ID no. 12405979
  misc_feature (1667)..(1667): n is a, c, t, g, unknown, or other
  misc_feature (1669)..(1669): n is a, c, t, g, unknown, or other
gcacgagaccattacctagaacatcctaatcgaaaagtttcgcctcgcgcctgccctgctgtcctgctgctgctattttgccattgcatccatttccgggggacggagtggaggagggcgtcgcctgcgctgcgttgcttcgcgtgggaagcgtagcgtgcttcgtttaggcctctcgccaatatccgagtgctaatctagagaggcctttggctttgccagacgcgcctgtacgcgccctttctgggaggcagccgcttgctctcgcctccaatggccgagatctgctgcgaagaagccaagtccacgccggcgaccgccgtggctgcggcttcagtctccgccacggccgctgcggccgccgccgtggcagtggcctcgtcggcgttagagaggaggcgacgcaggttggagatgaggaggttccgcgtcgcgggcgatcccgaggcgccggtcgcggaggacgtccgcgccgccaagcggcagaggctggcgcgcacgctgtccagcacctgccccgacgcgggctcaggctcgggctccggactcggactccgacaggcctgccctaccggagcggttgcccaggtacggggtcacctccgtctgcggccgacgccgcgagatggaggacacggtctccgttaggccggacttcgtgcccggcaccagcaaacaacacttcttcggcgtcttccgacggccacggctgctcccacgtagcaacgatgtgccagaacatgatgcacgaggtggtcgcggacgagcacaggaaggcagattgttctggcgaagagacggcgtggaaggccgtgatggagaggagcttcgcgcgactggacgagcaggccgccagctgggcgaccagccgcagccgcgacgagccctcctgcaggtgcgagcagcagaagcccttgcgttgcgatcacgtggggtccaccgccgtggtcgccgtcgtcagccccacccacgttgtcgtcgccaacgccggcgactcccgcgccgtcctatcccgcgccggcgtccccgttccgctgtccgtcgaccacaagcctgaccggcctgacgagctggcgcgcatcgaggcggcgggcggccgcgtcatttactgggacggtgctcgtgttctcggcgtcctcgccatgtctcgagccataggcgacggatacctgaanccgttcgtgtcgtcggagccggaggtaacggtgacggagcgcaccgacgacgacgagtgcctggtcctggccagcgacggcctgtgggacgtcgtgaccaacgagatggcgtgcgaggtcgtccgcgcgtgcttccacagcaacggtccgccggcgccggccgctcgggcgaacggcgcggccctcccggcagccgagaacggatccgcggtcgccgagggcgtgagcgtggaggattccgacaaggcgtgctccgacgcggccatgctgctggcgaagctggcgttggcccggcggagcgccgataatgttagcgtggtcgtcgtggatctccgccgggggatatgatttgccttcttttttagccctcttggaatccaagctaatttctcccccgttttcttccatacttttagttctgttttgatttagtattaatagtagttaccaatcagacgcttttcttctctcaaacgaggaattaaaagccantnggacc

SEQ ID NO: 21752 - protein, 264 aa, Zea mays subsp. mays
  misc_feature (1)..(264): Ceres Seq. ID no. 12405980
  misc_feature (149)..(149): Xaa is any aa, unknown or other
MCQNMMHEVVADEHRKADCSGEETAWKAVMERSFARLDEQAASWATSRSRDEPSCRCEQQKPLRCDHVGSTAVVAVVSPTHVVVANAGDSRAVLSRAGVPVPLSVDHKPDRPDELARIEAAGGRVIYWDGARVLGVLAMSRAIGDGYLXPFVSSEPEVTVTERTDDDECLVLASDGLWDVVTNEMACEVVRACFHSNGPPAPAARANGAALPAAENGSAVAEGVSVEDSDKACSDAAMLLAKLALARRSADNVSVVVVDLRRGI

SEQ ID NO: 21753 - protein, 260 aa, Zea mays subsp. mays
  misc_feature (1)..(260): Ceres Seq. ID no. 12405981
  misc_feature (145)..(145): Xaa is any aa, unknown or other
MMHEVVADEHRKADCSGEETAWKAVMERSFARLDEQAASWATSRSRDEPSCRCEQQKPLRCDHVGSTAVVAVVSPTHVVVANAGDSRAVLSRAGVPVPLSVDHKPDRPDELARIEAAGGRVIYWDGARVLGVLAMSRAIGDGYLXPFVSSEPEVTVTERTDDDECLVLASDGLWDVVTNEMACEVVRACFHSNGPPAPAARANGAALPAAENGSAVAEGVSVEDSDKACSDAAMLLAKLALARRSADNVSVVVVDLRRGI

SEQ ID NO: 21754 - protein, 259 aa, Zea mays subsp. mays
  misc_feature (1)..(259): Ceres Seq. ID no. 12405982
  misc_feature (144)..(144): Xaa is any aa, unknown or other
MHEVVADEHRKADCSGEETAWKAVMERSFARLDEQAASWATSRSRDEPSCRCEQQKPLRCDHVGSTAVVAVVSPTHVVVANAGDSRAVLSRAGVPVPLSVDHKPDRPDELARIEAAGGRVIYWDGARVLGVLAMSRAIGDGYLXPFVSSEPEVTVTERTDDDECLVLASDGLWDVVTNEMACEVVRACFHSNGPPAPAARANGAALPAAENGSAVAEGVSVEDSDKACSDAAMLLAKLALARRSADNVSVVVVDLRRGI

SEQ ID NO: 21755 - DNA, 1567 bp, Zea mays subsp. mays
  misc_feature (1)..(1567): Ceres Seq. ID no. 12405983
aactctatacagaaaccctggtctgaaagccctcactccaaatctcgcgcactgtcagctgacgccaccgcctgcgccagccctcgccaagccggtgaaaacctcgtgccctccgccgcctccgcccgcctcttccagagtaccgcggtctcatctcctcccgggacgggcatgcagagcacggctgccatcggtctcgttcggccatgcgccgcgcggccactccccacctaccctagcccacggcgcggcgccggcgcgtgcagcggcgccgcacagccgatcctcgcgccccgcggcctctgcctctccgcccgcgccagcctactgccggactcgccgctggaggaggagtaccggagatgcagggccggccggcacgtggccgcggccgggaaggtggcggcggctgatggggccgtagaggaagcggggggagggctcgtcaagacgctgcagctggggtcgctcttcgggctctggtacctcttcaacatctacttcaacatctacaacaagcaggttctgaaggttctgccataccctataaacatcaccacagtgcagtttgccgttggaagtgcccattgctttgtttatgtggatcaccggtatccttaaaaggccaaagatttctggtgcccagctttttgctatccttcctctagctatcgttcataccatgggcaatcttttcacaaacatgagccttggaaaggttgcggtgtcatttacacatactatcaaggccatggaacctttcttctcagttctcctttcagcaattttccttggtgagttgcctacgccttgggttgtgttgtctcttcttccgatcgttggtggtgtggcattggcatcccttactgaggcctcctttaactgggctggattttggagtgcaatggcttcaaatgtaaccttccagtcaaggaatgtgctaagcaagaaacttatggtgaagaaagaggaatctctcgacaacattaatctattttcgataattacagtcatgtcattcttcctgttggccccggtaaccttacttacagaaggtgttaaagttagtccagcagttttgcagtctgctggtttgaacttgaaacagatatacacaaggtcattgattgctgcatgctgcttccatgcataccaacaggtgtcatacatgatcctcgccagggtatccccagtcacacattcagtgggcaattgcgtcaagcgtgtggtggtcattgtgacctcggttctgttcttcaggacccctgtttctcccatcaactcactcggtaccgggatcgctcttgctggagttttcctatactcgcaattgaagaggcttaagcccaagcccaaggctgcttgatcatagacctttgcaggtccatccaatagaacttttgaagttatgctatgccattggaatgattagtgagtgccgtagttagaatgatgtttaaagaagagctaccacttcagcagataatttgtgacttgcttgcattttttggacggatttgttcgtgtattaataattttgcagtgacgatacttctgttgtgctgct

SEQ ID NO: 21756 - protein, 255 aa, Zea mays subsp. mays; identical to SEQ ID NO: 18865
  misc_feature (1)..(255): Ceres Seq. ID no. 12405984

SEQ ID NO: 21757 - protein, 227 aa, Zea mays subsp. mays; identical to SEQ ID NO: 18866
  misc_feature (1)..(227): Ceres Seq. ID no. 12405985

SEQ ID NO: 21758 - protein, 220 aa, Zea mays subsp. mays; identical to SEQ ID NO: 18867
  misc_feature (1)..(220): Ceres Seq. ID no. 12405986

SEQ ID NO: 21759 - DNA, 1865 bp, Zea mays subsp. mays
  misc_feature (1)..(1865): Ceres Seq. ID no. 12406164
gaaaaatcggtttctcggaagcctgtcaaacacggactggcttagtcaaagccggctttcagacatataatcgcgctcgccgtcgtgcgcacggcagtcggcaggcagtaccggagcagccgtgccaggccccatggacagctcgagcggcatgtgggccgtgctcggccaggcctcgaacgtggcgcagctggtcggcgtggacgcgctcgggctggtgtccatggtcgtgcaggccgcgctggcggcgcgccgccaccgcgacgcgtgccgccggctggcgcagcacgtggaggtcgtcggcggcctgctgcgggagctggagctcgccgagctgatgcggcgggaggccacgcggcggccgctcgaccagctccgggccgcgctgcggcggtgctacgcgctcgtcacggcgtgccaggactgcgggtacctccgcagcctgctcctcggcgcccggatggccgacgagctccgcgcggcggagaaggaggtcgacttgttcatccgcttagtcccacttatcgccctcgtcgacagcacgcatggtcgcagtggcaagactgccgagggagtaccaggtctactcacgaacggttcaaaccatcatgtcaggttttcaagaagtgtttccgcctccatcaaaatacacattcaacgaactactcaaatctgcagtattgcagaacagccattagcaggagcactggacttgggagaacataaaaatctggactttgaagaattgttggagctttgcatccgtactcaagagagttgctcaggattcagaaggtttttgaattatttcagatcattgacgctacaggcaatttcccggaaagtagaatcatcgggtcgggtggttttgctatagtttacaagggtcagttacctgatggatccatggtcgccatcaaaaggatggatgaaggtgccacaatgtttgatttcagcagtgaatttctggctgcgaggcttcagcataccaatctaattagacttttggggtggtgtatccatgggaaagaaaggattctagtgtatgagttcatgcacaagggtaccctgcacagtttaatctttgacaaaagaatggggttgttgctagactggtctaaacgaatcgatataatcagaggggtagctgaaggacttctttaccttcacaaacagtccaagttatggattgttcatagggatttgaagcccaggaacgtcctattagatcatgacatgaagccaaagcttgctgattttggatcggctagaactctgacttcggattccgctgaagagtgtacaagcagggttgtggggactagtggctacaaagctcctgagtacacgtctcgaggtgtctattcactgaagacagatgtgttcagcttcggggtggtggttctagtgaccatcagcggncgagagaacnccatactggagaagcaaggagactctgttggcacccttgtacgagatgcctggcagctatggaacgatggaaggctgcatgagcttgtagatccagtgctgggtgacggattcgaacttgctgaggtggcgcaggaggagccagcagatcgtcccaccatgtccgacgtcgtgtcgctcctgaactttgaaagcataggtctgctgccagatcctaagcagccgtctgagctttgtaagggaggtggtggtacttctggtgacaggttgccgacatgtggtagccagtcgagcaggaccatagacatcacaatcacaagttcagctcctgtgtcaactagaactagggtccgcatcattgtggacccagagacctaaaatgtagacataaaccgatgttaatatgtaaaagaacatggagaacttttaaggcc

SEQ ID NO: 21760 - protein, 300 aa, Zea mays subsp. mays
  misc_feature (1)..(300): Ceres Seq. ID no. 12406165
  misc_feature (172)..(172): Xaa is any aa, unknown or other
  misc_feature (176)..(176): Xaa is any aa, unknown or other
MVAIKRMDEGATMFDFSSEFLAARLQHTNLIRLLGWCIHGKERILVYEFMHKGTLHSLIFDKRMGLLLDWSKRIDIIRGVAEGLLYLHKQSKLWIVHRDLKPRNVLLDHDMKPKLADFGSARTLTSDSAEECTSRVVGTSGYKAPEYTSRGVYSLKTDVFSFGVVVLVTISXRENXILEKQGDSVGTLVRDAWQLWNDGRLHELVDPVLGDGFELAEVAQEEPADRPTMSDVVSLLNFESIGLLPDPKQPSELCKGGGGTSGDRLPTCGSQSSRTIDITITSSAPVSTRTRVRIIVDPET

SEQ ID NO: 21761 - protein, 294 aa, Zea mays subsp. mays
  misc_feature (1)..(294): Ceres Seq. ID no. 12406166
  misc_feature (166)..(166): Xaa is any aa, unknown or other
  misc_feature (170)..(170): Xaa is any aa, unknown or other
MDEGATMFDFSSEFLAARLQHTNLIRLLGWCIHGKERILVYEFMHKGTLHSLIFDKRMGLLLDWSKRIDIIRGVAEGLLYLHKQSKLWIVHRDLKPRNVLLDHDMKPKLADFGSARTLTSDSAEECTSRVVGTSGYKAPEYTSRGVYSLKTDVFSFGVVVLVTISXRENXILEKQGDSVGTLVRDAWQLWNDGRLHELVDPVLGDGFELAEVAQEEPADRPTMSDVVSLLNFESIGLLPDPKQPSELCKGGGGTSGDRLPTCGSQSSRTIDITITSSAPVSTRTRVRIIVDPET

SEQ ID NO: 21762 - protein, 288 aa, Zea mays subsp. mays
  misc_feature (1)..(288): Ceres Seq. ID no. 12406167
  misc_feature (160)..(160): Xaa is any aa, unknown or other
  misc_feature (164)..(164): Xaa is any aa, unknown or other
MFDFSSEFLAARLQHTNLIRLLGWCIHGKERILVYEFMHKGTLHSLIFDKRMGLLLDWSKRIDIIRGVAEGLLYLHKQSKLWIVHRDLKPRNVLLDHDMKPKLADFGSARTLTSDSAEECTSRVVGTSGYKAPEYTSRGVYSLKTDVFSFGVVVLVTISXRENXILEKQGDSVGTLVRDAWQLWNDGRLHELVDPVLGDGFELAEVAQEEPADRPTMSDVVSLLNFESIGLLPDPKQPSELCKGGGGTSGDRLPTCGSQSSRTIDITITSSAPVSTRTRVRIIVDPET

SEQ ID NO: 21763 - DNA, 872 bp, Zea mays subsp. mays
  misc_feature (1)..(872): Ceres Seq. ID no. 12406168
atccattcccacagcaccaagcaagagcaaagagcaacacaaggcaaggcagcacacgacccgcggcgacgcaacaagagaagccagcagtcgtctggatccatcgattgacatggccatggcggcggcagcggagggcaagagccggaggttcgcgctggcctgcggggtgctgagccagtacgtgaaggccgagcagcagatggcggccgccggggcccctgccccgcgcgccccggccacgacgctgagcctcatgcccggcgcggacgtcggcgccgagcaggagccggccgccgcgagggggcaggagacggccgggtccgcctccacggcggcgccgctcaccatcttctacggcggcagggtggtcgtgttcgacgacttcccggcggagaaggcagccgaggtcatgcgcctcgcagctggcgccgagcgcccggcggccccggccccggcgccggcgccgcgcgacgacctgcctatcgcccggaaggcgtcgctgcagcggttcctggccaagcgcaaggaccgcctcgtggagcgcgccccctacgcccgcccgtccccatccgaggaggcggagaaggcgaagccggcctcctggctcgggctcggcggcacggacgccgagcgcctcaacatcgcgctgtgatttggatctcggttgctacccacccggatcgaccggtggcgatttgattggctgggttcctggcttcttttgggtcttgctggattggggttggtgtggagatcggagacggaggattgtagaaacgtattcttgttttttttctctctcccttacgagagagtttggctgttaattgattcgataatagaaagatggaggatgtacaattcgtgtc

SEQ ID NO: 21764 - protein, 217 aa, Zea mays subsp. mays
  misc_feature (1)..(217): Ceres Seq. ID no. 12406169
SIPTAPSKSKEQHKARQHTTRGDATREASSRLDPSIDMAMAAAAEGKSRRFALACGVLSQYVKAEQQMAAAGAPAPRAPATTLSLMPGADVGAEQEPAAARGQETAGSASTAAPLTIFYGGRVVVFDDFPAEKAAEVMRLAAGAERPAAPAPAPAPRDDLPIARKASLQRFLAKRKDRLVERAPYARPSPSEEAEKAKPASWLGLGGTDAERLNIAL

SEQ ID NO: 21765 - protein, 180 aa, Zea mays subsp. mays
  misc_feature (1)..(180): Ceres Seq. ID no. 12406170
MAMAAAAEGKSRRFALACGVLSQYVKAEQQMAAAGAPAPRAPATTLSLMPGADVGAEQEPAAARGQETAGSASTAAPLTIFYGGRVVVFDDFPAEKAAEVMRLAAGAERPAAPAPAPAPRDDLPIARKASLQRFLAKRKDRLVERAPYARPSPSEEAEKAKPASWLGLGGTDAERLNIAL

SEQ ID NO: 21766 - protein, 178 aa, Zea mays subsp. mays
  misc_feature (1)..(178): Ceres Seq. ID no. 12406171
MAAAAEGKSRRFALACGVLSQYVKAEQQMAAAGAPAPRAPATTLSLMPGADVGAEQEPAAARGQETAGSASTAAPLTIFYGGRVVVFDDFPAEKAAEVMRLAAGAERPAAPAPAPAPRDDLPIARKASLQRFLAKRKDRLVERAPYARPSPSEEAEKAKPASWLGLGGTDAERLNIAL

SEQ ID NO: 21767 - DNA, 1432 bp, Zea mays subsp. mays
  misc_feature (1)..(1432): Ceres Seq. ID no. 12406172
atgtccacggtcaccgtggcgagggcagccccgccgagcgttagtcacagttgttgcctgcctaccatgcggctctaactcgatccgtgcagcagacgccgagtcgcggcaaggagtagctaggaactaggaaggaggaggcagggaaaggccaggccatggcgctcgaagctgtggtgttcccgaagagcacccggggtgtacggcggtcaaggcgcgcccggcgtcgctgggctgcggcttccacaccgaggagctcgaggtcgaggacaangncggcgtggttctgcaagganaagccgccgacgcgctgccgccgcccggtggtgccgccaccacgtnggactgggacgcggtgctctgnccgtgctccactacaccagctgcaggcgccgtggaggagtgctgggacgtgcatgcagcancagcatcagctcctgtccgtgtccccgccgccctcgtccgccgtcgcagcgtcgtcgtctgggcgccgcaaggctgccgcgtcggaggcggcgcggcgacggcggcgacgccccaaggcggtgaggaacacggacgagatggagagccagcgccgcaaccacattgccgtggagcgcaaccggcggcggcagatgaacgagtacctctccgtgctccgctccgccatgccgccttcctacacgcagcggggtgaccaggcgtcgatcgtggctggtgccatcaacttcgtcaaggagctggagcaactgctgcagtcgctggaggcgcagaagcggcgacagaggtgcaccgagccattggcggcgtcgtcgttcgccggcttcttcatcttccctcagtactccaccaccgccgcgacgagtggtgcggttggctctagtagcgacagcgctggctccggcggcgatcagagtggcggcggcgggggagcgcggcgaggcgtggccgacatcgaggtgtccctggcggagagccacgccaacgtgaaggtgctcgcggcgcggcnggccgcggcagctgctgaggatggtggtggcgctgcagtgcctnggccctcaccgtgctcccacctcaccgtgaccaccaccgccgaccacctggccttgtactccctcagcctcaagatgggaggacgagtgccggctgtcgccgtcggtcgacgacatcgccgccgcggtgaacgagatactcgacgagtgcgcccgcgggggggcccactgatgattagccgcttagcctaatatatatcttagcgagtgccatgtattgttgtgacgtacgtcgatttgatcctagtacacggataacactggcaagctagcgtggcagctcgctcgcgccactgtcaggcaggcggtaccactaccactccatatgtttgcgtgcaagtaaacatgtaccgattggaccagcttacgtactactacgactctttttttgcagcgcc

SEQ ID NO: 21768 - protein, 355 aa, Zea mays subsp. mays
  misc_feature (1)..(355): Ceres Seq. ID no. 12406173
  misc_feature (39)..(39): Xaa is any aa, unknown or other
  misc_feature (40)..(40): Xaa is any aa, unknown or other
  misc_feature (46)..(46): Xaa is any aa, unknown or other
  misc_feature (62)..(62): Xaa is any aa, unknown or other
  misc_feature (69)..(69): Xaa is any aa, unknown or other
  misc_feature (89)..(89): Xaa is any aa, unknown or other
  misc_feature (278)..(278): Xaa is any aa, unknown or other
  misc_feature (293)..(293): Xaa is any aa, unknown or other
MALEAVVFPKSTRGVRRSRRARRRWAAASTPRSSRSRTXXAWFCKXKPPTRCRRPVVPPPRXTGTRCSXRAPLHQLQAPWRSAGTCMQXQHQLLSVSPPPSSAVAASSSGRRKAAASEAARRRRRRPKAVRNTDEMESQRRNHIAVERNRRRQMNEYLSVLRSAMPPSYTQRGDQASIVAGAINFVKELEQLLQSLEAQKRRQRCTEPLAASSFAGFFIFPQYSTTAATSGAVGSSSDSAGSGGDQSGGGGGARRGVADIEVSLAESHANVKVLAARXAAAAAEDGGGAAVPXPSPCSHLTVTTTADHLALYSLSLKMGGRVPAVAVGRRHRRRGERDTRRVRPRGGPLMISRLA

SEQ ID NO: 21769 - protein, 269 aa, Zea mays subsp. mays
  misc_feature (1)..(269): Ceres Seq. ID no. 12406174
  misc_feature (3)..(3): Xaa is any aa, unknown or other
  misc_feature (192)..(192): Xaa is any aa, unknown or other
  misc_feature (207)..(207): Xaa is any aa, unknown or other
MQXQHQLLSVSPPPSSAVAASSSGRRKAAASEAARRRRRRPKAVRNTDEMESQRRNHIAVERNRRRQMNEYLSVLRSAMPPSYTQRGDQASIVAGAINFVKELEQLLQSLEAQKRRQRCTEPLAASSFAGFFIFPQYSTTAATSGAVGSSSDSAGSGGDQSGGGGGARRGVADIEVSLAESHANVKVLAARXAAAAAEDGGGAAVPXPSPCSHLTVTTTADHLALYSLSLKMGGRVPAVAVGRRHRRRGERDTRRVRPRGGPLMISRLA

SEQ ID NO: 21770 - protein, 220 aa, Zea mays subsp. mays
  misc_feature (1)..(220): Ceres Seq. ID no. 12406175
  misc_feature (143)..(143): Xaa is any aa, unknown or other
  misc_feature (158)..(158): Xaa is any aa, unknown or other
MESQRRNHIAVERNRRRQMNEYLSVLRSAMPPSYTQRGDQASIVAGAINFVKELEQLLQSLEAQKRRQRCTEPLAASSFAGFFIFPQYSTTAATSGAVGSSSDSAGSGGDQSGGGGGARRGVADIEVSLAESHANVKVLAARXAAAAAEDGGGAAVPXPSPCSHLTVTTTADHLALYSLSLKMGGRVPAVAVGRRHRRRGERDTRRVRPRGGPLMISRLA

SEQ ID NO: 21771 - DNA, 1206 bp, Zea mays subsp. mays
  misc_feature (1)..(1206): Ceres Seq. ID no. 12406176
gcacgagaccattacctagaacatcctaatcaaaagatcgggctgccctgccgcctcttgctcccttcctcctctcgcccagcagcctagctacttgagcgagacgagctccagctgaggaagtgagaggtcgtggtccgagaggcgtgcgtgcgtggccatggacggcgccgaggacgacgggacggagtggatgatgcatggtgccggagggaagggaaaaggcggcggcgcgctcgacaagaacaagaagcgcttcagcgacgagcagaccaagtcgctggagtccatgttcgcgacgcaggccaagctggagccgcgccagaagctgcagctggcgcgggagctcggcctgcagccgcgccaggtcgccatctggttccagaacaagcgcgcgcgctggaagtccaagcagctggagcgcgagtactcggcgctgcgcgacgactaccacgcgctcctctgcagctacgagtccctcaaggacgagaagcgcgcgctcctcaagcagctggagaagctggccgagatgctgcacgagccgccgcagggcaagtactacggcggcaatgcggacgacgtgcgctcgggcggcgtcggcggcacgaaggaggaggaggagtccacagacgcctgcgccggggccgcgctctactcgtccgagtgcgctggcggtggcaggttcatcgcgcacttcttggcggacgacgacgtgggagcagccctcttccggccgccgtcgtctccgcagccgaccgctggcttactcacgtcgtcggggccgccggagcaccagccgttccagttccactccggctactgctggccgtcgtcgtcggcggagcagacctgcagcggctcgcaatggtgggagttcgagtccctcagcgagtgacgtacgatgatcacaagcggccgggggtcactcggttccaagcacacgtaagggccgggccaatacgagttcgttcgtagcggtctcgtcactcgtcagctagccctgcagagcaacggtgtatgcatagcttcagtagatcgaagtccaggtccaggactgcccatcaagcagtttcttcttctcgccatcgatcatcgatcatgcatgcaaaagatttttttttctctcccttgctatcagatcatgtaatccagcagaggaacatgtagagaaagatcaaacgaggttatagagagaaggtcgcctgc

SEQ ID NO: 21772 - protein, 244 aa, Zea mays subsp. mays
  misc_feature (1)..(244): Ceres Seq. ID no. 12406177
MDGAEDDGTEWMMHGAGGKGKGGGALDKNKKRFSDEQTKSLESMFATQAKLEPRQKLQLARELGLQPRQVAIWFQNKRARWKSKQLEREYSALRDDYHALLCSYESLKDEKRALLKQLEKLAEMLHEPPQGKYYGGNADDVRSGGVGGTKEEEESTDACAGAALYSSECAGGGRFIAHFLADDDVGAALFRPPSSPQPTAGLLTSSGPPEHQPFQFHSGYCWPSSSAEQTCSGSQWWEFESLSE

SEQ ID NO: 21773 - protein, 234 aa, Zea mays subsp. mays
  misc_feature (1)..(234): Ceres Seq. ID no. 12406178
MVPEGREKAAARSTRTRSASATSRPSRWSPCSRRRPSWSRARSCSWRGSSACSRARSPSGSRTSARAGSPSSWSASTRRCATTTTRSSAATSPSRTRSARSSSSWRSWPRCCTSRRRASTTAAMRTTCARAASAARRRRRSPQTPAPGPRSTRPSALAVAGSSRTSWRTTTWEQPSSGRRRLRSRPLAYSRRRGRRSTSRSSSTPATAGRRRRRSRPAAARNGGSSSPSASDVR

SEQ ID NO: 21774 - protein, 233 aa, Zea mays subsp. mays
  misc_feature (1)..(233): Ceres Seq. ID no. 12406179
MMHGAGGKGKGGGALDKNKKRFSDEQTKSLESMFATQAKLEPRQKLQLARELGLQPRQVAIWFQNKRARWKSKQLEREYSALRDDYHALLCSYESLKDEKRALLKQLEKLAEMLHEPPQGKYYGGNADDVRSGGVGGTKEEEESTDACAGAALYSSECAGGGRFIAHFLADDDVGAALFRPPSSPQPTAGLLTSSGPPEHQPFQFHSGYCWPSSSAEQTCSGSQWWEFESLSE

SEQ ID NO: 21775 - DNA, 1291 bp, Zea mays subsp. mays
  misc_feature (1)..(1291): Ceres Seq. ID no. 12406180
atataaataaagtactcaagcaatcctcgagcctcaggcccaagcaaagcatccagcggancacaccacaccacccttggtccggcactagcactagctatccagtggagacgaagatggcgacggcgcggtggctgcaggttgccgccatggcggtggcgctgctggcggagtgggcgacggcggcggcgcctcggaagcccgtggacgtgccgttccagaagaactacgtgccgacgtgggcgcaggaccacatccactacatcgacggcgggcgggaggtgcagctgtacctggacaagtccaccggcacgggcttccagacgcggggctcctacctcttcggccacttcagcatgcacatgaagctcgtcggcggcgactccgcgggcaccgtcacggccttctacctgtcgtcgcagaactcgggagcacgacgagatcgacttcgagttcctgggcaaccggacggggcagccctacatcctgcagaccaacgtgttcaccggcggcaagggcgaccgcgagcagcggatctacctctggttcgaccccaccaaggagtaccactcctactccgtcctctggaacctctacatgatcgcgttcttcgtggacgacgtgccgatccgggtgttcaagaacacgagcgccgacctgggcgtgcggtacccgttcagccagccgatgaagctctactccagcctgtggaacgccgacgactgggcgacccgcggcgggcgcgagaagacggactggtccaacgcgcccttcgtcgcctcctaccgcggcttccacgtcgacggctgcgaggcctccgcggaggcgcgcttctgcgccacccagggcgcgcgctggtgggaccagccggagttcagggacctcgacgccgcgcagtaccgccgcctggccgaggtcaggcgccgctacaccatctacaactactgcaccgatcgcgaccgctacggcgccgccgtgccgcccgagtgcgcccgcgaccgcgacgtctgatgatgatgcgttgggccggcaagctgcttgatcgagagcagcctgtaatgtatgtatggtatggtattgttgtgtgtcaggttcgtcgtcgtgggtctgcagagacagagagagtccgatccggcgcgtacgtgtgcccgcgtgggcacatgcatacgtacatgcttgtgttgtactgtacgctcgtatctcctcacaccgaaatgaattgcgattaagtatcgaaatttcggcagcttatccatcatgtaatgagttcctctgcagtacttaaaactct

SEQ ID NO: 21776 - protein, 408 aa, Zea mays subsp. mays
  misc_feature (1)..(408): Ceres Seq. ID no. 12406181
  misc_feature (20)..(20): Xaa is any aa, unknown or other
INKVLKQSSSLRPKQSIQRXTPHHPWSGTSTSYPVETKMATARWLQVAAMAVALLAEWATAAAPRKPVDVPFQKNYVPTWAQDHIHYIDGGREVQLYLDKSTGTGFQTRGSYLFGHFSMHMKLVGGDSAGTVTAFYLSSQNSGARRDRLRVPGQPDGAALHPADQRVHRRQGRPRAADLPLVRPHQGVPLLLRPLEPLHDRVLRGRRADPGVQEHERRPGRAVPVQPADEALLQPVERRRLGDPRRAREDGLVQRALRRLLPRLPRRRLRGLRGGALLRHPGRALVGPAGVQGPRRRAVPPPGRGQAPLHHLQLLHRSRPLRRRRAARVRPRPRRLMMMRWAGKLLDREQPVMYVWYGIVVCQVRRRGSAETERVRSGAYVCPRGHMHTYMLVLYCTLVSPHTEMNCD

SEQ ID NO: 21777 - protein, 370 aa, Zea mays subsp. mays
  misc_feature (1)..(370): Ceres Seq. ID no. 12406182
MATARWLQVAAMAVALLAEWATAAAPRKPVDVPFQKNYVPTWAQDHIHYIDGGREVQLYLDKSTGTGFQTRGSYLFGHFSMHMKLVGGDSAGTVTAFYLSSQNSGARRDRLRVPGQPDGAALHPADQRVHRRQGRPRAADLPLVRPHQGVPLLLRPLEPLHDRVLRGRRADPGVQEHERRPGRAVPVQPADEALLQPVERRRLGDPRRAREDGLVQRALRRLLPRLPRRRLRGLRGGALLRHPGRALVGPAGVQGPRRRAVPPPGRGQAPLHHLQLLHRSRPLRRRRAARVRPRPRRLMMMRWAGKLLDREQPVMYVWYGIVVCQVRRRGSAETERVRSGAYVCPRGHMHTYMLVLYCTLVSPHTEMNCD

SEQ ID NO: 21778 - protein, 359 aa, Zea mays subsp. mays
  misc_feature (1)..(359): Ceres Seq. ID no. 12406183
MAVALLAEWATAAAPRKPVDVPFQKNYVPTWAQDHIHYIDGGREVQLYLDKSTGTGFQTRGSYLFGHFSMHMKLVGGDSAGTVTAFYLSSQNSGARRDRLRVPGQPDGAALHPADQRVHRRQGRPRAADLPLVRPHQGVPLLLRPLEPLHDRVLRGRRADPGVQEHERRPGRAVPVQPADEALLQPVERRRLGDPRRAREDGLVQRALRRLLPRLPRRRLRGLRGGALLRHPGRALVGPAGVQGPRRRAVPPPGRGQAPLHHLQLLHRSRPLRRRRAARVRPRPRRLMMMRWAGKLLDREQPVMYVWYGIVVCQVRRRGSAETERVRSGAYVCPRGHMHTYMLVLYCTLVSPHTEMNCD

SEQ ID NO: 21779 - DNA, 1215 bp, Zea mays subsp. mays
  misc_feature (1)..(1215): Ceres Seq. ID no. 12406200
atacggacacaggatatttggtcgctggagacagacacacgacacgacacagacatgcgtcgaggtcacgaggtccagagcagtaggaaagtagttttctcgaggccacgaggtcccctgtacctgtagctgtagcatgggcggtacagcagcaccaatgcaagctgcaaggcgatcgaatgatactaccccaccggcgtcggacatgcaggtacggtagcgttctgtttttgtttataaataaaaaaaaactgctccacgctttgcacacggccgatccaggcagcagcagcagcatgttcccacaggcagatgcgcatccagcccacgagcctctcgccggccgggtggccatcgtgacaggaggcgccgggggcatcggctcggcggtggccgcgcacctggcgtccctgggcgcccgcgtcgtggtcggcttcatcggcgacccggcccccgcggaccagctcgtggcggccctcaacaactcctcgccggcaggcaacagcgacccgcgcgccgtggcggtggcagcggacgtgtcggacccggcgcaggtggcgcggctgttcgacgcggcggaggcggcgttcgggccggagctgcacgtgctggtggccgcggcgggggtgcaggacgcgacgtacccgcggatcgcggacacgtcgcccgagcagtgggacctcgcgttcggcgtgaacacgcgcggcacgttcctgtgctgccgggaggcggcgcggcggctggcgcgcggcggcgcgggccgcatcgtcaccctctcgtcctccaacgtggggtcgctgcggcccgggtacggcgcgtacgctgccagcaaggcggccgtggaggccatgacaaaggtgctggccaaggagctgggcgggacggggatcacggtcaacgccgtggcgccgggccccgtggccacgcccatgttctacgcgggcaagtcggaggagcgcgtggccgccgcngcgcgcgagtgccccatggggaggctcgccgagccggcggacgtggcgcccgtggtggggttcctgtgcaccgacgccgccggctggatcaacgggcaggtcatccgagtcaacggcggctacgtgtgagtgtactgtgatgagagggaggaggcatagctagctagcttagcttggagtgtcagcgtgtcaccaaccgacaattacacgtgctccttccnttaataataataataataataat

SEQ ID NO: 21780 - protein, 306 aa, Zea mays subsp. mays
  misc_feature (1)..(306): Ceres Seq. ID no. 12406201
  misc_feature (264)..(264): Xaa is any aa, unknown or other
MILPHRRRTCRYGSVLFLFINKKKLLHALHTADPGSSSSMFPQADAHPAHEPLAGRVAIVTGGAGGIGSAVAAHLASLGARVVVGFIGDPAPADQLVAALNNSSPAGNSDPRAVAVAADVSDPAQVARLFDAAEAAFGPELHVLVAAAGVQDATYPRIADTSPEQWDLAFGVNTRGTFLCCREAARRLARGGAGRIVTLSSSNVGSLRPGYGAYAASKAAVEAMTKVLAKELGGTGITVNAVAPGPVATPMFYAGKSEERVAAXARECPMGRLAEPADVAPVVGFLCTDAAGWINGQVIRVNGGYV

SEQ ID NO: 21781 - protein, 267 aa, Zea mays subsp. mays
  misc_feature (1)..(267): Ceres Seq. ID no. 12406202
  misc_feature (225)..(225): Xaa is any aa, unknown or other
MFPQADAHPAHEPLAGRVAIVTGGAGGIGSAVAAHLASLGARVVVGFIGDPAPADQLVAALNNSSPAGNSDPRAVAVAADVSDPAQVARLFDAAEAAFGPELHVLVAAAGVQDATYPRIADTSPEQWDLAFGVNTRGTFLCCREAARRLARGGAGRIVTLSSSNVGSLRPGYGAYAASKAAVEAMTKVLAKELGGTGITVNAVAPGPVATPMFYAGKSEERVAAXARECPMGRLAEPADVAPVVGFLCTDAAGWINGQVIRVNGGYV

SEQ ID NO: 21782 - DNA, 1833 bp, Zea mays subsp. mays
  misc_feature (1)..(1833): Ceres Seq. ID no. 12406205
aaaaagaagctagaacacgctaacaagacaacaaggtgagtagtttcttgctccaaccgccttacctgccgttgactcgcttgctgcctcggctcatggggcgctactacctgtaggatcatggggcgcgggcgcggccacctcctgctgccggcagcagccgcctgcctgtgggcgctgtcgtgcgcgctgctgctgcgcgcgtcccctcaccgcgctggcgccggcgccggcgggctgctgagggtcgggctcagcaggcgcggcggcgggctcgaccagcgcgcgctggcggcggccaaggccgcgaggcagcaggaggcaagccgtctcggggcctccgncggcggcgacgtccctctcgtcgactacctcaacacccagtactatggggtcgtcggcatcggcacaccgccgcagaacttcaccgtcatcttcgacaccggcagctccaacctctgggtcccctcctccagatgctacttctcgattgcctgctacctgcaccacagatacaagtcggccaagtctagcacgtacaaggcggacggcgagacctgcaagatcacctacggctccggctcgatcgccgggttcttcagcgacgacgacgtgctggtcggggacctgaccgtcaaaaaccagaagttcatcgagacaacgcgcgaaagcagcgtaacgttcataatcggcaagttcgacggcatcctcggtctcggataccccgagatctccgtcggcaaggctcctccgatctggcagagcatgcaggagcaggagctgctggcggaggacgtcttctccttctggctgaaccggagcccggacgcggacgcagcgtccggcggcgagctcgtcttcggcggcgtcgaccctgcgcacttcagcgggaaccacacctacgtccccgtctcccgcaagggatactggcagttcgacatgggggaccttctcatcgacggccactccaccggtttctgcgccaaggggtgcgctgccatcgtcgactccgggacttccttgctcgctggcccaacggccataattgcccaggtgaacgaagcgatcggggcagacgggatcatcancacggagtgcaaggnagttgtgagccagtacggagagatgatcctcgacatgctcatcgcacagacggatccacagagggtgtgcagccaggttggtctgtgcgtgttcgatggcgctcgatctgtcagcgaggggattgaatctgttgtcgggaaagaaaacctgggctcagatgtcatgtgctcggcctgtcagatggctgtcgtgtggatagagaaccagtccgcgaaaacaagaccaaggagntcatactgcagtacgctaaccagctgtgtgagcgtctgccgagccccaacggagagtcaacagtcagctgccaggagatctccaagatgcccagccttgcgttcaccatcgcaaacaagaccttcaccctaacacccgagcagtacattgtgaagctggagcaaggaggccaaaccgtctgcatcagtgggttcatggcgtatgacgtgccaccgccgcgtggtcctctctggattcttggggacgtcttcatgggagcttaccacacggtgttcgacttcggcaacgacaggattgnttcgcggaatctgcatgagtgtggagagcactctcatctttataaagacgataccctatgtattagggatgtgtagtttattgtctatccactacatgccaacagtacgccgcaaataaatcggtggccaaaattgctgaaaccagaaacgtgaacagtactgctttctttgtttctggagaagagcaaatggatgcttc

SEQ ID NO: 21783 - protein, 448 aa, Zea mays subsp. mays
  misc_feature (1)..(448): Ceres Seq. ID no. 12406206
  misc_feature (75)..(75): Xaa is any aa, unknown or other
  misc_feature (323)..(323): Xaa is any aa, unknown or other
  misc_feature (328)..(328): Xaa is any aa, unknown or other
  misc_feature (405)..(405): Xaa is any aa, unknown or other
MGRGRGHLLLPAAAACLWALSCALLLRASPHRAGAGAGGLLRVGLSRRGGGLDQRALAAAKAARQQEASRLGASXGGDVPLVDYLNTQYYGVVGIGTPPQNFTVIFDTGSSNLWVPSSRCYFSIACYLHHRYKSAKSSTYKADGETCKITYGSGSIAGFFSDDDVLVGDLTVKNQKFIETTRESSVTFIIGKFDGILGLGYPEISVGKAPPIWQSMQEQELLAEDVFSFWLNRSPDADAASGGELVFGGVDPAHFSGNHTYVPVSRKGYWQFDMGDLLIDGHSTGFCAKGCAAIVDSGTSLLAGPTAIIAQVNEAIGADGIIXTECKXVVSQYGEMILDMLIAQTDPQRVCSQVGLCVFDGARSVSEGIESVVGKENLGSDVMCSACQMAVVWIENQSAKTRPRXSYCSTLTSCVSVCRAPTESQQSAARRSPRCPALRSPSQTRPSP

SEQ ID NO: 21784 - protein, 233 aa, Zea mays subsp. mays
  misc_feature (1)..(233): Ceres Seq. ID no. 12406207
  misc_feature (108)..(108): Xaa is any aa, unknown or other
  misc_feature (113)..(113): Xaa is any aa, unknown or other
  misc_feature (190)..(190): Xaa is any aa, unknown or other
MQEQELLAEDVFSFWLNRSPDADAASGGELVFGGVDPAHFSGNHTYVPVSRKGYWQFDMGDLLIDGHSTGFCAKGCAAIVDSGTSLLAGPTAIIAQVNEAIGADGIIXTECKXVVSQYGEMILDMLIAQTDPQRVCSQVGLCVFDGARSVSEGIESVVGKENLGSDVMCSACQMAVVWIENQSAKTRPRXSYCSTLTSCVSVCRAPTESQQSAARRSPRCPALRSPSQTRPSP

SEQ ID NO: 21785 - DNA, 1506 bp, Zea mays subsp. mays
  misc_feature (1)..(1506): Ceres Seq. ID no. 12406215
ctctttctccttcctcctccttcctctcgctcgctcccctcccttccccgctcctcctcctcctcctcctcctccctttcattcctacctccgctcgcgccactctcctccgaccgaggggcagggaccggtgcccgtccgcccgccatggtctcctggcggcgcagcgcgtcctggctgtcgtcggcgtcgcgctcctcgctcggcgccgccgtcggcggggaggccaaggtcacgccgnagncggatccgncggcgcagcacgacgagcccgacgaggagcgctggtcgcgcctgctgccggagctgctcacggagatcatgcgccgcgtggacgccggcgccgagcgctggccgccgcgccgggacgtcgtggtctgcgcctgcgtgtgccgccggtggcgcgacgccgctgtctcggtcgtgcgcccgccgctcgagtgcggcaggatcaccttcccgtcgtcgctcaagcagcctggaccaagggatgcgccgatgcactgttttatccggagggacaaaaaaaattcaaccttttctctctatctcagcttaacgcaggccctaacggataaagggaagtttcttttggctgctcgaaggttcagacaaggagcacatacagaatatatcatctcttatgactacgatgatctgcacccaagaagcagttcatatgttggaaagttgagatctgacttcttggggacaaagttcatcatctatgatagccaggcgccatatgacggtgccaaaccttcgaggacccgatccactcgccgctttgcaagcaagcagataagcccacaggtttcaggcggcaatttcgaagttggacaagtgacctacaggttcaacttcatgaaatcaagagggccgagacggatgcagtgcaatatccagtgccctgtaggccagggcagcgcttcggatccatccaaggagaaaacaccctcgccgagttccttggacctaaagaacaaggctccaagatggcacgaccatcttcagtgttggtgcttaaatttccacggccgggtgaccgtcgcctccgtgaagaacttccagctcgtcgccacagctggctccggcggtccatggggcgtcggagacgaggagacggtgatcctgcagttcgggaagatcgaggacgatgcgtttacgatggactaccggcagcctctgtccgccttccaggcgttcgccatctgcctcaccagctttggcacgaagctggcctgtgaataaatggttgccggtttacccaactatgttggggatcagattgtagggggtagtctgaactagttgccctgagcacctcagatgggagaaaactggcgataagaaacagggcggacgttgtccctataagctttgactccttgtaatcgcctaaatgattgatttatatatatatgatgtgcgcctatgttgttgaagagatgacgatgacttatcgttgtaaatgccattcccttccgtttggtgacattccattct

SEQ ID NO: 21786 - protein, 416 aa, Zea mays subsp. mays
  misc_feature (1)..(416): Ceres Seq. ID no. 12406216
  misc_feature (81)..(81): Xaa is any aa, unknown or other
  misc_feature (82)..(82): Xaa is any aa, unknown or other
  misc_feature (85)..(85): Xaa is any aa, unknown or other
LFLLPPPSSRSLPSLPRSSSSSSSSLSFLPPLAPLSSDRGAGTGARPPAMVSWRRSASWLSSASRSSLGAAVGGEAKVTPXXDPXAQHDEPDEERWSRLLPELLTEIMRRVDAGAERWPPRRDVVVCACVCRRWRDAAVSVVRPPLECGRITFPSSLKQPGPRDAPMHCFIRRDKKNSTFSLYLSLTQALTDKGKFLLAARRFRQGAHTEYIISYDYDDLHPRSSSYVGKLRSDFLGTKFIIYDSQAPYDGAKPSRTRSTRRFASKQISPQVSGGNFEVGQVTYRFNFMKSRGPRRMQCNIQCPVGQGSASDPSKEKTPSPSSLDLKNKAPRWHDHLQCWCLNFHGRVTVASVKNFQLVATAGSGGPWGVGDEETVILQFGKIEDDAFTMDYRQPLSAFQAFAICLTSFGTKLACE

SEQ ID NO: 21787 - protein, 367 aa, Zea mays subsp. mays
  misc_feature (1)..(367): Ceres Seq. ID no. 12406217
  misc_feature (32)..(32): Xaa is any aa, unknown or other
  misc_feature (33)..(33): Xaa is any aa, unknown or other
  misc_feature (36)..(36): Xaa is any aa, unknown or other
MVSWRRSASWLSSASRSSLGAAVGGEAKVTPXXDPXAQHDEPDEERWSRLLPELLTEIMRRVDAGAERWPPRRDVVVCACVCRRWRDAAVSVVRPPLECGRITFPSSLKQPGPRDAPMHCFIRRDKKNSTFSLYLSLTQALTDKGKFLLAARRFRQGAHTEYIISYDYDDLHPRSSSYVGKLRSDFLGTKFIIYDSQAPYDGAKPSRTRSTRRFASKQISPQVSGGNFEVGQVTYRFNFMKSRGPRRMQCNIQCPVGQGSASDPSKEKTPSPSSLDLKNKAPRWHDHLQCWCLNFHGRVTVASVKNFQLVATAGSGGPWGVGDEETVILQFGKIEDDAFTMDYRQPLSAFQAFAICLTSFGTKLACE

SEQ ID NO: 21788 - protein, 309 aa, Zea mays subsp. mays
  misc_feature (1)..(309): Ceres Seq. ID no. 12406218
MRRVDAGAERWPPRRDVVVCACVCRRWRDAAVSVVRPPLECGRITFPSSLKQPGPRDAPMHCFIRRDKKNSTFSLYLSLTQALTDKGKFLLAARRFRQGAHTEYIISYDYDDLHPRSSSYVGKLRSDFLGTKFIIYDSQAPYDGAKPSRTRSTRRFASKQISPQVSGGNFEVGQVTYRFNFMKSRGPRRMQCNIQCPVGQGSASDPSKEKTPSPSSLDLKNKAPRWHDHLQCWCLNFHGRVTVASVKNFQLVATAGSGGPWGVGDEETVILQFGKIEDDAFTMDYRQPLSAFQAFAICLTSFGTKLACE

SEQ ID NO: 21789 - DNA, 1998 bp, Zea mays subsp. mays
  misc_feature (1)..(1998): Ceres Seq. ID no. 12406235
aagatctttcccaaaattccagtggaatccgcacagcggagcgctgcctgagtccgtccccgttgcttgggtgcctgtgccggacgcccgcagtcccaccatcccaactctcaaccccagcgcagcagcctgcaccacaccagaaaccacaccaccacgctcaccgccgtgagcccgtgacccccacgtccccccacaccacggcacgtcggcaccagcttaactcccggtccgcggcgacacctcaccatcgcgcgcgcacacacacgagcgtgcgccgctccctgttcctcgtgacccccctccccgcctcccctctctctctctcacacacacacacaagtcggtgctgcagcagcagcagtcgcagtccagccgtgagctcttgccgtgcgagcgattcaccgcagggcgcacgggaatccaatcaaatcccccaggaaggtagccccgcggccgcccgttcctcgctccgccccgcgccgacgcctctccccgatcccgatctgtgcgcccgcaccctgcgtgggatggaggcggcgccgcggcggcagcagcaggaggaggaggggtgcccgtgcggcgggcccgaggccgcggaccacttcgagcggctccacgacgcggtgctgctcgacgtcctcaaccgcatcggcgacgtcaaggcgctcggccgctgcgccctcgtctcgcgccgcttccacgcgctcgtgccgctcgtcgactccgtcttcgtccgcgtcgactgcgtcatccccgacgacccaccctcttcctcctccgcgggcgccgcaccgggctccccgccgcaccaggcgccggcgccaaccgcgtgcgggcgcggcgcgctcgcgcgcgtcgcgcgcgccctgctcggcggcgtcgctaggcccatccacgcgctcggccagatcctctcctccgccgcggcgaccgtctcccggcgctccgagccactgcccgcttccccgccgcccgcgcccgtcgcggacgtctcccaccactcgccctccgaggtgctccgctccttcagggagctgcggcgccttcacatcgagctgcccacgggcgagctcggcattgacgacggcgtgctccttaagtggaaggccgacttcggctccaccctcggcagctgcgtcatcctcggcgcctcgtcggtctcgtccaagccgccggcagggtccgctcaggcggaaactgctgcggccgacagcacgcccgccgctcccgataccggtagggagactgaagagccgggaagccctgcctgattctctctacacaaatggagggctcaagctccgcgttgtctggaccatcagctccctgattgccgcgtcggcgaggcattacttgctgcacccgattatctgtaatcacggaacgcttgagagcttggacctgacagatgccgacgggcaaggggtgctcaccatggacaagaggcagctgcaggaactgcgggtgcggcccgtctctccatcagggagctcgcaccgcacactcatgccggcactcagtatgcgtctgcactacgcaccactcattgaactgcctgggggaacgctgctgaaaggtgcaacactagtggcgatcagaccaagcgaggatgccttgagggagggccaaggggttgcaggtcctgctggtacatgctggatttcagaggcctttgaggagccatatcggactgcggcaaaggtgctcctcaagagaagggcatattgccttgaaatgaactcgttctgagcaccagggattcacttccacagagttctacccatctgacaggatgggggaagtgagatgcccttcggttaatatatgggaattcatcattcagtgcaaaaattggaccaactctccccatcattaatttatctgatctcggtgaagagatgacttcgtgtacctgtacctttagggttgtaattacagatacgtatttgtgctggactactacacgcggaacggaatgctatttggccgattccg

SEQ ID NO: 21790 - protein, 423 aa, Zea mays subsp. mays
  misc_feature (1)..(423): Ceres Seq. ID no. 12406236
DLSQNSSGIRTAERCLSPSPLLGCLCRTPAVPPSQLSTPAQQPAPHQKPHHHAHRREPVTPTSPHTTARRHQLNSRSAATPHHRARTHTSVRRSLFLVTPLPASPLSLSHTHTSRCCSSSSRSPAVSSCRASDSPQGARESNQIPQEGSPAAARSSLRPAPTPLPDPDLCARTLRGMEAAPRRQQQEEEGCPCGGPEAADHFERLHDAVLLDVLNRIGDVKALGRCALVSRRFHALVPLVDSVFVRVDCVIPDDPPSSSSAGAAPGSPPHQAPAPTACGRGALARVARALLGGVARPIHALGQILSSAAATVSRRSEPLPASPPPAPVADVSHHSPSEVLRSFRELRRLHIELPTGELGIDDGVLLKWKADFGSTLGSCVILGASSVSSKPPAGSAQAETAAADSTPAAPDTGRETEEPGSPA

SEQ ID NO: 21791 - protein, 247 aa, Zea mays subsp. mays
  misc_feature (1)..(247): Ceres Seq. ID no. 12406237
MEAAPRRQQQEEEGCPCGGPEAADHFERLHDAVLLDVLNRIGDVKALGRCALVSRRFHALVPLVDSVFVRVDCVIPDDPPSSSSAGAAPGSPPHQAPAPTACGRGALARVARALLGGVARPIHALGQILSSAAATVSRRSEPLPASPPPAPVADVSHHSPSEVLRSFRELRRLHIELPTGELGIDDGVLLKWKADFGSTLGSCVILGASSVSSKPPAGSAQAETAAADSTPAAPDTGRETEEPGSPA

SEQ ID NO: 21792 - DNA, 1639 bp, Zea mays subsp. mays
  misc_feature (1)..(1639): Ceres Seq. ID no. 12406238
gcacgagaccattacctagaacatcctaatcgaaaaactctctcccgcgggtctcggcctcctctcctcggctcgctataagcaggctccaccgcttccgcaatggccacctaattcgctcggcgtcgggggagaagagaagcgcgcgcgatggcaccgggaagatctcttcgccctgcggggacggcggcggttctgtgggcggcgtcgctgctgctgctggcgacgtcgtgcgcgcgcgcaggtggcgcgtacgcggggccggggtgccggaagcacgtggcgagggtcacggagtacggcgcggtcggggacgggaggacgctcaacacggcggcgttcgccagggctgtggcggacctggcgcggcgcgcgcccgacggcggcgctgcgctggtggtgccgccggggaagtggctcacggggcccttcaacctcaccagctgcttcacgctctacctcgacgagggcgcccgagatcctcgcgtcccaggacatgaagcattggcccctcatagctcccctgccgtcctacgggagaggaagggacgagcctggcccaaggtacagcaatttcatcggaggatccaatctcactgacgtcatcatcacgggcaaaaatggaacgatcaacgggcaggggcaggtctggtgggacaagttccacgccaaggagctcaagttcacccgcggccacctcctcgagctcctctactctgacaacatcatcatctccaatgtcaccttcgtcgacgcgccgtactggaacctccaccctacctattgcaccaatgtgaccatcagtggcgtcaccattctcgcgccggtgaattcgcctaataccgatggaattgacccggattcttcctcgcgtgtcaagatcgaggactgctacatcgtctccggcgacgactgcgtggccgtgaagagcgggtgggacgagtacggcatcaggttcaacatgccgagccagcacatcgtcatccggaggctgacctgcgtctcccccacgagcgccatgatcgcgctgggcagcgagatgtccggcggcatccgcgacgtgcgcgccgaggacagcgtggccatcaacacggagtcggccgtcagggtcaagtccggcgccgggaggggcggcttcgtcagggacatcttcgtgcgcggcctcagcctccacaccatgaagtgggtgttctggatgaccggcaactacgggcagcaccccgacaacacgtccgaccccaacgccatgcccgaggtcaccggcatcaactacagcgacgtgttcgccgagaacgtgaccatggccggcaggatggagggcatccctaaggacccctacaccgggatctgcatatccaacgtgaccgcccgcctcgcgccggacgccaaggagctgcagtggaactgcaccaacgtcaagggggtcacctcccacgtctcgcccaagccgtgcccggagctcgccgcggagggcaagccgtgcgccttcccggaggaagagctcgtcatcggcccacccgagctgccgaagtgtagctattgaggccgattgccaaaagagatcattgatcatataggctcttcggtgatagtctagacaagcagtatgagaaatgcagctgaaatacgtttgcattgc

SEQ ID NO: 21793 - protein, 348 aa, Zea mays subsp. mays
  misc_feature (1)..(348): Ceres Seq. ID no. 12406239
MKHWPLIAPLPSYGRGRDEPGPRYSNFIGGSNLTDVIITGKNGTINGQGQVWWDKFHAKELKFTRGHLLELLYSDNIIISNVTFVDAPYWNLHPTYCTNVTISGVTILAPVNSPNTDGIDPDSSSRVKIEDCYIVSGDDCVAVKSGWDEYGIRFNMPSQHIVIRRLTCVSPTSAMIALGSEMSGGIRDVRAEDSVAINTESAVRVKSGAGRGGFVRDIFVRGLSLHTMKWVFWMTGNYGQHPDNTSDPNAMPEVTGINYSDVFAENVTMAGRMEGIPKDPYTGICISNVTARLAPDAKELQWNCTNVKGVTSHVSPKPCPELAAEGKPCAFPEEELVIGPPELPKCSY

SEQ ID NO: 21794 - protein, 193 aa, Zea mays subsp. mays
  misc_feature (1)..(193): Ceres Seq. ID no. 12406240
MPSQHIVIRRLTCVSPTSAMIALGSEMSGGIRDVRAEDSVAINTESAVRVKSGAGRGGFVRDIFVRGLSLHTMKWVFWMTGNYGQHPDNTSDPNAMPEVTGINYSDVFAENVTMAGRMEGIPKDPYTGICISNVTARLAPDAKELQWNCTNVKGVTSHVSPKPCPELAAEGKPCAFPEEELVIGPPELPKCSY

SEQ ID NO: 21795 - protein, 174 aa, Zea mays subsp. mays
  misc_feature (1)..(174): Ceres Seq. ID no. 12406241
MIALGSEMSGGIRDVRAEDSVAINTESAVRVKSGAGRGGFVRDIFVRGLSLHTMKWVFWMTGNYGQHPDNTSDPNAMPEVTGINYSDVFAENVTMAGRMEGIPKDPYTGICISNVTARLAPDAKELQWNCTNVKGVTSHVSPKPCPELAAEGKPCAFPEEELVIGPPELPKCSY

SEQ ID NO: 21796 - DNA, 1787 bp, Zea mays subsp. mays
  misc_feature (1)..(1787): Ceres Seq. ID no. 12406298
aaaggattcccaaccccaaccccaaccccccaagaagcaccgcgcagaaccctctgctcctctcaccctcacgctccaaggcggcggcgccatgcacggcggaggcgcggcctcgcccgatgccgccatatgcatctccccagaagctgggcccatcgtcggggtcgcccccgccgggatcagggtcgaaaactgctacgtgttcaagagccggctgcaggagtatgctcagagggttggcattccaaccccggagtaccacacgctgaaagaaggcccgtctcatgaacctgtcttcaagtccacagtgttcgttaataataccaagtatgaatcgctgcctgggttcttcagccggaaggctgcagaacagtctgccgcggaagttgcgctcatggagatagccatgtccgctccggtgaccgaaattaggaacatgccagcagttcaagaaactggactgtgcaagaatctccttcaggagtatgctcagaagatgaattatgccattccatcttatatttgcactaaacaagcttcgggtgtagctcctttcgtatgcagtgttgagattggtggcatcctatacattggtgctgcagctaggacaaagaaggaggcagagataaaagctgcccgaactgctcttcttgcaatccaaagtcaatcagaaggtggtgcaaatggtgccaaaaagtacattgttgttcctgggcaaaggccagataaggaggcgaataaaaatccaactgaaacccccataccacttagagtcaagaagcgtggttccaggaagaaatggaacaagaggaaattcaggaggatggctgaccgaattgttgatgctggaaaggatgcagaggggcttggaacgcttgtacatgatgactatgaggaagctagaagaataggatatgagttacctacagatactgctatggttcaatttaacaaggaagttgtaatgacacaacctggtgaaggagataggatagtacaattggagccacccagagatcctgcagagtttcaatataacaaggaagctagaagtgttgaacaggacccacccagagatcctgcagaggtccaacataacaaggaagctagaagtgttgaacaggacccacccagagatcctgcagaggtccaacataacaaggaagctagaactgtcgaacaggacccacccagcaacactgaagtgtggaagcctgacaataaggctacaactacagagcaggagtcggtgagcgcttacatagcattgagatctaatggggattctacagatgtggaggcggcaccaggcgataccttgatgatgcagggcgaggagtcggaagccacaatgcaagaagcatctcacgctggtgaacaggcccagcctaactaggaacctgaaagcaaaaaaaacttcctgaacaggaagaccgaaatgtaggtcgaatgcatgcattgctgtaggagaataagtccgctggaggtacatgagcctaaaataatttgtggagtggtggttgactccagttgtaagtgccttccagagtgtaccggcatgcccaaaactgaaatttccggtttagatagaattgggggcgcggaagagggtgccatgtgtgtgtgtgtgtgttgcctgtggatggaggaattgatgggagtatgtgaactgatgtagctagtctatgtttgttaccattgatgatatgattgtgtttggtcatgttttcactgtcatatttgttgacgaccagcacttgcatgagcattggattcgaggtagcctg

SEQ ID NO: 21797 - protein, 464 aa, Zea mays subsp. mays
  misc_feature (1)..(464): Ceres Seq. ID no. 12406299
KDSQPQPQPPKKHRAEPSAPLTLTLQGGGAMHGGGAASPDAAICISPEAGPIVGVAPAGIRVENCYVFKSRLQEYAQRVGIPTPEYHTLKEGPSHEPVFKSTVFVNNTKYESLPGFFSRKAAEQSAAEVALMEIAMSAPVTEIRNMPAVQETGLCKNLLQEYAQKMNYAIPSYICTKQASGVAPFVCSVEIGGILYIGAAARTKKEAEIKAARTALLAIQSQSEGGANGAKKYIVVPGQRPDKEANKNPTETPIPLRVKKRGSRKKWNKRKFRRMADRIVDAGKDAEGLGTLVHDDYEEARRIGYELPTDTAMVQFNKEVVMTQPGEGDRIVQLEPPRDPAEFQYNKEARSVEQDPPRDPAEVQHNKEARSVEQDPPRDPAEVQHNKEARTVEQDPPSNTEVWKPDNKATTTEQESVSAYIALRSNGDSTDVEAAPGDTLMMQGEESEATMQEASHAGEQAQPN

SEQ ID NO: 21798 - protein, 434 aa, Zea mays subsp. mays
  misc_feature (1)..(434): Ceres Seq. ID no. 12406300
MHGGGAASPDAAICISPEAGPIVGVAPAGIRVENCYVFKSRLQEYAQRVGIPTPEYHTLKEGPSHEPVFKSTVFVNNTKYESLPGFFSRKAAEQSAAEVALMEIAMSAPVTEIRNMPAVQETGLCKNLLQEYAQKMNYAIPSYICTKQASGVAPFVCSVEIGGILYIGAAARTKKEAEIKAARTALLAIQSQSEGGANGAKKYIVVPGQRPDKEANKNPTETPIPLRVKKRGSRKKWNKRKFRRMADRIVDAGKDAEGLGTLVHDDYEEARRIGYELPTDTAMVQFNKEVVMTQPGEGDRIVQLEPPRDPAEFQYNKEARSVEQDPPRDPAEVQHNKEARSVEQDPPRDPAEVQHNKEARTVEQDPPSNTEVWKPDNKATTTEQESVSAYIALRSNGDSTDVEAAPGDTLMMQGEESEATMQEASHAGEQAQPN

SEQ ID NO: 21799 - protein, 333 aa, Zea mays subsp. mays
  misc_feature (1)..(333): Ceres Seq. ID no. 12406301
MEIAMSAPVTEIRNMPAVQETGLCKNLLQEYAQKMNYAIPSYICTKQASGVAPFVCSVEIGGILYIGAAARTKKEAEIKAARTALLAIQSQSEGGANGAKKYIVVPGQRPDKEANKNPTETPIPLRVKKRGSRKKWNKRKFRRMADRIVDAGKDAEGLGTLVHDDYEEARRIGYELPTDTAMVQFNKEVVMTQPGEGDRIVQLEPPRDPAEFQYNKEARSVEQDPPRDPAEVQHNKEARSVEQDPPRDPAEVQHNKEARTVEQDPPSNTEVWKPDNKATTTEQESVSAYIALRSNGDSTDVEAAPGDTLMMQGEESEATMQEASHAGEQAQPN

SEQ ID NO: 21800 - DNA, 1818 bp, Zea mays subsp. mays
  misc_feature (1)..(1818): Ceres Seq. ID no. 12406318
gcacgagaccattacctagaacatcctaatcaaaactctctctctctcattcatctcgcctttctttcttaccggccggccggccggcggctgggctctgcaattcacccaacttttctctgttttcactacgatctcagggctccggcgaccgtgcggcctcatcatcagctacaacctaccagctgctaccgtctcggtcgccgcctagctctccgcagcggctagctcatccggccggccgccccttttctcttgccgttgcgcagttgcgcccccttccccgcggcttaggaaccatcgaaaagacgcctcaccatctcctttgtgtccttgctaactaactcccccattaaatcctctccttcctcccgcgctggccgtgtggtctctcagccctccgagttgatccataagctagcgccatcatcgatcgccatatatacatagccaaggacgcacgcgcgcgcgcgcgcaaaccagcgggagcgaacaccaaccggccggaccaattaagaagcaggctagcaagtcgaagaggaaagaagagaaggggggtaccgggggtaccggccggtcatcgatcgagcttggcgaagcagcgaccgccgggtcgtcgtcgtcggtacatgcatgcagcgcggcggtgatcaagcaggagcgagcctgggcatggagatgggggtggggtacgccggcggcggcggcggcggcgagtgctcgtcgtcctcggcggctgccgcggccgcggccgcggcggagggggaggagcggcagctgctcaagggggagatcgcggtgcacccgctgtgcgagcagctagtggcggcgcacgtggggtgcctgcgcgtggccacgcccatcgaccacctccccctcatcgacgcccagctcgcgcagtccagcggcctcctccactcctacgccgcccaccaccgccccttcctctccccgcacgacaagcacgacctcgactcgttcctcgcgcagtacctgatgctgctgtgctcgttccgggagcagctgcagcagcacgtccgggtgcacgccgtggaggccgtcatggcgtgccgcgagatcgagcagtccctgcaggacctaaccggggcgacacttgaggaagggacgggggcgaccatgtcagaggacgaggacgaggcgccgatgctggaggtgggcctggatatgggctccgacgggcacgacatgatgggcttcggcccgctcatgcccaccgactcggagcgctcgctcatggagagggtcaggcaggagctcaagatggagctcaagcagggtttcaagtcgagaatagaggatgtgcgggaggagatcctgaggaaaaggagggccgggaagctgcctggggacaccaccagcatcctcaagcaatggtggcaggagcactccaagtggccataccccacggaagacgataaggctaagctcgtcgaagagaccggcctgcagctgaagcaaatcaacaactggttcatcaaccagaggaagaggaactggcacaacaactcccagacgtcaaccctcaaatcgaagcgtaaaaggtgatggaggagagctagctgcaccgtatataccgtgtatgtaacgcacacctgctgacacacatgtacacatgtataccataccaacacgctaatcaaacggagctctgcatggcgactgtactcacggaaataaagaggaccatatcgaccggttcaactgtatatctagccattagtctgaccactggcatatttgtttgctgcggctgatactttgagctgatgatgtgtggctcacagcatactttattcc

SEQ ID NO: 21801 - protein, 310 aa, Zea mays subsp. mays
  misc_feature (1)..(310): Ceres Seq. ID no. 12406319
MQRGGDQAGASLGMEMGVGYAGGGGGGECSSSSAAAAAAAAAEGEERQLLKGEIAVHPLCEQLVAAHVGCLRVATPIDHLPLIDAQLAQSSGLLHSYAAHHRPFLSPHDKHDLDSFLAQYLMLLCSFREQLQQHVRVHAVEAVMACREIEQSLQDLTGATLEEGTGATMSEDEDEAPMLEVGLDMGSDGHDMMGFGPLMPTDSERSLMERVRQELKMELKQGFKSRIEDVREEILRKRRAGKLPGDTTSILKQWWQEHSKWPYPTEDDKAKLVEETGLQLKQINNWFINQRKRNWHNNSQTSTLKSKRKR

SEQ ID NO: 21802 - protein, 297 aa, Zea mays subsp. mays
  misc_feature (1)..(297): Ceres Seq. ID no. 12406320
MEMGVGYAGGGGGGECSSSSAAAAAAAAAEGEERQLLKGEIAVHPLCEQLVAAHVGCLRVATPIDHLPLIDAQLAQSSGLLHSYAAHHRPFLSPHDKHDLDSFLAQYLMLLCSFREQLQQHVRVHAVEAVMACREIEQSLQDLTGATLEEGTGATMSEDEDEAPMLEVGLDMGSDGHDMMGFGPLMPTDSERSLMERVRQELKMELKQGFKSRIEDVREEILRKRRAGKLPGDTTSILKQWWQEHSKWPYPTEDDKAKLVEETGLQLKQINNWFINQRKRNWHNNSQTSTLKSKRKR

SEQ ID NO: 21803 - protein, 295 aa, Zea mays subsp. mays
  misc_feature (1)..(295): Ceres Seq. ID no. 12406321
MGVGYAGGGGGGECSSSSAAAAAAAAAEGEERQLLKGEIAVHPLCEQLVAAHVGCLRVATPIDHLPLIDAQLAQSSGLLHSYAAHHRPFLSPHDKHDLDSFLAQYLMLLCSFREQLQQHVRVHAVEAVMACREIEQSLQDLTGATLEEGTGATMSEDEDEAPMLEVGLDMGSDGHDMMGFGPLMPTDSERSLMERVRQELKMELKQGFKSRIEDVREEILRKRRAGKLPGDTTSILKQWWQEHSKWPYPTEDDKAKLVEETGLQLKQINNWFINQRKRNWHNNSQTSTLKSKRKR

SEQ ID NO: 21804 - DNA, 1391 bp, Zea mays subsp. mays
  misc_feature (1)..(1391): Ceres Seq. ID no. 12406330
gcacgagaccattacctagaacatcctaatcgaaaaaagcagtcatgactcatgacactagaatggaatgggatggtgttcgtgcatcacgcgtcggcgagcttgggcgtgggtatgtggctgtcgacgaaggccttcatatcctgcagcaccttggtagcctcggggagctccgggaagccgtagaagccgtggaacatgcctgggtactcggccaccagcacctccttccccttccggcgcagcacgtcggcgtagcgtcgctgccagtccatgagcgggtcgaagccgccgatgatgaccatggcgggcgggaagtcgtcggcgaggtcggcgttgtcgtcggtgacgtgcgcggccgggtggtcgcgggtggcaccgtcgggcaggaacgcggtccacgagaagtcggagcgcctgaggttgaccacgggcgccacgccctctagctccagctccgacggcgtgcgctccacgccgccgaagtagggctgcacggggaagacgcccgcgacgcggagggcccgcgcggacggctgccacgccgccgcccagcggttggcgacgtggtgcacgatgtttccgcccgcgctctccccggccaggaagcagctgccgaggtcgacgggcacgccgtcgtccaggcccgggacgccgccgcgggcgtcgaggaagcgcagcgcgtcgacgccgtcgtcgtaggcggcgggccagcggtgctccggggccaggcggtagttgacggacaccacgacggcgccgagcgcggcgcagaggcggcggcacacgccgttgaagggcccgatggccggggagaagagcgcgaagccgccgccgtggaagtacacgaccacggggagcgggcggtccgccgcggccggcgcgaagacgcgcgcccagatgccgcgggacgcgtccatggtcacgtcgtaggagcgcaccccggaggcgtccgggcgcgggctggcgcgcgcgctcaggagccggtcgatcacgccgtacaggcagcggttcaccgtcccgtcgcggcgctccacggcgtcgatggccgccgtcagcccggccagctggaggcgcaccgacagcggcagcggtggtggcttcggcttcggcttatctgctgctccttggttgctgtcgctggccatggactccattccttcgctctggcctgctcgtcggtatctttgatcagtgtttccctggggttggacgtgcgatggagtatatagctgacagctcgtgtgccgtgtgggcagcggagcaggtagagagtttgagacggaactgtcggtatggcggcgcgtgcgtgccctgtctgtatttgtcaagacgggcgtggcgacgtgtcgcctggccttccacaaacggcaacggagagaccctgtctg

SEQ ID NO: 21805 - protein, 134 aa, Zea mays subsp. mays
  misc_feature (1)..(134): Ceres Seq. ID no. 12406331
MTHDTRMEWDGVRASRVGELGRGYVAVDEGLHILQHLGSLGELREAVEAVEHAWVLGHQHLLPLPAQHVGVASLPVHERVEAADDDHGGREVVGEVGVVVGDVRGRVVAGGTVGQERGPREVGAPEVDHGRHAL

SEQ ID NO: 21806 - protein, 128 aa, Zea mays subsp. mays
  misc_feature (1)..(128): Ceres Seq. ID no. 12406332
MEWDGVRASRVGELGRGYVAVDEGLHILQHLGSLGELREAVEAVEHAWVLGHQHLLPLPAQHVGVASLPVHERVEAADDDHGGREVVGEVGVVVGDVRGRVVAGGTVGQERGPREVGAPEVDHGRHAL

SEQ ID NO: 21807 - protein, 71 aa, Zea mays subsp. mays
  misc_feature (1)..(71): Ceres Seq. ID no. 12406333
MSGSKPPMMTMAGGKSSARSALSSVTCAAGWSRVAPSGRNAVHEKSERLRLTTGATPSSSSSDGVRSTPPK

SEQ ID NO: 21808 - DNA, 1193 bp, Zea mays subsp. mays
  misc_feature (1)..(1193): Ceres Seq. ID no. 12406389
actcggagtcggaggcgccacgcgcgcgtgtataaataactgcgcctcactgctgcggtgcacggtgtccccctccctccccgctgtctgtggctgcaggccacccccatagcccccgagctctgtgtgcgatggactactcgggcaccaaggagtcgcctcctgccggggcttggtggtcgagggagacggtggccgtggtgaccggcgcgaaccgcggcatcggccacgcgctcgccgcccgcctggccgagcacggcctcaccgtggtgctcaccgcgcgggacggcgagcgcggggaggccgccgcggcgccgctcctcgcgcgcgggctcgcagtcgtcttccgcaggctcgacgtctccgannnngcctccgtcgccgagttcgccgcgtggatccgcgacgccctcggcgngcctcgacatcctggtgaacaacgcagccgtgtcgtttaacgagatngacaccaacctccgtggagcacgccgaggctgtcctcaggaccaacttctacggggccaagatgctcaccgaagcgctcctgccgctgttccggcagtcgtcggcgaccagcaggatcctcaacgtcagctcccagcttggccttctcaacaaggtgagcgacccgtcgctgagggcgctgctgctggacgaggacgggctgacggaggcggggatagaggcgatggtgtcgcggttcctggcgcaggtgaaggacgggacgtggggcgggcagggttggcccaaggtgtggacggactactcggtctccaagctggccctgaacgcctactcgcggctgctggcgcggcggctgncnangngccggcgcgcgcgtgagcgtcaactgcttctgccccgggttcacgcgcacgggcatgaccaagggctgggggaagcgcaccgccgaggaggcggccgacgtcgccgcgcggctcgcgctgctggcgcccgccgagctccccacggggaccttcttcaagtggtgcacgccgcagctctactccaagctgtgactgtgactggatagctacgcctaccgtcgtcggcagtgtgtgcgtgcgctccgtgaacgctggagtatatatatatagttcggttcctttagctactctgatcagaagtcagaaacgggagtgtcgatctgccaaggtgctttcggttgaacacagctcgtttgtgacctctcg

SEQ ID NO: 21809 - protein, 168 aa, Zea mays subsp. mays
  misc_feature (1)..(168): Ceres Seq. ID no. 12406390
  misc_feature (99)..(99): Xaa is any aa, unknown or other
  misc_feature (100)..(100): Xaa is any aa, unknown or other
  misc_feature (101)..(101): Xaa is any aa, unknown or other
MLTEALLPLFRQSSATSRILNVSSQLGLLNKVSDPSLRALLLDEDGLTEAGIEAMVSRFLAQVKDGTWGGQGWPKVWTDYSVSKLALNAYSRLLARRLXXXRRARERQLLLPRVHAHGHDQGLGEAHRRGGGRRRRAARAAGARRAPHGDLLQVVHAAALLQAVTVTG

SEQ ID NO: 21810 - protein, 114 aa, Zea mays subsp. mays
  misc_feature (1)..(114): Ceres Seq. ID no. 12406391
  misc_feature (45)..(45): Xaa is any aa, unknown or other
  misc_feature (46)..(46): Xaa is any aa, unknown or other
  misc_feature (47)..(47): Xaa is any aa, unknown or other
MVSRFLAQVKDGTWGGQGWPKVWTDYSVSKLALNAYSRLLARRLXXXRRARERQLLLPRVHAHGHDQGLGEAHRRGGGRRRRAARAAGARRAPHGDLLQVVHAAALLQAVTVTG

SEQ ID NO: 21811 - protein, 108 aa, Zea mays subsp. mays
  misc_feature (1)..(108): Ceres Seq. ID no. 12406392
  misc_feature (79)..(79): Xaa is any aa, unknown or other
  misc_feature (80)..(80): Xaa is any aa, unknown or other
  misc_feature (96)..(96): Xaa is any aa, unknown or other
MDYSGTKESPPAGAWWSRETVAVVTGANRGIGHALAARLAEHGLTVVLTARDGERGEAAAAPLLARGLAVVFRRLDVSXXASVAEFAAWIRDALGXPRHPGEQRSRVV

SEQ ID NO: 21812 - DNA, 1772 bp, Zea mays subsp. mays
  misc_feature (1)..(1772): Ceres Seq. ID no. 12406393
gcacgagaccattacctagaacatcctaatcaaaaaccccaccagtctctggcaggttctcccccccacccctctccgtctccgatcccgtccgcattgcttcgcgccggaccaaggaggaagggtcggcgtcgcaggcattgcggtctgctagccacgagggccatggacccgtgcccgttcgtgcgggtgctggtcggcaacctggcgctgaagatgccggcatcggcgccccccgccgccgccgcggcgtccggctccggcgtgcacccggccacgccgccctgctactactgccgcatccgcctcaacaagctgccctaccagacggcgcccgcgccgctgctgccggccaccgaggagggctcggcgccggcgccggcgccggcgtcgtgcgcggccgccttccacgcctccaaggccgacctggaccgggccgccgccaggcccgcgctcttcctcggcggccgcctccgcaccgcgcgcctcaaggtggccgtgtacgccggccgcgggggcggtgaaggcggcgggaggctgctcggcaagctcgtcttccggttcgacctcaggcgcgccgtggccgagcccttcgtcttcctcagcggctggttcgacatcggcaagcgcggcgccgggaagccggcggcggccaacgccgcgcgcgcgcagctcaacctcaccgtcctcggcgagcctgacccgaggttcgtcttcgagttcgacggcgagcccgagtgcagcccgcaggtgctccaggttaaggggagcatgaagcagcccatgttcacgtgcaagttctcctgccgcagcaacagcgacctgcgctcgcggtccgtgcagtccgactcgggcgccgtcggcccgcgcaactggctggcgaagctgtggtccgagcgcgagcgcgagcgcgcggggaaggagcgcaaggggtggtcggtgacggtgcacgacctgtcggggtcgccggtggcgctggcgtcgatggtgacgccgttcgtggcgtccccggggacggaccgcgtgggccgctccaacccgggcggctggctcatcctgcgccgccgcgtggacgggacctggacgccgtggggccgcctcgagtgctggcgcgatcgcggcggcagcgccggggacgcccagctgggctaccgcttcgagctggtgcccgaccacaacagcaacgtcacgggcacgggcgtgtgcgtggccgagtccggcgtcccggcggcccgcggcgggcggttcgccatcgacctgaccacggccggatcccccgggcggggcagcggcgagttgagccgccacgcgctctggcccccgggcggcttcgtgatgtcggccgccgtgcagggggagggccggcgcggcaggccctccgtggagatcggcgtggcgcacgtcgggtgcgccgaggacgccgccgcgttcgtcgctctggcggccgccgtcgacctcagcatggacgcgtgccggctcttctcctgcaagctgcgccgggagctgtcggcgtgaacggcgaggggggagggagattggatggtgatcggacgaacttgttttcgttgtttgtctgtaatcccgctgagttctggtgtgatgttcgtcttctaggtgccttttgtagcttagaagaagccataaaactgggctctggggtgagcgaggcgaggtgtgtgttgttggatgtttttttttggattcccagcctctccgcatcgtgctgctaccgaagtggtagagatcaaattttcaaagctgtttgtgctgtc

SEQ ID NO: 21813 - protein, 504 aa, Zea mays subsp. mays
  misc_feature (1)..(504): Ceres Seq. ID no. 12406394
ARDHYLEHPNQKPHQSLAGSPPHPSPSPIPSALLRAGPRRKGRRRRHCGLLATRAMDPCPFVRVLVGNLALKMPASAPPAAAAASGSGVHPATPPCYYCRIRLNKLPYQTAPAPLLPATEEGSAPAPAPASCAAAFHASKADLDRAAARPALFLGGRLRTARLKVAVYAGRGGGEGGGRLLGKLVFRFDLRRAVAEPFVFLSGWFDIGKRGAGKPAAANAARAQLNLTVLGEPDPRFVFEFDGEPECSPQVLQVKGSMKQPMFTCKFSCRSNSDLRSRSVQSDSGAVGPRNWLAKLWSERERERAGKERKGWSVTVHDLSGSPVALASMVTPFVASPGTDRVGRSNPGGWLILRRRVDGTWTPWGRLECWRDRGGSAGDAQLGYRFELVPDHNSNVTGTGVCVAESGVPAARGGRFAIDLTTAGSPGRGSGELSRHALWPPGGFVMSAAVQGEGRRGRPSVEIGVAHVGCAEDAAAFVALAAAVDLSMDACRLFSCKLRRELSA

SEQ ID NO: 21814 - protein, 449 aa, Zea mays subsp. mays
  misc_feature (1)..(449): Ceres Seq. ID no. 12406395
MDPCPFVRVLVGNLALKMPASAPPAAAAASGSGVHPATPPCYYCRIRLNKLPYQTAPAPLLPATEEGSAPAPAPASCAAAFHASKADLDRAAARPALFLGGRLRTARLKVAVYAGRGGGEGGGRLLGKLVFRFDLRRAVAEPFVFLSGWFDIGKRGAGKPAAANAARAQLNLTVLGEPDPRFVFEFDGEPECSPQVLQVKGSMKQPMFTCKFSCRSNSDLRSRSVQSDSGAVGPRNWLAKLWSERERERAGKERKGWSVTVHDLSGSPVALASMVTPFVASPGTDRVGRSNPGGWLILRRRVDGTWTPWGRLECWRDRGGSAGDAQLGYRFELVPDHNSNVTGTGVCVAESGVPAARGGRFAIDLTTAGSPGRGSGELSRHALWPPGGFVMSAAVQGEGRRGRPSVEIGVAHVGCAEDAAAFVALAAAVDLSMDACRLFSCKLRRELSA

SEQ ID NO: 21815 - protein, 432 aa, Zea mays subsp. mays
  misc_feature (1)..(432): Ceres Seq. ID no. 12406396
MPASAPPAAAAASGSGVHPATPPCYYCRIRLNKLPYQTAPAPLLPATEEGSAPAPAPASCAAAFHASKADLDRAAARPALFLGGRLRTARLKVAVYAGRGGGEGGGRLLGKLVFRFDLRRAVAEPFVFLSGWFDIGKRGAGKPAAANAARAQLNLTVLGEPDPRFVFEFDGEPECSPQVLQVKGSMKQPMFTCKFSCRSNSDLRSRSVQSDSGAVGPRNWLAKLWSERERERAGKERKGWSVTVHDLSGSPVALASMVTPFVASPGTDRVGRSNPGGWLILRRRVDGTWTPWGRLECWRDRGGSAGDAQLGYRFELVPDHNSNVTGTGVCVAESGVPAARGGRFAIDLTTAGSPGRGSGELSRHALWPPGGFVMSAAVQGEGRRGRPSVEIGVAHVGCAEDAAAFVALAAAVDLSMDACRLFSCKLRRELSA

SEQ ID NO: 21816 - DNA, 1277 bp, Zea mays subsp. mays
  misc_feature (1)..(1277): Ceres Seq. ID no. 12406397
actcatcaaacccgcccttacagtcttatccatcgcggcctcgccgtccagcagctagctacgacctagctctgggcctctggccctgtgcctcgcccgagctgcagctccactccggtgcaccatggccgtcctgacgaaggtgcttctccgtctcttcttcaccactggcggcctcatcgtcttcctgttgtgtcccgcgtcctgccttgctcgtcctcctcattccagcagcaactccaactactactgcgactggtgccctcgccgttccaccgcctcccccgacctcgacgcgtcgttgctgcgttcttgtggaactagtagagacggcgacgacggtggcttcggctgcgggtacggggctgcggagcagctggacggaggtggagctccccacgtcgctgccgcgggcgccgactccttcagcgctggcgctggctgcggcgcctgctaccagttgaggtgcagagaccggagggtgtgcggcgacggcggcgtcaaggtcgtcgtggtagccggcttggccaaccggacggggttcttgctcaccagggaggccttcgctgcgatgatggccaggccgcgcgtgtcgtccaatgaccaactgctgcccggcttgggtggcaatgttgttgaggtcgacttcaggaggataccttgcgagtacaagaacagaaacctgtcggtacgcatcgacgaggaagggagccggcacccggcgcacctggccatcaccttcctgtaccagggcgggcagacggacatcgcggccgtcgagctctcgcacgcgcacgcgcagccgccgtcgtggcggcccatggcgcccgtgggcaggcgcggcatcgtgacgtggcgcacctcaagcgcgccggcggggccgctgcagctccgcctcgtcgtcacggccggcgtcggcggcaagtggctgcgggccggcggggacgtgctgccggcggactggcggcctgggcaggtgcacgacacggggctccggatccgcgacgtcgccctgagctcctgcgcccgctcctgccgcggcgccgctacagccggcgccagcgaggagctcaggtagtagagtagattagatgtaggcatggcatacaatggcattgggctggaggcgagcgagattagcttgctgcttgagtgcccatgaaggatgctcgtgctcgtccattgaggaaaattaaaagcaaaccagcagagagctgatctctgatgatctgacgcagtccatggaaatggaagcaaattaagttggtttcttgctg

SEQ ID NO: 21817 - protein, 317 aa, Zea mays subsp. mays
  misc_feature (1)..(317): Ceres Seq. ID no. 12406398
MAVLTKVLLRLFFTTGGLIVFLLCPASCLARPPHSSSNSNYYCDWCPRRSTASPDLDASLLRSCGTSRDGDDGGFGCGYGAAEQLDGGGAPHVAAAGADSFSAGAGCGACYQLRCRDRRVCGDGGVKVVVVAGLANRTGFLLTREAFAAMMARPRVSSNDQLLPGLGGNVVEVDFRRIPCEYKNRNLSVRIDEEGSRHPAHLAITFLYQGGQTDIAAVELSHAHAQPPSWRPMAPVGRRGIVTWRTSSAPAGPLQLRLVVTAGVGGKWLRAGGDVLPADWRPGQVHDTGLRIRDVALSSCARSCRGAATAGASEELR

SEQ ID NO: 21818 - protein, 168 aa, Zea mays subsp. mays
  misc_feature (1)..(168): Ceres Seq. ID no. 12406399
MMARPRVSSNDQLLPGLGGNVVEVDFRRIPCEYKNRNLSVRIDEEGSRHPAHLAITFLYQGGQTDIAAVELSHAHAQPPSWRPMAPVGRRGIVTWRTSSAPAGPLQLRLVVTAGVGGKWLRAGGDVLPADWRPGQVHDTGLRIRDVALSSCARSCRGAATAGASEELR

SEQ ID NO: 21819 - protein, 167 aa, Zea mays subsp. mays
  misc_feature (1)..(167): Ceres Seq. ID no. 12406400
MARPRVSSNDQLLPGLGGNVVEVDFRRIPCEYKNRNLSVRIDEEGSRHPAHLAITFLYQGGQTDIAAVELSHAHAQPPSWRPMAPVGRRGIVTWRTSSAPAGPLQLRLVVTAGVGGKWLRAGGDVLPADWRPGQVHDTGLRIRDVALSSCARSCRGAATAGASEELR

SEQ ID NO: 21820 - DNA, 1385 bp, Zea mays subsp. mays
  misc_feature (1)..(1385): Ceres Seq. ID no. 12406409
gcacgagaccattacctagaacatcctaatcaaaagagggggcaaagagcgatggacgccgcggtgcggaaggccgcgggcgccggcatcgcgcgcgcgccggcgctggtgctagcgctggtggcggcgggggcgttcctgatctcctacaacttcttcaccatgctgttccacggcggcggcggaataggcgcggcggtgaccgctgggacgagggaccctgtggtggccatgccagcgtggatgcgcgcggcggcggacaccgaggcgcgacggcggccgttccatgtggcgctcacggccacggacgcgccctacagccggtggcagtgccgggtcatgtacttctggtacaagcggatgcaggcgcggccgggcggagaggccatgggcgggttcacgcgcgtgctgcactcggggaagcccgacgggctcatggacgagatccccaccttcgtcgtcgacccgctgcccgctggcaaggaccacggatatgtggtcctaaataggccgtgggcatttgtgcagtggcttcagaaagcaaagattgaagaagagtatatactaatggcagaaccagaccatatatttgtgaaacctctaccaaatttggcccatgacgatgacccagcagcatttcccttcttttacattacaccatcagaacatgaaaaaattatcaggaaatactatgctaaagaaagaggtcctgtcacagatatcgatccgattgggaattctcctgtgatcattaagaagacaattcttgagaagattgcccccacatggatgaatgtgtcaattcaaatgaaagaggatgaagagacagataaagtttttggatgggtgttggaaatgtatgcatacgctgttgctagcgcattgcatggagttcatcatatccttcgtaaagatttcatgatccagccaccttttgatacaaagctccagaatacatttataatccacttcacttatggatgtgactactcactaaagggtgaactgacctatggtaaagttggtgaatggcgatttgacaaaagatcattcccagataggccaccaccaagaaatcttacattgccccctcctggagtaccagaaagtgtggttactctagtgaaaatggtcaatgaagctagtgcaaaccttcctcggtgggatgatggaatataaactttggatgatgtcaattatatcttaggttcctttgatctgcccttgtatatggggaatatcaaagtatcaggtgcagtcggttgtttggtttacatccaaaatagctgcttacacttgcacaccatacctgatagaagaagatacataattttctcattgtactttttaggaaaagaaaagaaatgaaagtaaagttagcatcg

SEQ ID NO: 21821 - protein, 392 aa, Zea mays subsp. mays
  misc_feature (1)..(392): Ceres Seq. ID no. 12406410
ARDHYLEHPNQKRGQRAMDAAVRKAAGAGIARAPALVLALVAAGAFLISYNFFTMLFHGGGGIGAAVTAGTRDPVVAMPAWMRAAADTEARRRPFHVALTATDAPYSRWQCRVMYFWYKRMQARPGGEAMGGFTRVLHSGKPDGLMDEIPTFVVDPLPAGKDHGYVVLNRPWAFVQWLQKAKIEEEYILMAEPDHIFVKPLPNLAHDDDPAAFPFFYITPSEHEKIIRKYYAKERGPVTDIDPIGNSPVIIKKTILEKIAPTWMNVSIQMKEDEETDKVFGWVLEMYAYAVASALHGVHHILRKDFMIQPPFDTKLQNTFIIHFTYGCDYSLKGELTYGKVGEWRFDKRSFPDRPPPRNLTLPPPGVPESVVTLVKMVNEASANLPRWDDGI

SEQ ID NO: 21822 - protein, 375 aa, Zea mays subsp. mays
  misc_feature (1)..(375): Ceres Seq. ID no. 12406411
MDAAVRKAAGAGIARAPALVLALVAAGAFLISYNFFTMLFHGGGGIGAAVTAGTRDPVVAMPAWMRAAADTEARRRPFHVALTATDAPYSRWQCRVMYFWYKRMQARPGGEAMGGFTRVLHSGKPDGLMDEIPTFVVDPLPAGKDHGYVVLNRPWAFVQWLQKAKIEEEYILMAEPDHIFVKPLPNLAHDDDPAAFPFFYITPSEHEKIIRKYYAKERGPVTDIDPIGNSPVIIKKTILEKIAPTWMNVSIQMKEDEETDKVFGWVLEMYAYAVASALHGVHHILRKDFMIQPPFDTKLQNTFIIHFTYGCDYSLKGELTYGKVGEWRFDKRSFPDRPPPRNLTLPPPGVPESVVTLVKMVNEASANLPRWDDGI

SEQ ID NO: 21823 - protein, 338 aa, Zea mays subsp. mays
  misc_feature (1)..(338): Ceres Seq. ID no. 12406412
MLFHGGGGIGAAVTAGTRDPVVAMPAWMRAAADTEARRRPFHVALTATDAPYSRWQCRVMYFWYKRMQARPGGEAMGGFTRVLHSGKPDGLMDEIPTFVVDPLPAGKDHGYVVLNRPWAFVQWLQKAKIEEEYILMAEPDHIFVKPLPNLAHDDDPAAFPFFYITPSEHEKIIRKYYAKERGPVTDIDPIGNSPVIIKKTILEKIAPTWMNVSIQMKEDEETDKVFGWVLEMYAYAVASALHGVHHILRKDFMIQPPFDTKLQNTFIIHFTYGCDYSLKGELTYGKVGEWRFDKRSFPDRPPPRNLTLPPPGVPESVVTLVKMVNEASANLPRWDDGI

SEQ ID NO: 21824 - DNA, 1870 bp, Zea mays subsp. mays
  misc_feature (1)..(1870): Ceres Seq. ID no. 12406420
acgctctcgcgagtcgcgacgacatcctccgcggagcttgcgcgggtacggcacggagatggccgcggccgggccgacgacgtccccggccacggcgggcgccgtggaggagctcacgcggctgtaccgggagctgccgccgcgcccggccgtggaggaggtggaggcggcggcggcggtgctggcgtcggcggccgcggaggaggaggcgcgcctcgccggagatcgacagggaggaggcgctggcgcgcgggggcgcgccgcccgagctcctcgacgtgctgtgggaggcccggcgcagctccgtgcgcctccgcgcgctgcagcagcgcaaggaggccgcgcacgtcctcgagctcgagaggcggttcaggctcttcgacgacctcatccagcgggcgtcgcgtcttctgtcccccggcggtggtgccggggccaggagcggcacaggtggtgccgcggtggaccacgacgaggtcgtcgaggtcgacgccacccggaacacggagctggacgccgcgccagccgagattggtcgcgggagcaagggcggcttgggactggaacccaagtccgtctcgtcgctgcgtcgtgctgcttcggcaggtactgacacagaaaagctgggccttatccaagtggcaagccttatagagtcatcggcaaagaaggggactacagagctcaatctccggggtaagctggtggaccaagttgaatggctccctgtctcgcttgggaagttacaggatgtgactgagcttgatctatctgagaataggatcatggcactcccatcaacaattggtagccttagatacttgacaaagctcgacctccactcaaaccagctgatcaatctgcctgataccttcggggaactttccagcctgattgatcttgacttgcgtgcaaaccagctaaagtctcttcctacatcatttggaaatctcacgagcctcgccaatcttgacctgagctcgaatctgttgaaggtccttcctgattgtttaggaaagttgaaaaacttgagaaggttaattgctgagacgaatgagcttgaggagctaccctatactattggatcgtgcacctctctcgtggagcttagactggattttaatcagctcaaagccctcccagaagccattgggaagttggaaaacctggaaatcctgacgttacactacaatagaatcaaaggcctgcctacaacaattggccatcttaccaggttgagggagctggatgtcagtttcaacgaagttgagactatacctgagaacatttgctttgcagccagccttgtgaagttgaatgtcagcaggaactttgccgacttaagagccctgccaaaatcaataggggaacttgagatgctagaggagctggacatcagtatcaaccagatacgagtgcttccagactcttttgggcatctctcaaagctacgtgtgtttcatgctgatgaaactccactggaagtaccgcccaaagaagttgtaaagctaggggctcaggagctggttaattatatgaagaatatggttgctgcaagggaagtgagccagaatcaaacagataagaggagcttctggacctggctccgctcactgtttggttgttacaaaaagaatcaaggattgggaccagttccagcctagctgaaccatatcgtccgcatgtattgtcatgaattattcagttttgctccatctctcaagtcagcgacgaaatgaggcatgactactattattatttcaactttatgtttgtgtatacaatggataaatattgtagcgctttcttgtacataagattaggttatgtgtaagttcatctgtacgaaacactatcatgttaatccatg

SEQ ID NO: 21825 - protein, 553 aa, Zea mays subsp. mays
  misc_feature (1)..(553): Ceres Seq. ID no. 12406421
ALASRDDILRGACAGTARRWPRPGRRRPRPRRAPWRSSRGCTGSCRRARPWRRWRRRRRCWRRRPRRRRRASPEIDREEALARGGAPPELLDVLWEARRSSVRLRALQQRKEAAHVLELERRFRLFDDLIQRASRLLSPGGGAGARSGTGGAAVDHDEVVEVDATRNTELDAAPAEIGRGSKGGLGLEPKSVSSLRRAASAGTDTEKLGLIQVASLIESSAKKGTTELNLRGKLVDQVEWLPVSLGKLQDVTELDLSENRIMALPSTIGSLRYLTKLDLHSNQLINLPDTFGELSSLIDLDLRANQLKSLPTSFGNLTSLANLDLSSNLLKVLPDCLGKLKNLRRLIAETNELEELPYTIGSCTSLVELRLDFNQLKALPEAIGKLENLEILTLHYNRIKGLPTTIGHLTRLRELDVSFNEVETIPENICFAASLVKLNVSRNFADLRALPKSIGELEMLEELDISINQIRVLPDSFGHLSKLRVFHADETPLEVPPKEVVKLGAQELVNYMKNMVAAREVSQNQTDKRSFWTWLRSLFGCYKKNQGLGPVPA

SEQ ID NO: 21826 - protein, 292 aa, Zea mays subsp. mays
  misc_feature (1)..(292): Ceres Seq. ID no. 12406422
MALPSTIGSLRYLTKLDLHSNQLINLPDTFGELSSLIDLDLRANQLKSLPTSFGNLTSLANLDLSSNLLKVLPDCLGKLKNLRRLIAETNELEELPYTIGSCTSLVELRLDFNQLKALPEAIGKLENLEILTLHYNRIKGLPTTIGHLTRLRELDVSFNEVETIPENICFAASLVKLNVSRNFADLRALPKSIGELEMLEELDISINQIRVLPDSFGHLSKLRVFHADETPLEVPPKEVVKLGAQELVNYMKNMVAAREVSQNQTDKRSFWTWLRSLFGCYKKNQGLGPVPA

SEQ ID NO: 21827 - DNA, 1366 bp, Zea mays subsp. mays
  misc_feature (1)..(1366): Ceres Seq. ID no. 12406423
ctcctctcaactgttctctcgccgccgttctagttccgttttgccttgaggtgcacgtggcggtggaagcttcccgggcggtggcggttgttggttcatgtcgatggcgcaggtgtgctgcgactcggccgcagcggcgacaccggtggccggaccggaggcggaggccagggccagggcgcgcgccgagaggcgccgccgggccgcggaggccgggaggtggaagcacgcggcggctgctggcactggcacggcagccgcagatgccacgaggaagcggagcctcgaggccggggagctgctcgtcgcgcggaagcacggggccgcgtcggtggccggccgccggagggagatggaggacgccgtgtccgtgcgcgagtccttcgccgcggagggcgaggccgacggcggccggaggcgcgacttctacggggtgttcgacggccacggctgctcgcacgtggccgaggcgtgccgggaccggatgcacgacctgctcgccgaggagctcgccgctgccgtcgccgccgacggctccgcggcgacctggaccgccgcgatggaacgcagcttcgcgcggatggacgccgaggcgatgtcggccggcgggagcgccgcctgccgctgcgacccgcacaagtgcgaccacgtgggctccaccgccgtggtggccgtcgtggaggagcgccgcgtcgtggtggccaactgtggcgacagccgcgcgctgctgtgccgcgggggcggcgcgccgccgctgccgctgtcgtcggaccacaagcccgaccgccccgacgagctggagcggatcgaggccgcgggcggccgcgtcatcttctgggagggcgcgcgcgtgctgggcgtcctcgccatgtcccgcgccatcggggacggctacctcaagccgtacgtctcgtccgtgcccgaggtcacgctcaccgaccgctccgacgccgacgagtgcctcatcctcgccagcgacggcctctgggacgtggttagcaacgaggccgcgtgcgaggtggcgcgcgcctgcctccgccgggggcgggccaggtggtgcgccgaggccgccgcgctgctcaccaagctggccctcgccaggcgcagctccgacaacgtctcggtggtcgtcgtcgatctccggaagagggatcgctagctagctctgtgccgttagtactaatacagtagtaggatggtgcacaaaaggatctcgcgggtgtctactaattgtttctctttgtcgtcaacagttattttgctgctctccctgaatcaaaaaagttcagaggagcccttagattaattgttgtggtggaaccggaatttgacccggataccatttgggatgaatggaaccttgcat

SEQ ID NO: 21828 - protein, 386 aa, Zea mays subsp. mays
  misc_feature (1)..(386): Ceres Seq. ID no. 12406424
PLNCSLAAVLVPFCLEVHVAVEASRAVAVVGSCRWRRCAATRPQRRHRWPDRRRRPGPGRAPRGAAGPRRPGGGSTRRLLALARQPQMPRGSGASRPGSCSSRGSTGPRRWPAAGGRWRTPCPCASPSPRRARPTAAGGATSTGCSTATAARTWPRRAGTGCTTCSPRSSPLPSPPTAPRRPGPPRWNAASRGWTPRRCRPAGAPPAAATRTSATTWAPPPWWPSWRSAASWWPTVATAARCCAAGAARRRCRCRRTTSPTAPTSWSGSRPRAAASSSGRARACWASSPCPAPSGTATSSRTSRPCPRSRSPTAPTPTSASSSPATASGTWLATRPRARWRAPASAGGGPGGAPRPPRCSPSWPSPGAAPTTSRWSSSISGRGIAS

SEQ ID NO: 21829 - protein, 353 aa, Zea mays subsp. mays
  misc_feature (1)..(353): Ceres Seq. ID no. 12406425
MSMAQVCCDSAAAATPVAGPEAEARARARAERRRRAAEAGRWKHAAAAGTGTAAADATRKRSLEAGELLVARKHGAASVAGRRREMEDAVSVRESFAAEGEADGGRRRDFYGVFDGHGCSHVAEACRDRMHDLLAEELAAAVAADGSAATWTAAMERSFARMDAEAMSAGGSAACRCDPHKCDHVGSTAVVAVVEERRVVVANCGDSRALLCRGGGAPPLPLSSDHKPDRPDELERIEAAGGRVIFWEGARVLGVLAMSRAIGDGYLKPYVSSVPEVTLTDRSDADECLILASDGLWDVVSNEAACEVARACLRRGRARWCAEAAALLTKLALARRSSDNVSVVVVDLRKRDR

SEQ ID NO: 21830 - protein, 351 aa, Zea mays subsp. mays
  misc_feature (1)..(351): Ceres Seq. ID no. 12406426
MAQVCCDSAAAATPVAGPEAEARARARAERRRRAAEAGRWKHAAAAGTGTAAADATRKRSLEAGELLVARKHGAASVAGRRREMEDAVSVRESFAAEGEADGGRRRDFYGVFDGHGCSHVAEACRDRMHDLLAEELAAAVAADGSAATWTAAMERSFARMDAEAMSAGGSAACRCDPHKCDHVGSTAVVAVVEERRVVVANCGDSRALLCRGGGAPPLPLSSDHKPDRPDELERIEAAGGRVIFWEGARVLGVLAMSRAIGDGYLKPYVSSVPEVTLTDRSDADECLILASDGLWDVVSNEAACEVARACLRRGRARWCAEAAALLTKLALARRSSDNVSVVVVDLRKRDR

SEQ ID NO: 21831 - DNA, 1486 bp, Zea mays subsp. mays
  misc_feature (1)..(1486): Ceres Seq. ID no. 12406450
actagctccactccaccacacacaccgcgcagctagctgtcaccggagcaagaaggaagaaaaaccagcggcaccgatcgatcgacgacacgcgcgcgatcgaggtgaggagcgaaagaaaaggtggccttttcgaagccgccggacggagtgtagcgctagctagctccccaggccggagaggaggatggtgggacgaggagcggcgacggccctcgtgtgggcggcggtggtggcggtcgcgacggtggtgtcgcgggcgcagcagctgcaggtggggttctacgacacgctgtgcccggcggcggagatcatcgtgcaggaggaggtgagcaaggcggcgtccggcaaccccggcgtcgccgcgggcctcctgcgcctccacttccacgactgcttcgtcagggggtgcgacgcgtcggtgctgctggactcgtcggcgggcaaccaggcggagaaggacgcggcgcccaacgccagcctgcgcgggttcgaggtcatcgacagcgccaagacgcggctggagcaggcctgcttcggcgtcgtctcctgcgccgacgtcctcgccttcgccgcccgcgacgccctcgcgctggtcgggggcgacgcgtaccaggtgccggcggggcggagggacggcaacgtctcctcggcgcaggaggcgggcgcgaacctgccgccgccgacggcgagcgcgagccagctgacgcaggcgttcggcgccaaggggctgagccaggccgagatggtggcgctgtcgggggcgcacacggtgggcgcggcgcgctgcagctccttcgcgccccgcctctactcgtacgggcccagcggcgcggggcaggacccgtccatggaccccgcgtacctggcggcgctggcgcagcagtgcccgccgcaggggaccggcgccgccgacccgcccctccccatggaccccgtcacgcccaccgccttcgacaccaactactacgccaacctggtcgccaggcgcggcctgctcgcctccgaccaggcgctgctcgccgacccggccaccgccgcgcaggtgctcgcctacaccaacagccccgccaccttccagaccgacttcgtcgccgccatgatcaagatgggtgccatacaggtgctcaaccggcacagccggcaccgtccggaccaactgcagggtggctagctagctagctcatccatgagaatgtacctgtanactcatgtgcttaaaatcatacgacgaaactgtacgtacggcgtagagtggtgtggcggggtccaatgattcagattgtacgtacgtgtccatcgatccaactgtagttgtgtacgcagtacagtacgtgctagctacggatcagttgcttatatatagcttgtgcgtttttttacactttcttttgtccttttggtttataatttttattaagatatacaaatatttctcttcagattcggatcgaatacaaatattaaaaatggttcgttctttttc

SEQ ID NO: 21832 - protein, 328 aa, Zea mays subsp. mays
  misc_feature (1)..(328): Ceres Seq. ID no. 12406451
MVGRGAATALVWAAVVAVATVVSRAQQLQVGFYDTLCPAAEIIVQEEVSKAASGNPGVAAGLLRLHFHDCFVRGCDASVLLDSSAGNQAEKDAAPNASLRGFEVIDSAKTRLEQACFGVVSCADVLAFAARDALALVGGDAYQVPAGRRDGNVSSAQEAGANLPPPTASASQLTQAFGAKGLSQAEMVALSGAHTVGAARCSSFAPRLYSYGPSGAGQDPSMDPAYLAALAQQCPPQGTGAADPPLPMDPVTPTAFDTNYYANLVARRGLLASDQALLADPATAAQVLAYTNSPATFQTDFVAAMIKMGAIQVLNRHSRHRPDQLQGG

SEQ ID NO: 21833 - DNA, 1071 bp, Zea mays subsp. mays
  misc_feature (1)..(1071): Ceres Seq. ID no. 12406460
gtctctctgaccttatccccttgcggcaaaaccttgcgcgcaacaatggccgcctccctcccgaccaccgccgcgcgcctcgcggccccggccttcgcctaccggtcgcccaaggctccctccgccaccgccctcccgcgtgccgccgccttccctgcaatcgccgttgcggcggcgcccctgcgcccgcgccgcgcgccgaggccggtggcggcccgggccgggggcgaggagagggagacgatactgctccccgggtgcgactacaaccactggctgatcgtcatggagttccccaaggaccccgcgcccacccgcgagcagatgatcgacacctacctcaacacactcgccaccgtcctcggcagcatggaggaagccaagaagaacatgtacgccttcagcacgaccacctacaccgggttccagtgcaccgtggacgaggagacgtcggagaagttcaagggtctgcctggggtgctgtgggtgctccctgattcctacatcgacgtgaagaacaaggactacggaggtgacaagtacgtgaacggcgagataatcccctgcacgtacccgacgtaccagccgaaggagcggaggacgtccaagtacgagagcaggcggtacgagaggcggagagatgggccaccggcggccagcaggaaaccgaggcagcaggcaccagctcagactcagaccgagtcggcgtcttcgtgacgagctctgcaggcattttgtccacgtacctacctacctagaagtagaacaagagaggaggacgcctaaaattctgtcgcattgggcaccgcgtactggactggacaggcgggtcgggatccatcatccatcgtcagccagaaaattgtcgctgtccaagcagcctgggcagcttgtgtgtgactgtgtgtgctgatatcttgagctagctgtggcagaaactggaaaccctactgtgtgtgtgctgatatcttgtcatagcgagctgtgtgatgccgactggtgtagagctgtatcgctgattgcgtgaaaccgaaatgctgtggctttatttagactgatgttgtcacttcc

SEQ ID NO: 21834 - protein, 238 aa, Zea mays subsp. mays
  misc_feature (1)..(238): Ceres Seq. ID no. 12406461
VSLTLSPCGKTLRATMAASLPTTAARLAAPAFAYRSPKAPSATALPRAAAFPAIAVAAAPLRPRRAPRPVAARAGGEERETILLPGCDYNHWLIVMEFPKDPAPTREQMIDTYLNTLATVLGSMEEAKKNMYAFSTTTYTGFQCTVDEETSEKFKGLPGVLWVLPDSYIDVKNKDYGGDKYVNGEIIPCTYPTYQPKERRTSKYESRRYERRRDGPPAASRKPRQQAPAQTQTESASS

SEQ ID NO: 21835 - protein, 223 aa, Zea mays subsp. mays
  misc_feature (1)..(223): Ceres Seq. ID no. 12406462
MAASLPTTAARLAAPAFAYRSPKAPSATALPRAAAFPAIAVAAAPLRPRRAPRPVAARAGGEERETILLPGCDYNHWLIVMEFPKDPAPTREQMIDTYLNTLATVLGSMEEAKKNMYAFSTTTYTGFQCTVDEETSEKFKGLPGVLWVLPDSYIDVKNKDYGGDKYVNGEIIPCTYPTYQPKERRTSKYESRRYERRRDGPPAASRKPRQQAPAQTQTESASS

SEQ ID NO: 21836 - protein, 164 aa, Zea mays subsp. mays
  misc_feature (1)..(164): Ceres Seq. ID no. 12406463
LSDLIPLRQNLARNNGRLPPDHRRAPRGPGLRLPVAQGSLRHRPPACRRLPCNRRCGGAPAPAPRAEAGGGPGRGRGEGDDTAPRVRLQPLADRHGVPQGPRAHPRADDRHLPQHTRHRPRQHGGSQEEHVRLQHDHLHRVPVHRGRGDVGEVQGSAWGAVGAP

SEQ ID NO: 21837 - DNA, 1363 bp, Zea mays subsp. mays
  misc_feature (1)..(1363): Ceres Seq. ID no. 12406464
atccaagctcacggagtcgcagtgccaccgaggcttccaagcaagaaccacccccgcctgcctgcggagctcggccgtcccctgcgctgcggagcgggagcgggagcggcggcgacaatgtcctccaacggcaagcccaccccacagcccgcggcggccagcgccggcgccggcgccggcgggccgccgaagatgtaccagcgacccatctaccggccgcagcaggcgccggcgaagcggcggcgcggggggcggtcgtgcccgttcagctgctgctgctgcttctgctggacgctcctcgtcgtcgtcctcctcgccgtcctggccgccgtggccgggggcgccttctacctgctgtaccggccgcaccggccggccttcacgctgaccgcggcgcgcgtgacgaggctgagcctgtcgtcgtccgccaccgcgcccgcgctgagcgacgccatcgacgtgacgctgaccgccaggaaccccaacaagaagctggtgtacgtctacgacgacttcgccgtgacggccgccacggccgccaacgccgtgccgctgggcgcggccaccgcgcccgggttcgcgcacgacgccggcaacgtcaccgtcatccgggccaccgtctccgcgtccgcgctcgcggtcgaccccgccgcggccggctccgacgtcaagaggtccggcgagttccccatcgtcctggacctggagaccagggccggcgtccgggttggcgcgctcaggaccaaagaagatcggcatcctggtgcactgcgacggcgtcaaggtggccgcgcccgcgcccgcgccggccaagaagacgaagaagctggcgaaggccgcggccgacaccccagcccccgccgccgcggccgttgaagacgcgccggcgccgcccgccgcgtcggccacggccaccgtcgctcgcgcgtgccaggtcagggtccgcgtcaagatctggaagtggaccttctanccacgtcgtcgtcgccagcctccgaggggccgcattgcaaaatttttcgggtgaaagggaaaaaggttgctttgctttgctttgctttgcaacaccgggtgaagtttctccagtcagtccagtaggagggaaagcaagggaaacagaattcgaatcaaatgccggccgctgtaaatttttttccgtgtttaattgaattttaccaaattcggcggggagggaaggagaaggagaggtcggaggagcggcaaggcaggaagtgacgtgccgtgtgcattctgttctgcagtgtgaggcttgaacgatttgatttctctctctctctctttctctttatcgctttgtgtagtgccatttttttaaattttttcacgcatcttcttgttggtg

SEQ ID NO: 21838 - protein, 388 aa, Zea mays subsp. mays
  misc_feature (1)..(388): Ceres Seq. ID no. 12406465
  misc_feature (324)..(324): Xaa is any aa, unknown or other
PSSRSRSATEASKQEPPPPACGARPSPALRSGSGSGGDNVLQRQAHPTARGGQRRRRRRRAAEDVPATHLPAAAGAGEAAARGAVVPVQLLLLLLLDAPRRRPPRRPGRRGRGRLLPAVPAAPAGLHADRGARDEAEPVVVRHRARAERRHRRDADRQEPQQEAGVRLRRLRRDGRHGRQRRAAGRGHRARVRARRRQRHRHPGHRLRVRARGRPRRGRLRRQEVRRVPHRPGPGDQGRRPGWRAQDQRRSASWCTATASRWPRPRPRRPRRRRSWRRPRPTPQPPPPRPLKTRRRRPPRRPRPPSLARARSGSASRSGSGPSXHVVVASLRGAALQNFSGEREKGCFALLCFATPGEVSPVSPVGGKARETEFESNAGRCKFFSVFN

SEQ ID NO: 21839 - protein, 291 aa, Zea mays subsp. mays
  misc_feature (1)..(291): Ceres Seq. ID no. 12406466
IQAHGVAVPPRLPSKNHPRLPAELGRPLRCGAGAGAAATMSSNGKPTPQPAAASAGAGAGGPPKMYQRPIYRPQQAPAKRRRGGRSCPFSCCCCFCWTLLVVVLLAVLAAVAGGAFYLLYRPHRPAFTLTAARVTRLSLSSSATAPALSDAIDVTLTARNPNKKLVYVYDDFAVTAATAANAVPLGAATAPGFAHDAGNVTVIRATVSASALAVDPAAAGSDVKRSGEFPIVLDLETRAGVRVGALRTKEDRHPGALRRRQGGRARARAGQEDEEAGEGRGRHPSPRRRGR

SEQ ID NO: 21840 - protein, 252 aa, Zea mays subsp. mays
  misc_feature (1)..(252): Ceres Seq. ID no. 12406467
MSSNGKPTPQPAAASAGAGAGGPPKMYQRPIYRPQQAPAKRRRGGRSCPFSCCCCFCWTLLVVVLLAVLAAVAGGAFYLLYRPHRPAFTLTAARVTRLSLSSSATAPALSDAIDVTLTARNPNKKLVYVYDDFAVTAATAANAVPLGAATAPGFAHDAGNVTVIRATVSASALAVDPAAAGSDVKRSGEFPIVLDLETRAGVRVGALRTKEDRHPGALRRRQGGRARARAGQEDEEAGEGRGRHPSPRRRGR

SEQ ID NO: 21841 - DNA, 1811 bp, Zea mays subsp. mays
  misc_feature (1)..(1811): Ceres Seq. ID no. 12406472
acctgcatcctccctctctctctcccgctcccgtgctctctccctctccccaggatccgaattgccagcgcaccagtcgagctcgcgggacctcgccggcgccggcgatggcctcctcccttttggccggacggggagggggccaccaccacaactggggggagacgcgcgccccgctcgagcccataccccccaaccctagtcccagccagccccacccgcgcgccgacgggtccaagtccaagccgcgggcggcggccggctacgtgaagttccgcccggcgtccctgggccaccgcgaggcccgcgcgctccgggaccgcctcgcggtggagctcggccaggtccgcgccctcctctcccgcatcgacacctggcagcagcagggcccgccgccgcgcgcggtgctccgcggggcgatgcggaagcggtgcggccagatcctcagcaggctgcgcaaggacaagcgcagcgtgtggttcaacgcgcccgtcgaggtggagcgcctcggcctccacgactaccatgccgtcatcaagcgccccatggatctcggcaccgtcaaggagggcctcgccgccgggaggtacgcctcgcacgacgacttcgcggccgacgtccgcctcaccttcaccaacgcgctgcggtacaacccggtcggccacgaggttcacacgttcgctggcgccctcctcgcctacttcgagaggatgtacaaggaggcgctcgtttgtttagaggaagagcgcaagcgccttgagccgccgaggccagtggcggctgagctgccacctccgccggcagttgagcctgtcgaggcgaaggctaagacgagagcagggaatgtgaggatgcggaagcccaaggcgagggagcctaacaagagggagatgagcctggaggagaagaacatgctcaggctggggctggtgagcctgcccgaagagaagatgcacaatgtgcttcagatcgtgcgcaagaggaacaacaacccggagatgcttggggatgagatcgagcttgatattgatgagatggatgttgagacacagtgggagcttgatcgtttcgttactaacttcaacaaggcgctcaagaagtcccagcgtgctgcgatgttgaatggtggcgttgctgatgtaaccagtactgctgtggctgaggatgacactgcacctgtgggcgatgtgcctacattggttggcaatgacgatgcggagagtgaggaacctgtgaagagcactacagtggctgagcaggtggatgagtatgttgatattggggatgaaatgccagcagccactaaccaatccatggagatcgagaaggacgctgaaggtacgactggctctggtggttctggcagtggctcttcatcgtccagtggttctgagtcgaggagctcaggggacagtgcctcaggagctggcaatgctcattctttgacttaggggaggttggtaacaataggatttgaaaatctgaatgatccgagttcgtgtgcaggtaattgtaagtgtgtagctgtttctgagacatgggtgtctgcttaggctttgattacgttagtagtagataacaaactggctttgtgggtgtctgacagcagtacagcaccatgtgtatgtaagctggaggtggaaggtactagtgtgttaaaagtagctgatcgaccttctcgtatgaagggggccagggctaatgtctgtgttcttaatggtagggttgatcgaccttctcgtaattgatgctttgtgcatgacattaaagtatggttttataagtaacaatgcagtatcatttgttgggtg

SEQ ID NO: 21842 - protein, 482 aa, Zea mays subsp. mays
  misc_feature (1)..(482): Ceres Seq. ID no. 12406473
LHPPSLSPAPVLSPSPQDPNCQRTSRARGTSPAPAMASSLLAGRGGGHHHNWGETRAPLEPIPPNPSPSQPHPRADGSKSKPRAAAGYVKFRPASLGHREARALRDRLAVELGQVRALLSRIDTWQQQGPPPRAVLRGAMRKRCGQILSRLRKDKRSVWFNAPVEVERLGLHDYHAVIKRPMDLGTVKEGLAAGRYASHDDFAADVRLTFTNALRYNPVGHEVHTFAGALLAYFERMYKEALVCLEEERKRLEPPRPVAAELPPPPAVEPVEAKAKTRAGNVRMRKPKAREPNKREMSLEEKNMLRLGLVSLPEEKMHNVLQIVRKRNNNPEMLGDEIELDIDEMDVETQWELDRFVTNFNKALKKSQRAAMLNGGVADVTSTAVAEDDTAPVGDVPTLVGNDDAESEEPVKSTTVAEQVDEYVDIGDEMPAATNQSMEIEKDAEGTTGSGGSGSGSSSSSGSESRSSGDSASGAGNAHSLT

SEQ ID NO: 21843 - protein, 447 aa, Zea mays subsp. mays
  misc_feature (1)..(447): Ceres Seq. ID no. 12406474
MASSLLAGRGGGHHHNWGETRAPLEPIPPNPSPSQPHPRADGSKSKPRAAAGYVKFRPASLGHREARALRDRLAVELGQVRALLSRIDTWQQQGPPPRAVLRGAMRKRCGQILSRLRKDKRSVWFNAPVEVERLGLHDYHAVIKRPMDLGTVKEGLAAGRYASHDDFAADVRLTFTNALRYNPVGHEVHTFAGALLAYFERMYKEALVCLEEERKRLEPPRPVAAELPPPPAVEPVEAKAKTRAGNVRMRKPKAREPNKREMSLEEKNMLRLGLVSLPEEKMHNVLQIVRKRNNNPEMLGDEIELDIDEMDVETQWELDRFVTNFNKALKKSQRAAMLNGGVADVTSTAVAEDDTAPVGDVPTLVGNDDAESEEPVKSTTVAEQVDEYVDIGDEMPAATNQSMEIEKDAEGTTGSGGSGSGSSSSSGSESRSSGDSASGAGNAHSLT

SEQ ID NO: 21844 - protein, 343 aa, Zea mays subsp. mays
  misc_feature (1)..(343): Ceres Seq. ID no. 12406475
MRKRCGQILSRLRKDKRSVWFNAPVEVERLGLHDYHAVIKRPMDLGTVKEGLAAGRYASHDDFAADVRLTFTNALRYNPVGHEVHTFAGALLAYFERMYKEALVCLEEERKRLEPPRPVAAELPPPPAVEPVEAKAKTRAGNVRMRKPKAREPNKREMSLEEKNMLRLGLVSLPEEKMHNVLQIVRKRNNNPEMLGDEIELDIDEMDVETQWELDRFVTNFNKALKKSQRAAMLNGGVADVTSTAVAEDDTAPVGDVPTLVGNDDAESEEPVKSTTVAEQVDEYVDIGDEMPAATNQSMEIEKDAEGTTGSGGSGSGSSSSSGSESRSSGDSASGAGNAHSLT

SEQ ID NO: 21845 - DNA, 1312 bp, Zea mays subsp. mays
  misc_feature (1)..(1312): Ceres Seq. ID no. 12406486
agttgttctttggcttctgatttcaacaaaaaaaatggtgtttctctaaaacccacaaagccctcctctgctctccatccctgtctctcgctttccctaacccacaccagaataccagatcgagcaccgatctagggttgcacctcttctgctagccggctggcgaggagccgttcggcatctggacgcggccaagggagatgaagctcgcggggctcaagtctgtggacggcgctcacgaggagtccatctgggcggcggcgtgggcgcccgccgctgaccaccgccccacggcggtgctcctcactggcgcgctcgacgagaccgtccgcgcttggctccccgacgacctcgctgccttggggtcccccacacggggccacgcgctcggagtcgtctccctcgccgcccaccccgccggctcgctcgccgccgccgtgtcgctcgacagcttcatccgcgtctttgacgtcgacacgggggcatccgtcgccacgctggaggcgccgccgtccgagatttggggcgtccagttccatcccaagggtaatgctctggccgcagccggtggtggcagtggatcagtgaagctgtgggacacggagaagtggaaggcgatcaccagcctcgccgtcccacgcccggagggagctcgccccgacaagacaggcagcggcaagttcgtcctgtcagtcgcctggagccccgacggaaggctcctagcatgcgggtccatggacggcacgatcgccgtctacgacgcggtccgcatgaagttcctgcaccacctggagggccaccacatgccggtgcggtccatggtgttctccccggtggacccgcacgtgcttttcacggcctgcgacgactgccacgtccacatctacgacgccagggagaagggcctcgtcggggccatgtcgggccacgcgagctgggtgctgagcatcgacgcgagccccgacggcctggcggtggccacggggtcgagcgaccgcaccgtccggctctgggacctcaacatgaggacctcggtgcagaccatgagcaaccactccgatcaggtgtgggccgtggccttcaggccaccaggcggtgccggagtccgagcagggcgtctggctagcgcgtcggatgacaagagcgtctccctgtacgattactcgtaggtttttgtttccttataaaccgttgcaaatgcctctgttgtaccgaccagagatttgaattcgggcatggtggttggaagaattgttgtacgcagcacagtagtcgaggtgttaaattgcaaggaaagagtttatttcgtgct

SEQ ID NO: 21846 - protein, 322 aa, Zea mays subsp. mays
  misc_feature (1)..(322): Ceres Seq. ID no. 12406487
MKLAGLKSVDGAHEESIWAAAWAPAADHRPTAVLLTGALDETVRAWLPDDLAALGSPTRGHALGVVSLAAHPAGSLAAAVSLDSFIRVFDVDTGASVATLEAPPSEIWGVQFHPKGNALAAAGGGSGSVKLWDTEKWKAITSLAVPRPEGARPDKTGSGKFVLSVAWSPDGRLLACGSMDGTIAVYDAVRMKFLHHLEGHHMPVRSMVFSPVDPHVLFTACDDCHVHIYDAREKGLVGAMSGHASWVLSIDASPDGLAVATGSSDRTVRLWDLNMRTSVQTMSNHSDQVWAVAFRPPGGAGVRAGRLASASDDKSVSLYDYS

SEQ ID NO: 21847 - DNA, 1919 bp, Zea mays subsp. mays
  misc_feature (1)..(1919): Ceres Seq. ID no. 12406508
gactatgcatgcatacgttcggggtcgagatcgagctgaccaatgatccaatagccgccgccttgtggttgtgtcatatatgggggccgaccagtggccgtggccgtggccgtgggcgacgccgccgccgccggccctgctgcttctggcctcactactgccggcgctgctgctcgcgctgtggcgcctggtgtggcaaccgcgggccgtggcgcggtcgttcgcgaggcagggcatccgggggccgccctactgtttcctggccggatccttgtcggaggcgaagcggctggcgcgtgccagccggagaagggttccgcagctggacgtcgcttcacatgacatcatgcccatcttgctgccaccgttccaccgatgggtcgtcgagtatgggaggacattcctgtactggatcgggccaacacctgcaatcttctccgttgatttagagttgattaaggaagtgctcacagacaggacgggcctgtttggcaaggacttcatgatccccgttttcaaagtcctgttgggcaacgggctcatcttagcaaacggcgacgactggaaacggcacaggaaagttgtccttccagccttcaaccacgagaggatcaagagcatgtcggcagtgacggcggaagctacggaacagatggcacagcgatggtgcgagcagctaatactgcacagtggtgcccgtcaagcagcggaaatacaagtggaccgcgccatctgcgacctgactgccgaaatcatcggccgcgccgctttcggcaccagcctccaggaagccggtgaggtcctcctcctgatgcacgagatgcagaagatgggcgccgcggccatggtggatgctcccatactctggtatctgccgacgcggcgcaacctaacggtgcgacgtctggacaagctgttgagggccaagatcactgcgatgatggcagcgcgggtggccgccaattgcggcggtggctacggcgacgacctgctcggcctcctgctggaggcgtggtcgccggagcctgggcggcgccatgctgggagcgacgacgaagggacgacgacgacgacgctgaccaccggagaggtgatcgacgagtgcaagaccttcttcggcgccgggcaggagaccaccgccaccctcctcgtgtggaccatgttcctgctgagcacgcacccgcagtggcaggacaaggtcagggaggaggtcctccgcgaattccgcggcgacgtccccaccaccgacaccctctccagactgaagctgcttcacatggttctgctggagacactgaggctctacccgccgatcgtgtacatacaacggaggactgcctcagacgtcgtgctcaggggcatgctgcaggtcccgaggggaccgtggtatcgatccccatcggcctgctgcaacgggacagggaggtgtggggctccgacgccgacgagttcaaccccttgaggtttagcaatggcgtcgccagggccgccacggatccacacgcgctgctgtctttctcgctcggcccgagagcctgcaccggcaagagcttcggcatcatagaagcacagatcgtcatggcggtcatcctcaggaacttctccttctcgctctcccccacctacgttcacaagccaaagtatgtcgtctccctcactcccaaatgtgggatgcctctcatcttaaagaacatccatgcttgagaaaagattactggcggcactgtaacttgctaatattatattgtacgttgtgtggcatcgacagatcatatatatatactagaactagtcatgtgcccgtgcgttgctacggattctatatatcacatagataaactctgtttaattgggatatatagttgttcaaacatgtttcaaacatgtacaataatattaattcgacatatttcagtggc

SEQ ID NO: 21848 - protein, 460 aa, Zea mays subsp. mays
  misc_feature (1)..(460): Ceres Seq. ID no. 12406509
MGADQWPWPWPWATPPPPALLLLASLLPALLLALWRLVWQPRAVARSFARQGIRGPPYCFLAGSLSEAKRLARASRRRVPQLDVASHDIMPILLPPFHRWVVEYGRTFLYWIGPTPAIFSVDLELIKEVLTDRTGLFGKDFMIPVFKVLLGNGLILANGDDWKRHRKVVLPAFNHERIKSMSAVTAEATEQMAQRWCEQLILHSGARQAAEIQVDRAICDLTAEIIGRAAFGTSLQEAGEVLLLMHEMQKMGAAAMVDAPILWYLPTRRNLTVRRLDKLLRAKITAMMAARVAANCGGGYGDDLLGLLLEAWSPEPGRRHAGSDDEGTTTTTLTTGEVIDECKTFFGAGQETTATLLVWTMFLLSTHPQWQDKVREEVLREFRGDVPTTDTLSRLKLLHMVLLETLRLYPPIVYIQRRTASDVVLRGMLQVPRGPWYRSPSACCNGTGRCGAPTPTSSTP

SEQ ID NO: 21849 - protein, 371 aa, Zea mays subsp. mays
  misc_feature (1)..(371): Ceres Seq. ID no. 12406510
MPILLPPFHRWVVEYGRTFLYWIGPTPAIFSVDLELIKEVLTDRTGLFGKDFMIPVFKVLLGNGLILANGDDWKRHRKVVLPAFNHERIKSMSAVTAEATEQMAQRWCEQLILHSGARQAAEIQVDRAICDLTAEIIGRAAFGTSLQEAGEVLLLMHEMQKMGAAAMVDAPILWYLPTRRNLTVRRLDKLLRAKITAMMAARVAANCGGGYGDDLLGLLLEAWSPEPGRRHAGSDDEGTTTTTLTTGEVIDECKTFFGAGQETTATLLVWTMFLLSTHPQWQDKVREEVLREFRGDVPTTDTLSRLKLLHMVLLETLRLYPPIVYIQRRTASDVVLRGMLQVPRGPWYRSPSACCNGTGRCGAPTPTSSTP

SEQ ID NO: 21850 - protein, 319 aa, Zea mays subsp. mays
  misc_feature (1)..(319): Ceres Seq. ID no. 12406511
MIPVFKVLLGNGLILANGDDWKRHRKVVLPAFNHERIKSMSAVTAEATEQMAQRWCEQLILHSGARQAAEIQVDRAICDLTAEIIGRAAFGTSLQEAGEVLLLMHEMQKMGAAAMVDAPILWYLPTRRNLTVRRLDKLLRAKITAMMAARVAANCGGGYGDDLLGLLLEAWSPEPGRRHAGSDDEGTTTTTLTTGEVIDECKTFFGAGQETTATLLVWTMFLLSTHPQWQDKVREEVLREFRGDVPTTDTLSRLKLLHMVLLETLRLYPPIVYIQRRTASDVVLRGMLQVPRGPWYRSPSACCNGTGRCGAPTPTSSTP

SEQ ID NO: 21851 - DNA, 1442 bp, Zea mays subsp. mays
  misc_feature (1)..(1442): Ceres Seq. ID no. 12406568
atgcgagactggaggcggaaccgcgcacgacaccaagctgccgcgccggactgctgcacgcaagcgcagcgcaggaccgaccgacctccgtaggcacgcacggcgccggcggcatggcggagcacctcctgtcgacggccgtgcacgacacgctgccggggagctacgtgcggccggagccggagcgcccgcgcctcgcggaggtcgtgaccggcgcgcgcatccccgtcgtggacctgggcagccccgaccgcggcgcggtcgtggccgccgtcggcgacgcctgccgctcgcacggcttcttccaggtcgtcaaccacgggatacacgccgccctggtcgcggcggtgatggccgcggggcgcggcttcttccggctgccccccgaggagaaggccaagctctactccgacgaccccgccaggaagatccggctgtccaccagcttcaacgtgcgcaaggagacggtgcacaactggcgcgactacctccgcctgcactgccatcccctcgacgagttcctgcccgattggccgtccaacccgcccgatttcaaggagaccatgggcacctactgcaaggaggtccgggagctcgggttcaggctgtacgccgcgatctcggagagcctgggcctagaggcgagctacatgaaggaagcgctgggggagcaggagcagcacatggcggtcaacttctacccgccgtgcccggagccggagctcacctacggcctcccggcgcacaccgaccccaacgcgctcaccatcctgctcatggacccggacgtcgccggcctgcaggtgctccacgccggccagtgggtcgccgtcaacccgcagcccggcgcgctcatcatcaacatcggcgaccagctgcaggcgctgagcaacgggcagtaccggagcgtgtggcaccgcgcggtggtgaactcggaccgggagcgcatgtccgtggcgtcgttcctgtgcccgtgcaaccacgtcgtgctcggccccgcgcggaagctcgtcaccgaggacaccccggccgtgtacaggaactacacgtacgacaagtactacgccaagttctggagcaggaacctggaccaggagcactgcctcgagctcttcagaacctagcgaatcggatacggatggatggatacattacatacgcgccctctgtttttctccatgacgttagaagaacacgttctgcaatgtttgtccattcaaggtggtatcaatcaaggctgtggtcgttgcaattcttccgctccatatacatgattaaatgctttgaaagaaaaagaaaaaaagaaacacaagtattatggcactactagtgtttttaggaacaaggaaagaggggttgcccctgctggctatatatattaaatataaataaaggtaaggctgtagacattggtgaataagagaaagtatttgagtttctct

SEQ ID NO: 21852 - protein, 442 aa, Zea mays subsp. mays
  misc_feature (1)..(442): Ceres Seq. ID no. 12406569
CETGGGTAHDTKLPRRTAARKRSAGPTDLRRHARRRRHGGAPPVDGRARHAAGELRAAGAGAPAPRGGRDRRAHPRRGPGQPRPRRGRGRRRRRLPLARLLPGRQPRDTRRPGRGGDGRGARLLPAAPRGEGQALLRRPRQEDPAVHQLQRAQGDGAQLARLPPPALPSPRRVPARLAVQPARFQGDHGHLLQGGPGARVQAVRRDLGEPGPRGELHEGSAGGAGAAHGGQLLPAVPGAGAHLRPPGAHRPQRAHHPAHGPGRRRPAGAPRRPVGRRQPAARRAHHQHRRPAAGAEQRAVPERVAPRGGELGPGAHVRGVVPVPVQPRRARPRAEARHRGHPGRVQELHVRQVLRQVLEQEPGPGALPRALQNLANRIRMDGYITYAPSVFLHDVRRTRSAMFVHSRWYQSRLWSLQFFRSIYMIKCFERKRKKETQVLWHY

SEQ ID NO: 21853 - protein, 373 aa, Zea mays subsp. mays
  misc_feature (1)..(373): Ceres Seq. ID no. 12406570
ARLEAEPRTTPSCRAGLLHASAAQDRPTSVGTHGAGGMAEHLLSTAVHDTLPGSYVRPEPERPRLAEVVTGARIPVVDLGSPDRGAVVAAVGDACRSHGFFQVVNHGIHAALVAAVMAAGRGFFRLPPEEKAKLYSDDPARKIRLSTSFNVRKETVHNWRDYLRLHCHPLDEFLPDWPSNPPDFKETMGTYCKEVRELGFRLYAAISESLGLEASYMKEALGEQEQHMAVNFYPPCPEPELTYGLPAHTDPNALTILLMDPDVAGLQVLHAGQWVAVNPQPGALIINIGDQLQALSNGQYRSVWHRAVVNSDRERMSVASFLCPCNHVVLGPARKLVTEDTPAVYRNYTYDKYYAKFWSRNLDQEHCLELFRT

SEQ ID NO: 21854 - protein, 336 aa, Zea mays subsp. mays
  misc_feature (1)..(336): Ceres Seq. ID no. 12406571
MAEHLLSTAVHDTLPGSYVRPEPERPRLAEVVTGARIPVVDLGSPDRGAVVAAVGDACRSHGFFQVVNHGIHAALVAAVMAAGRGFFRLPPEEKAKLYSDDPARKIRLSTSFNVRKETVHNWRDYLRLHCHPLDEFLPDWPSNPPDFKETMGTYCKEVRELGFRLYAAISESLGLEASYMKEALGEQEQHMAVNFYPPCPEPELTYGLPAHTDPNALTILLMDPDVAGLQVLHAGQWVAVNPQPGALIINIGDQLQALSNGQYRSVWHRAVVNSDRERMSVASFLCPCNHVVLGPARKLVTEDTPAVYRNYTYDKYYAKFWSRNLDQEHCLELFRT

SEQ ID NO: 21855 - DNA, 1067 bp, Zea mays subsp. mays
  misc_feature (1)..(1067): Ceres Seq. ID no. 12406572
actcccggcctcccctcccttgccgtccacttcttcctccaccacagtcatcagtggcgttatcctcttcgttctcgcctccctggttgttgttggctgggtgttggcgagctgggagtagagaccgagaagtggagcggccatgaagatccagtgcgacgcgtgcgagggcgcggctgccacggtggtgtgctgcgccgacgaggccgcgctgtgcgcgcgctgcgacgtcgagatccacgccgccaacaagctcgccagcaagcaccagcgcctcccgctcgaggcgctctccgccaagctcccgcgctgcgacgtctgccaggagaaagcggcgttcatcttctgcgtggaggaccgggcgctcttctgccaggactgcgacgagcccatccacgtcccgggcacgctctccgggaaccaccagcgctacctggccaccggcatccgcgtcggcctcgcctcggcttccgcctgcagcgacgcctgcgacgcccacgactccgaccaccacgccccgcccaaggccaccatcgagccaccgcacgccgccgtctccgccgcggtgcagcaggtgccctcgccgccgcagttcctgccgcagggctgggccgtcgacgagctcctgcagttctccgactacgagtccagcgacaagctgcacaaggagccgacgctcgggttcaaggagctggagtggttcgccgacatcgacctcttccacgagcaggcgcccaaagccagcaggacgttggcggaggtgccggagcttttcggataccaggcggcgaacgacgcggcgtactacaggccggccaaagccgccggcggcggcggcgccggggttcgccagagcaagaaggcccggatcgaggtcaccgacgacgaggactaccttatagtccctgatcttggttaaataagagagcgcaggagttttgtttcttctcctgatgtgtaccagagaagaattttactgtgtacaagctagtgtcatgtgttgtgcatctttgactgtagtgtcgctcaattctgaacatctattaagccacttttgttgctatgcc

SEQ ID NO: 21856 - protein, 302 aa, Zea mays subsp. mays
  misc_feature (1)..(302): Ceres Seq. ID no. 12406573
TPGLPSLAVHFFLHHSHQWRYPLRSRLPGCCWLGVGELGVETEKWSGHEDPVRRVRGRGCHGGVLRRRGRAVRALRRRDPRRQQARQQAPAPPARGALRQAPALRRLPGESGVHLLRGGPGALLPGLRRAHPRPGHALREPPALPGHRHPRRPRLGFRLQRRLRRPRLRPPRPAQGHHRATARRRLRRGAAGALAAAVPAAGLGRRRAPAVLRLRVQRQAAQGADARVQGAGVVRRHRPLPRAGAQSQQDVGGGAGAFRIPGGERRGVLQAGQSRRRRRRRGSPEQEGPDRGHRRRGLPYSP

SEQ ID NO: 21857 - protein, 258 aa, Zea mays subsp. mays
  misc_feature (1)..(258): Ceres Seq. ID no. 12406574
MKIQCDACEGAAATVVCCADEAALCARCDVEIHAANKLASKHQRLPLEALSAKLPRCDVCQEKAAFIFCVEDRALFCQDCDEPIHVPGTLSGNHQRYLATGIRVGLASASACSDACDAHDSDHHAPPKATIEPPHAAVSAAVQQVPSPPQFLPQGWAVDELLQFSDYESSDKLHKEPTLGFKELEWFADIDLFHEQAPKASRTLAEVPELFGYQAANDAAYYRPAKAAGGGGAGVRQSKKARIEVTDDEDYLIVPDLG

SEQ ID NO: 21858 - DNA, 1808 bp, Zea mays subsp. mays
  misc_feature (1)..(1808): Ceres Seq. ID no. 12406575
gcacgagaccattacctagaacatcctaatcgaaaaacgcgcactgtctctctcgtatcactctccattctacctctctcttccccaatccaggccagccaaccctagcgcaccggcgatggcgtcggacccggcccctgacgacgcggccgcggccgtgaatgggcacggcaacgacaacggacacggtaacggcccgtccccgtcgaagcgcccccgggcggtgatctcggaagccgagatccgcgtcgagttcgcacaccacgacgcagccgtggcgcgcgtcaacaacggcagcttcggctgctgcccggcctcggtcctcgccgcgcaggcccactggcagcgcctcttcctcgcgcagcccgacgccttctacttccacgttctccagcagggccttctccgctcgcgcgccgccgtcgccgaggtggtgggcgctggcgacgtctccgaggtctccctcgtcgataacgccaccacggccgccgccatcgtcctgcagcacgcagcctggagcttcgccgagggtcacttcgcgcgcggggatgcggtgctgatgctccactacgcctatggtgcggtcaagaagtccatccacgcgtacgtcgcgcgtgcgggggccaccgtcgtcgaggtgcccctcccattccccgtcgcgtccgccgacgcaatcattgccgagttccgtgctgcgctcgcggtcgccaaggaaggagggcgtagggtcaggctcgcagtcatcgaccacattacctccatgcccagtgtcgtcatcccagtcaaggagctcgtcgccatctgtcgagaagagggcgttgacaaggtatttgttgacgctgcccactctattgggcaggtgcctgtggacgtgcgcgacattggagccgatttctatacaagcaaccttcataagtggttcttttgcccccctgctgtggcctttttgcatactcgcaaggatgacccgatagcctcccaactccatcaccctgttgtttcccatgagtatgggaatgggctgcctatggagagcggatggattggaacacgggattacagtgcccagcttgttgtgtccgaggctatagattttgtgaatcgatttgagggtggaattgaggctatacgaaaccggaatcatgagaaagttattgagatgggtaggatgcttgctgaggcatgggggacttttcttggctcacctccggaactgtgtggtagcatggttatggtggggatgcctggttgccttggtgttgagagtgatgatgatgcaatgagagtgaggacaatgttgagaaaggatttccaggtggaggtgccggtatactacaactcaagaagggtggaaggacaggagatgacaaaggataaaaatggtgatccagtgacagggtatgtgaggatctcacaccaggtttacaatgtcacagaggactatgagagactgagggatgttgtcaataaacttgtttctgaagggttcaccagcagcaagttgcggccttctgagaagcaagaagcttaggtgtaatgaccttccagccaggtagcatccacctgaaggcgctgtggccgactacttaggtgtggaccggatcagcgcagccagtacggcttcgtgatcgtgacgttgaagaatgtagtgtaccgccaggaactgacatgtgttgtatttggcgttcagtgtaagtaacaataatgccctggcatgttgtcttctctcacattttgggagctgctgtaacctcagaataatctggaatataaggatatttacagctgctgtagattgattgctgggc

SEQ ID NO: 21859 - protein, 470 aa, Zea mays subsp. mays
  misc_feature (1)..(470): Ceres Seq. ID no. 12406576
MASDPAPDDAAAAVNGHGNDNGHGNGPSPSKRPRAVISEAEIRVEFAHHDAAVARVNNGSFGCCPASVLAAQAHWQRLFLAQPDAFYFHVLQQGLLRSRAAVAEVVGAGDVSEVSLVDNATTAAAIVLQHAAWSFAEGHFARGDAVLMLHYAYGAVKKSIHAYVARAGATVVEVPLPFPVASADAIIAEFRAALAVAKEGGRRVRLAVIDHITSMPSVVIPVKELVAICREEGVDKVFVDAAHSIGQVPVDVRDIGADFYTSNLHKWFFCPPAVAFLHTRKDDPIASQLHHPVVSHEYGNGLPMESGWIGTRDYSAQLVVSEAIDFVNRFEGGIEAIRNRNHEKVIEMGRMLAEAWGTFLGSPPELCGSMVMVGMPGCLGVESDDDAMRVRTMLRKDFQVEVPVYYNSRRVEGQEMTKDKNGDPVTGYVRISHQVYNVTEDYERLRDVVNKLVSEGFTSSKLRPSEKQEA

SEQ ID NO: 21860 - protein, 323 aa, Zea mays subsp. mays
  misc_feature (1)..(323): Ceres Seq. ID no. 12406577
MLHYAYGAVKKSIHAYVARAGATVVEVPLPFPVASADAIIAEFRAALAVAKEGGRRVRLAVIDHITSMPSVVIPVKELVAICREEGVDKVFVDAAHSIGQVPVDVRDIGADFYTSNLHKWFFCPPAVAFLHTRKDDPIASQLHHPVVSHEYGNGLPMESGWIGTRDYSAQLVVSEAIDFVNRFEGGIEAIRNRNHEKVIEMGRMLAEAWGTFLGSPPELCGSMVMVGMPGCLGVESDDDAMRVRTMLRKDFQVEVPVYYNSRRVEGQEMTKDKNGDPVTGYVRISHQVYNVTEDYERLRDVVNKLVSEGFTSSKLRPSEKQEA

SEQ ID NO: 21861 - protein, 256 aa, Zea mays subsp. mays
  misc_feature (1)..(256): Ceres Seq. ID no. 12406578
MPSVVIPVKELVAICREEGVDKVFVDAAHSIGQVPVDVRDIGADFYTSNLHKWFFCPPAVAFLHTRKDDPIASQLHHPVVSHEYGNGLPMESGWIGTRDYSAQLVVSEAIDFVNRFEGGIEAIRNRNHEKVIEMGRMLAEAWGTFLGSPPELCGSMVMVGMPGCLGVESDDDAMRVRTMLRKDFQVEVPVYYNSRRVEGQEMTKDKNGDPVTGYVRISHQVYNVTEDYERLRDVVNKLVSEGFTSSKLRPSEKQEA

SEQ ID NO: 21862 - DNA, 1719 bp, Zea mays subsp. mays
  misc_feature (1)..(1719): Ceres Seq. ID no. 12406579
actcttcgcttctaactccgctgggccaccagctttgaccgccgcctcccttcccctccgctactgctcctccccaccccactcccccgcaggagcggcggcggcggcggcgaggtcgtaccccacatcggcgagcggcggcggcaccgccggaggcaaaggcaagatgttcgggcgcgcgccgaagaagagcgacaacaccaagtactacgagatcctcggggtgcccaagtcggcgtcccaggacgatctcaagaaggcctaccgcaaggctgctatcaagaaccaccccgacaagggcggtgaccccgagaagttcaaggagctcgcacaagcctatgaggttttgagtgatccagagaaacgtgagatttatgatcagtatggtgaagatgcccttaaggaaggaatgggcggtggaggatcccatgttgatccatttgacatcttctcatcattttttggaccctcttttggaggaggtggtggaagcagcaggggaagaaggcaaaggaggggagaagatgtagttcacccacttaaagtttctctggaagatctttacaatggcacctcaaagaagctctctctttcgcgcaatgtcatctgctccaagtgcaagggcaagggctcgaagtctggtgcctcaatgaggtgccctggttgccagggctcaggcatgaaagtcactattcgtcagctgggcccttccatgatacagcagatgcagcagccttgcaatgagtgcaaggggactggagagagcatcaatgagaaggaccgctgtccagggtgcaagggtgagaaggtcattcaagagaagaaggttcttgaggttcatgttgagaaggggatgcaacacaaccagaagatcaccttccctggtgaagctgatgaagcgcctgatactgtcactggagacattgtattcgtcctccagcagaaggatcactccaaattcaaaagaaagggtgaagatctcttctatgagcacaccttgtctctgaccgaagcactatgtgggttccaatttgttcttacacatctggacaacaggcagcttctcatcaaatcagaccctggtgaagttgttaaacctgaccaattcaaggcgattaatgatgaggggatgccaatttaccagaggcctttcatgaaggggaagctgtacatccatttcacggtggagttccctgactcgttggcaccagagcagtgcaaggctctcgagacagtacttccaccaaggccttcatccaagctgacagacatggagatagatgaatgcgaggagacgactatgcatgatgtgaacaacatcgaggaagagatgcgcaggaagcaagctcacgctgcccaggaggcgtacgaggaggacgacgagatgccgggcggagcccagagagtgcagtgcgcgcaacagtaagcagactatcatcaaggcaattgggaggggtggtgcccttaaagcatgggagtgatctctggttttgctgtcgccgagctgggaaataggaagctgaatcgacctcgcaagcggggaatgtatccttttttgctgcaacataaaaaatgctacccaggcatagctgggtaccttttaacttctgtttgtgggatttgctagagtgatggtttcgatatatagggggacttgaatgtctggaatgctacggtataacgcacatttgggtgcaatgtctgttgcattgctgtctg

SEQ ID NO: 21863 - protein, 474 aa, Zea mays subsp. mays
  misc_feature (1)..(474): Ceres Seq. ID no. 12406580
LFASNSAGPPALTAASLPLRYCSSPPHSPAGAAAAAARSYPTSASGGGTAGGKGKMFGRAPKKSDNTKYYEILGVPKSASQDDLKKAYRKAAIKNHPDKGGDPEKFKELAQAYEVLSDPEKREIYDQYGEDALKEGMGGGGSHVDPFDIFSSFFGPSFGGGGGSSRGRRQRRGEDVVHPLKVSLEDLYNGTSKKLSLSRNVICSKCKGKGSKSGASMRCPGCQGSGMKVTIRQLGPSMIQQMQQPCNECKGTGESINEKDRCPGCKGEKVIQEKKVLEVHVEKGMQHNQKITFPGEADEAPDTVTGDIVFVLQQKDHSKFKRKGEDLFYEHTLSLTEALCGFQFVLTHLDNRQLLIKSDPGEVVKPDQFKAINDEGMPIYQRPFMKGKLYIHFTVEFPDSLAPEQCKALETVLPPRPSSKLTDMEIDECEETTMHDVNNIEEEMRRKQAHAAQEAYEEDDEMPGGAQRVQCAQQ

SEQ ID NO: 21864 - protein, 419 aa, Zea mays subsp. mays
  misc_feature (1)..(419): Ceres Seq. ID no. 12406581
MFGRAPKKSDNTKYYEILGVPKSASQDDLKKAYRKAAIKNHPDKGGDPEKFKELAQAYEVLSDPEKREIYDQYGEDALKEGMGGGGSHVDPFDIFSSFFGPSFGGGGGSSRGRRQRRGEDVVHPLKVSLEDLYNGTSKKLSLSRNVICSKCKGKGSKSGASMRCPGCQGSGMKVTIRQLGPSMIQQMQQPCNECKGTGESINEKDRCPGCKGEKVIQEKKVLEVHVEKGMQHNQKITFPGEADEAPDTVTGDIVFVLQQKDHSKFKRKGEDLFYEHTLSLTEALCGFQFVLTHLDNRQLLIKSDPGEVVKPDQFKAINDEGMPIYQRPFMKGKLYIHFTVEFPDSLAPEQCKALETVLPPRPSSKLTDMEIDECEETTMHDVNNIEEEMRRKQAHAAQEAYEEDDEMPGGAQRVQCAQQ

SEQ ID NO: 21865 - protein, 338 aa, Zea mays subsp. mays
  misc_feature (1)..(338): Ceres Seq. ID no. 12406582
MGGGGSHVDPFDIFSSFFGPSFGGGGGSSRGRRQRRGEDVVHPLKVSLEDLYNGTSKKLSLSRNVICSKCKGKGSKSGASMRCPGCQGSGMKVTIRQLGPSMIQQMQQPCNECKGTGESINEKDRCPGCKGEKVIQEKKVLEVHVEKGMQHNQKITFPGEADEAPDTVTGDIVFVLQQKDHSKFKRKGEDLFYEHTLSLTEALCGFQFVLTHLDNRQLLIKSDPGEVVKPDQFKAINDEGMPIYQRPFMKGKLYIHFTVEFPDSLAPEQCKALETVLPPRPSSKLTDMEIDECEETTMHDVNNIEEEMRRKQAHAAQEAYEEDDEMPGGAQRVQCAQQ

SEQ ID NO: 21866 - DNA, 1317 bp, Zea mays subsp. mays
  misc_feature (1)..(1317): Ceres Seq. ID no. 12406590
gcacgagaccattacctagaacatcctaatcgaaaaaaaaataactcgtcggagtcagtacggtgctctctccgtctcagccgtcgccaactaatctatccccgatcacgcggcgaaccgccgcaacaccactatcaccaatcgcaatggagaaccctccaccgtcctccgccggtccgtactcggcgcccgcgccggcagcgcagcatcaggacgcggcgaaggaggatcaggacgtggcgcagctcgtgctcaacctctgcatcccggagctccgcgagaaggccatcatcatcctttccaagaagcgagaaaaatgtgaagatcttgctctactactatggcactcttttggtacaatggctgcactactccaggaaattgtgtcaatttatcgattactttcacccccacaattatcttttgaccaatcaactcgagtctgcaatgtgcttgtactccttaagtgtgtggcatcacaccctgatactaggatgccatttttaaatgcacagtttccactgtacctgtaccctttcttgaacactacctacaaaacaagagaatatgagttcttgaggattagtagcctgagcgtgatcggtgctcttgtgaagtccgatgatcatgaagtcattgtgaatttgctgtgttctgaaatagttcctttgtgtctgcgtgctattgagatgggcagtgaactttcaaaaaaggtggccacttttattctccaaaagattatgcttgacgacacagggcttgcgtacgtatgcgcttcttctgaacgtttctgcgctgttgccaatgtgctagctcagatggtcgaagcacttgctgaacagccttccccgaggacgcttaagaacacaatccgctgctacctcaggctgacagatgatcgaagggcctgccaagcgttacgtgactacctccccatcgcgttgagggacgggacattcaacggcttaatcgaggtcgatctcacagcaaggctatggctccaccagctgctgcataacgtcatgatgtcagacagtggaggcggccctcgccctgccccgggtcctgtgatggggatgtgaatgaagccggtcgccacgcctcatcatctgtgaagatccaagagcgtgcgttgtagctgtaggtagcgaagtagtaacccacagggaagggaaagcaatcgtggtggtgttcacacccttttggagggaacaaacacaaacagctgagctttgtgccgtttggatggcgaagaagcaacgataacacgcgtcttcttgatacaagtctggctggccattggtcgttgggattttg

SEQ ID NO: 21867 - protein, 311 aa, Zea mays subsp. mays
  misc_feature (1)..(311): Ceres Seq. ID no. 12406591
MENPPPSSAGPYSAPAPAAQHQDAAKEDQDVAQLVLNLCIPELREKAIIILSKKREKCEDLALLLWHSFGTMAALLQEIVSIYRLLSPPQLSFDQSTRVCNVLVLLKCVASHPDTRMPFLNAQFPLYLYPFLNTTYKTREYEFLRISSLSVIGALVKSDDHEVIVNLLCSEIVPLCLRAIEMGSELSKKVATFILQKIMLDDTGLAYVCASSERFCAVANVLAQMVEALAEQPSPRTLKNTIRCYLRLTDDRRACQALRDYLPIALRDGTFNGLIEVDLTARLWLHQLLHNVMMSDSGGGPRPAPGPVMGM

SEQ ID NO: 21868 - protein, 240 aa, Zea mays subsp. mays
  misc_feature (1)..(240): Ceres Seq. ID no. 12406592
MAALLQEIVSIYRLLSPPQLSFDQSTRVCNVLVLLKCVASHPDTRMPFLNAQFPLYLYPFLNTTYKTREYEFLRISSLSVIGALVKSDDHEVIVNLLCSEIVPLCLRAIEMGSELSKKVATFILQKIMLDDTGLAYVCASSERFCAVANVLAQMVEALAEQPSPRTLKNTIRCYLRLTDDRRACQALRDYLPIALRDGTFNGLIEVDLTARLWLHQLLHNVMMSDSGGGPRPAPGPVMGM

SEQ ID NO: 21869 - protein, 195 aa, Zea mays subsp. mays
  misc_feature (1)..(195): Ceres Seq. ID no. 12406593
MPFLNAQFPLYLYPFLNTTYKTREYEFLRISSLSVIGALVKSDDHEVIVNLLCSEIVPLCLRAIEMGSELSKKVATFILQKIMLDDTGLAYVCASSERFCAVANVLAQMVEALAEQPSPRTLKNTIRCYLRLTDDRRACQALRDYLPIALRDGTFNGLIEVDLTARLWLHQLLHNVMMSDSGGGPRPAPGPVMGM

SEQ ID NO: 21870 - DNA, 1726 bp, Zea mays subsp. mays
  misc_feature (1)..(1726): Ceres Seq. ID no. 12406596
atggtatggcagatcatcgcgacggcgatcgcgctgggcatctgcctgcacgcggggaaccacctggcgtgcgacttcccgcggctgatcgcgtcggcgcccgaggagtaccgtctggtggcgcgcttcttcgggcgggacaggcccagctaccgcgggctcctggcgggcgcggagggcgtgacggggatcgtcatggtcacgctcatggccgtctccttcaccctggccacgcggccgttccggaagcgggaggaggccagcagggacaagaagaaggcggcggcctgcaggggcgtcccgctcgccggcttcaacgccttctggtactcgcaccacctgctcatcgtcgtctacctcctgctcctcgtccacggctggttcatgttcctcgtcgacaagtggtaccagaggacgacgtggatgtacatttctgtgccgctggcgctttacgtcggggaacggacgctacgggccttccgatccaaggcctacgcagtcaagattctcaaggtgtgcctcctgccggggaacgtcctgaccgtaaccatgtcgaagccctacgggttccgctacaggagcgggcagtacatattcctgcagtgtccaacaatctccccgttcgagtggcaccctttctccatcacctcagctcccggagacgactgcgtcagcgtccacgtccagaccaggggcgactggacacaggagctcaagcgcatcttcgtcgacaactacttcacgccgtgcgtgcccagacgggctgccttcggggacctaggcgcggtggaccacaagaccaagagcccgccgaggttgctggtcgacggcccctacggcgcccccgcgcaggacttcaggaactacgacgtgctgctcctcgtcggcctcgggatcggcgccacgcccttcatcagcatcctcagagacctcctcaacaacatcaagctggccgacgaactgatggacctggcaatggagaccggccgggccgaggacagcgccagcaacctgagcgcgtcgacggcgagcggcggcaacaagaggagggcgtaccgaacgacctgcgcccacttctactgggtcacgagggagcctgggtcgttcgagtggttcaagggggtcatgaacgaggtcgccgagatggacaagaagggtgtcattgagctgcacaactacctgacaagcgtgtacgaggagcgagacgcgaggacgactctgctgtccatggtgcaggccctcaaccacgccaagcatggcgtcgacattgtgtcagggacaagggtcaggacacattttgcaaggcctaactggaaagaagtatttacgaggatagcgtccaagcacccaaattctacagtcggggtattttactgtgggagacctacacttgccaaagaactgaagaaactgtcacttgacatgagccacagaacgggaacccgatttgatttccacaaggagtacttctgatggaaaatacaagtgcccctgatttcttttagtactagaagatacagataaaaaaaattcacaaatttttgcgtagaagcgaactgatcctctttcacagtatgtaaatgtacatggtataaagcagagagtagttagaaacgttttttctttctttcttaaccaaatgggagggtgaaaatatgtcctgcgctttcagacagccattggtaactgcagatataaatgtaatagatcatatcattgtatgctg

SEQ ID NO: 21871 - protein, 490 aa, Zea mays subsp. mays
  misc_feature (1)..(490): Ceres Seq. ID no. 12406597
MVWQIIATAIALGICLHAGNHLACDFPRLIASAPEEYRLVARFFGRDRPSYRGLLAGAEGVTGIVMVTLMAVSFTLATRPFRKREEASRDKKKAAACRGVPLAGFNAFWYSHHLLIVVYLLLLVHGWFMFLVDKWYQRTTWMYISVPLALYVGERTLRAFRSKAYAVKILKVCLLPGNVLTVTMSKPYGFRYRSGQYIFLQCPTISPFEWHPFSITSAPGDDCVSVHVQTRGDWTQELKRIFVDNYFTPCVPRRAAFGDLGAVDHKTKSPPRLLVDGPYGAPAQDFRNYDVLLLVGLGIGATPFISILRDLLNNIKLADELMDLAMETGRAEDSASNLSASTASGGNKRRAYRTTCAHFYWVTREPGSFEWFKGVMNEVAEMDKKGVIELHNYLTSVYEERDARTTLLSMVQALNHAKHGVDIVSGTRVRTHFARPNWKEVFTRIASKHPNSTVGVFYCGRPTLAKELKKLSLDMSHRTGTRFDFHKEYF

SEQ ID NO: 21872 - protein, 425 aa, Zea mays subsp. mays
  misc_feature (1)..(425): Ceres Seq. ID no. 12406598
MVTLMAVSFTLATRPFRKREEASRDKKKAAACRGVPLAGFNAFWYSHHLLIVVYLLLLVHGWFMFLVDKWYQRTTWMYISVPLALYVGERTLRAFRSKAYAVKILKVCLLPGNVLTVTMSKPYGFRYRSGQYIFLQCPTISPFEWHPFSITSAPGDDCVSVHVQTRGDWTQELKRIFVDNYFTPCVPRRAAFGDLGAVDHKTKSPPRLLVDGPYGAPAQDFRNYDVLLLVGLGIGATPFISILRDLLNNIKLADELMDLAMETGRAEDSASNLSASTASGGNKRRAYRTTCAHFYWVTREPGSFEWFKGVMNEVAEMDKKGVIELHNYLTSVYEERDARTTLLSMVQALNHAKHGVDIVSGTRVRTHFARPNWKEVFTRIASKHPNSTVGVFYCGRPTLAKELKKLSLDMSHRTGTRFDFHKEYF

SEQ ID NO: 21873 - protein, 421 aa, Zea mays subsp. mays
  misc_feature (1)..(421): Ceres Seq. ID no. 12406599
MAVSFTLATRPFRKREEASRDKKKAAACRGVPLAGFNAFWYSHHLLIVVYLLLLVHGWFMFLVDKWYQRTTWMYISVPLALYVGERTLRAFRSKAYAVKILKVCLLPGNVLTVTMSKPYGFRYRSGQYIFLQCPTISPFEWHPFSITSAPGDDCVSVHVQTRGDWTQELKRIFVDNYFTPCVPRRAAFGDLGAVDHKTKSPPRLLVDGPYGAPAQDFRNYDVLLLVGLGIGATPFISILRDLLNNIKLADELMDLAMETGRAEDSASNLSASTASGGNKRRAYRTTCAHFYWVTREPGSFEWFKGVMNEVAEMDKKGVIELHNYLTSVYEERDARTTLLSMVQALNHAKHGVDIVSGTRVRTHFARPNWKEVFTRIASKHPNSTVGVFYCGRPTLAKELKKLSLDMSHRTGTRFDFHKEYF

SEQ ID NO: 21874 - DNA, 1415 bp, Zea mays subsp. mays
  misc_feature (1)..(1415): Ceres Seq. ID no. 12406615
agggtgtgcactccgatcctgccctctaataacagcagcagcagccgccatggaaggcagcagcaagaagctccagccgttcctcctcacgctgctgctggtgctctccaccgccgtgacgcccatcctctcgctgtcagtgccagacgacgaggtagcctgcgactgcgacaaacccaaggcgcccaagccgtcgcacccgcccaagaccaagccctcccacccgtcgccgtcgccgaagcccaagaaccccaagccacccaggggcagcaccgggtacccagcgccggggcaccaaccgcccaagagcccctcctaccccccggtcgtcggccctcccaagggccccgtcacgcgcccgccagtcacgcgtccgccggtcgtcggtcctcccaagggccccgtcacgcgcccgccggtcacgcgtccgccggttgtcggaccaccggtgacctacccgccgatcaccggccctccgacgacgccgcctgttgtcggaccaccggtgacctacccgccgatcaccggccctccaacaacgccgcctgttgtcggcccaccggtgacctacccaccgatcactggcccgcccgcgacgaggcgccccggtcaccggtccgcccgtaacctacccacccggcggaggcgggggcagctcgacgccgtgcccgccgccaccgagcccgacgccgacgccgtcgtcgccgacgtgcccggcggactcgctgaagctgggcgcgtgcgtggacctgctgggcgggctggtgcatatcggcctcggcgaccccgtggtgaacaagtgctgcccggtgctggaggggctggtggagctggaggcggccgtgtgcctctgcaccaccatcaagctcaggctcctcaacatcaacctctacctgccactggcgctccagctcctcctcacctgcggcaagacgccgccgccgggctacacctgcaccgtctgatctggactagctggcagcccccggcccatgcgtccatttatccgtgaacatgggttttggagtgagctagcatccagttcatcggtcgtttgaagagagatcgacatgagaggatgtcgtctgcttcgtcgttccaagctgaagaaggcacgccggaggaggaagagagtaacaacggccgggtcgatcagctaacgatggatcgatcattttttccccatatttattgtgttgcgtctgctgtagtttctaattttctagatgtgctttcggtttggtctgtagaccctgcagcttgatttggttaagtttgatttgatgcaagggaaatgggtggcggttgattgctaataattcccgttgatatttgtcatgcgtacgtgaacttgataacaaaatgcatgatgtcttctctttgcgtgatttcgagttgattgtcatcaccatggc

SEQ ID NO: 21875 - protein, 336 aa, Zea mays subsp. mays
  misc_feature (1)..(336): Ceres Seq. ID no. 12406616
GCALRSCPLITAAAAAMEGSSKKLQPFLLTLLLVLSTAVTPILSLSVPDDEVACDCDKPKAPKPSHPPKTKPSHPSPSPKPKNPKPPRGSTGYPAPGHQPPKSPSYPPVVGPPKGPVTRPPVTRPPVVGPPKGPVTRPPVTRPPVVGPPVTYPPITGPPTTPPVVGPPVTYPPITGPPTTPPVVGPPVTYPPITGPPATRRPGHRSARNLPTRRRRGQLDAVPAATEPDADAVVADVPGGLAEAGRVRGPAGRAGAYRPRRPRGEQVLPGAGGAGGAGGGRVPLHHHQAQAPQHQPLPATGAPAPPHLRQDAAAGLHLHRLIWTSWQPPAHASIYP

SEQ ID NO: 21876 - protein, 320 aa, Zea mays subsp. mays
  misc_feature (1)..(320): Ceres Seq. ID no. 12406617
MEGSSKKLQPFLLTLLLVLSTAVTPILSLSVPDDEVACDCDKPKAPKPSHPPKTKPSHPSPSPKPKNPKPPRGSTGYPAPGHQPPKSPSYPPVVGPPKGPVTRPPVTRPPVVGPPKGPVTRPPVTRPPVVGPPVTYPPITGPPTTPPVVGPPVTYPPITGPPTTPPVVGPPVTYPPITGPPATRRPGHRSARNLPTRRRRGQLDAVPAATEPDADAVVADVPGGLAEAGRVRGPAGRAGAYRPRRPRGEQVLPGAGGAGGAGGGRVPLHHHQAQAPQHQPLPATGAPAPPHLRQDAAAGLHLHRLIWTSWQPPAHASIYP

SEQ ID NO: 21877 - protein, 208 aa, Zea mays subsp. mays
  misc_feature (1)..(208): Ceres Seq. ID no. 12406618
RVCTPILPSNNSSSSRHGRQQQEAPAVPPHAAAGALHRRDAHPLAVSARRRGSLRLRQTQGAQAVAPAQDQALPPVAVAEAQEPQATQGQHRVPSAGAPTAQEPLLPPGRRPSQGPRHAPASHASAGRRSSQGPRHAPAGHASAGCRTTGDLPADHRPSDDAACCRTTGDLPADHRPSNNAACCRPTGDLPTDHWPARDEAPRSPVRP

SEQ ID NO: 21878 - DNA, 2063 bp, Zea mays subsp. mays
  misc_feature (1)..(2063): Ceres Seq. ID no. 12406630
gatctgcgaggcttttattttagacgttgtaataaactccgcttgcaaccgcaccgaactaatcgcgccagtatcagttacttctaggagcagtcctcccgttgttccagccagcgctttccccatcggccaaggatctgtgcgatctaactaagtccccttcgaatctccccacggtctaggctaactccgtctccgccgctcgccgtcggccccgccttcggttgctgcagatcgcgaccatgggaccccgcggcgtcgccctagcgctcctcgcggcggcgctcctccaggccctcgcccccgcgtcggcgncggcggcggcggcgncggcggcggggggcctggtgcgggtcgcgctgaagaagcagcccgtcgaccagaacgcccgcgtcgccgcgcgcctctccgctgaggagaggcagcgcctcctcctccgcggcgccaacgccctgggctcggccggcggcgacgacgactccgacgtcatcgcgctcaataactacatgaacgcgcagtactttggggagatcggcgtcgggacgccgccgcagaagttcaccgtcatcttcgacaccggcagctccaacctctgggtgccgtcctccaagtgctatttctcgatcgcttgctacttccactcgcgctacaagtcagggcagtcaagtacttataagaagaacggaaaacctgctgccattcaatatggaaccggtgcaattgctggttttttcagtgaggatagcgttaaattaggtgatctggatgtgaatgatcaggaatttattgaagctacaaaggagccaggccttaccttcatggttgcaaaatttgatggcattcttgggctaggctttcaggaaatatctgttgggaatgcaacacctgtgtggtataacatggtaaaacaaggtctcatcagtgaccctgttttctctttctggtttaaccgacatgctggtgaaggagaaggtggtgaaattgtgtttggtggaatggattctagtcactacaagggtgatcacacctatgtcccagtcactcagaagggatactggcagtttaatatgggtgatgtcctggttgatggaaagttccactgggttttgtgctggtggttgtgcagcaatagcagattctggaacttccttgcttgctggccccacagccattattactgaaatcaacgaaaagatcggtgctgctggtgtagtcagccaggagtgcaagactgttgtttctcaatacggacaacagatcctagatcttctgctagctgagacgcaaccagcgaagatctgttctcaggttggcctgtgcacttttgatggcactcacggtgttagcactggaattcgtagcgtagtggatgacaaagctgggaaatcaaatggtggtctcaagagtgatccaatgtgcaatgcctgtgagatggctgtggtatggatgcagaaccaactggcccagaacaagacacaggagctcatcctgacctacattaatcagctttgtgagcgtcttccttctcccatgggagaatcagccgtggactgtgccagtcttgggtccatgcccgacattgcgttcaccattggaggcaagaagttcaagctgaaaccggagcagtacattctgaaggtcggtgaaggacaagctgcccagtgcatcagtggattcacagctatggacatcccaccacctcgtggccccctctggatcctgggcgatgttttcatgggagtctaccacaccgtcttcgattacggcaagctgagggttggcttcgcggagtcggcctaaggaacgtatggtttggcgcctcctccagaggaggcaaaacgcatgcgccgagagaaaagcttcgcttgtttttaacttgtgtatttatgcggccggcggtgtgtgtatatatgctacatgtttagtgatgctttccgagacctgagacaatgcccgtctgttttaacctggcacaaggaaatttctcgatgtgtttgccaagccaatcttgtacccaattgtcaccgtgcatcctggcaacgtgtactcaaagtatttttcct

SEQ ID NO: 21879 - protein, 312 aa, Zea mays subsp. mays
  misc_feature (1)..(312): Ceres Seq. ID no. 12406631
  misc_feature (25)..(25): Xaa is any aa, unknown or other
  misc_feature (30)..(30): Xaa is any aa, unknown or other
MGPRGVALALLAAALLQALAPASAXAAAAXAAGGLVRVALKKQPVDQNARVAARLSAEERQRLLLRGANALGSAGGDDDSDVIALNNYMNAQYFGEIGVGTPPQKFTVIFDTGSSNLWVPSSKCYFSIACYFHSRYKSGQSSTYKKNGKPAAIQYGTGAIAGFFSEDSVKLGDLDVNDQEFIEATKEPGLTFMVAKFDGILGLGFQEISVGNATPVWYNMVKQGLISDPVFSFWFNRHAGEGEGGEIVFGGMDSSHYKGDHTYVPVTQKGYWQFNMGDVLVDGKFHWVLCWWLCSNSRFWNFLACWPHSHYY

SEQ ID NO: 21880 - protein, 281 aa, Zea mays subsp. mays
  misc_feature (1)..(281): Ceres Seq. ID no. 12406632
MLVKEKVVKLCLVEWILVTTRVITPMSQSLRRDTGSLIWVMSWLMESSTGFCAGGCAAIADSGTSLLAGPTAIITEINEKIGAAGVVSQECKTVVSQYGQQILDLLLAETQPAKICSQVGLCTFDGTHGVSTGIRSVVDDKAGKSNGGLKSDPMCNACEMAVVWMQNQLAQNKTQELILTYINQLCERLPSPMGESAVDCASLGSMPDIAFTIGGKKFKLKPEQYILKVGEGQAAQCISGFTAMDIPPPRGPLWILGDVFMGVYHTVFDYGKLRVGFAESA

SEQ ID NO: 21881 - protein, 256 aa, Zea mays subsp. mays
  misc_feature (1)..(256): Ceres Seq. ID no. 12406633
MSQSLRRDTGSLIWVMSWLMESSTGFCAGGCAAIADSGTSLLAGPTAIITEINEKIGAAGVVSQECKTVVSQYGQQILDLLLAETQPAKICSQVGLCTFDGTHGVSTGIRSVVDDKAGKSNGGLKSDPMCNACEMAVVWMQNQLAQNKTQELILTYINQLCERLPSPMGESAVDCASLGSMPDIAFTIGGKKFKLKPEQYILKVGEGQAAQCISGFTAMDIPPPRGPLWILGDVFMGVYHTVFDYGKLRVGFAESA

SEQ ID NO: 21882 - DNA, 1701 bp, Zea mays subsp. mays
  misc_feature (1)..(1701): Ceres Seq. ID no. 12406634
gttctcccggggctcttctccgtccgtaaggcaccgccgccgcgtctcggctggaccgacagttcggccgatccgtcttctcatcctcctcctccacctgcggctgtgcaggtcggcttcggggacgatggcggcgagggcggctgatgagaacagaaggccgggggtggggaggcccgcgccatgcgtccgagacatggggagccggcgcgcgctcacggacatcaagaacctcgtcggggttgccccgaacccctgcgccgtcgccaagaagcccgtgctgcagaagagcagaaaggacgaaaagaagacagcgttgccaagcagccggccaatgacaaggaaattcgtcgcctccttggcgagcaaagagcaacctaaatgtcagccgaccggagctgatccagaacccggagttgatcaacggaaggaaccaatcgttgatggcaccgttgatatcgacgtggaactgggcgagccggtcgacgatagtgatggtgacatcgacatgggtgatgagacagagaacaaggacattatgaaccaagatgaatcgctcatggatattgatagtgcagactcggggaacccgcttgcagcaacagaatatgttgaagagctttacaagttttacagagaaaatgaggctaagagttgtgtaaaccctgattacatgtccagtcagcaagatataaatgcaaagatgagagcaattctgattgactggctaattgaggttcactacaagtttgaactgatggatgagacgctatttcttacggtaaacgtaatagatagattcttggaaaaggaagtggttccaaggaagaagctacaactggttggaatcacagctctgcttcttgcttgcaaatatgaggaggtctcagttccagttgttgaggaccttgtgctcatttctgaccgtgcctacacaaaagggcaaattctagaaatggaaaagttgattctgaacacgctgcaattcaacatgtctgttccaacaccttatgtcttcatgaagaggtttctgaaagcagcagacgcagataaacagtttgagctagtgtcatttttcatgctggagctctgcttggtagagtaccaaatgctgaactataggccttcacatctggctgctgctgcggtttatactgcacaatgtgctattaaccgttgccagcagtggacaaaggtttgcgagtcacatagcagatacactggcgaccaactcctggagtgctcgaggatgattgtagactttcaccagaaggctggaaccggcaagctcactggcgtgcacaggaagtacagtacctacaagtttgggtgcgcggccaagattgtgcctgcgcagttcatgctggagtcaggagggacagcaccgcctccttcaggtgcaatctaattgaatcgccctgttttaactgggtgggggtttttttttttaaaagattttagcatattctccgtgaacaaaagatgcagaaaacatcgtgttgatgttgcccaaaagtgcatcgaattttcttggagaattatgattaactgttttttttctatccgtgtcctgaatgacgagtgacggactgttttttgttatactgcggctaataacgaactgtcctgttcaggaatgttgttggaaccttgtaaagaaaaacaagttctgaatcaaatggtcaaatggatcctttgtcc

SEQ ID NO: 21883 - protein, 468 aa, Zea mays subsp. mays
  misc_feature (1)..(468): Ceres Seq. ID no. 12406635
FSRGSSPSVRHRRRVSAGPTVRPIRLLILLLHLRLCRSASGTMAARAADENRRPGVGRPAPCVRDMGSRRALTDIKNLVGVAPNPCAVAKKPVLQKSRKDEKKTALPSSRPMTRKFVASLASKEQPKCQPTGADPEPGVDQRKEPIVDGTVDIDVELGEPVDDSDGDIDMGDETENKDIMNQDESLMDIDSADSGNPLAATEYVEELYKFYRENEAKSCVNPDYMSSQQDINAKMRAILIDWLIEVHYKFELMDETLFLTVNVIDRFLEKEVVPRKKLQLVGITALLLACKYEEVSVPVVEDLVLISDRAYTKGQILEMEKLILNTLQFNMSVPTPYVFMKRFLKAADADKQFELVSFFMLELCLVEYQMLNYRPSHLAAAAVYTAQCAINRCQQWTKVCESHSRYTGDQLLECSRMIVDFHQKAGTGKLTGVHRKYSTYKFGCAAKIVPAQFMLESGGTAPPPSGAI

SEQ ID NO: 21884 - protein, 426 aa, Zea mays subsp. mays
  misc_feature (1)..(426): Ceres Seq. ID no. 12406636
MAARAADENRRPGVGRPAPCVRDMGSRRALTDIKNLVGVAPNPCAVAKKPVLQKSRKDEKKTALPSSRPMTRKFVASLASKEQPKCQPTGADPEPGVDQRKEPIVDGTVDIDVELGEPVDDSDGDIDMGDETENKDIMNQDESLMDIDSADSGNPLAATEYVEELYKFYRENEAKSCVNPDYMSSQQDINAKMRAILIDWLIEVHYKFELMDETLFLTVNVIDRFLEKEVVPRKKLQLVGITALLLACKYEEVSVPVVEDLVLISDRAYTKGQILEMEKLILNTLQFNMSVPTPYVFMKRFLKAADADKQFELVSFFMLELCLVEYQMLNYRPSHLAAAAVYTAQCAINRCQQWTKVCESHSRYTGDQLLECSRMIVDFHQKAGTGKLTGVHRKYSTYKFGCAAKIVPAQFMLESGGTAPPPSGAI

SEQ ID NO: 21885 - protein, 403 aa, Zea mays subsp. mays
  misc_feature (1)..(403): Ceres Seq. ID no. 12406637
MGSRRALTDIKNLVGVAPNPCAVAKKPVLQKSRKDEKKTALPSSRPMTRKFVASLASKEQPKCQPTGADPEPGVDQRKEPIVDGTVDIDVELGEPVDDSDGDIDMGDETENKDIMNQDESLMDIDSADSGNPLAATEYVEELYKFYRENEAKSCVNPDYMSSQQDINAKMRAILIDWLIEVHYKFELMDETLFLTVNVIDRFLEKEVVPRKKLQLVGITALLLACKYEEVSVPVVEDLVLISDRAYTKGQILEMEKLILNTLQFNMSVPTPYVFMKRFLKAADADKQFELVSFFMLELCLVEYQMLNYRPSHLAAAAVYTAQCAINRCQQWTKVCESHSRYTGDQLLECSRMIVDFHQKAGTGKLTGVHRKYSTYKFGCAAKIVPAQFMLESGGTAPPPSGAI

SEQ ID NO: 21886 - DNA, 1633 bp, Zea mays subsp. mays
  misc_feature (1)..(1633): Ceres Seq. ID no. 12406661
atcaccaaccctcctcctccttgcctaggtactcgcagcagcgtcggcaagcaaggttctcttctcgcgccgcccagatctgagcgctcccatggccatgccgtcctcccgctccccggcgcngccgccaacggcctcctcctcctactggtgctacatgtgcgaccgcttcgttcgcgccgccgcttcctcctcctcctcacccacttcgccgtcctcctcctcccccgcctgcccgtcctgcggcgggggcttcctcgaggagatgggcgcgccgccgccccgcgcccgccggccccgccgcgccgcccgccgcggcaccgactcccgcgcctcgcccttcaaccccgtcatcgttctccgccgctccccgcccgccgacgccgacgccgatggctcctcctctcccgccgccgccaccggcagcagcttacgagctgttctacgacgacggggcggggtcgggcctccgcccgctcccggagagcatgtcggacttcctcatgggctccggcttcgagcggctgctggagcagctggcccagatggaggccggcggcggtctggcggcgcgcgcccgcgacgcgccgccggcgtccaaggccgccgtggactccatgcccgcgctccgcgtcggcgccgcccacgtcgcggccgacgcgcactgcgccgtctgcaaggaggccttcgagctgggcgccgaggccagggagatgccctgcgcccacatctaccatgccgactgcatcctgccctggctcgcgctccgcaactcctgccccgtctgccgccacgagatgcccgccgacaacgccgccccgcgcgctgccgccgccgccgccgcggacgaggacgccagggtcggcctcaccatctggaggctccccggcggcgggttcgcggtcgggagattcgccggcgggccgaggcccgacgagagggagctccccgtggtgtacacggagatggaaagcgggttcaacttcaacagcggccacgcgcccaggcggatctcgtggggcgccaggcaggccgcggccacggacaggggcaccgtccgccgcttcctccgcagcgtcttcgcctgctttggacgcggccacgccccgtcggcggcggccgcgcgcgccatgcctgagctcaacgacgacgacgtggcgtctgaccacagcgccgccttcagccgtgggtccaggagccggagcaccagctggaggctcgaggacgggcgtgccgacgccatggtgcagagatgaccgccgtatactgtgtggaactgcttgtagtacagttacagtaacgctgccgaaaaagattgctgctttgtttcattcatgttgtatttaccgtactactgctagcctcctgcctactacttaggaagatttgaggttgtagaacagggcaaattggtgttagtacatattgtagtagtgaggaagggaaagagagcagcatctcgacctctctttgttagagagtttgcattgcagctgcaggtggggggtcaactgcgaactcaaacacttgttcttggcttggttggtggtaatattaggagcgaggtgatggatcaactgttcttttattatctttctttctgttcagttcattgtggcaggaaccatccttg

SEQ ID NO: 21887 - protein, 459 aa, Zea mays subsp. mays
  misc_feature (1)..(459): Ceres Seq. ID no. 12406662
  misc_feature (41)..(41): Xaa is any aa, unknown or other
ITNPPPPCLGTRSSVGKQGSLLAPPRSERSHGHAVLPLPGXAANGLLLLLVLHVRPLRSRRRFLLLLTHFAVLLLPRLPVLRRGLPRGDGRAAAPRPPAPPRRPPRHRLPRLALQPRHRSPPLPARRRRRRWLLLSRRRHRQQLTSCSTTTGRGRASARSRRACRTSSWAPASSGCWSSWPRWRPAAVWRRAPATRRRRPRPPWTPCPRSASAPPTSRPTRTAPSARRPSSWAPRPGRCPAPTSTMPTASCPGSRSATPAPSAATRCPPTTPPRALPPPPPRTRTPGSASPSGGSPAAGSRSGDSPAGRGPTRGSSPWCTRRWKAGSTSTAATRPGGSRGAPGRPRPRTGAPSAASSAASSPALDAATPRRRRPRAPCLSSTTTTWRLTTAPPSAVGPGAGAPAGGSRTGVPTPWCRDDRRILCGTACSTVTVTLPKKIAALFHSCCIYRTTASLLPTT

SEQ ID NO: 21888 - protein, 348 aa, Zea mays subsp. mays
  misc_feature (1)..(348): Ceres Seq. ID no. 12406663
  misc_feature (11)..(11): Xaa is any aa, unknown or other
MAMPSSRSPAXPPTASSSYWCYMCDRFVRAAASSSSSPTSPSSSSPACPSCGGGFLEEMGAPPPRARRPRRAARRGTDSRASPFNPVIVLRRSPPADADADGSSSPAAATGSSLRAVLRRRGGVGPPPAPGEHVGLPHGLRLRAAAGAAGPDGGRRRSGGARPRRAAGVQGRRGLHARAPRRRRPRRGRRALRRLQGGLRAGRRGQGDALRPHLPCRLHPALARAPQLLPRLPPRDARRQRRPARCRRRRRGRGRQGRPHHLEAPRRRVRGREIRRRAEARREGAPRGVHGDGKRVQLQQRPRAQADLVGRQAGRGHGQGHRPPLPPQRLRLLWTRPRPVGGGRARHA

SEQ ID NO: 21889 - protein, 346 aa, Zea mays subsp. mays
  misc_feature (1)..(346): Ceres Seq. ID no. 12406664
  misc_feature (9)..(9): Xaa is any aa, unknown or other
MPSSRSPAXPPTASSSYWCYMCDRFVRAAASSSSSPTSPSSSSPACPSCGGGFLEEMGAPPPRARRPRRAARRGTDSRASPFNPVIVLRRSPPADADADGSSSPAAATGSSLRAVLRRRGGVGPPPAPGEHVGLPHGLRLRAAAGAAGPDGGRRRSGGARPRRAAGVQGRRGLHARAPRRRRPRRGRRALRRLQGGLRAGRRGQGDALRPHLPCRLHPALARAPQLLPRLPPRDARRQRRPARCRRRRRGRGRQGRPHHLEAPRRRVRGREIRRRAEARREGAPRGVHGDGKRVQLQQRPRAQADLVGRQAGRGHGQGHRPPLPPQRLRLLWTRPRPVGGGRARHA

SEQ ID NO: 21890 - DNA, 1664 bp, Zea mays subsp. mays
  misc_feature (1)..(1664): Ceres Seq. ID no. 12406665
atttccccaatcgagagtccgagacccgagaggaggcacaggcacctgcgctagctgcagctgcaaatcgtcttccccagatccggcgccgcctagttcgctcctgctcgcgacagcgcccagagccgtccgcgtgcgcccgcagagatcgtttcggggacagccgagcagagcagagcagagcagagctgactctgccgcttgttgcccgttcttggctgctgttgctggcgagagcgcgcaggaggagcggctgatttttgattctctctgtccctccctccctcgcttcgctcgcgcggggtgcgtgcacgtaccatgagaagatgatgcgcgccaggcccaaaggtacattcgccgacgcgatgagggagagctcccctcctcctcctccccctccggctccggcttcggcagcggtgaaagaggacgagtgggaggtgcggcccggcgggatgctggtgcagaagcggagccccgacgccgacgcccccgccggggcgcccgtccccaccatccgcgtcaaggtcaagttcaacggcgtgtaccacgagatctacatcaactcccaggcctccttcggtgagctgaagaagatgctgtcggcgcggaccgggctgcaccccgaggaccagaagctggtgtacaaggacaaggagcgggactccaaggcgttcctggacatggccggcgtcaaggaccgctccaagatggtgctgctcgaggaccccgccgcgcaggccaagcgcctcctcgagcagcgccgcaccgacaaggcggagcgcgccgccaagtccatctcccgcatcggcctcgacgtcgacaagctcgccaccaaggtgtcggcgctggaggccatcgtcagcaagggcggcaaggtggtggacgctgacgtggtcgccctcaccgaggcgctcatgaacgagctggtcaagctggactccatcgccgccgacggcgaagtcaaggtgcagcgacgaatgcaggagaagcgggtgcagaagtacgtggagacgctggacgctatccgcgccaagaacgcggcggcgcccaaggccaaggccaaggccaacggcgacatgaatgggcacgccaaggcccgcgcgccgcaactcccgccgcgcccgccgcccgtgtcgcagaggcggaacttccagcagccctccccggcgccagcgccgcccacgcagggctgggagtcgttcgacctgctgtcgtcggtgccgtccacgtcctcggccaccgtgaccaccaccatggcggccgcgaccaccaccacctcgccggccggcgtctccccgatcccgcggttcgactgggagctcttctgaagccctccctcctcgcggcgcgtcggcgtgccggttggtcgatcagacggtacctacctcccttgtccatggatcttccctgctctcatcagtagtgccattgtttcttctgtggattctttccatttcttttcgcctcattctctcttcttttcttccatttcctttcgaatttgtatatctactatatgtctacaaaaagaacagagagaccgacgcggtgcggtgagtgtgttcactgggtcaaaagtccgtcagttgacaactcctcctcgtgaggatccatccatgcatgttgttcagtcacagcaaataagtggtggtcttattatg

SEQ ID NO: 21891 - protein, 334 aa, Zea mays subsp. mays
  misc_feature (1)..(334): Ceres Seq. ID no. 12406666
MMRARPKGTFADAMRESSPPPPPPPAPASAAVKEDEWEVRPGGMLVQKRSPDADAPAGAPVPTIRVKVKFNGVYHEIYINSQASFGELKKMLSARTGLHPEDQKLVYKDKERDSKAFLDMAGVKDRSKMVLLEDPAAQAKRLLEQRRTDKAERAAKSISRIGLDVDKLATKVSALEAIVSKGGKVVDADVVALTEALMNELVKLDSIAADGEVKVQRRMQEKRVQKYVETLDAIRAKNAAAPKAKAKANGDMNGHAKARAPQLPPRPPPVSQRRNFQQPSPAPAPPTQGWESFDLLSSVPSTSSATVTTTMAAATTTTSPAGVSPIPRFDWELF

SEQ ID NO: 21892 - protein, 333 aa, Zea mays subsp. mays
  misc_feature (1)..(333): Ceres Seq. ID no. 12406667
MRARPKGTFADAMRESSPPPPPPPAPASAAVKEDEWEVRPGGMLVQKRSPDADAPAGAPVPTIRVKVKFNGVYHEIYINSQASFGELKKMLSARTGLHPEDQKLVYKDKERDSKAFLDMAGVKDRSKMVLLEDPAAQAKRLLEQRRTDKAERAAKSISRIGLDVDKLATKVSALEAIVSKGGKVVDADVVALTEALMNELVKLDSIAADGEVKVQRRMQEKRVQKYVETLDAIRAKNAAAPKAKAKANGDMNGHAKARAPQLPPRPPPVSQRRNFQQPSPAPAPPTQGWESFDLLSSVPSTSSATVTTTMAAATTTTSPAGVSPIPRFDWELF

SEQ ID NO: 21893 - protein, 321 aa, Zea mays subsp. mays
  misc_feature (1)..(321): Ceres Seq. ID no. 12406668
MRESSPPPPPPPAPASAAVKEDEWEVRPGGMLVQKRSPDADAPAGAPVPTIRVKVKFNGVYHEIYINSQASFGELKKMLSARTGLHPEDQKLVYKDKERDSKAFLDMAGVKDRSKMVLLEDPAAQAKRLLEQRRTDKAERAAKSISRIGLDVDKLATKVSALEAIVSKGGKVVDADVVALTEALMNELVKLDSIAADGEVKVQRRMQEKRVQKYVETLDAIRAKNAAAPKAKAKANGDMNGHAKARAPQLPPRPPPVSQRRNFQQPSPAPAPPTQGWESFDLLSSVPSTSSATVTTTMAAATTTTSPAGVSPIPRFDWELF

SEQ ID NO: 21894 - DNA, 1318 bp, Zea mays subsp. mays
  misc_feature (1)..(1318): Ceres Seq. ID no. 12406702
gcacgagaccattacctagaacatcctaatcgaaaagtacttggcaatcctctctagctagctcagcatccgacgacgggacttgcacgatggatgctgctctgctcgtcgtctccctcgtcctctgcctgctggcggctgcccctgcggcgtccgcggcgcgggccttcttcgtcttcggcgactccctcgtcgacaacggcaacaacaactacctgctgaccacggcgcgcgccgacgcgcccccctacggcatcgacttccccacgcaccaagccacgggccgcttctccaacgggcttaacatccccgacatcatcagcgagcacctcggggccgaacctgcgctgccgtacctgagccccgagctccgaggggagaagctgctcgtcggcgccaacttcgcgtcggccggcgtcgggatcctcaacgacacaggaatacagtttgtgaacatcatcaggatcggcgaccagctgcagtacttccgggagtaccagcggaagctgcgagccctcgtcggcgagccgcaggcgacgcagctcgtgaaccaggccctcgtgctcatcacgctcggcggcaacgacttcgtgaacaactactacctggtgcccatgtccgtgcggtcgcgccagtacgcactcccggactacgtccgcttcatcgtctccgagtacaggaagatcctctcgaggctgtacgagctgggcgcgcggcgcgtgatcgtgacggggacggggccgctggggtgcgtcccggccgagctggcgctacacagccagaacggcgagtgcgcggcggagctgacgcgcgccgtgaacctcttcaacccgcagatggtggacatggtgcgcggcatcaaccgcgccatcggcgccgacgtcttcgtcaccgccaacacctaccgcatgaacttcgactacctcgcaaacccgcaggacttcgggttcacgaacgtgcaggtggcgtgctgcggccagggcccgtacaacgggatcgggctgtgcacggcggcgtcgaacgtgtgcgacaaccgcgacgtgttcgcgttctgggacgcgttccaccccacggagagggcaaaccgcatcatcgtcgcccagttcatgcacggngacacggactacatgcaccccatgaacctnancaccatnctngccacggaccaggagggcctctagactatagcttgatcagccggacacgattatacgtacatgcgtgatgtgtctcacgtgcctagcacgttagccatgtgttggatgatggcagcccaatttgccaataatattcgtgcctcgatccaagtttcaccttc

SEQ ID NO: 21895 - protein, 363 aa, Zea mays subsp. mays
  misc_feature (1)..(363): Ceres Seq. ID no. 12406703
  misc_feature (342)..(342): Xaa is any aa, unknown or other
  misc_feature (352)..(352): Xaa is any aa, unknown or other
  misc_feature (353)..(353): Xaa is any aa, unknown or other
  misc_feature (355)..(355): Xaa is any aa, unknown or other
  misc_feature (356)..(356): Xaa is any aa, unknown or other
MDAALLVVSLVLCLLAAAPAASAARAFFVFGDSLVDNGNNNYLLTTARADAPPYGIDFPTHQATGRFSNGLNIPDIISEHLGAEPALPYLSPELRGEKLLVGANFASAGVGILNDTGIQFVNIIRIGDQLQYFREYQRKLRALVGEPQATQLVNQALVLITLGGNDFVNNYYLVPMSVRSRQYALPDYVRFIVSEYRKILSRLYELGARRVIVTGTGPLGCVPAELALHSQNGECAAELTRAVNLFNPQMVDMVRGINRAIGADVFVTANTYRMNFDYLANPQDFGFTNVQVACCGQGPYNGIGLCTAASNVCDNRDVFAFWDAFHPTERANRIIVAQFMHXDTDYMHPMNXXTXXATDQEGL

SEQ ID NO: 21896 - protein, 188 aa, Zea mays subsp. mays
  misc_feature (1)..(188): Ceres Seq. ID no. 12406704
  misc_feature (167)..(167): Xaa is any aa, unknown or other
  misc_feature (177)..(177): Xaa is any aa, unknown or other
  misc_feature (178)..(178): Xaa is any aa, unknown or other
  misc_feature (180)..(180): Xaa is any aa, unknown or other
  misc_feature (181)..(181): Xaa is any aa, unknown or other
MSVRSRQYALPDYVRFIVSEYRKILSRLYELGARRVIVTGTGPLGCVPAELALHSQNGECAAELTRAVNLFNPQMVDMVRGINRAIGADVFVTANTYRMNFDYLANPQDFGFTNVQVACCGQGPYNGIGLCTAASNVCDNRDVFAFWDAFHPTERANRIIVAQFMHXDTDYMHPMNXXTXXATDQEGL

SEQ ID NO: 21897 - DNA, 1686 bp, Zea mays subsp. mays
  misc_feature (1)..(1686): Ceres Seq. ID no. 12406705
aaggtatcaccacgttcactgtcgctcgacctctgttcttgagctgcttcatgcgatagcgactggaccaaagttgtactctgctgcctccccgtgcctttagtgattcggtcctcgggtttgcgtgcaatttttaatcttcgcctccagccatgggtaaggagaagtctcacatcaacattgtggttattggccacgtcgactctggcaagtcgacaaccaccggccacctgatctacaagcttggaggcattgacaagcgtgtgatcgagaggtttgagaaggaggccgctgaaatgaacaagcggtcctttaagtatgcttgggtgcttgacaagctcaaggctgagcgtgagaggggtatcaccattgatattgctctgtggaagtttgagaccaccaagtactattgcaccgttattgatgcccctggacaccgtgactttatcaagaacatgatcactggtacctcccaggctgactgtgctgtccttatcattgactccaccactggtggttttgaggctggtatctccaaggatggccagacacgtgagcatgctctccttgcgttcacacttggagtgaagcagatgatttgctgctgcaacaagatggatgcaaccactcccaaatactccaaggcacgttatgatgagattgtgaaggaagtctcatcttacctcaagaaagttgggtacaaccctgataagatagcatttgttcccatctctggttttgagggtgacaacatgattgagaggtccaccaaccttgactggtacaaaggcccaaccctgcttgaggctcttgaccagatcaccgagcccaagagaccctcggacaagcccctgcgtctccccctccaggatgtgtacaagattggtggtattggaactgtgccagttggtcgtgtggagactggtgtcatcaagcctggtatggttgtcacctttggtccaactggcctgactactgaggtgaagtctgttgagatgcaccatgaggctcttcaggaggcccttcctggtgacaatgttggcttcaacgtgaagaacgtcgctgtgaaggatatcaagcgtggttatgtggcctccaactccaaggatgaccctgccaaggaggctgccagcttcacctcccaggtcatcatcatgaaccaccctgggcagatcggtaacggttatgccccagtgctggactgccacacctcccatattgctgtcaagtttgctgagctcattaccaagatcgacaggcgttctggcaaggagcttgagaaagagcccaagttcttgaagaacggtgatgctggtatggtgaagatgattcccaccaagcccatggtggtggagacattctcgcagtatcctcccctgggtaggtttgctgtccgtgacatgagacagacggttgctgttggagtcatcaagagtgtggagaagaaggacccgaccggtgccaaggtgaccaaggctgctgccaagaagaaatgatgcgacctgtcgttgatgcagcgtctgcttttccaatacgtagctgagatgttccattttgacataagttttgtatgctgtggttgctgtttaccttgtgaactgttgagctctactattgggtgtccgtttatctgtttatgtagcatcttgttatttcacctattgcaatacaagaatgctatatgac

SEQ ID NO: 21898 - protein, 447 aa, Zea mays subsp. mays
  misc_feature (1)..(447): Ceres Seq. ID no. 12406706
MGKEKSHINIVVIGHVDSGKSTTTGHLIYKLGGIDKRVIERFEKEAAEMNKRSFKYAWVLDKLKAERERGITIDIALWKFETTKYYCTVIDAPGHRDFIKNMITGTSQADCAVLIIDSTTGGFEAGISKDGQTREHALLAFTLGVKQMICCCNKMDATTPKYSKARYDEIVKEVSSYLKKVGYNPDKIAFVPISGFEGDNMIERSTNLDWYKGPTLLEALDQITEPKRPSDKPLRLPLQDVYKIGGIGTVPVGRVETGVIKPGMVVTFGPTGLTTEVKSVEMHHEALQEALPGDNVGFNVKNVAVKDIKRGYVASNSKDDPAKEAASFTSQVIIMNHPGQIGNGYAPVLDCHTSHIAVKFAELITKIDRRSGKELEKEPKFLKNGDAGMVKMIPTKPMVVETFSQYPPLGRFAVRDMRQTVAVGVIKSVEKKDPTGAKVTKAAAKKK

SEQ ID NO: 21899 - protein, 399 aa, Zea mays subsp. mays
  misc_feature (1)..(399): Ceres Seq. ID no. 12406707
MNKRSFKYAWVLDKLKAERERGITIDIALWKFETTKYYCTVIDAPGHRDFIKNMITGTSQADCAVLIIDSTTGGFEAGISKDGQTREHALLAFTLGVKQMICCCNKMDATTPKYSKARYDEIVKEVSSYLKKVGYNPDKIAFVPISGFEGDNMIERSTNLDWYKGPTLLEALDQITEPKRPSDKPLRLPLQDVYKIGGIGTVPVGRVETGVIKPGMVVTFGPTGLTTEVKSVEMHHEALQEALPGDNVGFNVKNVAVKDIKRGYVASNSKDDPAKEAASFTSQVIIMNHPGQIGNGYAPVLDCHTSHIAVKFAELITKIDRRSGKELEKEPKFLKNGDAGMVKMIPTKPMVVETFSQYPPLGRFAVRDMRQTVAVGVIKSVEKKDPTGAKVTKAAAKKK

SEQ ID NO: 21900 - protein, 346 aa, Zea mays subsp. mays
  misc_feature (1)..(346): Ceres Seq. ID no. 12406708
MITGTSQADCAVLIIDSTTGGFEAGISKDGQTREHALLAFTLGVKQMICCCNKMDATTPKYSKARYDEIVKEVSSYLKKVGYNPDKIAFVPISGFEGDNMIERSTNLDWYKGPTLLEALDQITEPKRPSDKPLRLPLQDVYKIGGIGTVPVGRVETGVIKPGMVVTFGPTGLTTEVKSVEMHHEALQEALPGDNVGFNVKNVAVKDIKRGYVASNSKDDPAKEAASFTSQVIIMNHPGQIGNGYAPVLDCHTSHIAVKFAELITKIDRRSGKELEKEPKFLKNGDAGMVKMIPTKPMVVETFSQYPPLGRFAVRDMRQTVAVGVIKSVEKKDPTGAKVTKAAAKKK

SEQ ID NO: 21901 - DNA, 1407 bp, Zea mays subsp. mays
  misc_feature (1)..(1407): Ceres Seq. ID no. 12406721
aaaacctctgaaccctcatcgagtttctgtggacgccacgccacgcgaccatacgtgtatagcacgcagcgcggcatcggcgtcgcacgcactcgcgcttgccgctggacggaggagcggagcaccgatcggccgggctcggtgcacgcgcctagcggatgaagatggccgtgctcgcgggcgcggccgtcgttgcggtggcggcggcggcgatggtcgccgcgctcctgtcctccccggacgcgctgcgcgacgtcgcggtgctggagattggcggcggggaaaggccgtgtcgagttggtccccgtggacgccggcgccgcggggcccgagagcctggcgttcgacccggccggcggcggcccgtacgcgggcgtgtcggacggccgcgtcctccggtgggtccccggcgagcggcgctgggaagagcactcggcctcctgcgcgcccgaactgctggacagctgcaggggctcccaggacccggggcgcgagcacgagtgcgggcgcccgttgggcctcaagttcaaccccgacacgggggagctctacgtggccgacgcctaccacggcctgcgcatggtcgcgccgggcccgggcggcggcaaggcgtcgaggccggtggcgccggagtggtggcagggcgcgcgcgccttcagcttcgccaacggcgtcgaggtcgacccgggcaccggcgccgtctacttcaccgagacgagcacgaggttccagaggcgggagttcctgcgcatcgtcgtgtccggcgacacgacggggcggctgctgcggtacgacccgaggggcggcggtggggtggaggtgctggccgacggcctggcgttccccaacggcctcgcgatgagcagcgacggcacgcacctgctgctggcggagaccaccacggggaggatcctccggtactggctccgcccgacggctcccaaggcgccggcgctgctggaggaggtggcgcggctgccgtggttcccggacaacatcaggatgagcccccggggcggcttctgggtggggctccacgccaggaggggcaagctcgcccagtactgcatctcctacccctggctccggcgcctggtgctggcgctgccgccgcgccacgtccagcgcgcctcgtcgctgctcagccgcctcgggcggcaggtcatcgcgctgcggctgagcgaggaggacgggagggtggtggagatggccagcgtccacggggatcttcggagggtgttcaggtccgtcagcgaagtggcggagaggaacggcagcatctggattggctctgtcatgtcgccgtttctcggagtctacaagttgcagtagaggcatttacgcttaaatatggattcagtagcttattatagcaaaggaaaacatacatcgcatctatatttgtgt

SEQ ID NO: 21902 - protein, 404 aa, Zea mays subsp. mays
  misc_feature (1)..(404): Ceres Seq. ID no. 12406722
MKMAVLAGAAVVAVAAAAMVAALLSSPDALRDVAVLEIGGGERPCRVGPRGRRRRGAREPGVRPGRRRPVRGRVGRPRPPVGPRRAALGRALGLLRARTAGQLQGLPGPGARARVRAPVGPQVQPRHGGALRGRRLPRPAHGRAGPGRRQGVEAGGAGVVAGRARLQLRQRRRGRPGHRRRLLHRDEHEVPEAGVPAHRRVRRHDGAAAAVRPEGRRWGGGAGRRPGVPQRPRDEQRRHAPAAGGDHHGEDPPVLAPPDGSQGAGAAGGGGAAAVVPGQHQDEPPGRLLGGAPRQEGQARPVLHLLPLAPAPGAGAAAAPRPARLVAAQPPRAAGHRAAAERGGREGGGDGQRPRGSSEGVQVRQRSGGEERQHLDWLCHVAVSRSLQVAVEAFTLKYGFSSLL

SEQ ID NO: 21903 - protein, 402 aa, Zea mays subsp. mays
  misc_feature (1)..(402): Ceres Seq. ID no. 12406723
MAVLAGAAVVAVAAAAMVAALLSSPDALRDVAVLEIGGGERPCRVGPRGRRRRGAREPGVRPGRRRPVRGRVGRPRPPVGPRRAALGRALGLLRARTAGQLQGLPGPGARARVRAPVGPQVQPRHGGALRGRRLPRPAHGRAGPGRRQGVEAGGAGVVAGRARLQLRQRRRGRPGHRRRLLHRDEHEVPEAGVPAHRRVRRHDGAAAAVRPEGRRWGGGAGRRPGVPQRPRDEQRRHAPAAGGDHHGEDPPVLAPPDGSQGAGAAGGGGAAAVVPGQHQDEPPGRLLGGAPRQEGQARPVLHLLPLAPAPGAGAAAAPRPARLVAAQPPRAAGHRAAAERGGREGGGDGQRPRGSSEGVQVRQRSGGEERQHLDWLCHVAVSRSLQVAVEAFTLKYGFSSLL

SEQ ID NO: 21904 - protein, 386 aa, Zea mays subsp. mays
  misc_feature (1)..(386): Ceres Seq. ID no. 12406724
MVAALLSSPDALRDVAVLEIGGGERPCRVGPRGRRRRGAREPGVRPGRRRPVRGRVGRPRPPVGPRRAALGRALGLLRARTAGQLQGLPGPGARARVRAPVGPQVQPRHGGALRGRRLPRPAHGRAGPGRRQGVEAGGAGVVAGRARLQLRQRRRGRPGHRRRLLHRDEHEVPEAGVPAHRRVRRHDGAAAAVRPEGRRWGGGAGRRPGVPQRPRDEQRRHAPAAGGDHHGEDPPVLAPPDGSQGAGAAGGGGAAAVVPGQHQDEPPGRLLGGAPRQEGQARPVLHLLPLAPAPGAGAAAAPRPARLVAAQPPRAAGHRAAAERGGREGGGDGQRPRGSSEGVQVRQRSGGEERQHLDWLCHVAVSRSLQVAVEAFTLKYGFSSLL

SEQ ID NO: 21905 - DNA, 1452 bp, Zea mays subsp. mays
  misc_feature (1)..(1452): Ceres Seq. ID no. 12406744
tccccgcgcgcccgcgcgcgagctcgttcgtgcgcggccgccggcgttggcgacgacgaccgaggagccatggcggccaagggcggcgccacgccgtcccccggcggcacggggcccgcggcggggaacggccgcctcttcacggtggggctagtcacggcctggtactcctccaacatcggcgtgctcctgctcaacaagtacctcctcagcaactacggcttcaagtaccccatcttcctcaccatgtgccacatgtccgcctgcgccctgctctcctacgccgccatcgcctggctgcgcgtcgtgcccatgcagctcgtgcgctcccgcgtccagctcgccaagatcgccgcgctcagcctcgtcttctgcggctccgtcgtctccgggaacgtctcgctgcgctacctccccgtgtccttcaaccaggccgtcggcgccaccacgcccttctttaccgccgtcttcgcgtacatcatgaccgtcaagcgcgagtcgtggatcacctacctcaccctcgtgcccgtcgttactggagtcatcatcgccagcggcggcgagcctagctttcatctgtttggattcatcatgtgcataggagcaactgcagcaagggcgttgaagacagtactgcaaggaattcttctgtcttctgatggggagaagcttaattctatgaatctgttattgtacatggctccaattgctgttattttcttgcttcctgcaactatctttatggaggataatgttgttggcatcacaattcagcttgcaaagaaggatttcacgattgtttggttgctactgttcaattcttgcttgtcatattttgtcaatttgaccaatttcttggtgaccaaacatactagcgcactgactctacaggttctcggaaatgcaaagggtgccgtggcagtcgtcatctcaatcatgatattcaggaatcctgtgtccataacaggaatgctcggttacactctcacagtttttggcgtcattctttacagtgaatccaaaaagcgcagcaacaagccgtgaccaccctagaagacagtaaatacggccatcatttctttgtcctgccagcgcctagagctaatatatgatgagaaactacaccggtggcgatcacaacaaacccaatgccgtaccgcctcagcaattggacatcaagggtagaagtccaataatacctgtagtattaaattggcatgtacgaggcattttttttaatggcattgatggatagaatacatatattttttgtgttagagaagtgtggctcagactgccagcattggttagtacgtttagctcttgggatattgcctcttctattcatcggctactgtaacttctattttcttttgttctgaagactacctgtaccagactttgatccaggttccagggcctaattaatatattgacactgaatttaagctt

SEQ ID NO: 21906 - protein, 347 aa, Zea mays subsp. mays
  misc_feature (1)..(347): Ceres Seq. ID no. 12406745
SPRARARARSCAAAGVGDDDRGAMAAKGGATPSPGGTGPAAGNGRLFTVGLVTAWYSSNIGVLLLNKYLLSNYGFKYPIFLTMCHMSACALLSYAAIAWLRVVPMQLVRSRVQLAKIAALSLVFCGSVVSGNVSLRYLPVSFNQAVGATTPFFTAVFAYIMTVKRESWITYLTLVPVVTGVIIASGGEPSFHLFGFIMCIGATAARALKTVLQGILLSSDGEKLNSMNLLLYMAPIAVIFLLPATIFMEDNVVGITIQLAKKDFTIVWLLLFNSCLSYFVNLTNFLVTKHTSALTLQVLGNAKGAVAVVISIMIFRNPVSITGMLGYTLTVFGVILYSESKKRSNKP

SEQ ID NO: 21907 - protein, 324 aa, Zea mays subsp. mays
  misc_feature (1)..(324): Ceres Seq. ID no. 12406746
MAAKGGATPSPGGTGPAAGNGRLFTVGLVTAWYSSNIGVLLLNKYLLSNYGFKYPIFLTMCHMSACALLSYAAIAWLRVVPMQLVRSRVQLAKIAALSLVFCGSVVSGNVSLRYLPVSFNQAVGATTPFFTAVFAYIMTVKRESWITYLTLVPVVTGVIIASGGEPSFHLFGFIMCIGATAARALKTVLQGILLSSDGEKLNSMNLLLYMAPIAVIFLLPATIFMEDNVVGITIQLAKKDFTIVWLLLFNSCLSYFVNLTNFLVTKHTSALTLQVLGNAKGAVAVVISIMIFRNPVSITGMLGYTLTVFGVILYSESKKRSNKP

SEQ ID NO: 21908 - protein, 265 aa, Zea mays subsp. mays
  misc_feature (1)..(265): Ceres Seq. ID no. 12406747
MCHMSACALLSYAAIAWLRVVPMQLVRSRVQLAKIAALSLVFCGSVVSGNVSLRYLPVSFNQAVGATTPFFTAVFAYIMTVKRESWITYLTLVPVVTGVIIASGGEPSFHLFGFIMCIGATAARALKTVLQGILLSSDGEKLNSMNLLLYMAPIAVIFLLPATIFMEDNVVGITIQLAKKDFTIVWLLLFNSCLSYFVNLTNFLVTKHTSALTLQVLGNAKGAVAVVISIMIFRNPVSITGMLGYTLTVFGVILYSESKKRSNKP

SEQ ID NO: 21909 - DNA, 1250 bp, Zea mays subsp. mays
  misc_feature (1)..(1250): Ceres Seq. ID no. 12406761
aagccaagcaaggagagcagcagcttagcctagcactgctgcagcttgcttgctttgctttgcttcttcttggccaggcctcagagcagagctttggcttggctagtcgtcgtccgcggatagtctccgctacaccgtgtgcgtgcaagcaaggcaaggcaaccagccagccgcggcgacgaccgatcgtcaacaagctcgatcgccttggccggcggccgggcgggccaccgcaagccgcgagcgatggaggagcagctgggcccggtggcggtgacgcacctgctgcagcacacgctgcggagcctctgcaccggcgacgccccgcagtggggtctacgccgtcttctggcgcatcctgccccggaactacccgccccccaaatgggatctccctggcgccgcgtacgacaggacccgagggaacaggaggaactggatcctggcatgggaggacgggttctgcaacttcgcggcggccagcagctctgccgccgcgtccgcgtgcggccaagagggggcagcggcagctgcggcggttgcatatgccggggactgtgaggcagctgtgcaggatgcggtgaagcaccagcaccagcaggcgcagggcctgcagcctgagctgttcttcaagatgtcccatgacatctacaactacggcgaaggtctgatagggaaagtggcggcagaccacagccacaagtgggtgttcaaggagccccaggagcacgagacgagcaacctcatctcctcctggagcaaccctgcagactctcatccgaggacgtgggaggcgcagttccagtgcggcatccaggtgcacacttttaggccttgacaaatcgcaatccggcccctttttgatcagaggcaggcagctagcgctagctagctgtgggctgtgtggcctacctcctctggctgcgattgcccaagacaagacatggccagctagctgactctgccatgccatggccaattggcctgcctgcctgcgtcggcttttctttttctttttttcccccctcgctcacattctgcgctttgctctgcacttgtgcagaccatcgccctgatcgctgtcagggagggcgtcgtgcagctcggctccatgaaaaaggtgccgctactctctcagtcagctactgctcaccggtcgttctctgcactccgattgagggtccgaggcagggcagcgcgtgtgtgcagtagcgagcgctgtagtatggtttttgtgttgtgtgtgtgtg

SEQ ID NO: 21910 - protein, 193 aa, Zea mays subsp. mays
  misc_feature (1)..(193): Ceres Seq. ID no. 12406762
AKQGEQQLSLALLQLACFALLLLGQASEQSFGLASRRPRIVSATPCACKQGKATSQPRRRPIVNKLDRLGRRPGGPPQAASDGGAAGPGGGDAPAAAHAAEPLHRRRPAVGSTPSSGASCPGTTRPPNGISLAPRTTGPEGTGGTGSWHGRTGSATSRRPAALPPRPRAAKRGQRQLRRLHMPGTVRQLCRMR

SEQ ID NO: 21911 - protein, 104 aa, Zea mays subsp. mays
  misc_feature (1)..(104): Ceres Seq. ID no. 12406763
MEEQLGPVAVTHLLQHTLRSLCTGDAPQWGLRRLLAHPAPELPAPQMGSPWRRVRQDPREQEELDPGMGGRVLQLRGGQQLCRRVRVRPRGGSGSCGGCICRGL

SEQ ID NO: 21912 - DNA, 1269 bp, Zea mays subsp. mays
  misc_feature (1)..(1269): Ceres Seq. ID no. 12406782
accattccgattcggcgatttgattcccagccttccccctgctctgcccacctcccatttcccgcccctctttcctactacaataaaaatatccaaaattcccgaacagagtcacccccgcttctcagaaacccaattcccgttcccgatcctcacctcaaccccgcgccgccccctccccaccaccctcgccatggtcagcgccgccgcctcgccgccgccgtccgggaagccgacgcaggacgagctgaagcgcttggcggcgcaccgcgcggtggagctcgtggagccctgcatgacgctgggcctgggcacgggctccacggcggcgcacgcgctggaccgcctgggcgacctcctccgcgcgggcgcgctgccgggggtgtccggcgtgccgacctcgctcaagacggaggcgcacgcggcgcgcgtcggcatcccgctgctcccgctcgacgccgccagcatcgcgctgtccatcgacggcgccgacgaggtcgacccggacctcaacctcgtcaagggccgcggcggctcgctgctccgcgagaagatggtcgagggcgccggcgcccgcttcgccgtcatcgtcgacgagtccaagctcgtgccgcgcctcggctgcaccggcgccgtccccgtcgaggtcgtcccgttcggcgcgccccacacgctgggcctcatccgcggcctcttccacggcctgcccggcttccacgccaggctcaggaccaccaccgtccccgagggggagcaaggctccgagcagcagcccttcgtcaccgacaacggcaactacatcgtcgagatgttcttcgacggcggcatccgcggcgacctgcgcgacatcagcgaccgcctgctccgcataaccggcgtcgtcgagcacggcatgttcctgggcatggccaccgtcgccattgtcgccaagaaggacggcacggtcgcagtcatggaaaggaagtagttagtctacaattcatcgaagcagccatcgcctgctccccatcaacagcgtgttcctctacgtggccatcatcaccaccgtcgccaacggcgacgacaataagtaataattctgcatgtagcctgtgtctgtgcaatatccagctactcttatctaaagttggagctgttgtcgtgtccgtgcgtcatcctcccatactatactgagtgtctgctgattactatggagtatgttaatcatcatcatcatccttatgttatcatcacaaaccttgttatcagtgattctcacgctattttact

SEQ ID NO: 21913 - protein, 390 aa, Zea mays subsp. mays
  misc_feature (1)..(390): Ceres Seq. ID no. 12406783
TIPIRRFDSQPSPCSAHLPFPAPLSYYNKNIQNSRTESPPLLRNPIPVPDPHLNPAPPPPHHPRHGQRRRLAAAVREADAGRAEALGGAPRGGARGALHDAGPGHGLHGGARAGPPGRPPPRGRAAGGVRRADLAQDGGARGARRHPAAPARRRQHRAVHRRRRRGRPGPQPRQGPRRLAAPREDGRGRRRPLRRHRRRVQARAAPRLHRRRPRRGRPVRRAPHAGPHPRPLPRPARLPRQAQDHHRPRGGARLRAAALRHRQRQLHRRDVLRRRHPRRPARHQRPPAPHNRRRRARHVPGHGHRRHCRQEGRHGRSHGKEVVSLQFIEAAIACSPSTACSSTWPSSPPSPTATTISNNSACSLCLCNIQLLLSKVGAVVVSVRHPPILY

SEQ ID NO: 21914 - protein, 321 aa, Zea mays subsp. mays
  misc_feature (1)..(321): Ceres Seq. ID no. 12406784
PFRFGDLIPSLPPALPTSHFPPLFPTTIKISKIPEQSHPRFSETQFPFPILTSTPRRPLPTTLAMVSAAASPPPSGKPTQDELKRLAAHRAVELVEPCMTLGLGTGSTAAHALDRLGDLLRAGALPGVSGVPTSLKTEAHAARVGIPLLPLDAASIALSIDGADEVDPDLNLVKGRGGSLLREKMVEGAGARFAVIVDESKLVPRLGCTGAVPVEVVPFGAPHTLGLIRGLFHGLPGFHARLRTTTVPEGEQGSEQQPFVTDNGNYIVEMFFDGGIRGDLRDISDRLLRITGVVEHGMFLGMATVAIVAKKDGTVAVMERK

SEQ ID NO: 21915 - protein, 257 aa, Zea mays subsp. mays
  misc_feature (1)..(257): Ceres Seq. ID no. 12406785
MVSAAASPPPSGKPTQDELKRLAAHRAVELVEPCMTLGLGTGSTAAHALDRLGDLLRAGALPGVSGVPTSLKTEAHAARVGIPLLPLDAASIALSIDGADEVDPDLNLVKGRGGSLLREKMVEGAGARFAVIVDESKLVPRLGCTGAVPVEVVPFGAPHTLGLIRGLFHGLPGFHARLRTTTVPEGEQGSEQQPFVTDNGNYIVEMFFDGGIRGDLRDISDRLLRITGVVEHGMFLGMATVAIVAKKDGTVAVMERK

SEQ ID NO: 21916 - DNA, 1825 bp, Zea mays subsp. mays
  misc_feature (1)..(1825): Ceres Seq. ID no. 12406786
agtgctgtgctgtgctgtgctgtgcagcggttgctcctcctggtcctgctactgctccgctctcctcgtcgcttgctcgtcttttttccacactgggcggatttctttctcgcaaggagcaggaggaggaggagggggaaaggtttgtccgtttcttgcgagagcccgttgcagagatccagccaggcagcaggattcaagaacctgacctttttgtgctctactccccgagagattttcacccaaagtttggtccttggagccgattcgatccctggaaacaaccaagtgaaggtgccgcaaatccgttgtgactgcacaaaatcccaaaacgcctctgccacctatctatttgatcgttgggaacctagctccatccatctgagccaagaaagcagcagccgcagggcggaggggaggggagaggataggagagggcgtcctcttccgagcagcccgcattgccgcctgtcgatgagtgagcgctgcctccgatgccgtcggggtgctcggtgtccagtctcgcggcgcggttcgccttcttcccgccggagccggcgacgtacgccgtccggaaggacgaggccacgggccgcctcgtcgcctccggcgtgccgcgggacaacgccatggacgtcctgctcgtcgacaccagcagggggaacaaggtggtggccttctacttccggaacccctgcgcgcgcctcaccctgctctactcgcacggcaacgctgccgacctcggccagctgtacgacctctttgtgcagctcaaggtcaatctcaagatcaacctgatgggatatgactattctggctatggtgcatctactggcaagccaagtgaagagaatacatatgcagacattgaagcagtgtaccaatgcttagaaactgagtatgggatcagccagggaagacattatcttgtacggacaatctgtcggcagtggaccaacattacatttagcctctcgtttgcctagattgcgtggggtggttctccacagcgctatactgtcaggcctccgtgtggtttgccatgtgaactttactttctgctttgacatttacaaaaatgtcaagaaaataaaaaaggtcaaatgcccagtgctcgttattcatgggacggacgacgacgtggtggactggtcgcacgggaaggagctgtggaggctggcgagggagcctcacgacccgctctggatcaagggcggcgggcactgcaacctggagctgtacccggacttcatccgccacctgtcgcggttcgtccgcgagatggagaccgtgacgacgaaggcccggctgaggaagatccggccggccctccaccagctccgcaagaaggcggcgcaccgggcaagcacggcggcgacgacgaccaccaccaccaccttcaccgccaactgctgctgccgcgtccgcgtccgcaagccgacctgccccagctgcggctccttcggctgtggctgctgcgggccgcttaggagctgcctcgcgctccggtttcccaggtgctgccggcctcctgctgcctgcttcacctgcggcggctgctgttggtcatgcaggtgcaggagctgcttcaagtgctgctgctgctgatgatgatgttgagacgtgcgtcaatgagtgccgcccgccgatcgatccctgcgcgcgcgcgcgcgcgtatggtataatgaagaggaatgacagtggtcatgggatccctgctaacaaaccctttaaacgccgtagactataaaaaaaacctagatttgagctggtggctgctgaacgttgtattaacagatcccaggactccccgccgtttgtggtc

SEQ ID NO: 21917 - protein, 265 aa, Zea mays subsp. mays
  misc_feature (1)..(265): Ceres Seq. ID no. 12406787
SAVLCCAVQRLLLLVLLLLRSPRRLLVFFPHWADFFLARSRRRRRGKGLSVSCESPLQRSSQAAGFKNLTFLCSTPREIFTQSLVLGADSIPGNNQVKVPQIRCDCTKSQNASATYLFDRWEPSSIHLSQESSSRRAEGRGEDRRGRPLPSSPHCRLSMSERCLRCRRGARCPVSRRGSPSSRRSRRRTPSGRTRPRAASSPPACRGTTPWTSCSSTPAGGTRWWPSTSGTPARASPCSTRTATLPTSASCTTSLCSSRSISRST

SEQ ID NO: 21918 - protein, 235 aa, Zea mays subsp. mays
  misc_feature (1)..(235): Ceres Seq. ID no. 12406788
MGSAREDIILYGQSVGSGPTLHLASRLPRLRGVVLHSAILSGLRVVCHVNFTFCFDIYKNVKKIKKVKCPVLVIHGTDDDVVDWSHGKELWRLAREPHDPLWIKGGGHCNLELYPDFIRHLSRFVREMETVTTKARLRKIRPALHQLRKKAAHRASTAATTTTTTTFTANCCCRVRVRKPTCPSCGSFGCGCCGPLRSCLALRFPRCCRPPAACFTCGGCCWSCRCRSCFKCCCC

SEQ ID NO: 21919 - protein, 163 aa, Zea mays subsp. mays
  misc_feature (1)..(163): Ceres Seq. ID no. 12406789
MPSGCSVSSLAARFAFFPPEPATYAVRKDEATGRLVASGVPRDNAMDVLLVDTSRGNKVVAFYFRNPCARLTLLYSHGNAADLGQLYDLFVQLKVNLKINLMGYDYSGYGASTGKPSEENTYADIEAVYQCLETEYGISQGRHYLVRTICRQWTNITFSLSFA

SEQ ID NO: 21920 - DNA, 1631 bp, Zea mays subsp. mays
  misc_feature (1)..(1631): Ceres Seq. ID no. 12406794
acctgtagttttctccactcgtcctcgtcctttgtccctgtccttcggggacaaaaacaaccaaggcgcaagcggtaatcttccgtggtgggggcgttctctgctgcaagcagtggtgacgccgcttggagggagggcgggcgggaaaggatggaggcggtggtggacctcaagtacctgccggttttcccgaacggcggcgtggccgcggccaagaagaagacgaggctcgggaccactgcggttgccggcggccagacgggggtgtactaccgggaatgcctcaagaaccacgcggcgagcctgggtggccacgcgctggacgggtgcggcgagttcatgccgtcgccggaggccgacccggcggacccgagttcgctcaggtgcgccgcgtgcggatgccaccgcaacttccaccgccggctaccggagctgtccccgccgccgcctctcctcgctttgccgccgcctccaccgccactggcgccggcgccggctgtcgcgccgcatgccatgcgtgacagccgcacgatgcgcggcgaggaggcgccagacgaccgcctgccggccgccttcgacgacgacaccgaggagtcggacgagggctcagatttcgaagaggaccggtcccctaacgccgctgccggcgccgggcatggtgccgntgccgcccggctaccgccaggtcgcgccacacatgctcctcgcgctgagcaccagcgcgccgggcgcccaaactcccgcggcggggcccaggccgcccgcctccctggtcccgatgccggcgcccgggtgctgctgctgctgcggcggcggcggccggcggcgaggaagcggttccgcaccaagttcagcccggaacagaagcagaggatgcaggctctgtcggagcggttgggttggcggctgcagaagcgcgacgaggcccgtggtcgacgagtgctgccaggagatcggcgtcaccaagggcgtcttcaaggtttggatgcacaacaacaagcacaacttcgtcggcggccacagccgcgcgccgcagcgcctcagcgtctgctgccacggccatccaccatccgttcgacgctgcccccgtctgcgcttcctcccacgccgccccagcaccagccgccgctgtgcacctttccgcccacgccgccccagcgccagccgcctccccggccacgcctgtcctcgctgactccaacatcaacggcaacgctgccgactacttccgtgtccaaccgtcgacggcgagtggcggctcgccgcagtcgtcctagtcaagttagtgctaatcagccatggttatttgtagagcctcgtgtctaattaaccaaccctaatggagcgagcaatggtgggatgcatgggactatcgaatatgggagcgctagtgagaaggctgctgctggtctttgttaatggtggagcccaaagaaggatcgtggggttttgggatctgatgatgtaatgattcaggattagcgcttatggtactagtagactgttagaccaactccactgaactgtactttgtcttcgtctaggatatcatgttgttccatataaaaatgcgatctgtccactgttgggttggctttaatacatatcgatttttacttttactgtttttt

SEQ ID NO: 21921 - protein, 397 aa, Zea mays subsp. mays
  misc_feature (1)..(397): Ceres Seq. ID no. 12406795
  misc_feature (222)..(222): Xaa is any aa, unknown or other
PVVFSTRPRPLSLSFGDKNNQGASGNLPWWGRSLLQAVVTPLGGRAGGKGWRRWWTSSTCRFSRTAAWPRPRRRRGSGPLRLPAARRGCTTGNASRTTRRAWVATRWTGAASSCRRRRPTRRTRVRSGAPRADATATSTAGYRSCPRRRLSSLCRRLHRHWRRRRLSRRMPCVTAARCAARRRQTTACRPPSTTTPRSRTRAQISKRTGPLTPLPAPGMVPXPPGYRQVAPHMLLALSTSAPGAQTPAAGPRPPASLVPMPAPGCCCCCGGGGRRRGSGSAPSSARNRSRGCRLCRSGWVGGCRSATRPVVDECCQEIGVTKGVFKVWMHNNKHNFVGGHSRAPQRLSVCCHGHPPSVRRCPRLRFLPRRPSTSRRCAPFRPRRPSASRLPGHACPR

SEQ ID NO: 21922 - protein, 391 aa, Zea mays subsp. mays
  misc_feature (1)..(391): Ceres Seq. ID no. 12406796
  misc_feature (172)..(172): Xaa is any aa, unknown or other
MEAVVDLKYLPVFPNGGVAAAKKKTRLGTTAVAGGQTGVYYRECLKNHAASLGGHALDGCGEFMPSPEADPADPSSLRCAACGCHRNFHRRLPELSPPPPLLALPPPPPPLAPAPAVAPHAMRDSRTMRGEEAPDDRLPAAFDDDTEESDEGSDFEEDRSPNAAAGAGHGAXAARLPPGRATHAPRAEHQRAGRPNSRGGAQAARLPGPDAGARVLLLLRRRRPAARKRFRTKFSPEQKQRMQALSERLGWRLQKRDEARGRRVLPGDRRHQGRLQGLDAQQQAQLRRRPQPRAAAPQRLLPRPSTIRSTLPPSALPPTPPQHQPPLCTFPPTPPQRQPPPRPRLSSLTPTSTATLPTTSVSNRRRRVAARRSRPSQVSANQPWLFVEPRV

SEQ ID NO: 21923 - protein, 328 aa, Zea mays subsp. mays
  misc_feature (1)..(328): Ceres Seq. ID no. 12406797
  misc_feature (109)..(109): Xaa is any aa, unknown or other
MPSPEADPADPSSLRCAACGCHRNFHRRLPELSPPPPLLALPPPPPPLAPAPAVAPHAMRDSRTMRGEEAPDDRLPAAFDDDTEESDEGSDFEEDRSPNAAAGAGHGAXAARLPPGRATHAPRAEHQRAGRPNSRGGAQAARLPGPDAGARVLLLLRRRRPAARKRFRTKFSPEQKQRMQALSERLGWRLQKRDEARGRRVLPGDRRHQGRLQGLDAQQQAQLRRRPQPRAAAPQRLLPRPSTIRSTLPPSALPPTPPQHQPPLCTFPPTPPQRQPPPRPRLSSLTPTSTATLPTTSVSNRRRRVAARRSRPSQVSANQPWLFVEPRV

SEQ ID NO: 21924 - DNA, 1340 bp, Zea mays subsp. mays
  misc_feature (1)..(1340): Ceres Seq. ID no. 12406798
atcaaactaaaaaaaatctcaattctcaaagtcgtcgatccagcggtagcagcgcacaaaccgatcgatctcggagagggagagaaccaaccaatttcatcgccgatcaaacaaggaaaaaagatcccggccatggcgacgcggtcgctggagctgacgctgatctcgggcaaggacctcaaggacgtgaacctgatgtccaggatggaggtctacgccgtggtgtcgctctccggcgacccccggtcgcggcagcgggtccaggccgaccgcaccggcggccgcaacccgacctggaacgccacgctccgcttcgccgtcccggccaccggcgccggctccctccacgtcctcctccgcgccgagcgcgccctcggcgaccgcgacgtcggcgaggtccacatcccgctgtccgagctcctctccggcgcccccgacggccccgtccccgccaagttcgtggcctaccaggtgcgcaagatctcctccggcaagccccagggagttctcaacctgtcgtacaagctcggcgaggtcgccaacggctacgcccccgcttccgccgcccagtccgcctacgcccatcctccaccgaccgccgcgtacccgcctccttcaggcaaggctgacgcctacgcgcctcccgccgcgtacccgcctccttcgggcaaggccgacgcgtacgcgccccctgccgcatacccgccggcaaccaaggccgacgcgtacccacctccatacggcgcctacccgcccgccggcggcaaggccgacgctgcttacccgccgtcatccggctacccacccgcggcggcaggcaagccaggcaaggggggcgaaccggtgacggcctacccttcggccggtcccagcacggcggcgccctacgctgctcctccgccgcagtacggcggctacggttacccgccgcagcagggcgcgggctacggctacccgcccccgccgccgcagcaggcggggtacgggtacggctacccgccgccgcaggccgccggctacgggtaccagcagcaggccgtgaggccgcagaagaagaagaacaacttcgggatggggctcggggccgggctgctcggaggcgccgtcgggggcctcctgatcggcgacatgatctcggactcgtcggcgtacgacgccgggttcgacgatggcggcggcttcgatttctagcgcgctccggtggcatgggcgattgggcggtgacgccacgccgcgcatcagagacggagaggttcccgttttggatttgccttttgtgatttgtttccttctgtacgcaatctatgtaattgtcggaacgaaatcaatcaagattatgc

SEQ ID NO: 21925 - protein, 396 aa, Zea mays subsp. mays
  misc_feature (1)..(396): Ceres Seq. ID no. 12406799
IKLKKISILKVVDPAVAAHKPIDLGEGENQPISSPIKQGKKIPAMATRSLELTLISGKDLKDVNLMSRMEVYAVVSLSGDPRSRQRVQADRTGGRNPTWNATLRFAVPATGAGSLHVLLRAERALGDRDVGEVHIPLSELLSGAPDGPVPAKFVAYQVRKISSGKPQGVLNLSYKLGEVANGYAPASAAQSAYAHPPPTAAYPPPSGKADAYAPPAAYPPPSGKADAYAPPAAYPPATKADAYPPPYGAYPPAGGKADAAYPPSSGYPPAAAGKPGKGGEPVTAYPSAGPSTAAPYAAPPPQYGGYGYPPQQGAGYGYPPPPPQQAGYGYGYPPPQAAGYGYQQQAVRPQKKKNNFGMGLGAGLLGGAVGGLLIGDMISDSSAYDAGFDDGGGFDF

SEQ ID NO: 21926 - protein, 352 aa, Zea mays subsp. mays
  misc_feature (1)..(352): Ceres Seq. ID no. 12406800
MATRSLELTLISGKDLKDVNLMSRMEVYAVVSLSGDPRSRQRVQADRTGGRNPTWNATLRFAVPATGAGSLHVLLRAERALGDRDVGEVHIPLSELLSGAPDGPVPAKFVAYQVRKISSGKPQGVLNLSYKLGEVANGYAPASAAQSAYAHPPPTAAYPPPSGKADAYAPPAAYPPPSGKADAYAPPAAYPPATKADAYPPPYGAYPPAGGKADAAYPPSSGYPPAAAGKPGKGGEPVTAYPSAGPSTAAPYAAPPPQYGGYGYPPQQGAGYGYPPPPPQQAGYGYGYPPPQAAGYGYQQQAVRPQKKKNNFGMGLGAGLLGGAVGGLLIGDMISDSSAYDAGFDDGGGFDF

SEQ ID NO: 21927 - protein, 331 aa, Zea mays subsp. mays
  misc_feature (1)..(331): Ceres Seq. ID no. 12406801
MSRMEVYAVVSLSGDPRSRQRVQADRTGGRNPTWNATLRFAVPATGAGSLHVLLRAERALGDRDVGEVHIPLSELLSGAPDGPVPAKFVAYQVRKISSGKPQGVLNLSYKLGEVANGYAPASAAQSAYAHPPPTAAYPPPSGKADAYAPPAAYPPPSGKADAYAPPAAYPPATKADAYPPPYGAYPPAGGKADAAYPPSSGYPPAAAGKPGKGGEPVTAYPSAGPSTAAPYAAPPPQYGGYGYPPQQGAGYGYPPPPPQQAGYGYGYPPPQAAGYGYQQQAVRPQKKKNNFGMGLGAGLLGGAVGGLLIGDMISDSSAYDAGFDDGGGFDF

SEQ ID NO: 21928 - DNA, 1206 bp, Zea mays subsp. mays
  misc_feature (1)..(1206): Ceres Seq. ID no. 12406819
gttcccccggttattctattccctttccctcccccgcctcctctgctcctcgctctcccacccgctcgggcatccgccacacggccacaccaacactgcactccaccgcggcccgccacagtcctcctcctccgtcgccgtcgttcttcagcggcgccttcgcttccccagcacggtaccctagcatcagcgattcagcgctcaatacaagccaccgcggccatggcgcccgcaccggcagctctctccgcggccaacgccctctcgctgctcgcgcccgctagagtctcctccggaaggtggagcagcctgtccgtctccgtctcagcccggcccgtgaccggggtggtgtctgtcgcggcggccacggcgcagaggaggctggtcgccgcggcggcggcgacggagatggcgcccgcggcgagcggggaagaagggagcaagccgttcgtggaggagatgcgggcggtcgcgatgaagctccacaccaaggaccaggcccgggagggggagaaggagccccaggcgccccccgtcgccaagtgggagccctccgtcgaggggtacctccgattcctcgtcgacagcaagctcgtcttccagacgctcgaagccattgtcgagcgcgccgccgtcccgtggtatgcagagtttcggaatactgggctggagagatcagaggcgctgaaaaatgatctggaatggttcaggcaacagggccacacaattccagaaccatcggctcctggcaccacatacgcttctctactggaagagctgtctgaggaggacccccaggcctttatctgccatttctataacgtgtactttgctcatactgctggaggccgaatgattggcaaaaaggtttccgagaagattctgaacaacaaagagctggagttctacaagtgggagggcaatctctcctagctgctgcagaacgtccgcaacaagcttaaccaagtcgcttcgagctggtctcgggaggagaaggaccactgcctggaggagacggagaagtcgttctcttactcaggaggcctcctccgccatatatttacctgatctatcattgctggttgatccagtctcaaacgctgtaaatacatagtcctttgaatgttaaaactttattactggtgagggggatctcctgccccaggtacggtttacctgcattcaagttgctcagtgtcttacttg

SEQ ID NO: 21929 - protein, 310 aa, Zea mays subsp. mays
  misc_feature (1)..(310): Ceres Seq. ID no. 12406820
VPPVILFPFPPPPPLLLALPPARASATRPHQHCTPPRPATVLLLRRRRSSAAPSLPQHGTLASAIQRSIQATAAMAPAPAALSAANALSLLAPARVSSGRWSSLSVSVSARPVTGVVSVAAATAQRRLVAAAAATEMAPAASGEEGSKPFVEEMRAVAMKLHTKDQAREGEKEPQAPPVAKWEPSVEGYLRFLVDSKLVFQTLEAIVERAAVPWYAEFRNTGLERSEALKNDLEWFRQQGHTIPEPSAPGTTYASLLEELSEEDPQAFICHFYNVYFAHTAGGRMIGKKVSEKILNNKELEFYKWEGNLS

SEQ ID NO: 21930 - protein, 236 aa, Zea mays subsp. mays
  misc_feature (1)..(236): Ceres Seq. ID no. 12406821
MAPAPAALSAANALSLLAPARVSSGRWSSLSVSVSARPVTGVVSVAAATAQRRLVAAAAATEMAPAASGEEGSKPFVEEMRAVAMKLHTKDQAREGEKEPQAPPVAKWEPSVEGYLRFLVDSKLVFQTLEAIVERAAVPWYAEFRNTGLERSEALKNDLEWFRQQGHTIPEPSAPGTTYASLLEELSEEDPQAFICHFYNVYFAHTAGGRMIGKKVSEKILNNKELEFYKWEGNLS

SEQ ID NO: 21931 - protein, 174 aa, Zea mays subsp. mays
  misc_feature (1)..(174): Ceres Seq. ID no. 12406822
MAPAASGEEGSKPFVEEMRAVAMKLHTKDQAREGEKEPQAPPVAKWEPSVEGYLRFLVDSKLVFQTLEAIVERAAVPWYAEFRNTGLERSEALKNDLEWFRQQGHTIPEPSAPGTTYASLLEELSEEDPQAFICHFYNVYFAHTAGGRMIGKKVSEKILNNKELEFYKWEGNLS

SEQ ID NO: 21932 - DNA, 1606 bp, Zea mays subsp. mays
  misc_feature (1)..(1606): Ceres Seq. ID no. 12406836
atccagctagctgctcacgcccgccacgcctctctttgtctctttcacccagtgacagcgcacagctcccaacctgctcgaagctcggctcagccgatccagtgcgccatggccggccgcgaggcaggcgactgcggcggagaggagccggcccgcgagatccccgacgacatcacgggcgagatcctgctccgcctgccgtcgcgctcggcgctggcgcgcgccgcggtggcgagctgcgccttccacgcgctcgtcgcctccccgcgcttcctccgccgccaccgctcgctgcatagggatcccggatcgctcctcggggtcttcaccttccctctcgtccccgacggcggcagaggtggaggcgacggctcggggcttccaccccaccgagcccccgcacccggcggcgtccaccgccagcgccgtcgccgctgcggccgacttctcgtttgggttcctcccagcggacccctccgccacggctgggtctgaggctgccgagtggatggtccgggactaccgcgacggccgcttcctcctcgaccgcgtgccttcgggaaccgggagcaccgtcttcaccgagctcgccgtctgcgacccgctgtcccgacgctacgtcctgctcccgcccattccggaggacctcgccgacaccgtccacagcgtgctcaccgtcttcggcggccgccgcgcgtgcgagcccttcctcgcgcccgccgagacctgcggcgcggacgacgtcgacgcggacccacctctcaccgtgttctggacggcccgctccccgaggaagatggtggccttcgccttctcgtcgcgcgacggacgatggcgtgcgctcgagtcgccgaactgcttcatctggcgcaggcaccgctccccgttcagctgccccatggcccccatcagcaccgtctggaaccgccgccactacgcgcacggctgcttctactgggtggactgcctcaccagccgctggctcgtgctcgacgggcgcaccatggagctctccctcgcgatgatcccgtcgccggccggctactgggaggagcacgtcgcagtcgtggaggccccggacgggaagcttggcgtattcgcgcacggtttccaccaccccgacggcaaagccaatctacactactatacgatcgtgcacgacaaggaagccgccggcgacacgaagcggtggcagctggagaagacgatccagctgccgtggccgtcagaccaccggtctttctgcctccggggcacggccaacgggtgcctcaacgttggcctcatcattgaagtcggcgagaagaagtcggtattcatgggaagccaccgcatcagggacgccgagctattcaagatcgacgtcaagagtttccagctccaaaagatctgccgagcacggtgcgccggcagtgctgccggcgagtgctgctggccatacttcggcttcccgccgtcgctgtccttgcccactgtgtgagaagcttgatgttactgagacaaaatgaattatgttacagcttcagagccgtccgtctgtatgtaacatgtataagcaacacttgtactcgtccagtttgtttacaaatgcaacgcatacatacat

SEQ ID NO: 21933 - protein, 323 aa, Zea mays subsp. mays
  misc_feature (1)..(323): Ceres Seq. ID no. 12406837
MVRDYRDGRFLLDRVPSGTGSTVFTELAVCDPLSRRYVLLPPIPEDLADTVHSVLTVFGGRRACEPFLAPAETCGADDVDADPPLTVFWTARSPRKMVAFAFSSRDGRWRALESPNCFIWRRHRSPFSCPMAPISTVWNRRHYAHGCFYWVDCLTSRWLVLDGRTMELSLAMIPSPAGYWEEHVAVVEAPDGKLGVFAHGFHHPDGKANLHYYTIVHDKEAAGDTKRWQLEKTIQLPWPSDHRSFCLRGTANGCLNVGLIIEVGEKKSVFMGSHRIRDAELFKIDVKSFQLQKICRARCAGSAAGECCWPYFGFPPSLSLPTV

SEQ ID NO: 21934 - protein, 227 aa, Zea mays subsp. mays
  misc_feature (1)..(227): Ceres Seq. ID no. 12406838
MVAFAFSSRDGRWRALESPNCFIWRRHRSPFSCPMAPISTVWNRRHYAHGCFYWVDCLTSRWLVLDGRTMELSLAMIPSPAGYWEEHVAVVEAPDGKLGVFAHGFHHPDGKANLHYYTIVHDKEAAGDTKRWQLEKTIQLPWPSDHRSFCLRGTANGCLNVGLIIEVGEKKSVFMGSHRIRDAELFKIDVKSFQLQKICRARCAGSAAGECCWPYFGFPPSLSLPTV

SEQ ID NO: 21935 - protein, 193 aa, Zea mays subsp. mays
  misc_feature (1)..(193): Ceres Seq. ID no. 12406839
MAPISTVWNRRHYAHGCFYWVDCLTSRWLVLDGRTMELSLAMIPSPAGYWEEHVAVVEAPDGKLGVFAHGFHHPDGKANLHYYTIVHDKEAAGDTKRWQLEKTIQLPWPSDHRSFCLRGTANGCLNVGLIIEVGEKKSVFMGSHRIRDAELFKIDVKSFQLQKICRARCAGSAAGECCWPYFGFPPSLSLPTV

SEQ ID NO: 21936 - DNA, 1422 bp, Zea mays subsp. mays
  misc_feature (1)..(1422): Ceres Seq. ID no. 12406840
tcagataccaccagaccagaccagatccgtcccgcgaatctaaggtcaaaccaaccgcgatccgcgaatccgcggagaggaggggaggggaggggaagggcgcgggggcatggagttcctgcagggccagaggctggagaccacgctggccgtcgcggccgccgtcgttgccgtcgcagccggctccgcctacctcttcctccgcagtaggaagcccaggggatgcctagaccccgagaacttcaaggagttcaaacttgttgagaagaggcagctgagtcataatgttgccaagttcaagtttgcgctcccaacacctacttctgtattgggtcttccaatcggacagcatataagctgcagaggacaggatgcttctggcgaggaagtgatcaagccttatactccaactactctggactctgatgttggatcttttgagcttgttataaagatgtatccccaaggaagaatgtctcatcatttccgtgagatgaaagttggtgattatatgtctgtgaagggacctaagggccgtttcaagtacctacctggacaagtgagagcattaggaatggtagctggaggatcaggcattactccaatgttccaagtcacaagggcaattcttgagaacccaaaggacaacacgaaagtacacttaatctatgcaaatgtcacgtatgaggatattcttctgaaggaagaacttgacggcatggccaaaaactatcctgatcgtttcaagatctactatgtcttgaatcagcctcctgaagtctgggacggtagcgtcgggttcgtgtcgaaggaaatgatccagactcattgcccagcgcctgccgccgacattcaggtattgcgatgtggacctcctcccatgaacaaagccatggccgcgcacctggacgaccttggctacacgaaggagatgcagttccagttctaagcgttacattctctctaccagtaccagaataaacgggggtggaacaagtttcgtcgcctctttgagcagacgaagcctgaccatatcgccatataggctccaaacagacgcggtttgccactgacagtcacagagcgtcgtacttaaggggtgtttggtttatagggactaaactttagtctctccactttattccattttagttcataaattattaaatagggaaacttaaatagagttttagtttctatatttagtaatttagggactaaaatggaataaaatagaggactaaaaattagtccctagaaaccaaacacccctttactctacctggatgaaagcagcagtacagtacccacctaatttgtatcggtgtcgggacattgtaccatgccgttcttttgtatcggtttgtcactcactcactccgcgagccagcagcccagcacacgatccatcgtgtcattttg

SEQ ID NO: 21937 - protein, 279 aa, Zea mays subsp. mays
  misc_feature (1)..(279): Ceres Seq. ID no. 12406841
MEFLQGQRLETTLAVAAAVVAVAAGSAYLFLRSRKPRGCLDPENFKEFKLVEKRQLSHNVAKFKFALPTPTSVLGLPIGQHISCRGQDASGEEVIKPYTPTTLDSDVGSFELVIKMYPQGRMSHHFREMKVGDYMSVKGPKGRFKYLPGQVRALGMVAGGSGITPMFQVTRAILENPKDNTKVHLIYANVTYEDILLKEELDGMAKNYPDRFKIYYVLNQPPEVWDGSVGFVSKEMIQTHCPAPAADIQVLRCGPPPMNKAMAAHLDDLGYTKEMQFQF

SEQ ID NO: 21938 - protein, 164 aa, Zea mays subsp. mays
  misc_feature (1)..(164): Ceres Seq. ID no. 12406842
MYPQGRMSHHFREMKVGDYMSVKGPKGRFKYLPGQVRALGMVAGGSGITPMFQVTRAILENPKDNTKVHLIYANVTYEDILLKEELDGMAKNYPDRFKIYYVLNQPPEVWDGSVGFVSKEMIQTHCPAPAADIQVLRCGPPPMNKAMAAHLDDLGYTKEMQFQF

SEQ ID NO: 21939 - protein, 158 aa, Zea mays subsp. mays
  misc_feature (1)..(158): Ceres Seq. ID no. 12406843
MSHHFREMKVGDYMSVKGPKGRFKYLPGQVRALGMVAGGSGITPMFQVTRAILENPKDNTKVHLIYANVTYEDILLKEELDGMAKNYPDRFKIYYVLNQPPEVWDGSVGFVSKEMIQTHCPAPAADIQVLRCGPPPMNKAMAAHLDDLGYTKEMQFQF

SEQ ID NO: 21940 - DNA, 1965 bp, Zea mays subsp. mays
  misc_feature (1)..(1965): Ceres Seq. ID no. 12406856
gtaggatcgtcacatgtttaccaactaataactagttaactactctcggtaccacgggtccacggcgggccgaactcgagcccctacgccgatcttatggagcttctctaatctaaaatatatacgatgtaaccttttctaatctaaaatatatacaatgtaacgtagaagtagattacatactgcagagtttagttcaattcctcgtaaactttttttatgcctccatccctgtttgcaaaaggtgcatcacttcgatcggcttcaagctccatgtctaagattcatggacatggatgaacatgaacgtgagatgacagatgaggtagaggcgtagggctcatgtgcgcacgcacgacaaccaccagctcatggatgaagcagctgatgaacgcttcccggcaaggccgccacggccgcgtcctccaccttctcttcacccacctacgacgcggcgacagaggggcgtggtagagctgcaccgcgcggccgtccccacggcactccgcgcctgcgcgcgcctcggaaacgcctcttccggccgcctaatccacgcgctcgtcctcacccggttcccgtccctcgcctccgacgccgtcgccgccaccgcgcttctcgacatgtacgccaaatgtggccttgtcgcgagtgcccagagggtgttcgacgaaatgccgagtagggatgacctcgtcgcctggaacgcgctggtcgcatgctacgcgcgccacgccctcccggagcgcgcactggtgctggctatcaaaatgcggggccagtgcctgtgccccgacctggtgacatggaacgccgtcgtctccggttttgcactggccggcgacgaccaaatggccacaaaattggtcggcgccatggaggtggacgggttccagccggacgtggtcacttggacatcgcttgtatccggctcggtgctgaacttccagtatgccagggcgcgcgtgctgttccggagaatgatgaccactgccaaccctgtcctgccgagctcggccacgattgccagcatcctgcctgcgttcgccaatgttgctgacgtgaagcgtggcaaggaagtccacgcctacgccgtggtgaccggcgtcgaacaggagctcaatgtgagcagtgctctagtagatatgtacacgaagagcgggtttgtggtcgaagcccgcaggctgtttgacaagatgtcggaaagaagcacggtgacatggaattccatgatcttcgggctggcgaattccggtcactgccaagaagccatcggtctcttcaaccggatgctgtgcgacggagcaaggccggatcacctgacgttcaccgccgctctgacggtttgcagctacgccggcatggtggagctcgggaagggcctgtaccgcgccatgcaggaagaacacggcatcgagccgaggctggagcattgtgcatgcatggtgcatttgcttggccgagccggctggctcgccgaggcttatgatttcatcaaagccatgcccctggggcctgactgcttcgtttggggggcgttgctgggggcatgccggagccatggcgacatcaagcttgccgagctggctgcgtcccacctgctaaccgtcgagccggccaatgcagcaagttgcctcctactctcggactcgctggcaagtgtaggcagacaagatgatgttatgaagatgaagaggctggcaaagagacggcgcatgaagaagctgcatggctgcagctggttagagtgagtctacataatcgagagcgatatatggtctgagatcaaaggaacagaattgattgatcacagattcatagttgcccagatttgcagaagcaaacatccaagagtttcctacaaatgcatgtgttggtctatttgatgctaccatgaaagtagaaatgttgtgctacttagatttaatggatgtaatgtttagcattcacactgtttactcaacgtcg

SEQ ID NO: 21941 - protein, 458 aa, Zea mays subsp. mays
  misc_feature (1)..(458): Ceres Seq. ID no. 12406857
MDEAADERFPARPPRPRPPPSLHPPTTRRQRGVVELHRAAVPTALRACARLGNASSGRLIHALVLTRFPSLASDAVAATALLDMYAKCGLVASAQRVFDEMPSRDDLVAWNALVACYARHALPERALVLAIKMRGQCLCPDLVTWNAVVSGFALAGDDQMATKLVGAMEVDGFQPDVVTWTSLVSGSVLNFQYARARVLFRRMMTTANPVLPSSATIASILPAFANVADVKRGKEVHAYAVVTGVEQELNVSSALVDMYTKSGFVVEARRLFDKMSERSTVTWNSMIFGLANSGHCQEAIGLFNRMLCDGARPDHLTFTAALTVCSYAGMVELGKGLYRAMQEEHGIEPRLEHCACMVHLLGRAGWLAEAYDFIKAMPLGPDCFVWGALLGACRSHGDIKLAELAASHLLTVEPANAASCLLLSDSLASVGRQDDVMKMKRLAKRRRMKKLHGCSWLE

SEQ ID NO: 21942 - protein, 375 aa, Zea mays subsp. mays
  misc_feature (1)..(375): Ceres Seq. ID no. 12406858
MYAKCGLVASAQRVFDEMPSRDDLVAWNALVACYARHALPERALVLAIKMRGQCLCPDLVTWNAVVSGFALAGDDQMATKLVGAMEVDGFQPDVVTWTSLVSGSVLNFQYARARVLFRRMMTTANPVLPSSATIASILPAFANVADVKRGKEVHAYAVVTGVEQELNVSSALVDMYTKSGFVVEARRLFDKMSERSTVTWNSMIFGLANSGHCQEAIGLFNRMLCDGARPDHLTFTAALTVCSYAGMVELGKGLYRAMQEEHGIEPRLEHCACMVHLLGRAGWLAEAYDFIKAMPLGPDCFVWGALLGACRSHGDIKLAELAASHLLTVEPANAASCLLLSDSLASVGRQDDVMKMKRLAKRRRMKKLHGCSWLE

SEQ ID NO: 21943 - protein, 358 aa, Zea mays subsp. mays
  misc_feature (1)..(358): Ceres Seq. ID no. 12406859
MPSRDDLVAWNALVACYARHALPERALVLAIKMRGQCLCPDLVTWNAVVSGFALAGDDQMATKLVGAMEVDGFQPDVVTWTSLVSGSVLNFQYARARVLFRRMMTTANPVLPSSATIASILPAFANVADVKRGKEVHAYAVVTGVEQELNVSSALVDMYTKSGFVVEARRLFDKMSERSTVTWNSMIFGLANSGHCQEAIGLFNRMLCDGARPDHLTFTAALTVCSYAGMVELGKGLYRAMQEEHGIEPRLEHCACMVHLLGRAGWLAEAYDFIKAMPLGPDCFVWGALLGACRSHGDIKLAELAASHLLTVEPANAASCLLLSDSLASVGRQDDVMKMKRLAKRRRMKKLHGCSWLE

SEQ ID NO: 21944 - DNA, 1904 bp, Zea mays subsp. mays
  misc_feature (1)..(1904): Ceres Seq. ID no. 12406864
agtctagctagaatacactcgcgttcaaaacaaacacacagcgtcgtgctgcgtgatctctgaccgcgtcgacaactaccgcagcaccaagcagctgatggcggccaccgtatcttcctgcctgagcctcgtccccaccgtgcaccaccgggccggcgggttccccagcagtgtggcactgacgaacacgcttcagcgccgtcgtcgttctcgccgctatcttgtcgtcgcctcggcgacgagagccgaacaggaggccgcccctgtgacgatcgaggacgtggacctcagctctcatcaggcccgcggccgacgacgggggagctcgccgcgcggtggcgggaggtccacggcagcaacaactgggagggtctgctggaccccatcgacggcgtgctcctccaggagctcatccgctacggcgagttcgcccaggccacctacgacagcttcgactacgaccgcttctccccctactgcggcagctgcaagtacccggcgaagaccttcttccacgacgtcggcctcggcggcatcggctacgaggtcacccgctacctctacgccacctgcaacgacctcaagttccccaacttcggcatcaagacggccgccaacgccaagatgtggagcgagtccggcacgttcatcgggtacgtggccgtgtccaccgacgaggagacggcgcggctcggccgccgggacatcgccgtggcgtggcgcggcaccatcacccgcctcgagtgggtggccgatctgacggccaaccagatccccctgcgcgagacgggcgtcccctgcccggaccccgacgtgaaggtggagcgagggttcgcggcgctgtacacggacaagggcgccggctgccgcttctgccggtactcggcgcgggagcaggtgctggccgaggtgcgcaagctggtggatctgtaccacgggcggggcgagcaggtgagcgtgacggtcacgggccacagcctgggcagcgcgctggcgatgctgtgcgccttcgacatcgcggagacgcgcgcgaacgtgtcgccgggcgacagggtggcgccggtgtgcgtgttctccttcgccggcccgcgcgtcgggaacgtcgccttccggaggcggttcgagcgggagctgggcgtgcgggcgctgcgcgtcgtgaacgtgcacgacagcgtgcccaaggtgcccggcgtgttcttcaacgagtcggcgttcccggagctcgtcctgcgggcggcggacaggctgggcctcggcggcgtgtacacgcacctgggcgtgctgctgcagctggaccacaaggtgtcgccgttcctcaaggagaccctggacctctcgtgctaccacgacctggaggcgcacctgcacctgctggacggcttccgcggctccggcgcggggttcgagccccgcgggagggaccccgcgctggtgaacaagtccaccgacttcctccgggaggaccacatggtgccgcccgtgtggtaccaggcggagaacaagggcatggtgaggacggaggacggccggtgggtgctgccgccgcggcagagggtgctcgacgaccacccggaggacactgaccatcacctccagcggctcggtctcaccgcgtgaagctcagcaatactctgatagtagcgttaattagtgcgtgtggcgttcgcgtacgtgcgcggggcagtcggttactctgttgccgcgcgcggcagctcagtggcgcgttcatggcgtgcatgatgcgggtgacgtgcgggatgggcacgtcgctgcctgagaagctcgcgccgttggcgttcgtgtggctgcagaaaggtcgtcttggattgtaattctctctacttatttttgtaaattgacccagaaaagctgctgcttgcagcgccaaaaaaaaaacgattttc

SEQ ID NO: 21945 - protein, 330 aa, Zea mays subsp. mays
  misc_feature (1)..(330): Ceres Seq. ID no. 12406865
MWSESGTFIGYVAVSTDEETARLGRRDIAVAWRGTITRLEWVADLTANQIPLRETGVPCPDPDVKVERGFAALYTDKGAGCRFCRYSAREQVLAEVRKLVDLYHGRGEQVSVTVTGHSLGSALAMLCAFDIAETRANVSPGDRVAPVCVFSFAGPRVGNVAFRRRFERELGVRALRVVNVHDSVPKVPGVFFNESAFPELVLRAADRLGLGGVYTHLGVLLQLDHKVSPFLKETLDLSCYHDLEAHLHLLDGFRGSGAGFEPRGRDPALVNKSTDFLREDHMVPPVWYQAENKGMVRTEDGRWVLPPRQRVLDDHPEDTDHHLQRLGLTA

SEQ ID NO: 21946 - protein, 220 aa, Zea mays subsp. mays
  misc_feature (1)..(220): Ceres Seq. ID no. 12406866
MAATVSSCLSLVPTVHHRAGGFPSSVALTNTLQRRRRSRRYLVVASATRAEQEAAPVTIEDVDLSSHQARGRRRGSSPRGGGRSTAATTGRVCWTPSTACSSRSSSATASSPRPPTTASTTTASPPTAAAASTRRRPSSTTSASAASATRSPATSTPPATTSSSPTSASRRPPTPRCGASPARSSGTWPCPPTRRRRGSAAGTSPWRGAAPSPASSGWPI

SEQ ID NO: 21947 - protein, 206 aa, Zea mays subsp. mays
  misc_feature (1)..(206): Ceres Seq. ID no. 12406867
MLCAFDIAETRANVSPGDRVAPVCVFSFAGPRVGNVAFRRRFERELGVRALRVVNVHDSVPKVPGVFFNESAFPELVLRAADRLGLGGVYTHLGVLLQLDHKVSPFLKETLDLSCYHDLEAHLHLLDGFRGSGAGFEPRGRDPALVNKSTDFLREDHMVPPVWYQAENKGMVRTEDGRWVLPPRQRVLDDHPEDTDHHLQRLGLTA

SEQ ID NO: 21948 - DNA, 1772 bp, Zea mays subsp. mays
  misc_feature (1)..(1772): Ceres Seq. ID no. 12406872
ccaagcggtgggggtggaggagcagcagctggtgcaggtgcagcagcaggggacgacgacttcgccttctactgctcctacctccaggacgccgacgctgccgccgcctcagcgacgtcgacgctcgccctcgccgtcgacgaccccaaccccaaccccagcgccgcagggatgacgaacggccggcgccggaagcagcgcggggcagaggacgccggagccgccggggaaggggaggaggaggccaagaaggacggcaagaagcggtccatagccaagctgctcacctcgctggcggcgctggaggcggaggagcacgccgaccgcgcgggcgccgcggacgcgtccaggcgggagctggcgctgctcgagtccaacgccgacacccgctcgcaggccaccatggactactacgccaagatggagagcagcttcgacgccaccgccgagtccgaggccgccgccaggtccaagcgctccaggctcgccgcgtcggccgccaccgcggccgtcgtggccggggaggaggcggcagcgtcagcggcggcgtcgccctccgcgtcggcctcgccgacgcgcgccgcggggcaggggcagggaggccaccaccagcgccggctgtgggtcaaggaccggtcgcgcgcgtggtgggaccggtgcaacagcgccgactaccggaggaggagttccggcgcgcgttccggatggggcgcgggaccttcgacatgatctgcgacgcgctgggctcctcggtggccaaggaggacaccatgctccgcgccgccatccccgtccgccagcgcgtcgccgtctgcgtctggcgcctcgccacgggggagccgctccgcctcgtttccaagcgcttcggcctcggcatctccacctgccacaagctcgtcctggaggtgtgcgccgccatcaagtccgtgctcatgccgcgcttcctgcagtggcccgacgccgacgccgcggcgcgcttcaaggagggcttcgagcgcgcctcgggcgtgccgggcgtcatcggcgccatgtacaccacccacatccccatcatcgcgcccaagatctcggtggcggcctacttcaaccgccgccacacggagcgcaaccagaagacgtcctactccatcactctccagggcgtcgtcggccccgacggcgccttcaccgacgtctgcatcggctggcccggctccatgcccgacgaccaggtcctggagaagtccatgctccaccagcgcgccgcggcggggatgatgcacgactcgtggctggtggctggcgccagctacccgctcatggactgggtgctggtgccgtacacgcaccccaacctgacgtggacgcagcacgcgttcaacgagaaggtggccgagctccggcgcgtcgcggtggaggcgttcgcgcgcctcaaggcgcgctgggcgtgcctgcagaagcgcaccgaggtcaagctgcaggacctccccgtcgtgctgggcgcctgctgcgtgctccacaacatctgcgagattcggggcgaggaggtggacccagccatccgctgcgaactggtggacgacgagaccacgccggagaaccccgtgcgctccgagacggccagtcgcgccagggacaacatcgcgcacaacctgctccaccgtggcttgggcggcaacacattcttctgatctcatccgtcaccttcttcttttttatgctttgctagtacagtagtacagaattgggctggaacaagaaagaaataggcattcttttcttttaattacact

SEQ ID NO: 21949 - protein, 555 aa, Zea mays subsp. mays
  misc_feature (1)..(555): Ceres Seq. ID no. 12406873
KRWGWRSSSWCRCSSRGRRLRLLLLLPPGRRRCRRLSDVDARPRRRRPQPQPQRRRDDERPAPEAARGRGRRSRRGRGGGGQEGRQEAVHSQAAHLAGGAGGGGARRPRGRRGRVQAGAGAARVQRRHPLAGHHGLLRQDGEQLRRHRRVRGRRQVQALQARRVGRHRGRRGRGGGGSVSGGVALRVGLADARRGAGAGRPPPAPAVGQGPVARVVGPVQQRRLPEEEFRRAFRMGRGTFDMICDALGSSVAKEDTMLRAAIPVRQRVAVCVWRLATGEPLRLVSKRFGLGISTCHKLVLEVCAAIKSVLMPRFLQWPDADAAARFKEGFERASGVPGVIGAMYTTHIPIIAPKISVAAYFNRRHTERNQKTSYSITLQGVVGPDGAFTDVCIGWPGSMPDDQVLEKSMLHQRAAAGMMHDSWLVAGASYPLMDWVLVPYTHPNLTWTQHAFNEKVAELRRVAVEAFARLKARWACLQKRTEVKLQDLPVVLGACCVLHNICEIRGEEVDPAIRCELVDDETTPENPVRSETASRARDNIAHNLLHRGLGGNTFF

SEQ ID NO: 21950 - protein, 321 aa, Zea mays subsp. mays
  misc_feature (1)..(321): Ceres Seq. ID no. 12406874
MGRGTFDMICDALGSSVAKEDTMLRAAIPVRQRVAVCVWRLATGEPLRLVSKRFGLGISTCHKLVLEVCAAIKSVLMPRFLQWPDADAAARFKEGFERASGVPGVIGAMYTTHIPIIAPKISVAAYFNRRHTERNQKTSYSITLQGVVGPDGAFTDVCIGWPGSMPDDQVLEKSMLHQRAAAGMMHDSWLVAGASYPLMDWVLVPYTHPNLTWTQHAFNEKVAELRRVAVEAFARLKARWACLQKRTEVKLQDLPVVLGACCVLHNICEIRGEEVDPAIRCELVDDETTPENPVRSETASRARDNIAHNLLHRGLGGNTFF

SEQ ID NO: 21951 - protein, 314 aa, Zea mays subsp. mays
  misc_feature (1)..(314): Ceres Seq. ID no. 12406875
MICDALGSSVAKEDTMLRAAIPVRQRVAVCVWRLATGEPLRLVSKRFGLGISTCHKLVLEVCAAIKSVLMPRFLQWPDADAAARFKEGFERASGVPGVIGAMYTTHIPIIAPKISVAAYFNRRHTERNQKTSYSITLQGVVGPDGAFTDVCIGWPGSMPDDQVLEKSMLHQRAAAGMMHDSWLVAGASYPLMDWVLVPYTHPNLTWTQHAFNEKVAELRRVAVEAFARLKARWACLQKRTEVKLQDLPVVLGACCVLHNICEIRGEEVDPAIRCELVDDETTPENPVRSETASRARDNIAHNLLHRGLGGNTFF

SEQ ID NO: 21952 - DNA, 1843 bp, Zea mays subsp. mays
  misc_feature (1)..(1843): Ceres Seq. ID no. 12406900
ggattcgggcgctcggcgtagccgcgcagtggtgtgtctgcctccctccttgtatcctcctcgaattcgagcggcggcgacggcgggaagggagatggaggcggttagaggcgatgggaggtggtgcgtggtgactggcggccgcgggttcgccgcgaggcatctggtgacgatgctgctccgctccggcgagtggcgggtgcgcgtggccgacctgggccctgccatcacgctcgaccgcgacgaagaagagggtttcctgggtgctgctctccgcgaaggccaggccgtctacgtgtccgccgacctccgtgacaaggcccaggtcgccagagcttttgaaggggcagaagtagttttccatatggctgctccagattcatccatcaacaacttccaccttcattatggagtcaatgtcgatggaacaaagaatgttattgacacttgtatccgttgcaaggtgaagagactcatctatactagttcacctagtgtcgtgtttgatggagttcatggaatttttaatgcagatgaatcaatgccttacccagataagtttaatgattcatattcagaaacgaaagcggatgcagaaaagcttgtgatgagagctaatggtagggaagggcttcttacatgctgtatacgcccaagtagcatttttggccctggtgataagctaatggttccatctttggttgctgctgcaagggcagggaagtccaaatacattattggtgatgggaacaactactatgatttcacctacgtggaaaatgtggcatatggccatgtttgtgcggagaaaactctatcatctgaagatggtgcaaagatagccgctggaaaaacctatttcataacaaatatggagcctataaaattctgggagttcatgtcattgattttagaaggtcttggatatgaaaggccttcagtaaaaataccagtctctgttatgatgccggtggctcatgttgtagaatggacttaccagaaatttgccaagtatggaatgaaagttcctcagctgaccccttcaaggatcaggctgctttcatgtaacaggacattcagttgctcaagagcaaaggagcagcttggttatgaacctctcgtgtcccttaaggatggagtgaagagaacagtagagtcgtactcccatctacaagctcagaatcataggagtatatcaaaggcttcaattttcctcgggaatggaaatcttgcaaaaacagtactttgggaagatgcgaagcaaactgtgacagtgcttctactgttggctgttatctactaccacttatttacatgtagttacaccttcatcacagcgatggcaaagcttttgtcactaactgctctgttcttattcattcatggcatgctgccatcaaatctgttcggtcacaaggttgagaaactcgaggcctctaattttcacatcacccaggcacaggctcatcatattgctaattccattagttcgaattggaactctttagtcagtgcgctaagatctctttgtagaggaaatgattggctattgtttctcaaggtttcactatctctgctggttgtcagcatccttagttccatgtcttctcaggctgcatttaaaataggtactgctctggttttcacaggcttcaaagcgtatgagaaatgggaggacagcattgatagtatggtgggcgacgcctgtaccattcttctgcactttggttctgccaaggaatcatctagctagaaacaaacgtaggtgtagcttgcagactgccagttactttgtttactgatattatcttcagctccagctgtttctgggtttcgttgacct

SEQ ID NO: 21953 - protein, 583 aa, Zea mays subsp. mays
  misc_feature (1)..(583): Ceres Seq. ID no. 12406901
DSGARRSRAVVCLPPSLYPPRIRAAATAGREMEAVRGDGRWCVVTGGRGFAARHLVTMLLRSGEWRVRVADLGPAITLDRDEEEGFLGAALREGQAVYVSADLRDKAQVARAFEGAEVVFHMAAPDSSINNFHLHYGVNVDGTKNVIDTCIRCKVKRLIYTSSPSVVFDGVHGIFNADESMPYPDKFNDSYSETKADAEKLVMRANGREGLLTCCIRPSSIFGPGDKLMVPSLVAAARAGKSKYIIGDGNNYYDFTYVENVAYGHVCAEKTLSSEDGAKIAAGKTYFITNMEPIKFWEFMSLILEGLGYERPSVKIPVSVMMPVAHVVEWTYQKFAKYGMKVPQLTPSRIRLLSCNRTFSCSRAKEQLGYEPLVSLKDGVKRTVESYSHLQAQNHRSISKASIFLGNGNLAKTVLWEDAKQTVTVLLLLAVIYYHLFTCSYTFITAMAKLLSLTALFLFIHGMLPSNLFGHKVEKLEASNFHITQAQAHHIANSISSNWNSLVSALRSLCRGNDWLLFLKVSLSLLVVSILSSMSSQAAFKIGTALVFTGFKAYEKWEDSIDSMVGDACTILLHFGSAKESSS

SEQ ID NO: 21954 - protein, 552 aa, Zea mays subsp. mays
  misc_feature (1)..(552): Ceres Seq. ID no. 12406902
MEAVRGDGRWCVVTGGRGFAARHLVTMLLRSGEWRVRVADLGPAITLDRDEEEGFLGAALREGQAVYVSADLRDKAQVARAFEGAEVVFHMAAPDSSINNFHLHYGVNVDGTKNVIDTCIRCKVKRLIYTSSPSVVFDGVHGIFNADESMPYPDKFNDSYSETKADAEKLVMRANGREGLLTCCIRPSSIFGPGDKLMVPSLVAAARAGKSKYIIGDGNNYYDFTYVENVAYGHVCAEKTLSSEDGAKIAAGKTYFITNMEPIKFWEFMSLILEGLGYERPSVKIPVSVMMPVAHVVEWTYQKFAKYGMKVPQLTPSRIRLLSCNRTFSCSRAKEQLGYEPLVSLKDGVKRTVESYSHLQAQNHRSISKASIFLGNGNLAKTVLWEDAKQTVTVLLLLAVIYYHLFTCSYTFITAMAKLLSLTALFLFIHGMLPSNLFGHKVEKLEASNFHITQAQAHHIANSISSNWNSLVSALRSLCRGNDWLLFLKVSLSLLVVSILSSMSSQAAFKIGTALVFTGFKAYEKWEDSIDSMVGDACTILLHFGSAKESSS

SEQ ID NO: 21955 - protein, 526 aa, Zea mays subsp. mays
  misc_feature (1)..(526): Ceres Seq. ID no. 12406903
MLLRSGEWRVRVADLGPAITLDRDEEEGFLGAALREGQAVYVSADLRDKAQVARAFEGAEVVFHMAAPDSSINNFHLHYGVNVDGTKNVIDTCIRCKVKRLIYTSSPSVVFDGVHGIFNADESMPYPDKFNDSYSETKADAEKLVMRANGREGLLTCCIRPSSIFGPGDKLMVPSLVAAARAGKSKYIIGDGNNYYDFTYVENVAYGHVCAEKTLSSEDGAKIAAGKTYFITNMEPIKFWEFMSLILEGLGYERPSVKIPVSVMMPVAHVVEWTYQKFAKYGMKVPQLTPSRIRLLSCNRTFSCSRAKEQLGYEPLVSLKDGVKRTVESYSHLQAQNHRSISKASIFLGNGNLAKTVLWEDAKQTVTVLLLLAVIYYHLFTCSYTFITAMAKLLSLTALFLFIHGMLPSNLFGHKVEKLEASNFHITQAQAHHIANSISSNWNSLVSALRSLCRGNDWLLFLKVSLSLLVVSILSSMSSQAAFKIGTALVFTGFKAYEKWEDSIDSMVGDACTILLHFGSAKESSS

SEQ ID NO: 21956 - DNA, 1811 bp, Zea mays subsp. mays
  misc_feature (1)..(1811): Ceres Seq. ID no. 12406923
ctcttctagtcgcctctacccagttacttgcatcgccccgtcaagcacgccgccggcacgcggccctcggtctccccgccgcgccctctgcctccgcccgaacaaagccgtctcgccgtcgcgttgccttccttaccgtccaccgcgggcagccgtcctagtactcggttggtcctcccctgctgcccttctacggtggaggagcggagatcctgccgttttccggctgatttcttctaattgcggggcaagttccgtggatagtcaatactgcttgtgctgttgagctaatattaagttcctgctgggagaacttctgcagttcctatggcaaagcctctcaatggcagtggccgtagcatgccaagatcgaatgagggaatgcggctcatattttcggcagttgtaggtgtcatgctgggttacctgtttgggatctccttccctacagtcaacataaccaagcttcacttcccttcgagtatcatctcttatatcgaagataggaactctggcatcacaacccagacattgttgaaccatgcttgggcatctgcaaacaatcataaaaagaatagttctgaatctaacactgatgaaattcccgagatttatgttcctacaaacccaaaaggtgctgagagacttccaccaggcattgtagtgtctgaaacagatctttatccccgaagactatggggtgatcctagtgaggaccttactagcgagccgaggtatcttgttacttttactgttggtattgggcaaaaggcaaatattgatgcagcggtcagaaagttttcagacaaattcaccattatgttgttccattatgatggtcggactacagagtgggatgaatttgagtggtctaaaagagcaatccatgtgagtgccaggaagcagacaaaatggtggtatgcaaaacgatttttgcatcccgatgttgttgccagatatgattacattttcatctgggatgaggatctaggtgtagagcatttcaacgcagagaagtacattgagcttgttagaaagcatgggttggaaatctctcagcctggtttgcaacctgatagaggactaacatggcaaatgactaaacggcgtggtgaccaggaagttcacaaagtaactgaggagagaccaggctggtgcactgatccacatctaccaccatgtgcagcatttgttgagattatggcaacagtgttctccagaaatgcatggcgctgtgtatggcatatgattcagaatgacttggtccatggatggggtcttgactttgctcttagaaaatgtgtggagccggctcatgagaaaattggagttgttgatgctcaatggattgttcatcaatcagttccttcacttggcaaccagggcaagtcagataatggaagaccaccatgggaaggggtaagagcacgctgcagaaaagaatgggggatatttcagacaaggctggctgatgcggagaaggcttattacttggagcgaggcatcacacccccgaactcaacatcagtttagatgaacacatgctcctcagatgccacggcaaggtttctgttgggggaacctgctgcaaactggcatgttcatcgaagctgctgcagcccagggcaaatccatatatttgtacattagaggtcccacgaatcgccatgattaatctttagtgtcgctcacctggttttaatgtcatttcttttgttagtgatactagctgcgatgtaagtaggaggatacagcagagaccgtgatgatacccatttgtgtattaatgacctgatgcaatatggatgttg

SEQ ID NO: 21957 - protein, 401 aa, Zea mays subsp. mays
  misc_feature (1)..(401): Ceres Seq. ID no. 12406924
MAKPLNGSGRSMPRSNEGMRLIFSAVVGVMLGYLFGISFPTVNITKLHFPSSIISYIEDRNSGITTQTLLNHAWASANNHKKNSSESNTDEIPEIYVPTNPKGAERLPPGIVVSETDLYPRRLWGDPSEDLTSEPRYLVTFTVGIGQKANIDAAVRKFSDKFTIMLFHYDGRTTEWDEFEWSKRAIHVSARKQTKWWYAKRFLHPDVVARYDYIFIWDEDLGVEHFNAEKYIELVRKHGLEISQPGLQPDRGLTWQMTKRRGDQEVHKVTEERPGWCTDPHLPPCAAFVEIMATVFSRNAWRCVWHMIQNDLVHGWGLDFALRKCVEPAHEKIGVVDAQWIVHQSVPSLGNQGKSDNGRPPWEGVRARCRKEWGIFQTRLADAEKAYYLERGITPPNSTSV

SEQ ID NO: 21958 - protein, 390 aa, Zea mays subsp. mays
  misc_feature (1)..(390): Ceres Seq. ID no. 12406925
MPRSNEGMRLIFSAVVGVMLGYLFGISFPTVNITKLHFPSSIISYIEDRNSGITTQTLLNHAWASANNHKKNSSESNTDEIPEIYVPTNPKGAERLPPGIVVSETDLYPRRLWGDPSEDLTSEPRYLVTFTVGIGQKANIDAAVRKFSDKFTIMLFHYDGRTTEWDEFEWSKRAIHVSARKQTKWWYAKRFLHPDVVARYDYIFIWDEDLGVEHFNAEKYIELVRKHGLEISQPGLQPDRGLTWQMTKRRGDQEVHKVTEERPGWCTDPHLPPCAAFVEIMATVFSRNAWRCVWHMIQNDLVHGWGLDFALRKCVEPAHEKIGVVDAQWIVHQSVPSLGNQGKSDNGRPPWEGVRARCRKEWGIFQTRLADAEKAYYLERGITPPNSTSV

SEQ ID NO: 21959 - protein, 383 aa, Zea mays subsp. mays
  misc_feature (1)..(383): Ceres Seq. ID no. 12406926
MRLIFSAVVGVMLGYLFGISFPTVNITKLHFPSSIISYIEDRNSGITTQTLLNHAWASANNHKKNSSESNTDEIPEIYVPTNPKGAERLPPGIVVSETDLYPRRLWGDPSEDLTSEPRYLVTFTVGIGQKANIDAAVRKFSDKFTIMLFHYDGRTTEWDEFEWSKRAIHVSARKQTKWWYAKRFLHPDVVARYDYIFIWDEDLGVEHFNAEKYIELVRKHGLEISQPGLQPDRGLTWQMTKRRGDQEVHKVTEERPGWCTDPHLPPCAAFVEIMATVFSRNAWRCVWHMIQNDLVHGWGLDFALRKCVEPAHEKIGVVDAQWIVHQSVPSLGNQGKSDNGRPPWEGVRARCRKEWGIFQTRLADAEKAYYLERGITPPNSTSV

SEQ ID NO: 21960 - DNA, 1247 bp, Zea mays subsp. mays
  misc_feature (1)..(1247): Ceres Seq. ID no. 12406931
tcgtttcgcgtcctagcccaggacaagttccctttttcttctcccaagtctgcgactaggaggcgacgggccgacgggccaagtttcctttctcttctcagtctgcgactggcggcggcgaccatcacgcacaagccttcgttgctacctgcgctccgccaattcggtgaattgcagtctaagcaaagggaaaaggaaggatcttttctccagacttggtaattttggacgacaagatgcacttccttgcatcatttcatgtccctacaggttttgtattatctgatttttcgggatggatgccaaaaggttcctgcatctggtcgaggagaagaaaagaagggtcctcgagaagaaagaagccccactaaagtgggagcagaagctagaaacagcagctaaggccaaggttgatgcagaagcaaaggtgaagaagctaaattcaagaaagcacaggaggagaggagatttgtcctcagactctgatagtgactatggcagcgatgttgatcgaaaacacttgaagaggaagaaccgcagaaggaacaagaagcatgagcattctgactctgatgatgccaggagacgcaatcgtagatctagaaggagcaccgactcaagtgatgagagcaacagtgaatacgagaccaggtctgaagaagaacgtccaaggaagaagcgctcgcacagaagaaggcatcaccggcactcttcaaagtcagactctgaaaactacagcagtgatgaggaacaacggagacctgccaaggaccattctcagagccgcaggcggcaccatcggtcatctgatgatgactcagacaaggacaaggtcaagtcaagacatgggaagggtctgagatctcgtgacgaggatgcaagagcagatttcaacagcaataagcatctcaggagccaatccttggaggagtcatcagatgatagagatgctgatgaatctgagaagatgaggaatggcaaaaggtctcacaagaatggcggccaccgtcaccatcaccatcgacaccaccatgaatgacatagtaactctgcagaacctaatgacaggaggcaagtactgaaagatggccagaggggcccttgaaggtgacagcgcatactgaagatatcccagcaaggtcgagttaattgtccttattaaggacatgaagatcatttttttttcgttcctgatgttctcagataattattgtattgctgacaacatttctttgatttgtgaatat

SEQ ID NO: 21961 - protein, 247 aa, Zea mays subsp. mays
  misc_feature (1)..(247): Ceres Seq. ID no. 12406932
MDAKRFLHLVEEKKRRVLEKKEAPLKWEQKLETAAKAKVDAEAKVKKLNSRKHRRRGDLSSDSDSDYGSDVDRKHLKRKNRRRNKKHEHSDSDDARRRNRRSRRSTDSSDESNSEYETRSEEERPRKKRSHRRRHHRHSSKSDSENYSSDEEQRRPAKDHSQSRRRHHRSSDDDSDKDKVKSRHGKGLRSRDEDARADFNSNKHLRSQSLEESSDDRDADESEKMRNGKRSHKNGGHRHHHHRHHHE

SEQ ID NO: 21962 - DNA, 1668 bp, Zea mays subsp. mays
  misc_feature (1)..(1668): Ceres Seq. ID no. 12406933
attccacgctgcctcggccggcacctacctcccccacttcgccgccggcgggtggagtcgggccggagcagccgctagctcgcctctgttaccccaaaaaagacaaaaaaaataaagagagagtaccaagcaagccgccggcagctcgggcagccatggggcacggcgtcagctgcgctcgcacgggcgacgagcacaactacttccgcgcggcgcaggtcggggacctcgacgccctggacgcgctcctcgccgccgacccctccctcgcccgccgcgccacgctctacgaccgtctctccgcgctgcacatcaccgccgccaatggccacctcgaggtgatgtccatgatcttgaatcacggggtaccgccggacgccgtgaaccggcacaagcagacgccgctgatgctcgcggcgatgcacggcaagatcgactgcgcgcggaagctcctgcaggccggcgccaatatcctgatgttcgactccctgcacgggcggacctgcctgcaccacgcgtcctacttcggccacgtcgactgcctgcgggccatcctcgcggcggcgcggaccacgccggtggccgactcatggggtttcgcccggttcgtcaacgtcagggacgaccgcggcgccacgccgctgcacctcgccgccaggcagggccgccccgcctgcgtgcaggtgctgctggagaacggcgccattgtctccgccctcaccggctcctacgggttccccggcagcacgtcgctgcatctggccgctcgaagcgggaacctggactgcatccggaaactgctcgcctggggcggggatcgtctccagagggactcagcagggaggattccttacgccgtggcgctgaagcgcaaccacggggcgtgcgcggcgctgctgaacccgtcggcggcggagcccatggtgtggccttccccgctcaagttcatcagcgagctggacccggaggcgaaggctctcctggaagcggcactgatggacgccaatagggagagggaggagaagatcctcaagggcatcaccaagtatccgcaggcatcgcctacttcgccttgcgagcacgatgccattgacgaagcgtcctcggaggccagcgacgcggagctgtgctgcatctgcttcgagcaggcgtgcagcatcgaggtgcaggactgcgggcaccagatgtgcgcggcgtgcacgctggcgctgtgctgccacagcaagccgaacccggcgacgctgacgccgccgtcgccggcctgcccgttctgccgcggcagcatctcgaggctgctggtggcccgggcgagccccgacgccgatgacgacaaggccgccgccgccgcctcgtccccgcagctcgtccggcggcgaccgcacaacctcagctgggcggcggcgacggcgtggacaagcccgagcacgacctgtgatcgccatttgatgctgtgcgtggctgagcagacagcagagcacgaccattttaaaagctgaagcaggcattgccactggctttccaagatgagagacatcacatccaagcgtgattatctactacttgtaatgcatcctcttcttctcccccatgtttggtctatttttgggcgtgctaggatgcacctggccggcatgcagctgcgcgatatggttgagctgagcttgagcc

SEQ ID NO: 21963 - protein, 497 aa, Zea mays subsp. mays
  misc_feature (1)..(497): Ceres Seq. ID no. 12406934
STLPRPAPTSPTSPPAGGVGPEQPLARLCYPKKDKKNKERVPSKPPAARAAMGHGVSCARTGDEHNYFRAAQVGDLDALDALLAADPSLARRATLYDRLSALHITAANGHLEVMSMILNHGVPPDAVNRHKQTPLMLAAMHGKIDCARKLLQAGANILMFDSLHGRTCLHHASYFGHVDCLRAILAAARTTPVADSWGFARFVNVRDDRGATPLHLAARQGRPACVQVLLENGAIVSALTGSYGFPGSTSLHLAARSGNLDCIRKLLAWGGDRLQRDSAGRIPYAVALKRNHGACAALLNPSAAEPMVWPSPLKFISELDPEAKALLEAALMDANREREEKILKGITKYPQASPTSPCEHDAIDEASSEASDAELCCICFEQACSIEVQDCGHQMCAACTLALCCHSKPNPATLTPPSPACPFCRGSISRLLVARASPDADDDKAAAAASSPQLVRRRPHNLSWAAATAWTSPSTTCDRHLMLCVAEQTAEHDHFKS

SEQ ID NO: 21964 - protein, 446 aa, Zea mays subsp. mays
  misc_feature (1)..(446): Ceres Seq. ID no. 12406935
MGHGVSCARTGDEHNYFRAAQVGDLDALDALLAADPSLARRATLYDRLSALHITAANGHLEVMSMILNHGVPPDAVNRHKQTPLMLAAMHGKIDCARKLLQAGANILMFDSLHGRTCLHHASYFGHVDCLRAILAAARTTPVADSWGFARFVNVRDDRGATPLHLAARQGRPACVQVLLENGAIVSALTGSYGFPGSTSLHLAARSGNLDCIRKLLAWGGDRLQRDSAGRIPYAVALKRNHGACAALLNPSAAEPMVWPSPLKFISELDPEAKALLEAALMDANREREEKILKGITKYPQASPTSPCEHDAIDEASSEASDAELCCICFEQACSIEVQDCGHQMCAACTLALCCHSKPNPATLTPPSPACPFCRGSISRLLVARASPDADDDKAAAAASSPQLVRRRPHNLSWAAATAWTSPSTTCDRHLMLCVAEQTAEHDHFKS

SEQ ID NO: 21965 - protein, 384 aa, Zea mays subsp. mays
  misc_feature (1)..(384): Ceres Seq. ID no. 12406936
MSMILNHGVPPDAVNRHKQTPLMLAAMHGKIDCARKLLQAGANILMFDSLHGRTCLHHASYFGHVDCLRAILAAARTTPVADSWGFARFVNVRDDRGATPLHLAARQGRPACVQVLLENGAIVSALTGSYGFPGSTSLHLAARSGNLDCIRKLLAWGGDRLQRDSAGRIPYAVALKRNHGACAALLNPSAAEPMVWPSPLKFISELDPEAKALLEAALMDANREREEKILKGITKYPQASPTSPCEHDAIDEASSEASDAELCCICFEQACSIEVQDCGHQMCAACTLALCCHSKPNPATLTPPSPACPFCRGSISRLLVARASPDADDDKAAAAASSPQLVRRRPHNLSWAAATAWTSPSTTCDRHLMLCVAEQTAEHDHFKS

SEQ ID NO: 21966 - DNA, 1822 bp, Zea mays subsp. mays
  misc_feature (1)..(1822): Ceres Seq. ID no. 12406971
attccaccctcctccgtctccgatcctcgccttcaactccactccctcgctctctcgggccttcttccctagcacgacggggtgatcactgattcactgccgcccgcgccaggtcggcccagaactagtgggcgccaaacatcatagcgatcatggaggtggtctcttgcagccactcctgctcggcattacatcaaacaccagcaagcacatggaggcttcggggcagtgctcttggccttggtcttgggcatgccagcccttcccggaccagaagatacacagttgcgtgtgtaggaaccacgagtggagcttcgaatccgggtggttccggcaaggtccatgcagcccagggattccatgtaagcgacgtggatgcagccctgcagggcattccttccatgaaagccggggaggccgagagggtgatgattcaaggccttccggaaggccctgacagctccccgatcagtactgggttctgggagtggaagccgaagctgactgtgtactacgagaggtccggcatgaagaacagcaaggcacctgcggtgctcttcctgccggggttcggagtcgggacgttccatttcgagaagcagctgagggatcttggtcgcgatcatcgggtgtggacgatggattttctcgggcaggggatgtcgctgcctggtgaagatcctgctcctagtagcatagcgagcgaagatgcgttttggggctttggacaagattcccagccttgggcagaggagctggtgtattctgtggatttatggcaaaaccaagttcagcatttcattgaggaggttatccgtgaaccagtttatattgtggggaactctcttggaggttttgttgctctgtattttgctgcatccagtccacaccttgtaaaaggtgtcacactgcttaatgcaacaccgttttggggattctttcccaaccctgctacatctccccgattgtcaaagattttcccatgggctgggacatttccgcttccatcatttgtgaggaaaattactgaagcagtttggcaaaagataagtgacccaaaaagtattcaggacatactcaaacaagtatacgctgaccattcaacaaatgtggacaaagtattctctcgtattgtggagataacacaacacccagcagctgctgcatcgtttgcctccattatgtttgctccaaggggtcagatatccttccaagaggccatctctaggtgccaagaccaaggcattcctatatctctcatgtatggaagagaagatccttggattagacctatttggggccttaaagttaaacagcaagtgcccgaagcaccttattatgaaattagccccgctggtcattgtcctcatgatgaggtccctgaggttataaactacttgctccgtgggtggctgaagaacctcgagtctgagggctcagtcgacctgccgtttctagaagaacgcagctatgctgagcgtggtgtatccagggagctggagtttgtcagagaaggatcaaggaagtcagttagtgtgcggctctatggtaccaagatttccctatggagccagctaagctcattcttgaacacacgtgtccccaagtcacggatagtcttgagataatccatcctcaactccaatagatctcaatcttagaagctttgattcagatattgtatttattactttattaaattggtcagcagacagtgtttccagaattcctagcgcatgtaaatattggcactacagtggtagtttcgaatttatcatgattcatatcatgtcaagatatgcttgaagttctgttcatagct

SEQ ID NO: 21967 - protein, 491 aa, Zea mays subsp. mays
  misc_feature (1)..(491): Ceres Seq. ID no. 12406972
MEVVSCSHSCSALHQTPASTWRLRGSALGLGLGHASPSRTRRYTVACVGTTSGASNPGGSGKVHAAQGFHVSDVDAALQGIPSMKAGEAERVMIQGLPEGPDSSPISTGFWEWKPKLTVYYERSGMKNSKAPAVLFLPGFGVGTFHFEKQLRDLGRDHRVWTMDFLGQGMSLPGEDPAPSSIASEDAFWGFGQDSQPWAEELVYSVDLWQNQVQHFIEEVIREPVYIVGNSLGGFVALYFAASSPHLVKGVTLLNATPFWGFFPNPATSPRLSKIFPWAGTFPLPSFVRKITEAVWQKISDPKSIQDILKQVYADHSTNVDKVFSRIVEITQHPAAAASFASIMFAPRGQISFQEAISRCQDQGIPISLMYGREDPWIRPIWGLKVKQQVPEAPYYEISPAGHCPHDEVPEVINYLLRGWLKNLESEGSVDLPFLEERSYAERGVSRELEFVREGSRKSVSVRLYGTKISLWSQLSSFLNTRVPKSRIVLR

SEQ ID NO: 21968 - protein, 408 aa, Zea mays subsp. mays
  misc_feature (1)..(408): Ceres Seq. ID no. 12406973
MKAGEAERVMIQGLPEGPDSSPISTGFWEWKPKLTVYYERSGMKNSKAPAVLFLPGFGVGTFHFEKQLRDLGRDHRVWTMDFLGQGMSLPGEDPAPSSIASEDAFWGFGQDSQPWAEELVYSVDLWQNQVQHFIEEVIREPVYIVGNSLGGFVALYFAASSPHLVKGVTLLNATPFWGFFPNPATSPRLSKIFPWAGTFPLPSFVRKITEAVWQKISDPKSIQDILKQVYADHSTNVDKVFSRIVEITQHPAAAASFASIMFAPRGQISFQEAISRCQDQGIPISLMYGREDPWIRPIWGLKVKQQVPEAPYYEISPAGHCPHDEVPEVINYLLRGWLKNLESEGSVDLPFLEERSYAERGVSRELEFVREGSRKSVSVRLYGTKISLWSQLSSFLNTRVPKSRIVLR

SEQ ID NO: 21969 - protein, 399 aa, Zea mays subsp. mays
  misc_feature (1)..(399): Ceres Seq. ID no. 12406974
MIQGLPEGPDSSPISTGFWEWKPKLTVYYERSGMKNSKAPAVLFLPGFGVGTFHFEKQLRDLGRDHRVWTMDFLGQGMSLPGEDPAPSSIASEDAFWGFGQDSQPWAEELVYSVDLWQNQVQHFIEEVIREPVYIVGNSLGGFVALYFAASSPHLVKGVTLLNATPFWGFFPNPATSPRLSKIFPWAGTFPLPSFVRKITEAVWQKISDPKSIQDILKQVYADHSTNVDKVFSRIVEITQHPAAAASFASIMFAPRGQISFQEAISRCQDQGIPISLMYGREDPWIRPIWGLKVKQQVPEAPYYEISPAGHCPHDEVPEVINYLLRGWLKNLESEGSVDLPFLEERSYAERGVSRELEFVREGSRKSVSVRLYGTKISLWSQLSSFLNTRVPKSRIVLR

SEQ ID NO: 21970 - DNA, 1457 bp, Zea mays subsp. mays
  misc_feature (1)..(1457): Ceres Seq. ID no. 12406983
acctcccttgacccgtcgtcccatgctaaaagcccagggttaggagctagaggtaatctctctcccgtctctccccagtgggcgtgggggcgccgcatggaagccatggacgtcaagtacaagcccgtcatgttccccaacggcgccggcctcaagaagccgaagccggcggcggccgtggcgctggccggggagccgctgtaccgggagtgcctcaagaaccacgccgcgagcctgggcgggcacgccgtcgacggttgcggcgagttcatgccctcgccgggggccaaccccgccgacccgacgtcgctcaagtgcgcggcgtgcgggtgccaccgcaacttccaccgccggacgctggagggttcccctccgccgcccgcgcccgcgccgctggcgcttcccgcctccgccgagcgtgatgcacggccagccgcaccgcgcccgggaggagacgcccgaggaccgccacccgggggtcgtcgacgccgacgactccgattccgactcggaaggctcggagtacgacgaggagcggtcggtgtccccgccgccgccgccgcaccacctgctgccggcgccggtggcgcagcagcccccgccaccgtcctacttcccgacggcgccgcacatggtgctctcgctaggttccggcgtgcccgggcccgcggtggcggtatccccggcgcagaggctggccccgacccagctgacgccgtccagcgcgccgccccacgccgggggcgcgatgcccatgcccaggaagcggttccgcaccaagttcaccgccgagcagaagcagcggatgcaggagctgtcggagcggctcgggtggcggctgcagaagcgcgacgaggccatcgtcgacgagtggtgccgcgacatcggcgtcggcaagggcgtcttcaaggtctggatgcacaacaacaagcacaacttcctgggcgggcacagcgcccgccgcagcgcctcctcgcccgcccccgcccccgccgccgcgtcgctccaaaccccagccgccggcgccggcgctgctgcagcaccgtcattccacccgtccaggatcacccctccccctcccgtcctcacctcgtccccgacggccgccaccggcttcaacatcaacggcgccgcctcgtcggcgcccaccgtcgccaccgactacaccacggacaacgccaacggagcttcgtcgccgcactccgcttgaactagagaagggagaagagaggaggggggaagggaagggagagcggagagagagaaacatttagcttaatttcagtgatcactcgttttttttttctttagacttcttgccatctactaagaaattaaccccaagaaaaagcatgccgctgtgcgccatgcctagaaatccaagcttcttcctcccctgtactagtactgtatgctcttgggatccgatgatgatgctgatgctgatttaggattag

SEQ ID NO: 21971 - protein, 404 aa, Zea mays subsp. mays
  misc_feature (1)..(404): Ceres Seq. ID no. 12406984
TSLDPSSHAKSPGLGARGNLSPVSPQWAWGRRMEAMDVKYKPVMFPNGAGLKKPKPAAAVALAGEPLYRECLKNHAASLGGHAVDGCGEFMPSPGANPADPTSLKCAACGCHRNFHRRTLEGSPPPPAPAPLALPASAERDARPAAPRPGGDARGPPPGGRRRRRLRFRLGRLGVRRGAVGVPAAAAAPPAAGAGGAAAPATVLLPDGAAHGALARFRRARARGGGIPGAEAGPDPADAVQRAAPRRGRDAHAQEAVPHQVHRRAEAADAGAVGAARVAAAEARRGHRRRVVPRHRRRQGRLQGLDAQQQAQLPGRAQRPPQRLLARPRPRRRVAPNPSRRRRRCCSTVIPPVQDHPSPSRPHLVPDGRHRLQHQRRRLVGAHRRHRLHHGQRQRSFVAALRLN

SEQ ID NO: 21972 - protein, 372 aa, Zea mays subsp. mays
  misc_feature (1)..(372): Ceres Seq. ID no. 12406985
MEAMDVKYKPVMFPNGAGLKKPKPAAAVALAGEPLYRECLKNHAASLGGHAVDGCGEFMPSPGANPADPTSLKCAACGCHRNFHRRTLEGSPPPPAPAPLALPASAERDARPAAPRPGGDARGPPPGGRRRRRLRFRLGRLGVRRGAVGVPAAAAAPPAAGAGGAAAPATVLLPDGAAHGALARFRRARARGGGIPGAEAGPDPADAVQRAAPRRGRDAHAQEAVPHQVHRRAEAADAGAVGAARVAAAEARRGHRRRVVPRHRRRQGRLQGLDAQQQAQLPGRAQRPPQRLLARPRPRRRVAPNPSRRRRRCCSTVIPPVQDHPSPSRPHLVPDGRHRLQHQRRRLVGAHRRHRLHHGQRQRSFVAALRLN

SEQ ID NO: 21973 - protein, 369 aa, Zea mays subsp. mays
  misc_feature (1)..(369): Ceres Seq. ID no. 12406986
MDVKYKPVMFPNGAGLKKPKPAAAVALAGEPLYRECLKNHAASLGGHAVDGCGEFMPSPGANPADPTSLKCAACGCHRNFHRRTLEGSPPPPAPAPLALPASAERDARPAAPRPGGDARGPPPGGRRRRRLRFRLGRLGVRRGAVGVPAAAAAPPAAGAGGAAAPATVLLPDGAAHGALARFRRARARGGGIPGAEAGPDPADAVQRAAPRRGRDAHAQEAVPHQVHRRAEAADAGAVGAARVAAAEARRGHRRRVVPRHRRRQGRLQGLDAQQQAQLPGRAQRPPQRLLARPRPRRRVAPNPSRRRRRCCSTVIPPVQDHPSPSRPHLVPDGRHRLQHQRRRLVGAHRRHRLHHGQRQRSFVAALRLN

SEQ ID NO: 21974 - DNA, 1283 bp, Zea mays subsp. mays
  misc_feature (1)..(1283): Ceres Seq. ID no. 12407025
acaggaggcgcggagcaggaggagacacatggcagatgaaggcgaggaggcggtgccgccggccgcgatggtgggggaggcgccaacagaggactttgggctgcccgctgagctgatggccgtgctaccatcggacccgttcgctcagctggacgtggcgcgcaagatcacctccatcgcgctctcgcaccgcctcggccgcctcgaggccgaggcggcgcgcctgcgctcgcagctcgccgagcgtgacgccgaggccgaggagctccgcgagcgcgtcgagcagctcgactccgcgctcgccgtcgccaccgggccgcctccgccgcgctgaggaggaaaaggagacactgctgcgggacaactctgcgctgtccaacaccgttaggaagctgaacagagatgtcgccaagttggaagttttcaaaaagacacttgtgcagtcgctccaggaagatgacagcagtgataatactgctcccagggcaagcgttgcagcaacttcaaacttctctgcgccatcagatgaagattctgcatttccaacttccaaatcatcacagatttcagaaactgcgagttcagtctcagaggaaaatagccaagttgaaccagatgcacctaggccaccaccccgtccacatgtatttttgccgtcatacaacagcacaccaaggagaactcccccagactcacctccaaggcgttatgcatcggtatcaccgccgaggcgacattcaatctccgttacgtcgatgaatatgtttaatgacaggtcctcaggcttttctagtcagcatagctctccatttgaccctccaagtcaaacaggacgaacaagagttgatggaaaggagttctttcgtcatgtcagaaatcggttgtcgtatgagcagtttggtgcattcctggctaatgtgaaggagctgaacgcacacaggcagaccagagaggataccttaagaaaggctgatgagatctttggtcctgaaaacaaggacctgtacaccgtttttgagagcctaataactcgcaacattcgctaatctcctcaagggttgaagcattaccaatgattactagtgattcatgttttaccggtatattttggttacaatgttcaacactttttttgtatttgaagtctgtagtctgttgtggattcttggtatatagtctatagttctttcttttttttttcatgctaatgtccatgtagagtcctctgtttctatgtaagctacaacttatattctaatacaaatgttgtctgatatttcttg

SEQ ID NO: 21975 - protein, 118 aa, Zea mays subsp. mays
  misc_feature (1)..(118): Ceres Seq. ID no. 12407026
MSPSWKFSKRHLCSRSRKMTAVIILLPGQALQQLQTSLRHQMKILHFQLPNHHRFQKLRVQSQRKIAKLNQMHLGHHPVHMYFCRHTTAHQGELPQTHLQGVMHRYHRRGDIQSPLRR

SEQ ID NO: 21976 - protein, 110 aa, Zea mays subsp. mays
  misc_feature (1)..(110): Ceres Seq. ID no. 12407027
QEARSRRRHMADEGEEAVPPAAMVGEAPTEDFGLPAELMAVLPSDPFAQLDVARKITSIALSHRLGRLEAEAARLRSQLAERDAEAEELRERVEQLDSALAVATGPPPPR

SEQ ID NO: 21977 - protein, 101 aa, Zea mays subsp. mays
  misc_feature (1)..(101): Ceres Seq. ID no. 12407028
MADEGEEAVPPAAMVGEAPTEDFGLPAELMAVLPSDPFAQLDVARKITSIALSHRLGRLEAEAARLRSQLAERDAEAEELRERVEQLDSALAVATGPPPPR

SEQ ID NO: 21978 - DNA, 1421 bp, Zea mays subsp. mays
  misc_feature (1)..(1421): Ceres Seq. ID no. 12407029
accaccaccctccctctctgcctcaccacctactccgcctgcgcctgcgagctgtgctgtgctgcgcaacggggagatccaatccacagaacaggatgcagtccaagcaccgggtcttcgcggaggacctgctcctggcggcggcggcggagggcgaggaccacttcgaccgggtgcccgactccctggtgctcctcatcttcaacaagctggccgacgcgcggtcgctggggcgctgctccgcggtgtcgcgccgcttcagcgcgctggtcccgctcgtggacgacgcctgcctgcgcatcgaccgcgtcatccccgccgacgccgccgacgcgggggcgccgcgcccgcgcgccgcgctctcgcacctcctcaagtccgtgctgctcgccgtgctcaagcccttcgcgcactgcgacgccaagtccgcgtcgccgcaaaagcacgcgcaccagcagcagcagcaccactcgcccgcccaggtgctcaggaacttcagcagcatccgcagcctccggatggagctcccggtctccgacgtgggcaccgacgacggcgtcgtgctcaggtggaaggccgtcttcggcagcacgctgcagagctgcgtcatcctcggcggcaccagggtggaccgcgcgggaccgccgcacgccccctcctccggctccgctccccccgcggtcgacgacgacggcggcagcatcccggagtccctgtacaccaacggcggcctcaagctgcgcgtcgtctggaccatcagctccctcatcgccgcggccancaggcactacctcctccgngagatcgtcaaggagcaccccaccctcgagcgggtggcgctgacggacgccggcgggcagggcacgctcagcatgggggcgcgaccagcctcagggagttcagggacaggccgctcgccgccgcgcccgccgccgccgccaaccgcacgcaggtgcccgcctgcaacatgaagctgcgctacgcgccgctgctggagctctcggacggcaccaggatccacggcgccacgctcgtggtcattcaagcccgtcggcgacgccggcgggaaggacctcgacgagctcggcgccggcgccttcgacgggcccctgagggaggccgtggccgcgctcggcaagcgccgcgcatacctgctcgagatgaacggcttctagtctgcgcgcctctctgctccattgcaatgggcattgttaattggccaatgggcaacggcaactagctagctagattgctcctccgctcgcttcacctcagctgtcagtcagctcctgtcctgacgatatccttgtgaaaaaaaaacagtagtatagaatggagtgggcagcgccagccagccggccagcttcacagtgcattctgatgctatcatgaacggaaatgaagcagtcagtcacatttcg

SEQ ID NO: 21979 - protein, 412 aa, Zea mays subsp. mays
  misc_feature (1)..(412): Ceres Seq. ID no. 12407030
  misc_feature (260)..(260): Xaa is any aa, unknown or other
  misc_feature (267)..(267): Xaa is any aa, unknown or other
PPPSLSASPPTPPAPASCAVLRNGEIQSTEQDAVQAPGLRGGPAPGGGGGGRGPLRPGARLPGAPHLQQAGRRAVAGALLRGVAPLQRAGPARGRRLPAHRPRHPRRRRRRGGAAPARRALAPPQVRAARRAQALRALRRQVRVAAKARAPAAAAPLARPGAQELQQHPQPPDGAPGLRRGHRRRRRAQVEGRLRQHAAELRHPRRHQGGPRGTAARPLLRLRSPRGRRRRRQHPGVPVHQRRPQAARRLDHQLPHRRGXQALPPPXDRQGAPHPRAGGADGRRRAGHAQHGGATSLREFRDRPLAAAPAAAANRTQVPACNMKLRYAPLLELSDGTRIHGATLVVIQARRRRRREGPRRARRRRLRRAPEGGRGRARQAPRIPARDERLLVCAPLCSIAMGIVNWPMGNGN

SEQ ID NO: 21980 - protein, 322 aa, Zea mays subsp. mays
  misc_feature (1)..(322): Ceres Seq. ID no. 12407031
  misc_feature (260)..(260): Xaa is any aa, unknown or other
  misc_feature (266)..(266): Xaa is any aa, unknown or other
HHPPSLPHHLLRLRLRAVLCCATGRSNPQNRMQSKHRVFAEDLLLAAAAEGEDHFDRVPDSLVLLIFNKLADARSLGRCSAVSRRFSALVPLVDDACLRIDRVIPADAADAGAPRPRAALSHLLKSVLLAVLKPFAHCDAKSASPQKHAHQQQQHHSPAQVLRNFSSIRSLRMELPVSDVGTDDGVVLRWKAVFGSTLQSCVILGGTRVDRAGPPHAPSSGSAPPAVDDDGGSIPESLYTNGGLKLRVVWTISSLIAAAXRHYLLXEIVKEHPTLERVALTDAGGQGTLSMGARPASGSSGTGRSPPRPPPPPTARRCPPAT

SEQ ID NO: 21981 - protein, 291 aa, Zea mays subsp. mays
  misc_feature (1)..(291): Ceres Seq. ID no. 12407032
  misc_feature (229)..(229): Xaa is any aa, unknown or other
  misc_feature (235)..(235): Xaa is any aa, unknown or other
MQSKHRVFAEDLLLAAAAEGEDHFDRVPDSLVLLIFNKLADARSLGRCSAVSRRFSALVPLVDDACLRIDRVIPADAADAGAPRPRAALSHLLKSVLLAVLKPFAHCDAKSASPQKHAHQQQQHHSPAQVLRNFSSIRSLRMELPVSDVGTDDGVVLRWKAVFGSTLQSCVILGGTRVDRAGPPHAPSSGSAPPAVDDDGGSIPESLYTNGGLKLRVVWTISSLIAAAXRHYLLXEIVKEHPTLERVALTDAGGQGTLSMGARPASGSSGTGRSPPRPPPPPTARRCPPAT

SEQ ID NO: 21982 - DNA, 1423 bp, Zea mays subsp. mays
  misc_feature (1)..(1423): Ceres Seq. ID no. 12407049
agaccaagcggcacgcacaagcgcagagccacggtgagcagagaagaaacgcatccacagaagggacaaacgtccggagcggattccacattccagtctcggtctcggtccatgggcgcgggaaagggaggagacggcggcgaggcggcgcccgaggccgcgcaggcgcagcccgtcgtgctgaagatgaacctgcattgcgccggctgcgcgcacaaggtcaagaaggccatcaagcgcgtccccggtgtggactccatcgtcacagacgtcgcggcgaacaaggtcgttgtggcggggacggccgacgcgggcgcgctcaagacgcggctcgaggccaagaccaacaagcccgtggagatcgtctccgccggcggtgcccccaggaagcctcccgccgcggagcccaagcaggacgccggcgacggcgagaagcagggggtcaaaggcgcgagccccaacgaggaggagaaagagaaagagaaggggaagaagcaacaggcggaggagaaagagaaagagaaggggaagaagcagcaggtggagtcggtgctgctcaagatccgcctgcactgcgacggctgcgcctaccgcatcaggcaacgcatcggcaagatcaaaggcgtcaaggatgtggtgctggaggccaatgccaaggacgaggtggaggtcacgggcaccatggacataccgaacatggtctcctacctcaaggagaagctcaaccgcgacgtggaggccgtggtgctgcccgtcaggaaagacggcggcggcggcggcgagggcgagggcgagggcaaggacgacaagaagcacagcggcggcggcggcggcaaggacaaggtcgcggccggggcagccggcgacgacaggatgaacaagggcaaagggatcgaggcgtcggcggccggtccgtcaacggcggccgccgcggcgtacatgtctgcgccggcgggggcgagcacgtaccacgtggctccgccgcacgggtacgtggcgtatgagcaggccccgcctcctgccagctactatccctacccgtactacggctacggcagtggcgatggcatgggccacgccaacccctcctactaccagcagcagccgcagccgcagcccgacgggaaccagcagccgcaggtggcgtacccgccatacccgtaccaattcgacatggcgccggcgccgcagctcttcagcgacgagaaccccaacgcttgctccgtgatgtgacgccgccgccggtgcgtgtccttgttgcgttccgtcggcgagctcactgatccgccgtcagctttaaccttagccatccgggcatccggccgagaaagaactcgacctgtacatatcgtcaatgaggaatcagccttagtccagagccctaggattatattttcctgatgaaattttgcttcatttgttt

SEQ ID NO: 21983 - protein, 410 aa, Zea mays subsp. mays
  misc_feature (1)..(410): Ceres Seq. ID no. 12407050
RPSGTHKRRATVSREETHPQKGQTSGADSTFQSRSRSMGAGKGGDGGEAAPEAAQAQPVVLKMNLHCAGCAHKVKKAIKRVPGVDSIVTDVAANKVVVAGTADAGALKTRLEAKTNKPVEIVSAGGAPRKPPAAEPKQDAGDGEKQGVKGASPNEEEKEKEKGKKQQAEEKEKEKGKKQQVESVLLKIRLHCDGCAYRIRQRIGKIKGVKDVVLEANAKDEVEVTGTMDIPNMVSYLKEKLNRDVEAVVLPVRKDGGGGGEGEGEGKDDKKHSGGGGGKDKVAAGAAGDDRMNKGKGIEASAAGPSTAAAAAYMSAPAGASTYHVAPPHGYVAYEQAPPPASYYPYPYYGYGSGDGMGHANPSYYQQQPQPQPDGNQQPQVAYPPYPYQFDMAPAPQLFSDENPNACSVM

SEQ ID NO: 21984 - protein, 373 aa, Zea mays subsp. mays
  misc_feature (1)..(373): Ceres Seq. ID no. 12407051
MGAGKGGDGGEAAPEAAQAQPVVLKMNLHCAGCAHKVKKAIKRVPGVDSIVTDVAANKVVVAGTADAGALKTRLEAKTNKPVEIVSAGGAPRKPPAAEPKQDAGDGEKQGVKGASPNEEEKEKEKGKKQQAEEKEKEKGKKQQVESVLLKIRLHCDGCAYRIRQRIGKIKGVKDVVLEANAKDEVEVTGTMDIPNMVSYLKEKLNRDVEAVVLPVRKDGGGGGEGEGEGKDDKKHSGGGGGKDKVAAGAAGDDRMNKGKGIEASAAGPSTAAAAAYMSAPAGASTYHVAPPHGYVAYEQAPPPASYYPYPYYGYGSGDGMGHANPSYYQQQPQPQPDGNQQPQVAYPPYPYQFDMAPAPQLFSDENPNACSVM

SEQ ID NO: 21985 - protein, 348 aa, Zea mays subsp. mays
  misc_feature (1)..(348): Ceres Seq. ID no. 12407052
MNLHCAGCAHKVKKAIKRVPGVDSIVTDVAANKVVVAGTADAGALKTRLEAKTNKPVEIVSAGGAPRKPPAAEPKQDAGDGEKQGVKGASPNEEEKEKEKGKKQQAEEKEKEKGKKQQVESVLLKIRLHCDGCAYRIRQRIGKIKGVKDVVLEANAKDEVEVTGTMDIPNMVSYLKEKLNRDVEAVVLPVRKDGGGGGEGEGEGKDDKKHSGGGGGKDKVAAGAAGDDRMNKGKGIEASAAGPSTAAAAAYMSAPAGASTYHVAPPHGYVAYEQAPPPASYYPYPYYGYGSGDGMGHANPSYYQQQPQPQPDGNQQPQVAYPPYPYQFDMAPAPQLFSDENPNACSVM

SEQ ID NO: 21986 - DNA, 1432 bp, Zea mays subsp. mays
  misc_feature (1)..(1432): Ceres Seq. ID no. 12407071
atcttccccgtgcttgcagttgcagtgcagctgtacccacagtgccctgtcagtctcggccattgcaatgcctcaagaagcagcaatggagttgccaagaccaatgggcgtgcttctgctcgtgttcttcgtcttgtgcagagtgggggacgcggcgacgttcatgttcgtgaaccggtgcacggacacggtgtggccgggcgtcctgtccaacgccggcagcccaaggctggagccgacggggttcgagctcccgccgggcgcggcacgcgcggtgccggcgccggcgggctggtccggccgcatgtgggcgcgcacgggctgctcccaggacggcgccacggggcggctcgtctgtgccacgggcgactgcggctctggctccgccgagtgcgcgggcgcgggcgctgcgccgccggccacgctggccgagttcacgctcgacggcagtggcgggctggacttctacgacgtcagcctcgtggatggctacaacctccccgtgctggtggagacctccggcggcgcaggctccagcgggccggcgtcgtgcgcggcggccgggtgcgcagcgaacctgaaacncgatgtgccccgccgagctccgagccgggggcggcgccgcgtgccggagcgcgtgcgacgcgttcgcgcggcccgagtactgctgcagcggcgccttcgcgtccccggcggcgtgccggccgactacctactcgcaggtgttcaagagcgcgtgcccgcgctcctacagttacgccttcgacgatcccacctccacattcacctgcggcggcggcccagactacaccgtcaccttctgccccggcgccaccccaagccagaagtcgacgaccacaccgggcgcgacgccggcgacggtgccggggacaatgacgacgacggtgccggaggcaacgccgatgccgggcgcgaccccggctatgccgacggggaccatgatgccaccgggcgcgacgttcacggacgccaccccggacagcgcgatgatgccgatgggtggcctgggcatcgagggcgggggccaaggcagcgtgctcctgggcggcagcagcagcgaaggcagcgtctcttggctcgccaacatggccaccggcgacgcggccgtcccgctggtggcttcggctcggttattggtggcgccactggcaacgttgctctgcggcctccatttgctgtagtagtggtgatggagggagcagaggaatctgttggcgattcgcacggtggcgcctttgtattgccgtgtctgtagatgattttactgtccattgatcatgttgcgttagccccggtcccaggattagatacttgtggctactagtagtactagttctagaggagaaattaaagcatggatgtggacattgattaaagttaatcgctgtcgtgctagctgcgctttgttgtt

SEQ ID NO: 21987 - protein, 424 aa, Zea mays subsp. mays
  misc_feature (1)..(424): Ceres Seq. ID no. 12407072
  misc_feature (195)..(195): Xaa is any aa, unknown or other
SSPCLQLQCSCTHSALSVSAIAMPQEAAMELPRPMGVLLLVFFVLCRVGDAATFMFVNRCTDTVWPGVLSNAGSPRLEPTGFELPPGAARAVPAPAGWSGRMWARTGCSQDGATGRLVCATGDCGSGSAECAGAGAAPPATLAEFTLDGSGGLDFYDVSLVDGYNLPVLVETSGGAGSSGPASCAAAGCAANLKXDVPRRAPSRGRRRVPERVRRVRAARVLLQRRLRVPGGVPADYLLAGVQERVPALLQLRLRRSHLHIHLRRRPRLHRHLLPRRHPKPEVDDHTGRDAGDGAGDNDDDGAGGNADAGRDPGYADGDHDATGRDVHGRHPGQRDDADGWPGHRGRGPRQRAPGRQQQRRQRLLARQHGHRRRGRPAGGFGSVIGGATGNVALRPPFAVVVVMEGAEESVGDSHGGAFVLPCL

SEQ ID NO: 21988 - protein, 402 aa, Zea mays subsp. mays
  misc_feature (1)..(402): Ceres Seq. ID no. 12407073
  misc_feature (173)..(173): Xaa is any aa, unknown or other
MPQEAAMELPRPMGVLLLVFFVLCRVGDAATFMFVNRCTDTVWPGVLSNAGSPRLEPTGFELPPGAARAVPAPAGWSGRMWARTGCSQDGATGRLVCATGDCGSGSAECAGAGAAPPATLAEFTLDGSGGLDFYDVSLVDGYNLPVLVETSGGAGSSGPASCAAAGCAANLKXDVPRRAPSRGRRRVPERVRRVRAARVLLQRRLRVPGGVPADYLLAGVQERVPALLQLRLRRSHLHIHLRRRPRLHRHLLPRRHPKPEVDDHTGRDAGDGAGDNDDDGAGGNADAGRDPGYADGDHDATGRDVHGRHPGQRDDADGWPGHRGRGPRQRAPGRQQQRRQRLLARQHGHRRRGRPAGGFGSVIGGATGNVALRPPFAVVVVMEGAEESVGDSHGGAFVLPCL

SEQ ID NO: 21989 - protein, 396 aa, Zea mays subsp. mays
  misc_feature (1)..(396): Ceres Seq. ID no. 12407074
  misc_feature (167)..(167): Xaa is any aa, unknown or other
MELPRPMGVLLLVFFVLCRVGDAATFMFVNRCTDTVWPGVLSNAGSPRLEPTGFELPPGAARAVPAPAGWSGRMWARTGCSQDGATGRLVCATGDCGSGSAECAGAGAAPPATLAEFTLDGSGGLDFYDVSLVDGYNLPVLVETSGGAGSSGPASCAAAGCAANLKXDVPRRAPSRGRRRVPERVRRVRAARVLLQRRLRVPGGVPADYLLAGVQERVPALLQLRLRRSHLHIHLRRRPRLHRHLLPRRHPKPEVDDHTGRDAGDGAGDNDDDGAGGNADAGRDPGYADGDHDATGRDVHGRHPGQRDDADGWPGHRGRGPRQRAPGRQQQRRQRLLARQHGHRRRGRPAGGFGSVIGGATGNVALRPPFAVVVVMEGAEESVGDSHGGAFVLPCL

SEQ ID NO: 21990 - DNA, 1759 bp, Zea mays subsp. mays
  misc_feature (1)..(1759): Ceres Seq. ID no. 12407100
gccgagaagcttcggactagctagcaagctagctagctacctacccgtgctttggttcggttggttggcgccatagccattgccgaggagcgagggagcagccgggcgggcagtcaggaggcggcgagtaagcatgctgggagcgagccccaggggcaggaaggccgccgcgccgccggtgaagctggggtcggcgaaggaggcgccggcggccggtggaggagggagcggctgcaaggtgccggcggaggaggtgtgggaggtgcggcccggcgggatgctggtgcagaagaggggcggcggcgacgacgagccgtcgcccaacgtgaagcccgtgcccaccatccgggtcaaggtcaagcacgccggcgtcacgcacgagatgtacatcagttccgaggcctccttcggggagctgaagaagctggtggccgccaagacggggctgcaccccgacgaccagaaggtgctgtacaaggacagggagcgtgactccaaggcgttcctggacacggctggcgtcagagaccgctccaaggtggtggtgctggaggaccccgaggcccgcgcgcgccgactcatcggggagcgccgcagcggccacctccagaaggccgccagggccgtcgccgcggtcaccgccgaggtcgacaagctggcacccaaggtggcggcgctggacgcgtcggtgcgcaggggggagaaggtcgcggagaaggacgtggtgcaggtgacggagctgctaatgaacgagctgctcaggctcgacgccgtggtcgcggacggcgacgtcaaggcgcagaggcggatgcaggtgaagcgcgtccagaagtacgtggagacgctggacgcggtggcggccaagaacgccgccctcgtcggcaagtccggcgagaaggccgcggccaagccggcgccggcgccggccccggccccgccgccgcggcagcagggacaggggcagacgcggtgggagatgttcgacctgctgtcgtcgctgccgtccacgtcctcggcctcgtcaacgacgaccgtgagctccacggcgtcctccggcgcgccgccgccgaaccgcccggactggatgctcttctgacgagtggacggcggtcccgcaccggccggccaccggcgcaaaagcgaaaggcgagtgcttgatcgatgcgatgcgatgcttgtgtgccaagaattgcaccccaaatctggtagctcgtcgagtgtcctgatgaggccatgattgggcaggcggggggctatctagcttggccacacagctgcattgcgttgggctgcatggtacccgtaccagccaattcgagttcatcaatcatgtggtgtgagagtatttttcttcttcacctctcctttttctttctttccttttgagcttttttttccctcctcctcctcctcctcctcctcttcttcttgttcatggaaggtttgggattcttttggagtgcatactatactattcagatagagaaacagaaagatggagttggttagggcaagtgaaacgtcttcagatagggaaataaataaaactagtcggtgtccaaactctgaagaaacgaacaaagaggtgcatggattgttagcttatcacactgttgtttgagagtgatgagagatgtatcgatcaagaggccacttggtcggtagtctgtcactccttgttgctgccgagtttcttcctcctcatcatcatcctgtataatgtaatcaagcaataatacaaaataaaaaaagcgttttg

SEQ ID NO: 21991 - protein, 320 aa, Zea mays subsp. mays
  misc_feature (1)..(320): Ceres Seq. ID no. 12407101
MLGASPRGRKAAAPPVKLGSAKEAPAAGGGGSGCKVPAEEVWEVRPGGMLVQKRGGGDDEPSPNVKPVPTIRVKVKHAGVTHEMYISSEASFGELKKLVAAKTGLHPDDQKVLYKDRERDSKAFLDTAGVRDRSKVVVLEDPEARARRLIGERRSGHLQKAARAVAAVTAEVDKLAPKVAALDASVRRGEKVAEKDVVQVTELLMNELLRLDAVVADGDVKAQRRMQVKRVQKYVETLDAVAAKNAALVGKSGEKAAAKPAPAPAPAPPPRQQGQGQTRWEMFDLLSSLPSTSSASSTTTVSSTASSGAPPPNRPDWMLF

SEQ ID NO: 21992 - protein, 272 aa, Zea mays subsp. mays
  misc_feature (1)..(272): Ceres Seq. ID no. 12407102
MLVQKRGGGDDEPSPNVKPVPTIRVKVKHAGVTHEMYISSEASFGELKKLVAAKTGLHPDDQKVLYKDRERDSKAFLDTAGVRDRSKVVVLEDPEARARRLIGERRSGHLQKAARAVAAVTAEVDKLAPKVAALDASVRRGEKVAEKDVVQVTELLMNELLRLDAVVADGDVKAQRRMQVKRVQKYVETLDAVAAKNAALVGKSGEKAAAKPAPAPAPAPPPRQQGQGQTRWEMFDLLSSLPSTSSASSTTTVSSTASSGAPPPNRPDWMLF

SEQ ID NO: 21993 - protein, 237 aa, Zea mays subsp. mays
  misc_feature (1)..(237): Ceres Seq. ID no. 12407103
MYISSEASFGELKKLVAAKTGLHPDDQKVLYKDRERDSKAFLDTAGVRDRSKVVVLEDPEARARRLIGERRSGHLQKAARAVAAVTAEVDKLAPKVAALDASVRRGEKVAEKDVVQVTELLMNELLRLDAVVADGDVKAQRRMQVKRVQKYVETLDAVAAKNAALVGKSGEKAAAKPAPAPAPAPPPRQQGQGQTRWEMFDLLSSLPSTSSASSTTTVSSTASSGAPPPNRPDWMLF

SEQ ID NO: 21994 - DNA, 1478 bp, Zea mays subsp. mays
  misc_feature (1)..(1478): Ceres Seq. ID no. 12407112
actactacagcgcgccaccaggcagtacactgcagccagccagccacctccctcctctcagttcagttggctccctcccggctcccgccccactagtcgttgtagtcaatactgtgcagtacgccacccaccacctctccaagtctccattaaagaaaaggggaggcaagtcggggcctcggggagaaggggctgagcatcagaccatgacgtccggggcggcggcggcggcaggaggtctggggcggacgccgacgtggaaggagcgggagaacaacaagcgccgggagcgccggcggagggccatcgccgccaagatcttcacgggcctgcgcgcgctcggcaactacaagctgcccaagcactgcgacaacaacgaggtgctcaaggcgctctgccgcgaggcggggtgggtcgtcgaggacgacggcaccacctaccggaagggttgcaggccgccgccggggatgctgagcccgtgctcgtcgtcgcagctgctgagcgcgccgtcctcgagcttcccgagcccggtgccgtcctaccacgccagcccggcgtcgtcgagcttcccgagcccgacgcgcctcgaccacagcagcggcggcagcagcacccacaaccccgccgcggcggccgccgccgccgcctccctgctcccgttcctccggggcctgccgaacctgccgccgctccgcgtgtccagcagcgcgcccgtcacgccgccgctctcctctcccacggccgcggcggcggcgtcgcgaccgcccaccaaggtccgcaggcccgactgggacgccgccgccgaccccttccggcaccccttcttcgcggtctccgcccccgccagccccacccgcgcgcgccggcgcgagcacccggacaccatcccggagtgcgacgagtccgacgtctgctccgcggccgactccgcccggtggatcagcttccaggccaccacggcgcccgcgtcgcccacgtacaacctcgtccacccggcctccgactccatggagctggacgggacgacggcagccgtcgaggagttcgagttcgacaagggccgcgtcgtcacgccatgggaaggcgagcggatccacgaggtggccgccgaggagctcgagctcacgctcggcgtcggcgccaagtgaagcgaagctctcaagcaaagctcggatctttgagctcccgtactgcaaatgccgcgattggcagaaaaaaaaatgtgtacgtactacgtagcgtcgtagccgcgtgaagaaatcgtggatgcattcgtgctgagtttcgatcggaggcacattcggtgtagggcgtaggtgttgtttcattcatggacagctgatcaggtgaaagaacaatcgttgttcgtccgtccctccgcctgtattgcattgcattattgatcacagactgtatgctgactccattcggatgtagtactaggtggatctttggcatctacttactgtttgttctgc

SEQ ID NO: 21995 - protein, 381 aa, Zea mays subsp. mays
  misc_feature (1)..(381): Ceres Seq. ID no. 12407113
YYSAPPGSTLQPASHLPPLSSVGSLPAPAPLVVVVNTVQYATHHLSKSPLKKRGGKSGPRGEGAEHQTMTSGAAAAAGGLGRTPTWKERENNKRRERRRRAIAAKIFTGLRALGNYKLPKHCDNNEVLKALCREAGWVVEDDGTTYRKGCRPPPGMLSPCSSSQLLSAPSSSFPSPVPSYHASPASSSFPSPTRLDHSSGGSSTHNPAAAAAAAASLLPFLRGLPNLPPLRVSSSAPVTPPLSSPTAAAAASRPPTKVRRPDWDAAADPFRHPFFAVSAPASPTRARRREHPDTIPECDESDVCSAADSARWISFQATTAPASPTYNLVHPASDSMELDGTTAAVEEFEFDKGRVVTPWEGERIHEVAAEELELTLGVGAK

SEQ ID NO: 21996 - protein, 313 aa, Zea mays subsp. mays
  misc_feature (1)..(313): Ceres Seq. ID no. 12407114
MTSGAAAAAGGLGRTPTWKERENNKRRERRRRAIAAKIFTGLRALGNYKLPKHCDNNEVLKALCREAGWVVEDDGTTYRKGCRPPPGMLSPCSSSQLLSAPSSSFPSPVPSYHASPASSSFPSPTRLDHSSGGSSTHNPAAAAAAAASLLPFLRGLPNLPPLRVSSSAPVTPPLSSPTAAAAASRPPTKVRRPDWDAAADPFRHPFFAVSAPASPTRARRREHPDTIPECDESDVCSAADSARWISFQATTAPASPTYNLVHPASDSMELDGTTAAVEEFEFDKGRVVTPWEGERIHEVAAEELELTLGVGAK

SEQ ID NO: 21997 - protein, 226 aa, Zea mays subsp. mays
  misc_feature (1)..(226): Ceres Seq. ID no. 12407115
MLSPCSSSQLLSAPSSSFPSPVPSYHASPASSSFPSPTRLDHSSGGSSTHNPAAAAAAAASLLPFLRGLPNLPPLRVSSSAPVTPPLSSPTAAAAASRPPTKVRRPDWDAAADPFRHPFFAVSAPASPTRARRREHPDTIPECDESDVCSAADSARWISFQATTAPASPTYNLVHPASDSMELDGTTAAVEEFEFDKGRVVTPWEGERIHEVAAEELELTLGVGAK

SEQ ID NO: 21998 - DNA, 1201 bp, Zea mays subsp. mays
  misc_feature (1)..(1201): Ceres Seq. ID no. 12407124
acgaattccccattcccttcccccatcgcatcgagagccaggccagccagccacctctgctaggtctccatggccgccgcgctcaggtccccggcctcggccaaggtctcgagccccgccgccgcctccacgtgcgccaggcgtccagagtcgcggtgggcgggttccggcagcatccgcggagccgtgtcggccccgtggccgtgcgggcgtcgctgttctcgcccaagcccgcggcggccaaggacgcgcggccgaccaaggtgcaggagctgtacgtgtacgagatgaacgagcgggaccgcgagagccccgcgtacctgcgcctcagcgccaagcagacggagaacgcgctgggcgacctggtccccttcacaaacaaggtccgtcgtcgttgtgttccttgctttgctttttgcttttgcttttgcttttgccttgatcggtgcctccgcttagccgctcttcctccccacccacccatgcacccaggtttacaacggcagcctggacaagcggctgggcatcaccgccggcatctgcgtgctcatccagcacgtccccgaccgcaacggcgaccggtacgaggccatctacagcttctacttcggcgactacggccacatctcggtgcagggcgcgtacctgacctacgaggagtcgtacctggccgtcacgggcggntccggcgtacttcgagggcgcctacggccaggtcaagctccaccagatcgtcttccccttcaagatcttctacaccttctacctccggggcatcccggacctgcccagggacctgctctgcacgcccgtcccgccctcccccaccgtcgagcccacgcccgccgccagggccgccgagccgcacgcctgcgtcaacaactacaccaactgactgatcaactccagcccaggaaccatctctgcctgccatgcctgtccctcactcgatttgtatgtttgtatggcttangtccttcgattcgtacgttcgtgcgtggtagcaccaataaacatgcgatcgattgagttgtgtgtgcttctccattcattcacttgctctttctgcagctcgtgatcgagttgtgtgtgctccattcccaaattatgtatgatcgattagtagcgttaggggttaaccagtagccgctgtgtacttgtgtcacccttggacaaacaatgagatatttctttgtcgtcg

SEQ ID NO: 21999 - protein, 298 aa, Zea mays subsp. mays
  misc_feature (1)..(298): Ceres Seq. ID no. 12407125
  misc_feature (228)..(228): Xaa is any aa, unknown or other
EFPIPFPHRIESQASQPPLLGLHGRRAQVPGLGQGLEPRRRLHVRQASRVAVGGFRQHPRSRVGPVAVRASLFSPKPAAAKDARPTKVQELYVYEMNERDRESPAYLRLSAKQTENALGDLVPFTNKVRRRCVPCFAFCFCFCFCLDRCLRLAALPPHPPMHPGLQRQPGQAAGHHRRHLRAHPARPRPQRRPVRGHLQLLLRRLRPHLGAGRVPDLRGVVPGRHGRXRRTSRAPTARSSSTRSSSPSRSSTPSTSGASRTCPGTCSARPSRPPPPSSPRPPPGPPSRTPASTTTPTD

SEQ ID NO: 22000 - protein, 203 aa, Zea mays subsp. mays
  misc_feature (1)..(203): Ceres Seq. ID no. 12407126
  misc_feature (133)..(133): Xaa is any aa, unknown or other
MNERDRESPAYLRLSAKQTENALGDLVPFTNKVRRRCVPCFAFCFCFCFCLDRCLRLAALPPHPPMHPGLQRQPGQAAGHHRRHLRAHPARPRPQRRPVRGHLQLLLRRLRPHLGAGRVPDLRGVVPGRHGRXRRTSRAPTARSSSTRSSSPSRSSTPSTSGASRTCPGTCSARPSRPPPPSSPRPPPGPPSRTPASTTTPTD

SEQ ID NO: 22001 - DNA, 1579 bp, Zea mays subsp. mays
  misc_feature (1)..(1579): Ceres Seq. ID no. 12407139
ggcagtagaagccgagaaggtaggcccgctcgttccaacatcacaaactccacacggctctcctgtctccgctgcccgctccacctccctccatgccgtcggcttccctccgcctcgccgtcgtcggcgcgggcgcggcgggcctggttgccgcccgcgagctacgccgcgagggccatgcgcccgtcgtcttcgagcgcgccgccgccgttgggggcacttggctctacacgcctcccgccacgtcctccgacccgctcggcgccgcggcgacgcattccagcctctacgcatcgctccgcaccaacctgccacgcgagaccatgggcttcctcgacttccccttcgccgctggcgccgcgggctcccgagacccccgccggtttcccgggcacgaggaggtgctccgctacctggaggcgttcgcgcgccggttcgacctgctccggctcgtccgcttcgagacggaggtgctcagtgtgaggagggaagacggagggaggtgggctgtgacgtcgaggaagctcggggataaggggagcggcgaggaggagttctatgatgccgtcgtggtctgcaatggtcactacacggagccacgcctcgccgtcattcccggggtagatgcttggccagggaagcagatgcatagccacaattaccgtgtgccggagccattccttgatcaagtagtgatcataattggggcctcggcaagtgcagttgacatttcgagagacatcgcaagcatggcggaagaggtacatattgctgatagatcagcaccggcttccacctgtaacaagcagcctggctatgataatctgtggcttcattccatgattgaccatgcgcaggaggatggcactgtggtgttccaggatggcagctcaatcaaagctgatgttatcatgcactgcactggctacctgtatgactttccattccttggagatgacagcactatcaccgtggacgacaaccgtgtcgatccactatacaagcatatttttccacccgaagtggcacctcatttgtccttcatcggattgccttggaaagttatccccttcccactgtttgaactccaaagtaagtgggttgctagagttctatcaggacggattaatcttccatccgaagacaggatgatggaagatgtgaaggctttctatttgaaactagaagcacatggatggcctaagagatacacacataattttgcaaattaccagtttgagtatgatgattggctcgctgagcaatgtggccatccaccagtcgaagaatggaggaagcagatgtatgctgtaacttcaatgaacaaggcagctcgtcctgagagttaccgtgatgaatgggatgacgagcatctggtggccgaagcaaatgaatacttcaagaaattcttgtaaattctttcttactattctcatcccatattctttcggcatacccgaggctgatctcaactgcaatatgcaaatatgaataaccatttaactattttatgtgatgtggattggatatacttctgggttagcatttcatcgatgtatatatatgagactgttctggt

SEQ ID NO: 22002 - protein, 440 aa, Zea mays subsp. mays
  misc_feature (1)..(440): Ceres Seq. ID no. 12407140
MPSASLRLAVVGAGAAGLVAARELRREGHAPVVFERAAAVGGTWLYTPPATSSDPLGAAATHSSLYASLRTNLPRETMGFLDFPFAAGAAGSRDPRRFPGHEEVLRYLEAFARRFDLLRLVRFETEVLSVRREDGGRWAVTSRKLGDKGSGEEEFYDAVVVCNGHYTEPRLAVIPGVDAWPGKQMHSHNYRVPEPFLDQVVIIIGASASAVDISRDIASMAEEVHIADRSAPASTCNKQPGYDNLWLHSMIDHAQEDGTVVFQDGSSIKADVIMHCTGYLYDFPFLGDDSTITVDDNRVDPLYKHIFPPEVAPHLSFIGLPWKVIPFPLFELQSKWVARVLSGRINLPSEDRMMEDVKAFYLKLEAHGWPKRYTHNFANYQFEYDDWLAEQCGHPPVEEWRKQMYAVTSMNKAARPESYRDEWDDEHLVAEANEYFKKFL

SEQ ID NO: 22003 - protein, 363 aa, Zea mays subsp. mays
  misc_feature (1)..(363): Ceres Seq. ID no. 12407141
MGFLDFPFAAGAAGSRDPRRFPGHEEVLRYLEAFARRFDLLRLVRFETEVLSVRREDGGRWAVTSRKLGDKGSGEEEFYDAVVVCNGHYTEPRLAVIPGVDAWPGKQMHSHNYRVPEPFLDQVVIIIGASASAVDISRDIASMAEEVHIADRSAPASTCNKQPGYDNLWLHSMIDHAQEDGTVVFQDGSSIKADVIMHCTGYLYDFPFLGDDSTITVDDNRVDPLYKHIFPPEVAPHLSFIGLPWKVIPFPLFELQSKWVARVLSGRINLPSEDRMMEDVKAFYLKLEAHGWPKRYTHNFANYQFEYDDWLAEQCGHPPVEEWRKQMYAVTSMNKAARPESYRDEWDDEHLVAEANEYFKKFL

SEQ ID NO: 22004 - protein, 256 aa, Zea mays subsp. mays
  misc_feature (1)..(256): Ceres Seq. ID no. 12407142
MHSHNYRVPEPFLDQVVIIIGASASAVDISRDIASMAEEVHIADRSAPASTCNKQPGYDNLWLHSMIDHAQEDGTVVFQDGSSIKADVIMHCTGYLYDFPFLGDDSTITVDDNRVDPLYKHIFPPEVAPHLSFIGLPWKVIPFPLFELQSKWVARVLSGRINLPSEDRMMEDVKAFYLKLEAHGWPKRYTHNFANYQFEYDDWLAEQCGHPPVEEWRKQMYAVTSMNKAARPESYRDEWDDEHLVAEANEYFKKFL

SEQ ID NO: 22005 - DNA, 1396 bp, Zea mays subsp. mays
  misc_feature (1)..(1396): Ceres Seq. ID no. 12407155
agtcacaactcacaatcacccagcgacagacaacaactacccagtccgtcgtcccggcttccgtgcgggccggggtttcccacgagcgcgcacggcacggcgccgccagcaaggtcacgagtcgggtggaggcatcggacatggccaccacgacggtgacgacgactgcggaggcggcgagcgcgcccgggaagcggcgcggcggggggtgntgcgccctcgcggcggcggcggcgagcgtcgtgcccgtgaaggcggcgggtgagcaggggcagcagccgctgccgctgccgcggctggnncggttcnaggagctnccggactacctgcgcgacaacgagttcatccacgcgcactaccgctgcgagtggtccgtccgcgacgcgnngcgcagcgccctcgcctggcacaacgagacgctcaacgtctggagccatctcggaggcttcttcctgttcctgtacctcgccgtcgccgagccaacggggacggtggccggcggcgccggcgccggagccgccccgggtatcgtgacgttcgtgctcgcgtcggccaacacctcctggtcttcgtgggaggccagcagtaactcgagcttgacggccagcaagggtttgatggccgtgttcgggagcagcgacggcgacgcccacgcggtgccgaggtggccgcggacggtgttcctggcgggcgcgatggcgtgcctggcggtgagcgcggcggcgcacctgctggcgtgccactcgcgccgcttcacgcgcctcttctggcagctcgactacgcggggatcgcggtgatgatcgtcgcctccttcttccctcccgtctactacgccttcctcggccgcgcccgcacgcagctcgtctacctgtccgccgtcaccctgctgggcctgctggtggtggcgctgctcctggcgcccgcgcgctcgtcgccgcgcctgcgccacctccgcgccggcctcttcgtgtccatggccttctccggggtgctgccggcgctgcacgcgctgtggctcaactgggtacaccgcgagtgccacctcgcgctggcgctcgagctcctcatgggcctcgtgtacgccgccggcgccgggttctacgtcacccgcgtgccggagcgctggagccccggcaggttcgactgcgtcggccacagccaccagatcttccacgtgctcgtgctcgtcggcgcgctcacgcactacgccgccaccgccatcctcatcgactggcgagaggcgatggccgtcgctgccggcggggcatcggtgctctcgtgatccgtgactgcaaagcagcgcagtgtatatgtaggtgaagggggtactatcgattcgttcattctttgtacgcgacgtcgatttatttacctcaatcgaaatatttgttcggc

SEQ ID NO: 22006 - protein, 426 aa, Zea mays subsp. mays
  misc_feature (1)..(426): Ceres Seq. ID no. 12407156
  misc_feature (70)..(70): Xaa is any aa, unknown or other
  misc_feature (100)..(100): Xaa is any aa, unknown or other
  misc_feature (103)..(103): Xaa is any aa, unknown or other
  misc_feature (105)..(105): Xaa is any aa, unknown or other
  misc_feature (129)..(129): Xaa is any aa, unknown or other
SQLTITQRQTTTTQSVVPASVRAGVSHERARHGAASKVTSRVEASDMATTTVTTTAEAASAPGKRRGGGXCALAAAAASVVPVKAAGEQGQQPLPLPRLXRFXEXPDYLRDNEFIHAHYRCEWSVRDAXRSALAWHNETLNVWSHLGGFFLFLYLAVAEPTGTVAGGAGAGAAPGIVTFVLASANTSWSSWEASSNSSLTASKGLMAVFGSSDGDAHAVPRWPRTVFLAGAMACLAVSAAAHLLACHSRRFTRLFWQLDYAGIAVMIVASFFPPVYYAFLGRARTQLVYLSAVTLLGLLVVALLLAPARSSPRLRHLRAGLFVSMAFSGVLPALHALWLNWVHRECHLALALELLMGLVYAAGAGFYVTRVPERWSPGRFDCVGHSHQIFHVLVLVGALTHYAATAILIDWREAMAVAAGGASVLS

SEQ ID NO: 22007 - protein, 380 aa, Zea mays subsp. mays
  misc_feature (1)..(380): Ceres Seq. ID no. 12407157
  misc_feature (24)..(24): Xaa is any aa, unknown or other
  misc_feature (54)..(54): Xaa is any aa, unknown or other
  misc_feature (57)..(57): Xaa is any aa, unknown or other
  misc_feature (59)..(59): Xaa is any aa, unknown or other
  misc_feature (83)..(83): Xaa is any aa, unknown or other
MATTTVTTTAEAASAPGKRRGGGXCALAAAAASVVPVKAAGEQGQQPLPLPRLXRFXEXPDYLRDNEFIHAHYRCEWSVRDAXRSALAWHNETLNVWSHLGGFFLFLYLAVAEPTGTVAGGAGAGAAPGIVTFVLASANTSWSSWEASSNSSLTASKGLMAVFGSSDGDAHAVPRWPRTVFLAGAMACLAVSAAAHLLACHSRRFTRLFWQLDYAGIAVMIVASFFPPVYYAFLGRARTQLVYLSAVTLLGLLVVALLLAPARSSPRLRHLRAGLFVSMAFSGVLPALHALWLNWVHRECHLALALELLMGLVYAAGAGFYVTRVPERWSPGRFDCVGHSHQIFHVLVLVGALTHYAATAILIDWREAMAVAAGGASVLS

SEQ ID NO: 22008 - protein, 221 aa, Zea mays subsp. mays
  misc_feature (1)..(221): Ceres Seq. ID no. 12407158
MAVFGSSDGDAHAVPRWPRTVFLAGAMACLAVSAAAHLLACHSRRFTRLFWQLDYAGIAVMIVASFFPPVYYAFLGRARTQLVYLSAVTLLGLLVVALLLAPARSSPRLRHLRAGLFVSMAFSGVLPALHALWLNWVHRECHLALALELLMGLVYAAGAGFYVTRVPERWSPGRFDCVGHSHQIFHVLVLVGALTHYAATAILIDWREAMAVAAGGASVLS

SEQ ID NO: 22009 - DNA, 1429 bp, Zea mays subsp. mays
  misc_feature (1)..(1429): Ceres Seq. ID no. 12407159
aaaaatttttccttaaaactgcctcctcagttagaaaaagccacgcaactttgcaagtcacgacctcatggaagaggtgagccaccccgtgacggattgacaccaagtcagtctcactcaagtaaagtggacgccaagtcagtcacactcacaccaccgtagcacacaccagtacaccacacactcgcctttccgatcccatccctctccagccaccttcctccgctcgccgtgcttctgcttcctccgccaccaccgccggcatggctgcgcgctgcccctacttcgccgtcgaggagtcctcccgcggcatccgctcgggggagtccccggccgcggcgctccgccggatcctcgcgacgcctggtgcgcaccaggcgccctgctgctacgacgcgctcggcgcgcgcctcgtcgagcgcgcggggtttccgatcgggttcatgggcggtttctgtgtttctgccgcgcgacttggcttgcctgatgttggcctcatttcctatggagaaatggtagatcaagggcgtctcatcaatgaagctgtttcaatcccagtgattggtgatggagacaatggttacggaaactctatgaatatcaagagaaccataaaaggatatatcaatgctggttttgctggaattatgcttgaggatcaggtggcacctaaagcatgtggacatactgaaggaaggaaagtcatatcaagggaggaagctgtcatgcacataaaagctgctgtagatgctaggaaagagagtggctctgacattgttattgtagcaaggacagattctcgccaagctatttctcatgatgaagcattatggagggtgaaagcatttgctgatgctggagcagatgttctatttattgatgcccttgcttcagtagaagagatgaaagcattttgtgcggttgcaccagaagttccaaagatggcaaacatgttagaaggtggtggtaaaactcccatattgagccctgctgaacttgaggaaattggtttcaggcttgtagtatatcctttatccttagttggggtatcaatgcgtgcaatgcaggatgctctagttgcgataaaagacggcggtgtacctccacctagcgtcctgccatcttttcaggagatcaaggatacattgggtttcaaccgctattataaagaagagaaacaataccaagtggacaagtgaaggaagcagctgaagtctgatcctgtggattcagtcggatcgtggccatggcttaatttccaccggacatgctgggcttccaccggacatgatgcagaccaatcgtatttatgttgagttgtaatcgaacgctgcgtagcgcagtatcccgaagaacatatatatggggtcttctcttccgtttctgctctgctgtggtttcaataatcccgaaactgtgattccagttt

SEQ ID NO: 22010 - protein, 311 aa, Zea mays subsp. mays
  misc_feature (1)..(311): Ceres Seq. ID no. 12407160
MAARCPYFAVEESSRGIRSGESPAAALRRILATPGAHQAPCCYDALGARLVERAGFPIGFMGGFCVSAARLGLPDVGLISYGEMVDQGRLINEAVSIPVIGDGDNGYGNSMNIKRTIKGYINAGFAGIMLEDQVAPKACGHTEGRKVISREEAVMHIKAAVDARKESGSDIVIVARTDSRQAISHDEALWRVKAFADAGADVLFIDALASVEEMKAFCAVAPEVPKMANMLEGGGKTPILSPAELEEIGFRLVVYPLSLVGVSMRAMQDALVAIKDGGVPPPSVLPSFQEIKDTLGFNRYYKEEKQYQVDK

SEQ ID NO: 22011 - protein, 251 aa, Zea mays subsp. mays
  misc_feature (1)..(251): Ceres Seq. ID no. 12407161
MGGFCVSAARLGLPDVGLISYGEMVDQGRLINEAVSIPVIGDGDNGYGNSMNIKRTIKGYINAGFAGIMLEDQVAPKACGHTEGRKVISREEAVMHIKAAVDARKESGSDIVIVARTDSRQAISHDEALWRVKAFADAGADVLFIDALASVEEMKAFCAVAPEVPKMANMLEGGGKTPILSPAELEEIGFRLVVYPLSLVGVSMRAMQDALVAIKDGGVPPPSVLPSFQEIKDTLGFNRYYKEEKQYQVDK

SEQ ID NO: 22012 - protein, 228 aa, Zea mays subsp. mays
  misc_feature (1)..(228): Ceres Seq. ID no. 12407162
MVDQGRLINEAVSIPVIGDGDNGYGNSMNIKRTIKGYINAGFAGIMLEDQVAPKACGHTEGRKVISREEAVMHIKAAVDARKESGSDIVIVARTDSRQAISHDEALWRVKAFADAGADVLFIDALASVEEMKAFCAVAPEVPKMANMLEGGGKTPILSPAELEEIGFRLVVYPLSLVGVSMRAMQDALVAIKDGGVPPPSVLPSFQEIKDTLGFNRYYKEEKQYQVDK

SEQ ID NO: 22013 - DNA, 1353 bp, Zea mays subsp. mays
  misc_feature (1)..(1353): Ceres Seq. ID no. 12407178
gtgtgcaagcaaagcgcaaggccgatccgagggtggactgtggagggccggccatggtgatgatgatgcggtcgtgcctcggcggcggcctgctaccggtggcggtcatgctctgcctcaacgtggtggcggcggtcatggtgtcgctcgtcaaggtggccatggacggcggcatgaaaccgctcgtgatcgtcaccctgcagcagctcaccgccgccgtcttcctcgcgccaatcgcattcttcaaggagaggaagtcgaggccaaagctgacgctggagatcttcgcctacatcttcgtcagtgcggcgctcggggcagctcttcgtcagtacatgatcttcgtggccctgcgctacaccacggccaccttcgtgaccgccttctccaacatcgcccccgtgctcaccttcctcctggccgtcgctacgcggtccgaagcgctggacctcaagagcaggacggggttagcgaagctgctgggcacgctggtgtcgctggccggcgccatggtgctcaccctctacaagggcgtggcgctcacccacgcggcgttccgcctcgcaggaccagcagcagcactcccacggccggttgccgccgagcgccgccgacagccgcggcaagtggacgctgggcaccgtggccatcctgggcaactgcgtctgcctctcctgctggttcctgctccacggccgcctcgccaagaagtacccgcacgtctactcctgcaacgcgctcatgtccttgctcagcttcctccaggtcgccgtcgtcggcctctgcacccagcgcagcatctccccctggatcgtcaccagcaagttcaacatcctcaccgtcctatacgccggcatcgtcggctgcggcgtctcgttcgtgctggtgacatggtgcatcgagaagagaggagccgtgttcgtggccgccttcataccggtggtgcagatcatcgtctccgtcatcgacttctccatcctgcacgagcagctctacctcggaagcgtgctgggatcagtgctagtgataggtggcctttaccttctgctgtggggcaagaggcaggaggccctgcactgtcctcctcctcctccaaaggttgccgaagaagaccctgctgacaaagagcagcagcaagtgcagcagaactgaagacggacagcatcctctgactgtttggtcgtttggttgtaacagtgccagcaataagatctctctgcctccttttcttttcttttggtgtctcaggggggtgggcaatgttccttccttctcagatcgatcaccaacaaagtgtttagattctaatccaaaacagtagaatggtcttaaatacagtactcctgcttactg

SEQ ID NO: 22014 - protein, 372 aa, Zea mays subsp. mays
  misc_feature (1)..(372): Ceres Seq. ID no. 12407179
VQAKRKADPRVDCGGPAMVMMMRSCLGGGLLPVAVMLCLNVVAAVMVSLVKVAMDGGMKPLVIVTLQQLTAAVFLAPIAFFKERKSRPKLTLEIFAYIFVSAALGAALRQYMIFVALRYTTATFVTAFSNIAPVLTFLLAVATRSEALDLKSRTGLAKLLGTLVSLAGAMVLTLYKGVALTHAAFRLAGPAAALPRPVAAERRRQPRQVDAGHRGHPGQLRLPLLLVPAPRPPRQEVPARLLLQRAHVLAQLPPGRRRRPLHPAQHLPLDRHQQVQHPHRPIRRHRRLRRLVRAGDMVHREERSRVRGRLHTGGADHRLRHRLLHPARAALPRKRAGISASDRWPLPSAVGQEAGGPALSSSSSKGCRRRPC

SEQ ID NO: 22015 - protein, 355 aa, Zea mays subsp. mays
  misc_feature (1)..(355): Ceres Seq. ID no. 12407180
MVMMMRSCLGGGLLPVAVMLCLNVVAAVMVSLVKVAMDGGMKPLVIVTLQQLTAAVFLAPIAFFKERKSRPKLTLEIFAYIFVSAALGAALRQYMIFVALRYTTATFVTAFSNIAPVLTFLLAVATRSEALDLKSRTGLAKLLGTLVSLAGAMVLTLYKGVALTHAAFRLAGPAAALPRPVAAERRRQPRQVDAGHRGHPGQLRLPLLLVPAPRPPRQEVPARLLLQRAHVLAQLPPGRRRRPLHPAQHLPLDRHQQVQHPHRPIRRHRRLRRLVRAGDMVHREERSRVRGRLHTGGADHRLRHRLLHPARAALPRKRAGISASDRWPLPSAVGQEAGGPALSSSSSKGCRRRPC

SEQ ID NO: 22016 - protein, 353 aa, Zea mays subsp. mays
  misc_feature (1)..(353): Ceres Seq. ID no. 12407181
MMMRSCLGGGLLPVAVMLCLNVVAAVMVSLVKVAMDGGMKPLVIVTLQQLTAAVFLAPIAFFKERKSRPKLTLEIFAYIFVSAALGAALRQYMIFVALRYTTATFVTAFSNIAPVLTFLLAVATRSEALDLKSRTGLAKLLGTLVSLAGAMVLTLYKGVALTHAAFRLAGPAAALPRPVAAERRRQPRQVDAGHRGHPGQLRLPLLLVPAPRPPRQEVPARLLLQRAHVLAQLPPGRRRRPLHPAQHLPLDRHQQVQHPHRPIRRHRRLRRLVRAGDMVHREERSRVRGRLHTGGADHRLRHRLLHPARAALPRKRAGISASDRWPLPSAVGQEAGGPALSSSSSKGCRRRPC

SEQ ID NO: 22017 - DNA, 1003 bp, Zea mays subsp. mays
  misc_feature (1)..(1003): Ceres Seq. ID no. 12407190
acactctcctctcctgtctatccactttccactccttcactgccctccgtctccctcccctcccccctttgctcgccatggccatggcgacctccaccttctccccgcgtcccgccagcctcaggcccctgcgggcgggcggcaagcccgtcggactcctccccttcccgcgccgcctcgcctgtgccaccgccgccggggaggcgccgcccgtggagcagcgggacaaggcggagccggcccccgccgcggcctccaacggggccgccgtcaagtacgaggccccgccgccgcccgcgccagcgccggtcccggccttccgggacgccaggtgggtcaacggcacctgggacctcgccaagttcgacaagggcagcggcgtcgactgggacgccgtcatcgacgccgaggccaggagaaggagatggctcgaagactatccggaggcgactaacacagacgaggctgtcgtcttcgacacttccattattccatggtgggcttggatgaaacgcttccaccttcccgaagccgagaagctaaatggtcgcgccgccatggtcggcttcttcatggcctacttcgtggacagcttgacgggcgcgggcctcgtcgaccagatgggcaacttcttctgcaagacgctgctgttcgccgccgtcgcaggcgtgctgctggtcaggaaaaacgaggacgtcgagtcgctgaagaagctcgtcgacgagaccacgttctatgacaggcagtggcaggcgacctggcaagatgactccgctgggggaccaaacaactagttcagagttggggtacaaaaaaattagcttatctatttcctcggccttcttgttttccctgtgtagtgagaacttttttttgtttttgtttttgacaaacgcaatgatctacgtcatgttgtaagattgtatgaaaaataattctgcagtttcagtttttttttaaaaaaaccgataatattcagacatggtaatttattcacatatcg

SEQ ID NO: 22018 - protein, 263 aa, Zea mays subsp. mays
  misc_feature (1)..(263): Ceres Seq. ID no. 12407191
TLLSCLSTFHSFTALRLPPLPPLLAMAMATSTFSPRPASLRPLRAGGKPVGLLPFPRRLACATAAGEAPPVEQRDKAEPAPAAASNGAAVKYEAPPPPAPAPVPAFRDARWVNGTWDLAKFDKGSGVDWDAVIDAEARRRRWLEDYPEATNTDEAVVFDTSIIPWWAWMKRFHLPEAEKLNGRAAMVGFFMAYFVDSLTGAGLVDQMGNFFCKTLLFAAVAGVLLVRKNEDVESLKKLVDETTFYDRQWQATWQDDSAGGPNN

SEQ ID NO: 22019 - protein, 238 aa, Zea mays subsp. mays
  misc_feature (1)..(238): Ceres Seq. ID no. 12407192
MAMATSTFSPRPASLRPLRAGGKPVGLLPFPRRLACATAAGEAPPVEQRDKAEPAPAAASNGAAVKYEAPPPPAPAPVPAFRDARWVNGTWDLAKFDKGSGVDWDAVIDAEARRRRWLEDYPEATNTDEAVVFDTSIIPWWAWMKRFHLPEAEKLNGRAAMVGFFMAYFVDSLTGAGLVDQMGNFFCKTLLFAAVAGVLLVRKNEDVESLKKLVDETTFYDRQWQATWQDDSAGGPNN

SEQ ID NO: 22020 - protein, 236 aa, Zea mays subsp. mays
  misc_feature (1)..(236): Ceres Seq. ID no. 12407193
MATSTFSPRPASLRPLRAGGKPVGLLPFPRRLACATAAGEAPPVEQRDKAEPAPAAASNGAAVKYEAPPPPAPAPVPAFRDARWVNGTWDLAKFDKGSGVDWDAVIDAEARRRRWLEDYPEATNTDEAVVFDTSIIPWWAWMKRFHLPEAEKLNGRAAMVGFFMAYFVDSLTGAGLVDQMGNFFCKTLLFAAVAGVLLVRKNEDVESLKKLVDETTFYDRQWQATWQDDSAGGPNN

SEQ ID NO: 22021 - DNA, 1169 bp, Zea mays subsp. mays
  misc_feature (1)..(1169): Ceres Seq. ID no. 12407205
atcaacccaacacggcgtccccgtcccgagtcaccaccgacccaagcaaaaccgcacgcaccctgccagcggccccccaactcccaacccaacccctactccagctagctcgcggcggcggccagcggccatggccttccggctgagcaacaacctgatcggggtcctaaacttcgtcaccttcctgctctccgtcccgatcctgggcgcgggcatctggctgggccaccgcgccgacggcaccgagtgcgagcgctacctctcggcgcccgtcatcgcgctgggggccttcctcctcgccgtctccctggcgggcctcgtcggcgcctgctgccgcgtcacctggctgctctgggcctacctcctcgccatgttcgtcctcatcctcgtcctcttctgcttcaccgtcttcgccttcgtcgtcaccaacaggggcgccggcgaggccgtctccggccgcggatacaaggagtaccgcctcggggactactccaactggctgcagaagcgcgtcgagaacaccaggaactgggaccggatcaggagctgcctccaggactccaaggtctgcaagagcctgcaggacaagaacgagaccgtcgcccagttcatgagttccagcctctcccccatcgagtctggctgctgcaagccccccaccagctgcggctacacctacgtcggcggcacggactggacgccggtgaccaccaactcgacggacccggactgcaagacctggagcaacgacgcctcggcgctctgctacaactgccagtcgtgcaaggccggcgtggtggccacgttccagcggaactggaagcgcgtcgccgtcgtctgcatcgtcttcctcgtcttcatcatcatcgtctactccgtcggctgctgcgccttcaggaacaaccgcagagacaacgcctaccgcggcgggtggaagggcgggtacgcttgatccaccatcgcgtcgtttaggagcggagccatgcacgcgcgctcggtgctctgctctgctccctgcccgccgctgtcgtcgtacgtacatgtttagtaggctcgttgtagctctgtacaggtgatggagatcgttgttgcggattcttatcgtcttcctggttacatacttacattattgttatgatctgatcagcggtaggttttgtatacgctgc

SEQ ID NO: 22022 - protein, 316 aa, Zea mays subsp. mays
  misc_feature (1)..(316): Ceres Seq. ID no. 12407206
STQHGVPVPSHHRPKQNRTHPASGPPTPNPTPTPASSRRRPAAMAFRLSNNLIGVLNFVTFLLSVPILGAGIWLGHRADGTECERYLSAPVIALGAFLLAVSLAGLVGACCRVTWLLWAYLLAMFVLILVLFCFTVFAFVVTNRGAGEAVSGRGYKEYRLGDYSNWLQKRVENTRNWDRIRSCLQDSKVCKSLQDKNETVAQFMSSSLSPIESGCCKPPTSCGYTYVGGTDWTPVTTNSTDPDCKTWSNDASALCYNCQSCKAGVVATFQRNWKRVAVVCIVFLVFIIIVYSVGCCAFRNNRRDNAYRGGWKGGYA

SEQ ID NO: 22023 - protein, 273 aa, Zea mays subsp. mays
  misc_feature (1)..(273): Ceres Seq. ID no. 12407207
MAFRLSNNLIGVLNFVTFLLSVPILGAGIWLGHRADGTECERYLSAPVIALGAFLLAVSLAGLVGACCRVTWLLWAYLLAMFVLILVLFCFTVFAFVVTNRGAGEAVSGRGYKEYRLGDYSNWLQKRVENTRNWDRIRSCLQDSKVCKSLQDKNETVAQFMSSSLSPIESGCCKPPTSCGYTYVGGTDWTPVTTNSTDPDCKTWSNDASALCYNCQSCKAGVVATFQRNWKRVAVVCIVFLVFIIIVYSVGCCAFRNNRRDNAYRGGWKGGYA

SEQ ID NO: 22024 - protein, 193 aa, Zea mays subsp. mays
  misc_feature (1)..(193): Ceres Seq. ID no. 12407208
MFVLILVLFCFTVFAFVVTNRGAGEAVSGRGYKEYRLGDYSNWLQKRVENTRNWDRIRSCLQDSKVCKSLQDKNETVAQFMSSSLSPIESGCCKPPTSCGYTYVGGTDWTPVTTNSTDPDCKTWSNDASALCYNCQSCKAGVVATFQRNWKRVAVVCIVFLVFIIIVYSVGCCAFRNNRRDNAYRGGWKGGYA

SEQ ID NO: 22025 - DNA, 1773 bp, Zea mays subsp. mays
  misc_feature (1)..(1773): Ceres Seq. ID no. 12407294
  misc_feature (1742)..(1742): n is a, c, t, g, unknown, or other
  misc_feature (1743)..(1743): n is a, c, t, g, unknown, or other
  misc_feature (1767)..(1767): n is a, c, t, g, unknown, or other
actcactagctagcttccagcagcagcagccttgtcgtgcaacagcagcaccaggaccaggctaccaccagttagctgctggggacctggggtacggttgctgttccgtgactctcgtcgcacaacacaatgccggccatggtagaggaggggctcgtcaggcgggcggcgcccgagccgcacttcctggtggtgaccttcccggcgcagggccacatcaacccggcgcgccacctcgcgcgccgcctgctacgcgccacgggggcgcgggtcaccgtctgcacggccgtgtccgcgctccgcaagatgttcccgggcgccgaggcagacgcggaggaggagggccaccgcgacggcgcgggggtgcggtacgtgccctactccgacggctacgacgacggcttcgacggcgccgtgcacgacgccacgcgctacatggaccaggtcaaggtcgtggggtcccgcacgctgggggacgtcctggcccgcctccgcggcgcgggcaggcccgccacgctcgtcgtgtacacgctgctgctgtcgtgggtggccgacgtggcgcgcgaccacgccgtgcccgccgcgctctactggatccagccggccaccgtgctcgccgtctacctgcacttcttccgcgccacgggcggcgtcgacgcggccgtcgccgcggcgggcggcgacccgtgggcgggcgtccggttcccgggcctcccgccgctccgcgtccgcgacctgccgtcgttcatcgtctccacctccgaggacgacccctacgcgttcgtcgcggacgcgttccgcgagctcgtcgggcggctggacgncggcgaggacagccccagcgtgctggccaacacgttcgacgccgtggagcccgaggcggtggcgtcgctgcgggagcacggcgtggacgtggtccccgtcggccccgtcctctccttcctggacgacgacgcggcggccggcggcaacaacgacctgttcacgcaggacggcaagggctacctcgagtggctggacgcacaggcgccgggctccgtggtgtacatctcgttcgggagcctgtcggtgatgcgcaggcggcagatcgaggaggtggcgcgggggatgtccgagagcggccgcccgttcctgtgggtgctgcgggaggacaaccgcagaagcgagggcgccgacgccgacgccgcgacgctggccggcggcgggcgcggcatggtggtggggtggtgcgaccaggtgcgggtgttgtcgcacccggccgtgggctgcttcgtcacggcactggcggctggaactccacgctggagagcacggcgtgcggcgtccccgtcgtgtgcgtgccgcagtggacggaccagggcaccaacgcgtggctggtggagaggatcgggaccggcgtcagggccgccgtcagcgacaaggacggggtgctggaggccggcgagctgcggaggtgtatcgacctcgctacctccgacatggtgcgcgccaaggccgccgtgtggagggagaaggcgcgcgccgccgcgtcgaagggcggctcgtcggagaggaacctcaaggcgttcgtcgccaagcagatcgccggcgggaataactaggccgtcagctctcgtgcggtcgacataggttatgggactcgatctacaactgtacttaattaattgttgctctaagcgcatgtgcaagtgcaaacatgtgtgtcaacgtgataatattgatattctctgcaggtgtgtgtnnacgtgataatttatataattctcncttaat

SEQ ID NO: 22026 - protein, 532 aa, Zea mays subsp. mays
  misc_feature (1)..(532): Ceres Seq. ID no. 12407295
  misc_feature (274)..(274): Xaa is any aa, unknown or other
SLASFQQQQPCRATAAPGPGYHQLAAGDLGYGCCSVTLVAQHNAGHGRGGARQAGGARAALPGGDLPGAGPHQPGAPPRAPPATRHGGAGHRLHGRVRAPQDVPGRRGRRGGGGPPRRRGGAVRALLRRLRRRLRRRRARRHALHGPGQGRGVPHAGGRPGPPPRRGQARHARRVHAAAVVGGRRGARPRRARRALLDPAGHRARRLPALLPRHGRRRRGRRRGGRRPVGGRPVPGPPAAPRPRPAVVHRLHLRGRPLRVRRGRVPRARRAAGXRRGQPQRAGQHVRRRGARGGGVAAGARRGRGPRRPRPLLPGRRRGGRRQQRPVHAGRQGLPRVAGRTGAGLRGVHLVREPVGDAQAADRGGGAGDVRERPPVPVGAAGGQPQKRGRRRRRRDAGRRRARHGGGVVRPGAGVVAPGRGLLRHGTGGWNSTLESTACGVPVVCVPQWTDQGTNAWLVERIGTGVRAAVSDKDGVLEAGELRRCIDLATSDMVRAKAAVWREKARAAASKGGSSERNLKAFVAKQIAGGNN

SEQ ID NO: 22027 - protein, 499 aa, Zea mays subsp. mays
  misc_feature (1)..(499): Ceres Seq. ID no. 12407296
  misc_feature (232)..(232): Xaa is any aa, unknown or other
MPAMVEEGLVRRAAPEPHFLVVTFPAQGHINPARHLARRLLRATGARVTVCTAVSALRKMFPGAEADAEEEGHRDGAGVRYVPYSDGYDDGFDGAVHDATRYMDQVKVVGSRTLGDVLARLRGAGRPATLVVYTLLLSWVADVARDHAVPAALYWIQPATVLAVYLHFFRATGGVDAAVAAAGGDPWAGVRFPGLPPLRVRDLPSFIVSTSEDDPYAFVADAFRELVGRLDXGEDSPSVLANTFDAVEPEAVASLREHGVDVVPVGPVLSFLDDDAAAGGNNDLFTQDGKGYLEWLDAQAPGSVVYISFGSLSVMRRRQIEEVARGMSESGRPFLWVLREDNRRSEGADADAATLAGGGRGMVVGWCDQVRVLSHPAVGCFVTALAAGTPRWRARRAASPSCACRSGRTRAPTRGWWRGSGPASGPPSATRTGCWRPASCGGVSTSLPPTWCAPRPPCGGRRRAPPRRRAARRRGTSRRSSPSRSPAGITRPSALVRST

SEQ ID NO: 22028 - protein, 496 aa, Zea mays subsp. mays
  misc_feature (1)..(496): Ceres Seq. ID no. 12407297
  misc_feature (229)..(229): Xaa is any aa, unknown or other
MVEEGLVRRAAPEPHFLVVTFPAQGHINPARHLARRLLRATGARVTVCTAVSALRKMFPGAEADAEEEGHRDGAGVRYVPYSDGYDDGFDGAVHDATRYMDQVKVVGSRTLGDVLARLRGAGRPATLVVYTLLLSWVADVARDHAVPAALYWIQPATVLAVYLHFFRATGGVDAAVAAAGGDPWAGVRFPGLPPLRVRDLPSFIVSTSEDDPYAFVADAFRELVGRLDXGEDSPSVLANTFDAVEPEAVASLREHGVDVVPVGPVLSFLDDDAAAGGNNDLFTQDGKGYLEWLDAQAPGSVVYISFGSLSVMRRRQIEEVARGMSESGRPFLWVLREDNRRSEGADADAATLAGGGRGMVVGWCDQVRVLSHPAVGCFVTALAAGTPRWRARRAASPSCACRSGRTRAPTRGWWRGSGPASGPPSATRTGCWRPASCGGVSTSLPPTWCAPRPPCGGRRRAPPRRRAARRRGTSRRSSPSRSPAGITRPSALVRST

SEQ ID NO: 22029 - DNA, 1332 bp, Zea mays subsp. mays
  misc_feature (1)..(1332): Ceres Seq. ID no. 12407298
aatataggcaccccgcaccccgttggcgtttgcccgtcctgactcctcgtccccgtgcacaccaccctcgtctccgcgcccgcgccactcacatcgtgatcgagacgacccgcgtcctccgcggtccgcgcccgcgcaccatctcgcctcgcattcccgaaagtatctgtattccttgatcaacatgtcgcgggaggagaatgtttatatggccaagctggctgagcaagcagaacggtacgaggaaatggttgaatacatggagaaggtggctaagaccacagatgtgcaagagctcactgttgaggagcgtaaccttctatctgttgcctacaagaatgtgattgcggccccccgtgcctcatggcgcattatctcctccatcgagcagaaagaggagtcccgtaagaatgaggaacatgttgcacagatcaaggaataccgtggcaagattgaggctgaattgagcaacatttgtgatggtatcctaaagctgcttgacacgcaccttgtgccttcctccactgccacagagtcgaaggtgttttacctcaagatgaagggtgattatcacaggtaccttgctgagtttaagactggtgctgagaggaaggaatctgcagagagcacaatggtagcttataaggcagctcaggatattgcattggctgaactgccacctattcatcccataaggcttggacttgcacttaacttctcagttttctattacgagattcagaactctccagacaaagcttgcaatcttgccaaggaggcgtttgatgaagctatttctcagttggacatgcttggtgaggattcctacaaagatagcaacttgattatgcagctcctgagggacaacttgaccctctggacggaggacggcattgaggagggcttagaatcctctaagggcgatgctggtgagggtcagtagcctggtaaacttagattgatggttcgacgtgtttctcaagcacatcgtgttggacgcccagtgctgacaaaaggcttttgctgctccatgcattccaagcttctgccccctcgttcgcaccctctttatgttgttggctggtagtggtcagatttagtcccattggtttagttggccctgggtccatctgaactgatgtattgttactgctatggaagtcattcctttagttttgctctggcagtggattgctgttgggtcgtgttttcagtctttattggtttccgatcggacgctgttgcgggcaaaccacccctgtagatactcttcacatgctgaagaaaactaccagcagccgtttagcctgaataattgctaaatgataggtt

SEQ ID NO: 22030 - protein, 252 aa, Zea mays subsp. mays
  misc_feature (1)..(252): Ceres Seq. ID no. 12407299
MSREENVYMAKLAEQAERYEEMVEYMEKVAKTTDVQELTVEERNLLSVAYKNVIAAPRASWRIISSIEQKEESRKNEEHVAQIKEYRGKIEAELSNICDGILKLLDTHLVPSSTATESKVFYLKMKGDYHRYLAEFKTGAERKESAESTMVAYKAAQDIALAELPPIHPIRLGLALNFSVFYYEIQNSPDKACNLAKEAFDEAISQLDMLGEDSYKDSNLIMQLLRDNLTLWTEDGIEEGLESSKGDAGEGQ

SEQ ID NO: 22031 - protein, 244 aa, Zea mays subsp. mays
  misc_feature (1)..(244): Ceres Seq. ID no. 12407300
MAKLAEQAERYEEMVEYMEKVAKTTDVQELTVEERNLLSVAYKNVIAAPRASWRIISSIEQKEESRKNEEHVAQIKEYRGKIEAELSNICDGILKLLDTHLVPSSTATESKVFYLKMKGDYHRYLAEFKTGAERKESAESTMVAYKAAQDIALAELPPIHPIRLGLALNFSVFYYEIQNSPDKACNLAKEAFDEAISQLDMLGEDSYKDSNLIMQLLRDNLTLWTEDGIEEGLESSKGDAGEGQ

SEQ ID NO: 22032 - protein, 231 aa, Zea mays subsp. mays
  misc_feature (1)..(231): Ceres Seq. ID no. 12407301
MVEYMEKVAKTTDVQELTVEERNLLSVAYKNVIAAPRASWRIISSIEQKEESRKNEEHVAQIKEYRGKIEAELSNICDGILKLLDTHLVPSSTATESKVFYLKMKGDYHRYLAEFKTGAERKESAESTMVAYKAAQDIALAELPPIHPIRLGLALNFSVFYYEIQNSPDKACNLAKEAFDEAISQLDMLGEDSYKDSNLIMQLLRDNLTLWTEDGIEEGLESSKGDAGEGQ

SEQ ID NO: 22033 - DNA, 1366 bp, Zea mays subsp. mays
  misc_feature (1)..(1366): Ceres Seq. ID no. 12407332
aagcgcaaggaagcaatcgggaagagacaacggcaagcgacgggactcgggaggaagcaagtgcaaagcagcattcttgtaggagagtgagtgagtttcttcgtaccgagctaagagaaacaaaagaacagcaagaaccggcagtgcaacataagactacgtagctgctaatcgaacctggcgtctactgtttcctcttccttttgcccaaaatcacagcgcctggggttcaatccaaactacttgcattgctatccaagtttttagttacaggatcggcgagctactcggattcctctcccacggcgttgcctgcgcgccacgcccggcgccgaacgtctcggctgcgccggccccggtcccggccatgccgccgatgggctggacgaacgcggggaggcctcgtcctgccgacgcgcccgacgggctcatcccgagccccaggaagtccagcgtcgccgggcttcccgctgaacagagacgactggcccatcatgagctccggcaggctcacctgagccccggtggagtcgtacggcagcccaaggccgagcccggccgacagcattggcgccggctccagctccagccgcggcggccattgctgcagcgaggcgtccgggagtgacacccgcatggcctcctggtgctggtgctgctggcctgacgacgaggcgcccggcgacgacgaggagacgtccaggcccagcccgcgcaggaacgaggagctcgacgaggtggcgcccatctgcgcggccttctgcagcagcgcggtggccgacatgtgtgcggacggggacggggacggaggcggcggcgcgaactgctggcgctcggcggtcaccgccggcgccgccgagaagatcgacgacgatgcgtccgtggcgaggcacagcggcgggggcttggcgggatgggcgcgctccggccggccgccgaggtccgcgtactgcggcgctgacgccatcgacgacggcgcgaacataccgccgagcaggctctgcgacgtccccgcgacgctgctgctgctgctgctggcgccaacgttggcagcagcgctcaccgaatcttgcgaaagcaccggtacctgtaactgcggcggcggcggtggcggaggcggcggcggtggcggaggcggcggcgcgaactggacggcctcagtcgcattcgtgtcagtctctgcatgcattgcaacgaagcattagcgaatcgggggcatggattagattcagactagattgattagtgtaaaaggcgctaaaagctcgggagatgcagaaagcaacgagaggccatgatggcgtccttttcatgttgctcgtgggcgtgcttttgtcatcggatttcaatgctctgagaagttctg

SEQ ID NO: 22034 - protein, 189 aa, Zea mays subsp. mays
  misc_feature (1)..(189): Ceres Seq. ID no. 12407333
MASWCWCCWPDDEAPGDDEETSRPSPRRNEELDEVAPICAAFCSSAVADMCADGDGDGGGGANCWRSAVTAGAAEKIDDDASVARHSGGGLAGWARSGRPPRSAYCGADAIDDGANIPPSRLCDVPATLLLLLLAPTLAAALTESCESTGTCNCGGGGGGGGGGGGGGGANWTASVAFVSVSACIATKH

SEQ ID NO: 22035 - protein, 140 aa, Zea mays subsp. mays
  misc_feature (1)..(140): Ceres Seq. ID no. 12407334
MCADGDGDGGGGANCWRSAVTAGAAEKIDDDASVARHSGGGLAGWARSGRPPRSAYCGADAIDDGANIPPSRLCDVPATLLLLLLAPTLAAALTESCESTGTCNCGGGGGGGGGGGGGGGANWTASVAFVSVSACIATKH

SEQ ID NO: 22036 - protein, 122 aa, Zea mays subsp. mays
  misc_feature (1)..(122): Ceres Seq. ID no. 12407335
MRPWRGTAAGAWRDGRAPAGRRGPRTAALTPSTTARTYRRAGSATSPRRCCCCCWRQRWQQRSPNLAKAPVPVTAAAAVAEAAAVAEAAARTGRPQSHSCQSLHALQRSISESGAWIRFRLD

SEQ ID NO: 22037 - DNA, 1553 bp, Zea mays subsp. mays
  misc_feature (1)..(1553): Ceres Seq. ID no. 12407344
gcgtgcgtccacctccttggtcttctcttcccttccttctgtgcgaaaagcgagcacccaaaccctatcttactatttgtattcggatctgagctactggatgcgcccctgatctggggcagtattcctcatatttggccaaagaggaatataatacttcccctgatttccagcagcttccggaactttgtaaagaaacgaaagaaaagtttaacacagcgcgcgcgcgcgatcctttccgacaggacagtatagcggatggcttcgtcggtgcgggcgccatcggggtcggtgatcgccgtggcatcgtcctcttcctcagcagccttggccggggtgtgcggcacgggctcgccgtgcgccgcgtgcaagttcctgcgtcgcaagtgccagccggactgcgtgttcgcgccctacttcccaccggacaacccgcagaagttcgtgcgcgtgcaccgcgtcttcggcgcgagcaacgtgaccaagctgatgaacgaaatccacccgttgcagcgcgaggacgccatgaactcgctcgcctacgaggccgacatgcgaattcgcgaccccgtctacggctgcgtgggcgtcatctccatcctccagcacaacctacggcagctccagcaggacctcgcccgcgccaagtacgagctctccaagtaccaggcggcagcggcggcagcatccgcgtcgacggcgccgaccgggccgcaggcgatggcagagttcatcggcagcgcgatgccgaacggcgccgcgcacaacttcatcaaccttggacactcggcggcgctcggctccctcggaggctccaccgccatgttcgggcagcaggagcagttcggcagcaacgcgcagatgctgtccaggagctacgacggcggcgagcccatcgcgaggatagggatgaacaacggcggctacgagttcggttactcgagcgcgacgacgatgggcgggtctgcaggcgctgtctctggcggcctcgggacgctcggcatcagcagcccgccgttcttgaagtctggaaccgccggcggcgacgagaagcccagcggcggtcagtaggcggttccatccgtgtgaccgatccttctatccatccatccatccatcagtcttgtcaggttactgacgcgatgaagaaacggggaggaaaaaaatatccatgaaacgcgtgcaaggacttatcctagacgtccgccgttgtcaggagggggctaatttccagacgattttacatggaaaaagtgcgtcgcttgcgtgcgtgcgtgcttgcttttgttgctagattcattgcttgtttgttaattaccacgctatctaccctccccatccacatcatccacgagatcgtcagatattccatgccagcgtccacagagtggcctatgttcttgttattagttgctgtactgcgaagggagggggacaaaatgcatgcttgtccggcccggacctttttttttaccccactcggaagactagcgcccatttgtactccatgtattattgctaggttggctgtaatatatgaagttgaccttttg

SEQ ID NO: 22038 - protein, 270 aa, Zea mays subsp. mays
  misc_feature (1)..(270): Ceres Seq. ID no. 12407345
MASSVRAPSGSVIAVASSSSSAALAGVCGTGSPCAACKFLRRKCQPDCVFAPYFPPDNPQKFVRVHRVFGASNVTKLMNEIHPLQREDAMNSLAYEADMRIRDPVYGCVGVISILQHNLRQLQQDLARAKYELSKYQAAAAAASASTAPTGPQAMAEFIGSAMPNGAAHNFINLGHSAALGSLGGSTAMFGQQEQFGSNAQMLSRSYDGGEPIARIGMNNGGYEFGYSSATTMGGSAGAVSGGLGTLGISSPPFLKSGTAGGDEKPSGGQ

SEQ ID NO: 22039 - protein, 193 aa, Zea mays subsp. mays
  misc_feature (1)..(193): Ceres Seq. ID no. 12407346
MNEIHPLQREDAMNSLAYEADMRIRDPVYGCVGVISILQHNLRQLQQDLARAKYELSKYQAAAAAASASTAPTGPQAMAEFIGSAMPNGAAHNFINLGHSAALGSLGGSTAMFGQQEQFGSNAQMLSRSYDGGEPIARIGMNNGGYEFGYSSATTMGGSAGAVSGGLGTLGISSPPFLKSGTAGGDEKPSGGQ

SEQ ID NO: 22040 - protein, 181 aa, Zea mays subsp. mays
  misc_feature (1)..(181): Ceres Seq. ID no. 12407347
MNSLAYEADMRIRDPVYGCVGVISILQHNLRQLQQDLARAKYELSKYQAAAAAASASTAPTGPQAMAEFIGSAMPNGAAHNFINLGHSAALGSLGGSTAMFGQQEQFGSNAQMLSRSYDGGEPIARIGMNNGGYEFGYSSATTMGGSAGAVSGGLGTLGISSPPFLKSGTAGGDEKPSGGQ

SEQ ID NO: 22041 - DNA, 1473 bp, Zea mays subsp. mays
  misc_feature (1)..(1473): Ceres Seq. ID no. 12407354
aatgtccactcagatctgaaatgtcaatggaatccgttgccgttgccgtcgtggcggtgccgttcccggcgcagggccacctcaacggcatgctgcacttgtctctgctactcgcgtcccgagggctttccgtgcactacgcggcgccggggccgcacgtccgccaggcgcgcgcgcgcgtgcacggctggggcgacgacgcccaccgccgcatcgagttccacgagctcgaggtccccgcgtacgccaccccgccgccggacccggtcgcgccctcgccgttcccgacccacctcatccccatgagcgaggccttcctcgcgggcgcgcgcgccccagtcgccagcctcatcgggagggtctccgcgcgccaccgccgcgtggtggtcctgtacgatcgcctcagctccttcgccgcccccgaggcggcgcggatccccaacggcgaagcgttctgcctgcagtgcgtggccgcgtgcttcgacgccgcgtggacggacgccgggcagcggctcctgcgcaagcacggcctcgacgccccgcaccccggcgcctgcatgccgagggagttcgtggagtacattgtcaggacgcaggaggacagccggagtccggcgttcgctggggtagtggcgaacacgtgccgcgcgatcgagagcgagttcatcgacgtggtggccggggaccctgagaaccgaggaaagagagtcttcgcagtcgggccgatgaatccgctgcttaacgtgaccgcgccgacagcgggacagagtgcacggcacgagtgcttggactggctcgacaagcaaccgccggcgtcggtgctgtacgtgtcgttcggcacgacgtcgtcgctgcgggcggagcagatcgcggaactcgccgcggcgctgcgcgacagcaaacagcggttcgtctgggttctgcgcgacgctgatcgcggtgtggtacacgaggaggaagccgtggagagtaggcacgccaggttcctatccgagttcaccgaggaaactcaaggcatcgggttggtgatcaccgggtgggcgccgcagctggagatcctggcccacggcgccacggcagctttcatgagtcactgcggctggaactcgaccatggagagcctgagccacgggaagccgatgctcgcctggcccatgcactccgaccagccgctggtggcggagctcgtgtgcaagtgcctcaaggccgggctcctcgtaaggccatgggagcaacacagtgctgtgacacctgcggaaaccatccgcgaggtgatcgagaaggtgatggcacgcgatgaaggtttggcggtccgggagagggccaaggagctcatggagtttattcgccgctctgtggccgagggcgggtcttcgcgcaaggaccttgacgacttcgttgcttacatagcaagatgaaatgcgtcctgtatttgactatttctactagtttcaattttgagttctcgtgatg

SEQ ID NO: 22042 - protein, 471 aa, Zea mays subsp. mays
  misc_feature (1)..(471): Ceres Seq. ID no. 12407355
CPLRSEMSMESVAVAVVAVPFPAQGHLNGMLHLSLLLASRGLSVHYAAPGPHVRQARARVHGWGDDAHRRIEFHELEVPAYATPPPDPVAPSPFPTHLIPMSEAFLAGARAPVASLIGRVSARHRRVVVLYDRLSSFAAPEAARIPNGEAFCLQCVAACFDAAWTDAGQRLLRKHGLDAPHPGACMPREFVEYIVRTQEDSRSPAFAGVVANTCRAIESEFIDVVAGDPENRGKRVFAVGPMNPLLNVTAPTAGQSARHECLDWLDKQPPASVLYVSFGTTSSLRAEQIAELAAALRDSKQRFVWVLRDADRGVVHEEEAVESRHARFLSEFTEETQGIGLVITGWAPQLEILAHGATAAFMSHCGWNSTMESLSHGKPMLAWPMHSDQPLVAELVCKCLKAGLLVRPWEQHSAVTPAETIREVIEKVMARDEGLAVRERAKELMEFIRRSVAEGGSSRKDLDDFVAYIAR

SEQ ID NO: 22043 - protein, 465 aa, Zea mays subsp. mays
  misc_feature (1)..(465): Ceres Seq. ID no. 12407356
MSMESVAVAVVAVPFPAQGHLNGMLHLSLLLASRGLSVHYAAPGPHVRQARARVHGWGDDAHRRIEFHELEVPAYATPPPDPVAPSPFPTHLIPMSEAFLAGARAPVASLIGRVSARHRRVVVLYDRLSSFAAPEAARIPNGEAFCLQCVAACFDAAWTDAGQRLLRKHGLDAPHPGACMPREFVEYIVRTQEDSRSPAFAGVVANTCRAIESEFIDVVAGDPENRGKRVFAVGPMNPLLNVTAPTAGQSARHECLDWLDKQPPASVLYVSFGTTSSLRAEQIAELAAALRDSKQRFVWVLRDADRGVVHEEEAVESRHARFLSEFTEETQGIGLVITGWAPQLEILAHGATAAFMSHCGWNSTMESLSHGKPMLAWPMHSDQPLVAELVCKCLKAGLLVRPWEQHSAVTPAETIREVIEKVMARDEGLAVRERAKELMEFIRRSVAEGGSSRKDLDDFVAYIAR

SEQ ID NO: 22044 - protein, 463 aa, Zea mays subsp. mays
  misc_feature (1)..(463): Ceres Seq. ID no. 12407357
MESVAVAVVAVPFPAQGHLNGMLHLSLLLASRGLSVHYAAPGPHVRQARARVHGWGDDAHRRIEFHELEVPAYATPPPDPVAPSPFPTHLIPMSEAFLAGARAPVASLIGRVSARHRRVVVLYDRLSSFAAPEAARIPNGEAFCLQCVAACFDAAWTDAGQRLLRKHGLDAPHPGACMPREFVEYIVRTQEDSRSPAFAGVVANTCRAIESEFIDVVAGDPENRGKRVFAVGPMNPLLNVTAPTAGQSARHECLDWLDKQPPASVLYVSFGTTSSLRAEQIAELAAALRDSKQRFVWVLRDADRGVVHEEEAVESRHARFLSEFTEETQGIGLVITGWAPQLEILAHGATAAFMSHCGWNSTMESLSHGKPMLAWPMHSDQPLVAELVCKCLKAGLLVRPWEQHSAVTPAETIREVIEKVMARDEGLAVRERAKELMEFIRRSVAEGGSSRKDLDDFVAYIAR

SEQ ID NO: 22045 - DNA, 1361 bp, Zea mays subsp. mays
  misc_feature (1)..(1361): Ceres Seq. ID no. 12407362
acaatccacagatacggtcataccgactgctgttgcccccgatttcccgtccgcccgcagtttctgaaggcacaccaaaacgatgagacctgtagacagtactctagtctctagtccacgaaatcctcgtacttgtgttggctggccctcgactagcgtgttgtagcacactagcgccacagtaatcgagagtgctctcccaggtcgaggtggtgtaggtgtttggcggagcagccggagcgttagaatctgaggaggagaagatggtggtgctggtggtggccacgacgtcggacccggcgtccattgggcccgccgccgccttcctcgccatgcccggatggtcccccggcccgcccatcgccgaggcgatggagagttttactaatgggaatgttcgattactgaagcatgagcgtagcattgtcgcagaggatgatcttgaccagcgatggcaggaagccactggagagtctgtttctgaggtcatattcctcagcaaacacactgcagtctccaaacgtccagcactcacagtgcatccaattggtgtgccacatctgaaggaggatgaaaccccaccccaaggaggaactcctggatgggcagcaattccaagtcctcgaattggaccttggctccggttgatgcaaaagatagctgtagaacaaggccttgttccagagtttgaggttacgcttgaggctactcaccatggaccagttaccagcacacccaccatgtttgttgagataggaagtacagaagaccactggggtcgacaagatgctgcacaggcaattgctctagttctatggaaaggtcttggtctggaggatggaaatgctgttggaacttggcagaggaattgtgaaaaggttctattaggtataggaggtggtcactatgttcctcgtcacatggatattgtcatcaaagatggtgtatgggtcggtcatttactctctggctactccttgccaatggacatgccgtcgcaagtaaatgtaaagagttctgaagaggttgctggaatgtggaagcactccatcaaagtttcttatgaagcaacaaaggcagcatttcctggtggtgaagttatcgcgcatcttgatcacaagagcttcaagggctggcagaagaatgctgttacatgcttcttgcaggagcagaacatcaggataggaaagcctagcgatttcctgtgacgtgctgcgacagcagtgctggacaggacaggtggaagaggctgtgaatgcttgagctgatttccctggtcacgcccacgcgcgcgctgaataaatatgagacgtatagtaagactcgatccttaatgcggttcaagagcttgaatttgccgc

SEQ ID NO: 22046 - protein, 314 aa, Zea mays subsp. mays
  misc_feature (1)..(314): Ceres Seq. ID no. 12407363
MVVLVVATTSDPASIGPAAAFLAMPGWSPGPPIAEAMESFTNGNVRLLKHERSIVAEDDLDQRWQEATGESVSEVIFLSKHTAVSKRPALTVHPIGVPHLKEDETPPQGGTPGWAAIPSPRIGPWLRLMQKIAVEQGLVPEFEVTLEATHHGPVTSTPTMFVEIGSTEDHWGRQDAAQAIALVLWKGLGLEDGNAVGTWQRNCEKVLLGIGGGHYVPRHMDIVIKDGVWVGHLLSGYSLPMDMPSQVNVKSSEEVAGMWKHSIKVSYEATKAAFPGGEVIAHLDHKSFKGWQKNAVTCFLQEQNIRIGKPSDFL

SEQ ID NO: 22047 - protein, 291 aa, Zea mays subsp. mays
  misc_feature (1)..(291): Ceres Seq. ID no. 12407364
MPGWSPGPPIAEAMESFTNGNVRLLKHERSIVAEDDLDQRWQEATGESVSEVIFLSKHTAVSKRPALTVHPIGVPHLKEDETPPQGGTPGWAAIPSPRIGPWLRLMQKIAVEQGLVPEFEVTLEATHHGPVTSTPTMFVEIGSTEDHWGRQDAAQAIALVLWKGLGLEDGNAVGTWQRNCEKVLLGIGGGHYVPRHMDIVIKDGVWVGHLLSGYSLPMDMPSQVNVKSSEEVAGMWKHSIKVSYEATKAAFPGGEVIAHLDHKSFKGWQKNAVTCFLQEQNIRIGKPSDFL

SEQ ID NO: 22048 - protein, 278 aa, Zea mays subsp. mays
  misc_feature (1)..(278): Ceres Seq. ID no. 12407365
MESFTNGNVRLLKHERSIVAEDDLDQRWQEATGESVSEVIFLSKHTAVSKRPALTVHPIGVPHLKEDETPPQGGTPGWAAIPSPRIGPWLRLMQKIAVEQGLVPEFEVTLEATHHGPVTSTPTMFVEIGSTEDHWGRQDAAQAIALVLWKGLGLEDGNAVGTWQRNCEKVLLGIGGGHYVPRHMDIVIKDGVWVGHLLSGYSLPMDMPSQVNVKSSEEVAGMWKHSIKVSYEATKAAFPGGEVIAHLDHKSFKGWQKNAVTCFLQEQNIRIGKPSDFL

SEQ ID NO: 22049 - DNA, 1660 bp, Zea mays subsp. mays
  misc_feature (1)..(1660): Ceres Seq. ID no. 12407366
gcacgagaccattacctagaacatcctaatcgaaaagcagaaccatggccggcgaggaacaccagcagcacagcagccactacggccaccacttcctggtggtggcctacggcatgcagggccacgtcaacccagcgcgcgctctggctcaccgcctcgccaagctcagcgacgtcgtaggcggctgccccatcctcgccacgctctccctgcacgtcgccgcccaccgccgcatgttcccggcacagctggacccggacgccgccggcgaggaggatgaggaggaggccagcgacggcgtcatctcctacgtgccccactcggacagcttcgacgacggctccttgcccagaacccccgaggactgggcccgcagacgccgcgcgagccgcgagagcctctccgccatgctcgcccgcttcgccggcggcgggcggcccgtcacctgcgtggtgtgcacgctgctggtgcccgcggcggtggacgccgcgacgcgccacggcgtccccttcgccgtgtactggatccagccggccaccgtcctcgccgccgcgtaccactacttccacggctacggcgagaccgtcgccgccgccgacccggcgcacgaggtgagcctgcctgggctacgccgccctctccgggtccgggacttcccgtcctacctggtggacacgacgggcagcccgctggccaggtccgtcgtcgggatgttccgagagctgttcgagagcgtggaccggtggcggcctaaagtcctcgtgaacacgttcgacgagctggaggcgggcgtgctctcggagatgaagcgacacctcgacgtgttcgccgtcggtcccatggtcgccggcgccggtggtggctcgggctcctctggcgcgtcaaacgacgaaggacggatccatctgtacaggcacgacgacgccgacaggaagaggtacatggagtggctcggagcgcagccggagagctcggtggtgtacgtgtcgttcgggagcatagcgacgcacaccttgcagcagatggaggaggttgtccaagggctgctgcaggctggacggccgtacttgctggccgcgcgcagctggcacgggctcgaggacgacggtgcgcgccgcgtcctggacaacgccgcccagagcagcggcggccgtgggacggtcgtggactggtgcgaccagccggaggtcctggcgcacccggccgtcgggtgcttcgtctcgcactgcggctggaactcgacgttggaggccgtggcggccggcgtgccgctcgtcggcgtgcccagcctgtttgaccagccaacgaacacgtacttggtggtggaggagtggggggtcggcgtcagaggggagcgtgacggtgagggcgtgttagctgcgacggagctggcgagatgcgttgagctggtcatgggtcaaggtacaaaagcaacggcgataagggagagagtaaaggctttgagagagatggcgcagcaggcggcacgagcaggtgggccggcggagagaaaccttgaggactttgttaactctgtcggtgatagcttccgtcctgtcggaatttcagttgcggaaaaaactgatgaatctcgtacatgttcatcagaatgacttccgtacagatattatttttatctacattctacaaggagtacctg

SEQ ID NO: 22050 - protein, 522 aa, Zea mays subsp. mays
  misc_feature (1)..(522): Ceres Seq. ID no. 12407367
MAGEEHQQHSSHYGHHFLVVAYGMQGHVNPARALAHRLAKLSDVVGGCPILATLSLHVAAHRRMFPAQLDPDAAGEEDEEEASDGVISYVPHSDSFDDGSLPRTPEDWARRRRASRESLSAMLARFAGGGRPVTCVVCTLLVPAAVDAATRHGVPFAVYWIQPATVLAAAYHYFHGYGETVAAADPAHEVSLPGLRRPLRVRDFPSYLVDTTGSPLARSVVGMFRELFESVDRWRPKVLVNTFDELEAGVLSEMKRHLDVFAVGPMVAGAGGGSGSSGASNDEGRIHLYRHDDADRKRYMEWLGAQPESSVVYVSFGSIATHTLQQMEEVVQGLLQAGRPYLLAARSWHGLEDDGARRVLDNAAQSSGGRGTVVDWCDQPEVLAHPAVGCFVSHCGWNSTLEAVAAGVPLVGVPSLFDQPTNTYLVVEEWGVGVRGERDGEGVLAATELARCVELVMGQGTKATAIRERVKALREMAQQAARAGGPAERNLEDFVNSVGDSFRPVGISVAEKTDESRTCSSE

SEQ ID NO: 22051 - protein, 499 aa, Zea mays subsp. mays
  misc_feature (1)..(499): Ceres Seq. ID no. 12407368
MQGHVNPARALAHRLAKLSDVVGGCPILATLSLHVAAHRRMFPAQLDPDAAGEEDEEEASDGVISYVPHSDSFDDGSLPRTPEDWARRRRASRESLSAMLARFAGGGRPVTCVVCTLLVPAAVDAATRHGVPFAVYWIQPATVLAAAYHYFHGYGETVAAADPAHEVSLPGLRRPLRVRDFPSYLVDTTGSPLARSVVGMFRELFESVDRWRPKVLVNTFDELEAGVLSEMKRHLDVFAVGPMVAGAGGGSGSSGASNDEGRIHLYRHDDADRKRYMEWLGAQPESSVVYVSFGSIATHTLQQMEEVVQGLLQAGRPYLLAARSWHGLEDDGARRVLDNAAQSSGGRGTVVDWCDQPEVLAHPAVGCFVSHCGWNSTLEAVAAGVPLVGVPSLFDQPTNTYLVVEEWGVGVRGERDGEGVLAATELARCVELVMGQGTKATAIRERVKALREMAQQAARAGGPAERNLEDFVNSVGDSFRPVGISVAEKTDESRTCSSE

SEQ ID NO: 22052 - protein, 459 aa, Zea mays subsp. mays
  misc_feature (1)..(459): Ceres Seq. ID no. 12407369
MFPAQLDPDAAGEEDEEEASDGVISYVPHSDSFDDGSLPRTPEDWARRRRASRESLSAMLARFAGGGRPVTCVVCTLLVPAAVDAATRHGVPFAVYWIQPATVLAAAYHYFHGYGETVAAADPAHEVSLPGLRRPLRVRDFPSYLVDTTGSPLARSVVGMFRELFESVDRWRPKVLVNTFDELEAGVLSEMKRHLDVFAVGPMVAGAGGGSGSSGASNDEGRIHLYRHDDADRKRYMEWLGAQPESSVVYVSFGSIATHTLQQMEEVVQGLLQAGRPYLLAARSWHGLEDDGARRVLDNAAQSSGGRGTVVDWCDQPEVLAHPAVGCFVSHCGWNSTLEAVAAGVPLVGVPSLFDQPTNTYLVVEEWGVGVRGERDGEGVLAATELARCVELVMGQGTKATAIRERVKALREMAQQAARAGGPAERNLEDFVNSVGDSFRPVGISVAEKTDESRTCSSE

SEQ ID NO: 22053 - DNA, 1804 bp, Zea mays subsp. mays
  misc_feature (1)..(1804): Ceres Seq. ID no. 12407383
atcccaccagttccccaattccatttctccatccatgacagctcgccatttccccacctgttcctacgctaccgccacctaaaaaaattccaggcactatccatttcaatcttgctcaaaggtcatttcattccggccggtgccttttttaggccgattggagggaaggctggtctgtgttttgttttcctgctgcctcttgggcgagttgaatttgggcgcctcttgctccaggcagtattttatcgagctagagtctggtacccggcgattcttgcttggtccaggcgccaaggcgaggaattgggcctagctccagctcaaatctgtgccttgttgcagacagaaggatttctgcatgggcgaccataactaagatgtgagattgggtggcgtcagctcggctggtgggtgattcttggtgcgtacacagacacatccctggaggcttgagctgatttggcgaggaggacagtgcaggagagagatgtctttcaggagcctgattcaggacatgaaggacgagttcgggagcatctcgcggcacagcctgcggtcccggtctcaccgctccgccgggaacgcggcgcgggcggcggcggcgggaccgtcggaggcgatggatcagagctgctggtcgcagctgccccccgagctcctgcgggaggtgctggtgaggatcgaggcatcggagagctggtggccagcgcgcaaggacgtggtgtcaggcgccggcgtctgccggacctggaggggcatcatgaaggaggccgtgcgcgtcccggaggtgtcagggaagctcacgttccccatctcacttaagcagcctggcccaagggatggcactcttaaatgtttcatcaggaggaatcgaactactcagacatattatctgtatattggattgacagaagcattggctgatgatgggaagtttctacttgctgcacgcaagtgtcgtaagcccacctgcacagactacctaatttctcttgataaggttgatatgtcaaagggaagcagcacctatattggcaagctaagatcaaacttccttggaacaaagttcactgtctatgatgctcatccaccatatgatggagctgcggtctcaaagagtcgctctgcacgtgtggttggtttgaagcaggtctcccctagagttccggctggaaattatcccgtttcacatatttcttacgagctgaatgttctgggctccagaggtccaagaaggatgaactgtgttatggattccatccctgcatcagctgttaaggaaggagggaaaactcctacacagactgaatttccacttagcagccttgactctttcccatcatttccattcttcagatctaaatcagctcggatagacagttcaacgtcgcaatcatccagtcagagggaagataggttggtgctgaagaacaagtctcctaggtggcacgaacaactgcagtgttggtgcctgaatttccgtgggcgggtcactgttgcctcggttaaaaacttccagttggtggcttctgaggacaatggaccagagagccaagagagtgacaaggtgattctccaattcggaaagatcggaaaagacttgttcaccatggactacggttatccaatatcggcatttcaagcttttgcaatttgtctgagcagttttgatacaaaaattgcctgcgaatgaggcaaggtgatttttttcccttctctattccccttgcttgtattatggacatgcagtaaaattttattaaacatgcaatttccaatgtcaaggatgattggatgaagctct

SEQ ID NO: 22054 - protein, 401 aa, Zea mays subsp. mays
  misc_feature (1)..(401): Ceres Seq. ID no. 12407384
MSFRSLIQDMKDEFGSISRHSLRSRSHRSAGNAARAAAAGPSEAMDQSCWSQLPPELLREVLVRIEASESWWPARKDVVSGAGVCRTWRGIMKEAVRVPEVSGKLTFPISLKQPGPRDGTLKCFIRRNRTTQTYYLYIGLTEALADDGKFLLAARKCRKPTCTDYLISLDKVDMSKGSSTYIGKLRSNFLGTKFTVYDAHPPYDGAAVSKSRSARVVGLKQVSPRVPAGNYPVSHISYELNVLGSRGPRRMNCVMDSIPASAVKEGGKTPTQTEFPLSSLDSFPSFPFFRSKSARIDSSTSQSSSQREDRLVLKNKSPRWHEQLQCWCLNFRGRVTVASVKNFQLVASEDNGPESQESDKVILQFGKIGKDLFTMDYGYPISAFQAFAICLSSFDTKIACE

SEQ ID NO: 22055 - protein, 392 aa, Zea mays subsp. mays
  misc_feature (1)..(392): Ceres Seq. ID no. 12407385
MKDEFGSISRHSLRSRSHRSAGNAARAAAAGPSEAMDQSCWSQLPPELLREVLVRIEASESWWPARKDVVSGAGVCRTWRGIMKEAVRVPEVSGKLTFPISLKQPGPRDGTLKCFIRRNRTTQTYYLYIGLTEALADDGKFLLAARKCRKPTCTDYLISLDKVDMSKGSSTYIGKLRSNFLGTKFTVYDAHPPYDGAAVSKSRSARVVGLKQVSPRVPAGNYPVSHISYELNVLGSRGPRRMNCVMDSIPASAVKEGGKTPTQTEFPLSSLDSFPSFPFFRSKSARIDSSTSQSSSQREDRLVLKNKSPRWHEQLQCWCLNFRGRVTVASVKNFQLVASEDNGPESQESDKVILQFGKIGKDLFTMDYGYPISAFQAFAICLSSFDTKIACE

SEQ ID NO: 22056 - protein, 357 aa, Zea mays subsp. mays
  misc_feature (1)..(357): Ceres Seq. ID no. 12407386
MDQSCWSQLPPELLREVLVRIEASESWWPARKDVVSGAGVCRTWRGIMKEAVRVPEVSGKLTFPISLKQPGPRDGTLKCFIRRNRTTQTYYLYIGLTEALADDGKFLLAARKCRKPTCTDYLISLDKVDMSKGSSTYIGKLRSNFLGTKFTVYDAHPPYDGAAVSKSRSARVVGLKQVSPRVPAGNYPVSHISYELNVLGSRGPRRMNCVMDSIPASAVKEGGKTPTQTEFPLSSLDSFPSFPFFRSKSARIDSSTSQSSSQREDRLVLKNKSPRWHEQLQCWCLNFRGRVTVASVKNFQLVASEDNGPESQESDKVILQFGKIGKDLFTMDYGYPISAFQAFAICLSSFDTKIACE

SEQ ID NO: 22057 - DNA, 1486 bp, Zea mays subsp. mays
  misc_feature (1)..(1486): Ceres Seq. ID no. 12407390
ccttttcttctcttctctctctctctctctctctctgatttcttctcttaactctcgcgtctcgcgtccttttcccttcctcccctccgttgcgtccgtcgtctgcgttgcgtccctccgtccgtccgtccgttggcccgtccgtcgtcaccagcctcctccctcgcgcccaccgccgggatccggccctcctcgtctgcgcccgcctcggtctagatttctgagaaaatggcgagaagtgcgggaactaggaggcgtgtggctcgccagctcaagtccacacatcccattccttcataccgatggaagtcaaagcccatgaaaaagccgatgaaaaaatccaaccgaaagcaagtgttgccaaccttgcaaaagatggactgggaagatgccaattgctctgtgtgcatggaatacccacataatgctgtgctcatcctttgttcatcccatgataagggttgtcgtccttatatgtgtggaactagctaccgccactctaattgcttggatcagttcaagaaagcttacaccaagggggcattgcttgaggaagttcctgcaaatagtgttggctctaatctggattcggcgccattgactgcagaaaaaactgactccattgaccttgcatgtcccttgtgtcgtggcaaggtgaaagggtggacggtggtggaaccagctcgaagctacctcaatggaaaacgaagaacatgcatgcaggatggttgctcatttgtggggacctacaaggagctccgcaagcatgtcaagttggaacaccctcttgcaaagccaagggaagttgatcctgtccttgagcaaaaatggagattgctcgagattgaaagagagcggcaagatgcgctcagtacgatcactgcaacaatgggcagagccgtcgtttttggtgattatgtgctagacttggaggatggaatggactcggaggatgttgacagtgatgctgataatgatggccgtgggacagaaaacactcgtaggatgctactatttattatgcgccaagttgctcaacatcaccaaaaccaaaggctccagaatgcgactggtgcatctgacaatgctgaggacaattatgtggtgagcagtggtgccaatggaaccacaccatactcttaccccttggagggggaggacgagaatggtatggttgtggccggaggcagaagcactgatgtgctgagaccagagaggaggcgccgtcgccgccgcaggaaccgtgggagattgtttttaggtgctaattgagaggacaggtgaccaggtagggtttagccgccagaggagtacatacagaaatgcttccctggtgcctggcattcatcaattcctgtctcaatttacttgatcatgatcatgtaccaagtagttatcttaacatcagctcattgtcataaatttatggtatctcacattcttcgttgaaaaaggaaaacaccgcatccatctcttgcggtttgtg

SEQ ID NO: 22058 - protein, 347 aa, Zea mays subsp. mays
  misc_feature (1)..(347): Ceres Seq. ID no. 12407391
MARSAGTRRRVARQLKSTHPIPSYRWKSKPMKKPMKKSNRKQVLPTLQKMDWEDANCSVCMEYPHNAVLILCSSHDKGCRPYMCGTSYRHSNCLDQFKKAYTKGALLEEVPANSVGSNLDSAPLTAEKTDSIDLACPLCRGKVKGWTVVEPARSYLNGKRRTCMQDGCSFVGTYKELRKHVKLEHPLAKPREVDPVLEQKWRLLEIERERQDALSTITATMGRAVVFGDYVLDLEDGMDSEDVDSDADNDGRGTENTRRMLLFIMRQVAQHHQNQRLQNATGASDNAEDNYVVSSGANGTTPYSYPLEGEDENGMVVAGGRSTDVLRPERRRRRRRRNRGRLFLGAN

SEQ ID NO: 22059 - protein, 317 aa, Zea mays subsp. mays
  misc_feature (1)..(317): Ceres Seq. ID no. 12407392
MKKPMKKSNRKQVLPTLQKMDWEDANCSVCMEYPHNAVLILCSSHDKGCRPYMCGTSYRHSNCLDQFKKAYTKGALLEEVPANSVGSNLDSAPLTAEKTDSIDLACPLCRGKVKGWTVVEPARSYLNGKRRTCMQDGCSFVGTYKELRKHVKLEHPLAKPREVDPVLEQKWRLLEIERERQDALSTITATMGRAVVFGDYVLDLEDGMDSEDVDSDADNDGRGTENTRRMLLFIMRQVAQHHQNQRLQNATGASDNAEDNYVVSSGANGTTPYSYPLEGEDENGMVVAGGRSTDVLRPERRRRRRRRNRGRLFLGAN

SEQ ID NO: 22060 - protein, 313 aa, Zea mays subsp. mays
  misc_feature (1)..(313): Ceres Seq. ID no. 12407393
MKKSNRKQVLPTLQKMDWEDANCSVCMEYPHNAVLILCSSHDKGCRPYMCGTSYRHSNCLDQFKKAYTKGALLEEVPANSVGSNLDSAPLTAEKTDSIDLACPLCRGKVKGWTVVEPARSYLNGKRRTCMQDGCSFVGTYKELRKHVKLEHPLAKPREVDPVLEQKWRLLEIERERQDALSTITATMGRAVVFGDYVLDLEDGMDSEDVDSDADNDGRGTENTRRMLLFIMRQVAQHHQNQRLQNATGASDNAEDNYVVSSGANGTTPYSYPLEGEDENGMVVAGGRSTDVLRPERRRRRRRRNRGRLFLGAN

SEQ ID NO: 22061 - DNA, 1027 bp, Zea mays subsp. mays
  misc_feature (1)..(1027): Ceres Seq. ID no. 12407402
aatgcaggccttctccggcctcggcaccttcttcaagctctccgccgcgtccgccgtcatgctgtgcctcgagacatggtactaccagatcatcgtgctcatcgccggcctgctcaagaacccggagatctcgctcgactccctctccatatgcatgaccgtgaacgcatgggtgtttatgatctccgtgggcttcaacgccgcggcgagcgtgcgggtcgggaacgagctcggcgcgggcaacccgagggcggcgtcgttctcggtgctggtggtgacgtcgctgtcgttcgccgtgtcggcggtgtgcgccgtcgccgtgctctgcctccgcgaccagctgagctacctgttcacgggcggcgaggccgtggctcgcgccgtgtccgacctctgcccgctcctcgccctcacgctcgtcctcaacggcgtgcagccagtgctctcaggcgtcgccgtgggctgcgggtggcaggccttcgtggcgtacgtgaacgtcggctgctactacgtcgtcggcgtgccgctcggcgtcttcctcggcttctacctcgacctcggcgccaagggcatttggagcggcatggtcatcgggggaaccatgatgcagacgctcatcctgctctgggtcaccttcagaacagactggaccaaggaggtggagaacgccagggcgaggctggacaagtgggacgacaagaagcagcccctcctagcctagaagaagactgattgaaggtcactgtagcgcgcgctgatgcacctttttttggcgatgattgagagaccacaccaggcgcgcgtcggaggggatgcaacgcaacgcaacgcaatcatttgggttttgaagctatttaatattatcgcattatagagtgtgcgcgtgcagtttcgagtgattaaagttttgttacgctttcttcggtgtcagctccaacttagggcgactagatgcgaccatcacaccagggtttggaccgtggtgggtggattctattcgtttttttttaagcacaaatatgtctag

SEQ ID NO: 22062 - protein, 243 aa, Zea mays subsp. mays
  misc_feature (1)..(243): Ceres Seq. ID no. 12407403
NAGLLRPRHLLQALRRVRRHAVPRDMVLPDHRAHRRPAQEPGDLARLPLHMHDRERMGVYDLRGLQRRGERAGRERARRGQPEGGVVLGAGGDVAVVRRVGGVRRRRALPPRPAELPVHGRRGRGSRRVRPLPAPRPHARPQRRAASALRRRRGLRVAGLRGVRERRLLLRRRRAARRLPRLLPRPRRQGHLERHGHRGNHDADAHPALGHLQNRLDQGGGERQGEAGQVGRQEAAPPSLEED

SEQ ID NO: 22063 - protein, 239 aa, Zea mays subsp. mays
  misc_feature (1)..(239): Ceres Seq. ID no. 12407404
MQAFSGLGTFFKLSAASAVMLCLETWYYQIIVLIAGLLKNPEISLDSLSICMTVNAWVFMISVGFNAAASVRVGNELGAGNPRAASFSVLVVTSLSFAVSAVCAVAVLCLRDQLSYLFTGGEAVARAVSDLCPLLALTLVLNGVQPVLSGVAVGCGWQAFVAYVNVGCYYVVGVPLGVFLGFYLDLGAKGIWSGMVIGGTMMQTLILLWVTFRTDWTKEVENARARLDKWDDKKQPLLA

SEQ ID NO: 22064 - protein, 220 aa, Zea mays subsp. mays
  misc_feature (1)..(220): Ceres Seq. ID no. 12407405
MLCLETWYYQIIVLIAGLLKNPEISLDSLSICMTVNAWVFMISVGFNAAASVRVGNELGAGNPRAASFSVLVVTSLSFAVSAVCAVAVLCLRDQLSYLFTGGEAVARAVSDLCPLLALTLVLNGVQPVLSGVAVGCGWQAFVAYVNVGCYYVVGVPLGVFLGFYLDLGAKGIWSGMVIGGTMMQTLILLWVTFRTDWTKEVENARARLDKWDDKKQPLLA

SEQ ID NO: 22065 - DNA, 1417 bp, Zea mays subsp. mays
  misc_feature (1)..(1417): Ceres Seq. ID no. 12407425
acaacacttcccgcaacagaagcatacgccgtgcccatctatctatagctagcactagcagtggtgcacactgaaatggacagcgccagcagcctcgtggacgacaccagcagcggtggcggcggcggcggcggcgcgtccacggacaagctaagggctttggccgtcttcgccgccgcctcggggacgccgctggagcgcatgggcagcggcgccagcgcggtcgtggacgcggccgagccgggcgccgaggcggactccggctccggtgccgccgcggtgagcgttggcgggaagctgccgtcgtccaggtacaagggcgtggtgccgcagcccaacgggcggtggggcgcgcagatctacgagcgccaccagcgcgtgtggctcggcaccttcgcgggcgaggccgacgcggcgcgcgcctacgacgtcgcggcgcagcggttccgcggccgcgacgcggtcaccaacttccgcccgctcgcggacgccgacccggacgcggccgccgagctccggttcctggcgtcccgctccaaggccgaggtcgtcgacatgctccgcaagcacacatacttcgacgagctcgcgcagaacaagcgcgccttcgccgccgcgtccgcggccaccgcctcgtcgctggccaacaacccttcttcctacgcgtcgctctcccccgcgaccgcgacggccgccgccgccgccgcgcgggagcacctcttcgacaagacggtcacccccagcgacgtgggcaagctgaaccggctggtgatcccgaagcagcacgccgagaagcacttcccgctgcagctcccgtccgccggcggcgagagcaagggcgtgctcctcaacctggaggacgccgcgggcaaggtgtggcggttccgctactcgtactggaacagcagccagagctacgtgctcaccaagggctggagccgcttcgtcaaggagaagggcctccaagccggcgacgtcgtcggcttctaccgctccgctgcaggcgccgacaccaagctcttcatcgactgcaagctgcggcccaacagcgtcgtcgccgcctcgacggcaggcccgtcgcctcgggcgccggtggcgaaggccgtgcgtctcttcggcgtcgacctgctgacggcaccggccaccgccgccgcggcgccggcggaggccgtggctgtggccgggtgcaagagagccagggacttgggttcgcccccgcaggcggcgttcaagaagcagctcgtggagctggcactagtgtagattaatgctacggagcgatcgatctttccctagctagctagtcttttttattttttttgctcgatcgctcaactcagatggtagcatcaccgagctgaatttagttccctctcggcatctcacttagttggttcgtttgttaatttccagtttc

SEQ ID NO: 22066 - protein, 395 aa, Zea mays subsp. mays
  misc_feature (1)..(395): Ceres Seq. ID no. 12407426
MDSASSLVDDTSSGGGGGGGASTDKLRALAVFAAASGTPLERMGSGASAVVDAAEPGAEADSGSGAAAVSVGGKLPSSRYKGVVPQPNGRWGAQIYERHQRVWLGTFAGEADAARAYDVAAQRFRGRDAVTNFRPLADADPDAAAELRFLASRSKAEVVDMLRKHTYFDELAQNKRAFAAASAATASSLANNPSSYASLSPATATAAAAAAREHLFDKTVTPSDVGKLNRLVIPKQHAEKHFPLQLPSAGGESKGVLLNLEDAAGKVWRFRYSYWNSSQSYVLTKGWSRFVKEKGLQAGDVVGFYRSAAGADTKLFIDCKLRPNSVVAASTAGPSPRAPVAKAVRLFGVDLLTAPATAAAAPAEAVAVAGCKRARDLGSPPQAAFKKQLVELALV

SEQ ID NO: 22067 - protein, 353 aa, Zea mays subsp. mays
  misc_feature (1)..(353): Ceres Seq. ID no. 12407427
MGSGASAVVDAAEPGAEADSGSGAAAVSVGGKLPSSRYKGVVPQPNGRWGAQIYERHQRVWLGTFAGEADAARAYDVAAQRFRGRDAVTNFRPLADADPDAAAELRFLASRSKAEVVDMLRKHTYFDELAQNKRAFAAASAATASSLANNPSSYASLSPATATAAAAAAREHLFDKTVTPSDVGKLNRLVIPKQHAEKHFPLQLPSAGGESKGVLLNLEDAAGKVWRFRYSYWNSSQSYVLTKGWSRFVKEKGLQAGDVVGFYRSAAGADTKLFIDCKLRPNSVVAASTAGPSPRAPVAKAVRLFGVDLLTAPATAAAAPAEAVAVAGCKRARDLGSPPQAAFKKQLVELALV

SEQ ID NO: 22068 - protein, 235 aa, Zea mays subsp. mays
  misc_feature (1)..(235): Ceres Seq. ID no. 12407428
MLRKHTYFDELAQNKRAFAAASAATASSLANNPSSYASLSPATATAAAAAAREHLFDKTVTPSDVGKLNRLVIPKQHAEKHFPLQLPSAGGESKGVLLNLEDAAGKVWRFRYSYWNSSQSYVLTKGWSRFVKEKGLQAGDVVGFYRSAAGADTKLFIDCKLRPNSVVAASTAGPSPRAPVAKAVRLFGVDLLTAPATAAAAPAEAVAVAGCKRARDLGSPPQAAFKKQLVELALV

SEQ ID NO: 22069 - DNA, 1075 bp, Zea mays subsp. mays
  misc_feature (1)..(1075): Ceres Seq. ID no. 12407455
ctcccgcagccgccacctcaacccaggaacagagcgaggcgacgccgcggcacctcttctccggtaagtgagatcgcatatctcgtcgcatgcggcgaagaatttttaggtccggtagcttgttctctgctttattcgtggtgaagtttgggcggttcgaagttgatgaattgcttgtacgattcgactgggggtttgtcgtgcttattaggcacgattcgtcgttggttaggtggctgtagcatccctgcttctgttttgcactttctatgcgtatttttgcactctatatgtgttaaggttgacttaaatctgattattcgctcggttagatttggtatcctcatagtgtgtaggtctatctgtcttagaaatactaagtcaaatgttccgcattagcttgcaacccaaagtcttccgcagatagtaatgatatacggaatatcacatttggcagttgatattgattatttaggcgaagggaaatggcaaccgttccaggggatctgatctggcaggttgtgaggaagaacaactccttccttgtgaagcagttcggcaacggcaatgccaaggtgcagttcaccaaggagccgaacaacctctacaacatccactccttcaaacactcgggtttggcgaacaagaagactgtgacgatccagccagctgcaaaggactcggctgtggtcctctctactaccaagaccaagaagcagaacgcacctgcgaagctcagccacaagtctgtgatgcgcaaggagttccgcaagatggccaaggctgtgaaaaaccaggttagtgacaactactacaggcctgatctgaccaagccagctcttgctaggctaagctcggtgtaccgcagcctccaggttgccaagtccggtgtcaagaagaagaacaggcagtcctaagcgctaagtttgtgttctgtcagggggcatgttggtgctcgtagtcccagcttatatttatctatgttccaacagttttgagacttgttagaactgagcaaaccatgttaagatgctgctgtgtgtcattccttaaaaaaattgccttgcactttgtg

SEQ ID NO: 22070 - protein, 143 aa, Zea mays subsp. mays
  misc_feature (1)..(143): Ceres Seq. ID no. 12407456
MATVPGDLIWQVVRKNNSFLVKQFGNGNAKVQFTKEPNNLYNIHSFKHSGLANKKTVTIQPAAKDSAVVLSTTKTKKQNAPAKLSHKSVMRKEFRKMAKAVKNQVSDNYYRPDLTKPALARLSSVYRSLQVAKSGVKKKNRQS

SEQ ID NO: 22071 - protein, 77 aa, Zea mays subsp. mays
  misc_feature (1)..(77): Ceres Seq. ID no. 12407457
MNCLYDSTGGLSCLLGTIRRWLGGCSIPASVLHFLCVFLHSICVKVDLNLIIRSVRFGILIVCRSICLRNTKSNVPH

SEQ ID NO: 22072 - DNA, 1598 bp, Zea mays subsp. mays
  misc_feature (1)..(1598): Ceres Seq. ID no. 12407458
gcacgagaccattacctagaacatcctaatcaaaaattcttctttctccgtcctttccatcccaggtcgccaccgcgtctccgcccttccctcctccccaccatcttcagcacgaggcagcacgcgcggacgtccctcccgacacggagaaccccgctccgcgcgctcgcattcatcgcgccgccacccaggtcccagccggccgcgcgcccgcgcccccccgccgccggccgtgccatgccgcggcggggcgagacggcggtggtccccattgacgtggcgtccgccggcggcgggcgaggcgatgagcggcccaagagagagcgccaccggagccacggccccggccgccacggtccgcaccggagtcgcccgccgcccccgcccccgccggcgttccggccgttccggcggtggttcccgttccttgtgccgctattcatcgtcgctaacatcgtcctcttcgtgctcaccatgtacgtcaacgactgccccgcgcacgcgcgggccaccggcgccgcgataggcggatcggtcggcgagagcgccaccgcgcagggctgctggctcgcgcccgagctcgggaggttcgcgttccagtcgttcaaggagaacccgctcatcggcccttcctccgccacgctgttggaaatgggggcactggaaaccagtaaagttaccaaagatcacgaagggtggcgcctcattacatgcatttggttgcatgctggagtcgtccacatactcgccaacatgttgagcctcttaatgatcggaatcaggctcgagaaggaatttggtttcataaggattggtacactgtatgtgatctctggtgttggtggcagcttgctgtcttctctatttatggtgtcaaatatatcagtcggtgcttcaggtgcattatttggactattgggctcaatgctgtcagagctcataacgaattggacgatatatgagaacaagtttgcagcactcttgactctagttatgatcattctcatcaacttagctgttgggatccttccacatgttgacaacttcgctcaccttggaggatttatgtcagggttctgtcttggttttgtgctgctaatgcgaccacagtttggatatattaaccaaaagaactctcctcttggatttcccatgggcgtaactaaacggaagttcaagacatatcaagtcatacttttggttatttctacaatgatactagtttctgggttcaccattggattggtgttgctatttcaagggttcaatgctagtgagcactgttcttggtgccattatatgagctgtgtgcctacttcaaagtggagttgcaacgcaccaaataactactgcatgtcttcacagctcggaaaccaactaaatctgacatgtgaaagcactggaaagaccgcatcatatgttctcagcgatccaaacaactcggaggcgattaaaaatctttgtgtcggtctttgcagttaatagtaatgtctgcattttctaacaggaaattaatgctagcatatctatggattatatgactagaagcctatgcttacattatgattctctggtaatgctattgcggcttctatggc

SEQ ID NO: 22073 - protein, 493 aa, Zea mays subsp. mays
  misc_feature (1)..(493): Ceres Seq. ID no. 12407459
ARDHYLEHPNQKFFFLRPFHPRSPPRLRPSLLPTIFSTRQHARTSLPTRRTPLRALAFIAPPPRSQPAARPRPPAAGRAMPRRGETAVVPIDVASAGGGRGDERPKRERHRSHGPGRHGPHRSRPPPPPPPAFRPFRRWFPFLVPLFIVANIVLFVLTMYVNDCPAHARATGAAIGGSVGESATAQGCWLAPELGRFAFQSFKENPLIGPSSATLLEMGALETSKVTKDHEGWRLITCIWLHAGVVHILANMLSLLMIGIRLEKEFGFIRIGTLYVISGVGGSLLSSLFMVSNISVGASGALFGLLGSMLSELITNWTIYENKFAALLTLVMIILINLAVGILPHVDNFAHLGGFMSGFCLGFVLLMRPQFGYINQKNSPLGFPMGVTKRKFKTYQVILLVISTMILVSGFTIGLVLLFQGFNASEHCSWCHYMSCVPTSKWSCNAPNNYCMSSQLGNQLNLTCESTGKTASYVLSDPNNSEAIKNLCVGLCS

SEQ ID NO: 22074 - protein, 414 aa, Zea mays subsp. mays
  misc_feature (1)..(414): Ceres Seq. ID no. 12407460
MPRRGETAVVPIDVASAGGGRGDERPKRERHRSHGPGRHGPHRSRPPPPPPPAFRPFRRWFPFLVPLFIVANIVLFVLTMYVNDCPAHARATGAAIGGSVGESATAQGCWLAPELGRFAFQSFKENPLIGPSSATLLEMGALETSKVTKDHEGWRLITCIWLHAGVVHILANMLSLLMIGIRLEKEFGFIRIGTLYVISGVGGSLLSSLFMVSNISVGASGALFGLLGSMLSELITNWTIYENKFAALLTLVMIILINLAVGILPHVDNFAHLGGFMSGFCLGFVLLMRPQFGYINQKNSPLGFPMGVTKRKFKTYQVILLVISTMILVSGFTIGLVLLFQGFNASEHCSWCHYMSCVPTSKWSCNAPNNYCMSSQLGNQLNLTCESTGKTASYVLSDPNNSEAIKNLCVGLCS

SEQ ID NO: 22075 - protein, 335 aa, Zea mays subsp. mays
  misc_feature (1)..(335): Ceres Seq. ID no. 12407461
MYVNDCPAHARATGAAIGGSVGESATAQGCWLAPELGRFAFQSFKENPLIGPSSATLLEMGALETSKVTKDHEGWRLITCIWLHAGVVHILANMLSLLMIGIRLEKEFGFIRIGTLYVISGVGGSLLSSLFMVSNISVGASGALFGLLGSMLSELITNWTIYENKFAALLTLVMIILINLAVGILPHVDNFAHLGGFMSGFCLGFVLLMRPQFGYINQKNSPLGFPMGVTKRKFKTYQVILLVISTMILVSGFTIGLVLLFQGFNASEHCSWCHYMSCVPTSKWSCNAPNNYCMSSQLGNQLNLTCESTGKTASYVLSDPNNSEAIKNLCVGLCS

SEQ ID NO: 22076 - DNA, 1644 bp, Zea mays subsp. mays
  misc_feature (1)..(1644): Ceres Seq. ID no. 12407466
actcttcaccaccgccattcccccccccactcttcaccaccgcagcgccgccgcgtacaaggcgattaggcgaagctgcaccggaaggagaaggagagaagcgagagtctccccagccagagcaagccgaatccgaagctagcggagaggagagagggctgagtgaggatgccgacggttacctgcaacgcgtgcaacgcggggttcgacgacgaggagcagcagcggcttcactaccgctctgaatggcaccgttacaacctcaagcgcaaggtggctggagttcctggtgtcacagaggctctgtttctggctaggcaagctgctttggcggaggggagcaagcctgctagcaccccaatgctttacagctgtgctctttgtggaaaggagtacagaagctcgaaagctcacgagcagcatcttaactcgcgatcacatcttttgaaagcctctcaggagcccaatgcctctattgctggtatcacgatagtcaagccacttcctgaacgagtctcacgaagagctccatctgcagtagaggaggatcaagacgacgatgaggaagaagagtgggttgaagttgacccaagtgagatggagttggctgatgagtctacttcaaacatgcaagaagatgagcactcctcaaaatcagatgatgacatggatgaccttgaagagttggatatctcgtcgtgtttcatgtgtgacctcaagcatgacaccatagaagactgcatggtccatatgcataagaagcatgggtttttcatacctgacagtgaatacttgaaggatcccagtggtcttcttacttatgttggactgaaggtgaagcgtgattttatctgcctctactgcaatgacagatgccagtccttcttcagtctagaggctgtcaggaagcacatggatgcaaaggggcattgcaagttgcggtatggagatggtggagatgatgaagatgctgacctcgaggaattctatgattacagcagcagttatgttgattcagaaggcaagcagttgattgctgttgatgacttgaacaacaacattgagctgggaatcggtgggtctgagctagtaataacaaacaagagcgagaaaggcactcgggtcagaacccttggctctagggaatttatgcgctactatcgccagaaaccacggccttctgttgcaccagaccgtgcgcttgcactttcactagcttccagctacaagagcatgggtttggtgacagtgcagtctaaggagcagatggtgaggctgaaagttctccgtgctatgaacaggaccggggtcgagactatgcggaacaagatcggaatgaagagcaatgtgatccggaacctccctaagaattgcccgcactagacaacactgccttctcctgcaccctatctggagcttctcctggcatttatatggtgtcttatggtttcttgtctgtcgctgacaacgttggcgcttaagatatttggaataggactacaccttccatagtttttgttgaactctgtggtgcggaagcagctgttgccattatggcggaaattgctgacgcctcattgaacatgtttagtttttattttgttaaaaaattgggcaaaaaagtttgatgctcatattcatcgc

SEQ ID NO: 22077 - protein, 404 aa, Zea mays subsp. mays
  misc_feature (1)..(404): Ceres Seq. ID no. 12407467
MPTVTCNACNAGFDDEEQQRLHYRSEWHRYNLKRKVAGVPGVTEALFLARQAALAEGSKPASTPMLYSCALCGKEYRSSKAHEQHLNSRSHLLKASQEPNASIAGITIVKPLPERVSRRAPSAVEEDQDDDEEEEWVEVDPSEMELADESTSNMQEDEHSSKSDDDMDDLEELDISSCFMCDLKHDTIEDCMVHMHKKHGFFIPDSEYLKDPSGLLTYVGLKVKRDFICLYCNDRCQSFFSLEAVRKHMDAKGHCKLRYGDGGDDEDADLEEFYDYSSSYVDSEGKQLIAVDDLNNNIELGIGGSELVITNKSEKGTRVRTLGSREFMRYYRQKPRPSVAPDRALALSLASSYKSMGLVTVQSKEQMVRLKVLRAMNRTGVETMRNKIGMKSNVIRNLPKNCPH

SEQ ID NO: 22078 - protein, 340 aa, Zea mays subsp. mays
  misc_feature (1)..(340): Ceres Seq. ID no. 12407468
MLYSCALCGKEYRSSKAHEQHLNSRSHLLKASQEPNASIAGITIVKPLPERVSRRAPSAVEEDQDDDEEEEWVEVDPSEMELADESTSNMQEDEHSSKSDDDMDDLEELDISSCFMCDLKHDTIEDCMVHMHKKHGFFIPDSEYLKDPSGLLTYVGLKVKRDFICLYCNDRCQSFFSLEAVRKHMDAKGHCKLRYGDGGDDEDADLEEFYDYSSSYVDSEGKQLIAVDDLNNNIELGIGGSELVITNKSEKGTRVRTLGSREFMRYYRQKPRPSVAPDRALALSLASSYKSMGLVTVQSKEQMVRLKVLRAMNRTGVETMRNKIGMKSNVIRNLPKNCPH

SEQ ID NO: 22079 - protein, 261 aa, Zea mays subsp. mays
  misc_feature (1)..(261): Ceres Seq. ID no. 12407469
MELADESTSNMQEDEHSSKSDDDMDDLEELDISSCFMCDLKHDTIEDCMVHMHKKHGFFIPDSEYLKDPSGLLTYVGLKVKRDFICLYCNDRCQSFFSLEAVRKHMDAKGHCKLRYGDGGDDEDADLEEFYDYSSSYVDSEGKQLIAVDDLNNNIELGIGGSELVITNKSEKGTRVRTLGSREFMRYYRQKPRPSVAPDRALALSLASSYKSMGLVTVQSKEQMVRLKVLRAMNRTGVETMRNKIGMKSNVIRNLPKNCPH

SEQ ID NO: 22080 - DNA, 1499 bp, Zea mays subsp. mays
  misc_feature (1)..(1499): Ceres Seq. ID no. 12407470
aaatccgcggcacggacggagagacggctgcaccgccccacacccacccttttccgcgcccgcgaagaaaacgaaggcagtggaacccgaagcggaggggccagaaagcgacccgaccgtctctccgctccctccctcccccacaccacccacctgtgatctcccgcgcgggagatccgcccgccccatggcgccgtcgcgcccgctcatgcgggggatccgcccgccgcgcgtcttcccgacccgcggcggccgcgcctcgccgtacgctgtcgccctcacggccctgctcctcgtctccgccgccctcctcgcgctcatcgccttcggcgtcttctcgctccccgtgtcagcgccgaacgccgccgccaccaccacagccggaggggagaccgaatccgccgacacccgccccgcgcgcccccgcgcccgccgggacctgggggaggggctgggagagcgcggcgcgcagtggaccgaggtcatctcgtgggagccaagggcattcgtctaccacaacttcctgtctaaggaagagtgtgaatacctaattggattggccaagcctcacatggtaaaatcaacagttgtcgacagcactactggtaaaagcaaggacagcagggtccggacaagttcgggcatgtttcttcaaagaggaagggacaaggttattcgagtaattgaaaagaggattgcagactataccttcatacctgtagatcatggagagggactccaagtactgcattatgaagtcgggcagaagtatgagcctcactttgattattttcttgatgagtttaacaccaagaatggtggtcagaggatggctactcttctgatgtatctatcagatgttgaagaagggggcgagactattttccctgatgcaaatgtgaacgtcagttctttaccatggtacaatgagctttcagagtgtgccaagagaggcctttctgtcaaaccaaagatgggagatgcacttcttttctggagcatgaaaccagatgccaccctggacccattaagtttgcatgggggttgtcctgtgattagaggaaataaatggtcgtcaaccaagtggatgcatatccacgagtacaaagcttgagccttcaagactcgagagtcgagcgtaccaaagatggatctctatgcatgtgacttggggctgtctactgggttgacacccatgtatgctttacagacccactgaagctgtattctttgctcctttgttggaggggggagaattgcagataataggggccaataagcaggggccttgctcatccctgcagtatttttgggtctgatccttgctgacttggcttttgtcttttcttttctttttcttaccttgccgtaccccagctatagaggaatggtgtagtgtctgggggcatagagtttgagattttgttttgtgccacacctgtgttactagtataagctttggtactaatgaataacgaggcctaagctcacatctactg

SEQ ID NO: 22081 - protein, 370 aa, Zea mays subsp. mays
  misc_feature (1)..(370): Ceres Seq. ID no. 12407471
NPRHGRRDGCTAPHPPFSAPAKKTKAVEPEAEGPESDPTVSPLPPSPTPPTCDLPRGRSARPMAPSRPLMRGIRPPRVFPTRGGRASPYAVALTALLLVSAALLALIAFGVFSLPVSAPNAAATTTAGGETESADTRPARPRARRDLGEGLGERGAQWTEVISWEPRAFVYHNFLSKEECEYLIGLAKPHMVKSTVVDSTTGKSKDSRVRTSSGMFLQRGRDKVIRVIEKRIADYTFIPVDHGEGLQVLHYEVGQKYEPHFDYFLDEFNTKNGGQRMATLLMYLSDVEEGGETIFPDANVNVSSLPWYNELSECAKRGLSVKPKMGDALLFWSMKPDATLDPLSLHGGCPVIRGNKWSSTKWMHIHEYKA

SEQ ID NO: 22082 - protein, 308 aa, Zea mays subsp. mays; identical to SEQ ID NO: 16716
  misc_feature (1)..(308): Ceres Seq. ID no. 12407472

SEQ ID NO: 22083 - protein, 301 aa, Zea mays subsp. mays; identical to SEQ ID NO: 16717
  misc_feature (1)..(301): Ceres Seq. ID no. 12407473

SEQ ID NO: 22084 - DNA, 1253 bp, Zea mays subsp. mays
  misc_feature (1)..(1253): Ceres Seq. ID no. 12407485
ctctgctcagctcgaacgaacaaaaagaactcccctcggccctctcctcttgtgcttctgcttccccaccgagtctcctcaaccccaggcactcgccctctgtcggtctgtcccctcccttcctcgcctccgatgccgccgccgccgccgcttctcgagccgcgcgactacctcggcgccggcgccacctcgtcgtgctgctcgtcgtcctgctcctccggccgcgagggcgcggggccccacctcgcgctgcggctcgggcttccggggtccgacgactcccccggccgcaggcgcggacgcggagcacgccggcgcccacgtcgacgccgcgctcaccctcggccccgcccccgcccccgcgcctcccaggggcagcgccaagcgcgggttcgccgactccctcgaccggtccgcgaagcgggacggcgttgccgcggatgacgctgctgggggcgtcacgcgggtagctggagctgctgccggagctccgcccgctgccaaggcacaagttgttggatggccgcctgttaggagctaccggaagaataccctagctgccagtgccacaaagacaaatgggggagatgaaggtaggagtgaggcgggatgctgttatgtcaaggtcagcatggatggagccccatacctaaggaaggtggacctcaagacctattcaagctatgaggatctctcgcttggtctggagaaaatgttcagttgcttcatcactggtcaaaacagttcatgcaagacatcaagaagggataggcttactgatggttctagggctgatgcccttcaggaccaagaatatgtccttacttacgaagataaagatgctgactggatgctcgttggtgatctgccctgggacttgttcaccacattttgccggaaacttaggatcatgagaggctctgatgctgctggcatggctcctccaagaccaccggaacagacagttcggaacaaatgagggcgggcagcttacttacctggcgctgaactgaagggagagcgacgctgccttggtcaggccttctttcacttgtgcagtgggatctgcgtcctgctgtctcggacgcccattttgcccacgagctggtcgtcacgtgctgtcgctttttgtctgggaaagatagcgtactgcttgctgtatgatactttcatctgtgttcggaagtttgtagcgcttcatatcctggaagggagtaaagaaaatgtccatgtgtccggtgagaatttctttc

SEQ ID NO: 22085 - protein, 325 aa, Zea mays subsp. mays
  misc_feature (1)..(325): Ceres Seq. ID no. 12407486
SAQLERTKRTPLGPLLLCFCFPTESPQPQALALCRSVPSLPRLRCRRRRRFSSRATTSAPAPPRRAARRPAPPAARARGPTSRCGSGFRGPTTPPAAGADAEHAGAHVDAALTLGPAPAPAPPRGSAKRGFADSLDRSAKRDGVAADDAAGGVTRVAGAAAGAPPAAKAQVVGWPPVRSYRKNTLAASATKTNGGDEGRSEAGCCYVKVSMDGAPYLRKVDLKTYSSYEDLSLGLEKMFSCFITGQNSSCKTSRRDRLTDGSRADALQDQEYVLTYEDKDADWMLVGDLPWDLFTTFCRKLRIMRGSDAAGMAPPRPPEQTVRNK

SEQ ID NO: 22086 - DNA, 1864 bp, Zea mays subsp. mays
  misc_feature (1)..(1864): Ceres Seq. ID no. 12407509
accaacccacacccgttccgtttctggcgcacagcacagtcacagtgctcggcatcttttccgctccgctctgacgctctcccactcccccacagtcccacgccctccagtcaaagcaagccgctgcttggccggccgggaaggctcggtcgcagcgccgaggaatggcggccaagccggtcaccgtcggcgacctcatccaccgcgtcgcctcttcctgcctctccaaccgcctgccgtgcaaccacaccttccgcgactccgtggacagcgactttgacgacgacgacgacgacgacgaccccttcgccgacgccgtctccagcagcgagaaatgccagcggtccccgcccgctgcggaggtcgaggaagaggaggaggaggacgagaagctcaagatctgggaggagagggagcaggagaaggagaggctggccgccgcgtccaagggcgccgagcgcgcccgcgacgcggacgcgctgatggcggaggtgttcgacgccgtctccggggtgcgccgcgcctacgccgcgctccaggacgcgcactgcccctgggaccccgacaagatgcggaccgcggacgcggccgtggtcgccgagctccgccacctcgcgcgcctccgcgaccgcttccgccgctccgcagccgtgggccacatcccgcgcccgaaaccgtccgcgccgccgctgcgcgaggccgtggcgccgtacgaggcggcgctcgacgacctccagcgccagctccagtccaggcaggccgaggtggacgcgctcaaagagaagctcgcggcggccaccagccgccgcaacgggcgccaccaccacgtcccgccctccaagcagaacggcggcgcgccgacggcggagctcttcaccacctgcgccgagcaagcccgcgcggcgacgcgggccttcgcggggcacctcgcgcacctgatgcgcgcggcggggctggagctcgcggcggccacccggtcgctcaccaagatcccggtgtcctccccgcagctggccaagcacgcgctggaggcgcacgccacgcgcgccctcctcggcggcttcgagcacgagtccttctacctggacggctccctctcgtcgctgctggaccccgccgcgttccggcgggagcggtacgcgcagttccgggacatgcgcgggatggagcccgcggagctgctgggcgtgctcccgacctgcgccttcggccgctacgccgccgccaagttcgcggcgctcctgccgccgcgcgtggaggaggccgtcctgggcgacgccgagcaccggagggtggtcaacgccggcgcccacccgcggacgcccttctacggggagttcctgcgcgcggccaaggccgtgtggatgctgcacctgctagccttcgcgctggagccgccgcccagccacttcgatgccggacgcggtgcggagttccaccaggagtacatggagagcgtgaccggcgcgccaccgcacggcggcgcgggcctggtcgtcgggttcgccgtcgcgcccgggttccggctggggaacggcgccgtcgtgcgcgcccgggtctacctggtgccgcgtggtggccgaccgtgacagacccatgcatggcgtgacagaccgcgtggtagcgttgcatagcgccgcggcccacggatcacctccgagagttgttggtgggtgccaatgcgcaccctgctggagcctggagctggacctgcggagtagctgctggctggctgcgttggtgaagaacagacaaaggctcatagctactgtactagtggctccgtagattttatttcattttacttctccttgttaatctcaaaaaaagtaataatcgccatgtgtaagaggactttgaattt

SEQ ID NO: 22087 - protein, 474 aa, Zea mays subsp. mays
  misc_feature (1)..(474): Ceres Seq. ID no. 12407510
MAAKPVTVGDLIHRVASSCLSNRLPCNHTFRDSVDSDFDDDDDDDDPFADAVSSSEKCQRSPPAAEVEEEEEEDEKLKIWEEREQEKERLAAASKGAERARDADALMAEVFDAVSGVRRAYAALQDAHCPWDPDKMRTADAAVVAELRHLARLRDRFRRSAAVGHIPRPKPSAPPLREAVAPYEAALDDLQRQLQSRQAEVDALKEKLAAATSRRNGRHHHVPPSKQNGGAPTAELFTTCAEQARAATRAFAGHLAHLMRAAGLELAAATRSLTKIPVSSPQLAKHALEAHATRALLGGFEHESFYLDGSLSSLLDPAAFRRERYAQFRDMRGMEPAELLGVLPTCAFGRYAAAKFAALLPPRVEEAVLGDAEHRRVVNAGAHPRTPFYGEFLRAAKAVWMLHLLAFALEPPPSHFDAGRGAEFHQEYMESVTGAPPHGGAGLVVGFAVAPGFRLGNGAVVRARVYLVPRGGRP

SEQ ID NO: 22088 - protein, 424 aa, Zea mays subsp. mays
  misc_feature (1)..(424): Ceres Seq. ID no. 12407511
MPAVPARCGGRGRGGGGREAQDLGGEGAGEGEAGRRVQGRRARPRRGRADGGGVRRRLRGAPRLRRAPGRALPLGPRQDADRGRGRGRRAPPPRAPPRPLPPLRSRGPHPAPETVRAAAARGRGAVRGGARRPPAPAPVQAGRGGRAQREARGGHQPPQRAPPPRPALQAERRRADGGALHHLRRASPRGDAGLRGAPRAPDARGGAGARGGHPVAHQDPGVLPAAGQARAGGARHARPPRRLRARVLLPGRLPLVAAGPRRVPAGAVRAVPGHARDGARGAAGRAPDLRLRPLRRRQVRGAPAAARGGGRPGRRRAPEGGQRRRPPADALLRGVPARGQGRVDAAPASLRAGAAAQPLRCRTRCGVPPGVHGERDRRATARRRGPGRRVRRRARVPAGERRRRARPGLPGAAWWPTVTDPCMA

SEQ ID NO: 22089 - protein, 368 aa, Zea mays subsp. mays
  misc_feature (1)..(368): Ceres Seq. ID no. 12407512
MAEVFDAVSGVRRAYAALQDAHCPWDPDKMRTADAAVVAELRHLARLRDRFRRSAAVGHIPRPKPSAPPLREAVAPYEAALDDLQRQLQSRQAEVDALKEKLAAATSRRNGRHHHVPPSKQNGGAPTAELFTTCAEQARAATRAFAGHLAHLMRAAGLELAAATRSLTKIPVSSPQLAKHALEAHATRALLGGFEHESFYLDGSLSSLLDPAAFRRERYAQFRDMRGMEPAELLGVLPTCAFGRYAAAKFAALLPPRVEEAVLGDAEHRRVVNAGAHPRTPFYGEFLRAAKAVWMLHLLAFALEPPPSHFDAGRGAEFHQEYMESVTGAPPHGGAGLVVGFAVAPGFRLGNGAVVRARVYLVPRGGRP

SEQ ID NO: 22090 - DNA, 1421 bp, Zea mays subsp. mays
  misc_feature (1)..(1421): Ceres Seq. ID no. 12407513
acaaaccataaaccaagaagctgctgcgggacgttcaaatcaaacatctctaccctctccttccagcgaaatggcaagagcggcggctcctccgcctctgcaccggctgcccggtctggccttgctgtgccttgccgtggcagtttgcttctccggcggcgaaaacgccgcggcggcggcctggacgaggaagatagtcggcgttcacgagctcagggtgggggatttctccgtcaaggtcaccaactggggggcgactctcatgtccgtcatcctccccgactccaaagggaacttgggcgacgttgtgctcggctacgacaccgtcgctgaatacgtcaacggcaccgcctacttcggcggtctgatcggccgcgtggccaacagggtcgccggcgcgcggttcacgctggacgggaaagcctaccgcctctaccgcaacgacggcaacaactcgctccacggtggccaccgggggttcagcaaggtcgtatggacggtgaaggagcacgtcggcggcggtgactccccgtacatcacgctctactaccatagcttcgacggggagcaagggttccccggcgacctggacgtgtacgtgacgtaccgtctgtcgcgcccgtacgtgctgagcgtgcgcatgaacgccacggcgcggagcagggccaccccggtgaacctcgcgcaccacgcgtactggaacctcggcggccacggcagcgggcccgtcctcggcgaaacggtgcagctcttcgcgtcgcggtacacgccggtggacgccgcgctcgtgccgacgggcgcgctggcgcccgtggccggcacgccctacgacttccgcgcgccggcgcccgtgggggcgcgcctgggcggacctgcggccgcgccgtggcactggcggcgtcgcgggctacgacaccaactacgccgtggacggcgccgcgtcgccgtcgctgcggccggtggcgcgcgtntgggacggcgccacggggcgggccatggagctgtgggcggaccagcccggggtgcagttctacaccagcaacgggctcgctggcgtcaggggcaagggcggtagcgtgtaccggcggtacgccgcgctgtgcctcgagacgcaggggttccccgatgccgtcaaccacccgagcttcccgtcgcagatcgtgaggccgggcaaggtgtatagccatgacatgctctttaagttctccttcgcctagctacaagactactggtgcatgcggttcatgcgtacacctgcgcagtgctgtgtcaccttgatgtgtcttgattagactcctccgtctactctcaagaactttacatccccaaataacagcgtgctgcccggtacgagctagggttttatatgtatgcgcgggcgcggcttatgctcgataatttccgtctcattggttggccgt

SEQ ID NO: 22091 - protein, 357 aa, Zea mays subsp. mays
  misc_feature (1)..(357): Ceres Seq. ID no. 12407514
  misc_feature (324)..(324): Xaa is any aa, unknown or other
QTINQEAAAGRSNQTSLPSPSSEMARAAAPPPLHRLPGLALLCLAVAVCFSGGENAAAAAWTRKIVGVHELRVGDFSVKVTNWGATLMSVILPDSKGNLGDVVLGYDTVAEYVNGTAYFGGLIGRVANRVAGARFTLDGKAYRLYRNDGNNSLHGGHRGFSKVVWTVKEHVGGGDSPYITLYYHSFDGEQGFPGDLDVYVTYRLSRPYVLSVRMNATARSRATPVNLAHHAYWNLGGHGSGPVLGETVQLFASRYTPVDAALVPTGALAPVAGTPYDFRAPAPVGARLGGPAAAPWHWRRRGLRHQLRRGRRRVAVAAAGGARXGRRHGAGHGAVGGPARGAVLHQQRARWRQGQGR

SEQ ID NO: 22092 - protein, 334 aa, Zea mays subsp. mays
  misc_feature (1)..(334): Ceres Seq. ID no. 12407515
  misc_feature (301)..(301): Xaa is any aa, unknown or other
MARAAAPPPLHRLPGLALLCLAVAVCFSGGENAAAAAWTRKIVGVHELRVGDFSVKVTNWGATLMSVILPDSKGNLGDVVLGYDTVAEYVNGTAYFGGLIGRVANRVAGARFTLDGKAYRLYRNDGNNSLHGGHRGFSKVVWTVKEHVGGGDSPYITLYYHSFDGEQGFPGDLDVYVTYRLSRPYVLSVRMNATARSRATPVNLAHHAYWNLGGHGSGPVLGETVQLFASRYTPVDAALVPTGALAPVAGTPYDFRAPAPVGARLGGPAAAPWHWRRRGLRHQLRRGRRRVAVAAAGGARXGRRHGAGHGAVGGPARGAVLHQQRARWRQGQGR

SEQ ID NO: 22093 - protein, 270 aa, Zea mays subsp. mays
  misc_feature (1)..(270): Ceres Seq. ID no. 12407516
  misc_feature (237)..(237): Xaa is any aa, unknown or other
MSVILPDSKGNLGDVVLGYDTVAEYVNGTAYFGGLIGRVANRVAGARFTLDGKAYRLYRNDGNNSLHGGHRGFSKVVWTVKEHVGGGDSPYITLYYHSFDGEQGFPGDLDVYVTYRLSRPYVLSVRMNATARSRATPVNLAHHAYWNLGGHGSGPVLGETVQLFASRYTPVDAALVPTGALAPVAGTPYDFRAPAPVGARLGGPAAAPWHWRRRGLRHQLRRGRRRVAVAAAGGARXGRRHGAGHGAVGGPARGAVLHQQRARWRQGQGR

SEQ ID NO: 22094 - DNA, 1226 bp, Zea mays subsp. mays
  misc_feature (1)..(1226): Ceres Seq. ID no. 12407532
ctctacccgccgccacattcatcagtagaaaccacctatcctgcctgctctacctacctccgctccccagccatgacggtgctggacgccgagtcgcggttccatgtcctggcggtggacgacagcatcatcgacaggaagctcatcgagatgctgctcaagagctcgtcttaccaagtgaccacggtggagtccgggaacaaggcgctggagctgctggggctgagggacaacggcgcggaggacgcgtcgccgccgtcatcctcctcctcatcttcgtcgtcgtcctcccctgaccatcaggagatcgacgtgagtctcatcatcactgactactgcatgcccggcatgacaggatacgatctgctcaagcgagtgaaggggtcctcatcgctcaaggacattccggtggtgatcatgtcgtctgagaacgtgcctgcccggatcagcaggtgcttgcaggatggcgcggaggagttcttcctgaagcccgtgaagccggccgacatgaagaagctcaagtcacacctgctgaagcggaagcagcccaagcagaagaacaagcctcaggcgcaggcggtggagtctcctgagcagcagctggacccgcatccgcagccggtgcacgagctggagctggaggaagccgcggcagatcgcaacggcgtgaacaagaggaaggcagcggccatggaggaggggctgaccgtggtggtgacggcgccggagagcaccaagccgaggaggctgtctacgagcagcctgactgtggagacctgatcaaccgtggctacggctacgcacattaatctagcagtggatgcaagccccagtcccagcctcgccgccaagaaacacaaagtcgtgcctgctgcttttggttctgggagctaacggagggaagtgacaaacaattaaattatatgtagcggctgctgcttcggcctgcaaattttgttgcgctaacggtcatggacatggacatggacaccatcccttgtgttcgttaatcgttcggaaggggaaaagaagaagaagctgtagatataaaaaaaaggacaggcggctaattgttaatttccgcatggcttaattctggcaacgacatgctggctcaatcaaaaacctgtgacggacagacggatggatcaactgatgatgatgttgttttggctcggttcttcttccttgtacactgagtattcagatgaacatgttgtaatctg

SEQ ID NO: 22095 - protein, 259 aa, Zea mays subsp. mays
  misc_feature (1)..(259): Ceres Seq. ID no. 12407533
LYPPPHSSVETTYPACSTYLRSPAMTVLDAESRFHVLAVDDSIIDRKLIEMLLKSSSYQVTTVESGNKALELLGLRDNGAEDASPPSSSSSSSSSSSPDHQEIDVSLIITDYCMPGMTGYDLLKRVKGSSSLKDIPVVIMSSENVPARISRCLQDGAEEFFLKPVKPADMKKLKSHLLKRKQPKQKNKPQAQAVESPEQQLDPHPQPVHELELEEAAADRNGVNKRKAAAMEEGLTVVVTAPESTKPRRLSTSSLTVET

SEQ ID NO: 22096 - protein, 235 aa, Zea mays subsp. mays
  misc_feature (1)..(235): Ceres Seq. ID no. 12407534
MTVLDAESRFHVLAVDDSIIDRKLIEMLLKSSSYQVTTVESGNKALELLGLRDNGAEDASPPSSSSSSSSSSSPDHQEIDVSLIITDYCMPGMTGYDLLKRVKGSSSLKDIPVVIMSSENVPARISRCLQDGAEEFFLKPVKPADMKKLKSHLLKRKQPKQKNKPQAQAVESPEQQLDPHPQPVHELELEEAAADRNGVNKRKAAAMEEGLTVVVTAPESTKPRRLSTSSLTVET

SEQ ID NO: 22097 - protein, 209 aa, Zea mays subsp. mays
  misc_feature (1)..(209): Ceres Seq. ID no. 12407535
MLLKSSSYQVTTVESGNKALELLGLRDNGAEDASPPSSSSSSSSSSSPDHQEIDVSLIITDYCMPGMTGYDLLKRVKGSSSLKDIPVVIMSSENVPARISRCLQDGAEEFFLKPVKPADMKKLKSHLLKRKQPKQKNKPQAQAVESPEQQLDPHPQPVHELELEEAAADRNGVNKRKAAAMEEGLTVVVTAPESTKPRRLSTSSLTVET

SEQ ID NO: 22098 - DNA, 1319 bp, Zea mays subsp. mays
  misc_feature (1)..(1319): Ceres Seq. ID no. 12407555
ctgtaactggagtacttagtacgggcagtctatagcttctccattgcccggtttgcaagcaaggaattgatgaacaagcatggggctggccggccgtctgggctttgcgggcagggcaaggacgccgccagctaccacgtgctgtccttcctcctcggcgccgctctccccactgccctcctcttctacctcgcgtccgacccggctcggcgagggcttatccagcatctcaccgagcagctgggggagcagccgaaccccgacgacccagcagctagccggcgccactgatcacactgctcctacttctcctacctcccaaggtcaagagtccgaatttgcagaactggctgagctgctacccagagtcgccaccgacgacgacaggacggtgatcctcacgtcagtgaacgaagcatttgcgaggcctgactcgttgctcggcctgttccgcgagagcttcccgggccggcgaggggaccgagcacctccttgaccatgtcctcgtcgtcgccgtggacgccatggcgttcgtccactgcaaggccgtgcacccacactgctaccgcctcgaggtggattccgccacgtacctcagctccgagagcagcttcttgagcgcggcctacgtggagctcgtctgggccaagctctcgctgcagcagcgcgtcctcgagctcggctacaacttcctcttcacggacgtggacgtcgtgtggttgcgcaacccgttccggcacatcagcgtgtacccggacatgacgacgtcgagcgacatattccacggcgacgccaacagcctcgacaactggcccaacaccggcttctactacgtcaaggcaacgaaccggacggtggagatgctgcggcggtggcgggctgcgcggaggaggttccctccgaaccacgagcaggccatcttcaaccagatcaagcacgagctcgccgccgacctcggggtgcgcatccagttcctcgacacggcgcgttcgccggcttctgccggatcttccacagtgacatgggcgcgcgtgcaccatgcacgccaactgctgcttcgggctcgctaacaagctgcacgacctcagggaagtgctcggccagtggaggaactacaccgtccttccgccgctggagaagaagagccgaaagttcatctggaaggatcccggcaagtgcggaacgccggacaaaaagaattggtcgataaatacatgagatcacgcatccctagaagcgactagggcactgggctgcctgatataattctcgtttttcaaccacaaattggtgaaacaaataaaatggtatatgttgtt

SEQ ID NO: 22099 - protein, 181 aa, Zea mays subsp. mays
  misc_feature (1)..(181): Ceres Seq. ID no. 12407556
MAFVHCKAVHPHCYRLEVDSATYLSSESSFLSAAYVELVWAKLSLQQRVLELGYNFLFTDVDVVWLRNPFRHISVYPDMTTSSDIFHGDANSLDNWPNTGFYYVKATNRTVEMLRRWRAARRRFPPNHEQAIFNQIKHELAADLGVRIQFLDTARSPASAGSSTVTWARVHHARQLLLRAR

SEQ ID NO: 22100 - protein, 138 aa, Zea mays subsp. mays
  misc_feature (1)..(138): Ceres Seq. ID no. 12407557
MGLAGRLGFAGRARTPPATTCCPSSSAPLSPLPSSSTSRPTRLGEGLSSISPSSWGSSRTPTTQQLAGATDHTAPTSPTSQGQESEFAELAELLPRVATDDDRTVILTSVNEAFARPDSLLGLFRESFPGRRGDRAPP

SEQ ID NO: 22101 - protein, 103 aa, Zea mays subsp. mays
  misc_feature (1)..(103): Ceres Seq. ID no. 12407558
MTTSSDIFHGDANSLDNWPNTGFYYVKATNRTVEMLRRWRAARRRFPPNHEQAIFNQIKHELAADLGVRIQFLDTARSPASAGSSTVTWARVHHARQLLLRAR

SEQ ID NO: 22102 - DNA, 1368 bp, Zea mays subsp. mays
  misc_feature (1)..(1368): Ceres Seq. ID no. 12407575
attaacaaagctgcagcttcgaggcctcacctcccgagccgaaagcgattcatagcatcatctattcatccgcgcgtggtgcaatggaggaggctcccacgacgccgccgcggaaggcgaagccgctgatgtcgcgcctcatgcggctttccatcaaggtcgtggacagggtcaccgacgccacccgccgggcagacgggacgctgaatcgttttgcgctctcgctgctggacccgcgtgtcccggccatctcctccccttgccgtggcgtcgcctcccgggacgtcatcctcgacggcgccctccgcctccgcgcgcgcctattccacccggccacgacgtcaaaatccacggcccctctccccgtgatcgtctttttccacggcggcgggttcgcgtacctctccgcggcgtccccggcctacgacgccgcgtgccgccgcatcgcgcggtacgcctccgcggcagtgctctcggtcgactaccgccgcgctcccgagcaccggttcccgggcgccctacgatgacggtatcgcggcgctgcgcttcctcgacgatccaaagaaccaccccaccccgctcgacgtgtcccgcagcttcgtcgcgggcgacagcgctggcggcaacatcgcccaccacgtggcccgccgctacgcgtccgacgtcgcctcgttcaggaacatccgtgtcgccggcctgatcgccatccagcccttcttcggcggcgaggagcggacaccctccgagctccgcctagacggcgccgcgcccatcgtgtccatcgaccgcaccgactggatgtggcgcgcgttcctgccgcccggctgcgaccgtacccacgagggtgccaacttcgcatccccagcagccgccgccggcctcgactcccaggcgttccctcccgtcctgctcgtcatcggtggcttcgacccgctgcaggattggcagcgccggtacggcgagatgctgaagagcatgggcaaggatgtgcgagtggttgagtaccctgacgccatccacgccttctacgtcttccccgggttcgacaacgcgcgagatttcatgatacgcatcgccaagttcgtcgccgaaagcgccagcggcagaagtagcagctagcgagttgtcggagctggagatacagtctgcacactgtgcagtggtcaggtgtttggtgcaagtggcgtgtcgtgcgtcgcaatttgcagccttggctgtggcgttttggaggatgcggcggtatggttgcgtggttgagtgagagaagaagatgtgtctggttgttattgttaactttcgtaaaagtttggtctgataagtctgatgaatgatgtaattttaattaactaatcaagttggtgatttcgt

SEQ ID NO: 22103 - protein, 147 aa, Zea mays subsp. mays
  misc_feature (1)..(147): Ceres Seq. ID no. 12407576
MEEAPTTPPRKAKPLMSRLMRLSIKVVDRVTDATRRADGTLNRFALSLLDPRVPAISSPCRGVASRDVILDGALRLRARLFHPATTSKSTAPLPVIVFFHGGGFAYLSAASPAYDAACRRIARYASAAVLSVDYRRAPEHRFPGALR

SEQ ID NO: 22104 - protein, 132 aa, Zea mays subsp. mays
  misc_feature (1)..(132): Ceres Seq. ID no. 12407577
MSRLMRLSIKVVDRVTDATRRADGTLNRFALSLLDPRVPAISSPCRGVASRDVILDGALRLRARLFHPATTSKSTAPLPVIVFFHGGGFAYLSAASPAYDAACRRIARYASAAVLSVDYRRAPEHRFPGALR

SEQ ID NO: 22105 - protein, 128 aa, Zea mays subsp. mays
  misc_feature (1)..(128): Ceres Seq. ID no. 12407578
MRLSIKVVDRVTDATRRADGTLNRFALSLLDPRVPAISSPCRGVASRDVILDGALRLRARLFHPATTSKSTAPLPVIVFFHGGGFAYLSAASPAYDAACRRIARYASAAVLSVDYRRAPEHRFPGALR

SEQ ID NO: 22106 - DNA, 1199 bp, Zea mays subsp. mays
  misc_feature (1)..(1199): Ceres Seq. ID no. 12407579
gcaaatcgccccccaaaccaaccgggccggccgacacaagcagcatcccgtcggcggcgatggacctggtgtcgagcgacctcgcggcgctgggcgcggtggagctggtccgcgtctcggcgtcgatcccgcgcgcggctccgcgcaccttcgcgctgctcaccgcctgcctcgtcttcccgctctccttcgccgtgctcgcgcactccctcttcacccaccccatcctgctccgcatccggggcgccgcccactcggggttcgcgccgtggctcggcctcttcgcgtaccagttcatgtacctcatcgtcctcttcaccttctccctcctctccaccgccgccgccgtcttcaccgtcgcctccctctacgccgggaagcccgcgtccgtctcctcctcgctcagcgcgctgcgccccatcctgccccgcctcctccgcaccttcctctgggtctccctcctcatgctcgcctaccacctcgccttcgcgctcgccgtcctcctgctcgtcgtcctcgtcttcctcgggatccacgtctacatctccgcgctgtggcacctcgccagcgtcgtctccgtgctcgagccgctctgcgggctcgccgccatggccaagagcaggcagctgctccagggccgcaccggcaccgcagccacgcttgtcgtctcctacttcgcggtctgcggcgcgacctcgctgctgttccgtgccgctgtcgttaagggacgcaccgaggaggggagcttcggcctggccttgcctggccggctgcttgtcggcgccgtgctggtgtgcgttcttgtctctgtcaatctgctaggactgctcgtgcagagtgtcttctactacgcctgcaaggccttccacagccagcagattgaccgcactgcattgtatgagcaccttggaggctaccttggggagtacgtgccactcaagagcaatatccagatggagaacctttgagagttggagcataggacaagggtaatcttctcacctctcattgctacatactagcagttttctatggatctttctcaaaagatgactatggtttacttggagctatctggtcttgttgtttctagtatcctgtagtagtgtagtttagaatctgtacaagtgaaaatgcgcagtatggaaccaatctatggaatggaacgtagatgcatgaacaaggttgtctttcgtctc

SEQ ID NO: 22107 - protein, 321 aa, Zea mays subsp. mays
  misc_feature (1)..(321): Ceres Seq. ID no. 12407580
KSPPKPTGPADTSSIPSAAMDLVSSDLAALGAVELVRVSASIPRAAPRTFALLTACLVFPLSFAVLAHSLFTHPILLRIRGAAHSGFAPWLGLFAYQFMYLIVLFTFSLLSTAAAVFTVASLYAGKPASVSSSLSALRPILPRLLRTFLWVSLLMLAYHLAFALAVLLLVVLVFLGIHVYISALWHLASVVSVLEPLCGLAAMAKSRQLLQGRTGTAATLVVSYFAVCGATSLLFRAAVVKGRTEEGSFGLALPGRLLVGAVLVCVLVSVNLLGLLVQSVFYYACKAFHSQQIDRTALYEHLGGYLGEYVPLKSNIQMENL

SEQ ID NO: 22108 - protein, 302 aa, Zea mays subsp. mays
  misc_feature (1)..(302): Ceres Seq. ID no. 12407581
MDLVSSDLAALGAVELVRVSASIPRAAPRTFALLTACLVFPLSFAVLAHSLFTHPILLRIRGAAHSGFAPWLGLFAYQFMYLIVLFTFSLLSTAAAVFTVASLYAGKPASVSSSLSALRPILPRLLRTFLWVSLLMLAYHLAFALAVLLLVVLVFLGIHVYISALWHLASVVSVLEPLCGLAAMAKSRQLLQGRTGTAATLVVSYFAVCGATSLLFRAAVVKGRTEEGSFGLALPGRLLVGAVLVCVLVSVNLLGLLVQSVFYYACKAFHSQQIDRTALYEHLGGYLGEYVPLKSNIQMENL

SEQ ID NO: 22109 - protein, 273 aa, Zea mays subsp. mays
  misc_feature (1)..(273): Ceres Seq. ID no. 12407582
ANRPPNQPGRPTQAASRRRRWTWCRATSRRWARWSWSASRRRSRARLRAPSRCSPPASSSRSPSPCSRTPSSPTPSCSASGAPPTRGSRRGSASSRTSSCTSSSSSPSPSSPPPPPSSPSPPSTPGSPRPSPPRSARCAPSCPASSAPSSGSPSSCSPTTSPSRSPSSCSSSSSSSGSTSTSPRCGTSPASSPCSSRSAGSPPWPRAGSCSRAAPAPQPRLSSPTSRSAARPRCCSVPLSLRDAPRRGASAWPCLAGCLSAPCWCAFLSLSIC

SEQ ID NO: 22110 - DNA, 1431 bp, Zea mays subsp. mays
  misc_feature (1)..(1431): Ceres Seq. ID no. 12407603
acacttcgatcagtgtcgccaacaagtagctagacgatgagcagaggagctgagaagaagaattggccgccgtctcggtcttcttcctcctcctcttcttcaccgacgtcgtcgtgggtcgccagcaggtccatggcggggttctaccgctacccgtcctccactcgcacctccggcaaggacagaacccagccgccgccagcaccagctgcaccgacacaacaacaaggcgacaagagcagcagcaagaagaagaggaggagtatcagcatcggccggagcatcacgtgcgcgggctccatctgcagtaccaaggagagctcggtcatgagccgggaccgccgcggcgcctccagcaggtcgctcagggcaccctacgtcgacgtcgacgtcaacgacgcctctgccgccgccatctccgccacgtcgtccttcaactcggagaccaccgtggcgtcgacgaccaccgtcacgtcctcgtcctcgtcctcgtcctcgtcctcgtccgtcgggacctccttcaggggcgtgcacatcaggaagctctccggctgctacgagtgccactccgtcttcgaccccaggagcttcggcgccgccgccttcccctgcgcggactgcgacgaggtgttcgccaaggcagagtcgctacagctccacagggcaaccaggcatgcagttttggagctgggccccgaggacacgagcaggaacatcgtggagatcatcttccagtccagctggccggccgggaagcagcagcaggcgccggtctgcaagatcgagcgggtactcaaggtgcagagcagcgacaggaccctggagaggttcgagcagtacaaggagagcgtcagggagagggcgagcagcgaccggggcaggaagaacaaccctcggtgcgtcgccgacggcaacgagctcctcaggttccactgcaccaccttcacctgctccctcggcctcgccggcagcaccgcgctgtgccgggcgccgtgcaagctgtgcgccatcgtcagggacggtttcagggtcgacgacgacggcaagattgcgacgatgggcaccagcgggcgcgcccacgacatggcgcaggtgctgtcggagtcggacggtgacaagagagcaatgctcgtgtgcagggtcgtcgcggggagggtgaagaagaaggccagcgatgagaagaagccttcagaggactctggctttgactctgtcagccccagcacagaaggcgtctgctccgatttggatcaactctttgtcttcaatcagagagctatactgccctgctttgtagtcatatacagtggctattagggttgtagggacctaagttataacttattagctagttttgtttcctttcactgtcacctgctcctttaatccagttcttcttttttttatgggccagaagtgcaagttttggcg

SEQ ID NO: 22111 - protein, 426 aa, Zea mays subsp. mays
  misc_feature (1)..(426): Ceres Seq. ID no. 12407604
MSRGAEKKNWPPSRSSSSSSSSPTSSWVASRSMAGFYRYPSSTRTSGKDRTQPPPAPAAPTQQQGDKSSSKKKRRSISIGRSITCAGSICSTKESSVMSRDRRGASSRSLRAPYVDVDVNDASAAAISATSSFNSETTVASTTTVTSSSSSSSSSSSVGTSFRGVHIRKLSGCYECHSVFDPRSFGAAAFPCADCDEVFAKAESLQLHRATRHAVLELGPEDTSRNIVEIIFQSSWPAGKQQQAPVCKIERVLKVQSSDRTLERFEQYKESVRERASSDRGRKNNPRCVADGNELLRFHCTTFTCSLGLAGSTALCRAPCKLCAIVRDGFRVDDDGKIATMGTSGRAHDMAQVLSESDGDKRAMLVCRVVAGRVKKKASDEKKPSEDSGFDSVSPSTEGVCSDLDQLFVFNQRAILPCFVVIYSGY

SEQ ID NO: 22112 - protein, 394 aa, Zea mays subsp. mays
  misc_feature (1)..(394): Ceres Seq. ID no. 12407605
MAGFYRYPSSTRTSGKDRTQPPPAPAAPTQQQGDKSSSKKKRRSISIGRSITCAGSICSTKESSVMSRDRRGASSRSLRAPYVDVDVNDASAAAISATSSFNSETTVASTTTVTSSSSSSSSSSSVGTSFRGVHIRKLSGCYECHSVFDPRSFGAAAFPCADCDEVFAKAESLQLHRATRHAVLELGPEDTSRNIVEIIFQSSWPAGKQQQAPVCKIERVLKVQSSDRTLERFEQYKESVRERASSDRGRKNNPRCVADGNELLRFHCTTFTCSLGLAGSTALCRAPCKLCAIVRDGFRVDDDGKIATMGTSGRAHDMAQVLSESDGDKRAMLVCRVVAGRVKKKASDEKKPSEDSGFDSVSPSTEGVCSDLDQLFVFNQRAILPCFVVIYSGY

SEQ ID NO: 22113 - protein, 329 aa, Zea mays subsp. mays
  misc_feature (1)..(329): Ceres Seq. ID no. 12407606
MSRDRRGASSRSLRAPYVDVDVNDASAAAISATSSFNSETTVASTTTVTSSSSSSSSSSSVGTSFRGVHIRKLSGCYECHSVFDPRSFGAAAFPCADCDEVFAKAESLQLHRATRHAVLELGPEDTSRNIVEIIFQSSWPAGKQQQAPVCKIERVLKVQSSDRTLERFEQYKESVRERASSDRGRKNNPRCVADGNELLRFHCTTFTCSLGLAGSTALCRAPCKLCAIVRDGFRVDDDGKIATMGTSGRAHDMAQVLSESDGDKRAMLVCRVVAGRVKKKASDEKKPSEDSGFDSVSPSTEGVCSDLDQLFVFNQRAILPCFVVIYSGY

SEQ ID NO: 22114 - DNA, 1198 bp, Zea mays subsp. mays
  misc_feature (1)..(1198): Ceres Seq. ID no. 12407607
agatccatttcccactcgatcgccaataatggagtttccgcaccaccaccaccaccacggccatcgccgcgacgacgacgaagacgaccgcagaggcccgcctcccccggtctacggcggctacggccagccaccgccacccgacccgtacggccgcgcgcccgtcgaccccgatccgtacggtcgacctccgccccagtccgcgtacggtggggccggggacgcctacggccacagcgggccaaggctacgcgcccccgccggcctacggcgccgggggcgggtacggcaacgtcgtccacgtcgcgcacgaggtcggcgacgagaggccttactacggcggcggcggcggcggtcttggtggcgcctacggaggcggtggctccgagtacggccacgagggccgaccgcaccacggcggcggcggatcccagtacggccacgagacacgcccgcaccacggcggcgggggcggcgccccgcctgtgaggcagcagacgtacaggatctactgcaaggctggggaggaccagtacagcctcgcctcccgcgacggcaaggtctgcctcgtgcgcacggaccgtgatgacgacgcgcagcactggatcaaggacatgaagtacagcaccagggtgaaggatgaggaaggctaccctgccatcgtcctcgtcaacaaagccactggagaggctctcaagcattcccttggccagtcacaccctgttcttctgacccgccataatccagactccctggacgagtctgtcctgtggacagagagcagggacgttggggatgggttccgctgcattaggatggtcaacaacatctacctgaactttgatgctttacatggagacaaggaccatggtggtgtgcgcgacggggacggcccttgtgctgtgggagtggtgcgagggagacaaccagcgctggaagattgttccctggtgaacaaggaaatgtgtgaccgagcccgcaccaaggaggagctcctgccgttataagtgaagtgattggtactgaagtttctggaaataagaggctcttctgagatgcctgtttgtgtgagtatttgcgtttccattccgttttcatgataataaaacgcattgattattaatatatgtaatgtgatgctacactgagtggcagcgttggtatatatttgtaagaattaagaacccattgttgttgg

SEQ ID NO: 22115 - protein, 194 aa, Zea mays subsp. mays
  misc_feature (1)..(194): Ceres Seq. ID no. 12407608
DPFPTRSPIMEFPHHHHHHGHRRDDDEDDRRGPPPPVYGGYGQPPPPDPYGRAPVDPDPYGRPPPQSAYGGAGDAYGHSGPRLRAPAGLRRRGRVRQRRPRRARGRRREALLRRRRRRSWWRLRRRWLRVRPRGPTAPRRRRIPVRPRDTPAPRRRGRRPACEAADVQDLLQGWGGPVQPRLPRRQGLPRAHGP

SEQ ID NO: 22116 - protein, 185 aa, Zea mays subsp. mays
  misc_feature (1)..(185): Ceres Seq. ID no. 12407609
MEFPHHHHHHGHRRDDDEDDRRGPPPPVYGGYGQPPPPDPYGRAPVDPDPYGRPPPQSAYGGAGDAYGHSGPRLRAPAGLRRRGRVRQRRPRRARGRRREALLRRRRRRSWWRLRRRWLRVRPRGPTAPRRRRIPVRPRDTPAPRRRGRRPACEAADVQDLLQGWGGPVQPRLPRRQGLPRAHGP

SEQ ID NO: 22117 - protein, 162 aa, Zea mays subsp. mays
  misc_feature (1)..(162): Ceres Seq. ID no. 12407610
RSISHSIANNGVSAPPPPPRPSPRRRRRRPQRPASPGLRRLRPATATRPVRPRARRPRSVRSTSAPVRVRWGRGRLRPQRAKATRPRRPTAPGAGTATSSTSRTRSATRGLTTAAAAAVLVAPTEAVAPSTATRADRTTAAADPSTATRHARTTAAGAAPRL

SEQ ID NO: 22118 - protein, 130 aa, Zea mays subsp. mays
  misc_feature (1)..(130): Ceres Seq. ID no. 12407611
MKYSTRVKDEEGYPAIVLVNKATGEALKHSLGQSHPVLLTRHNPDSLDESVLWTESRDVGDGFRCIRMVNNIYLNFDALHGDKDHGGVRDGDGPCAVGVVRGRQPALEDCSLVNKEMCDRARTKEELLPL

SEQ ID NO: 22119 - DNA, 1235 bp, Zea mays subsp. mays
  misc_feature (1)..(1235): Ceres Seq. ID no. 12407635
gctcccaccccacctcaccatctccactccaaacaaggggaaggcgagcgacagacaaacccaccccatcgcccctcctctgtctcctctcttgcccacgcccgccccaatgtcgccgcccctcgagccccacgactacatcggcctctccgccgcggccgcggccgcgccgccgaccccgacctcctcctcctcttcctcctcctcgccggccccccgcctcacccttcgcctcggcctgccgggctccgagtcccccgaccgcgaccgggactgctgcgaggacttcgccgccacgctctccctcggcccgctgccggcggcagccgccgtctccgccaagcgcgccttcccggaccccgcccagcgccccggcgcttccaaggctagcgacgccaagcagcaggcttcccccgccgcgccgccggccgccaaagcgcaggtggttggatggccgcccgtgcgcaactaccggaagaataccctcgccgccgcgaccgcctccaggagcaaggcgccggcggaggaggccgcgtccggagctgggcccatgtacgtaaaggtgagcatggatggcgcgccctacctcaggaaggtggacatcaagatgtactccagctacgaggacctctccctggcgctcgagaagatgttcagctgcttcatcgctggtcaaagtggtctgcataaatcatcgagcaaagacaggctgaccaatggctcaaaggtggatgccctcaaagatcaggagtatgtccttacatatgaggataaggatgcagactggatgcttgtcggtgatcttccctgggattattttacctctatctgccggaagctcaaaatcatgaggggctctgatgctgttggaatagctccacgaaccgtcgagcagacaggtcagaacaaataagctttggcctttgcctgcatccaaggaagacatctgagctagctgggagactatgttgaaggctgaagcctgaaatagttgccgggaatcgtcaaaacccgtcaaatgtttagtgtagttttcacgtgtccttgagacatgtgcatttgtatgtctgtgacgtgatccgttagatcgtgcaatcgtaggttgctgttcttgtgccctttaaaggccagacagatcagggagctctctgcttccttagtgcacttgctttgcagcattccttgttattctactctgaaatcatacatcatgccacaagaaccgatggttcgcg

SEQ ID NO: 22120 - protein, 303 aa, Zea mays subsp. mays
  misc_feature (1)..(303): Ceres Seq. ID no. 12407636
LPPHLTISTPNKGKASDRQTHPIAPPLSPLLPTPAPMSPPLEPHDYIGLSAAAAAAPPTPTSSSSSSSSPAPRLTLRLGLPGSESPDRDRDCCEDFAATLSLGPLPAAAAVSAKRAFPDPAQRPGASKASDAKQQASPAAPPAAKAQVVGWPPVRNYRKNTLAAATASRSKAPAEEAASGAGPMYVKVSMDGAPYLRKVDIKMYSSYEDLSLALEKMFSCFIAGQSGLHKSSSKDRLTNGSKVDALKDQEYVLTYEDKDADWMLVGDLPWDYFTSICRKLKIMRGSDAVGIAPRTVEQTGQNK

SEQ ID NO: 22121 - protein, 267 aa, Zea mays subsp. mays
  misc_feature (1)..(267): Ceres Seq. ID no. 12407637
MSPPLEPHDYIGLSAAAAAAPPTPTSSSSSSSSPAPRLTLRLGLPGSESPDRDRDCCEDFAATLSLGPLPAAAAVSAKRAFPDPAQRPGASKASDAKQQASPAAPPAAKAQVVGWPPVRNYRKNTLAAATASRSKAPAEEAASGAGPMYVKVSMDGAPYLRKVDIKMYSSYEDLSLALEKMFSCFIAGQSGLHKSSSKDRLTNGSKVDALKDQEYVLTYEDKDADWMLVGDLPWDYFTSICRKLKIMRGSDAVGIAPRTVEQTGQNK

SEQ ID NO: 22122 - protein, 185 aa, Zea mays subsp. mays
  misc_feature (1)..(185): Ceres Seq. ID no. 12407638
SHPTSPSPLQTRGRRATDKPTPSPLLCLLSCPRPPQCRRPSSPTTTSASPPRPRPRRRPRPPPPLPPPRRPPASPFASACRAPSPPTATGTAARTSPPRSPSARCRRQPPSPPSAPSRTPPSAPALPRLATPSSRLPPPRRRPPKRRWLDGRPCATTGRIPSPPRPPPGARRRRRRPRPELGPCT

SEQ ID NO: 22123 - DNA, 1876 bp, Zea mays subsp. mays
  misc_feature (1)..(1876): Ceres Seq. ID no. 12407639
agcaaatcccgtgtgccgcactggccgagcccacattcgaaccaaagtccccccgggcccccccaaggaaaaccatgtgccgcgcccgccacgttcccacgcgccactaaatcagcagcgcccggccgcccggagctgccagtagcggcaacagcaaaacaagaagcagccagctaccggagcactagtaaacagtaagcagcagagagcatggcgagatcagggcgggaagcggagcccggagaggaggaacggaagctggtgctgggcaagtacgagctgggccgcctgctggggcagggcaccttcgccaaggtttactacgcgagggacctgagcgccggcgccggcacgggccacagctgcagcgtagccatcaaggtgatcgacaaggcgcggctgcggcgcacggaggggatggtggagcagctgcgccgggagatctccatcatgcggatggtgcggcaccccaacgtggtgggcatccgggaggtgctcgccagccgctcccgcgtcttcgtcgtcatggagtacgcgcgcggcggggagctcttcgccaaggtggcccggggccgcctcgacgaggaccacgcgcgccgctacttccagcagctggtcgccgccgtcggcttctgccaccgccgcggcgtcgcgcaccgggacctcaagcccgagaacctgctgctggacgaggcggggcggctcaaggtcaccgacttcgggctggccgcgctgcccgagcagctgcgccacgacggcctgctccacacgcagtgcggcacccccgcgtacgtcgcgcccgaggtgctcaggaagcgcggctacgacggcgcccgcgccgacctctggtcctgcggcgtcgtgctctacgtcctcctctgcggcttcctcccgttccagcacgacaactacgtcaagttgtaccagaagatcttcaaggccgactaccaggtgccgccctgggtctccggcgacgcgcgccgcctcatcgcgcgcctgctcgtcgtcgaccccgccaagcgcgcctccatcgccgagatcatgtgcacgccgtggttcaggaagggcttcgtgccgcccgtcctttcgcccccggtgacgcccaagaaacagcagctggacgaaggcgctgccctcttcgacaacgacgacgacgacaacagcaacagcaaccactctggcgccacctcccctcggtcgtgcaacgcgttccagctcatctcgtccatgtcctccgggttcgacctgtcggggctgttcgagagcgagcagaagaccgcgaccgtgttcacggcccgcgcgccggcggccaccgtggtggagaagctggagtccgtggcgcgcgccctaggattcgaggtcaccagggggaaaggctggaaggtgaggatggaggccaaggccgagggcacgaacggacggctcgcggccaccgccgaggtgctcgaggtggccgtggacgtgaccgtggtcgagttcgtgcacgacgccggggacgcgctggactttaacaagttctgcgccgtcgacgtccgcccggggctcacggagatcgtctgggcgtggcagggcgacagccccgccgccgccgtcggcaccgcgtgaacaagcgtccccgtctgtcacgtggaagttgtagcaactttgcgtaggagttaaacacggctgcactggcaccagctttttatagcatgtaaagtttcaagttctcgtcgttgcttcgagactgccatggtggctagttcgttgtgtgccatatgctgtacaggaaggaaagagtcgaatcgagccggggagttttcgatcgacttgccaatttttgtacgatcataacctgtattttctggagatgtgtgcatacaaaattttgcccgtg

SEQ ID NO: 22124 - protein, 464 aa, Zea mays subsp. mays
  misc_feature (1)..(464): Ceres Seq. ID no. 12407640
MARSGREAEPGEEERKLVLGKYELGRLLGQGTFAKVYYARDLSAGAGTGHSCSVAIKVIDKARLRRTEGMVEQLRREISIMRMVRHPNVVGIREVLASRSRVFVVMEYARGGELFAKVARGRLDEDHARRYFQQLVAAVGFCHRRGVAHRDLKPENLLLDEAGRLKVTDFGLAALPEQLRHDGLLHTQCGTPAYVAPEVLRKRGYDGARADLWSCGVVLYVLLCGFLPFQHDNYVKLYQKIFKADYQVPPWVSGDARRLIARLLVVDPAKRASIAEIMCTPWFRKGFVPPVLSPPVTPKKQQLDEGAALFDNDDDDNSNSNHSGATSPRSCNAFQLISSMSSGFDLSGLFESEQKTATVFTARAPAATVVEKLESVARALGFEVTRGKGWKVRMEAKAEGTNGRLAATAEVLEVAVDVTVVEFVHDAGDALDFNKFCAVDVRPGLTEIVWAWQGDSPAAAVGTA

SEQ ID NO: 22125 - protein, 395 aa, Zea mays subsp. mays
  misc_feature (1)..(395): Ceres Seq. ID no. 12407641
MVEQLRREISIMRMVRHPNVVGIREVLASRSRVFVVMEYARGGELFAKVARGRLDEDHARRYFQQLVAAVGFCHRRGVAHRDLKPENLLLDEAGRLKVTDFGLAALPEQLRHDGLLHTQCGTPAYVAPEVLRKRGYDGARADLWSCGVVLYVLLCGFLPFQHDNYVKLYQKIFKADYQVPPWVSGDARRLIARLLVVDPAKRASIAEIMCTPWFRKGFVPPVLSPPVTPKKQQLDEGAALFDNDDDDNSNSNHSGATSPRSCNAFQLISSMSSGFDLSGLFESEQKTATVFTARAPAATVVEKLESVARALGFEVTRGKGWKVRMEAKAEGTNGRLAATAEVLEVAVDVTVVEFVHDAGDALDFNKFCAVDVRPGLTEIVWAWQGDSPAAAVGTA

SEQ ID NO: 22126 - protein, 384 aa, Zea mays subsp. mays
  misc_feature (1)..(384): Ceres Seq. ID no. 12407642
MRMVRHPNVVGIREVLASRSRVFVVMEYARGGELFAKVARGRLDEDHARRYFQQLVAAVGFCHRRGVAHRDLKPENLLLDEAGRLKVTDFGLAALPEQLRHDGLLHTQCGTPAYVAPEVLRKRGYDGARADLWSCGVVLYVLLCGFLPFQHDNYVKLYQKIFKADYQVPPWVSGDARRLIARLLVVDPAKRASIAEIMCTPWFRKGFVPPVLSPPVTPKKQQLDEGAALFDNDDDDNSNSNHSGATSPRSCNAFQLISSMSSGFDLSGLFESEQKTATVFTARAPAATVVEKLESVARALGFEVTRGKGWKVRMEAKAEGTNGRLAATAEVLEVAVDVTVVEFVHDAGDALDFNKFCAVDVRPGLTEIVWAWQGDSPAAAVGTA

SEQ ID NO: 22127 - DNA, 1511 bp, Zea mays subsp. mays
  misc_feature (1)..(1511): Ceres Seq. ID no. 12407681
atcaaacggactcacagctcgcagcacctgcatgacattgagaaccagccagctaaccaaccaaccaaccggcggagccaaagccaagaaggaaggcaacgtgcccatccagtcaggatgtgcaactccaacgtcaagtccgcgggggtggcccagatcgacggccgcccggtgctgcagccggcgggcaaccgcgtggcggcgccggagccggacgcctcccgcccgctcaagaagtccctccagaagtcgctctccatgccggcctactacgacagcaatgccaccgcgggcgcccgtcctgcgccggccgagaacaccacccgtgcagcggctaattcgtctccgctgcctcccgcgaaggcggcgacgaaggcagcgggcgctttccccgcggagaagagcggcaggtccaaggcagccaggaggccaggcgccgtgccgccgccggtggtggcgttcgcggcgctggacgcgttggagccggcggggagcatcgccgcggcgcagcgggagcacgccgcgcaggcgcaggcgcagcgcaagctgcggatcgcgcactacggccgcaccgcgtccttctcccgggtggaggggcgagtagtcggcgccgcggccgccgcccccgagcgggccgtcaccgcctcccccgccgggcaggacgagaagcgctgcagcttcatcacgccctactcagaccccctgtatgtcgcgtaccacgacgaggagtggggagtgcccgtgcacgacgacgagttgctattcgagatgctcacactgtctggcgtgcaagtcggggccgactggacttccatcctcaagaaaagacacgtgtacagggaggcgttctccggcttcaacgtggatgcggtcgccaagtacaccgagaagcagatggcgtcgctgagcgccgactacgggctggatttgggcaccgtcagaggaaccgtcaacaacgcctgccggattatcgaggtgcggagggacttcggctcgctggacaggtacgtgtgggcgttcgtgaacaacaggccgctgtcgccgagctacaggtacagccggaagatcccggcgaagacgtccaagtcggagtgcatcagcaaggacatggtccggcgcaggttccgcttcgtcggccccaccgtcgtccactccttcatgcaggcggtcggcctcaccaacgaccacctcgtctcgtgcccgcgccaccgcgcctgctccgccgccgccgttaactgattctgctgaccaccgtccaccgatcaagagccagacgtaaggaagaaaagagaccttttatctaaggacacgtacaatacaaccgagaaaaaggagaaaggttagtagcctctagtagcactagatcgaagtagtagtatacgaaagggagagtgctggtttgcaagtgtgtgtgcatcatgtacgtatgatgatcgagtgtgcttgtgtagattagttacgcccccacccctaattattagtcaatgaatgagcttgcttgctgcgacttc

SEQ ID NO: 22128 - protein, 412 aa, Zea mays subsp. mays
  misc_feature (1)..(412): Ceres Seq. ID no. 12407682
IKRTHSSQHLHDIENQPANQPTNRRSQSQEGRQRAHPVRMCNSNVKSAGVAQIDGRPVLQPAGNRVAAPEPDASRPLKKSLQKSLSMPAYYDSNATAGARPAPAENTTRAAANSSPLPPAKAATKAAGAFPAEKSGRSKAARRPGAVPPPVVAFAALDALEPAGSIAAAQREHAAQAQAQRKLRIAHYGRTASFSRVEGRVVGAAAAAPERAVTASPAGQDEKRCSFITPYSDPLYVAYHDEEWGVPVHDDELLFEMLTLSGVQVGADWTSILKKRHVYREAFSGFNVDAVAKYTEKQMASLSADYGLDLGTVRGTVNNACRIIEVRRDFGSLDRYVWAFVNNRPLSPSYRYSRKIPAKTSKSECISKDMVRRRFRFVGPTVVHSFMQAVGLTNDHLVSCPRHRACSAAAVN

SEQ ID NO: 22129 - protein, 373 aa, Zea mays subsp. mays
  misc_feature (1)..(373): Ceres Seq. ID no. 12407683
MCNSNVKSAGVAQIDGRPVLQPAGNRVAAPEPDASRPLKKSLQKSLSMPAYYDSNATAGARPAPAENTTRAAANSSPLPPAKAATKAAGAFPAEKSGRSKAARRPGAVPPPVVAFAALDALEPAGSIAAAQREHAAQAQAQRKLRIAHYGRTASFSRVEGRVVGAAAAAPERAVTASPAGQDEKRCSFITPYSDPLYVAYHDEEWGVPVHDDELLFEMLTLSGVQVGADWTSILKKRHVYREAFSGFNVDAVAKYTEKQMASLSADYGLDLGTVRGTVNNACRIIEVRRDFGSLDRYVWAFVNNRPLSPSYRYSRKIPAKTSKSECISKDMVRRRFRFVGPTVVHSFMQAVGLTNDHLVSCPRHRACSAAAVN

SEQ ID NO: 22130 - protein, 326 aa, Zea mays subsp. mays
  misc_feature (1)..(326): Ceres Seq. ID no. 12407684
MPAYYDSNATAGARPAPAENTTRAAANSSPLPPAKAATKAAGAFPAEKSGRSKAARRPGAVPPPVVAFAALDALEPAGSIAAAQREHAAQAQAQRKLRIAHYGRTASFSRVEGRVVGAAAAAPERAVTASPAGQDEKRCSFITPYSDPLYVAYHDEEWGVPVHDDELLFEMLTLSGVQVGADWTSILKKRHVYREAFSGFNVDAVAKYTEKQMASLSADYGLDLGTVRGTVNNACRIIEVRRDFGSLDRYVWAFVNNRPLSPSYRYSRKIPAKTSKSECISKDMVRRRFRFVGPTVVHSFMQAVGLTNDHLVSCPRHRACSAAAVN

SEQ ID NO: 22131 - DNA, 1864 bp, Zea mays subsp. mays
  misc_feature (1)..(1864): Ceres Seq. ID no. 12407713
atcgtcattgcttgctccatgtggagtcactttattactgcattacactagctagctagctagccacagccagcttcatcttcacgtcgattcgatccatcggtgctgtgtgtaccgtacgccagcttgctgatccatcgccggccgacgatggaggtgagcacgtgggtgatgctggtggcggccgccgccgcggtacatggcgtggttctggcggctgtcgcgggggctcagcgggccgcgggtgtggccggtgctcggcagcctgccggggctggtgcagcacgccgaggacatgcacgagtggatcgtgggcaacctgcgccgcacgggaggcacctaccagacctgcatcttcgcggtgcccggggtggctcgccgcgggcgggctggtcacggtcacgtgcgaccctcgcaacctggagcacgtcctcaaggcgcgcttcgacaactaccccaagggccccttctggcacgccgtcttccgggacctgctcggcgacggcatcttcaactccgacggcgacacgtgggtggcgcagcgcaagacggccgcgctcgagttcaccacgcgcacgctacgcacggccatgtcccgctgggtgtcgcgctccatccacctcaggctgctgcccatcctggacgaggcggccaccgagaagacgcacgtcgacctccaggacctcctcctccgcctcaccttcgacaacatctgcggcctcgcgttcggcaaggaccccgagacgctcgcgccgggcctgccggagaacgcattcgccacggcgttcgaccgcgccacggaggcgacgctcaaccggttcatattccccgagtgcctgtggcggtgcaagaagtggctgggcctcggcatggagagcacgctggccccgcagcgtcgcgcacgtggaccagtacctcgccgccgtcatcaaggcgcgcaagcttgagctcgccggcaacggcaagtgcgacgcgccggcgcacgacgacctgctgtctcggttcatgcgcaagggctcctattcggacgagtcgctgcagcacgtggcgctcaacttcatcctcgccggccgcgacacctcctccgtggcgctctcctggttcttctggctcgtgtccacgcacccggacgtggagcgccagatcgtactcgagctgtgcgccgcgctcgccgcgtcccgcggctcccacgacccggcattgtggctggcgtcgccactcacgttcgaggagctggaccgcctggtctacctcaaggcggcgctctcggagaccctgcgcctgtacccgtccgttcccgaggactccaagcacgtcgtggccgacgactacctccccgacggcacgttcgtccccggcggggtcgtcggtgacctactccatctactcggccgggcgcatgaagacggtgtggggggaggactgcctcgagttccgccccgagcggtggttgtccgccgacggcacccggttcgagccgcacgactcgtaccggttcgtggcgttcaacgccgggccgaggatctgcctcggtaaggacctcgcgtacctgcagatgaagaacatcgccggcagcgtgctcctgcgccaccgcctggccgtcgcgcggggccaccgcgtggagcagaagatgtcgctgacgctgttcatgaagcacgggctccggatggaggtgcacccgcgcgacctggccccggtcatcgatgagctccgtggcgcgggcgcggcaaggccggccatggcgccatgctgcgcgtagaagatcccccctccgtgctgcgggggagacgctgggaattcaatgtgtagataagcgtacaagtacaagacaggagtaaagtaaaaattaaatgggtttggtgag

SEQ ID NO: 22132 - protein, 519 aa, Zea mays subsp. mays
  misc_feature (1)..(519): Ceres Seq. ID no. 12407714
MAWFWRLSRGLSGPRVWPVLGSLPGLVQHAEDMHEWIVGNLRRTGGTYQTCIFAVPGVARRGRAGHGHVRPSQPGARPQGALRQLPQGPLLARRLPGPARRRHLQLRRRHVGGAAQDGRARVHHAHATHGHVPLGVALHPPQAAAHPGRGGHREDARRPPGPPPPPHLRQHLRPRVRQGPRDARAGPAGERIRHGVRPRHGGDAQPVHIPRVPVAVQEVAGPRHGEHAGPAASRTWTSTSPPSSRRASLSSPATASATRRRTTTCCLGSCARAPIRTSRCSTWRSTSSSPAATPPPWRSPGSSGSCPRTRTWSARSYSSCAPRSPRPAAPTTRHCGWRRHSRSRSWTAWSTSRRRSRRPCACTRPFPRTPSTSWPTTTSPTARSSPAGSSVTYSIYSAGRMKTVWGEDCLEFRPERWLSADGTRFEPHDSYRFVAFNAGPRICLGKDLAYLQMKNIAGSVLLRHRLAVARGHRVEQKMSLTLFMKHGLRMEVHPRDLAPVIDELRGAGAARPAMAPCCA

SEQ ID NO: 22133 - protein, 487 aa, Zea mays subsp. mays
  misc_feature (1)..(487): Ceres Seq. ID no. 12407715
MHEWIVGNLRRTGGTYQTCIFAVPGVARRGRAGHGHVRPSQPGARPQGALRQLPQGPLLARRLPGPARRRHLQLRRRHVGGAAQDGRARVHHAHATHGHVPLGVALHPPQAAAHPGRGGHREDARRPPGPPPPPHLRQHLRPRVRQGPRDARAGPAGERIRHGVRPRHGGDAQPVHIPRVPVAVQEVAGPRHGEHAGPAASRTWTSTSPPSSRRASLSSPATASATRRRTTTCCLGSCARAPIRTSRCSTWRSTSSSPAATPPPWRSPGSSGSCPRTRTWSARSYSSCAPRSPRPAAPTTRHCGWRRHSRSRSWTAWSTSRRRSRRPCACTRPFPRTPSTSWPTTTSPTARSSPAGSSVTYSIYSAGRMKTVWGEDCLEFRPERWLSADGTRFEPHDSYRFVAFNAGPRICLGKDLAYLQMKNIAGSVLLRHRLAVARGHRVEQKMSLTLFMKHGLRMEVHPRDLAPVIDELRGAGAARPAMAPCCA

SEQ ID NO: 22134 - protein, 461 aa, Zea mays subsp. mays
  misc_feature (1)..(461): Ceres Seq. ID no. 12407716
MEVSTWVMLVAAAAAVHGVVLAAVAGAQRAAGVAGARQPAGAGAARRGHARVDRGQPAPHGRHLPDLHLRGARGGSPRAGWSRSRATLATWSTSSRRASTTTPRAPSGTPSSGTCSATASSTPTATRGWRSARRPRSSSPRARYARPCPAGCRAPSTSGCCPSWTRRPPRRRTSTSRTSSSASPSTTSAASRSARTPRRSRRACRRTHSPRRSTAPRRRRSTGSYSPSACGGARSGWASAWRARWPRSVAHVDQYLAAVIKARKLELAGNGKCDAPAHDDLLSRFMRKGSYSDESLQHVALNFILAGRDTSSVALSWFFWLVSTHPDVERQIVLELCAALAASRGSHDPALWLASPLTFEELDRLVYLKAALSETLRLYPSVPEDSKHVVADDYLPDGTFVPGGVVGDLLHLLGRAHEDGVGGGLPRVPPRAVVVRRRHPVRAARLVPVRGVQRRAEDLPR

SEQ ID NO: 22135 - DNA, 1320 bp, Zea mays subsp. mays
  misc_feature (1)..(1320): Ceres Seq. ID no. 12407729
gtacaatccgatgtaaacgaacaaggcctaagacgtactgcagcggcagcgcaccacatctgaccctaccaccatggcatccgcggggacgacggcggtggtgcccgaggtggccctgcggtcgggcaacgcgaggacggcgatgccgatggtcggcatgggcacggcgtcgttccctctggtgcacgaggccgtcaaggacggccgtgctctccgccatcgaggtggggttccgccacttcgacactgcctccatgtacggcaccgagaagccgctgggcgacgccgtggccgaggcgctccggcgcgggaccctgcggtcccgggaggatctgttcgtgacgtccaagctgtggtgctcgcagaaccacccggacctcgtgctgccgtccctccgggaaacactcaagaacctgcagatggagtacgtggatctgtacctgatccactggccggtgtgcctgaaaccggggccgcccgagctcccgaccaggaaggagaacgccgtgccgctggacctcgcgggtgtgtggcgcgccatggaggagtgccagcggctgggcctcgccaaggcgatcggcgtgagcaacttcaccaccaggcacctcgacggggtcctggccgtcgccacggtcccgcccgcggtgaaccaggtggagctgaacccgggcgtggccagcagcggacgctcagggcgtactgcgccgacaggggcatccacgtcgcggcctactcgccgntggaagggcagaactgggacgggcagggcagcgccgtgctggactccgaggtgctcgccgcgatagccaaggcgagggggaaaaccgtcgcgcaggtggcgttgcgatggatacatgagcagggagtgacatgcatcgtcaagagttacagcaaggagaggctgaggcagaaccttgggatattcgactgggagctgaccgacgaggagcggctcaagatcagccagatcccgcagaggaaggttgtccagactagtagcttgttctcgcaagagggtgagttcacggctgttgatccagcggaacttaatattttagaggaatagggggaaaatgacccgccacacatacactgcatcagtgttgctgcatacaaaagtgtatttcgtagaccatttgaataaggctgttggaaacggtgacatctagtgctgtttggtttcgttgccgggacggtaacatctacagttaatgctgcaatccattaacggaacggaggggaatggatagcgctcgtttatgagtggtttcattactgttataagactgtttcagcaacatttactaaatttcattctct

SEQ ID NO: 22136 - protein, 330 aa, Zea mays subsp. mays
  misc_feature (1)..(330): Ceres Seq. ID no. 12407730
  misc_feature (223)..(223): Xaa is any aa, unknown or other
MASAGTTAVVPEVALRSGNARTAMPMVGMGTASFPLVHEAVKDGRALRHRGGVPPLRHCLHVRHREAAGRRRGRGAPARDPAVPGGSVRDVQAVVLAEPPGPRAAVPPGNTQEPADGVRGSVPDPLAGVPETGAARAPDQEGERRAAGPRGCVARHGGVPAAGPRQGDRREQLHHQAPRRGPGRRHGPARGEPGGAEPGRGQQRTLRAYCADRGIHVAAYSPXEGQNWDGQGSAVLDSEVLAAIAKARGKTVAQVALRWIHEQGVTCIVKSYSKERLRQNLGIFDWELTDEERLKISQIPQRKVVQTSSLFSQEGEFTAVDPAELNILEE

SEQ ID NO: 22137 - protein, 307 aa, Zea mays subsp. mays
  misc_feature (1)..(307): Ceres Seq. ID no. 12407731
  misc_feature (200)..(200): Xaa is any aa, unknown or other
MPMVGMGTASFPLVHEAVKDGRALRHRGGVPPLRHCLHVRHREAAGRRRGRGAPARDPAVPGGSVRDVQAVVLAEPPGPRAAVPPGNTQEPADGVRGSVPDPLAGVPETGAARAPDQEGERRAAGPRGCVARHGGVPAAGPRQGDRREQLHHQAPRRGPGRRHGPARGEPGGAEPGRGQQRTLRAYCADRGIHVAAYSPXEGQNWDGQGSAVLDSEVLAAIAKARGKTVAQVALRWIHEQGVTCIVKSYSKERLRQNLGIFDWELTDEERLKISQIPQRKVVQTSSLFSQEGEFTAVDPAELNILEE

SEQ ID NO: 22138 - protein, 305 aa, Zea mays subsp. mays
  misc_feature (1)..(305): Ceres Seq. ID no. 12407732
  misc_feature (198)..(198): Xaa is any aa, unknown or other
MVGMGTASFPLVHEAVKDGRALRHRGGVPPLRHCLHVRHREAAGRRRGRGAPARDPAVPGGSVRDVQAVVLAEPPGPRAAVPPGNTQEPADGVRGSVPDPLAGVPETGAARAPDQEGERRAAGPRGCVARHGGVPAAGPRQGDRREQLHHQAPRRGPGRRHGPARGEPGGAEPGRGQQRTLRAYCADRGIHVAAYSPXEGQNWDGQGSAVLDSEVLAAIAKARGKTVAQVALRWIHEQGVTCIVKSYSKERLRQNLGIFDWELTDEERLKISQIPQRKVVQTSSLFSQEGEFTAVDPAELNILEE

SEQ ID NO: 22139 - DNA, 1565 bp, Zea mays subsp. mays
  misc_feature (1)..(1565): Ceres Seq. ID no. 12407744
aacgctcgaactccacatcccccggtgttccccctccgctctccttcttaacccgtcccactgaactggatttcctctcgctattgtggtatactgtagcacgccagacgcaactagtcacggtcacggtcaagctcattgcgagcggagcgccctcctgtcgcttctgccgccgccgccaccgccgccgctcggctataaagtcgccagctctgttcaccgccgcttttcctctgcatccgtctgtggtgcggaattgaattccggtgggatttgggagccgagaggagaaggcggtaggcggggatggagacaccgggagggagcggggccccgtcgctggcgcggcagggctcggtgtactcgctaacgttcgacgagttccagaccgcgctcggcggcgccagcaaggacttcggctccatgaacatggacgagctgctgcgcaacatctggacggccgaggagtccaacgccatgaccgcggccgccccgaccacggcggccgcatccatggacgcgcatgggcagcatcagcagcaggccggggcgcccatccagcgccagggctccttcacgctgccgcgcacgctcagccagaagacggtcgacgaggtctggcgcgagatcgtgggcctcaccgacggggaggacgcgcaggcggttgcggctcccgctcccacgcccgcgcacgcgccgctgccggcgcaggcacagcggcagcagacgctggggtccatgactctggaggatttcctggtacgcgccggcgtggtttgtgaggacatggggcagcagaccctcgtgcagcagccgcacacgcagggttttttctcccaggggaatgcggtcgcgccgcagaccatgcagctggggaacggggtggtgaccggggtcgtcgggcaggggctcggaggagggatgacggtggcggtgccgacgacgccggtcgtgttcaacgggatggggaaggtggaggcgggggatctttcgtcgctgtcgccggtgccgtatcccttcgacactgcactgagggtgaggaagggaccgaccgtcgagaaggtggtggagaggaggcagaggcgcatgatcaagaacagggagtcggcagccaggtcgcgcgcgaggaagcaggcatacataatggagctagaagctgaggtggcaaaactcaaggacctgaatgacgagttgcagaaaaagcaggttgaaatgctgaagaagcaaaaggatgaggtcctggagcgaatcaacaaccaacatggaccgaaggcaaagaaactttgtcttcaccgcaccctgactggcccatggtagcctgctgaagcttgcacagacctcaccgaagtcgagatcgtcggcttagatgtgctcgtgtgtataccagatgatctcaagttgttctgtgacgtgggttgttgtctgtgcctgacagttcaccgtttaggttcagctgcgcaatcctcatataaacaatgaggcgtactaccttatctgttcatttaactccctcctattgccatggtgagatcatgcatgtaacttaggccttgttcgtttgtgcc

SEQ ID NO: 22140 - protein, 336 aa, Zea mays subsp. mays
  misc_feature (1)..(336): Ceres Seq. ID no. 12407745
METPGGSGAPSLARQGSVYSLTFDEFQTALGGASKDFGSMNMDELLRNIWTAEESNAMTAAAPTTAAASMDAHGQHQQQAGAPIQRQGSFTLPRTLSQKTVDEVWREIVGLTDGEDAQAVAAPAPTPAHAPLPAQAQRQQTLGSMTLEDFLVRAGVVCEDMGQQTLVQQPHTQGFFSQGNAVAPQTMQLGNGVVTGVVGQGLGGGMTVAVPTTPVVFNGMGKVEAGDLSSLSPVPYPFDTALRVRKGPTVEKVVERRQRRMIKNRESAARSRARKQAYIMELEAEVAKLKDLNDELQKKQVEMLKKQKDEVLERINNQHGPKAKKLCLHRTLTGPW

SEQ ID NO: 22141 - protein, 297 aa, Zea mays subsp. mays
  misc_feature (1)..(297): Ceres Seq. ID no. 12407746
MNMDELLRNIWTAEESNAMTAAAPTTAAASMDAHGQHQQQAGAPIQRQGSFTLPRTLSQKTVDEVWREIVGLTDGEDAQAVAAPAPTPAHAPLPAQAQRQQTLGSMTLEDFLVRAGVVCEDMGQQTLVQQPHTQGFFSQGNAVAPQTMQLGNGVVTGVVGQGLGGGMTVAVPTTPVVFNGMGKVEAGDLSSLSPVPYPFDTALRVRKGPTVEKVVERRQRRMIKNRESAARSRARKQAYIMELEAEVAKLKDLNDELQKKQVEMLKKQKDEVLERINNQHGPKAKKLCLHRTLTGPW

SEQ ID NO: 22142 - protein, 295 aa, Zea mays subsp. mays
  misc_feature (1)..(295): Ceres Seq. ID no. 12407747
MDELLRNIWTAEESNAMTAAAPTTAAASMDAHGQHQQQAGAPIQRQGSFTLPRTLSQKTVDEVWREIVGLTDGEDAQAVAAPAPTPAHAPLPAQAQRQQTLGSMTLEDFLVRAGVVCEDMGQQTLVQQPHTQGFFSQGNAVAPQTMQLGNGVVTGVVGQGLGGGMTVAVPTTPVVFNGMGKVEAGDLSSLSPVPYPFDTALRVRKGPTVEKVVERRQRRMIKNRESAARSRARKQAYIMELEAEVAKLKDLNDELQKKQVEMLKKQKDEVLERINNQHGPKAKKLCLHRTLTGPW

SEQ ID NO: 22143 - DNA, 1084 bp, Zea mays subsp. mays
  misc_feature (1)..(1084): Ceres Seq. ID no. 12407764
ctgctccttctctggtgaggaggcgtggtgagagactgcgactgcgcgatggaggcgtcgtcgtcggcgttggcgctcgtggccgccgtgctcctcctctcctccccgctcgctgcgtcagatttctgcgtgtgccgttcggaccagccgacggcggtgctgcagaaggcgatcgacttcgcgtgcggcccgcagggcggcgccgactgcacgcccatcctgcagggcggcgggtgctacagcccggacaccgccgccgcgcactgctcctgggccgccaacacctactaccagaacaacaaggccaggggcgccacctgcgacttcggcggcgcagccaccgtctccaccaccgacccgagtttctccgggtgcactttcgcttccagtgccaccagcgccggtgctgggactggaaccgggacggcgggcagcagcaccttcagccccagcgcgggcaccggcttcaacggcaccgggaacgggatgggcggcagcactactaccggcctgggacccacgggcaacgcctttgacgccgccgccgccgccgcgccgggcctgctccccagcgccgcgtccctcggcctcgcactcgccgtcctctccttcctaacctagccctgccgcgccattaacggcagcctcccctcgtcttatgtctggtcgtgttcagtaccatacctctctgaacatgagccagctgctgctgctacttggcttgctccatggcggaaggggacgggccggggagctgtacgtactgcgacgaagaagagtgcggtggaactggctggttggttggttttggttccagcttcattttcacctcacaccccacactgctagtggcgacggtggttggggttgcggggtgcggtgcgtgccttttttgatgaatcctagctacacgacgggatggcgtgtggtttattcgctggtaggatggctgtctcttttcctccgaggaccattcatgtcttccttgtttgtacgtacctctcttcttttcttgttttatgtacaagacttgtcgctagccctttgtttgtttgtttctaatcaaactctttgttctgctgtc

SEQ ID NO: 22144 - protein, 190 aa, Zea mays subsp. mays
  misc_feature (1)..(190): Ceres Seq. ID no. 12407765
MEASSSALALVAAVLLLSSPLAASDFCVCRSDQPTAVLQKAIDFACGPQGGADCTPILQGGGCYSPDTAAAHCSWAANTYYQNNKARGATCDFGGAATVSTTDPSFSGCTFASSATSAGAGTGTGTAGSSTFSPSAGTGFNGTGNGMGGSTTTGLGPTGNAFDAAAAAAPGLLPSAASLGLALAVLSFLT

SEQ ID NO: 22145 - protein, 177 aa, Zea mays subsp. mays
  misc_feature (1)..(177): Ceres Seq. ID no. 12407766
APSLVRRRGERLRLRDGGVVVGVGARGRRAPPLLPARCVRFLRVPFGPADGGAAEGDRLRVRPAGRRRLHAHPAGRRVLQPGHRRRALLLGRQHLLPEQQGQGRHLRLRRRSHRLHHRPEFLRVHFRFQCHQRRCWDWNRDGGQQHLQPQRGHRLQRHRERDGRQHYYRPGTHGQRL

SEQ ID NO: 22146 - protein, 142 aa, Zea mays subsp. mays
  misc_feature (1)..(142): Ceres Seq. ID no. 12407767
MSGRVQYHTSLNMSQLLLLLGLLHGGRGRAGELYVLRRRRVRWNWLVGWFWFQLHFHLTPHTASGDGGWGCGVRCVPFLMNPSYTTGWRVVYSLVGWLSLFLRGPFMSSLFVRTSLLFLFYVQDLSLALCLFVSNQTLCSAV

SEQ ID NO: 22147 - DNA, 1536 bp, Zea mays subsp. mays
  misc_feature (1)..(1536): Ceres Seq. ID no. 12407772
aaacctaacagaagcaaccgaatatcccctcgcctttcaactcgtcttcctcctcatgtcgtcgcctcctatccctctatatcttctattctaagccacctcgatcggaccctagatagatgcaagaaaagaaaagagaagagcctctgtggatagtggtgggtgctggatcactgggcggagcagcttctcatatcggatcgatcgattaattaatatatactataaacatacaatcaattacatacatatacgccaagagaagaggaacgccggcccgtttcacttgtctccttcctccgatccctcccggcggccggccgggctcgggcgtttttccccttttgtttcccatggaggacgccaagatggggaacggcgccaccatccgcgcggtgctcgccatcctccagtggtggggattcaacgtcaccgtcatcatcatcaacaagtggatcttccagaaactggagttcaagttccccctgacggtgtcgtgcgtccacttcatatgttcctccatcggagcctacatcgcgatcaaagtcctgagaacgaagccgctgatcgaggtggcctcggaggaccggtggaggaggatattccccatgtcgttggtgttctgcgtcaacatcgtgctggggaacgtgagcctgaggtacataccagtgtcattcatgcagacgatcaagtcgttcactccggcaacgacagtggttcttcagtggctggtttggaggaaatactttgagtggcgcatctgggcgtccttggtgcccatcgttggaggaatccttgtcacctccgtgacggagctgagcttcaacacggctggcttctgcgccgcgctggtggggtgcctggccacgtccaccaagaccatcctggcagagtcgctgctccacggctacaagttcgacagcatcaacacggtgtactacatggctccgctggccacgctgatcctgtcggtgccggccgtggcgctggagggcggcgccgtgctggggtggctgcggacgcacgagtccgtgggaccggcgctggcggtcgtcgtcacctccggggtgctggccttctgcctcaacttctccatcttctacgtcatccactccacgacggcagtcaccttcaacgtggccggcaacctcaaggtggccgtggcggtgctggcgtcctggatggtgttccggaaccccatctccgccatgaacgcactcggctgcggcgtcacgctcgtcggatgcaccttctacggctacgtcaggcaccgactctcgcagaaccaggcgcccagagcccgcttggagatgctgccgctcaccgccgtcgacaagcaaggcgacaagatataaaaagtcttttcgaataaaccatctgattctttctgatccacctagcctaaccgccgatcgagaatgcatccaccatcagagatgacaggaaattattttttgttggcagccagattttgataatgagtcagttcagttgttgcttaaagagaaatgtcatgaggtctataaagtcttttgg

SEQ ID NO: 22148 - protein, 333 aa, Zea mays subsp. mays
  misc_feature (1)..(333): Ceres Seq. ID no. 12407773
MEDAKMGNGATIRAVLAILQWWGFNVTVIIINKWIFQKLEFKFPLTVSCVHFICSSIGAYIAIKVLRTKPLIEVASEDRWRRIFPMSLVFCVNIVLGNVSLRYIPVSFMQTIKSFTPATTVVLQWLVWRKYFEWRIWASLVPIVGGILVTSVTELSFNTAGFCAALVGCLATSTKTILAESLLHGYKFDSINTVYYMAPLATLILSVPAVALEGGAVLGWLRTHESVGPALAVVVTSGVLAFCLNFSIFYVIHSTTAVTFNVAGNLKVAVAVLASWMVFRNPISAMNALGCGVTLVGCTFYGYVRHRLSQNQAPRARLEMLPLTAVDKQGDKI

SEQ ID NO: 22149 - protein, 328 aa, Zea mays subsp. mays
  misc_feature (1)..(328): Ceres Seq. ID no. 12407774
MGNGATIRAVLAILQWWGFNVTVIIINKWIFQKLEFKFPLTVSCVHFICSSIGAYIAIKVLRTKPLIEVASEDRWRRIFPMSLVFCVNIVLGNVSLRYIPVSFMQTIKSFTPATTVVLQWLVWRKYFEWRIWASLVPIVGGILVTSVTELSFNTAGFCAALVGCLATSTKTILAESLLHGYKFDSINTVYYMAPLATLILSVPAVALEGGAVLGWLRTHESVGPALAVVVTSGVLAFCLNFSIFYVIHSTTAVTFNVAGNLKVAVAVLASWMVFRNPISAMNALGCGVTLVGCTFYGYVRHRLSQNQAPRARLEMLPLTAVDKQGDKI

SEQ ID NO: 22150 - protein, 248 aa, Zea mays subsp. mays; identical to SEQ ID NO: 18971
  misc_feature (1)..(248): Ceres Seq. ID no. 12407775

SEQ ID NO: 22151 - DNA, 1215 bp, Zea mays subsp. mays
  misc_feature (1)..(1215): Ceres Seq. ID no. 12407776
acccacccgttttatccacgcacggcgtcgaacaccccgcggtcgctcacgtgaggcgccaccccgcgcacccagtcagcgcccgcctccaccacccacccacacgacaaaaatccgccatggccttcgcgctcaaggccgccgccgcggggtcggcgtcgttctccgccgcggggccgaggcggcgcgccgcggcgactggtagggtctcgttccggagcgccgcgcccgtggtcgccgtcagggccgcggcggcggcggccgccgctgtggcggaggacaagcgcagcatctccggcaccttcgccgagctcaggcagcaggggaagactgccttgattcccttcatcactgctggagaccctgacttggccaccacagcaaaagcactcaggatccttgatgcgtgtggttcagacgtgatcgaactgggtgtgccttactccgatccattggctgacggccctgttattcaggcctccgcgacgcgcgctctggcaaagggcaccacatttgaggatgtcatctccatggtaaagggggtgatacctgatctgtcctgccctgtagcgcttttcacatattacaacccgatcctgaagcgtggtgtccccaacttcatgagtattgttaaagaagctggggtacacggtcttgtggtaccagatgttcctttggaagagacagatgtcttgaggagtgaggctgccaaaaacaacctagagctggtgctattgacaacaccgactacaccaaatgaaagaatggagaaaattgcacaggcttcagaaggatttatttatcttgtaagcactgttggagttactggtacacgtgcaaatgtaagcggcaaggtgcaatctcttcttcaggatatcaagaaggtgacagaaaaacccgtggctgttggctttggtgtgtcgactccagagcatgtccggcagattgcaggatggggcgcagatggtgtgattatcggtagcgcagtgatgaagacgttggaggaagctgcttctccagaagaaggattgaagaagctagaagagttcgccaagaacctgaaggccgcattgccgtgaaccaaccattttcgttagcaaagaaattaagattttttttttcctttcaatcttggctttcagggttgttggttgttgtgtagtgaaaataattgtgtccctatgttgaatgctcaaatgaataaatcaagatccc

SEQ ID NO: 22152 - protein, 358 aa, Zea mays subsp. mays
  misc_feature (1)..(358): Ceres Seq. ID no. 12407777
PPVLSTHGVEHPAVAHVRRHPAHPVSARLHHPPTRQKSAMAFALKAAAAGSASFSAAGPRRRAAATGRVSFRSAAPVVAVRAAAAAAAAVAEDKRSISGTFAELRQQGKTALIPFITAGDPDLATTAKALRILDACGSDVIELGVPYSDPLADGPVIQASATRALAKGTTFEDVISMVKGVIPDLSCPVALFTYYNPILKRGVPNFMSIVKEAGVHGLVVPDVPLEETDVLRSEAAKNNLELVLLTTPTTPNERMEKIAQASEGFIYLVSTVGVTGTRANVSGKVQSLLQDIKKVTEKPVAVGFGVSTPEHVRQIAGWGADGVIIGSAVMKTLEEAASPEEGLKKLEEFAKNLKAALP

SEQ ID NO: 22153 - protein, 319 aa, Zea mays subsp. mays
  misc_feature (1)..(319): Ceres Seq. ID no. 12407778
MAFALKAAAAGSASFSAAGPRRRAAATGRVSFRSAAPVVAVRAAAAAAAAVAEDKRSISGTFAELRQQGKTALIPFITAGDPDLATTAKALRILDACGSDVIELGVPYSDPLADGPVIQASATRALAKGTTFEDVISMVKGVIPDLSCPVALFTYYNPILKRGVPNFMSIVKEAGVHGLVVPDVPLEETDVLRSEAAKNNLELVLLTTPTTPNERMEKIAQASEGFIYLVSTVGVTGTRANVSGKVQSLLQDIKKVTEKPVAVGFGVSTPEHVRQIAGWGADGVIIGSAVMKTLEEAASPEEGLKKLEEFAKNLKAALP

SEQ ID NO: 22154 - protein, 182 aa, Zea mays subsp. mays
  misc_feature (1)..(182): Ceres Seq. ID no. 12407779
MVKGVIPDLSCPVALFTYYNPILKRGVPNFMSIVKEAGVHGLVVPDVPLEETDVLRSEAAKNNLELVLLTTPTTPNERMEKIAQASEGFIYLVSTVGVTGTRANVSGKVQSLLQDIKKVTEKPVAVGFGVSTPEHVRQIAGWGADGVIIGSAVMKTLEEAASPEEGLKKLEEFAKNLKAALP

SEQ ID NO: 22155 - DNA, 1637 bp, Zea mays subsp. mays
  misc_feature (1)..(1637): Ceres Seq. ID no. 12407796
tcgctcgcgtctcccttatccattcccaaataatccccacctcccgctgctgctccgccgcccgccatggcttccctcacctcggcgtccacttcactcctcttcccgcaggcctcctcatccatgagccgcatccgtctctccacccccctgggcttctccgcgcagcctgcgcggctgcggagccagggggcggcagtgggcgcgcggcggcgcgggcgcctgctggtggtgcgcgcagcgaggggcaagttcgagcgcaccaaaccacacgtcaacataggcaccatcggccatgtcgaccacggaaagaccactctcaccgccgcgctcaccatggtgctcgcctccgtcggcggcagcgcgcctaagaagtacgacgagatcgacgccgcccccgaggagcgcgcccgcggtatcaccatcaacaccgccaccgtcgagtacgagaccgagacccgccactacgcacacgtcgactgccccggccacgccgactatgtcaagaatatgatcaccggcgctgcgcagatggacggtgccatcctcgtcgtatccggtgccgacgggcccatgccgcagaccaaagagcacatcctcctcgccaagcaagtcggtgttcccaagatcgttgtcttcctcaacaaaaaggacatggtcgacgacgaggagctgctcgagctcgtcgagctcgaggtccgcgagctgctcagcaactacgagtacgacggcgacgacgtaccaatcgtcgctggctccgccctcaaggcgctcgaggctctcatggtcaaccctgccctgaagcgcggcgacgatgagtgggtcgactacatcttctcgttggttgataaagtggattcctatattccagtcccgcagaggcagactgacctcccgttcttgctcgctgttgaagatgtcttctccatcaccggtcgtggtacagttgccactggccgtatagagcgtggcaccgtcaagattggtgacacagtcgatatcgtcggaatccgggacacccggaactgcacggtcactggtgttgagatgttccagaagaccatggatgatgccatggccggagacaatgttgggctgctgctccgtggtatgcagaaggatgacattgaaagaggcatggtgctggcaaagcctggctctatcacaccgcacaccaagtttgaggctgttgtgtatgtgcttaagaaggaagagggtggccgacactcacctttcttccctggttaccgcccacagttctacatgcggacaactgatgtgacagggagtgtgactacgattatgaatgacaaggatgaggaggcgaagatgtgcatgcctggtgaccgtatcaaaatgattgttcagctcatccagcctgttgcttgtgagcagggtatgaggtttgctatccgtgagggtggtaagaccgttggtgccggtgtcatcaacaaaatcattgagtaaactggatataacatatccaccatgagaattttccttgtttactcaaagcgacatgctccgtagttgttattatgtggtgagttttaggggttgctcatgtgcaattgtagtatgacacttttttttgtcaagtgaatttgcataatttatgacattcacgacaaagattc

SEQ ID NO: 22156 - protein, 466 aa, Zea mays subsp. mays
  misc_feature (1)..(466): Ceres Seq. ID no. 12407797
MASLTSASTSLLFPQASSSMSRIRLSTPLGFSAQPARLRSQGAAVGARRRGRLLVVRAARGKFERTKPHVNIGTIGHVDHGKTTLTAALTMVLASVGGSAPKKYDEIDAAPEERARGITINTATVEYETETRHYAHVDCPGHADYVKNMITGAAQMDGAILVVSGADGPMPQTKEHILLAKQVGVPKIVVFLNKKDMVDDEELLELVELEVRELLSNYEYDGDDVPIVAGSALKALEALMVNPALKRGDDEWVDYIFSLVDKVDSYIPVPQRQTDLPFLLAVEDVFSITGRGTVATGRIERGTVKIGDTVDIVGIRDTRNCTVTGVEMFQKTMDDAMAGDNVGLLLRGMQKDDIERGMVLAKPGSITPHTKFEAVVYVLKKEEGGRHSPFFPGYRPQFYMRTTDVTGSVTTIMNDKDEEAKMCMPGDRIKMIVQLIQPVACEQGMRFAIREGGKTVGAGVINKIIE

SEQ ID NO: 22157 - protein, 447 aa, Zea mays subsp. mays
  misc_feature (1)..(447): Ceres Seq. ID no. 12407798
MSRIRLSTPLGFSAQPARLRSQGAAVGARRRGRLLVVRAARGKFERTKPHVNIGTIGHVDHGKTTLTAALTMVLASVGGSAPKKYDEIDAAPEERARGITINTATVEYETETRHYAHVDCPGHADYVKNMITGAAQMDGAILVVSGADGPMPQTKEHILLAKQVGVPKIVVFLNKKDMVDDEELLELVELEVRELLSNYEYDGDDVPIVAGSALKALEALMVNPALKRGDDEWVDYIFSLVDKVDSYIPVPQRQTDLPFLLAVEDVFSITGRGTVATGRIERGTVKIGDTVDIVGIRDTRNCTVTGVEMFQKTMDDAMAGDNVGLLLRGMQKDDIERGMVLAKPGSITPHTKFEAVVYVLKKEEGGRHSPFFPGYRPQFYMRTTDVTGSVTTIMNDKDEEAKMCMPGDRIKMIVQLIQPVACEQGMRFAIREGGKTVGAGVINKIIE

SEQ ID NO: 22158 - protein, 376 aa, Zea mays subsp. mays
  misc_feature (1)..(376): Ceres Seq. ID no. 12407799
MVLASVGGSAPKKYDEIDAAPEERARGITINTATVEYETETRHYAHVDCPGHADYVKNMITGAAQMDGAILVVSGADGPMPQTKEHILLAKQVGVPKIVVFLNKKDMVDDEELLELVELEVRELLSNYEYDGDDVPIVAGSALKALEALMVNPALKRGDDEWVDYIFSLVDKVDSYIPVPQRQTDLPFLLAVEDVFSITGRGTVATGRIERGTVKIGDTVDIVGIRDTRNCTVTGVEMFQKTMDDAMAGDNVGLLLRGMQKDDIERGMVLAKPGSITPHTKFEAVVYVLKKEEGGRHSPFFPGYRPQFYMRTTDVTGSVTTIMNDKDEEAKMCMPGDRIKMIVQLIQPVACEQGMRFAIREGGKTVGAGVINKIIE

SEQ ID NO: 22159 - DNA, 1532 bp, Zea mays subsp. mays
  misc_feature (1)..(1532): Ceres Seq. ID no. 12407804
acagtgtccactgtccagtcgcctagtcgcaaatctcaccccgccgccatggcctcccccgccgccgcctcccccgcgcgccgcctttccgtcattttctcctcgaccaagccacgcgcccgaccacccaaaccggcgccggctccgaaagcgccggccggccaggcggttgcgaaacctgacgagcgctgcgagtcccggaatctcacgaaaatcctgcaggtcatcttccgggagcgcgatccggacaagctggtttcccagttcatcgccgaatcgaccgcgtctgaacgcttccgcaacaagcaccgcgtgtacgacgtggccgtggcccgcctcgcctccttcggccgacacgatggcattgctgccatcatcgactcacagaagccgttcatcgcggcctccagcgtgggcttcgtcgcacgcctcatccgcctctgcggccgcgcctccatgccgtcccacgccgccgcgatcttccatgacctcccaccgaagcacaagtcctccatgactttcaatgccctcctcgggccgcctacctcgacgccagcgacttcgacgcactcgccaccgcgttgcaggaaatcccggccacacaccccactattgctcccaccatatactctcacaatatactcatcagtgcgctgtgcaagaagccggacctctcggccgccgtggatgtcatcacgctcatggagaagcgcggtattacccctgatatcatctctttcaacattctgctcaatgggttttacagcaatgatcgctttgatgacgtcgagaaagtttgggagatgatgaaggagaggaatgttgagccggatgcgaggagctataatgcaaaactgcggggtttggtttcccaagggagggttgaggatgcagctgcattgattgagaggatgcaaaaggagggaccaaagcctgattcagtgtcctacaacgaactgattcgagggtattgcaatgaagggaggttgaatgaagccaagaaggtatatgataatatgataaagaatggatatgcaccaaataggggcacatttcatacccttgtgccacattttgtggaggctggagagcttgatcatgctctaagctgctgccatgagatcttcactaggaagtgcagagtgcagtgctcgttgctgcagggggtagtgactgcgttggttgctgcatcaaggaaggaggaggctaagaggatcgttcatcttggaagggagaactactatcctcgaaagggtttgaggatgccaccacgtactagaaaagacgagggtttgaagatgccgcaacctggtggagaaggcaatgatgtagaagctggaactgattcagaagattctgtatcatatgaagatgggtgcgagcaagaagaggagtcgaaaaatggtcagtgaggatgtacctttgtaatttaagcattgatgtgacatggcgatgcaaactgaatttgctctacttctttgatggcatgatacaacagaattgcctgtgcaattggaattctctcgcacttt

SEQ ID NO: 22160 - protein, 268 aa, Zea mays subsp. mays
  misc_feature (1)..(268): Ceres Seq. ID no. 12407805
TVSTVQSPSRKSHPAAMASPAAASPARRLSVIFSSTKPRARPPKPAPAPKAPAGQAVAKPDERCESRNLTKILQVIFRERDPDKLVSQFIAESTASERFRNKHRVYDVAVARLASFGRHDGIAAIIDSQKPFIAASSVGFVARLIRLCGRASMPSHAAAIFHDLPPKHKSSMTFNALLGPPTSTPATSTHSPPRCRKSRPHTPLLLPPYTLTIYSSVRCARSRTSRPPWMSSRSWRSAVLPLISSLSTFCSMGFTAMIALMTSRKFGR

SEQ ID NO: 22161 - protein, 252 aa, Zea mays subsp. mays
  misc_feature (1)..(252): Ceres Seq. ID no. 12407806
MASPAAASPARRLSVIFSSTKPRARPPKPAPAPKAPAGQAVAKPDERCESRNLTKILQVIFRERDPDKLVSQFIAESTASERFRNKHRVYDVAVARLASFGRHDGIAAIIDSQKPFIAASSVGFVARLIRLCGRASMPSHAAAIFHDLPPKHKSSMTFNALLGPPTSTPATSTHSPPRCRKSRPHTPLLLPPYTLTIYSSVRCARSRTSRPPWMSSRSWRSAVLPLISSLSTFCSMGFTAMIALMTSRKFGR

SEQ ID NO: 22162 - protein, 236 aa, Zea mays subsp. mays
  misc_feature (1)..(236): Ceres Seq. ID no. 12407807
MEKRGITPDIISFNILLNGFYSNDRFDDVEKVWEMMKERNVEPDARSYNAKLRGLVSQGRVEDAAALIERMQKEGPKPDSVSYNELIRGYCNEGRLNEAKKVYDNMIKNGYAPNRGTFHTLVPHFVEAGELDHALSCCHEIFTRKCRVQCSLLQGVVTALVAASRKEEAKRIVHLGRENYYPRKGLRMPPRTRKDEGLKMPQPGGEGNDVEAGTDSEDSVSYEDGCEQEEESKNGQ

SEQ ID NO: 22163 - DNA, 1103 bp, Zea mays subsp. mays
  misc_feature (1)..(1103): Ceres Seq. ID no. 12407827
atggcggtgaccacttaagcgtggtggcttctgagttttgcctcgatttcgattctttctttttcccccacgtgcgccgccgcgaccttcctcgatcccatctcccaacgcccccgcctcgcctcgggatcccgccgccgctccatctgcctttgctcccccacccgcaggcagcgagcgacagcgacggcgagggatggccaaggccaggtcgttggcgaagcagaagcaggcgcagcaatcaaacggcggcggcggccacgcgctgtcctccaagctcgcccggtacctcgacccggaggcctccttggacaaggaccaactgctggacgcggtgcactggatccgccaggcggtggggctcatatgcggcctgctctggggagccgtccccgtcgtcggcgccgtctggatcgcactatttatggccatctcgactggcattatctattggtactacacctacttgctgaaggttgacgaggaggaatatggaggccatggggcgcttcttcaggagggtcttttcgcttcattcacccttttcctgctttcgtggactctagtatacagtctggctcacttctgagaagctcctttggcgcacatacctttgttcactgtgccagacagaaaagactcaccaggacagtgtagactaaggagcttctcagaagttgagcgagatgagctgatcaaagtccacgaggacaagaagttgaagctcaagaaagaatacatggatctggagctggagctggagaaggagtttgacgcagccctgacgggcctgatggagaagcataagccagataccttcgaggcctccagctcgtaagggggcttcagcggctaagcgctttccttaggccccagctaagcttggagcagtctcgtacatgctcctgcttgcttatccatgaaataatgcctggacagtctgtagatgttgcgaaaacatggtgccccctgtggttgccgcgtgtgtagtaagtatctctcagtcgtagtgtggttgaagcatctgaactcttgagcggtttgcctgtgatggcatatgggtcaaactacaactggagtgtgatatctagtttatatggtcc

SEQ ID NO: 22164 - protein, 156 aa, Zea mays subsp. mays
  misc_feature (1)..(156): Ceres Seq. ID no. 12407828
GGDHLSVVASEFCLDFDSFFFPHVRRRDLPRSHLPTPPPRLGIPPPLHLPLLPHPQAASDSDGEGWPRPGRWRSRSRRSNQTAAAATRCPPSSPGTSTRRPPWTRTNCWTRCTGSARRWGSYAACSGEPSPSSAPSGSHYLWPSRLALSIGTTPTC

SEQ ID NO: 22165 - protein, 130 aa, Zea mays subsp. mays
  misc_feature (1)..(130): Ceres Seq. ID no. 12407829
MAKARSLAKQKQAQQSNGGGGHALSSKLARYLDPEASLDKDQLLDAVHWIRQAVGLICGLLWGAVPVVGAVWIALFMAISTGIIYWYYTYLLKVDEEEYGGHGALLQEGLFASFTLFLLSWTLVYSLAHF

SEQ ID NO: 22166 - DNA, 1429 bp, Zea mays subsp. mays
  misc_feature (1)..(1429): Ceres Seq. ID no. 12407830
tttttataagggagcaagagggctcggcggcagcggcgacggcgaccgcgacggcagtggcagtggcagtggcaggctgtcagccgtccctatcttgtgtgtcaagcgcgaactccctatctcgtgtgtcaagcgcgttcgcgtccgttctaggcacaggcagccgaggcgagccccttccgctcagtggccgccgccggaccgtggacgcagctagcccatcagcccatggcagggacggacgtcgcaggctccgcacgcggctccgatgccgcgctcgggaagacgggcgaaccacccgccgcggcgcggctctggcgcagccaagaaggtggctctcgctctgctagcctccttctcggcgctgctgtacagccagattcagccgccgccgtctaagatccccggcatgccgggcgggcctccggtcacggcgcccagaacaaggctcaaggacggccggcacttggcgtacctggaatctggcgtcccaaaggagaaggccaagtacaagatcatattcgttcacggcttcgactgctgtagatacgacgtgctgaatgtctcccaggggctgttggaagagctgggaatctacctgttgtccttcgaccggcccgggtacgccgagagcgacgcccacccggcccggacagagaagagcatcgcccttgacatcgcggagctggcggacaatctccagctcggccccaagttccatctcatcggcttctccatgggcggcgagatcatgtggagctgcctcaagtacatcccgcacaggctcgccggcgtggcgattcttgccccggtgggcaactactggtggtccggcttcccgccggacgtgttcaaggaggcgtggcgcgtgcagtttccgcaagaccagcgcgcggtctgggtcgctcaccacctgccgtggctgacgcactggtggaacacccagaagctgttccgcggatccagcgtcaaggacggcgaccctgccatgctatccaaggaggacaggcttgtagctgacaagttcgagaagcgaacctatgagaagcaggtcagacagcagggagagcacgactcgctccaccgcgacatgatggtcggtttcgggaagtgggactggagcccgctggagatggagaacccgttcgccggcggcctagacgaggtgaaggtgcacctgtggcacggcgtcgaggacctctacgtgccggttcaactgtcgcggtacatcagcgagaggctcccatgggtcatctaccatgagctcccgacggccggccacctcttcccggtcgccgacggcatgcccgacgctatcgtcaggtcgcttctgctcggagatgagtgatcagtatttaggatgcgcggatccaggacttgtgcactttttgcagcttcatcagtaataaaaatacactcggaggtcgag

SEQ ID NO: 22167 - protein, 359 aa, Zea mays subsp. mays
  misc_feature (1)..(359): Ceres Seq. ID no. 12407831
MPRSGRRANHPPRRGSGAAKKVALALLASFSALLYSQIQPPPSKIPGMPGGPPVTAPRTRLKDGRHLAYLESGVPKEKAKYKIIFVHGFDCCRYDVLNVSQGLLEELGIYLLSFDRPGYAESDAHPARTEKSIALDIAELADNLQLGPKFHLIGFSMGGEIMWSCLKYIPHRLAGVAILAPVGNYWWSGFPPDVFKEAWRVQFPQDQRAVWVAHHLPWLTHWWNTQKLFRGSSVKDGDPAMLSKEDRLVADKFEKRTYEKQVRQQGEHDSLHRDMMVGFGKWDWSPLEMENPFAGGLDEVKVHLWHGVEDLYVPVQLSRYISERLPWVIYHELPTAGHLFPVADGMPDAIVRSLLLGDE

SEQ ID NO: 22168 - protein, 312 aa, Zea mays subsp. mays
  misc_feature (1)..(312): Ceres Seq. ID no. 12407832
MPGGPPVTAPRTRLKDGRHLAYLESGVPKEKAKYKIIFVHGFDCCRYDVLNVSQGLLEELGIYLLSFDRPGYAESDAHPARTEKSIALDIAELADNLQLGPKFHLIGFSMGGEIMWSCLKYIPHRLAGVAILAPVGNYWWSGFPPDVFKEAWRVQFPQDQRAVWVAHHLPWLTHWWNTQKLFRGSSVKDGDPAMLSKEDRLVADKFEKRTYEKQVRQQGEHDSLHRDMMVGFGKWDWSPLEMENPFAGGLDEVKVHLWHGVEDLYVPVQLSRYISERLPWVIYHELPTAGHLFPVADGMPDAIVRSLLLGDE

SEQ ID NO: 22169 - protein, 203 aa, Zea mays subsp. mays; identical to SEQ ID NO: 20311
  misc_feature (1)..(203): Ceres Seq. ID no. 12407833

SEQ ID NO: 22170 - DNA, 1336 bp, Zea mays subsp. mays
  misc_feature (1)..(1336): Ceres Seq. ID no. 12407834
atctcgatcgtgctccattccatccacgtatgtagctagagctgccaatcggagatacgtacatggcccgtgtcgcgtcgctgctgctcaccgtcatcgtggctgcggcggcgtcgctgctgctgctgcttgcgccgtcggcggcggagctgacgcgggtggagcacccgcccaagaacgagggctcgctcgccatccttgcagttggcgactgggggcgccgggggcagttcaaccagaccctcgtggcccagcagatgggagtggtgggggagaagttggacatcgacttcgtcatctccacgggcgacaacatctacgacgacggcatcgccaacaccagcgaccccctcttcaaggagtgcttcaccaacatctacaccgcgcagagcctccagacgccttggtacatcgtcctcggcaaccatgactacacgggcaacgcgctggcgcagcaagaccccgccatccgcgaagtcgacagccggtacctcaacctcgccaagtccttcatcgtcaactcaggaatcgcggatttcttcctcctggacacgtcgccgttctacctcaagtactggaacagcagcaagtacgactggagagacgtcgctcctcgcgacacctacatccaaaacctcctcgatgatttggacgacgccctggtccaatccgaggcgccctggaagattgtcgtcggccaccaccccatcagcagcggctgcgagcatgggaacaccactgagctccaggagctcctcagaccaatcctcgaggcgcgcggggtcgacatgtacgtgaacggccacgaccactgcttgcagcacatcagcagcagaaacagcccggttcagttcatgacgagcggcggcgggtccaaggcatgggcgggcaagttcaagaccacgtccgacaagatagagttcatctacgacggccagggattcatgtccatgcaactgagcagcacggaggcgcacctcgtcttctacgacgtcgccggcaatgtcctgcacagctatgacagcaccaaaaacgaagaagaggacgatggctggccagctggacaacaagcagctgtgaggggatcaattgatcgaggcaacttataatatgtgtgtgggccggaagcaattcgtttgtgtatcttatgatgtgtgtatgtgctatgtttaaaatgtgcattattgtgtgcacaagagaggattattgttgtatcttctagctagttgggtcacttgaggggctcagggctagaaaccaatttaaaatcacaatcattggatagtagctggactctcataatataaactatacatataatatatagttactagcc

SEQ ID NO: 22171 - protein, 348 aa, Zea mays subsp. mays
  misc_feature (1)..(348): Ceres Seq. ID no. 12407835
MARVASLLLTVIVAAAASLLLLLAPSAAELTRVEHPPKNEGSLAILAVGDWGRRGQFNQTLVAQQMGVVGEKLDIDFVISTGDNIYDDGIANTSDPLFKECFTNIYTAQSLQTPWYIVLGNHDYTGNALAQQDPAIREVDSRYLNLAKSFIVNSGIADFFLLDTSPFYLKYWNSSKYDWRDVAPRDTYIQNLLDDLDDALVQSEAPWKIVVGHHPISSGCEHGNTTELQELLRPILEARGVDMYVNGHDHCLQHISSRNSPVQFMTSGGGSKAWAGKFKTTSDKIEFIYDGQGFMSMQLSSTEAHLVFYDVAGNVLHSYDSTKNEEEDDGWPAGQQAAVRGSIDRGNL

SEQ ID NO: 22172 - protein, 283 aa, Zea mays subsp. mays
  misc_feature (1)..(283): Ceres Seq. ID no. 12407836
MGVVGEKLDIDFVISTGDNIYDDGIANTSDPLFKECFTNIYTAQSLQTPWYIVLGNHDYTGNALAQQDPAIREVDSRYLNLAKSFIVNSGIADFFLLDTSPFYLKYWNSSKYDWRDVAPRDTYIQNLLDDLDDALVQSEAPWKIVVGHHPISSGCEHGNTTELQELLRPILEARGVDMYVNGHDHCLQHISSRNSPVQFMTSGGGSKAWAGKFKTTSDKIEFIYDGQGFMSMQLSSTEAHLVFYDVAGNVLHSYDSTKNEEEDDGWPAGQQAAVRGSIDRGNL

SEQ ID NO: 22173 - DNA, 1361 bp, Zea mays subsp. mays
  misc_feature (1)..(1361): Ceres Seq. ID no. 12407837
gaaaaaaccgccgccatcgtgtgatggccgccacgcccgacgagcggaagcaggagaggccgatgaggcccgcgacgtcgccggcgagcgtggtggcggacttcgccatgggaggcgcggccgccgtggtggcaaagacgggggccgcgccggtcgagcgcgtcaagctgctgctccagaaccaggccgagatgctgcgccgcggcaccctcacgcgcccctacaggggcatcgccgacgccttcacccgcatcctccgcgaggagggccccgccgcgctttggcgtggcaaccaggccaacgtcatccgctacttccccacccaggcttttaactttgcattcaggggctatttcaaaagcttttttggctatgacagggagaaagacggaaagtggaagtggttagctggaaatgtagcctctggcagtgctgccggagctacaacatcattgctgctataccatctagattatgcaagaacaaggctagctactgatgcaattgaatcacggggaaccaagcgccagttcagggggttgctggatgtttacaagaagacacttacaaccgatggcatgtctggactataccgaggtttcagtgtgtctattacgggaatctccttataccggggtttatattttggtatctatgatagcatgaagcctctagttctagtaggcccattggaggggaatttcttcgccagttttgtgttgggctggacaataactacgttctctggggcttgtgcctatccattcgacacggtccgtcgtagaatgatgttaacttcaggagaaccatttaaatacaagaacggtttccatgcagtaaaactgatagtttcaaccgaagggttcttcacattattcagaggtgttggtgcaaatattctctcagggctggcaggggctggagttctttctgggtatgatcaactccaacggttggcaagccggcatgatcaaaattttgagcacaatatgaaaggggcattgaaatgatgtgcatatgatatgaatagattcagatccttggttgaagtccagatcattcaaatgggatgctcaagcaagaactcctgagcctgaagaacttcgcaaaaaatattgggggaagaaaaaggaaaagttttcctggagatgaatttcacaaggagatggaatcattgcaacaaaagataactcttgtaaacagagagtgctgaatatatattttaatgtgtagatctaatccttcaagtatgagcacatgtacatgttggtgtttcttcgattgttagaggccaatagtatcctatcaatgtgaaatgtaaatccaaatccttcagtaggtcatgaccaagctatttttct

SEQ ID NO: 22174 - protein, 335 aa, Zea mays subsp. mays
  misc_feature (1)..(335): Ceres Seq. ID no. 12407838
KNRRHRVMAATPDERKQERPMRPATSPASVVADFAMGGAAAVVAKTGAAPVERVKLLLQNQAEMLRRGTLTRPYRGIADAFTRILREEGPAALWRGNQANVIRYFPTQAFNFAFRGYFKSFFGYDREKDGKWKWLAGNVASGSAAGATTSLLLYHLDYARTRLATDAIESRGTKRQFRGLLDVYKKTLTTDGMSGLYRGFSVSITGISLYRGLYFGIYDSMKPLVLVGPLEGNFFASFVLGWTITTFSGACAYPFDTVRRRMMLTSGEPFKYKNGFHAVKLIVSTEGFFTLFRGVGANILSGLAGAGVLSGYDQLQRLASRHDQNFEHNMKGALK

SEQ ID NO: 22175 - protein, 328 aa, Zea mays subsp. mays
  misc_feature (1)..(328): Ceres Seq. ID no. 12407839
MAATPDERKQERPMRPATSPASVVADFAMGGAAAVVAKTGAAPVERVKLLLQNQAEMLRRGTLTRPYRGIADAFTRILREEGPAALWRGNQANVIRYFPTQAFNFAFRGYFKSFFGYDREKDGKWKWLAGNVASGSAAGATTSLLLYHLDYARTRLATDAIESRGTKRQFRGLLDVYKKTLTTDGMSGLYRGFSVSITGISLYRGLYFGIYDSMKPLVLVGPLEGNFFASFVLGWTITTFSGACAYPFDTVRRRMMLTSGEPFKYKNGFHAVKLIVSTEGFFTLFRGVGANILSGLAGAGVLSGYDQLQRLASRHDQNFEHNMKGALK

SEQ ID NO: 22176 - protein, 315 aa, Zea mays subsp. mays
  misc_feature (1)..(315): Ceres Seq. ID no. 12407840
MRPATSPASVVADFAMGGAAAVVAKTGAAPVERVKLLLQNQAEMLRRGTLTRPYRGIADAFTRILREEGPAALWRGNQANVIRYFPTQAFNFAFRGYFKSFFGYDREKDGKWKWLAGNVASGSAAGATTSLLLYHLDYARTRLATDAIESRGTKRQFRGLLDVYKKTLTTDGMSGLYRGFSVSITGISLYRGLYFGIYDSMKPLVLVGPLEGNFFASFVLGWTITTFSGACAYPFDTVRRRMMLTSGEPFKYKNGFHAVKLIVSTEGFFTLFRGVGANILSGLAGAGVLSGYDQLQRLASRHDQNFEHNMKGALK

SEQ ID NO: 22177 - DNA, 1529 bp, Zea mays subsp. mays
  misc_feature (1)..(1529): Ceres Seq. ID no. 12407871
accacacgaattgcacatctccacagctcacgattccaacactagctacatatatatgtagctttctaggctactatatacactcaccaccaagtgtgaagtgtgtatatatagtgacagctactgcaatatatacatacgcgtcacctatatattagccaagctagctatatgagcttggttgcggcgccaatggcgatcgtcgacgtggccaacgcccagctgcagcaagcagcagcagcagctgccaagaaagacgaggacggccatgagcagcaggagtcgtcctacgactacggcgcgctgatgaaaggcgtgaggcacctgtcggacagcggcattaccaggctgcccgacaggtacgtcctgcccgcgtccgaccgccccggcgtccttgccgtctcgtcgtccgtgggcgggcagcggcagggtcaagctccctgtcgtcaacctcgccggcctccgcgacccctgccagcgcgccgccgtgctggccacgctcgacgccgcgtgccgggagtacggcttctttcaggtggtaaaccacgggttcgggagcgacgtgagcggcgggatgctggacgtggcgcagcgcttcttcgagctgccgctggccgagcgagcgcggcacatgtcggcggacgtgcgggcgccggtgcgctacggcaccagcttcaaccaggccaaggacgacgtgctctgctggcgcgacttcctcaagctcgtctgccagccgctgcaggcggtgctcccgtactggccccagcagccggcggacctcagggacgtggccaccaggtacgccacggcgagccaccggctgttcatggaggtcatggaggcggcgctggaggccctgggcatccccacggccggcggcgtgctcggggagctggcagcgtcgtcgtcgcacatgatgacggtgaactgctacccggcttgcccgcagcctgagctcacgctggggatgccctcgcactcggactacggcctcttcacgttcgtcctgcaggaccacgtcgagggcctccaggtcatgcacgacggccgctggctcaccatcgaccccatcccgggatcgttcgtcgtcaacgtcggcgaccacctagagatctacagcaacgggcggtacaagagcgcgctgcaccgggtgcacgtgaactccacgcggccgcgcatctcggtggcgtcgttccacagcctgccggcggagcgagtgatcgggccggcgccggagctggtggacgacgaggccggcaacccgcggcggtacatggacaccgacttcgctaccttcctcgcctacctcgcatccgcggacggcaagaacaagaccttcctccagtcaaggaagctgcctgctgctgctcctccatgcctctagctaactagatagctgcttattaatctgacagaataaaattaatcagttcagcgcacaattccacaagcgaaaacaaacctggatttgttttaattagctctgcccttcattattacattcaagctagctcttggtcaacgcatgc

SEQ ID NO: 22178 - protein, 269 aa, Zea mays subsp. mays
  misc_feature (1)..(269): Ceres Seq. ID no. 12407872
MLDVAQRFFELPLAERARHMSADVRAPVRYGTSFNQAKDDVLCWRDFLKLVCQPLQAVLPYWPQQPADLRDVATRYATASHRLFMEVMEAALEALGIPTAGGVLGELAASSSHMMTVNCYPACPQPELTLGMPSHSDYGLFTFVLQDHVEGLQVMHDGRWLTIDPIPGSFVVNVGDHLEIYSNGRYKSALHRVHVNSTRPRISVASFHSLPAERVIGPAPELVDDEAGNPRRYMDTDFATFLAYLASADGKNKTFLQSRKLPAAAPPCL

SEQ ID NO: 22179 - protein, 260 aa, Zea mays subsp. mays
  misc_feature (1)..(260): Ceres Seq. ID no. 12407873
MSLVAAPMAIVDVANAQLQQAAAAAAKKDEDGHEQQESSYDYGALMKGVRHLSDSGITRLPDRYVLPASDRPGVLAVSSSVGGQRQGQAPCRQPRRPPRPLPARRRAGHARRRVPGVRLLSGGKPRVRERRERRDAGRGAALLRAAAGRASAAHVGGRAGAGALRHQLQPGQGRRALLARLPQARLPAAAGGAPVLAPAAGGPQGRGHQVRHGEPPAVHGGHGGGAGGPGHPHGRRRARGAGSVVVAHDDGELLPGLPAA

SEQ ID NO: 22180 - protein, 253 aa, Zea mays subsp. mays
  misc_feature (1)..(253): Ceres Seq. ID no. 12407874
MAIVDVANAQLQQAAAAAAKKDEDGHEQQESSYDYGALMKGVRHLSDSGITRLPDRYVLPASDRPGVLAVSSSVGGQRQGQAPCRQPRRPPRPLPARRRAGHARRRVPGVRLLSGGKPRVRERRERRDAGRGAALLRAAAGRASAAHVGGRAGAGALRHQLQPGQGRRALLARLPQARLPAAAGGAPVLAPAAGGPQGRGHQVRHGEPPAVHGGHGGGAGGPGHPHGRRRARGAGSVVVAHDDGELLPGLPAA

SEQ ID NO: 22181 - DNA, 1377 bp, Zea mays subsp. mays
  misc_feature (1)..(1377): Ceres Seq. ID no. 12407875
aaaacccaatccacttcgcaagccccgccgcacacttcttccccctgcctccaaaaactcagaaaaccctgaccgccggcggcggccatgcttctccaccaccgcctcctccctcgcctacttcttgttccttccacacatacctccacactcctctgcccctcccgtttgccgcgccgcctctccctctcgccgcgcttctacgcgctgccccacctcgcggcaccccagaccgtcgaccactccgacgatgagggggcaccccagggggaggggcagatcaagctcccgctcgaccatctcttcgtgccgcccggggcaacaatggatgcgggggaccaggaggccgtgagcgcacgggtgcttaagggctccaacatcgtgctgggcccatacgcgcgcggcgacgcacaggtggtcaacgcagattttgtaaagagcagcgtgcgtcccgatgactgccctcgggacggccttccggagtttgcactcgttggccggtccaacgtcggcaaatcgtcgctgctcaactcgcttgtccgccgcaagcgccttgcccttacctccaagaagcctgggaagacccaatgtatcaatcatttcaaagtaaatgacagctggtatcttgttgacttgcctggttatggatatgcttctgcaccacaggaagctcgtaccaattgggatgaatttactagaaattactttctcagtcgggagaatttggtatctgtttttcttcttatagatgcaagtatacctgccaagaagattgatcttgactatgctagttggcttggccaaaacaaggttcccatgacccttgtgttcacaaaatgtgacaagcgcaagaagaagaagaacggcggcaggaaacctgaagaaaacgtggaaactttccagggcctaatccgcgaatacttcgaggccgcgcctccttggatcatgacgagcagcgtgaccaaccagggccgcgatgagatactcctgcacatgtctcagcttaggaattattggctcaagcattgagatgcaatgataaccaaaccggagcgaagcaactagaacagcatgcaaagcactgtagtccattgacgcatggacattcagcagtcggcgcctccgcaatcaggcgttcgcaccaactagtccagccttttgagctgttgactgtccaatatggcccctgtacatgattacccaatcaacactccggggatgcggacaaggtgctaaaatcagctgatcatggttttttttctttatttctattgtgtacacgtacaatcccaaccaacgttttccccttgttcccatctgattataggcttgtgtatactgtggggttaaatgattaataaattctggtgttagctg

SEQ ID NO: 22182 - protein, 313 aa, Zea mays subsp. mays
  misc_feature (1)..(313): Ceres Seq. ID no. 12407876
MLLHHRLLPRLLLVPSTHTSTLLCPSRLPRRLSLSPRFYALPHLAAPQTVDHSDDEGAPQGEGQIKLPLDHLFVPPGATMDAGDQEAVSARVLKGSNIVLGPYARGDAQVVNADFVKSSVRPDDCPRDGLPEFALVGRSNVGKSSLLNSLVRRKRLALTSKKPGKTQCINHFKVNDSWYLVDLPGYGYASAPQEARTNWDEFTRNYFLSRENLVSVFLLIDASIPAKKIDLDYASWLGQNKVPMTLVFTKCDKRKKKKNGGRKPEENVETFQGLIREYFEAAPPWIMTSSVTNQGRDEILLHMSQLRNYWLKH

SEQ ID NO: 22183 - protein, 234 aa, Zea mays subsp. mays
  misc_feature (1)..(234): Ceres Seq. ID no. 12407877
MDAGDQEAVSARVLKGSNIVLGPYARGDAQVVNADFVKSSVRPDDCPRDGLPEFALVGRSNVGKSSLLNSLVRRKRLALTSKKPGKTQCINHFKVNDSWYLVDLPGYGYASAPQEARTNWDEFTRNYFLSRENLVSVFLLIDASIPAKKIDLDYASWLGQNKVPMTLVFTKCDKRKKKKNGGRKPEENVETFQGLIREYFEAAPPWIMTSSVTNQGRDEILLHMSQLRNYWLKH

SEQ ID NO: 22184 - DNA, 991 bp, Zea mays subsp. mays
  misc_feature (1)..(991): Ceres Seq. ID no. 12407888
gtgtccactgttcagtcggctcgagtaacaacagcaatagaatgggtggcggcggcgggagcccggcagcgagcggcgggagcagcagcagcgaggatgacggagacgccgcgtggaaggcagccattgactccatcgcgtccgttgggttcagcgtcccttcgtccaacggcgtggcgaaggcagcctctagcggcagccgcgaggtgaacaaccgcgctgatctggaagagccgcgtgaggggaagccaaagagtcctgggcttaagctgtaccaggtcaaggtaagaaacatgttggatgatatgttagagaaaaatctcgaaatagtcaaagctccgtgcttgaacttagtagaccccatggaaacaggaggaggaataaagttatttaaaaaagcaccacctggtattagcatggattctacggataaatggcacgtgcaactcaagcgaccaagaatcgtgcctggggtagaggtcgatgagaaatcaaagaagttccggcatatgctccggtctgttgttgtcgacggcagtgacatagttgtttctgcaaagaaagcatctgagagatcattggctagattggaagtgagagaagctgcagcaaaggcaaaagccaagagggaggaagaaagggtgcaggaactaaagaaggttaggggagagaaatggcttccttctgttgctagacaaatgaaggaggaaaaggcttgggagctgcgaaggcagagttccttttctaaggtcttaatcaattgtaataaaacgaaatacagtcaggatttttttgtgatttttacttgatctgtgagcgaacactgggtctttcaccttgtcatccaatgggttctgctccttggtgaaatctcccaccagccagtaaagaactgggttgttttcataatatatgcttttgctatgcagcctctgctgttgtaaggaattgcattgttatcttatatcactgtatggtgatgtttaacttt

SEQ ID NO: 22185 - protein, 268 aa, Zea mays subsp. mays
  misc_feature (1)..(268): Ceres Seq. ID no. 12407889
VHCSVGSSNNSNRMGGGGGSPAASGGSSSSEDDGDAAWKAAIDSIASVGFSVPSSNGVAKAASSGSREVNNRADLEEPREGKPKSPGLKLYQVKVRNMLDDMLEKNLEIVKAPCLNLVDPMETGGGIKLFKKAPPGISMDSTDKWHVQLKRPRIVPGVEVDEKSKKFRHMLRSVVVDGSDIVVSAKKASERSLARLEVREAAAKAKAKREEERVQELKKVRGEKWLPSVARQMKEEKAWELRRQSSFSKVLINCNKTKYSQDFFVIFT

SEQ ID NO: 22186 - protein, 255 aa, Zea mays subsp. mays
  misc_feature (1)..(255): Ceres Seq. ID no. 12407890
MGGGGGSPAASGGSSSSEDDGDAAWKAAIDSIASVGFSVPSSNGVAKAASSGSREVNNRADLEEPREGKPKSPGLKLYQVKVRNMLDDMLEKNLEIVKAPCLNLVDPMETGGGIKLFKKAPPGISMDSTDKWHVQLKRPRIVPGVEVDEKSKKFRHMLRSVVVDGSDIVVSAKKASERSLARLEVREAAAKAKAKREEERVQELKKVRGEKWLPSVARQMKEEKAWELRRQSSFSKVLINCNKTKYSQDFFVIFT

SEQ ID NO: 22187 - protein, 171 aa, Zea mays subsp. mays
  misc_feature (1)..(171): Ceres Seq. ID no. 12407891
MLDDMLEKNLEIVKAPCLNLVDPMETGGGIKLFKKAPPGISMDSTDKWHVQLKRPRIVPGVEVDEKSKKFRHMLRSVVVDGSDIVVSAKKASERSLARLEVREAAAKAKAKREEERVQELKKVRGEKWLPSVARQMKEEKAWELRRQSSFSKVLINCNKTKYSQDFFVIFT

SEQ ID NO: 22188 - DNA, 1422 bp, Zea mays subsp. mays
  misc_feature (1)..(1422): Ceres Seq. ID no. 12407902
aacccattcttcggcggttcggcccggcctgcaccctgcagccaccaagcaaacccagtgctctgctttctgcattcccccccgccgccactccgtcgggcttgatgagcctctgctccaagctcttcgcgttgctccgcaagtcccgcgccctcgccaccagcaccgccgccgcagccgccgcgacaacctccgcgacggcgtcggccaacgggatggaggaggctgtcgccgcggcgggcccgctgcgcacgcgcgtctgcatcatcggcagcggcccagccgcgcacacggcggccgtctacgccgcgcgcgccgagctcaagcccgtcctcttcgagggctggctcgccaacgacatcgccgcgggtggacagctcaccaccaccaccgacgtcgagaacttcccgggcttccccgacggcatcctcggcgccgacctcatggatcgctgccgcgcgcagtcgctcaggttcgggaccaagatcctcaccgagaccgtcaccaccgtggacttctccgcccgccccttccgtgtcgcctccgacgacaccgttgtgcacgccgactccgtcgtcgtcgccacgggcgccgtcgcgcgcaggctgcacttcgccggctccgacgccttctggaaccggggcatctccgcctgcgccgtctgcgacggggctgcgcctatcttccggaacaagcccatcgccgtcgtcggaggcggggactccgccatggaggaggctaacttcctcaccaagtacggctcgcaagtttacatcatccaccgccgcagcgacttccgggcgtccaagatcatgcaggcgcgcacgctctccaaccccaagatcaaggtcgtctggaactccgaggtcgtcgaggcctacggcggtgcggatggcggcccgctagccggcgtcaaggtcaaggacgtcgtcaccggcgaggtctctgatctccaggtggccgggctcttctttgccatcggtcacgagccggcgacaaaatttcttggagggcagctcgagctcgactctgatgggtatgtggtgaccaagcccggttccacgcacaccagtgtgcagggggtctttgcagctggggatgtccaggacaagaagtaccgccaggccattactgcagctggatcaggttgcatggctgctctggatgcagagcactacctgcaggaggttggagcacaggaagggaagaccgattgactatgtctgggccaagctgctcttgggccaaggaaaacttctccgaaagccgctctctagtggtgtaaacagcacattattatttggttttaggcctcaaattacgttacattggaaattgatttatatgagcgtgcgcaagcttgtatacattattcgcattgtttattactcttagagtcttagtcattaatcacactttgct

SEQ ID NO: 22189 - protein, 404 aa, Zea mays subsp. mays
  misc_feature (1)..(404): Ceres Seq. ID no. 12407903
PILRRFGPACTLQPPSKPSALLSAFPPAATPSGLMSLCSKLFALLRKSRALATSTAAAAAATTSATASANGMEEAVAAAGPLRTRVCIIGSGPAAHTAAVYAARAELKPVLFEGWLANDIAAGGQLTTTTDVENFPGFPDGILGADLMDRCRAQSLRFGTKILTETVTTVDFSARPFRVASDDTVVHADSVVVATGAVARRLHFAGSDAFWNRGISACAVCDGAAPIFRNKPIAVVGGGDSAMEEANFLTKYGSQVYIIHRRSDFRASKIMQARTLSNPKIKVVWNSEVVEAYGGADGGPLAGVKVKDVVTGEVSDLQVAGLFFAIGHEPATKFLGGQLELDSDGYVVTKPGSTHTSVQGVFAAGDVQDKKYRQAITAAGSGCMAALDAEHYLQEVGAQEGKTD

SEQ ID NO: 22190 - protein, 370 aa, Zea mays subsp. mays
  misc_feature (1)..(370): Ceres Seq. ID no. 12407904
MSLCSKLFALLRKSRALATSTAAAAAATTSATASANGMEEAVAAAGPLRTRVCIIGSGPAAHTAAVYAARAELKPVLFEGWLANDIAAGGQLTTTTDVENFPGFPDGILGADLMDRCRAQSLRFGTKILTETVTTVDFSARPFRVASDDTVVHADSVVVATGAVARRLHFAGSDAFWNRGISACAVCDGAAPIFRNKPIAVVGGGDSAMEEANFLTKYGSQVYIIHRRSDFRASKIMQARTLSNPKIKVVWNSEVVEAYGGADGGPLAGVKVKDVVTGEVSDLQVAGLFFAIGHEPATKFLGGQLELDSDGYVVTKPGSTHTSVQGVFAAGDVQDKKYRQAITAAGSGCMAALDAEHYLQEVGAQEGKTD

SEQ ID NO: 22191 - protein, 333 aa, Zea mays subsp. mays
  misc_feature (1)..(333): Ceres Seq. ID no. 12407905
MEEAVAAAGPLRTRVCIIGSGPAAHTAAVYAARAELKPVLFEGWLANDIAAGGQLTTTTDVENFPGFPDGILGADLMDRCRAQSLRFGTKILTETVTTVDFSARPFRVASDDTVVHADSVVVATGAVARRLHFAGSDAFWNRGISACAVCDGAAPIFRNKPIAVVGGGDSAMEEANFLTKYGSQVYIIHRRSDFRASKIMQARTLSNPKIKVVWNSEVVEAYGGADGGPLAGVKVKDVVTGEVSDLQVAGLFFAIGHEPATKFLGGQLELDSDGYVVTKPGSTHTSVQGVFAAGDVQDKKYRQAITAAGSGCMAALDAEHYLQEVGAQEGKTD

SEQ ID NO: 22192 - DNA, 1489 bp, Zea mays subsp. mays
  misc_feature (1)..(1489): Ceres Seq. ID no. 12407941
gaaaaatggcacaagcacacagctcatcagttcttcttcgtcgtcttggctagctgcctagctagctagctagttcctcactcctctccgagaaccccctttttcatctctctctctcgcctagctcctttcgcgatgttatcttctctgctggcctcacaactcgagagagactcgtgaaaagaatccagatatataaagagatcgagggcagctagcttaattattagcatgtcgatgagcttcttgagcatggtggaggcggagctgccgccgggggttccggttccacccgagggacgacgagctcatctgcgactacctcgcgcccaagctcggcgccaagcccggcttctccggctgccgcccgcccatggtcgacgtcgacctcaacaaggtcgagccatgggacctccccgtggcggcgtcggtggggccgcgggagtggtacttcttcagcctcaaggaccgcaagtacgcgacggggcagcggacgaaccgggccacggtgtccgggtactggaaggcgacggggaaggaccgacccgtggtggcggcgcggcgaggcgcgctggtggggatgcgcaagacgctcgtgttctaccaggggagggcgcccaagggcaggaagacggagtgggtgatgcacgagtacaggatggagccagctgctcctcttcttgatcaccaaccctcctcatccaactccaaggatgaagattgggtgctgtgcagagtcatctgcaagaagaaactggcagcaggaggccgcgcaggagggggaagctcaaggagcctggtcgccagcaacggcggccgcgagaccgcgccagccaccccgccgccgccgccgctgccacctcgcatggacacggacgccaccctagcacagctccaggccgccatgcacgccaccgccggcgcgctcgagcaggtgccctgcttctccagcttcaataacaacactactgccagctctagagctgctgccgcagcagcagcagcagcgcagccatgctacctgcccagcatggccacaggcggcagccacggcacgacgagctactacctggaccacgcgatgctgccgcctgagctaggtggctgcttcgatcctctccacggcgacaagagctgctcaaggcggtgctgggccagctcggcggcgacgcggtggcgccgggcctgcacctgcagcacgagatggccgccggcgctgtcgtcgcttcgtccgcttggatgaatcacttctaggggacattagttcagcgaacctaagtatgtgattggttgcgtatattatgggaaatacatacatacatatatacataattgtgtggtgaaacatttgtgtgtgaggcaaggagtagagcatctgagcatgcgtcattttttctgttgctgccgatcgatttggacgagaaggccatgaggcaaggagtaaactctgtaatataatggctgctcaagtgtgtgtacattcagatgc

SEQ ID NO: 22193 - protein, 289 aa, Zea mays subsp. mays
  misc_feature (1)..(289): Ceres Seq. ID no. 12407942
MVDVDLNKVEPWDLPVAASVGPREWYFFSLKDRKYATGQRTNRATVSGYWKATGKDRPVVAARRGALVGMRKTLVFYQGRAPKGRKTEWVMHEYRMEPAAPLLDHQPSSSNSKDEDWVLCRVICKKKLAAGGRAGGGSSRSLVASNGGRETAPATPPPPPLPPRMDTDATLAQLQAAMHATAGALEQVPCFSSFNNNTTASSRAAAAAAAAAQPCYLPSMATGGSHGTTSYYLDHAMLPPELGGCFDPLHGDKSCSRRCWASSAATRWRRACTCSTRWPPALSSLRPLG

SEQ ID NO: 22194 - protein, 220 aa, Zea mays subsp. mays
  misc_feature (1)..(220): Ceres Seq. ID no. 12407943
MRKTLVFYQGRAPKGRKTEWVMHEYRMEPAAPLLDHQPSSSNSKDEDWVLCRVICKKKLAAGGRAGGGSSRSLVASNGGRETAPATPPPPPLPPRMDTDATLAQLQAAMHATAGALEQVPCFSSFNNNTTASSRAAAAAAAAAQPCYLPSMATGGSHGTTSYYLDHAMLPPELGGCFDPLHGDKSCSRRCWASSAATRWRRACTCSTRWPPALSSLRPLG

SEQ ID NO: 22195 - protein, 199 aa, Zea mays subsp. mays
  misc_feature (1)..(199): Ceres Seq. ID no. 12407944
MHEYRMEPAAPLLDHQPSSSNSKDEDWVLCRVICKKKLAAGGRAGGGSSRSLVASNGGRETAPATPPPPPLPPRMDTDATLAQLQAAMHATAGALEQVPCFSSFNNNTTASSRAAAAAAAAAQPCYLPSMATGGSHGTTSYYLDHAMLPPELGGCFDPLHGDKSCSRRCWASSAATRWRRACTCSTRWPPALSSLRPLG

SEQ ID NO: 22196 - DNA, 1024 bp, Zea mays subsp. mays
  misc_feature (1)..(1024): Ceres Seq. ID no. 12407960
gtccatccatccatccaggtagtccgagccagcgaaccaactattcgtttgcttttcgtcttcgtcctctctttgcccagttgtcggtcgcccgcgccgtcgtctccgctccgccggccggcctgcgaaaccctagcgaggcgagcgagagagaaactagcggccatgttcggctacaggaaggctgacccggacctcgaggccggcgggtcctcgctgctgtacccgggaatgacggagaagccccgagcttcggtgggcgttcgtccgcaaggatctacgtcatcctagccgtccagctcgccatgacggccgcggtctccgccttcgtcgtcaaggtgcccgccgtctccaacttcttcgtctcctccaacgccggggtcgcactctacatcttcctcatcatcctgcctttcctcgtgctgtgccctctgcgctactaccaccagaagcatccggtcaatctgctgctgctcggcctcttcaccgtcgccatcagctttgccgtcggcatgacatgcgctttcactagcggaaaaatcattttggaggctgccattcttacagcagtggtggtgatcagcttaactgcgtacactttctgggctgcaaagaggggccatgacttcaacttcctcggtcccttcctatttgctgctatcatggtgctcatggtgttttcactaatccagatctttttcccgctgggtaagatatctgtgatgatatacggtgggttggcatcacttatcttctgtggatacatcatctatgacacggacaatgtcatcaagcgctacacctacgatgaatatatatgggctgctgtttcactctacctcgacgtcatcaacctgttcctgtctctgctgcagctgctgagggcagccgatagctgagctcgtcaagctttcacttggatcttgttctcacatacatttgtgtatatcacaaactctgtaatggtcatggatactccaatttataactatactttgtcggtggctcggtgttaccttggtcc

SEQ ID NO: 22197 - protein, 197 aa, Zea mays subsp. mays
  misc_feature (1)..(197): Ceres Seq. ID no. 12407961
MTAAVSAFVVKVPAVSNFFVSSNAGVALYIFLIILPFLVLCPLRYYHQKHPVNLLLLGLFTVAISFAVGMTCAFTSGKIILEAAILTAVVVISLTAYTFWAAKRGHDFNFLGPFLFAAIMVLMVFSLIQIFFPLGKISVMIYGGLASLIFCGYIIYDTDNVIKRYTYDEYIWAAVSLYLDVINLFLSLLQLLRAADS

SEQ ID NO: 22198 - protein, 128 aa, Zea mays subsp. mays
  misc_feature (1)..(128): Ceres Seq. ID no. 12407962
MTCAFTSGKIILEAAILTAVVVISLTAYTFWAAKRGHDFNFLGPFLFAAIMVLMVFSLIQIFFPLGKISVMIYGGLASLIFCGYIIYDTDNVIKRYTYDEYIWAAVSLYLDVINLFLSLLQLLRAADS

SEQ ID NO: 22199 - DNA, 1622 bp, Zea mays subsp. mays
  misc_feature (1)..(1622): Ceres Seq. ID no. 12407965
aaaacgcacccccaagctaccaacgcacgcaaagcacggacgggcgcatacagctttccctttcgcgagtgcgtgccccttctcttctctagttctcttctccgtcgcgtcagagatcagggagagaccagagcaaacaacaaccaccgcttgtttcatcaagaatcgtggaggagaaccgaaaggtgtagtagccttttccggtagggcatctgctagagccggccggttgaagcaggggagcgagaggaggagggcagccgagcaggagcatcgcagtggtggttaagcagcagcaacgacgacgacgacgacgctgagaggtttccccgttcccgacggcacgtccaccgaggcggcgccatcgcgatgggtcctctggcgccgctgaggtgtaacccgccgccgccgttctccaagtcgccggggtccctgctgctgctgtccaagtcgctcaccctctactgctgagccgagccccctcctcgatcggttccatgggcgccgtggcctcgtcggcgggtggggcccggggaggcgatggcacggtgctgggcgacctgccggagaactgcgtcgcggaggtgctgctcaggctggacccgctggagatctgccggatggcgcggctcagccgcacgttccgtggcgccgcgtccggggacggtgtctgggagtccaagctaccgaggaactacgcgcgcctcctcgccgttgctgcggccggcgatggggaaggtgggcaggccgccgcgtcggcgccgggggcagagctgctgcccaagaaggaactgtacgcgcggctttgccgtcggaaccgtttcgacggcggcaaaaaggagttctggctggacaagggcggtggaggtctatgtatgtcaatttcttcaagggcgctttcaataacaggcattgatgataggaggtattggaacttcattcccagtgatgaatcaagattccgcacggttgcgtacctctcgcaaatctggtggtttgaagtgagaggggaggttgaattcttcttcccagaaggcacgtacagcctattctaccgcattcatctcggccgaccattcaagcgtcttggccggcgagtctacagctcggagcacgtccacggctgggacatgaagccggtgcgtttccagatgtcgacctccgacggacagcatgttcagtccaagtgctacttgagcgatcccggtatctggatcaaccaccatgtcggggacttcgtcgtgaaggactcgagcaggccagtgaacatcaggttcgcgatgattcagatagactgcacgcacacgaaaggcggcctctgcgtggattcggtcgtggtgaaaccgcagcacctcgcgcagaaaaaagcgccctggacttacgtctagggaggagggatatgatccatagtttccttttggattgttctactaccagatgtgcgttttgtttacagaagtgcggttttttacatttgcacttatacgcgtattttgcagtcatgtaatgtaattgaaggggtaagtgatttttttagttcctcttgtcccccctaggaacatgttggacctctgtaaattgttcgtttgaactttgaaatgtacatcggctgtgttctgcct

SEQ ID NO: 22200 - protein, 296 aa, Zea mays subsp. mays
  misc_feature (1)..(296): Ceres Seq. ID no. 12407966
MGAVASSAGGARGGDGTVLGDLPENCVAEVLLRLDPLEICRMARLSRTFRGAASGDGVWESKLPRNYARLLAVAAAGDGEGGQAAASAPGAELLPKKELYARLCRRNRFDGGKKEFWLDKGGGGLCMSISSRALSITGIDDRRYWNFIPSDESRFRTVAYLSQIWWFEVRGEVEFFFPEGTYSLFYRIHLGRPFKRLGRRVYSSEHVHGWDMKPVRFQMSTSDGQHVQSKCYLSDPGIWINHHVGDFVVKDSSRPVNIRFAMIQIDCTHTKGGLCVDSVVVKPQHLAQKKAPWTYV

SEQ ID NO: 22201 - protein, 255 aa, Zea mays subsp. mays
  misc_feature (1)..(255): Ceres Seq. ID no. 12407967
MARLSRTFRGAASGDGVWESKLPRNYARLLAVAAAGDGEGGQAAASAPGAELLPKKELYARLCRRNRFDGGKKEFWLDKGGGGLCMSISSRALSITGIDDRRYWNFIPSDESRFRTVAYLSQIWWFEVRGEVEFFFPEGTYSLFYRIHLGRPFKRLGRRVYSSEHVHGWDMKPVRFQMSTSDGQHVQSKCYLSDPGIWINHHVGDFVVKDSSRPVNIRFAMIQIDCTHTKGGLCVDSVVVKPQHLAQKKAPWTYV

SEQ ID NO: 22202 - protein, 170 aa, Zea mays subsp. mays
  misc_feature (1)..(170): Ceres Seq. ID no. 12407968
MSISSRALSITGIDDRRYWNFIPSDESRFRTVAYLSQIWWFEVRGEVEFFFPEGTYSLFYRIHLGRPFKRLGRRVYSSEHVHGWDMKPVRFQMSTSDGQHVQSKCYLSDPGIWINHHVGDFVVKDSSRPVNIRFAMIQIDCTHTKGGLCVDSVVVKPQHLAQKKAPWTYV

SEQ ID NO: 22203 - DNA, 1626 bp, Zea mays subsp. mays
  misc_feature (1)..(1626): Ceres Seq. ID no. 12407976
ggtcgcggctgcccgccgcttttcccttcttccgttgcggcctcgctataaaaaccgtccgtccagtccgcgccgcggccgcgcacggcgaacccgaatcccgagcacaggccgccgctcgctcgctcgctgcagctacgcacgcacgcgcctgctcctccccttagcttccacaaggctcgactcggccggcggcgatggcgcggaagaagatccgggagtacgactccaagcgcctcctccgggagcacctcaagcgcctcgccggcatcgacctccagatcctctccgcgcaggtcacacagtcaacggatttcactgagcttgcaaaccaggagccgtggctctcatctatgaagttggttgtgaaacctgacatgctctttgggaaacgtgggaagagtgggcttgtggccctcaacctagatcttgcccaagttcgccaatttgtcaaggagcggttgggagttgaggtcgagatgggtggctgcaaagctccaattacaaccttcatagttgaaccatttgtgccacatgaccaagagtactacctttcgattgtatctgaaaggcttggcaacaccattagtttctcagaatgtggaggtattgagatcgaggagaactgggacaaggttaagactatctttcttcccacagagaagcaaatgacacctgacgcatgtgctccattgattgccaccctgccattggaggtccgcacaaagataggtggtttcattagagctgtattttctgttttccaagacttggatttctcatttcttgagatgaacccattcaccttggtaaatggtgaaccgtatcctctggatatgagaggagaactagatgacacagctgctttcaaaaacttcaataagtggggcaatattgtgtttcccctaccatttggaagagttctcagtccctccgaaagttttatccatgaactggatgagaagacaagtgcttctctgaaattcacggtactgaacccaaaaggacgcatctggacaatggttgcaggtggtggtgctagtgtcatatacgcagacactgttggtgatttgggatatgcttcggagctaggaaattatgcagagtacagtggagctcccaaggaggaggaggttctgcagtatgctagagtgcttttggattgcgctacctctgatcctgatggccgtaagagagcccttctaatcggaggaggaatcgctaacttcacagatgttgcttctacatttagtggcatcattcgggctttaagagagaaggagtccaaattaaaggctgcaaggatgaacatttatgtccggagaggtggtccgaactaccaaactggactcgccaaaatgcgcaccctaggcgccgaacttggcgttccaattgaggtctatggaccagaggcgaccatgactgggatctgcaaagaagccattgattgcatcatggccgcgtaaatcacaaatgtggttgttccatttgaagtcacatccgttttgtactagacgttccttgtacgtgattgctctggtaaaacagagaacgatcattgtcatgagtaaactcggcctttgtaacacagttacgcaagtaataattaagatcttggtttggtgc

SEQ ID NO: 22204 - protein, 422 aa, Zea mays subsp. mays
  misc_feature (1)..(422): Ceres Seq. ID no. 12407977
MARKKIREYDSKRLLREHLKRLAGIDLQILSAQVTQSTDFTELANQEPWLSSMKLVVKPDMLFGKRGKSGLVALNLDLAQVRQFVKERLGVEVEMGGCKAPITTFIVEPFVPHDQEYYLSIVSERLGNTISFSECGGIEIEENWDKVKTIFLPTEKQMTPDACAPLIATLPLEVRTKIGGFIRAVFSVFQDLDFSFLEMNPFTLVNGEPYPLDMRGELDDTAAFKNFNKWGNIVFPLPFGRVLSPSESFIHELDEKTSASLKFTVLNPKGRIWTMVAGGGASVIYADTVGDLGYASELGNYAEYSGAPKEEEVLQYARVLLDCATSDPDGRKRALLIGGGIANFTDVASTFSGIIRALREKESKLKAARMNIYVRRGGPNYQTGLAKMRTLGAELGVPIEVYGPEATMTGICKEAIDCIMAA

SEQ ID NO: 22205 - protein, 370 aa, Zea mays subsp. mays
  misc_feature (1)..(370): Ceres Seq. ID no. 12407978
MKLVVKPDMLFGKRGKSGLVALNLDLAQVRQFVKERLGVEVEMGGCKAPITTFIVEPFVPHDQEYYLSIVSERLGNTISFSECGGIEIEENWDKVKTIFLPTEKQMTPDACAPLIATLPLEVRTKIGGFIRAVFSVFQDLDFSFLEMNPFTLVNGEPYPLDMRGELDDTAAFKNFNKWGNIVFPLPFGRVLSPSESFIHELDEKTSASLKFTVLNPKGRIWTMVAGGGASVIYADTVGDLGYASELGNYAEYSGAPKEEEVLQYARVLLDCATSDPDGRKRALLIGGGIANFTDVASTFSGIIRALREKESKLKAARMNIYVRRGGPNYQTGLAKMRTLGAELGVPIEVYGPEATMTGICKEAIDCIMAA

SEQ ID NO: 22206 - protein, 362 aa, Zea mays subsp. mays
  misc_feature (1)..(362): Ceres Seq. ID no. 12407979
MLFGKRGKSGLVALNLDLAQVRQFVKERLGVEVEMGGCKAPITTFIVEPFVPHDQEYYLSIVSERLGNTISFSECGGIEIEENWDKVKTIFLPTEKQMTPDACAPLIATLPLEVRTKIGGFIRAVFSVFQDLDFSFLEMNPFTLVNGEPYPLDMRGELDDTAAFKNFNKWGNIVFPLPFGRVLSPSESFIHELDEKTSASLKFTVLNPKGRIWTMVAGGGASVIYADTVGDLGYASELGNYAEYSGAPKEEEVLQYARVLLDCATSDPDGRKRALLIGGGIANFTDVASTFSGIIRALREKESKLKAARMNIYVRRGGPNYQTGLAKMRTLGAELGVPIEVYGPEATMTGICKEAIDCIMAA

SEQ ID NO: 22207 - DNA, 1135 bp, Zea mays subsp. mays
  misc_feature (1)..(1135): Ceres Seq. ID no. 12408002
acgacgccgccaccacctgccccagcagcggcacgctccgacaacgtcgaccatggcggtgcgggcgcgggggctggggagtctgttccctgctagatccagtagatggccgactcatcgaggccctccgtgaacatcatctgcgccggtcgtctgctcggctgcagtggattaggtgagcggggttccggtagaggattgtttagtttgggattctaggttcctcgctcccgtgccggagacgacgctagacgatgaggtcagtgccgcggcggcgcggcgcgtcgcagagatgaaggcgcggaagcggtccgagcggcgcacctacctggtggccgccgtgatgtccaggctcggggtcacgtccatggccgtcgccgccgtgtactatcgcttcagctggcaaatggagggcggcgcggtcccggtgagcgagatgttcggcacgtttgcgctctccgtcggcgcggcggtcgggatggagttctgggcgcggtgggcgcaccgggcgctatggcacgcctccctgtggcacatgcacgagtcgcaccaccggtcgtgcgagggcccattcgagctcaacgacgtgttcgccatcgtcaacgccgtgccggccatctccctcctcggtgacgtcgcgagcagatacaccatatggacaattttgagggcgtcccgtatgggctcttcctgggaccaaaggagctggaggaggtcggtggcctggacgagctggaaaaggagctcgcgcgaatcggccagaccatctgatggatttgtccggattccggcgcggcgatctccgctccgctccgtgattccggcgcagcctcatggttggggagccgacgaccagaacctccagaagggatttggtttggatgcgcgagcgtagatcttgacctgcatttcggatggtctgtggaggcatagctcgtacctggagatgtctggtgccatggaattacttttcttttcttcttttcctgacattttcatgccggcgtctttatttgtggagacgtcgcacgttctggcccctgtattactgttcttatggctaggattctgtatataacttgtagagacatgttatgaaccaccagctcaatgaagctaaaaattcggtggttgg

SEQ ID NO: 22208 - protein, 200 aa, Zea mays subsp. mays
  misc_feature (1)..(200): Ceres Seq. ID no. 12408003
MKARKRSERRTYLVAAVMSRLGVTSMAVAAVYYRFSWQMEGGAVPVSEMFGTFALSVGAAVGMEFWARWAHRALWHASLWHMHESHHRSCEGPFELNDVFAIVNAVPAISLLGDVASRYTIWTILRASRMGSSWDQRSWRRSVAWTSWKRSSRESARPSDGFVRIPARRSPLRSVIPAQPHGWGADDQNLQKGFGLDARA

SEQ ID NO: 22209 - protein, 183 aa, Zea mays subsp. mays
  misc_feature (1)..(183): Ceres Seq. ID no. 12408004
MSRLGVTSMAVAAVYYRFSWQMEGGAVPVSEMFGTFALSVGAAVGMEFWARWAHRALWHASLWHMHESHHRSCEGPFELNDVFAIVNAVPAISLLGDVASRYTIWTILRASRMGSSWDQRSWRRSVAWTSWKRSSRESARPSDGFVRIPARRSPLRSVIPAQPHGWGADDQNLQKGFGLDARA

SEQ ID NO: 22210 - protein, 175 aa, Zea mays subsp. mays
  misc_feature (1)..(175): Ceres Seq. ID no. 12408005
MAVAAVYYRFSWQMEGGAVPVSEMFGTFALSVGAAVGMEFWARWAHRALWHASLWHMHESHHRSCEGPFELNDVFAIVNAVPAISLLGDVASRYTIWTILRASRMGSSWDQRSWRRSVAWTSWKRSSRESARPSDGFVRIPARRSPLRSVIPAQPHGWGADDQNLQKGFGLDARA

SEQ ID NO: 22211 - DNA, 1877 bp, Zea mays subsp. mays
  misc_feature (1)..(1877): Ceres Seq. ID no. 12408017
accctcccccaccgccattgctcagcagcagtagtaaagccacgcctgacagacagctggttcatttctggttgctgccttgctggtggtagccctcggcgcaggcagccaagaacagagagagcgagatggatgtgaacgacgtgctgctagtggtgctggcggcggcgctggctgccatgtggtggcgtcggtgctccaagaccggcggtgtcgacggccctcccgccggggcctccgggttggccggtggtggggaacctgttccaggtgatcctgcagcgacggcccttcatgtacgtggtgcgcgacctccgggagaagtacgggcccatcttcaccatgcggatggggcagcgcaccctcatcgtggtcacctcggcggagctcatccacgaggcgctggtgaagcagggccccatgttcgcgagccggcccgaggacagccccacccgcctcctcttcagcgtcggcaagtgcaccgtcaactcggcgccctacggccccctgtggcgtgctctgcgccgcaacttcgtcgccgagatcgtgtccccgcaccgcgtcaagggcttctcctggatccgggagtgggccgtggacgcgcacttgcgccgcctctgcgccgagctcgcggcggacggtgccgtgcgggtcatggccagctgccgcctcaccatctgcagcatcctcatctgcatctgcttcggcgccaagatccccgacgagctcatccgggagatcgaggaggtgctcaaggacgtgatgatgatgaccatgcccaagctcccggacttcctgcccctcctcacaccgctcttcaggaagcagctcaccgaggcccgcgccctgcgccgccgccagctcaactgcctcgtgccgctcgtccgcgcgcggagggacttcctccgcgacggcaccgcggcagcggcggacggcgtggagatgatgagcgggcctggggaagcgtacgtggactcgctcttcgacctggagccgcccggccgcgggaagcgcctcggcgaggaggagctcgtcacgctctgctccgaggtcatgagcgccggcacagacaccagcgccacagcgctggaatgggccatgatgcacctcgtcctcgaccccgccgcgcagtagcgcctctacgacgaggtcgtcgccaaggtgggcaagaccgcccggatcaccgaagccgacgtcgaggccatgccctacctccaggcggtggtgaaggagacgttccggcggcacccgccgagccacttcgtgctgtcgcacgcggcgacgcgggacacggagctgggcgggtaccgcgtgccggcggacgccagcgtggagttctacacggcgtgggtgacggagaacccggcgacgtggccggacccggacgcgtggcggccggagcgcttcctggaaggcggcgagggcttcgacaccgacatcaccggcacccgcgcgctgcgcatgatgcccttcggcgccggccgccgcatctgccccgccgccacgctcggcgtgctccacatccagctcatgctcgccaacatggtgcgcgagttccgctggctgccgcccgccggtgagggcccgccggaccccaccgagaccttcgcattcaccgtcgtcatgaagaacccgctccgggcagccttcgtcgagcgggccacgacggagacggcgacaaccgcgtgacgagtgacgacggaaagtaaaaaaaaagggagagagagagaagttactagtacaagttactctttcactgggctctggctgggtgggtaagttgctgcaacgtgcgtgtcgtgcggggttaattcggtcccgcactctgcggtataaattacagttattaattaattagtccacggggaaggtgcgtg

SEQ ID NO: 22212 - protein, 483 aa, Zea mays subsp. mays
  misc_feature (1)..(483): Ceres Seq. ID no. 12408018
MDVNDVLLVVLAAALAAMWWRRCSKTGGVDGPPAGASGLAGGGEPVPGDPAATALHVRGARPPGEVRAHLHHADGAAHPHRGHLGGAHPRGAGEAGPHVREPARGQPHPPPLQRRQVHRQLGALRPPVACSAPQLRRRDRVPAPRQGLLLDPGVGRGRALAPPLRRARGGRCRAGHGQLPPHHLQHPHLHLLRRQDPRRAHPGDRGGAQGRDDDDHAQAPGLPAPPHTALQEAAHRGPRPAPPPAQLPRAARPRAEGLPPRRHRGSGGRRGDDERAWGSVRGLALRPGAARPREAPRRGGARHALLRGHERRHRHQRHSAGMGHDAPRPRPRRAVAPLRRGRRQGGQDRPDHRSRRRGHALPPGGGEGDVPAAPAEPLRAVARGDAGHGAGRVPRAGGRQRGVLHGVGDGEPGDVAGPGRVAAGALPGRRRGLRHRHHRHPRAAHDALRRRPPHLPRRHARRAPHPAHARQHGARVPLAAARR

SEQ ID NO: 22213 - protein, 466 aa, Zea mays subsp. mays
  misc_feature (1)..(466): Ceres Seq. ID no. 12408019
MWWRRCSKTGGVDGPPAGASGLAGGGEPVPGDPAATALHVRGARPPGEVRAHLHHADGAAHPHRGHLGGAHPRGAGEAGPHVREPARGQPHPPPLQRRQVHRQLGALRPPVACSAPQLRRRDRVPAPRQGLLLDPGVGRGRALAPPLRRARGGRCRAGHGQLPPHHLQHPHLHLLRRQDPRRAHPGDRGGAQGRDDDDHAQAPGLPAPPHTALQEAAHRGPRPAPPPAQLPRAARPRAEGLPPRRHRGSGGRRGDDERAWGSVRGLALRPGAARPREAPRRGGARHALLRGHERRHRHQRHSAGMGHDAPRPRPRRAVAPLRRGRRQGGQDRPDHRSRRRGHALPPGGGEGDVPAAPAEPLRAVARGDAGHGAGRVPRAGGRQRGVLHGVGDGEPGDVAGPGRVAAGALPGRRRGLRHRHHRHPRAAHDALRRRPPHLPRRHARRAPHPAHARQHGARVPLAAARR

SEQ ID NO: 22214 - protein, 279 aa, Zea mays subsp. mays
  misc_feature (1)..(279): Ceres Seq. ID no. 12408020
MYVVRDLREKYGPIFTMRMGQRTLIVVTSAELIHEALVKQGPMFASRPEDSPTRLLFSVGKCTVNSAPYGPLWRALRRNFVAEIVSPHRVKGFSWIREWAVDAHLRRLCAELAADGAVRVMASCRLTICSILICICFGAKIPDELIREIEEVLKDVMMMTMPKLPDFLPLLTPLFRKQLTEARALRRRQLNCLVPLVRARRDFLRDGTAAAADGVEMMSGPGEAYVDSLFDLEPPGRGKRLGEEELVTLCSEVMSAGTDTSATALEWAMMHLVLDPAAQ

SEQ ID NO: 22215 - DNA, 1589 bp, Zea mays subsp. mays
  misc_feature (1)..(1589): Ceres Seq. ID no. 12408021
actcacatcactcccagactgcttccacctacgttcattatttccgcaatgtacaaccgagtatgatatgcagtcgtagtatcatggataaccaccttatgtcgtccttcgccatcctactgctttcttcttttgctgcaatggttgcatatcctgctcgcagtgaattacagcctaaccagatgaaaaaccaccattctgtatcatcatacagcccacaaccgaaggattttccaactgagcaactctacagcgcctacctagtaatccagcgattcaagagcaccatcactagcgaccccaagaacgtcaccgccacctggattggtcatgatatctgcggagaaacgacctacgtggggttctactgcggatcgccggccggaggagataagaagttgacagtcacgggggttattttgaatggctatagtctacatgcaccaacgttggaaggtttcgtcaatcagctccctgatctagctcttttccatgctgcttccaacaattttggtggcgatataccccagctaaccgcccttgggtacatgtacgagctcagtgtcgccgctaaagatgtgccattacagactagggatgcggatgattttgtgggggggaggggcatcggtcgcgtgcaattaggtagatgcgtaactgctgattttgacttttcatttaatgtcggaattaataagggtcacaaatttcctggttttacgcatgccaaggctctccttctcaaccgcaacaatttgtccggtccacttccgtcaaacctcggtttctcaaaactgagctaccttgccctcgccaacaacaaactcaccgggccaatcccgccgtcaatcagtaagctggaagactctctcttcgaggtactccttctcaacaaccagctctccggctgcctcccccacgagctcggcatgctcaccaaggcggccgtgattgacgccggcatgaaccagctcaccggcccaatcccgtcatctttctcctgcctaagcagcgtcgagcagctcaacctggccggaaaccgcctctacggtcaggtacccgacgcgctctgcaagcttgctgggcccgctggccgcctcgccaacctcacgctgtccggcaactacttcacatccgccgggccggcatgcgcggcgctgatcaaagacggagtgctggacgtgaagaacaactgcattccggggctcaccaaccagaggcgccccgcggagtgcgcggcgttccagagccaaccaaagacttgcccggcagcgagcgctcaggtgacatgccccgccgccgcagcttccaggaacgcggcggcgccaggggagaggaaggtcaaggattactccagctacgtgacgtacgctactctgcatgactgagccacactggcatgcagtaggagacagaatgccttgctggctatgtgtctcttgtattcagcatgagtgtaccctagcgtgtgttgttgtgattgtgattgctgtctatttgcattattgtacgtgtgttgctgtcacatctagatcatcccattatttgtacgtccaaatccattttatggaaagtactgttggtgtttt

SEQ ID NO: 22216 - protein, 461 aa, Zea mays subsp. mays
  misc_feature (1)..(461): Ceres Seq. ID no. 12408022
SHHSQTASTYVHYFRNVQPSMICSRSIMDNHLMSSFAILLLSSFAAMVAYPARSELQPNQMKNHHSVSSYSPQPKDFPTEQLYSAYLVIQRFKSTITSDPKNVTATWIGHDICGETTYVGFYCGSPAGGDKKLTVTGVILNGYSLHAPTLEGFVNQLPDLALFHAASNNFGGDIPQLTALGYMYELSVAAKDVPLQTRDADDFVGGRGIGRVQLGRCVTADFDFSFNVGINKGHKFPGFTHAKALLLNRNNLSGPLPSNLGFSKLSYLALANNKLTGPIPPSISKLEDSLFEVLLLNNQLSGCLPHELGMLTKAAVIDAGMNQLTGPIPSSFSCLSSVEQLNLAGNRLYGQVPDALCKLAGPAGRLANLTLSGNYFTSAGPACAALIKDGVLDVKNNCIPGLTNQRRPAECAAFQSQPKTCPAASAQVTCPAAAASRNAAAPGERKVKDYSSYVTYATLHD

SEQ ID NO: 22217 - protein, 441 aa, Zea mays subsp. mays
  misc_feature (1)..(441): Ceres Seq. ID no. 12408023
MICSRSIMDNHLMSSFAILLLSSFAAMVAYPARSELQPNQMKNHHSVSSYSPQPKDFPTEQLYSAYLVIQRFKSTITSDPKNVTATWIGHDICGETTYVGFYCGSPAGGDKKLTVTGVILNGYSLHAPTLEGFVNQLPDLALFHAASNNFGGDIPQLTALGYMYELSVAAKDVPLQTRDADDFVGGRGIGRVQLGRCVTADFDFSFNVGINKGHKFPGFTHAKALLLNRNNLSGPLPSNLGFSKLSYLALANNKLTGPIPPSISKLEDSLFEVLLLNNQLSGCLPHELGMLTKAAVIDAGMNQLTGPIPSSFSCLSSVEQLNLAGNRLYGQVPDALCKLAGPAGRLANLTLSGNYFTSAGPACAALIKDGVLDVKNNCIPGLTNQRRPAECAAFQSQPKTCPAASAQVTCPAAAASRNAAAPGERKVKDYSSYVTYATLHD

SEQ ID NO: 22218 - protein, 434 aa, Zea mays subsp. mays
  misc_feature (1)..(434): Ceres Seq. ID no. 12408024
MDNHLMSSFAILLLSSFAAMVAYPARSELQPNQMKNHHSVSSYSPQPKDFPTEQLYSAYLVIQRFKSTITSDPKNVTATWIGHDICGETTYVGFYCGSPAGGDKKLTVTGVILNGYSLHAPTLEGFVNQLPDLALFHAASNNFGGDIPQLTALGYMYELSVAAKDVPLQTRDADDFVGGRGIGRVQLGRCVTADFDFSFNVGINKGHKFPGFTHAKALLLNRNNLSGPLPSNLGFSKLSYLALANNKLTGPIPPSISKLEDSLFEVLLLNNQLSGCLPHELGMLTKAAVIDAGMNQLTGPIPSSFSCLSSVEQLNLAGNRLYGQVPDALCKLAGPAGRLANLTLSGNYFTSAGPACAALIKDGVLDVKNNCIPGLTNQRRPAECAAFQSQPKTCPAASAQVTCPAAAASRNAAAPGERKVKDYSSYVTYATLHD

SEQ ID NO: 22219 - DNA, 934 bp, Zea mays subsp. mays
  misc_feature (1)..(934): Ceres Seq. ID no. 12408029
ctcgcggtcgcagctagcgaaccctaatggagatcgctgaggccctgcaggcctacacgggcctcacacccgcggccgccgccaccatcctcgccctcatggtggccacctacctcctcgtctcctccctcttcgtcgcccccgcccccgcccccgccccactttccaagccgccccagcagcagcgcgagggggagaaggcacaggaggaggaggaggaagaaccgatgcctttcgtgtatccggaccccgtggaggtgggcgagctcacgctcgagcagctcagtgcgtatgacggcaaggacccagccaagcagatcctcattgccatccggggccaggtctacgacgtctcccgcgggaggctcttttatggccctcagggaccatattccttgtttgccgggagggatgcaacccgggccctggcattgatgtcatttgacccaaacgacctcaccggggatctggacggcctaagcgccgatgagctggaggtgttgcaagattgggaggaaaaattcaagtagaggtatccgagggtgggccaccttgcctgtcaagacgcgacagacagtggtcagaccaccgctgggcttcatcacgaggaaggggacgcctaaaactccactggtttgcctcgtcgtcctctcctctgtttttttttttttacttgctggatttcaccctgtagatctgatgtgcgcacttgtgggtgacgcagctgtcgtcgtcgtttgctgtatatgtatgtacgtgtgcggtgtgcctactgactaatgcacgcacctgctgtcccatttcttttggatctgtagcggctataaggaaattttgagcctaaaaaaaactggaggctttaggaacagcccatgttcgactcttggttgtatacgcgtgatttgtgtcatgatttgtggctttgttgttcatc

SEQ ID NO: 22220 - protein, 167 aa, Zea mays subsp. mays
  misc_feature (1)..(167): Ceres Seq. ID no. 12408030
MEIAEALQAYTGLTPAAAATILALMVATYLLVSSLFVAPAPAPAPLSKPPQQQREGEKAQEEEEEEPMPFVYPDPVEVGELTLEQLSAYDGKDPAKQILIAIRGQVYDVSRGRLFYGPQGPYSLFAGRDATRALALMSFDPNDLTGDLDGLSADELEVLQDWEEKFK

SEQ ID NO: 22221 - protein, 143 aa, Zea mays subsp. mays
  misc_feature (1)..(143): Ceres Seq. ID no. 12408031
MVATYLLVSSLFVAPAPAPAPLSKPPQQQREGEKAQEEEEEEPMPFVYPDPVEVGELTLEQLSAYDGKDPAKQILIAIRGQVYDVSRGRLFYGPQGPYSLFAGRDATRALALMSFDPNDLTGDLDGLSADELEVLQDWEEKFK

SEQ ID NO: 22222 - protein, 100 aa, Zea mays subsp. mays
  misc_feature (1)..(100): Ceres Seq. ID no. 12408032
MPFVYPDPVEVGELTLEQLSAYDGKDPAKQILIAIRGQVYDVSRGRLFYGPQGPYSLFAGRDATRALALMSFDPNDLTGDLDGLSADELEVLQDWEEKFK

SEQ ID NO: 22223 - DNA, 1613 bp, Zea mays subsp. mays
  misc_feature (1)..(1613): Ceres Seq. ID no. 12408053
acctggccgctccatctcgcgtccaacaatcaattcggcgtcgctctcgtctcatcagtcatcactccgcgactgcgagcgagcgagcgaggcccttccgcgccacgcgcaatggacgctgctctgctcgtgaccgtcctcgtccccgcggtggcggcgctcctcgtcctcgggtccggggccgcgtccgcctcgccgccgcgcgccttcttcgtgttcggggactccctcgtggacaacggcaacaacaactacctcatgaccacggcgcgggccgacgcgccgccctacgggatcgacttccccacgcacctgcccacggggcggttctcccaacgggctcaacatccccgacatcatcagcgagcacctcggctcccagcccgcgctgccgtacctcagccccgacctccgcggcgaccagctgctcgtcggcgccaacttcgcgtccgccggcgtcggcatcctcaacgacaccggcatacagttcgtgaacatcatcgggatcgggcagcagctgcacaacttccaggactaccagcagaggctggccgcgttcgtcggcgacgacgcggcgaggcaggtcgtgagcaatgcgctcgtcctcatcacgctcggcggcaacgacttcgtcaacaactactacctggtgcccttctccttccgctcccgccagttcgccatccaagactacgtcccgtacctcatctccgagtacaggaaaatcctcacgcggctgtacgagctcggggcccgtcgcgtggtggtgacgggcaccgggatgatcgggtgcgtgccggcggagctggccatgcacagcatcgacggcgagtgcgcgcgcgacctcacggaggcggccgacctcttcaacccgcagctggtgcagatgctctccgacctcaacgcggccatcggcggcgacgtcttcatcgccgccaacaccaaccgcctcagcttcgacttcatgttcaacccgcaggactacgggttcgtgacggccaaggtggcgtgctgcgggcagggcccgtacaacgggatcgggctgtgcacgccggcgtccaacgtgtgccccaaccgggacgtgtacgcgtactgggacgcgttccaccccacggagcgcgccaaccggatcatcgtcgcccagttcatgcacggctccaccgaccacatcagccccatgaacatcagcaccatcctcgccatggacaacaggggggactaactagtcccgccgcgtgctgcctccacccatctcgtcattggttggttcacgccaagaggttttgctgcattgcatgtgtcatggagctggtggataacaagttttcgttgcacctttttgtgatttattagatgacgtgaattagtggtgaattgagccttattagagtgggttaaattaatacagctgtcccaagtttctttgctccagcagattgtttggggacagggctagctaggaacttcagaaattgctaagcggtactacctagccagtccgtccgatcatttcaagaaaattctcttgcactttgtagtgtgatcctgaacttttgggtacaaggtaccgacgattcaatgccaatgtatattttggtggctggggcacagtg

SEQ ID NO: 22224 - protein, 450 aa, Zea mays subsp. mays
  misc_feature (1)..(450): Ceres Seq. ID no. 12408054
TWPLHLASNNQFGVALVSSVITPRLRASERGPSAPRAMDAALLVTVLVPAVAALLVLGSGAASASPPRAFFVFGDSLVDNGNNNYLMTTARADAPPYGIDFPTHLPTGRFSQRAQHPRHHQRAPRLPARAAVPQPRPPRRPAARRRQLRVRRRRHPQRHRHTVREHHRDRAAAAQLPGLPAEAGRVRRRRRGEAGREQCARPHHARRQRLRQQLLPGALLLPLPPVRHPRLRPVPHLRVQENPHAAVRARGPSRGGDGHRDDRVRAGGAGHAQHRRRVRARPHGGGRPLQPAAGADALRPQRGHRRRRLHRRQHQPPQLRLHVQPAGLRVRDGQGGVLRAGPVQRDRAVHAGVQRVPQPGRVRVLGRVPPHGARQPDHRRPVHARLHRPHQPHEHQHHPRHGQQGGLTSPAACCLHPSRHWLVHAKRFCCIACVMELVDNKFSLHLFVIY

SEQ ID NO: 22225 - protein, 413 aa, Zea mays subsp. mays
  misc_feature (1)..(413): Ceres Seq. ID no. 12408055
MDAALLVTVLVPAVAALLVLGSGAASASPPRAFFVFGDSLVDNGNNNYLMTTARADAPPYGIDFPTHLPTGRFSQRAQHPRHHQRAPRLPARAAVPQPRPPRRPAARRRQLRVRRRRHPQRHRHTVREHHRDRAAAAQLPGLPAEAGRVRRRRRGEAGREQCARPHHARRQRLRQQLLPGALLLPLPPVRHPRLRPVPHLRVQENPHAAVRARGPSRGGDGHRDDRVRAGGAGHAQHRRRVRARPHGGGRPLQPAAGADALRPQRGHRRRRLHRRQHQPPQLRLHVQPAGLRVRDGQGGVLRAGPVQRDRAVHAGVQRVPQPGRVRVLGRVPPHGARQPDHRRPVHARLHRPHQPHEHQHHPRHGQQGGLTSPAACCLHPSRHWLVHAKRFCCIACVMELVDNKFSLHLFVIY

SEQ ID NO: 22226 - protein, 364 aa, Zea mays subsp. mays
  misc_feature (1)..(364): Ceres Seq. ID no. 12408056
MTTARADAPPYGIDFPTHLPTGRFSQRAQHPRHHQRAPRLPARAAVPQPRPPRRPAARRRQLRVRRRRHPQRHRHTVREHHRDRAAAAQLPGLPAEAGRVRRRRRGEAGREQCARPHHARRQRLRQQLLPGALLLPLPPVRHPRLRPVPHLRVQENPHAAVRARGPSRGGDGHRDDRVRAGGAGHAQHRRRVRARPHGGGRPLQPAAGADALRPQRGHRRRRLHRRQHQPPQLRLHVQPAGLRVRDGQGGVLRAGPVQRDRAVHAGVQRVPQPGRVRVLGRVPPHGARQPDHRRPVHARLHRPHQPHEHQHHPRHGQQGGLTSPAACCLHPSRHWLVHAKRFCCIACVMELVDNKFSLHLFVIY

SEQ ID NO: 22227 - DNA, 1923 bp, Zea mays subsp. mays
  misc_feature (1)..(1923): Ceres Seq. ID no. 12408064
aaataagatcagttagcttgtctttatttcttcctccgatcactgattatacacacgcacttgatgaggttagatcgctagttaagcaagaaattagaggaggagagaggggtagccatggaagagcagcagccccgcccccgcccaagcatcatgttcgtcctgtcgtcgctcgccaagaataacccagagtccgtgctggcgctcatcgcggtgctcaccgtcgtcgccctgcgccacttgatctcctcatggcggcagcaggcccggctgcccccgtcaccgacgagcctcccggtgatcggccacctgcacctgctccgcccgccagtgcaccgcaccttccaggagctggcgtcccggatcggtccgctgatgcacatccgcctcggctccacgcactgcgtggttgccagcaccccggaggtggccagcgagctcatccgcggccacgagggcagcatctcggagcggccgctcacggcggtggcccgccagttcgcgtacgactcggccggcttcgccttcgcgccctataacacgcactggcgcttcatgaagcgcctctgcatgtcggagctgctcggcccgcgcactgtcgagcagctgcgccccgtccgccgcgccggcaccgtgtccctgctcgccgacctgctggcgtcgtcggcgcggggggagacggtggacctcacccgccatctcatccgcctctccaacacctccatcatccggatggtggccagcaccgtgcccggaagcgtcaccgacgaggcgcaggaggtggtcaaggacgtggccgagctcgtgggcgccttcaacgtcgacgactacatctccctagtccgtggctgggatctccagggcctccgcaggagagccgctggcgtccaccgccgcttcgacgcgctgctggaggacatcctcaggcacaaggaggaggcgagggcggcgcgaaggctcgaccaagacgacgacggacgtggcagcagcaagcaggacaagaagcaggccacgcacagcaaggacctgctcgacatcctcatggacaaggcagacgacccggcggcggagatcaagctcacccgggaaaacatcaaggctttcatcatcgacgtggtgactgctggttcagacacgtcggccgccatggtagagtggatgctggcggagctgatgaaccacccggagacgctgcgtaaggtggcggaggagatcgacgcggtggtcggcggcgacaggatcgccagcgaagcggacctgccacagctgccgtacctgatggcggcgtacaaggagacgttgcgtctgcacccggcagcgcccatcgcgcaccgacagtcgagcgaggagatggtggtgcgcggcttcacggtgccgccgcagacggcggtgttcatcaacgtgtgggccatcgggcgcgacccggcgtactgggaggagcccctagcgttccggccggagcggttcatgcccggcggcgccgccgagagcctggagccccgtgggcagcactttcagtacatgcccttcggcagcggccgccggggatgccccggcatgggcctggcgctacagtccgtgccggccgtgctggcggcgctcgtgcagtgcttccactgggccacccgtcgacggcgacggcggggtgaacaagatcgacatgtcggagtcggacgggctggtgtgcgctcgcaagaagccgcttctgctccgccccacgcctcgcctcacccccttcccggccgtcgtctagcgtgtcttccatggcaataccgtctatgtctgtaccaacctctaccagtaccaccacgtacgtacggattcgaagaatgtggataccatgcattaattatatgtatcacattattatatatatgatatgcaagagtaatatgcatggcattgtcttgcatgctctttgtt

SEQ ID NO: 22228 - protein, 586 aa, Zea mays subsp. mays
  misc_feature (1)..(586): Ceres Seq. ID no. 12408065
MEEQQPRPRPSIMFVLSSLAKNNPESVLALIAVLTVVALRHLISSWRQQARLPPSPTSLPVIGHLHLLRPPVHRTFQELASRIGPLMHIRLGSTHCVVASTPEVASELIRGHEGSISERPLTAVARQFAYDSAGFAFAPYNTHWRFMKRLCMSELLGPRTVEQLRPVRRAGTVSLLADLLASSARGETVDLTRHLIRLSNTSIIRMVASTVPGSVTDEAQEVVKDVAELVGAFNVDDYISLVRGWDLQGLRRRAAGVHRRFDALLEDILRHKEEARAARRLDQDDDGRGSSKQDKKQATHSKDLLDILMDKADDPAAEIKLTRENIKAFIIDVVTAGSDTSAAMVEWMLAELMNHPETLRKVAEEIDAVVGGDRIASEADLPQLPYLMAAYKETLRLHPAAPIAHRQSSEEMVVRGFTVPPQTAVFINVWAIGRDPAYWEEPLAFRPERFMPGGAAESLEPRGQHFQYMPFGSGRRGCPGMGLALQSVPAVLAALVQCFHWATRRRRRRGEQDRHVGVGRAGVRSQEAASAPPHASPHPLPGRRLACLPWQYRLCLYQPLPVPPRTYGFEECGYHALIICITLLYI

SEQ ID NO: 22229 - protein, 574 aa, Zea mays subsp. mays
  misc_feature (1)..(574): Ceres Seq. ID no. 12408066
MFVLSSLAKNNPESVLALIAVLTVVALRHLISSWRQQARLPPSPTSLPVIGHLHLLRPPVHRTFQELASRIGPLMHIRLGSTHCVVASTPEVASELIRGHEGSISERPLTAVARQFAYDSAGFAFAPYNTHWRFMKRLCMSELLGPRTVEQLRPVRRAGTVSLLADLLASSARGETVDLTRHLIRLSNTSIIRMVASTVPGSVTDEAQEVVKDVAELVGAFNVDDYISLVRGWDLQGLRRRAAGVHRRFDALLEDILRHKEEARAARRLDQDDDGRGSSKQDKKQATHSKDLLDILMDKADDPAAEIKLTRENIKAFIIDVVTAGSDTSAAMVEWMLAELMNHPETLRKVAEEIDAVVGGDRIASEADLPQLPYLMAAYKETLRLHPAAPIAHRQSSEEMVVRGFTVPPQTAVFINVWAIGRDPAYWEEPLAFRPERFMPGGAAESLEPRGQHFQYMPFGSGRRGCPGMGLALQSVPAVLAALVQCFHWATRRRRRRGEQDRHVGVGRAGVRSQEAASAPPHASPHPLPGRRLACLPWQYRLCLYQPLPVPPRTYGFEECGYHALIICITLLYI

SEQ ID NO: 22230 - protein, 500 aa, Zea mays subsp. mays
  misc_feature (1)..(500): Ceres Seq. ID no. 12408067
MHIRLGSTHCVVASTPEVASELIRGHEGSISERPLTAVARQFAYDSAGFAFAPYNTHWRFMKRLCMSELLGPRTVEQLRPVRRAGTVSLLADLLASSARGETVDLTRHLIRLSNTSIIRMVASTVPGSVTDEAQEVVKDVAELVGAFNVDDYISLVRGWDLQGLRRRAAGVHRRFDALLEDILRHKEEARAARRLDQDDDGRGSSKQDKKQATHSKDLLDILMDKADDPAAEIKLTRENIKAFIIDVVTAGSDTSAAMVEWMLAELMNHPETLRKVAEEIDAVVGGDRIASEADLPQLPYLMAAYKETLRLHPAAPIAHRQSSEEMVVRGFTVPPQTAVFINVWAIGRDPAYWEEPLAFRPERFMPGGAAESLEPRGQHFQYMPFGSGRRGCPGMGLALQSVPAVLAALVQCFHWATRRRRRRGEQDRHVGVGRAGVRSQEAASAPPHASPHPLPGRRLACLPWQYRLCLYQPLPVPPRTYGFEECGYHALIICITLLYI

SEQ ID NO: 22231 - DNA, 1514 bp, Zea mays subsp. mays
  misc_feature (1)..(1514): Ceres Seq. ID no. 12408075
aattttcctcgcgccgctgtcccttcgtttccccagacagtgcagaccgaaccgaacaggcgaacagacattggttttccccgccgcgcagcgcgcacacgcctgcctgccatttctaaatccggggccggtcatcctctcttgtttccgtggcaaccgcgcctctcctccttccttgcagcgtgcccctgcggggggctgcgcgtggatctgatctcgtcaattgtcgtgctatgtttttctccagcggcacgaagtgaagaacacgtttttgtgacgccatggctgtggaaagagatatatttggaatttctgggccaacgtatctgaaatcaatcgattggaactgtgagcataatcggagatctgtggctgcaagcttagttcaggctgtatatgtgttggagagagaccggcaactgaatcatcaatcttttgaagccttggcacctgcttggtgggaattcctccattttgagctgattcgcaagctgattgatgatgctgatatgtccatatttggtgcaatatttgaattcaaccctccaaaggaggaagcttctggtgcaaatgctccaagatttgtcatcgcattcagaggcaccataacagagaaggatactatctctagggacctttccctggacctgcaccttgttcaaaatggtctccacaggacctcgagatttaatatagcaatgcaagctgttcaaaacgtagcctcggttttccctggatccacgatttggctagcagggcattcactaggcgctggcctggccatccttacgggaagaaacatggttaagaagggtgtgcttttagaaagctttctcttcaacccaccgttcgttgctgctccagttgaaaggatcagggacgaaagggtaaagcacggatttcgtattgcaagaagcgtgattactgctggattgactattgccatgaaagctaaaactgagggtagcagtcagagatccgtcgctgaagaatctttcagcattttgtcatcatggacgccgtacctgttcgttaatccaggagaccacatttactcagagtacattgggtacttccagcaccggaagaacatggaggatcttggtgccggatttatcgagaagcttgcgacacagaattccatcggagacctgttcttcaaggcactagggtgggagtcagaaccgctgcaccttcttccgtctgccgatctaatcgtcaacgtgagcccttcgtctgatttcaagtacgctcacggcatcagccagtggtggcaacctgagctgaatttgcagtgcagtaaatataggtactcatagttgtacgtcgctagaaatgatgtctcagaaacttagttatcctctctatcccttcagtttattcatgtggttcattctgtttgttgtagtgttggtttcccagctgtggtagactatttcagacatattgactgcattttcctgacctgcaaaatctgttgattgtgtggagtaaagttgtgacatccatcgttc

SEQ ID NO: 22232 - protein, 345 aa, Zea mays subsp. mays
  misc_feature (1)..(345): Ceres Seq. ID no. 12408076
MAVERDIFGISGPTYLKSIDWNCEHNRRSVAASLVQAVYVLERDRQLNHQSFEALAPAWWEFLHFELIRKLIDDADMSIFGAIFEFNPPKEEASGANAPRFVIAFRGTITEKDTISRDLSLDLHLVQNGLHRTSRFNIAMQAVQNVASVFPGSTIWLAGHSLGAGLAILTGRNMVKKGVLLESFLFNPPFVAAPVERIRDERVKHGFRIARSVITAGLTIAMKAKTEGSSQRSVAEESFSILSSWTPYLFVNPGDHIYSEYIGYFQHRKNMEDLGAGFIEKLATQNSIGDLFFKALGWESEPLHLLPSADLIVNVSPSSDFKYAHGISQWWQPELNLQCSKYRYS

SEQ ID NO: 22233 - protein, 269 aa, Zea mays subsp. mays
  misc_feature (1)..(269): Ceres Seq. ID no. 12408077
MSIFGAIFEFNPPKEEASGANAPRFVIAFRGTITEKDTISRDLSLDLHLVQNGLHRTSRFNIAMQAVQNVASVFPGSTIWLAGHSLGAGLAILTGRNMVKKGVLLESFLFNPPFVAAPVERIRDERVKHGFRIARSVITAGLTIAMKAKTEGSSQRSVAEESFSILSSWTPYLFVNPGDHIYSEYIGYFQHRKNMEDLGAGFIEKLATQNSIGDLFFKALGWESEPLHLLPSADLIVNVSPSSDFKYAHGISQWWQPELNLQCSKYRYS

SEQ ID NO: 22234 - protein, 206 aa, Zea mays subsp. mays
  misc_feature (1)..(206): Ceres Seq. ID no. 12408078
MQAVQNVASVFPGSTIWLAGHSLGAGLAILTGRNMVKKGVLLESFLFNPPFVAAPVERIRDERVKHGFRIARSVITAGLTIAMKAKTEGSSQRSVAEESFSILSSWTPYLFVNPGDHIYSEYIGYFQHRKNMEDLGAGFIEKLATQNSIGDLFFKALGWESEPLHLLPSADLIVNVSPSSDFKYAHGISQWWQPELNLQCSKYRYS

SEQ ID NO: 22235 - DNA, 1193 bp, Zea mays subsp. mays
  misc_feature (1)..(1193): Ceres Seq. ID no. 12408082
cacacacacacacatcctccaccaccattcatcagaaagcgaagcacaagcctctgatgccaagccaaagcacacacacctcctccagcctttcttcctctacagccccaattcttccctgcagctctgctgctgccttgtttcgatcggtcatggcggcggtggccacagagactccgttccatgtcctggcggtggacgacagcctcccggacaggaagctcatcgagaggctcctcaagacctcttccttccaagtgaccactgtcgactccgggagcaaggcgctgcagttcctgggcctccatgaccaggacagcacggttcctcctgtccacacgcaccagctggatgtggctgccaatcaggatgtggctgtgaacctgatcatcacagactactgcatgcctggcatgacaggatatgacctgctcaagaagatcaaggagtcgtcgtctctcagagatatcccggtggtgatcatgtcctctgagaacattccttcaaggatcaataggtgcctggaggaaggagctgacgagttcttcctaaaacctgtgcggctatcagacatgaacaagctcaagccccacatactgaaaagcagatgcaaccaggaacagcaccagcaaagtgacagtcacagtggcgaacgcaggaaccccacaatcggcagcagcagcgatagcataaacaaccgcaagagaaagggtgcaggcaccgaagaaatcttgccccagctggcaaacagatcaaggcacagttaactgagaactgactagtacagctaaaaccttttctttttcactttactttggcctactgatttgtaacgtagatgttagccctggatttgcaaaacggaacggaatctgtaaactgatactgcttgagtcgaatcgatcgaagtgattctgcaccagatctccctatttcatttatcagaatcgaaagccagctgacagagtcacagtaacagcccgttggacatagcagcaggtgccgaagccaagaacatctgaaactgaccgtcggataacctacgatgggagtagccttttactgcttctaagctttagcctggatacaagttgtcactacagtagtcagtagggcagtaacttggtgcatctccaagagttttcaaaacacactgtcaatctagaaatttttggtgatgtagcttctcccac

SEQ ID NO: 22236 - protein, 254 aa, Zea mays subsp. mays
  misc_feature (1)..(254): Ceres Seq. ID no. 12408083
HTHTSSTTIHQKAKHKPLMPSQSTHTSSSLSSSTAPILPCSSAAALFRSVMAAVATETPFHVLAVDDSLPDRKLIERLLKTSSFQVTTVDSGSKALQFLGLHDQDSTVPPVHTHQLDVAANQDVAVNLIITDYCMPGMTGYDLLKKIKESSSLRDIPVVIMSSENIPSRINRCLEEGADEFFLKPVRLSDMNKLKPHILKSRCNQEQHQQSDSHSGERRNPTIGSSSDSINNRKRKGAGTEEILPQLANRSRHS

SEQ ID NO: 22237 - protein, 236 aa, Zea mays subsp. mays
  misc_feature (1)..(236): Ceres Seq. ID no. 12408084
MPSQSTHTSSSLSSSTAPILPCSSAAALFRSVMAAVATETPFHVLAVDDSLPDRKLIERLLKTSSFQVTTVDSGSKALQFLGLHDQDSTVPPVHTHQLDVAANQDVAVNLIITDYCMPGMTGYDLLKKIKESSSLRDIPVVIMSSENIPSRINRCLEEGADEFFLKPVRLSDMNKLKPHILKSRCNQEQHQQSDSHSGERRNPTIGSSSDSINNRKRKGAGTEEILPQLANRSRHS

SEQ ID NO: 22238 - protein, 204 aa, Zea mays subsp. mays
  misc_feature (1)..(204): Ceres Seq. ID no. 12408085
MAAVATETPFHVLAVDDSLPDRKLIERLLKTSSFQVTTVDSGSKALQFLGLHDQDSTVPPVHTHQLDVAANQDVAVNLIITDYCMPGMTGYDLLKKIKESSSLRDIPVVIMSSENIPSRINRCLEEGADEFFLKPVRLSDMNKLKPHILKSRCNQEQHQQSDSHSGERRNPTIGSSSDSINNRKRKGAGTEEILPQLANRSRHS

SEQ ID NO: 22239 - DNA, 1274 bp, Zea mays subsp. mays
  misc_feature (1)..(1274): Ceres Seq. ID no. 12408122
gcgcagagccagccaagccaaccagccagtcagaagaggaaccggggagcggcagctgcagcggccgagggcggagcacgcgaggttcaagattatccggtttaaagacatcagaagaggctgtggcatggatagataccaaagggtagagaagcctcggaatgacacgccaatcagccagaatgagatcagaatcactactcaggggaggatgaggaactatatcagctatgggatgtcgctgcttgaggaaaatggacatgatgagattagtatcaaggccatgggacgggccataaataagacagttatggttgttgaattgatcaagagaagggttggaggtcttcatcagaacactgctactgaatctgttgatatcacagacacatgggaacctttggaagaaggccttctcccactagagacaactcgccatgtgtcgatgatcactgtgacactgtcaaagaaccctctggatacatcatctccaggataccagccacctatcccagctgaagaggtgaaacctgcttttgactatgatcatgaagaatcgtatcccactggtcgtggaagaggacgtggtggtggcagaagaggcaggggaagaggcatgagcaatggcccccctccacctgcttatggttacaacgaagagtgggaggaggaaggagattattataacagagggcgcgggagagggcggctacgtggacgaggagggagagggcgtggtggctactacggaggtgggaggcgtggtggctacggttatgattatggctatgcccccagaggcgggtactatgaagagcaagacgaatactatgatgagcccgaggaatatgctcctccccctggccgcggacgtggcagagggagaaggggcggcatgccttggcgtgggcgtggaggccgcgggccaccgcgcggtggccgagggagctactactaggcgcgagaaatgcgacgtgccgaatgcgtgtgcttattagttatctgttagcgtttgctgcagtgctcttctatggagctccgaccccggactggaattatctcgtaggcccttccaggtgctactctacttcagctgctgtccctgtgcaactcgtccgggcaagttttgtggctcgctcgtggttttgtagctaggttaagcgagtgaagttacactcggtagcgcagtatttcctgcgagattgtttattcttctgttaatgtacctaccttactatttcgtttggattatggatactgggtgcatccgttcc

SEQ ID NO: 22240 - protein, 318 aa, Zea mays subsp. mays
  misc_feature (1)..(318): Ceres Seq. ID no. 12408123
RRASQANQPVRRGTGERQLQRPRAEHARFKIIRFKDIRRGCGMDRYQRVEKPRNDTPISQNEIRITTQGRMRNYISYGMSLLEENGHDEISIKAMGRAINKTVMVVELIKRRVGGLHQNTATESVDITDTWEPLEEGLLPLETTRHVSMITVTLSKNPLDTSSPGYQPPIPAEEVKPAFDYDHEESYPTGRGRGRGGGRRGRGRGMSNGPPPPAYGYNEEWEEEGDYYNRGRGRGRLRGRGGRGRGGYYGGGRRGGYGYDYGYAPRGGYYEEQDEYYDEPEEYAPPPGRGRGRGRRGGMPWRGRGGRGPPRGGRGSYY

SEQ ID NO: 22241 - protein, 276 aa, Zea mays subsp. mays
  misc_feature (1)..(276): Ceres Seq. ID no. 12408124
MDRYQRVEKPRNDTPISQNEIRITTQGRMRNYISYGMSLLEENGHDEISIKAMGRAINKTVMVVELIKRRVGGLHQNTATESVDITDTWEPLEEGLLPLETTRHVSMITVTLSKNPLDTSSPGYQPPIPAEEVKPAFDYDHEESYPTGRGRGRGGGRRGRGRGMSNGPPPPAYGYNEEWEEEGDYYNRGRGRGRLRGRGGRGRGGYYGGGRRGGYGYDYGYAPRGGYYEEQDEYYDEPEEYAPPPGRGRGRGRRGGMPWRGRGGRGPPRGGRGSYY

SEQ ID NO: 22242 - protein, 248 aa, Zea mays subsp. mays
  misc_feature (1)..(248): Ceres Seq. ID no. 12408125
MRNYISYGMSLLEENGHDEISIKAMGRAINKTVMVVELIKRRVGGLHQNTATESVDITDTWEPLEEGLLPLETTRHVSMITVTLSKNPLDTSSPGYQPPIPAEEVKPAFDYDHEESYPTGRGRGRGGGRRGRGRGMSNGPPPPAYGYNEEWEEEGDYYNRGRGRGRLRGRGGRGRGGYYGGGRRGGYGYDYGYAPRGGYYEEQDEYYDEPEEYAPPPGRGRGRGRRGGMPWRGRGGRGPPRGGRGSYY

SEQ ID NO: 22243 - DNA, 1359 bp, Zea mays subsp. mays
  misc_feature (1)..(1359): Ceres Seq. ID no. 12408140
gcacgagaccattacctagaacatcctaatcgaaaaccattacggacacagccattccaccaaccaaccaagccaaacggtttatagccccgctcggttcaagccggtaccgtacacctccagagtagcttaccccaaccaaatccatccaaattcaatcggaattcgcgtgcgcaagcccaaatcggaccacggtaatccaaaggccgcggcgtagcggacgcgcgggcgctggtgataaagcgggggctgggcctcgacgcctctgctctgctctgctctccttgcataggttttatcttctcccctcctctgcccccatctcgcttctcgcacacggcagccggattccgaagcgcgccccctcggccccagccaaaagcatcgcagtttctaatcgtttggagagcacacaagaatgtcgttcgtgcagctctctggtgctggagtcgctgcagtggccttcacgaacaagagcctagtctctcggcacgcagcgctacgggtctgctcgtcgaggcgctcgatccgtagcctggtcgttaaggctgcaactgtcgtcaccccaaagtacacttcactgaagcctctgggagatagggtgcttgtgaagcttggtgccgcagaggagaagacagttggtggcattttgcttccatctactgcccagactaaaccacaaggaggtgaggttgttgctgttggagcaggaaggaccatcggggacaagaaaatagctgtggatatagagactggagcacaagtagtatactcaaagtatgctgggactgaggttgaattcaatgactcaaagcatcttattctcaaagaagacgatatcattggtattcttgagacagatgatgtgaaggacatgaagcctctcaatgaccgtgttctcatcaaggttgcagaagccgaagacaaaactcctgggggccttatcctcactgaaacaactaaagagaagccgtccataggaacggttgtagctgttggcccgggtcctctggacgaggaaggcaagagacagccactgtcagtgtcggcgggcagcacagtgctgtactccaagtatgcagggagtgagttcaagggcgcggatggcacggcctacattgtgttgagagcgtcggatgtgatggctgtcctgtcttgagcatttcgtttccggctcgttaatgtagtttgcagccaatagttgtcatgtggtatgaaacgatcgctttgtggtggtcatcacaccatgctggtgatcatcacaacatatgctgatactgttccggacaatcggctagaatttgttgtgtggcaggtataaacgtcagcatctgatagtgagagcactcggttacttct

SEQ ID NO: 22244 - protein, 246 aa, Zea mays subsp. mays
  misc_feature (1)..(246): Ceres Seq. ID no. 12408141
MSFVQLSGAGVAAVAFTNKSLVSRHAALRVCSSRRSIRSLVVKAATVVTPKYTSLKPLGDRVLVKLGAAEEKTVGGILLPSTAQTKPQGGEVVAVGAGRTIGDKKIAVDIETGAQVVYSKYAGTEVEFNDSKHLILKEDDIIGILETDDVKDMKPLNDRVLIKVAEAEDKTPGGLILTETTKEKPSIGTVVAVGPGPLDEEGKRQPLSVSAGSTVLYSKYAGSEFKGADGTAYIVLRASDVMAVLS

SEQ ID NO: 22245 - DNA, 761 bp, Zea mays subsp. mays
  misc_feature (1)..(761): Ceres Seq. ID no. 12408149
atcgcctccaacttgttcttccgctgcaagacagcagtcccgagctgtagcctgctaccgttcttgtctagtcgtcttccccggcaagccgcggcggtcgttgccccctcgtataatctactcgcggcatccttgtcatcgccgattcgattgggttgatacagaggggagccgcgagggggcggagatgccgacgctgacgaagctgtacagcatggaggaggctgccctccacaacacgcccgacgactgctgggtcatcgtcgacggcaagatttatgatgtgaccaagtatttggaagaccatcctgggggtgccgatgttctgctcgaagcaaccggtaaggatgctacagaagaatttgacgatgcagggcacagcaagagtgccaaggatctaatgcaggactacttcattggggagctggacttggacccaactcctgacattcctgagatggaggttttcaggaaggagcaggacacgggatttgccagcaagcttatggacaacgtggtgcagtactgggcaatcccagcagctgtaattgggatatcagctgttgttgctatattgtatgcgcgaaggaagtgaaagttaatgtgccatgcttgggcagatgatcctttttagagggatcaacccatggtgcatggatgggtatatgtactcctgtcccaaattacactatgatgttcgattcttagacacacttaggcaaacatttgcctgattaatgacactattttatcgatatggc

SEQ ID NO: 22246 - protein, 197 aa, Zea mays subsp. mays
  misc_feature (1)..(197): Ceres Seq. ID no. 12408150
SPPTCSSAARQQSRAVACYRSCLVVFPGKPRRSLPPRIIYSRHPCHRRFDWVDTEGSREGAEMPTLTKLYSMEEAALHNTPDDCWVIVDGKIYDVTKYLEDHPGGADVLLEATGKDATEEFDDAGHSKSAKDLMQDYFIGELDLDPTPDIPEMEVFRKEQDTGFASKLMDNVVQYWAIPAAVIGISAVVAILYARRK

SEQ ID NO: 22247 - protein, 135 aa, Zea mays subsp. mays
  misc_feature (1)..(135): Ceres Seq. ID no. 12408151
MPTLTKLYSMEEAALHNTPDDCWVIVDGKIYDVTKYLEDHPGGADVLLEATGKDATEEFDDAGHSKSAKDLMQDYFIGELDLDPTPDIPEMEVFRKEQDTGFASKLMDNVVQYWAIPAAVIGISAVVAILYARRK

SEQ ID NO: 22248 - protein, 126 aa, Zea mays subsp. mays
  misc_feature (1)..(126): Ceres Seq. ID no. 12408152
MEEAALHNTPDDCWVIVDGKIYDVTKYLEDHPGGADVLLEATGKDATEEFDDAGHSKSAKDLMQDYFIGELDLDPTPDIPEMEVFRKEQDTGFASKLMDNVVQYWAIPAAVIGISAVVAILYARRK

SEQ ID NO: 22249 - DNA, 1594 bp, Zea mays subsp. mays
  misc_feature (1)..(1594): Ceres Seq. ID no. 12408178
attttttccgcgccgccggttcgtgccaaaaccctactccctagaaaatgcagcggcgcctaagctgaaatcagtgaatcgtgcgccgcggcgaagagagaactcgaactcggcaggacttgtgcgggaggaggaggggagcgggggtcagagagggagatagagatcatcaggtttgccatgtcctccagggctggcggcggcaagccgttgtggtctgcctccaccatcgtcgccaaagtcgcgagtgggtaccacatcctcaggatcgatggctactccaggaccatggagacccccacaggagagtccatcgcgtccctcccgttctcggtgggcggccgttgctggcgcattcgctactaccccaacggcgacaagttggagaataaagaatacatctcgctttatctttatctccacgacagaagcgtcgaggcagagaaggcgcagttaatgttccgtttcgtcggtgacgtagcggagcagccgttgattctgggaagactgcataccttcgaaaagcaaggttgggggtacgccaagttcatcaaaaggaaagatttggaagagtcgaagcatctcgtggacgattctttttccatcaggtgcgatgtggccgtgcgcttcaacgatgtccgcgtggagaaggcgccggaagccgctgctgcagcatctatgatttccgtgcaaccatctgacctgcaccagcacctcggcagtctcctgctgacccagaagggcgccgatgtggtgttcgacgtcgccggtgagacgttcgccgcgcaccggtgcgtgctcgcagcccgctctcctgtcttcactgcagagctctttggtgcgatgaaagagggccacaccggaggcgtggtgcgcatagaggacatggaacctcgggcgttcaaggcattgctctacttcctttacaccgatttactattcccaaagacaatggcaacgacgatgaatcaagctgaagacggagacgtaggcgacgacgatgaagacgttctgtgtcagcacctactggtcgctgcagacaaatacaacttggagaggctgaaatcgctatgtgaaaagaagctgtctgagtgcatccatgtgggcacggtagcaatcatcctgacgctagctgagcaacaccgctgccctggactgaagaaggtgtgcctccattttctcagatctcctgcaaatttgagggcagtcgcctccagcgacgcctttaagcatctgagcagcagctgcccctctgttatggtggagttggttgccatgcttggcaactcagcgtagaccttcatctaagcaggaaactgcacttggtgtttttttctggatcgacttgtattatcaagcggtcttggaaaaaatgctactagttcatagtgtccacttccagtagctatgcatcctaagtttcaagtagattctgaagtagttgaatccgttggcgcttttggtacaccatttcgcagcggatgattttggtatctggtagctagctttgaatgtctgccagaagtccgtctatgatgtccttaacatacaattctcagacgttggaaacttggaatgcaatgcagttcttgtt

SEQ ID NO: 22250 - protein, 371 aa, Zea mays subsp. mays
  misc_feature (1)..(371): Ceres Seq. ID no. 12408179
MSSRAGGGKPLWSASTIVAKVASGYHILRIDGYSRTMETPTGESIASLPFSVGGRCWRIRYYPNGDKLENKEYISLYLYLHDRSVEAEKAQLMFRFVGDVAEQPLILGRLHTFEKQGWGYAKFIKRKDLEESKHLVDDSFSIRCDVAVRFNDVRVEKAPEAAAAASMISVQPSDLHQHLGSLLLTQKGADVVFDVAGETFAAHRCVLAARSPVFTAELFGAMKEGHTGGVVRIEDMEPRAFKALLYFLYTDLLFPKTMATTMNQAEDGDVGDDDEDVLCQHLLVAADKYNLERLKSLCEKKLSECIHVGTVAIILTLAEQHRCPGLKKVCLHFLRSPANLRAVASSDAFKHLSSSCPSVMVELVAMLGNSA

SEQ ID NO: 22251 - protein, 335 aa, Zea mays subsp. mays
  misc_feature (1)..(335): Ceres Seq. ID no. 12408180
METPTGESIASLPFSVGGRCWRIRYYPNGDKLENKEYISLYLYLHDRSVEAEKAQLMFRFVGDVAEQPLILGRLHTFEKQGWGYAKFIKRKDLEESKHLVDDSFSIRCDVAVRFNDVRVEKAPEAAAAASMISVQPSDLHQHLGSLLLTQKGADVVFDVAGETFAAHRCVLAARSPVFTAELFGAMKEGHTGGVVRIEDMEPRAFKALLYFLYTDLLFPKTMATTMNQAEDGDVGDDDEDVLCQHLLVAADKYNLERLKSLCEKKLSECIHVGTVAIILTLAEQHRCPGLKKVCLHFLRSPANLRAVASSDAFKHLSSSCPSVMVELVAMLGNSA

SEQ ID NO: 22252 - protein, 279 aa, Zea mays subsp. mays
  misc_feature (1)..(279): Ceres Seq. ID no. 12408181
MFRFVGDVAEQPLILGRLHTFEKQGWGYAKFIKRKDLEESKHLVDDSFSIRCDVAVRFNDVRVEKAPEAAAAASMISVQPSDLHQHLGSLLLTQKGADVVFDVAGETFAAHRCVLAARSPVFTAELFGAMKEGHTGGVVRIEDMEPRAFKALLYFLYTDLLFPKTMATTMNQAEDGDVGDDDEDVLCQHLLVAADKYNLERLKSLCEKKLSECIHVGTVAIILTLAEQHRCPGLKKVCLHFLRSPANLRAVASSDAFKHLSSSCPSVMVELVAMLGNSA

SEQ ID NO: 22253 - DNA, 1175 bp, Zea mays subsp. mays
  misc_feature (1)..(1175): Ceres Seq. ID no. 12408185
aacaccaacctcagcacaccaaggagagtacgtggaggagcagccatggcttcatcggtggccgccgcggcgagcacattcctgggcacccgcctggcggacccggcgccacagaacgggcgcatcgtggcccggttcgggttcgggttgggcggcaaggcgaagcctgctccgaagaaggtggcgaagacatcgacctcctctgaccggccgctgtggttccccggcgccgtggcgcccgactacctggacggctcgctggtcggcgactacgggttcgacccgttcggtctcgggaagcccgtggagtacctgcagttcgagttggactcgctggaccagaacctggccaagaatgaggccggcggcatcatcggcacccggttcgagtcctccgaagtcaagtccaccccgttgcagccctacagcgaggtgttcggcctccagcggttccgcgagtgcgagctcatccacggccgctgggccatgctcgccaccctcggcgccctctccgtcgagtggctcaccggcgtcacctggcaggacgccggcaaggtggagctggtggacgggtcctcctacctgggccagccgctgccgttctccatctcgacgctcatctggatcgaggtgctcgtgatcggctacatcgagttccagcgcaacgccgagctcgacccggagaagaggctgtaccccggcggctcctacttcgacccgctcggcctggcggccgaccctgagaagaaggagcggctgcagctggcggagatcaagcacgcgcgcctcgccatggtcgccttcctcggcttcgccgtgcaggccgccgccaccggcaaggggccgctcaacaactgggccacccacctgagcgacccgctccacactaccatcttcgacacgttcggagggtcctcttaagcccgccattgctccgccccgtccatcgaccggaacgtgttcttggattaattaactacgatctctatgagcctggggatggatcaacccgtcgtgcgtggtctcgttttgtgatgagtgggagagagaggatgacaagatcgatcctttgttaatggagatctcgttaattaggagagctaccgctgggacttggtggtttgtaatatatgatccaaccagtgatgaatcaatgcattcacttgtgtacacat

SEQ ID NO: 22254 - protein, 306 aa, Zea mays subsp. mays
  misc_feature (1)..(306): Ceres Seq. ID no. 12408186
NTNLSTPRRVRGGAAMASSVAAAASTFLGTRLADPAPQNGRIVARFGFGLGGKAKPAPKKVAKTSTSSDRPLWFPGAVAPDYLDGSLVGDYGFDPFGLGKPVEYLQFELDSLDQNLAKNEAGGIIGTRFESSEVKSTPLQPYSEVFGLQRFRECELIHGRWAMLATLGALSVEWLTGVTWQDAGKVELVDGSSYLGQPLPFSISTLIWIEVLVIGYIEFQRNAELDPEKRLYPGGSYFDPLGLAADPEKKERLQLAEIKHARLAMVAFLGFAVQAAATGKGPLNNWATHLSDPLHTTIFDTFGGSS

SEQ ID NO: 22255 - protein, 291 aa, Zea mays subsp. mays
  misc_feature (1)..(291): Ceres Seq. ID no. 12408187
MASSVAAAASTFLGTRLADPAPQNGRIVARFGFGLGGKAKPAPKKVAKTSTSSDRPLWFPGAVAPDYLDGSLVGDYGFDPFGLGKPVEYLQFELDSLDQNLAKNEAGGIIGTRFESSEVKSTPLQPYSEVFGLQRFRECELIHGRWAMLATLGALSVEWLTGVTWQDAGKVELVDGSSYLGQPLPFSISTLIWIEVLVIGYIEFQRNAELDPEKRLYPGGSYFDPLGLAADPEKKERLQLAEIKHARLAMVAFLGFAVQAAATGKGPLNNWATHLSDPLHTTIFDTFGGSS

SEQ ID NO: 22256 - protein, 212 aa, Zea mays subsp. mays
  misc_feature (1)..(212): Ceres Seq. ID no. 12408188
TPTSAHQGEYVEEQPWLHRWPPRRAHSWAPAWRTRRHRTGASWPGSGSGWAARRSLLRRRWRRHRPPLTGRCGSPAPWRPTTWTARWSATTGSTRSVSGSPWSTCSSSWTRWTRTWPRMRPAASSAPGSSPPKSSPPRCSPTARCSASSGSASASSSTAAGPCSPPSAPSPSSGSPASPGRTPARWSWWTGPPTWASRCRSPSRRSSGSRCS

SEQ ID NO: 22257 - DNA, 1513 bp, Zea mays subsp. mays
  misc_feature (1)..(1513): Ceres Seq. ID no. 12408247
gtccgaacactgggccggccggttgtccgccgcatccccttgcgttgcgttcacggttctcctctctgtctctcgcgcaagggatctcgttctccgcggcagctggtgtttcgctcccttctcgccctccgacggctggttggcagccggcgccggcgccgccaaacgctaggtgctgaggccttcgccagtgtcttcgacggcgacgagcacgtaccagcatcatgtcggaaagaggtcgcctggcaggacgattgattgataaccgcagcagagggtaccatgtagtccctctagttgaggatcccagaggccatcctgaagtcctcgtggatggggatcggaggggctactctgacattcgtggggttcagcaacgtcggggctaccctgacacccatctgcttgaggaacctaggggctaccctggtgttcgtgtggtcgaccataggggctatcctggcagtcgtggggttgatgaacgcagggcctatcctgagctccatcaaggctcacgcatgagggcggctcctcccccttacccagctgccttcgaggatgagctcgagttacaggaagttgaactccggaggctttcggcacataaccgcgctctagttgaggagcgtgaactgttaagcagggaaatacaagctggaaaagatgaggtccgccacttgaatgtgatcattgctgacattaacactgagaaagaagcttatatcagtaagcttatggacaagaggaggaagcttgaagctgaacttggagcaagtgagcacttgcgtgatgaggtcaggcatcttcgtggtgaaattgacaagctcgttaccgctcggaaagaactatctgcagaggctgcatctctcgtggaagagctgaacagggagcaatctgttaaacagcagctacctgtgctgaaaacagaaattgacggtctgcaacaggaacttgttcacgtgaggactgcttgcgggttagagcagaaggggaatttggaattgctggaacaaaggaaggcaatggagaagaatatgctttctatggcacaagagatcgagcagatgcgaggcgaattagctaattttgaagttagaccaaggggcccaggtggagcatatgggatgcagattgggagttcggaagtgaccttcactaagaacccatatgaagatggttataatgcttatgtgggggttcctgagaaagatcctttgcatcctcctgaatatgcttcatgggggacatatgacaggagtcgccttcagtaccgctaagaccagaacttagtcattggagaaagaattgccttctaggttttaatggacatgtcttgtcgtttacagtaccgaagctttatgcctgctgcttggttttccattaagagttgtcctttttaatgcttctaatcgtaactttttccattacaaactggctagattattaaactattggtaccaagatgtccagcaatgtgcggaaagcaccttacatacatgtgattttgcgtgtc

SEQ ID NO: 22258 - protein, 350 aa, Zea mays subsp. mays
  misc_feature (1)..(350): Ceres Seq. ID no. 12408248
MSERGRLAGRLIDNRSRGYHVVPLVEDPRGHPEVLVDGDRRGYSDIRGVQQRRGYPDTHLLEEPRGYPGVRVVDHRGYPGSRGVDERRAYPELHQGSRMRAAPPPYPAAFEDELELQEVELRRLSAHNRALVEERELLSREIQAGKDEVRHLNVIIADINTEKEAYISKLMDKRRKLEAELGASEHLRDEVRHLRGEIDKLVTARKELSAEAASLVEELNREQSVKQQLPVLKTEIDGLQQELVHVRTACGLEQKGNLELLEQRKAMEKNMLSMAQEIEQMRGELANFEVRPRGPGGAYGMQIGSSEVTFTKNPYEDGYNAYVGVPEKDPLHPPEYASWGTYDRSRLQYR

SEQ ID NO: 22259 - protein, 252 aa, Zea mays subsp. mays
  misc_feature (1)..(252): Ceres Seq. ID no. 12408249
MRAAPPPYPAAFEDELELQEVELRRLSAHNRALVEERELLSREIQAGKDEVRHLNVIIADINTEKEAYISKLMDKRRKLEAELGASEHLRDEVRHLRGEIDKLVTARKELSAEAASLVEELNREQSVKQQLPVLKTEIDGLQQELVHVRTACGLEQKGNLELLEQRKAMEKNMLSMAQEIEQMRGELANFEVRPRGPGGAYGMQIGSSEVTFTKNPYEDGYNAYVGVPEKDPLHPPEYASWGTYDRSRLQYR

SEQ ID NO: 22260 - protein, 180 aa, Zea mays subsp. mays
  misc_feature (1)..(180): Ceres Seq. ID no. 12408250
MDKRRKLEAELGASEHLRDEVRHLRGEIDKLVTARKELSAEAASLVEELNREQSVKQQLPVLKTEIDGLQQELVHVRTACGLEQKGNLELLEQRKAMEKNMLSMAQEIEQMRGELANFEVRPRGPGGAYGMQIGSSEVTFTKNPYEDGYNAYVGVPEKDPLHPPEYASWGTYDRSRLQYR

SEQ ID NO: 22261 - DNA, 1785 bp, Zea mays subsp. mays
  misc_feature (1)..(1785): Ceres Seq. ID no. 12408251
atatttaattatttattgctgcgaacatatgggatgccagagtcgcagcaaaccacggttcggcggcgtccaattccccttcctcgccgatgccgatgccgatgccgatgccgatgccgatgccacgggcgcggacgcggtggtcggcgctagccgccagcgcgctcatccaatgctgcgcggggagctcctactgcttcggcgtctactctcagacgctcaaggcctcgcagcgctacgaccagtccgcgctcgacgccgtcgccttcttcaaggacgtcggcgccaacgccggggtcctctcgggcttcctcgtcgcttgggcgccggggggccgcaggcgcccctggattgtcctcctcgccggctccctgctctgcgccgcgggctacctccccatgtggctagccgtcgcgggggtcgcgcccgcgccgctcccgctcgtctgcctctacatgctgctcgccgcgcaggcgcagaccttcttcaacaccgccgatgttgtctccgccgtcgagaacttccccgaccgacgaggcactgtcatcggcatcatgaagggttttctaggcctaagtggggcaatacttgtcgaaatttaccgcactcttggcattgatcccagctctttcatactgatgctggcagttttacccacgtccgtcaccttggtgctcatgtattttgtggatgtccacaatccacatgaacggtatgagaagaaattcctagacgctttctccctcattgctgttactgttgctggatacttgatgattctcataatctatggtcaagttttcccaataagctcagctgtgcagagcgtttgtttcgtggtactcctgctactagtgatgtctccaatagctgtggctgcaaaggcccagacgccagaatcaatagctcatcaaggatcaatctcagaacaaagggctggactgctccgcaaagaggtcacagaggattctgaaaatgctagctcaagcactactgcgcttgggggatctaaccaagacctgtcttcaggcaaagaaaacctgaacgtattacaggccatgtgcaagctcaacttctggttgctcttcctggcaatggcttgtggaatgggatcaggtctggccacggtgaacaatatcagccagatcggcggctcccttggctacacgaccaaggagaccagcacactcgtgtctctatggagcatatggaacttttcagggcggtttggtgcaggcttcatatccgaccatttccttcgcctgcgaggagttggcaggccattctttataagcatcacgctgctggtcatgagcgtcggccatgccatcatctcctccggtctccctgcgtcgctctacattgggtcggtgctcatcggcatgtgctatgggtgtcagtgggccctgatgccgagcataacatctgagatctttgggctgagccatttcggcaccatattcaacatggtggctgttgcaagccctgttgggtcctacatcctctcggtgcgcatcgtgggctacatatacgatattgaatcgccaccggacgagcactcttgtgtaggtaagcaatgctttgcactctctttcatgatcatggccggtgtctgtatgtttgggtccgctgtggcatttgtgttgtttatcagaacaaggacgttctataggcgtgtcgtatatgcaaggttgcaatcttttctagacaagtaacaagtctttatgtaagatggctatataacttggaataatgtttgtacatgtatattatgtcagtgtttcc

SEQ ID NO: 22262 - protein, 541 aa, Zea mays subsp. mays
  misc_feature (1)..(541): Ceres Seq. ID no. 12408252
MPMPMPMPMPMPRARTRWSALAASALIQCCAGSSYCFGVYSQTLKASQRYDQSALDAVAFFKDVGANAGVLSGFLVAWAPGGRRRPWIVLLAGSLLCAAGYLPMWLAVAGVAPAPLPLVCLYMLLAAQAQTFFNTADVVSAVENFPDRRGTVIGIMKGFLGLSGAILVEIYRTLGIDPSSFILMLAVLPTSVTLVLMYFVDVHNPHERYEKKFLDAFSLIAVTVAGYLMILIIYGQVFPISSAVQSVCFVVLLLLVMSPIAVAAKAQTPESIAHQGSISEQRAGLLRKEVTEDSENASSSTTALGGSNQDLSSGKENLNVLQAMCKLNFWLLFLAMACGMGSGLATVNNISQIGGSLGYTTKETSTLVSLWSIWNFSGRFGAGFISDHFLRLRGVGRPFFISITLLVMSVGHAIISSGLPASLYIGSVLIGMCYGCQWALMPSITSEIFGLSHFGTIFNMVAVASPVGSYILSVRIVGYIYDIESPPDEHSCVGKQCFALSFMIMAGVCMFGSAVAFVLFIRTRTFYRRVVYARLQSFLDK

SEQ ID NO: 22263 - protein, 539 aa, Zea mays subsp. mays
  misc_feature (1)..(539): Ceres Seq. ID no. 12408253
MPMPMPMPMPRARTRWSALAASALIQCCAGSSYCFGVYSQTLKASQRYDQSALDAVAFFKDVGANAGVLSGFLVAWAPGGRRRPWIVLLAGSLLCAAGYLPMWLAVAGVAPAPLPLVCLYMLLAAQAQTFFNTADVVSAVENFPDRRGTVIGIMKGFLGLSGAILVEIYRTLGIDPSSFILMLAVLPTSVTLVLMYFVDVHNPHERYEKKFLDAFSLIAVTVAGYLMILIIYGQVFPISSAVQSVCFVVLLLLVMSPIAVAAKAQTPESIAHQGSISEQRAGLLRKEVTEDSENASSSTTALGGSNQDLSSGKENLNVLQAMCKLNFWLLFLAMACGMGSGLATVNNISQIGGSLGYTTKETSTLVSLWSIWNFSGRFGAGFISDHFLRLRGVGRPFFISITLLVMSVGHAIISSGLPASLYIGSVLIGMCYGCQWALMPSITSEIFGLSHFGTIFNMVAVASPVGSYILSVRIVGYIYDIESPPDEHSCVGKQCFALSFMIMAGVCMFGSAVAFVLFIRTRTFYRRVVYARLQSFLDK

SEQ ID NO: 22264 - protein, 537 aa, Zea mays subsp. mays
  misc_feature (1)..(537): Ceres Seq. ID no. 12408254
MPMPMPMPRARTRWSALAASALIQCCAGSSYCFGVYSQTLKASQRYDQSALDAVAFFKDVGANAGVLSGFLVAWAPGGRRRPWIVLLAGSLLCAAGYLPMWLAVAGVAPAPLPLVCLYMLLAAQAQTFFNTADVVSAVENFPDRRGTVIGIMKGFLGLSGAILVEIYRTLGIDPSSFILMLAVLPTSVTLVLMYFVDVHNPHERYEKKFLDAFSLIAVTVAGYLMILIIYGQVFPISSAVQSVCFVVLLLLVMSPIAVAAKAQTPESIAHQGSISEQRAGLLRKEVTEDSENASSSTTALGGSNQDLSSGKENLNVLQAMCKLNFWLLFLAMACGMGSGLATVNNISQIGGSLGYTTKETSTLVSLWSIWNFSGRFGAGFISDHFLRLRGVGRPFFISITLLVMSVGHAIISSGLPASLYIGSVLIGMCYGCQWALMPSITSEIFGLSHFGTIFNMVAVASPVGSYILSVRIVGYIYDIESPPDEHSCVGKQCFALSFMIMAGVCMFGSAVAFVLFIRTRTFYRRVVYARLQSFLDK

SEQ ID NO: 22265 - DNA, 1474 bp, Zea mays subsp. mays
  misc_feature (1)..(1474): Ceres Seq. ID no. 12408280
atctagcaaactgcaaaccaggtcatctctgaatttccccaacaaagagcgagcataaaccccgctatacccgcttccttctctccaatctccggtgctcgcatcccgctccgcctccatgcgccgcggcagttccacgacgccagtcctctcacctctgtcctgacccaacacccgggcggctggaacccgcaggtgcgcttagtgccgctcgaggaggctcgccgtttgctggattcgttctgtcctttgccggccggcattgtgccctccgcggcggcgacaggggcgtgcgcggtgctgctgtaggggagggtgacggccatctccctggtcggccgcggcccgggctggtggcgtgcgaggaagacggattcacaaagcacggtgctccccaagtctagcagggtgtgttgtatggcttccacgctccagctgttgttttccattgccatcacagctttggcctttttcctccacccatgcgcatcgactgatgagttccaccgtgagctctacggttggtccaatggcatcgctacatggtatggcgcagctgatggcgctggaactgacggtggtgcgtgtggataccagaatgctgtggaccagccacctttctcatccatgattgccgctggctgctcttccatctacgactctggcaagggctgtggctcttgctatcaggctgtatgcaccggcaatgacgcttgctccggtaacccggtgactgtcgtcatcaccgacgagtgccccgattgcccgtgtcctgatgagcaggtccacttcgacatgagcgggacagcgttcggtgccttggcgaagcccgggcaggagagccagctgcgtggcgccggcgccatccaaatccagtatacccgggtgcagtgcgagtggcctggcgtggacgtgaccttctcggtggagccgggctccaacccgaactacctggccgtgctgatcgagtacgaggatagcgacagcgacctcgactccgtggacatgatgcagacgcagggcgggacgacggggcagtgggtgccgatgcagcagtcgtggggcgccgtgtggaagatcaactccggctccgtcctccagggccccttcaacatccgcctcaccttcagctctggcagggcgctcgtcgccagcaacgccatacctgcggggtggaacgccggcgtcgcgtaccggtctggcggcgtggctgtgacgagggccaggcccaggagcggtgcctgccggggctacgaggctgccgggacactggatggtttggtgcatcgtcacctcgtcgtgttgttgttactggtgttattgacgctgtgagccgagatgcgatgcaattttgctggttctgggagcgtgcgagtttgggctacatggactgagtagctctgtgtatttttcttgcatcgcatcgtagtggatggattactgcgtcgtattgtggacatgtctggtggttatc

SEQ ID NO: 22266 - protein, 304 aa, Zea mays subsp. mays
  misc_feature (1)..(304): Ceres Seq. ID no. 12408281
MASTLQLLFSIAITALAFFLHPCASTDEFHRELYGWSNGIATWYGAADGAGTDGGACGYQNAVDQPPFSSMIAAGCSSIYDSGKGCGSCYQAVCTGNDACSGNPVTVVITDECPDCPCPDEQVHFDMSGTAFGALAKPGQESQLRGAGAIQIQYTRVQCEWPGVDVTFSVEPGSNPNYLAVLIEYEDSDSDLDSVDMMQTQGGTTGQWVPMQQSWGAVWKINSGSVLQGPFNIRLTFSSGRALVASNAIPAGWNAGVAYRSGGVAVTRARPRSGACRGYEAAGTLDGLVHRHLVVLLLLVLLTL

SEQ ID NO: 22267 - protein, 234 aa, Zea mays subsp. mays
  misc_feature (1)..(234): Ceres Seq. ID no. 12408282
MIAAGCSSIYDSGKGCGSCYQAVCTGNDACSGNPVTVVITDECPDCPCPDEQVHFDMSGTAFGALAKPGQESQLRGAGAIQIQYTRVQCEWPGVDVTFSVEPGSNPNYLAVLIEYEDSDSDLDSVDMMQTQGGTTGQWVPMQQSWGAVWKINSGSVLQGPFNIRLTFSSGRALVASNAIPAGWNAGVAYRSGGVAVTRARPRSGACRGYEAAGTLDGLVHRHLVVLLLLVLLTL

SEQ ID NO: 22268 - protein, 178 aa, Zea mays subsp. mays
  misc_feature (1)..(178): Ceres Seq. ID no. 12408283
MSGTAFGALAKPGQESQLRGAGAIQIQYTRVQCEWPGVDVTFSVEPGSNPNYLAVLIEYEDSDSDLDSVDMMQTQGGTTGQWVPMQQSWGAVWKINSGSVLQGPFNIRLTFSSGRALVASNAIPAGWNAGVAYRSGGVAVTRARPRSGACRGYEAAGTLDGLVHRHLVVLLLLVLLTL

SEQ ID NO: 22269 - DNA, 1292 bp, Zea mays subsp. mays
  misc_feature (1)..(1292): Ceres Seq. ID no. 12408296
ggttcacacatggcttccttgttgcgctggaaggacaagtacgtgaaggagaggctgcagggcctgtcctgctcctcggcggccgccacctccgtcgtcccctccaatggccgcgccatcgaccggcactctccgcacctccgggaccctcaccggcgtctcccgccaccggtgcccaagccacccagacccagctctagtttcagtactaccaaagattcgtcctcctcctcctacaagcagcggcagcagatttgccacttcgacgtcgatggcaaagacaaaaggaagaataagaagaagaagagcacagcagcagcagccgctggtagtggtagctcgccgtcggagcataggagaaacggcaaggagaaggcgctgcagctgcagcaggtgagccccgcgagctcgtcccggttcctgctcaactcctccaggctcatgatgcagtccgacgacgaaaccactgccgtcgactccctgccgccacttccgtccccgcggcggccctccttcgttgacgccgccgccgaggacgacacagacacattccccagcagccacggcgatgccgcgtcgccggctgttccgtcaagaaggcctcagctcgtggcgccggcgccgccactggaattattcgctgagccgtctgcatcaggcgcaggctcctcctcctcttcgtcgtcagagataactggaggccatgtcgtcgccgccgctgacaacactgtcgtggtgagatcatgttccacgagaacagggcagcaccaggtagtggttttgagggtatctctgcactgcaaggggtgcgctggcaaggtgaagaagcacctctccaagatggaaggcgttacttctttcgacatcgacatcgcgacgaagaaggtgacggtggtgggagatgtgacgccgctaggcgtcctcaacagcatctccaaggtcaagagcgcccagttctggcctgactctcgctcctctttctctacgccaccgcgtgcctctgcctccttctgagctgcccactagcttcgtcacaaacttaatggttgggacgccaacacggtggtctttcaaatatatagttccttttttctccatattatcgatcgaggaaaatatatatatttgcacaatccaatcaaaagttcctctaccacaaaagatgcattatacaaaatttaactttaactatatatataggcgtctttttatgttttgaagctcgttgtaataagattatgaaagtataatgtatattttcaattttattaaatacaaaaatagggggaccc

SEQ ID NO: 22270 - protein, 337 aa, Zea mays subsp. mays
  misc_feature (1)..(337): Ceres Seq. ID no. 12408297
GSHMASLLRWKDKYVKERLQGLSCSSAAATSVVPSNGRAIDRHSPHLRDPHRRLPPPVPKPPRPSSSFSTTKDSSSSSYKQRQQICHFDVDGKDKRKNKKKKSTAAAAAGSGSSPSEHRRNGKEKALQLQQVSPASSSRFLLNSSRLMMQSDDETTAVDSLPPLPSPRRPSFVDAAAEDDTDTFPSSHGDAASPAVPSRRPQLVAPAPPLELFAEPSASGAGSSSSSSSEITGGHVVAAADNTVVVRSCSTRTGQHQVVVLRVSLHCKGCAGKVKKHLSKMEGVTSFDIDIATKKVTVVGDVTPLGVLNSISKVKSAQFWPDSRSSFSTPPRASASF

SEQ ID NO: 22271 - protein, 334 aa, Zea mays subsp. mays
  misc_feature (1)..(334): Ceres Seq. ID no. 12408298
MASLLRWKDKYVKERLQGLSCSSAAATSVVPSNGRAIDRHSPHLRDPHRRLPPPVPKPPRPSSSFSTTKDSSSSSYKQRQQICHFDVDGKDKRKNKKKKSTAAAAAGSGSSPSEHRRNGKEKALQLQQVSPASSSRFLLNSSRLMMQSDDETTAVDSLPPLPSPRRPSFVDAAAEDDTDTFPSSHGDAASPAVPSRRPQLVAPAPPLELFAEPSASGAGSSSSSSSEITGGHVVAAADNTVVVRSCSTRTGQHQVVVLRVSLHCKGCAGKVKKHLSKMEGVTSFDIDIATKKVTVVGDVTPLGVLNSISKVKSAQFWPDSRSSFSTPPRASASF

SEQ ID NO: 22272 - protein, 190 aa, Zea mays subsp. mays
  misc_feature (1)..(190): Ceres Seq. ID no. 12408299
MMQSDDETTAVDSLPPLPSPRRPSFVDAAAEDDTDTFPSSHGDAASPAVPSRRPQLVAPAPPLELFAEPSASGAGSSSSSSSEITGGHVVAAADNTVVVRSCSTRTGQHQVVVLRVSLHCKGCAGKVKKHLSKMEGVTSFDIDIATKKVTVVGDVTPLGVLNSISKVKSAQFWPDSRSSFSTPPRASASF

SEQ ID NO: 22273 - DNA, 1577 bp, Zea mays subsp. mays
  misc_feature (1)..(1577): Ceres Seq. ID no. 12408300
ataggaacacacgaatacgcgaccacacgttcacctcggccatgatccaccaacacagcagctccctccctgaaatctcattcccatgaatttccacacggccagcttctgcgcttccgcggcgataggcctcccaacagcccccaaaatatcggcttcgttggctactggtcgctttgcctgccgcagtgagagatgtctggagacctggaccttcagatctcctgctatctgccttcttgctgctacccccacacgctgcaccctcacagacaccatggatccgagctccgacatcatactcgacactccgttcttccgcatctacagcgaccgccgcatcgaccgcttggtcgggcaccgataccgtgccggccggctttgatcccgccaccggcgtcacctccaaagatgtcgttttagacagcaactccggcctctacgttcgcctgtacctcccggacacggctaccgggtctgaccactactccaagaaattccccgtgctagtctacttccacggcggcggctttgtcacccactcggcagcgtctccgccctatcagcccttcctcaacacccttgccgcgaaggccggcttgctcatcgtctccgtgaactaccgcctcgcgccagagcacccgcttccggcaggttacgaggactccttccgcgcgctcaagtgggcggcctctggaagcggggacccctggctatcacatcacggcgacctgggccgcatcttcctggccggggacagctccggcgggaactttgtccacaacgtcgctatgatggccgccgcgtcagagttgcaaatcgagggcgcggtcctcctgcacgccgggttcgctggcaagcagcgcatcgacggagagaaaccagagtcagtggcgctgacgcagaagctgtgggggatcgtgtgccccgaggcgacggacggcgtggacgacccgcggatgaaccccttggccgccgcggcgcccagcctgcgaaacctgccgtgcgagagggtgctcgtctgcgcggcagagctggactcgctgcgggcgaggaacagggcgtactacgacgccctcgcggcaagcgggtggggtggcacggtggagtggctcgagtctaagggcaagcagcacgccttcttcctctacgactccggctgcggcgaggccgtggagctcatggatcgactggtcgcgttctttgctgggaacttgaattcgtcatgtgtggatgtgaccacacatcacacgaccacatccggtgagaccctgagatgaatggaacaaacgaagatgcagctcattgctcaatcgaaataactgagctcagtcctcaaaacaatgaaaaaagaggaagaacagctgagatcggatccttgtactgatcagtttatgttatcgcttgggtcatcaatttctactagttgtgtgcccgtgcgttgcaacggaaacatataataccattgatagcttatgtacgttgggatgaacatcgacatatatctgaccggatcttcttcttccttggggatctggagaaaagcctgttcgaaagccaaacatgttaagacctgt

SEQ ID NO: 22274 - protein, 162 aa, Zea mays subsp. mays
  misc_feature (1)..(162): Ceres Seq. ID no. 12408301
MMAAASELQIEGAVLLHAGFAGKQRIDGEKPESVALTQKLWGIVCPEATDGVDDPRMNPLAAAAPSLRNLPCERVLVCAAELDSLRARNRAYYDALAASGWGGTVEWLESKGKQHAFFLYDSGCGEAVELMDRLVAFFAGNLNSSCVDVTTHHTTTSGETLR

SEQ ID NO: 22275 - protein, 161 aa, Zea mays subsp. mays
  misc_feature (1)..(161): Ceres Seq. ID no. 12408302
MAAASELQIEGAVLLHAGFAGKQRIDGEKPESVALTQKLWGIVCPEATDGVDDPRMNPLAAAAPSLRNLPCERVLVCAAELDSLRARNRAYYDALAASGWGGTVEWLESKGKQHAFFLYDSGCGEAVELMDRLVAFFAGNLNSSCVDVTTHHTTTSGETLR

SEQ ID NO: 22276 - protein, 106 aa, Zea mays subsp. mays
  misc_feature (1)..(106): Ceres Seq. ID no. 12408303
MNPLAAAAPSLRNLPCERVLVCAAELDSLRARNRAYYDALAASGWGGTVEWLESKGKQHAFFLYDSGCGEAVELMDRLVAFFAGNLNSSCVDVTTHHTTTSGETLR

SEQ ID NO: 22277 - DNA, 1540 bp, Zea mays subsp. mays
  misc_feature (1)..(1540): Ceres Seq. ID no. 12408314
gaaagcaggatgttcctacctttaaccaagtggaccaagatctctatcatcgactccctgcccccctcctcctcttctatataaaccatacactgaaacgacgtctaattgtgctgtgatccaggcagcagtgagctcagtacacagctaggcacagcgacggggtccggtccagggccatggctaaggaaagcaagctaacggccggagtggccgccgcgctgaccgtcgtcgctgcttgcgcgctatgcctgctgctgccggcgacggcccgcgcgcagctccgggtgggattctacgacaccagctgccccaacgccgaggccctcgtccgccaggccgtcgcggccgccttcgccaaggacgccggcatcgccgccggcctcatccgcctccacttccacgactgctttgtcaggggctgtgatggatccgtcctcctcaccgtgaatcctggcggcgggcagactgagcgtgacgccctcccaaacaacccgagcctccgcggcttcgacgtgatcgacgccgccaagaccgccgttgagcagagctgcccgcgcacagtctcgtgcgccgacatcgtcgccttcgccgcccgcgacagcatcagtctcaccgggagcgtctcgtaccaggtccccgcgggccggcgcgacggccgcgtgtccaacgcgacggagaccgtcgacctacccccgcccacctccacggcgcaaagcctgaccgacttgttcaaggccaaggagcttagcgtggaggacatggtcgtcctctccggcgctcacaccgtcggccgctccttctgcgcctccttcttcaagcgcgtctggaacacaagcacgaaccccgctaccgcaatcgtggacgcggggctgagcccgtcgtacgcgcagctactacgcgcgctgtgcccgtcaaacacgacgcagacgacgccgatcacgacggccatggacccgggaacgcccaacgtgctggacaacaactactacaagcttcctgcctcgcggcatggggctcttcttctccgacaacccgctgcgcgtgaacccgcagatggccgcgctggtgagcagcttcgcgtccaacgagacgctgtggaaggagaaattcgcggcggccatggtaaagatgggacgcatccaggtgcagacagggacgtgcggagaggtccgtctcaactgcggcgtcgtcaacccgagttcgtactcgtcgtcgtcggcggtggagctgggttcgagcgcgccagcagccgtcggtgaagagggctacgccgcgagctagtagctcgcataccagtcttcggccgccgtcgttgtcgagatcaatgattttttttctctctctcgcatgcatccctcttctgcttttattttgtcgcgtggactgtggtttttgttgtgtcgatgatctttgttgtgtgccagtgccactaaacgtacgcatgccggccggcgaactcttaacttcggtggcgggtaataataagcatatgtatgagtaagatgagattgtgtcaatttagggtgtggatgctttc

SEQ ID NO: 22278 - protein, 360 aa, Zea mays subsp. mays
  misc_feature (1)..(360): Ceres Seq. ID no. 12408315
MAKESKLTAGVAAALTVVAACALCLLLPATARAQLRVGFYDTSCPNAEALVRQAVAAAFAKDAGIAAGLIRLHFHDCFVRGCDGSVLLTVNPGGGQTERDALPNNPSLRGFDVIDAAKTAVEQSCPRTVSCADIVAFAARDSISLTGSVSYQVPAGRRDGRVSNATETVDLPPPTSTAQSLTDLFKAKELSVEDMVVLSGAHTVGRSFCASFFKRVWNTSTNPATAIVDAGLSPSYAQLLRALCPSNTTQTTPITTAMDPGTPNVLDNNYYKLPASRHGALLLRQPAAREPADGRAGEQLRVQRDAVEGEIRGGHGKDGTHPGADRDVRRGPSQLRRRQPEFVLVVVGGGAGFERASSRR

SEQ ID NO: 22279 - DNA, 1312 bp, Zea mays subsp. mays
  misc_feature (1)..(1312): Ceres Seq. ID no. 12408327
actctactcccggtaccggaggccggagctatccaattcccttcccacccagaccgcgatccctaaccctacccaatgtcctcgccgccgccggcttcgcccatggccgccgagaatgaggcctgcgactgggcggagatgccgtcggacgcgctcgcggccgtgttcgcgaagctggacgtggccgagatcctgtccggcgccgggctggtctgccgcgcgtggcaccgtctcgcggcctcggaccctacgctgtggcgccgcgtcgacatgtgctaccagggggaccagctgcagaccgaggaggtcgaggccatggcgcgcgccgcggtcgaccgctctgcgggcaccatggaggcgttctgtgccgagaccttcgtcaacgacgacctggctccgctacatctctcagagggccccctcattgaagagcctccatctctgcctgtgccattacgtcactaatcaaggttttgcagaggcagttaattgcttccctcagctcaaggagctagacattacattctgctcattgtatggcatcgtgtgtgagactgctgggagagcctgcccgcagcttaaatgcttcaggttgaatgagcgctggtctattcttcaaagcgagtttgcaccctacgagggcatggatgatgacacggaagcattagggatcgctagcaccatgcctgggctccaagaacttcagttgatcggtaacaacctgaccaatgacggactcgtggcaatccttgaccgttgccctcgccttgaatcccttgacattcgccaatgctacaacatacagatggacgacgcactgagatcgaaatgcgctaggatacgagatctgaagcttcctcacgactccatctccgacttcaagtatcgggcttacatcgtcagcagcatagccaactcgggctctgattttgaggttgatatgtatgatgatctgctggatgtggtcactgaagatgatgatgctgatttcgatgacatggatgatttcgatgatacagtctcagatggaggcatgtacgatgatgacttggatatctgaaattaggaatcggttcaaacagcttttccgtggaccatgtaagtgctgttagctggaatggtttcccgtcccttttctttgagattcgggtagctatgatggaatctccctgatgttcatacttctgcgcctctccatttgttaagaagctggagtagctgaactggttctaatcgatgtacaactgttgtttttttattctgaacctttgttaattggtattttaataataacctagggcaaaaaatgtgt

SEQ ID NO: 22280 - protein, 352 aa, Zea mays subsp. mays
  misc_feature (1)..(352): Ceres Seq. ID no. 12408328
LYSRYRRPELSNSLPTQTAIPNPTQCPRRRRLRPWPPRMRPATGRRCRRTRSRPCSRSWTWPRSCPAPGWSAARGTVSRPRTLRCGAASTCATRGTSCRPRRSRPWRAPRSTALRAPWRRSVPRPSSTTTWLRYISQRAPSLKSLHLCLCHYVTNQGFAEAVNCFPQLKELDITFCSLYGIVCETAGRACPQLKCFRLNERWSILQSEFAPYEGMDDDTEALGIASTMPGLQELQLIGNNLTNDGLVAILDRCPRLESLDIRQCYNIQMDDALRSKCARIRDLKLPHDSISDFKYRAYIVSSIANSGSDFEVDMYDDLLDVVTEDDDADFDDMDDFDDTVSDGGMYDDDLDI

SEQ ID NO: 22281 - protein, 314 aa, Zea mays subsp. mays
  misc_feature (1)..(314): Ceres Seq. ID no. 12408329
MRPATGRRCRRTRSRPCSRSWTWPRSCPAPGWSAARGTVSRPRTLRCGAASTCATRGTSCRPRRSRPWRAPRSTALRAPWRRSVPRPSSTTTWLRYISQRAPSLKSLHLCLCHYVTNQGFAEAVNCFPQLKELDITFCSLYGIVCETAGRACPQLKCFRLNERWSILQSEFAPYEGMDDDTEALGIASTMPGLQELQLIGNNLTNDGLVAILDRCPRLESLDIRQCYNIQMDDALRSKCARIRDLKLPHDSISDFKYRAYIVSSIANSGSDFEVDMYDDLLDVVTEDDDADFDDMDDFDDTVSDGGMYDDDLDI

SEQ ID NO: 22282 - DNA, 1608 bp, Zea mays subsp. mays
  misc_feature (1)..(1608): Ceres Seq. ID no. 12408379
aaacgggcggcctcgtagcggagtcctagtcctctcgctttctccctgcgattcgcctcagcttccatccgatccgattcgggagtcgggactcgggagatagaggcagacggagagagaagaaaggcaaggcaatcgccgcgcgcgtgcttcctgccttctcggtcggctccagctcgccgttcattcccgcaatcccgctccgctcgcggtatcgggccgtggtagtgatgccgctggctgagccgccccagtggcgccgcaaagccacggatttcttctccacatctagtgtcaagctgaagcaggcagggcaatcggccggggataatatagctgatgttgctgggaaggttgggtccgcggtgaagagtcggtgggtcgtcttccaggaggctaggcagcagcagcagcaacggccaccgcatgagacagtgcaagagcgtatcatcaccgctgctgccaccactggtttgcttttcaggaaaggcatttcagagacaaaggagaaggttgcagtgggaaaggttaaagttgaagaggttgctaaaaaaactgcagataaaagcaagaatatcttgaacaatattgaacgctggcagaagggagtcgcaagcactgatgtgtttggtgttcctattgaagccactgtacaacgagagcaatctggtaaagctgtgcccttggtgctagtgagatgtgcagactacctggttatatcaggtttgaataatgagtacttattcaaatctgaaggtgacaaaaaagttcttcagcagttagtttctctttacaatgaagactctggcgcatctttacctgaaggtgtgaatcctattgatgtaggtgcactggtgaagtgctaccttgccagtatccctgagccgcttactacattttcgctttatgatgagcttcgagctgcgagggttagcattcctgatcttagggatatattgaagaagcttccaaatgtgaactacatgacaatagagtttgttacagcattgcttcttcgagtcagccataaatcatcacttaacaagatggactcccgcagccttgctgtggaatttgcgcctttgatcatgtggcggcaaggtgatgctggcacagatttgcgtaaccacctcaagttaaccctgaaaccgcctccaaaaattgtggatacaacatcaaatactgccacgtgggacctgtttgatgaggatggcgaggatgcttcatcccagatccccttggacgatgcttcacccccagactacaactccattgaggtcatccagtgtctgatcgagcatcataatgccatcttcactgatgcaaatgaaaccgtgtggagatgatcaaggtctcctctagatctctctggtgttagctcgtgctacgtattagttccaggtaggaaggtggattaccgtccgttattgttagggataagcattttggccggaacatttttggagtaggtttgtatatatgcgctagtgttaattctccccgggactaggatctggtcatgttatagcaatataagtcttgggtggatgtaaaccagatggacacgattgtgctgcatttgctaaattcggcttatacactgctgtt

SEQ ID NO: 22283 - protein, 371 aa, Zea mays subsp. mays
  misc_feature (1)..(371): Ceres Seq. ID no. 12408380
MPLAEPPQWRRKATDFFSTSSVKLKQAGQSAGDNIADVAGKVGSAVKSRWVVFQEARQQQQQRPPHETVQERIITAAATTGLLFRKGISETKEKVAVGKVKVEEVAKKTADKSKNILNNIERWQKGVASTDVFGVPIEATVQREQSGKAVPLVLVRCADYLVISGLNNEYLFKSEGDKKVLQQLVSLYNEDSGASLPEGVNPIDVGALVKCYLASIPEPLTTFSLYDELRAARVSIPDLRDILKKLPNVNYMTIEFVTALLLRVSHKSSLNKMDSRSLAVEFAPLIMWRQGDAGTDLRNHLKLTLKPPPKIVDTTSNTATWDLFDEDGEDASSQIPLDDASPPDYNSIEVIQCLIEHHNAIFTDANETVWR

SEQ ID NO: 22284 - DNA, 1528 bp, Zea mays subsp. mays
  misc_feature (1)..(1528): Ceres Seq. ID no. 12408393
atctcgcttgcgaaacaaaggacggcgcgcgagaggaggggaaaggaaaacaaccaccacgaccccgtccattccgttccacttccacccgagctcagcgatcgcggcggcggatgcggatggggaaggggctgtcgtcgcgggcggggtcgcggcaccggcagttccgcgcccgagccatgacccgcgtcgacgacctccaggaggtcttctcgggcctgcagtccgcgcgcaaggactcacgctccgcggacgccgccgtcctcgaggcgcagctccagcagatgctgcgcgagtggcgctccgagctcaacgctccctctcccacctcctccctgcagggcaacgccagggaactgtcggatccgccttcggatactcttcgtctactgcagttggtggtggccgaggaggaggatgacgccacgagcaagatggtcgagcagcagcagcagcccccacctccgctcccagctaaccggagccagggccacgcgcatgttgtgtgccagggcatgaagccggagccgcacgaggaagcagttgacgttgctgtggaccagccgcagctgctgagtcagggggttctgcctaatggtgctgctaccgcgtctgcggtgttccatgatcagctgtactatgtgaaccaggagctcacggtcgaggattttctttatgatgatgattacaagatagatctttctgggtctaatctggatgtcattaataacctagaagggattgttcagctggaatatccagatcacaatttgccgcaagggttagcccctaatgcataccttgacatgaatagttgtgggcagagtgccggggctgttttcctgcacatgccagatttgctcacaacaatgacttcagcaccttctgcattcctgaagccaaaatgcgctctctgggactgccccaggcctgctattggatcagaaagatggcataattattgcagcatgtatcatgctgatttggctgtgcaggaagagggccctccgggcacaatgcctgtgatccgtccaagaggcattgatctgaaagatggccccctgtttgctgctcttagtgcaaaagtccaaggaaaaaatgttggggtccctatctgtgaaggagctgccactgcaaagtctccatggaatgcacctgaacttttcgatctttacatatttgaaggtgaatctatcagagaatggttgttttttgacaaaccaaggagggcatttgatagtggaaatcggaagcagcggtccttgccagactacaacggccgtggttggcatgaatctaggaagcaggtgatgaaggactttgggggtctgaagaggtcctattacatggatccacaaccatccaacagctatgaatggcacctatatgaatatgagatcaatgactgtgatgcttttgccttatatcggcttgaattcaagtcttcagatgcaaagaaaattgcaaaatccaaattaggttgtaatccactgaatgaaattcagcagcaaatggatagactcagtcc

SEQ ID NO: 22285 - protein, 508 aa, Zea mays subsp. mays
  misc_feature (1)..(508): Ceres Seq. ID no. 12408394
LACETKDGAREEGKGKQPPRPRPFRSTSTRAQRSRRRMRMGKGLSSRAGSRHRQFRARAMTRVDDLQEVFSGLQSARKDSRSADAAVLEAQLQQMLREWRSELNAPSPTSSLQGNARELSDPPSDTLRLLQLVVAEEEDDATSKMVEQQQQPPPPLPANRSQGHAHVVCQGMKPEPHEEAVDVAVDQPQLLSQGVLPNGAATASAVFHDQLYYVNQELTVEDFLYDDDYKIDLSGSNLDVINNLEGIVQLEYPDHNLPQGLAPNAYLDMNSCGQSAGAVFLHMPDLLTTMTSAPSAFLKPKCALWDCPRPAIGSERWHNYCSMYHADLAVQEEGPPGTMPVIRPRGIDLKDGPLFAALSAKVQGKNVGVPICEGAATAKSPWNAPELFDLYIFEGESIREWLFFDKPRRAFDSGNRKQRSLPDYNGRGWHESRKQVMKDFGGLKRSYYMDPQPSNSYEWHLYEYEINDCDAFALYRLEFKSSDAKKIAKSKLGCNPLNEIQQQMDRLS

SEQ ID NO: 22286 - protein, 471 aa, Zea mays subsp. mays
  misc_feature (1)..(471): Ceres Seq. ID no. 12408395
MRMGKGLSSRAGSRHRQFRARAMTRVDDLQEVFSGLQSARKDSRSADAAVLEAQLQQMLREWRSELNAPSPTSSLQGNARELSDPPSDTLRLLQLVVAEEEDDATSKMVEQQQQPPPPLPANRSQGHAHVVCQGMKPEPHEEAVDVAVDQPQLLSQGVLPNGAATASAVFHDQLYYVNQELTVEDFLYDDDYKIDLSGSNLDVINNLEGIVQLEYPDHNLPQGLAPNAYLDMNSCGQSAGAVFLHMPDLLTTMTSAPSAFLKPKCALWDCPRPAIGSERWHNYCSMYHADLAVQEEGPPGTMPVIRPRGIDLKDGPLFAALSAKVQGKNVGVPICEGAATAKSPWNAPELFDLYIFEGESIREWLFFDKPRRAFDSGNRKQRSLPDYNGRGWHESRKQVMKDFGGLKRSYYMDPQPSNSYEWHLYEYEINDCDAFALYRLEFKSSDAKKIAKSKLGCNPLNEIQQQMDRLS

SEQ ID NO: 22287 - protein, 469 aa, Zea mays subsp. mays
  misc_feature (1)..(469): Ceres Seq. ID no. 12408396
MGKGLSSRAGSRHRQFRARAMTRVDDLQEVFSGLQSARKDSRSADAAVLEAQLQQMLREWRSELNAPSPTSSLQGNARELSDPPSDTLRLLQLVVAEEEDDATSKMVEQQQQPPPPLPANRSQGHAHVVCQGMKPEPHEEAVDVAVDQPQLLSQGVLPNGAATASAVFHDQLYYVNQELTVEDFLYDDDYKIDLSGSNLDVINNLEGIVQLEYPDHNLPQGLAPNAYLDMNSCGQSAGAVFLHMPDLLTTMTSAPSAFLKPKCALWDCPRPAIGSERWHNYCSMYHADLAVQEEGPPGTMPVIRPRGIDLKDGPLFAALSAKVQGKNVGVPICEGAATAKSPWNAPELFDLYIFEGESIREWLFFDKPRRAFDSGNRKQRSLPDYNGRGWHESRKQVMKDFGGLKRSYYMDPQPSNSYEWHLYEYEINDCDAFALYRLEFKSSDAKKIAKSKLGCNPLNEIQQQMDRLS

SEQ ID NO: 22288 - DNA, 2037 bp, Zea mays subsp. mays
  misc_feature (1)..(2037): Ceres Seq. ID no. 12408401
cttcgcccaactcgtcccattatttctctaaaaatccaacaaataaatccttgtgccagcagaaagtatagatcgtgttagctaaaagacatccgcgatgacgtcgacagcggtggggggcgagccggcggcgttgccacgggtactggcggtggagcaaagccgactttttcccggagccctcgttccagagctggcgcgcgtacggcggcgcgctcttgtccactgggccacggctgcgcgaccgcgtcacgagtcgctcatccgaggccgttgaggcggggacgctgctcgcccagagcgagaaccccctccggcggtgcctgtcgtgggtggatctcgccttcctcggattcggctccgtcgtcggctcgggcgtcttcgtgctcaccggccaggaggcgcggttcgacgccggcccggccatcccgctggcctacgccgccgcgggcttctcggcgctgctctcgtccttctgctacgcggagctcgccggcgagatcccgtcggctggcggctcgttctcgtacctgcgcgtcgagctcggggacctggccgcgttcatcgccgccgggaacatcctgctcgaggccgtggtgggcgcggccggcctgggccggtcctggacgtcgtacctcgcggcgctcatcggccgcgacagcgacgcgctccgcatccacgtccccgcgctcgccgacggcttcaatctgctggacccgatcgccgtcgtcgtgctgtgcgccacttccgcgctcgccgtgtccggcgcgcgcctcacctccaccgtcaactcggtggcgtccgcggtcggcatcgccatcatcgcgttcgtgctggccgcggggttctcgcacttcgagccagccaacctcgcgccgtcattcttccccttcggcgccgcgggcgtcttccgcgcggcggccgtcgtgtactggtcctacacgggattcgacatggtggccaccatggccgaggagaccaagaaccccggcccgcgacgtgccgctgggcctcatctcgtccatgtccgccatcaccctcgtctactgcgccatgtccctcgcgctcgtggggatgcagcgctacagcgacattgacgccaacgcggcctactcggtggcgttcgcggcggccgggatgaagtgggcgcgctacgtcgtggcgctcggcgcgctcaagggcatgacgagcggcctcctcgtcggcgcgctcggccaggcgcgctacaccacgcagatcgcgcgcacgcacatgatcccgccctacttcgcgctcgtgcaccccaggaccggcacgcccatctacgccaccatcgccgtcacgctcggcgccgcctgcgtcgcgctcttctccagcctcgacgtgctcgcgtccgtctcctccatcagcacgctcttcatcttcgcgctcgtcgccgttgcgctcctcgtccgacgatactacgtcgcgggaaccacgtcacccgcgcaggcccgcaccttcgtcggcttcctggcgctgatcgtgctgtcgtccatcgggctgtccgtgtactacaactcgggctacgctgctcggtggcccgggtacgtagcgttcggcgctttgtgggcggccggcacggcggggctggcgctattcgcggagcagcagcgcgcgcccagggtatacggcgcgccgctcatgccgtggctgccggccatgtccgtcgccacaaacctcttccttatgggctctctcggctccctcgcctacatgcgctttggcatctgcacggcggcgatgcttgtgtactacgtgctcttcagcgtgcacgccacctatgacatggtgcactctcaaggtcagacgacatcggcggccgacgctgccaccgacggagtggagcagaggaagataatgccggtgtgacacagaggatgtcatttcttggttagttgagcaaaaggtttgttcaactgtagtgtagggtagacttgagtttggtttgttcaattgctctagttaattggatccctcgttcagaatagctcatctgtatgaaaaaatggtttgtgc

SEQ ID NO: 22289 - protein, 288 aa, Zea mays subsp. mays
  misc_feature (1)..(288): Ceres Seq. ID no. 12408402
MSAITLVYCAMSLALVGMQRYSDIDANAAYSVAFAAAGMKWARYVVALGALKGMTSGLLVGALGQARYTTQIARTHMIPPYFALVHPRTGTPIYATIAVTLGAACVALFSSLDVLASVSSISTLFIFALVAVALLVRRYYVAGTTSPAQARTFVGFLALIVLSSIGLSVYYNSGYAARWPGYVAFGALWAAGTAGLALFAEQQRAPRVYGAPLMPWLPAMSVATNLFLMGSLGSLAYMRFGICTAAMLVYYVLFSVHATYDMVHSQGQTTSAADAATDGVEQRKIMPV

SEQ ID NO: 22290 - protein, 278 aa, Zea mays subsp. mays
  misc_feature (1)..(278): Ceres Seq. ID no. 12408403
MSLALVGMQRYSDIDANAAYSVAFAAAGMKWARYVVALGALKGMTSGLLVGALGQARYTTQIARTHMIPPYFALVHPRTGTPIYATIAVTLGAACVALFSSLDVLASVSSISTLFIFALVAVALLVRRYYVAGTTSPAQARTFVGFLALIVLSSIGLSVYYNSGYAARWPGYVAFGALWAAGTAGLALFAEQQRAPRVYGAPLMPWLPAMSVATNLFLMGSLGSLAYMRFGICTAAMLVYYVLFSVHATYDMVHSQGQTTSAADAATDGVEQRKIMPV

SEQ ID NO: 22291 - protein, 271 aa, Zea mays subsp. mays
  misc_feature (1)..(271): Ceres Seq. ID no. 12408404
MQRYSDIDANAAYSVAFAAAGMKWARYVVALGALKGMTSGLLVGALGQARYTTQIARTHMIPPYFALVHPRTGTPIYATIAVTLGAACVALFSSLDVLASVSSISTLFIFALVAVALLVRRYYVAGTTSPAQARTFVGFLALIVLSSIGLSVYYNSGYAARWPGYVAFGALWAAGTAGLALFAEQQRAPRVYGAPLMPWLPAMSVATNLFLMGSLGSLAYMRFGICTAAMLVYYVLFSVHATYDMVHSQGQTTSAADAATDGVEQRKIMPV

SEQ ID NO: 22292 - DNA, 1323 bp, Zea mays subsp. mays
  misc_feature (1)..(1323): Ceres Seq. ID no. 12408405
aagcttgggagttgggagtgacaccgcggcacctccactgcagtagtcttgttgccggcggcggcggcgggcggcggcgcggagaaattcggcgaacgatggcggactccggaagcctgaggaagcgggaggagaaggaagaggaggacgacattgtctgcctggatccttccttcttcgtggaccgcagctacgagatgacgaccttcaccttcggatcccacgagttgcgcctcctctgcctccgcgccgcttccactgattttgatcttactggacagttagtgtggccaggggcagtccttatgaacaactacctatctcaacaccctgaaattgtgaagggatgttcagtagttgagctaggatctgggattggcattactggcatattgtgtagccgtttctgcaaggaggttgtcttgactgatcacaatgatgaagttctggagattataaagaaaaatatagagttgcagtcatgttctgagaatgcacatgcagtgttgacagccgagaaactagagtggggaaactcagatcatttaagcggtattattgaaaaacatcctggtggatttgatcttgttcttggagctgatatttgcttccagcaatctagcatttcctgcctctttgatactgtagagaggattgttcgtattcaagctggtaaatgcagattcatattggcttatgtatcccgaactaaagtcatggatgcactagtactcaaggaagctgaaaagcatggaatgcgtgttgaagaagtgaacggaacaagaacaaccatctcgaatcttgaaggagtcatatttgacattaccctgaaatgacagtccgtccttcgactctcctttgtcgaagtgcttgagtggttattcgtcatgaagtcctgtgtaacttccttttagcgggaaaatcgaagttccgcatcatgatgagctggagttgtgtcagttgtatctctgtagaggaggaggcaccacagtaagaacattagccgatgatggtctttgattcatgcgcccatttggtgtggctttctactgttcaactgctccatcctttaagccaatatataagatgtaagatgcgtgctacaactttctcggactatctatctatctatcggtgagatgaccagactgtgaaagttcctgtgacaaggagttgctgaaagcagtgccatcatgtatgggttgcagatgcttggtctgaactctgtaaaaggctctggattaccatgagtttttcgtgcttggtgcagtagcatgtaagtaagcaccaactgaacagaagaaaccttcagcacccccttcg

SEQ ID NO: 22293 - protein, 277 aa, Zea mays subsp. mays
  misc_feature (1)..(277): Ceres Seq. ID no. 12408406
AWELGVTPRHLHCSSLVAGGGGGRRRGEIRRTMADSGSLRKREEKEEEDDIVCLDPSFFVDRSYEMTTFTFGSHELRLLCLRAASTDFDLTGQLVWPGAVLMNNYLSQHPEIVKGCSVVELGSGIGITGILCSRFCKEVVLTDHNDEVLEIIKKNIELQSCSENAHAVLTAEKLEWGNSDHLSGIIEKHPGGFDLVLGADICFQQSSISCLFDTVERIVRIQAGKCRFILAYVSRTKVMDALVLKEAEKHGMRVEEVNGTRTTISNLEGVIFDITLK

SEQ ID NO: 22294 - protein, 245 aa, Zea mays subsp. mays
  misc_feature (1)..(245): Ceres Seq. ID no. 12408407
MADSGSLRKREEKEEEDDIVCLDPSFFVDRSYEMTTFTFGSHELRLLCLRAASTDFDLTGQLVWPGAVLMNNYLSQHPEIVKGCSVVELGSGIGITGILCSRFCKEVVLTDHNDEVLEIIKKNIELQSCSENAHAVLTAEKLEWGNSDHLSGIIEKHPGGFDLVLGADICFQQSSISCLFDTVERIVRIQAGKCRFILAYVSRTKVMDALVLKEAEKHGMRVEEVNGTRTTISNLEGVIFDITLK

SEQ ID NO: 22295 - protein, 212 aa, Zea mays subsp. mays
  misc_feature (1)..(212): Ceres Seq. ID no. 12408408
MTTFTFGSHELRLLCLRAASTDFDLTGQLVWPGAVLMNNYLSQHPEIVKGCSVVELGSGIGITGILCSRFCKEVVLTDHNDEVLEIIKKNIELQSCSENAHAVLTAEKLEWGNSDHLSGIIEKHPGGFDLVLGADICFQQSSISCLFDTVERIVRIQAGKCRFILAYVSRTKVMDALVLKEAEKHGMRVEEVNGTRTTISNLEGVIFDITLK

SEQ ID NO: 22296 - DNA, 1350 bp, Zea mays subsp. mays
  misc_feature (1)..(1350): Ceres Seq. ID no. 12408432
atcacactcgcacagtctcaccacagcgagcgagagcaaggcgcccaagcaaccaccgcgagaacaagtcgcagccaaacagccccgtctcccagcgaagcttgagcttgcattattctaccatgtcttccatggagctgctccacgccgtcgtcccggagaagcagagcgaggaggaggtcgcgcccgcagcgacgaccacgagcagcagcgccaccgccacgggcggggacgagggcgcccacgtgctccaggggtgggccaagaggaagcgctcgcgccgccagcgatcggaggaggagaacctcgcgctctgcctcctcatgctctcccgcggtggccaccaccgcgtccaggcgccgccaacgccggtcccgtccgcggcgccggccgccgcggagttcaggtgctccgtctgcggcaagtccttcagctcctaccaggcgctggggggccacaagaccagccaccgcgtcaagctgcccacccctcctcctcctcctcctgctgtaactgtcccggcagcagtgcccgtcccggaggcccccgccccgaccaccgtcgtcgtcccgccgctgccgccagtcgaggtcggccgcgagccggccacgtcatccaccgccgcgtcctccgacggggcggcctcgagcagagtccaccggtgctccatctgccacaaggagttcccgaccggccaggcgctcggcgggcacaagaggaagcactacgacgggggcgtcggcagcgccgccgcgtccaccgacgtcccggcggcgcccgccgagacgtccgccgaggtcgggagctccgccgcgcgtgcgttcgacctcaacctcccggccgtgccggagttcgtgttccggtgcggcaagcccggcaagatgtgggaggaggacgaggaggtgcagagccccctcgccttcaagaagccccgcctcctcatgaccgcgtgaaaccgctgcgcgcgcgggcggcggatctcatctcatcacccgtccaagattttggtccgcagctgccgagttcagcggtggaagtggaacacactattcgttcattcatttcgtatggtgccagtagcgctattgtttgatttttgtggctgctcctcttgtacagtaccgagtgcgagaaaagatgcatagtcatcgtatacataccaatacaataccgtacctataggtcttcctattcctgtggaagagtagaacttgtatccttattagctgtcagttcatacacacttggttctcattatcagagatcattggtgaattagtggttttgtatcataagcttattgtaaatgatggattggagattagtatggaatcagatacccatttgtgc

SEQ ID NO: 22297 - protein, 363 aa, Zea mays subsp. mays
  misc_feature (1)..(363): Ceres Seq. ID no. 12408433
SHSHSLTTASESKAPKQPPREQVAAKQPRLPAKLELALFYHVFHGAAPRRRPGEAERGGGRARSDDHEQQRHRHGRGRGRPRAPGVGQEEALAPPAIGGGEPRALPPHALPRWPPPRPGAANAGPVRGAGRRGVQVLRLRQVLQLLPGAGGPQDQPPRQAAHPSSSSSCCNCPGSSARPGGPRPDHRRRPAAAASRGRPRAGHVIHRRVLRRGGLEQSPPVLHLPQGVPDRPGARRAQEEALRRGRRQRRRVHRRPGGARRDVRRGRELRRACVRPQPPGRAGVRVPVRQARQDVGGGRGGAEPPRLQEAPPPHDRVKPLRARAADLISSPVQDFGPQLPSSAVEVEHTIRSFISYGASSAIV

SEQ ID NO: 22298 - protein, 316 aa, Zea mays subsp. mays
  misc_feature (1)..(316): Ceres Seq. ID no. 12408434
HTRTVSPQRARARRPSNHRENKSQPNSPVSQRSLSLHYSTMSSMELLHAVVPEKQSEEEVAPAATTTSSSATATGGDEGAHVLQGWAKRKRSRRQRSEEENLALCLLMLSRGGHHRVQAPPTPVPSAAPAAAEFRCSVCGKSFSSYQALGGHKTSHRVKLPTPPPPPPAVTVPAAVPVPEAPAPTTVVVPPLPPVEVGREPATSSTAASSDGAASSRVHRCSICHKEFPTGQALGGHKRKHYDGGVGSAAASTDVPAAPAETSAEVGSSAARAFDLNLPAVPEFVFRCGKPGKMWEEDEEVQSPLAFKKPRLLMTA

SEQ ID NO: 22299 - protein, 276 aa, Zea mays subsp. mays
  misc_feature (1)..(276): Ceres Seq. ID no. 12408435
MSSMELLHAVVPEKQSEEEVAPAATTTSSSATATGGDEGAHVLQGWAKRKRSRRQRSEEENLALCLLMLSRGGHHRVQAPPTPVPSAAPAAAEFRCSVCGKSFSSYQALGGHKTSHRVKLPTPPPPPPAVTVPAAVPVPEAPAPTTVVVPPLPPVEVGREPATSSTAASSDGAASSRVHRCSICHKEFPTGQALGGHKRKHYDGGVGSAAASTDVPAAPAETSAEVGSSAARAFDLNLPAVPEFVFRCGKPGKMWEEDEEVQSPLAFKKPRLLMTA

SEQ ID NO: 22300 - DNA, 1621 bp, Zea mays subsp. mays
  misc_feature (1)..(1621): Ceres Seq. ID no. 12408436
ctctcttttccgccctccacccctcgcgagctctccacccctccacacgaccctcctcggcggcggcggcggcgatgcagatggcggcgaccaccaccgagtcccaaccggccgtgccgcctcaacaccctcacgcccacccccacgcgcccccgcagcatgctcatccgcaccaccacatgccgcagccacggtgggtcgtcatcccgtacccgccgccgccgcccatggtggccgcgccaccaccaccgccgcagtttgccaagcacttcgctgctgggccgccgccgccgccccaagctggtgctgggcgccgcacgccgaccccgccctcgtctggatccggcgggaacgggtgcgaagaaaataaaaccatttgggtcggtgacctccagtactggatggatgaaaactacctacataactgcttcgggcccagcggcgaggtggttacaataaaagttatccgcaataggcaaacaggacagtcagaggggtatggatttgttgagttcttttctcatgcatcagcagagaaagctcttcagaattttactggtcatgtgatgccaaacactgaccggccatttaaattgaactgggcatcgtatagcatgggtgaaaagcgatctgaagtggcttctgatcactcgatatttgttggcgatctagctgctgatgtcactgatgaaatgctgctggagcttttctccagcaagtaccgctcggtgaaaggagctaaagttattattgatgcaaacacaggccgttccaggggctatggatttgtcaggtttggagacgacaacgacaaatctcatgccatgtctgaaatgaatggtgtatattgctctacgaggccaattcgtataggacctgcgactcccagaagatcttcaggtgattctggctcctcgactcctggtcattcagatggtgattcttctaacagaacggtatatgttggtgggcttgaccccaatgtcagtgaagatgaactgagaaaagcctttgccaaatatgatcttgcctctgtgaaaattcctctaggaaagcaatgtggctttgttcaatttgttagcagaactgatgctgaagaagcactacaaggattaaatggatcactcattggaaagcaggcagttcgcctttcatgggtccgcagcccatcacataagcagtctaggggtgactccgtcaacaggaggaacaacatgtactatggcacaccattctacggcggatatggctatgcctccccggtgccacacccaaacatgtacgctgcagcgtatggcacgtacccgctatatggcaaccagcagctagtgagctagagagctcccctccgacgtgtcccctctgacgggaaacaaaggttttggtccggtgagcatagtagcgtcaggtgagaaggtgcctttataaggctgtcctaagaagtgggcgagatatgttgttgcatcgttatcgttatggtgcctgtaactgttgtgtgtgccgtgtgcgtccggaagaattggatggaatggaactcgtggcttgttgtagtacatcagagagtcatgttattctttcaagaaattttgacttggaaataaattaaactattgtttgtgcg

SEQ ID NO: 22301 - protein, 444 aa, Zea mays subsp. mays
  misc_feature (1)..(444): Ceres Seq. ID no. 12408437
LFSALHPSRALHPSTRPSSAAAAAMQMAATTTESQPAVPPQHPHAHPHAPPQHAHPHHHMPQPRWVVIPYPPPPPMVAAPPPPPQFAKHFAAGPPPPPQAGAGRRTPTPPSSGSGGNGCEENKTIWVGDLQYWMDENYLHNCFGPSGEVVTIKVIRNRQTGQSEGYGFVEFFSHASAEKALQNFTGHVMPNTDRPFKLNWASYSMGEKRSEVASDHSIFVGDLAADVTDEMLLELFSSKYRSVKGAKVIIDANTGRSRGYGFVRFGDDNDKSHAMSEMNGVYCSTRPIRIGPATPRRSSGDSGSSTPGHSDGDSSNRTVYVGGLDPNVSEDELRKAFAKYDLASVKIPLGKQCGFVQFVSRTDAEEALQGLNGSLIGKQAVRLSWVRSPSHKQSRGDSVNRRNNMYYGTPFYGGYGYASPVPHPNMYAAAYGTYPLYGNQQLVS

SEQ ID NO: 22302 - protein, 420 aa, Zea mays subsp. mays
  misc_feature (1)..(420): Ceres Seq. ID no. 12408438
MQMAATTTESQPAVPPQHPHAHPHAPPQHAHPHHHMPQPRWVVIPYPPPPPMVAAPPPPPQFAKHFAAGPPPPPQAGAGRRTPTPPSSGSGGNGCEENKTIWVGDLQYWMDENYLHNCFGPSGEVVTIKVIRNRQTGQSEGYGFVEFFSHASAEKALQNFTGHVMPNTDRPFKLNWASYSMGEKRSEVASDHSIFVGDLAADVTDEMLLELFSSKYRSVKGAKVIIDANTGRSRGYGFVRFGDDNDKSHAMSEMNGVYCSTRPIRIGPATPRRSSGDSGSSTPGHSDGDSSNRTVYVGGLDPNVSEDELRKAFAKYDLASVKIPLGKQCGFVQFVSRTDAEEALQGLNGSLIGKQAVRLSWVRSPSHKQSRGDSVNRRNNMYYGTPFYGGYGYASPVPHPNMYAAAYGTYPLYGNQQLVS

SEQ ID NO: 22303 - protein, 418 aa, Zea mays subsp. mays
  misc_feature (1)..(418): Ceres Seq. ID no. 12408439
MAATTTESQPAVPPQHPHAHPHAPPQHAHPHHHMPQPRWVVIPYPPPPPMVAAPPPPPQFAKHFAAGPPPPPQAGAGRRTPTPPSSGSGGNGCEENKTIWVGDLQYWMDENYLHNCFGPSGEVVTIKVIRNRQTGQSEGYGFVEFFSHASAEKALQNFTGHVMPNTDRPFKLNWASYSMGEKRSEVASDHSIFVGDLAADVTDEMLLELFSSKYRSVKGAKVIIDANTGRSRGYGFVRFGDDNDKSHAMSEMNGVYCSTRPIRIGPATPRRSSGDSGSSTPGHSDGDSSNRTVYVGGLDPNVSEDELRKAFAKYDLASVKIPLGKQCGFVQFVSRTDAEEALQGLNGSLIGKQAVRLSWVRSPSHKQSRGDSVNRRNNMYYGTPFYGGYGYASPVPHPNMYAAAYGTYPLYGNQQLVS

SEQ ID NO: 22304 - DNA, 1500 bp, Zea mays subsp. mays
  misc_feature (1)..(1500): Ceres Seq. ID no. 12408444
aagttcgatccagattatagcagctagctcaccgtcaccgacatacagtacaatagcagcttattagcttgtgtcagtccatccatccatccatggagaaactcgtctacttcgcgaccattatatccttatccatggcggcgctgctagtgccactccgcgtacagtgcgaagaagcagctagagctgctgctgccagaagctgccatgccggcaccggagcttctgcttctgcaccagccgcagcagcagcgtggaaaaggagctgcggcggcggcaaggcggggaagcagcagccgcaggtggagggcatgttcgtgttcgggagctcgctggtggacaacggcaacaacaactttctcaacggctccggcgtgcgcgcagactacctcccctacggcgtggacttccccctcggcccctccggccgtttctccaacggccgcaacgtcatcgacgcgctcggcgagctcctcggcctccccgggctcgtcccacccttcgccgacccgcgcacccggcgggcccgcgccgcgctgcgcggcgtcaacttcgcctccggcggctccggcatcctggagcacaccgggcagggcaaggtggtgagcctgcggcagcagatcaccaactttgagtcggtgacccttcctgacctgcgggcccaactgcgtggaccagctgcggccgccaaccactggatcaagggtcaagattccttccacaagtgctacctctccaagtgcctcttcgtcatcggcacaggtggcaatgactacctgctcgactacttcaaccccgggaacggcacccaaggtgggccgcccttgtcagagttcactgcgtctctcatcaccaagctctccggacatcttcagaggttgtacgctcttggcgcacggaagtttgtgatcttctcgatccagccgaccgggtgcacccccgtggtacgggcgttcctcaacatcaccggcggcgcctgcatcgagccggtgaacgacgcggtggcgctcttcaacgccgagctcaggcggctggtggatggcgcgaggcggcgcatgcccgccgccaggttcgcctttatcgactcctacaggatcatcaaggacatgctggaccaccccgccaaacatggcgttagggagacgagcagagcctgctgcgagatgtcgaggagctcgtcgggcgtgctgtgcaagaagcaggggcccatctgcagcgaccggacggagtacgtcttcttcgacgggctgcacccgacggacgccgtgaacgccaggatcgcgcgcaagggctacggctccagctcgcccgaccacgcctaccccatcaacgtcaagaagctagccatgctgtagcccttgtagaagctagccatgcatgcttgtaacctagctttgtactagtagtaataatctagaattaatgcctacctcatcaacgccaacatcgttcgactacttactagtagtactagttctctgtgaaatagtctaataagcc

SEQ ID NO: 22305 - protein, 420 aa, Zea mays subsp. mays
  misc_feature (1)..(420): Ceres Seq. ID no. 12408445
MEKLVYFATIISLSMAALLVPLRVQCEEAARAAAARSCHAGTGASASAPAAAAAWKRSCGGGKAGKQQPQVEGMFVFGSSLVDNGNNNFLNGSGVRADYLPYGVDFPLGPSGRFSNGRNVIDALGELLGLPGLVPPFADPRTRRARAALRGVNFASGGSGILEHTGQGKVVSLRQQITNFESVTLPDLRAQLRGPAAAANHWIKGQDSFHKCYLSKCLFVIGTGGNDYLLDYFNPGNGTQGGPPLSEFTASLITKLSGHLQRLYALGARKFVIFSIQPTGCTPVVRAFLNITGGACIEPVNDAVALFNAELRRLVDGARRRMPAARFAFIDSYRIIKDMLDHPAKHGVRETSRACCEMSRSSSGVLCKKQGPICSDRTEYVFFDGLHPTDAVNARIARKGYGSSSPDHAYPINVKKLAML

SEQ ID NO: 22306 - protein, 406 aa, Zea mays subsp. mays
  misc_feature (1)..(406): Ceres Seq. ID no. 12408446
MAALLVPLRVQCEEAARAAAARSCHAGTGASASAPAAAAAWKRSCGGGKAGKQQPQVEGMFVFGSSLVDNGNNNFLNGSGVRADYLPYGVDFPLGPSGRFSNGRNVIDALGELLGLPGLVPPFADPRTRRARAALRGVNFASGGSGILEHTGQGKVVSLRQQITNFESVTLPDLRAQLRGPAAAANHWIKGQDSFHKCYLSKCLFVIGTGGNDYLLDYFNPGNGTQGGPPLSEFTASLITKLSGHLQRLYALGARKFVIFSIQPTGCTPVVRAFLNITGGACIEPVNDAVALFNAELRRLVDGARRRMPAARFAFIDSYRIIKDMLDHPAKHGVRETSRACCEMSRSSSGVLCKKQGPICSDRTEYVFFDGLHPTDAVNARIARKGYGSSSPDHAYPINVKKLAML

SEQ ID NO: 22307 - protein, 347 aa, Zea mays subsp. mays
  misc_feature (1)..(347): Ceres Seq. ID no. 12408447
MFVFGSSLVDNGNNNFLNGSGVRADYLPYGVDFPLGPSGRFSNGRNVIDALGELLGLPGLVPPFADPRTRRARAALRGVNFASGGSGILEHTGQGKVVSLRQQITNFESVTLPDLRAQLRGPAAAANHWIKGQDSFHKCYLSKCLFVIGTGGNDYLLDYFNPGNGTQGGPPLSEFTASLITKLSGHLQRLYALGARKFVIFSIQPTGCTPVVRAFLNITGGACIEPVNDAVALFNAELRRLVDGARRRMPAARFAFIDSYRIIKDMLDHPAKHGVRETSRACCEMSRSSSGVLCKKQGPICSDRTEYVFFDGLHPTDAVNARIARKGYGSSSPDHAYPINVKKLAML

SEQ ID NO: 22308 - DNA, 1683 bp, Zea mays subsp. mays
  misc_feature (1)..(1683): Ceres Seq. ID no. 12408452
accatctttaggataagatagcaaatatatggccatcatactcgtacgagcagcgtcgccggggctctccgccgccgacagcatcagccaccaggggactctccagtgctccaccctgctcaagacgaagaggccggcggcgcgccggtggatgccctgctcgctccttggcctccacccgtgggaggctggccgtccctcccccgccgtctactccagcctcgccgtcaacccggcgggagaggccgtcgtctcgtccgagcagaaggtctacgacgtcgtgctcaagcaggccgcattgctcaaacgccagctgcgcacgccggtcctacgccaggccccaggacatggacatgccacgcaacgggctcaaggaagcctacgaccgctgcggcgagatctgtgaggagtatgccaagacgttttacctcggaactatgttgatgacagaggagcggcgccgcgccatatgggccatctatgtgtggtgtaggaggacagatgagcttgtagatgggccaaacgccaactacattacaccaacagctttggaccggtgggagaagagacttgaggatctgttcacgggacgtccttacgacatgcttgatgccgctctctctgataccatctcaaggttccccatagacattcagccattcagggacatgattgaagggatgaggagtgatcttaggaagacaaggtataacaacttcgacgagctctacatgtactgctactatgttgctggaactgtcgggttaatgagcgtacctgtgatgggcatcgcaaccgagtctaaagcaacaactgaaagcgtatacagtgctgccttggctctgggaattgcgaaccaactcacgaacatactccgggatgttggagaggatgctagaagaggaaggatatatttaccacaagatgagcttgcacaggcagggctctctgatgaggacatcttcaaaggggtcgtcacgaaccggtggagaaacttcatgaagaggcagatcaagagggccaggatgttttttgaggaggcagagagaggggtaaatgagctctcacaggctagcagatggccagtatgggcttccctgttgttgtacaggcagatcctggatgagatcgaagccaacgactacaacaacttcacgaagagggcgtatgttggtaaagggaagaagttgctagcacttcctgtggcatatggaaaatcgctactgctcccatgttcattgagaaatggccagacctagccatcagagaagctgcaatgcaaggttcaggttaggctagatagaaagttaaatggggcaacatcaggaggccttgatgaaaaacagacaacctggtgaattgttgttgggatcaggcacagaacagataagagccgcgcagccaacctagatggatacggaacattcgcctcttattcggagcaatatatgtctctcaaggaaagagcccaacatgtatactgccttctttttctcatcccagatttgggggaaaaacaatgtaaatgccaatggtatcgtaggaagattactagaagtaaatgccaatgtaaaaacagatgagttggcatttacatgataggatggtggggtcatcagactgaaaatgataggggattgtgctcccctgcgactccaactattaaacaaggaatccgtcagc

SEQ ID NO: 22309 - protein, 303 aa, Zea mays subsp. mays
  misc_feature (1)..(303): Ceres Seq. ID no. 12408453
MDMPRNGLKEAYDRCGEICEEYAKTFYLGTMLMTEERRRAIWAIYVWCRRTDELVDGPNANYITPTALDRWEKRLEDLFTGRPYDMLDAALSDTISRFPIDIQPFRDMIEGMRSDLRKTRYNNFDELYMYCYYVAGTVGLMSVPVMGIATESKATTESVYSAALALGIANQLTNILRDVGEDARRGRIYLPQDELAQAGLSDEDIFKGVVTNRWRNFMKRQIKRARMFFEEAERGVNELSQASRWPVWASLLLYRQILDEIEANDYNNFTKRAYVGKGKKLLALPVAYGKSLLLPCSLRNGQT

SEQ ID NO: 22310 - protein, 301 aa, Zea mays subsp. mays
  misc_feature (1)..(301): Ceres Seq. ID no. 12408454
MPRNGLKEAYDRCGEICEEYAKTFYLGTMLMTEERRRAIWAIYVWCRRTDELVDGPNANYITPTALDRWEKRLEDLFTGRPYDMLDAALSDTISRFPIDIQPFRDMIEGMRSDLRKTRYNNFDELYMYCYYVAGTVGLMSVPVMGIATESKATTESVYSAALALGIANQLTNILRDVGEDARRGRIYLPQDELAQAGLSDEDIFKGVVTNRWRNFMKRQIKRARMFFEEAERGVNELSQASRWPVWASLLLYRQILDEIEANDYNNFTKRAYVGKGKKLLALPVAYGKSLLLPCSLRNGQT

SEQ ID NO: 22311 - protein, 273 aa, Zea mays subsp. mays
  misc_feature (1)..(273): Ceres Seq. ID no. 12408455
MLMTEERRRAIWAIYVWCRRTDELVDGPNANYITPTALDRWEKRLEDLFTGRPYDMLDAALSDTISRFPIDIQPFRDMIEGMRSDLRKTRYNNFDELYMYCYYVAGTVGLMSVPVMGIATESKATTESVYSAALALGIANQLTNILRDVGEDARRGRIYLPQDELAQAGLSDEDIFKGVVTNRWRNFMKRQIKRARMFFEEAERGVNELSQASRWPVWASLLLYRQILDEIEANDYNNFTKRAYVGKGKKLLALPVAYGKSLLLPCSLRNGQT

SEQ ID NO: 22312 - DNA, 1676 bp, Zea mays subsp. mays
  misc_feature (1)..(1676): Ceres Seq. ID no. 12408456
gcgccagcagactctttttaatagccgacctcaaccaacgtcgagaggaaacccactgttgcagcgcgagtgtagcaggctgcacacacaaggaaggggacaaccacaagcgcctaagatcccgtcctccgcgtcgagatctttgccgaggcggtgaccgtcgagggatcgccatggcgttgagggcgtcccccgtgtcgcatggcaccgcggcagcgccgctgccgcctttcgcgcggaggaggatggcccgtggggtggtggtggccatggcgtccaccatcaacagggtcaaaactgtcaaagaaccctatacccctccacgagaggtacatcgccaaattacccattcactaccacctcaaaagcgggagattttcgattcacttcaaccttgggccaaggataacctactgaacctactgaagccagttgaaaagtcatggcagccacaggacttcctaccagagccttcttctgatgggttttatgatgaagttaaagaactgagggagcgggcaaatgaaatacctgatgaatactttgtttgcttagttggtgatatggttactgaggaagccttacctacataccaaacaatgcttaacactcttgatggagtccgggatgaaactggtgcaagtccaaccacgtgggcggtttggacaagggcatggacagctgaagagaacagacatggtgacctccttaacaagtacatgtaccttactggacgggttgacatgaaacaaattgagaagaccatacaatatctgattggttccggaatggatcctggaactgagaacaacccctacttgggtttcctctacacatcattccaagaaagggcaacatttgtgtcgcatgggaatactgcaaggcatgccaaggagtatggtgatctcaagctggcccagatatgtggcacgatagcagccgatgagaagcgccacgaaacagcctacaccaagatagtcgagaagctcttcgagatggaccctgattacacagtgcttgcgtttgctgacatgatgaggaagaagatcacgatgccagcccatctcatgtacgacggtaaggacgacaacctgttcgagcacttcagcgcggtggcgcagaggctgggcgtctacaccgccaaagactacgccgacatcctcgagttcctggtccagaggtggaaagtcgcggagctcacagggctgtctggagaagggagaagggcgcaggactttgtctgtaccttggcgccgaggatcaggcggctggatgatagagctcaagcgagggcgaagcaagcaccggttattcctttcagttgggtttatgaccgcaaggtgcagctttaatcaagaacgctaggcaatgtgggcatttactacgtatatcattttcagtcctggggttctctataagaaacagtctctaggttatctagcagggtacaattcaactactcgtggatctcactcggtgcaaagtagtgcaaagtacgctatctgttgttaccgtgcaagctgcagagtttggattactatgtgggcctggtgatggagaggaattctgtggggtgcctgcagccagttatgagtggcagctccatcgcaactgagttgttgtattgaatatgttacaggacctatagtaaccgaaagtaataatatggagtttgt

SEQ ID NO: 22313 - protein, 449 aa, Zea mays subsp. mays
  misc_feature (1)..(449): Ceres Seq. ID no. 12408457
ASRLFLIADLNQRREETHCCSASVAGCTHKEGDNHKRLRSRPPRRDLCRGGDRRGIAMALRASPVSHGTAAAPLPPFARRRMARGVVVAMASTINRVKTVKEPYTPPREVHRQITHSLPPQKREIFDSLQPWAKDNLLNLLKPVEKSWQPQDFLPEPSSDGFYDEVKELRERANEIPDEYFVCLVGDMVTEEALPTYQTMLNTLDGVRDETGASPTTWAVWTRAWTAEENRHGDLLNKYMYLTGRVDMKQIEKTIQYLIGSGMDPGTENNPYLGFLYTSFQERATFVSHGNTARHAKEYGDLKLAQICGTIAADEKRHETAYTKIVEKLFEMDPDYTVLAFADMMRKKITMPAHLMYDGKDDNLFEHFSAVAQRLGVYTAKDYADILEFLVQRWKVAELTGLSGEGRRAQDFVCTLAPRIRRLDDRAQARAKQAPVIPFSWVYDRKVQL

SEQ ID NO: 22314 - protein, 392 aa, Zea mays subsp. mays
  misc_feature (1)..(392): Ceres Seq. ID no. 12408458
MALRASPVSHGTAAAPLPPFARRRMARGVVVAMASTINRVKTVKEPYTPPREVHRQITHSLPPQKREIFDSLQPWAKDNLLNLLKPVEKSWQPQDFLPEPSSDGFYDEVKELRERANEIPDEYFVCLVGDMVTEEALPTYQTMLNTLDGVRDETGASPTTWAVWTRAWTAEENRHGDLLNKYMYLTGRVDMKQIEKTIQYLIGSGMDPGTENNPYLGFLYTSFQERATFVSHGNTARHAKEYGDLKLAQICGTIAADEKRHETAYTKIVEKLFEMDPDYTVLAFADMMRKKITMPAHLMYDGKDDNLFEHFSAVAQRLGVYTAKDYADILEFLVQRWKVAELTGLSGEGRRAQDFVCTLAPRIRRLDDRAQARAKQAPVIPFSWVYDRKVQL

SEQ ID NO: 22315 - protein, 368 aa, Zea mays subsp. mays
  misc_feature (1)..(368): Ceres Seq. ID no. 12408459
MARGVVVAMASTINRVKTVKEPYTPPREVHRQITHSLPPQKREIFDSLQPWAKDNLLNLLKPVEKSWQPQDFLPEPSSDGFYDEVKELRERANEIPDEYFVCLVGDMVTEEALPTYQTMLNTLDGVRDETGASPTTWAVWTRAWTAEENRHGDLLNKYMYLTGRVDMKQIEKTIQYLIGSGMDPGTENNPYLGFLYTSFQERATFVSHGNTARHAKEYGDLKLAQICGTIAADEKRHETAYTKIVEKLFEMDPDYTVLAFADMMRKKITMPAHLMYDGKDDNLFEHFSAVAQRLGVYTAKDYADILEFLVQRWKVAELTGLSGEGRRAQDFVCTLAPRIRRLDDRAQARAKQAPVIPFSWVYDRKVQL

SEQ ID NO: 22316 - DNA, 1491 bp, Zea mays subsp. mays
  misc_feature (1)..(1491): Ceres Seq. ID no. 12408460
accaccagtagtcctactggtccttgacgtccgtggccactcaggttgtgttctcggagttctttcgccgggtggggaggcggagtgcgcggtcgaggaaggccttagcggtcgatcgatcggcgccgcgcttgactgcctgtacatgaggagcggctgcggcggcggcggagggagacaacctggggaaggaggcgggggaggcgctggggctgctgggctgcgtcaatgaggtggtggcggcggtggcggccacgtgggggcccatgaccgacggcgcgcgcgtcgagacggcgcccaggctcgcccaatggcgcgtcgacccgctcccctgctacacctaccgcaagtcactccccttcctcatcggcctctggaactggtgcatatctgtggagagaaataacaagcaaacctgtgttaagctctttgcagagaatacaagttctctcaagaacggttcctcagccccaatagcttcctttatcgccaaacttattgtatctcttccacctaatcagcagaccatagtccacccaggaatttttgacaaacagctgaaatacgacggttttgtgtggacaatcgatagcaccgtcactgggaggtttgtgattgagatagagtttcttgacctgaaggtcgctgatccgtctggcggcgagccggcctcgatttgggcctcccgccaggtcaagcagtgctcggatagcacggccctgtcgtccctggctcggatgctgcacgaggacgtcctcaccgacatcaccatcaacgcggcggacggcagcgtgggcgcgcaccgcgcggtcctggcgacgcggtcgccggtgttccggagcatgttctcgcacgacctgagggagaaggagctctccaccgtggacatcaccgacatgtccctggacgcgtgccgcgccttcctcagctacatctacggcgacgtgcgcggcggcgaggagttcctggcgaaccggctggcgctcctccgcgccgccgacaagtacgacatcggcgacctcagggaggcctgccacgagagcctgctggaagacatcgacgcgcgcaacgtgctggagcggctgcagacggcgcacctgtaccggctgccgaggctcaagggcggctgcctgaggttccttgtggacttcaggaaggtgtacgagatgcacgacgacgacctcaacgcgttcctgcagacggccgacagggaactcgtggccgaggtgttccatggcgttcttgccgcgtggagcgggcggtaagccgggcgcatgccatggcactgccgctctgctgcaggtgttgcacatctggttggttcagttcgtcacaactcagaagcgttgtttgcaactgcaggattcttgctgggaaagcgtgtaaatatttgcaactgtacatgcgtgccagtggttggtctaaaatttactgtgcatgccttgattggattttgttcctatgatgtggaaatcagctcatatgctgctc

SEQ ID NO: 22317 - protein, 332 aa, Zea mays subsp. mays
  misc_feature (1)..(332): Ceres Seq. ID no. 12408461
MTDGARVETAPRLAQWRVDPLPCYTYRKSLPFLIGLWNWCISVERNNKQTCVKLFAENTSSLKNGSSAPIASFIAKLIVSLPPNQQTIVHPGIFDKQLKYDGFVWTIDSTVTGRFVIEIEFLDLKVADPSGGEPASIWASRQVKQCSDSTALSSLARMLHEDVLTDITINAADGSVGAHRAVLATRSPVFRSMFSHDLREKELSTVDITDMSLDACRAFLSYIYGDVRGGEEFLANRLALLRAADKYDIGDLREACHESLLEDIDARNVLERLQTAHLYRLPRLKGGCLRFLVDFRKVYEMHDDDLNAFLQTADRELVAEVFHGVLAAWSGR

SEQ ID NO: 22318 - protein, 175 aa, Zea mays subsp. mays
  misc_feature (1)..(175): Ceres Seq. ID no. 12408462
MLHEDVLTDITINAADGSVGAHRAVLATRSPVFRSMFSHDLREKELSTVDITDMSLDACRAFLSYIYGDVRGGEEFLANRLALLRAADKYDIGDLREACHESLLEDIDARNVLERLQTAHLYRLPRLKGGCLRFLVDFRKVYEMHDDDLNAFLQTADRELVAEVFHGVLAAWSGR

SEQ ID NO: 22319 - DNA, 1585 bp, Zea mays subsp. mays
  misc_feature (1)..(1585): Ceres Seq. ID no. 12408463
aacccacacatccgacgccgaggaagtaggaagcacgagcagcatatgtcacagagggccagcgtcccacactcctcctgcatagccttcgcgctccattcccatctcctggtctccagtgagatgtgccccagctcctattggcagcaatagctattctccgctttccttttttttcccccttcctttcttcccgtctggctttggtttccgtttgatcgagctggctctcagtttccgtttttagttttgttggcatctttgctctcggatccgtctctccctaactcctgaaacccaaaagggagagaagaaaccgggcaagcaagcaaccaagcgagcgatgggtgtcaagggattcgtcgagggcggcatcgcctccatcgtggccggctgctccacccacccgctggacctcatcaaggtccgcatgcagctgcagggggaggcggcggccgccgtggcgccgcagccggcgctgcgcccggcgctcgccttccacgccgggggccacgccgtcgcgctcccgcaccaccaccaccacgacatcccggcgccaccgcggaagcccgggccgctggccgtcggcgcgcagatcctgcggtccgagggcgccgcgggcctcttctcgggggtgtccgccaccatgctgcggcagacgctctactccaccacgcggatggggctgtacgacatcctcaagaccaggtgggcccgggagaacggcggcgtcctcccgctgcaccgcaagatcttggccggcctcgtcgccggcggcgtcggcgccgccgtgggcaacccggccgacgtggccatggtgcggatgcaggcggacgggcgcctgcccctcgcggagcgccggaactaccgcggcgtcggcgacgccatcggccggatggcgcgcgacgagggcgtgcgcagcctctggcgcgggtcctcgctcaccgtcaaccgcgccatgatcgtcacggcgtcgcagctggccacgtacgaccaggccaaggaggccatcctggcgcgccgcggcccgggcgccgacgggctcgccacgcacgtggccgccagcttcaccgccggcatcgtcgccgccgccgcgtccaaccccgtcgacgtcgtcaagacgaggatgatgaacatgaaggtggcgcccggcgcgcccccgccctacgccggcgccgtcgactgcgccctcaagaccgtcaggtcggagggacccatggcgctgtacaaggggttcatccccaccgtcatgcgccaggggcccttcaccgttgtgctcttcgtcacgctcgagcaggtgcgcaaggtcttcaagggcgtcgagttctgagaccggcgacgaggaaagatgatgacgacaacaaacgttgcgctgccagttcgtcaccgcgttcgctgccaagaataataacccgctgccaccctagaggccgcgactactattacgccctttgcttgcattgcatcccgtgttagacttgtgctcatgcgcttcactgcatcctgttgtatctggatggatttgaccaaatgcaaattgccaacatttttattaattaaaattgctactgcaatgtctcaaccc

SEQ ID NO: 22320 - protein, 328 aa, Zea mays subsp. mays
  misc_feature (1)..(328): Ceres Seq. ID no. 12408464
MGVKGFVEGGIASIVAGCSTHPLDLIKVRMQLQGEAAAAVAPQPALRPALAFHAGGHAVALPHHHHHDIPAPPRKPGPLAVGAQILRSEGAAGLFSGVSATMLRQTLYSTTRMGLYDILKTRWARENGGVLPLHRKILAGLVAGGVGAAVGNPADVAMVRMQADGRLPLAERRNYRGVGDAIGRMARDEGVRSLWRGSSLTVNRAMIVTASQLATYDQAKEAILARRGPGADGLATHVAASFTAGIVAAAASNPVDVVKTRMMNMKVAPGAPPPYAGAVDCALKTVRSEGPMALYKGFIPTVMRQGPFTVVLFVTLEQVRKVFKGVEF

SEQ ID NO: 22321 - protein, 299 aa, Zea mays subsp. mays
  misc_feature (1)..(299): Ceres Seq. ID no. 12408465
MQLQGEAAAAVAPQPALRPALAFHAGGHAVALPHHHHHDIPAPPRKPGPLAVGAQILRSEGAAGLFSGVSATMLRQTLYSTTRMGLYDILKTRWARENGGVLPLHRKILAGLVAGGVGAAVGNPADVAMVRMQADGRLPLAERRNYRGVGDAIGRMARDEGVRSLWRGSSLTVNRAMIVTASQLATYDQAKEAILARRGPGADGLATHVAASFTAGIVAAAASNPVDVVKTRMMNMKVAPGAPPPYAGAVDCALKTVRSEGPMALYKGFIPTVMRQGPFTVVLFVTLEQVRKVFKGVEF

SEQ ID NO: 22322 - protein, 227 aa, Zea mays subsp. mays
  misc_feature (1)..(227): Ceres Seq. ID no. 12408466
MLRQTLYSTTRMGLYDILKTRWARENGGVLPLHRKILAGLVAGGVGAAVGNPADVAMVRMQADGRLPLAERRNYRGVGDAIGRMARDEGVRSLWRGSSLTVNRAMIVTASQLATYDQAKEAILARRGPGADGLATHVAASFTAGIVAAAASNPVDVVKTRMMNMKVAPGAPPPYAGAVDCALKTVRSEGPMALYKGFIPTVMRQGPFTVVLFVTLEQVRKVFKGVEF

SEQ ID NO: 22323 - DNA, 1606 bp, Zea mays subsp. mays
  misc_feature (1)..(1606): Ceres Seq. ID no. 12408467
acgagaagggcaccgatctgggaaggcattgtcttgttgtactttcccttccggcagtggcctcgattcgcatccccttttcccgtccatgcgcgcgccggcgggcggtgccagtgccagtgccaccgcgctcgcggcggccatgaacattaagcagccgctgcacggcgcatcgacgctgttcgcgctgctctccctctcgctgctcctcctccgcctgctcctccgcctccgcctggcggccttccgcgacgcggcgctgtcgctccacctgctggcgcgcctccgcttccgccccgtcctcctctgcctcccgtcagcctgccacgacggcggcgccggcgccaccacgctgcgcgtctggtgccccgccgccccatcctccaagccgccgctgctcctcctccacggcttcggcggggacgccaagtggacgtgggcgcgcaacctcccgcgcctgtcccgccacttccacgtgtacgcgccggacctcgtgttcttcggcgcgcagtcccggtccgcgtcgccgctgcgctccgtggcgttccaggcccgctgcgccgccgaggccatgcgcctcctcggcgtgccccgctacgacgtcgcggggatcagctacggcggcttcgtcgcctaccggatggccgccgccgaggccagggacgccgtgggcaggctcgtcatcatgaccaccggcgtcgcggccacgcccggggagatgcgggcgatggcggcgcgcgaggaccgcaccgtcgaggatgcgctgctgccggacaccgccgaggggctgcgcttcctcgtaagacgctccatgcatcgccccccgccttggatgccggacttcgtgcttgacgacttcatccagctcatgtacgtggaccagaaaagggagagggcagagttgctgcacgaacttctcaagaccggagctggcttcgaccccctgccggttcttacccaggaaacactgatcatctggggcgacaaagaccaggtgttccccgtcgacctcggccacaggctgcacaggcttctgggcgagaggtccaggctagagatcgtcagggacgcagggcacgcgctgcagctggagggcgccgaccacgtcaaccgctccatcaagtcgttcctcctggacgagcgggtcggcccgggagccggcgcgggccgcaagtaggacgaggccttctcccgtccaggcccacaagcaaacggaggcctgctcgcagtcgcaggtgcctgcgtacttgcgttgcagagctgcaatgcaacagtgccaacgccagctgtagttaagcagcggagcggcaatgacctgcacgcacgcagacgcccccaccgccccgcaatcatgcagcgctggggctactggttacataagtacagagaagcgtcgctccggactactagtttgttttgtacaataatgtctgaaagaatgagcttgtgcggccgaaattccgagagctgtcttttgtctggtgccctggcgcgcacagtctgtctctgttgtttctttaggctcagccttatgggataacgacatatttaggacagctccaacaataatttgtaagctaaattcaagcattttattttatatttc

SEQ ID NO: 22324 - protein, 391 aa, Zea mays subsp. mays
  misc_feature (1)..(391): Ceres Seq. ID no. 12408468
REGHRSGKALSCCTFPSGSGLDSHPLFPSMRAPAGGASASATALAAAMNIKQPLHGASTLFALLSLSLLLLRLLLRLRLAAFRDAALSLHLLARLRFRPVLLCLPSACHDGGAGATTLRVWCPAAPSSKPPLLLLHGFGGDAKWTWARNLPRLSRHFHVYAPDLVFFGAQSRSASPLRSVAFQARCAAEAMRLLGVPRYDVAGISYGGFVAYRMAAAEARDAVGRLVIMTTGVAATPGEMRAMAAREDRTVEDALLPDTAEGLRFLVRRSMHRPPPWMPDFVLDDFIQLMYVDQKRERAELLHELLKTGAGFDPLPVLTQETLIIWGDKDQVFPVDLGHRLHRLLGERSRLEIVRDAGHALQLEGADHVNRSIKSFLLDERVGPGAGAGRK

SEQ ID NO: 22325 - protein, 362 aa, Zea mays subsp. mays
  misc_feature (1)..(362): Ceres Seq. ID no. 12408469
MRAPAGGASASATALAAAMNIKQPLHGASTLFALLSLSLLLLRLLLRLRLAAFRDAALSLHLLARLRFRPVLLCLPSACHDGGAGATTLRVWCPAAPSSKPPLLLLHGFGGDAKWTWARNLPRLSRHFHVYAPDLVFFGAQSRSASPLRSVAFQARCAAEAMRLLGVPRYDVAGISYGGFVAYRMAAAEARDAVGRLVIMTTGVAATPGEMRAMAAREDRTVEDALLPDTAEGLRFLVRRSMHRPPPWMPDFVLDDFIQLMYVDQKRERAELLHELLKTGAGFDPLPVLTQETLIIWGDKDQVFPVDLGHRLHRLLGERSRLEIVRDAGHALQLEGADHVNRSIKSFLLDERVGPGAGAGRK

SEQ ID NO: 22326 - protein, 344 aa, Zea mays subsp. mays
  misc_feature (1)..(344): Ceres Seq. ID no. 12408470
MNIKQPLHGASTLFALLSLSLLLLRLLLRLRLAAFRDAALSLHLLARLRFRPVLLCLPSACHDGGAGATTLRVWCPAAPSSKPPLLLLHGFGGDAKWTWARNLPRLSRHFHVYAPDLVFFGAQSRSASPLRSVAFQARCAAEAMRLLGVPRYDVAGISYGGFVAYRMAAAEARDAVGRLVIMTTGVAATPGEMRAMAAREDRTVEDALLPDTAEGLRFLVRRSMHRPPPWMPDFVLDDFIQLMYVDQKRERAELLHELLKTGAGFDPLPVLTQETLIIWGDKDQVFPVDLGHRLHRLLGERSRLEIVRDAGHALQLEGADHVNRSIKSFLLDERVGPGAGAGRK

SEQ ID NO: 22327 - DNA, 1686 bp, Zea mays subsp. mays
  misc_feature (1)..(1686): Ceres Seq. ID no. 12408511
acctatagctctctccgatccatgcagagctcggtggtcatgttgtcgagcacggtggcagcggcggccatggcatcgctgcgcaccctcccgctgccggtgctggtgcccctcgtcgcctcggggctcgtcttcctggccaccgtgctccgacgcttgctaaggcggcagcggccggtgtacctcctgaactacagctgccacctcccggacgcggagcggcaggtgaacctggaggtgtgcgagtacttcggcctcaagtgtcgccgctactccgacgacatcgccgacttcatgcggctggtgtacagcaagtccggtctgggccaggagaccttcgcgccgcccttcatctactcgggcaagttcgagaagacgctggcattcgcgatccaggaggccgaggagggtctgttcgccgtcgtggagcagctcctggcaaagtcggacgtgagtcccagcgacatcagcgtcctggtggtggcctgctccatgttctccccgatgccgtcgctggcgtccatgatcatgcaccggttcaatatgcggccggatgtgaagtcgtacagcgtggccgggatgggttgcagcgcggggaccgttggcatcgacacggcggcgcggtcgctgcgctctcggcggacgcccgggtacgcgctggtggtggtgacggagaacacgagcctaaactggtacttcggcaagaacaagcacatgctggtgaccaactgcatcttccgcgtgggcagcgcggcggcgctggtgacggacgtcccgtcccggcgcccggacgccaagtacgagctggtgcgcacgctgcggacgcaccacggcgcggacgacgcggccttcaacgcggcgctgcagatggaggacgaggagggcaacctgggcgtggcgctcaccaaggacctggtccgcgtcgccggtgcggcgctgcggaggcacatcaccacgctgggtccccaggtgctgccggtgtccgagatgctccggtacgcgtggcgcgtggcgcgcgcctacgcggccgggaacagcaaggccgcggcggcggaggtgcccgacttccagcgcgcgttcgagcacttctgcatccactcgggcgggaaggcggttatcgactcgatcgccgcggctgatggggttcgggccctacgtcgtggagccggcgcgctccacgctgcaccggttcggcaacacgtccagcagtctggtgttctacgagctggcctacttcgaggccaagcgccgcgtccgggccggcgaccgcctctggatgctggcgttcgggacggggttcaaggcgtgcagcaacgtctggcgcgcgctccgcgacgccgcgcccgacgccgacaacccatggaacggatgcgtccaccgctacccagtgccgccgccgccaccgtccaagacgcacaagcatgcttgatatagtactatgtgctcctccgtcgccgcgtctcgtgcctgtgtctgcgtcgattgtttgataagcaacatcaacgaaggcgtatgtatcctagctagggaccgggtcagttgtttgatacgcttggatgcatgatgatcagctgtctcattggctccaagaagacctatgggttgtttgatttctgtgtcagtgatatgtcatatgacaacatgagtatccctgtttggaaagtgaaatatataagaaatttaaat

SEQ ID NO: 22328 - protein, 477 aa, Zea mays subsp. mays
  misc_feature (1)..(477): Ceres Seq. ID no. 12408512
TYSSLRSMQSSVVMLSSTVAAAAMASLRTLPLPVLVPLVASGLVFLATVLRRLLRRQRPVYLLNYSCHLPDAERQVNLEVCEYFGLKCRRYSDDIADFMRLVYSKSGLGQETFAPPFIYSGKFEKTLAFAIQEAEEGLFAVVEQLLAKSDVSPSDISVLVVACSMFSPMPSLASMIMHRFNMRPDVKSYSVAGMGCSAGTVGIDTAARSLRSRRTPGYALVVVTENTSLNWYFGKNKHMLVTNCIFRVGSAAALVTDVPSRRPDAKYELVRTLRTHHGADDAAFNAALQMEDEEGNLGVALTKDLVRVAGAALRRHITTLGPQVLPVSEMLRYAWRVARAYAAGNSKAAAAEVPDFQRAFEHFCIHSGGKAVIDSIAAADGVRALRRGAGALHAAPVRQHVQQSGVLRAGLLRGQAPRPGRRPPLDAGVRDGVQGVQQRLARAPRRRARRRQPMERMRPPLPSAAAATVQDAQACLI

SEQ ID NO: 22329 - protein, 470 aa, Zea mays subsp. mays
  misc_feature (1)..(470): Ceres Seq. ID no. 12408513
MQSSVVMLSSTVAAAAMASLRTLPLPVLVPLVASGLVFLATVLRRLLRRQRPVYLLNYSCHLPDAERQVNLEVCEYFGLKCRRYSDDIADFMRLVYSKSGLGQETFAPPFIYSGKFEKTLAFAIQEAEEGLFAVVEQLLAKSDVSPSDISVLVVACSMFSPMPSLASMIMHRFNMRPDVKSYSVAGMGCSAGTVGIDTAARSLRSRRTPGYALVVVTENTSLNWYFGKNKHMLVTNCIFRVGSAAALVTDVPSRRPDAKYELVRTLRTHHGADDAAFNAALQMEDEEGNLGVALTKDLVRVAGAALRRHITTLGPQVLPVSEMLRYAWRVARAYAAGNSKAAAAEVPDFQRAFEHFCIHSGGKAVIDSIAAADGVRALRRGAGALHAAPVRQHVQQSGVLRAGLLRGQAPRPGRRPPLDAGVRDGVQGVQQRLARAPRRRARRRQPMERMRPPLPSAAAATVQDAQACLI

SEQ ID NO: 22330 - protein, 464 aa, Zea mays subsp. mays
  misc_feature (1)..(464): Ceres Seq. ID no. 12408514
MLSSTVAAAAMASLRTLPLPVLVPLVASGLVFLATVLRRLLRRQRPVYLLNYSCHLPDAERQVNLEVCEYFGLKCRRYSDDIADFMRLVYSKSGLGQETFAPPFIYSGKFEKTLAFAIQEAEEGLFAVVEQLLAKSDVSPSDISVLVVACSMFSPMPSLASMIMHRFNMRPDVKSYSVAGMGCSAGTVGIDTAARSLRSRRTPGYALVVVTENTSLNWYFGKNKHMLVTNCIFRVGSAAALVTDVPSRRPDAKYELVRTLRTHHGADDAAFNAALQMEDEEGNLGVALTKDLVRVAGAALRRHITTLGPQVLPVSEMLRYAWRVARAYAAGNSKAAAAEVPDFQRAFEHFCIHSGGKAVIDSIAAADGVRALRRGAGALHAAPVRQHVQQSGVLRAGLLRGQAPRPGRRPPLDAGVRDGVQGVQQRLARAPRRRARRRQPMERMRPPLPSAAAATVQDAQACLI

SEQ ID NO: 22331 - DNA, 1464 bp, Zea mays subsp. mays
  misc_feature (1)..(1464): Ceres Seq. ID no. 12408541
ctgccattaagactagctaactagcgtgaaagagctcctccgacgactactagctctcgcttgctccgacgacccctgccggccgcctctggtacaacgtacgagaggaagagagacgatcgatggccggcgccaccgtgaccgtggacgaggtgaggaagggccagcgcgcgaccggccccgccaccgtgctggccatcgggacggcgacgcccgccaactgcgtgtaccaggccgactacccggactactacttccggatcaccaagagcgaccacctcaccgacctcaaggagaagttcaagaggatgtgcgacaagtcgatgatccggaagcggtacatgcacctgacggaggagttcctgtcggagaacccgagcatgtgcgcgtacatggcgccgtcgctggacgcgcggcaggacgtggtggtgacggaggtgccgaagctggggaaggcggccggcgcagaaggcgatcaaggagtgggggcagcccaagtcgcggatcacgcacctggtgttctgcaccacgtcgggggtggacatgccgggcgccgactaccagctgaccaaggcgctggggctgcgcccgtccgtgaaccgcctgatgatgtaccagcaggggtgcttcgcgggcggcacggtgctgcgcgtggccaaggacctggcggagaacaaccgcggggcgagggtcctggtggtgtgctcggagatcacggccgtgacgttccgcgggccgtccgagtcgcacctggactcgctcgtggggcaggcgctgttcggcgacggcgcggcggccgtcgtggtgggcgccgacccggacgggcgggtcgagcgcccgctgttccagctcgtgtcggcggcgcagaccatcctgcccgactcggagggcgccatcgacggccacctccgcgaggtggggctgacgttccacctgctcaaggacgtgcccgggctcatctccaagaacatcgagcgcgcgctggaggacgcgttcgagccgctcggcatctccgactggaactccatcttctgggtggcgcaccccggcgggcccgccatcctggaccaggtggaggccagggtcgggctggacaaggccaggatgcgcgccacccgccacgtcctctccgagtacggcaacatgtccagcgcctgcgtgctcttcatcctggacgagatgcgcaagcgctccgccgaggacggccaggccaccaccggcgaggggctcgactggggcgtcctcttcggcttcggcccgggcctcaccgtcgagaccgtcgtgctccacagcgtccccatcaccaccggagcgcccaccgccgcctgagtcgtccatctatcctcgcgatcgctccagacatgaacgacccgacctacgaataatgtatctgcgtaattaattactatctgtcttgtgtcctagtagctgttttaaaacccttaattaattttattatgggcg

SEQ ID NO: 22332 - protein, 420 aa, Zea mays subsp. mays
  misc_feature (1)..(420): Ceres Seq. ID no. 12408542
MAGATVTVDEVRKGQRATGPATVLAIGTATPANCVYQADYPDYYFRITKSDHLTDLKEKFKRMCDKSMIRKRYMHLTEEFLSENPSMCAYMAPSLDARQDVVVTEVPKLGKAAGAEGDQGVGAAQVADHAPGVLHHVGGGHAGRRLPADQGAGAAPVREPPDDVPAGVLRGRHGAARGQGPGGEQPRGEGPGGVLGDHGRDVPRAVRVAPGLARGAGAVRRRRGGRRGGRRPGRAGRAPAVPARVGGADHPARLGGRHRRPPPRGGADVPPAQGRARAHLQEHRARAGGRVRAARHLRLELHLLGGAPRRARHPGPGGGQGRAGQGQDARHPPRPLRVRQHVQRLRALHPGRDAQALRRGRPGHHRRGARLGRPLRLRPGPHRRDRRAPQRPHHHRSAHRRLSRPSILAIAPDMNDPTYE

SEQ ID NO: 22333 - protein, 358 aa, Zea mays subsp. mays
  misc_feature (1)..(358): Ceres Seq. ID no. 12408543
MCDKSMIRKRYMHLTEEFLSENPSMCAYMAPSLDARQDVVVTEVPKLGKAAGAEGDQGVGAAQVADHAPGVLHHVGGGHAGRRLPADQGAGAAPVREPPDDVPAGVLRGRHGAARGQGPGGEQPRGEGPGGVLGDHGRDVPRAVRVAPGLARGAGAVRRRRGGRRGGRRPGRAGRAPAVPARVGGADHPARLGGRHRRPPPRGGADVPPAQGRARAHLQEHRARAGGRVRAARHLRLELHLLGGAPRRARHPGPGGGQGRAGQGQDARHPPRPLRVRQHVQRLRALHPGRDAQALRRGRPGHHRRGARLGRPLRLRPGPHRRDRRAPQRPHHHRSAHRRLSRPSILAIAPDMNDPTYE

SEQ ID NO: 22334 - protein, 353 aa, Zea mays subsp. mays
  misc_feature (1)..(353): Ceres Seq. ID no. 12408544
MIRKRYMHLTEEFLSENPSMCAYMAPSLDARQDVVVTEVPKLGKAAGAEGDQGVGAAQVADHAPGVLHHVGGGHAGRRLPADQGAGAAPVREPPDDVPAGVLRGRHGAARGQGPGGEQPRGEGPGGVLGDHGRDVPRAVRVAPGLARGAGAVRRRRGGRRGGRRPGRAGRAPAVPARVGGADHPARLGGRHRRPPPRGGADVPPAQGRARAHLQEHRARAGGRVRAARHLRLELHLLGGAPRRARHPGPGGGQGRAGQGQDARHPPRPLRVRQHVQRLRALHPGRDAQALRRGRPGHHRRGARLGRPLRLRPGPHRRDRRAPQRPHHHRSAHRRLSRPSILAIAPDMNDPTYE

SEQ ID NO: 22335 - DNA, 1135 bp, Zea mays subsp. mays
  misc_feature (1)..(1135): Ceres Seq. ID no. 12408545
aaaggaccaacgtgctcgatctccatctcgaccgtcgctcaccgggaagctacgctacgacgaagcatggcgtccgtcaccgcccgcgccccggtcgcagccctgcgcccgtcgtcgtcgtcggccttccttggccactctagccgcctcggccgcactgctaccgcgtcgccgacgaggcgcagcctcaaggcggaggccaagggcgagtggctcccgggccttccctcccccgcctacctcgacggcagcctgccgggtgacaatggcttcgacccgttgggcctggcggaggacccggagaacctgaggtggtacgtgcaggcggagctggtgaacgggcggtgggcgatgctgggcgtggccgggatgctgatcccggaggtgctgaccaaggccgggctgatcaacgcgccgcagtggtacgacgccggcaagtcggagtacttcgcgtcgtcgtcgacgctgttcgtgatcgagttcatcctgtttcactacgtggagatccggcggtggcaggacatcaagaaccccggcagcgtcaaccaggaccccatcttcaagagctacagcctgccgccgcacgagtgcggctaccccggcagcgtcttcaacccgctcaacttcgcgcccacgctcgaggccaaggagaaggagctcgccaacgggaggctggccatgctggcgttcctggccttcctgatccagcacaacgtcaccggcaaggggcccttcgacaacctgctgcagcacctgtccgacccatggcacaacaccatcatccagaccctgtcgggttgagtcgacggtccatcaggtcatgtgatccgagctgaaataaaggaagacaaatcttgaaacgcgatcgatgttacgttcctttctgggccggatcagttcgtgtgatgcgttcttaatcgactgagggctaaggaatgtgacgtactggtatatgtacattagttgaagcggaggctataaagggtgtagagattgtttcatcagtgtatatcatctgtcccgatgggttttgttttgtgcttttcacgattcattgtggaagcacatgtattattagtacaagaactgctagtagatatataggcttataattaagcacgacttctaaaacctc

SEQ ID NO: 22336 - protein, 266 aa, Zea mays subsp. mays
  misc_feature (1)..(266): Ceres Seq. ID no. 12408546
KGPTCSISISTVAHREATLRRSMASVTARAPVAALRPSSSSAFLGHSSRLGRTATASPTRRSLKAEAKGEWLPGLPSPAYLDGSLPGDNGFDPLGLAEDPENLRWYVQAELVNGRWAMLGVAGMLIPEVLTKAGLINAPQWYDAGKSEYFASSSTLFVIEFILFHYVEIRRWQDIKNPGSVNQDPIFKSYSLPPHECGYPGSVFNPLNFAPTLEAKEKELANGRLAMLAFLAFLIQHNVTGKGPFDNLLQHLSDPWHNTIIQTLSG

SEQ ID NO: 22337 - protein, 244 aa, Zea mays subsp. mays
  misc_feature (1)..(244): Ceres Seq. ID no. 12408547
MASVTARAPVAALRPSSSSAFLGHSSRLGRTATASPTRRSLKAEAKGEWLPGLPSPAYLDGSLPGDNGFDPLGLAEDPENLRWYVQAELVNGRWAMLGVAGMLIPEVLTKAGLINAPQWYDAGKSEYFASSSTLFVIEFILFHYVEIRRWQDIKNPGSVNQDPIFKSYSLPPHECGYPGSVFNPLNFAPTLEAKEKELANGRLAMLAFLAFLIQHNVTGKGPFDNLLQHLSDPWHNTIIQTLSG

SEQ ID NO: 22338 - protein, 149 aa, Zea mays subsp. mays
  misc_feature (1)..(149): Ceres Seq. ID no. 12408548
MLGVAGMLIPEVLTKAGLINAPQWYDAGKSEYFASSSTLFVIEFILFHYVEIRRWQDIKNPGSVNQDPIFKSYSLPPHECGYPGSVFNPLNFAPTLEAKEKELANGRLAMLAFLAFLIQHNVTGKGPFDNLLQHLSDPWHNTIIQTLSG

SEQ ID NO: 22339 - DNA, 1440 bp, Zea mays subsp. mays
  misc_feature (1)..(1440): Ceres Seq. ID no. 12408549
gacgcgcacccgcaccagcctctagtcggccagtcgggacgaagcctctcgaacgagcgaggccacgaggtgcccgccgcgcccagccggcctcgccgaccgggcccgccggcccctatataggcaggcgccacttcctcctcgcaaccaccagacgccagtccaccaccgcttcccgtgcagcgccctccctctacgttcccccatttcctgtgttggcggcgatggcgcggcacttcgtgctcaacaccggcgccaagatcccctccgtggggctcggcacctggcagtctgaccccggcgtcgttggcaacgctgtctacgccgccgtcaaggcgggttaccgacatatcgattgtgccagagtttacggcaacgaaaaggagattggtttggcgctgaagaagctatttgaagagggtgtagtgaagcgagaagatctgtttatcacctctaagctatggaatgatcatcatgctcctgaagatgtgcctgaggcactaaatgacagcctgaatgatttgcagcttgagtacctggatctttatcttatccattggccatttagagtcaacaagggaacaaataccagccctgaaaattttgttacacctgacttccctgctacttggggggcaatggaaaagttatatgatgctggcaaagctcgcgctattggtgtgagtaacttctcctcaaagaaattgggtgacttgcttgctgtagctcgtgtacctccagctgttgatcaggtggaatgtcatcctggttggcagcaaactaagctccatagcttttgtcagtcaactggtgttcatctaactgcttactcaccactaggttcacctggtacaacttggatgaatggtaatgtccttaaagaaccaataatcatctcaatagctgagaaactcgggaaaacttctgcacaagtggctctgcgctggaacattcagatgggtcacagtgttcttccaaagagcacgaatgaagaaaggataaagcaaaaccttgatgtttatgattggtcaattccagatgacttgcttgcaaagttctctgagattaagcaggctaggctacttagaggcaacttcattgttaatccagagagcgtttacaagacccatgaggagctctgggatggtgaactttaagaaggacgccgttgtccctcctgactcctgagcagggagcaagcagcgttccattagggctcgtcagatcatttcacctccaaagttgctcttttgaaatgaaggttcagtgctcggaagctctggtgccatcctgtatcacgaactattgagaaatttgtcggtgattttactttgtgctacgggatgtgctgctgcagtctgtcctagtgtcagttgatttttctggtaaaactgtgaccaaataagttaattcgccaggcatcattactattggaatttc

SEQ ID NO: 22340 - protein, 384 aa, Zea mays subsp. mays
  misc_feature (1)..(384): Ceres Seq. ID no. 12408550
RAPAPASSRPVGTKPLERARPRGARRAQPASPTGPAGPYIGRRHFLLATTRRQSTTASRAAPSLYVPPFPVLAAMARHFVLNTGAKIPSVGLGTWQSDPGVVGNAVYAAVKAGYRHIDCARVYGNEKEIGLALKKLFEEGVVKREDLFITSKLWNDHHAPEDVPEALNDSLNDLQLEYLDLYLIHWPFRVNKGTNTSPENFVTPDFPATWGAMEKLYDAGKARAIGVSNFSSKKLGDLLAVARVPPAVDQVECHPGWQQTKLHSFCQSTGVHLTAYSPLGSPGTTWMNGNVLKEPIIISIAEKLGKTSAQVALRWNIQMGHSVLPKSTNEERIKQNLDVYDWSIPDDLLAKFSEIKQARLLRGNFIVNPESVYKTHEELWDGEL

SEQ ID NO: 22341 - protein, 310 aa, Zea mays subsp. mays
  misc_feature (1)..(310): Ceres Seq. ID no. 12408551
MARHFVLNTGAKIPSVGLGTWQSDPGVVGNAVYAAVKAGYRHIDCARVYGNEKEIGLALKKLFEEGVVKREDLFITSKLWNDHHAPEDVPEALNDSLNDLQLEYLDLYLIHWPFRVNKGTNTSPENFVTPDFPATWGAMEKLYDAGKARAIGVSNFSSKKLGDLLAVARVPPAVDQVECHPGWQQTKLHSFCQSTGVHLTAYSPLGSPGTTWMNGNVLKEPIIISIAEKLGKTSAQVALRWNIQMGHSVLPKSTNEERIKQNLDVYDWSIPDDLLAKFSEIKQARLLRGNFIVNPESVYKTHEELWDGEL

SEQ ID NO: 22342 - DNA, 593 bp, Zea mays subsp. mays
  misc_feature (1)..(593): Ceres Seq. ID no. 12408576
acgcctctctctacttaggagtatacttcaaaagcgccgaaccagataggcaggcatctcgatcggcgacggctccagtcaaggggctggttggcatggagggcgagaagaaggcggccgccgtagcggaggatgaggttgtggttgtggctgctggcgatgtcagcctgaaggacctgtcaaagaagctcaacgacttcgccagggagagggactgggagcagttccatagccccaggaacctactgctcgncatgatcgccgaagtcggggagctgtcagagctgttcatgtggagaggggaggtgcggaagggcctcgcgggctgggacgaggccgagaaggagcacctgggcgaggagctctccgacgtgctgctctacctggtccaactctccgacatgtgcggcgtcgacctcggcgacgccgccgtcaggaaggatcggcaagaacgccgtcaagtacccggcgccgccgccgtcggaagaaggaagaagaaggcgcctgatagctttttttcttctggctgtgcatgtttgaaggccaatactacttgatgcagaaattgctcgtctgatagctttcgcctttcg

SEQ ID NO: 22343 - protein, 184 aa, Zea mays subsp. mays
  misc_feature (1)..(184): Ceres Seq. ID no. 12408577
  misc_feature (84)..(84): Xaa is any aa, unknown or other
ASLYLGVYFKSAEPDRQASRSATAPVKGLVGMEGEKKAAAVAEDEVVVVAAGDVSLKDLSKKLNDFARERDWEQFHSPRNLLLXMIAEVGELSELFMWRGEVRKGLAGWDEAEKEHLGEELSDVLLYLVQLSDMCGVDLGDAAVRKDRQERRQVPGAAAVGRRKKKAPDSFFSSGCACLKANTT

SEQ ID NO: 22344 - protein, 153 aa, Zea mays subsp. mays
  misc_feature (1)..(153): Ceres Seq. ID no. 12408578
  misc_feature (53)..(53): Xaa is any aa, unknown or other
MEGEKKAAAVAEDEVVVVAAGDVSLKDLSKKLNDFARERDWEQFHSPRNLLLXMIAEVGELSELFMWRGEVRKGLAGWDEAEKEHLGEELSDVLLYLVQLSDMCGVDLGDAAVRKDRQERRQVPGAAAVGRRKKKAPDSFFSSGCACLKANTT

SEQ ID NO: 22345 - protein, 100 aa, Zea mays subsp. mays
  misc_feature (1)..(100): Ceres Seq. ID no. 12408579
MIAEVGELSELFMWRGEVRKGLAGWDEAEKEHLGEELSDVLLYLVQLSDMCGVDLGDAAVRKDRQERRQVPGAAAVGRRKKKAPDSFFSSGCACLKANTT

SEQ ID NO: 22346 - DNA, 1524 bp, Zea mays subsp. mays
  misc_feature (1)..(1524): Ceres Seq. ID no. 12408587
atttgttccacaatccacattccccaccccccacggcccccgggcccacccaccctctccctcttcttcctcactcctctctccctctctctctctctctctctctctctcgtcctgcgccacacgccgcggccgtctccgggcaggaaggaagggggcgggaagatgatgatgacgcgggcaccgatggggccgatggagggcgcggcggtggacgagatggtgcgccgcctcgtggagggcggccgaggcgggcgccaggtgcagctgtccgaggcggagatccggcagctctgcgtagagggcaagcgggtgctcctctcccagcccaatctcctccgaatccacgccccagtcaagatctgcggtgatatccatggccagtttgtcgaccttctgagattattcgatttgggtggttatcctccagcttcaacttacgtattcctcggagactatgtcgatagaggcaaacagagcctggagactatatgcttgctgctggcgtacaaaatccggtaccccgaaaatattttcctgttgaggggtaaccacgaggatgcaaagatcaacagagtctatggtttttatgacgaatgtaagaggaggttcaatgttcggctgtggaagatattctctgattgcttcaactgcctgcccatcgcagcgctcatcgatgacaagatactgtgcatgcatggtggcctctcgcccgaattgactagtttggaccagataaaagatattgagcgacctgctgagattcctgattatggtctcctgtgtgatctgctttggtctgatcctagccccgatggagaagggtggggggagagtgacaggggtgtctcgtgtacgtttggtgcagataaacttgtagagtttttggagaagaatgatctcgatcttatatgccgagctcatcaggtggttgaagatggctatgagttctttgcacaacgaagattagtgacaatcttttcagctccaaattattgtggagagtttgataatgttggcgctcttttaagcatagatgagagcctaatgtgttcatttcagatcctgaagccaactgatatgggtccaccgcatgcaagaaaacaaattccaaataagccaacaagagggtgaagccttggaccagcatccaatacttccagttccagtatcatgatgatcgtcagtcagctcaaagggggtgatctgttgtttggatagttggatccaccagggcctgacattagacatccatcagccaattaatccctttagccaccctttactcgtgtcttgggaggcggcttggctgtaaaggatattctgtacagcatttagttggattcaacacatcatctgttttactgttcttcctgccggcaagggacctcattggcagcatgacatacaatagatgttagtagtctcaatttgttttccttagcttctgccttgcgtttttttttttttggtgcgggacttgatgtatggtgattttatatctttgtaatatgtagatgttgc

SEQ ID NO: 22347 - protein, 377 aa, Zea mays subsp. mays
  misc_feature (1)..(377): Ceres Seq. ID no. 12408588
ICSTIHIPHPPRPPGPPTLSLFFLTPLSLSLSLSLSLVLRHTPRPSPGRKEGGGKMMMTRAPMGPMEGAAVDEMVRRLVEGGRGGRQVQLSEAEIRQLCVEGKRVLLSQPNLLRIHAPVKICGDIHGQFVDLLRLFDLGGYPPASTYVFLGDYVDRGKQSLETICLLLAYKIRYPENIFLLRGNHEDAKINRVYGFYDECKRRFNVRLWKIFSDCFNCLPIAALIDDKILCMHGGLSPELTSLDQIKDIERPAEIPDYGLLCDLLWSDPSPDGEGWGESDRGVSCTFGADKLVEFLEKNDLDLICRAHQVVEDGYEFFAQRRLVTIFSAPNYCGEFDNVGALLSIDESLMCSFQILKPTDMGPPHARKQIPNKPTRG

SEQ ID NO: 22348 - protein, 322 aa, Zea mays subsp. mays
  misc_feature (1)..(322): Ceres Seq. ID no. 12408589
MMMTRAPMGPMEGAAVDEMVRRLVEGGRGGRQVQLSEAEIRQLCVEGKRVLLSQPNLLRIHAPVKICGDIHGQFVDLLRLFDLGGYPPASTYVFLGDYVDRGKQSLETICLLLAYKIRYPENIFLLRGNHEDAKINRVYGFYDECKRRFNVRLWKIFSDCFNCLPIAALIDDKILCMHGGLSPELTSLDQIKDIERPAEIPDYGLLCDLLWSDPSPDGEGWGESDRGVSCTFGADKLVEFLEKNDLDLICRAHQVVEDGYEFFAQRRLVTIFSAPNYCGEFDNVGALLSIDESLMCSFQILKPTDMGPPHARKQIPNKPTRG

SEQ ID NO: 22349 - protein, 321 aa, Zea mays subsp. mays
  misc_feature (1)..(321): Ceres Seq. ID no. 12408590
MMTRAPMGPMEGAAVDEMVRRLVEGGRGGRQVQLSEAEIRQLCVEGKRVLLSQPNLLRIHAPVKICGDIHGQFVDLLRLFDLGGYPPASTYVFLGDYVDRGKQSLETICLLLAYKIRYPENIFLLRGNHEDAKINRVYGFYDECKRRFNVRLWKIFSDCFNCLPIAALIDDKILCMHGGLSPELTSLDQIKDIERPAEIPDYGLLCDLLWSDPSPDGEGWGESDRGVSCTFGADKLVEFLEKNDLDLICRAHQVVEDGYEFFAQRRLVTIFSAPNYCGEFDNVGALLSIDESLMCSFQILKPTDMGPPHARKQIPNKPTRG

SEQ ID NO: 22350 - DNA, 1285 bp, Zea mays subsp. mays
  misc_feature (1)..(1285): Ceres Seq. ID no. 12408603
aactagacggaccagaggacgctgccacactatagatcccgtgcttggctgtacaagaacaaccgcactgatgctaccgaccactggtgtccgattaagcagctcatttctaagaagccgacccaggccagccgatatcgagcaccaacgacacaccccattgacgtacagctatgatgcggccgacgtcgacccttgctatggtcgtgccgtcgctcgctgtagccatcctctgcatcctagtccggtccgcctccgcggagttctggctcgacgagttcaccacggacggcgacgtccgcagagactacgaccgttctggccggcaggtggcgtcgcttgtcctcgaccagcgttctggcgctggcttcaactccacgcgcaagtacctcttcggcgagttcagcgtggagatgaagctcgtcggcggcaactccgctgggactgtcacctccttctacctgacgtccggcgagggcgacgagcacgacgagatcgacatggagttcatgggcaactccagcggctccccgacggtgctcaacacgaacgtgtgggccaacggcgacggcaagaaggagcaccagttctacctgtggttcgacccggccgccgacttccacaaatacaagatcgtctggaacgacaagaacatcatcttccaggtggacgacgtgacggtgcgcgtcttcaagcgctacgatgacctgccgtacccggacgccaagcccatggcggtgcacgccacgctgtgggacggcagctactgggccacgcgcaagggcgaggtcaagatcgactggtccagcgcgcccttcgtcgtctcctaccgagactacaccgccaacgcctgcgccgtcgacggccggaacggcggcggcagctcgtcgtgccccgccggtgccaacgagtggatggacaggcagtccgacgacaccgaccgtctcaccgtggcttgggcgcgccggaactgcttgcagtacaactactgcgatgacgggtggcgcttcccgcaggggttccccggagagtgcgcccgcaactgatccaccatctgccctgcagtcgcgagtctccaagtctcgccggcctcatcgcatcctcttaccgcagatataggcatactagatcgagttcattcttggattttatgttcttgtaattgtcttattgtacgtacgtacatcgtctcttccgactcacaaagagcccagcagcgtgcgtcctggatctggatgcatatcgaaggtactagttctgtgacttctaaaagatctttttttct

SEQ ID NO: 22351 - protein, 290 aa, Zea mays subsp. mays
  misc_feature (1)..(290): Ceres Seq. ID no. 12408604
MMRPTSTLAMVVPSLAVAILCILVRSASAEFWLDEFTTDGDVRRDYDRSGRQVASLVLDQRSGAGFNSTRKYLFGEFSVEMKLVGGNSAGTVTSFYLTSGEGDEHDEIDMEFMGNSSGSPTVLNTNVWANGDGKKEHQFYLWFDPAADFHKYKIVWNDKNIIFQVDDVTVRVFKRYDDLPYPDAKPMAVHATLWDGSYWATRKGEVKIDWSSAPFVVSYRDYTANACAVDGRNGGGSSSCPAGANEWMDRQSDDTDRLTVAWARRNCLQYNYCDDGWRFPQGFPGECARN

SEQ ID NO: 22352 - protein, 289 aa, Zea mays subsp. mays
  misc_feature (1)..(289): Ceres Seq. ID no. 12408605
MRPTSTLAMVVPSLAVAILCILVRSASAEFWLDEFTTDGDVRRDYDRSGRQVASLVLDQRSGAGFNSTRKYLFGEFSVEMKLVGGNSAGTVTSFYLTSGEGDEHDEIDMEFMGNSSGSPTVLNTNVWANGDGKKEHQFYLWFDPAADFHKYKIVWNDKNIIFQVDDVTVRVFKRYDDLPYPDAKPMAVHATLWDGSYWATRKGEVKIDWSSAPFVVSYRDYTANACAVDGRNGGGSSSCPAGANEWMDRQSDDTDRLTVAWARRNCLQYNYCDDGWRFPQGFPGECARN

SEQ ID NO: 22353 - protein, 281 aa, Zea mays subsp. mays
  misc_feature (1)..(281): Ceres Seq. ID no. 12408606
MVVPSLAVAILCILVRSASAEFWLDEFTTDGDVRRDYDRSGRQVASLVLDQRSGAGFNSTRKYLFGEFSVEMKLVGGNSAGTVTSFYLTSGEGDEHDEIDMEFMGNSSGSPTVLNTNVWANGDGKKEHQFYLWFDPAADFHKYKIVWNDKNIIFQVDDVTVRVFKRYDDLPYPDAKPMAVHATLWDGSYWATRKGEVKIDWSSAPFVVSYRDYTANACAVDGRNGGGSSSCPAGANEWMDRQSDDTDRLTVAWARRNCLQYNYCDDGWRFPQGFPGECARN

SEQ ID NO: 22354 - DNA, 1369 bp, Zea mays subsp. mays
  misc_feature (1)..(1369): Ceres Seq. ID no. 12408614
ttttaaagaaaagctccccccatccacgaacaaaagatcgcgaagcgagagggaatgatggaggcataggcactagcacctcctcgcctccacctccgtcctcttcgatcccgtccaatcccccgcgccccggcgcccctctccgccggcggctttgctgggtcccgcgctcctcctcctcctaggctgttctggttggggctgcggcggagggaactaggtaagggggaaggaaaggggaggtttgagggagagcgcagcggcagcggcagcagcgatgccatcgcccggatctggaccgccagatctcgcagctgcgggattgcaagttcctgcctgaggcggaggtcaaaacgctatgcgagcaggccaaggcgatcctcatggaggagtggaacgtgcagcccgtgcgttgccccgtcactgtctgcggcgacatccacggccagttctacgacctcatcgagctctttcgcatcggtggcgacgcgcccgacaccaactacctctttatgggcgactacgtcgaccgtggctactactcagtggagactgtgtccttattggtggctctaaaagtacgttatagagacagaatcacaatattgagaggaaatcatgagagtagacaaataactcaagtgtatggcttctatgatgaatgcttgcggaaatatggaaatgcaaatgtgtggaagtactttacagacttgtttgattatttgcctctcacagctcttatagaaaatcagatcttctgcctacatggtggtctctctccatcactggatactttggataatgtccgctcccttgatcgcatacaagaggtcccgcatgaaggacctatgtgtgatcttttgtggtctgacccggatgacagatgtggatggggaatttcaccaaggggtgctggatacacatttggccaagatattgcacaacaattcaaccatacaaatgggctaagtcttatttcaagagctcatcaacttgtaatggaagggttcaattggtgccaggataagaacgttgtgacagtgttcagcgcgcctaactattgctaccgatgcgggaacatggctgcgatcctcgaaattggcgagaacatggatcagaacttcctccaattcgacccagctccgcggcagattgagccggacatgacgcgcaagaccccagactactttttgtaatcagcatgctggctttctttcaacttgtctactgcagcgccagcacctgtagatctccttagaaaatggtgtttcctctagccgccttgtacccccatcattcttttggtgtggagattttattgccgcttctcagaacattgaggttgttgaaagtacatggcattgggtct

SEQ ID NO: 22355 - protein, 270 aa, Zea mays subsp. mays
  misc_feature (1)..(270): Ceres Seq. ID no. 12408615
MEEWNVQPVRCPVTVCGDIHGQFYDLIELFRIGGDAPDTNYLFMGDYVDRGYYSVETVSLLVALKVRYRDRITILRGNHESRQITQVYGFYDECLRKYGNANVWKYFTDLFDYLPLTALIENQIFCLHGGLSPSLDTLDNVRSLDRIQEVPHEGPMCDLLWSDPDDRCGWGISPRGAGYTFGQDIAQQFNHTNGLSLISRAHQLVMEGFNWCQDKNVVTVFSAPNYCYRCGNMAAILEIGENMDQNFLQFDPAPRQIEPDMTRKTPDYFL

SEQ ID NO: 22356 - protein, 227 aa, Zea mays subsp. mays
  misc_feature (1)..(227): Ceres Seq. ID no. 12408616
MGDYVDRGYYSVETVSLLVALKVRYRDRITILRGNHESRQITQVYGFYDECLRKYGNANVWKYFTDLFDYLPLTALIENQIFCLHGGLSPSLDTLDNVRSLDRIQEVPHEGPMCDLLWSDPDDRCGWGISPRGAGYTFGQDIAQQFNHTNGLSLISRAHQLVMEGFNWCQDKNVVTVFSAPNYCYRCGNMAAILEIGENMDQNFLQFDPAPRQIEPDMTRKTPDYFL

SEQ ID NO: 22357 - DNA, 1421 bp, Zea mays subsp. mays
  misc_feature (1)..(1421): Ceres Seq. ID no. 12408617
cagacacctaaacgatgacacagcgtgcacccaccaccaccaccagcgccgactgccgagcgccggccgcgataccgtcgtgtcccccctccccaccgcattagcgccggccgacaaaattactaggtgcttaatttaactagtggccctaggcgtgaaacttcaccagctccgccactgcccatggccaacggctttccggaccctcgctgcgtcgtcctcaccgccgacgctgcccgatccctcgtcggattccgtcgacgccttcctcttcgactgcgatggcgtcatttggaagggagatatgctcattgaaggggtcccagagacgatggagctactgaggaaactgggaaagaaattagtttttgtaacaaataactctagaaagtcaagaaggcaatactcaaagaaattcagatcacttggacttgaagttactgaggaagagatttttacatcatcgtttgcggcagccatgttcttgaagttaaataattttcctccagaaaagaaggtttatgttgttggtgaagatggaatcttggaagagctcaagttagctggttttgaatgttttggtggtccggaggatggcaagaaaaacataaagttggaggcggatttctactttgaacatgacaaaagtgttggagctgtcattgttggacttgatcagtacttcaattattataaaatgcagtatgcaagaacatgtattagtgagaaccctggctgctttttcattgcgaccaaccgtgatccaaccgggcatatgacatctgcccaagaatggccaggagctggagctatggttgctgcagtaagctgctcagtacagaaagaacccattgttgttggaaaaccttcaggctttttgatggacttcctcttgaaaagcttcaatctggagacgtcaaggatgtgcatggttggtgatagactggacacggacatactatttggccagaacaccggctgcaagaccctccttgttttgtctggttgcactgccttaccagaagtgcaggatgctcgtaacaatatccatccagatctctacacaaacagcgtgtatgatctagttgggttactgcagaagtaattctccttggccgcgttgcagcgcaatctcagcacgctttggatagcgcctatcagcaatttattacgtggattacttgcatgaagccatgtgttcttgaaacaacaattttgaactttctttggggtaacctgtttgacagtaacaaaatctttcaattggatcctacaaattagaccaatttgacaaccttgtaagcgtggctgtaaagctttaaatctggcaacttgattcccttgctggaaaatatattggttggagtatggaattgtacagaatcgaattgtaatgaagcaacgtgttgtactttgttgct

SEQ ID NO: 22358 - protein, 266 aa, Zea mays subsp. mays
  misc_feature (1)..(266): Ceres Seq. ID no. 12408618
MLIEGVPETMELLRKLGKKLVFVTNNSRKSRRQYSKKFRSLGLEVTEEEIFTSSFAAAMFLKLNNFPPEKKVYVVGEDGILEELKLAGFECFGGPEDGKKNIKLEADFYFEHDKSVGAVIVGLDQYFNYYKMQYARTCISENPGCFFIATNRDPTGHMTSAQEWPGAGAMVAAVSCSVQKEPIVVGKPSGFLMDFLLKSFNLETSRMCMVGDRLDTDILFGQNTGCKTLLVLSGCTALPEVQDARNNIHPDLYTNSVYDLVGLLQK

SEQ ID NO: 22359 - protein, 257 aa, Zea mays subsp. mays
  misc_feature (1)..(257): Ceres Seq. ID no. 12408619
MELLRKLGKKLVFVTNNSRKSRRQYSKKFRSLGLEVTEEEIFTSSFAAAMFLKLNNFPPEKKVYVVGEDGILEELKLAGFECFGGPEDGKKNIKLEADFYFEHDKSVGAVIVGLDQYFNYYKMQYARTCISENPGCFFIATNRDPTGHMTSAQEWPGAGAMVAAVSCSVQKEPIVVGKPSGFLMDFLLKSFNLETSRMCMVGDRLDTDILFGQNTGCKTLLVLSGCTALPEVQDARNNIHPDLYTNSVYDLVGLLQK

SEQ ID NO: 22360 - protein, 208 aa, Zea mays subsp. mays
  misc_feature (1)..(208): Ceres Seq. ID no. 12408620
MFLKLNNFPPEKKVYVVGEDGILEELKLAGFECFGGPEDGKKNIKLEADFYFEHDKSVGAVIVGLDQYFNYYKMQYARTCISENPGCFFIATNRDPTGHMTSAQEWPGAGAMVAAVSCSVQKEPIVVGKPSGFLMDFLLKSFNLETSRMCMVGDRLDTDILFGQNTGCKTLLVLSGCTALPEVQDARNNIHPDLYTNSVYDLVGLLQK

SEQ ID NO: 22361 - DNA, 1467 bp, Zea mays subsp. mays
  misc_feature (1)..(1467): Ceres Seq. ID no. 12408629
atccgagttgccagccaattttgcatccccaccaccaatccaccaccccacacccagtgacagagacagaaggccggacggctacgcgacgcgacggagatggagcacacgaatcatcgccgccgccgtcaagctttggccaccgtgtcggcgacgacgacgctcctgctgcttctcctctgcctcgcggcgttgacgacggcagaggcgctgcgcgagcacagggacgagggcggcgctagcagcagtggcggaagcggaagcggctgcggcagcaacgccgccggcggcaagcaatcgccggccgtgtgggtgttcggggactcgtacgcggacacggggaacctgggcgacctcgggcgggagctgacccgcgagtggtacgacccgtacgggaccaccttccccggccggcccgccggccgcttctccgacggccgcgtcctcaccgacttcatagcctccgcgatgggagtgccaacgccggtggcgtacaagctgcgcaggggcgccgcgcgcgggctcgtggcgcgcggcatgaacttcgccgtcggcggcgcgggcgtgctggacaccggcaacttccagcgcaacatcggcgagcagatcgacctgttccaggcgcagcgcccgccgccgccgtcgccctccgcccgcggctgcgacgccggggtcgccgtcgtcgtcgtctccggcaacgactactcctacgccgccgacaaggacaacagcacaagcgccgcgatcgcctacatcccagcggtggtgcggcagctccgggagcagctgcggcggctgcgcgacgaggcgggcatgcgcaaggtggtggtcaccaacctgcaccccatggggtgcacgccgctcttcacccgcgctctcaactacacggcctgcgacccgctggccaacgccggcgccgcgcagcacaacgcggcgcttcagtccgtgctcgccgcgctcgacccggccaaccgcaccttcctcctcctcgacctcaacacgcccttcgccgccttagtcgacggcgcggcggcggcgacggcggaggagaggttcgcggagccgaggcggccgtgctgcgagagcttcagcgccgacggccactgcgggcagcaggacgacagcggcaggcggcagtacacgctgtgtagcgacccgagcaagcatttttactgggacgacgtccacccgacgcaggccgcgtgggccgccgtctcccgaacgttcaggcccatgattcaaggagttccttctgtctacctgatcacagctttgtttcgatcagatgagataaaaactagcactacttatcaaaagaaccaatcaatcaagggtggagagctaaccgagttgttggattagtgaaattctcctgtcattgttactctaaaaatggctggattttttgtattaaaaaaaatccacggtgcgagatgttggaataaaaaagcgatcttcagttcagtg

SEQ ID NO: 22362 - protein, 420 aa, Zea mays subsp. mays
  misc_feature (1)..(420): Ceres Seq. ID no. 12408630
MEHTNHRRRRQALATVSATTTLLLLLLCLAALTTAEALREHRDEGGASSSGGSGSGCGSNAAGGKQSPAVWVFGDSYADTGNLGDLGRELTREWYDPYGTTFPGRPAGRFSDGRVLTDFIASAMGVPTPVAYKLRRGAARGLVARGMNFAVGGAGVLDTGNFQRNIGEQIDLFQAQRPPPPSPSARGCDAGVAVVVVSGNDYSYAADKDNSTSAAIAYIPAVVRQLREQLRRLRDEAGMRKVVVTNLHPMGCTPLFTRALNYTACDPLANAGAAQHNAALQSVLAALDPANRTFLLLDLNTPFAALVDGAAAATAEERFAEPRRPCCESFSADGHCGQQDDSGRRQYTLCSDPSKHFYWDDVHPTQAAWAAVSRTFRPMIQGVPSVYLITALFRSDEIKTSTTYQKNQSIKGGELTELLD

SEQ ID NO: 22363 - protein, 297 aa, Zea mays subsp. mays
  misc_feature (1)..(297): Ceres Seq. ID no. 12408631
MGVPTPVAYKLRRGAARGLVARGMNFAVGGAGVLDTGNFQRNIGEQIDLFQAQRPPPPSPSARGCDAGVAVVVVSGNDYSYAADKDNSTSAAIAYIPAVVRQLREQLRRLRDEAGMRKVVVTNLHPMGCTPLFTRALNYTACDPLANAGAAQHNAALQSVLAALDPANRTFLLLDLNTPFAALVDGAAAATAEERFAEPRRPCCESFSADGHCGQQDDSGRRQYTLCSDPSKHFYWDDVHPTQAAWAAVSRTFRPMIQGVPSVYLITALFRSDEIKTSTTYQKNQSIKGGELTELLD

SEQ ID NO: 22364 - protein, 274 aa, Zea mays subsp. mays
  misc_feature (1)..(274): Ceres Seq. ID no. 12408632
MNFAVGGAGVLDTGNFQRNIGEQIDLFQAQRPPPPSPSARGCDAGVAVVVVSGNDYSYAADKDNSTSAAIAYIPAVVRQLREQLRRLRDEAGMRKVVVTNLHPMGCTPLFTRALNYTACDPLANAGAAQHNAALQSVLAALDPANRTFLLLDLNTPFAALVDGAAAATAEERFAEPRRPCCESFSADGHCGQQDDSGRRQYTLCSDPSKHFYWDDVHPTQAAWAAVSRTFRPMIQGVPSVYLITALFRSDEIKTSTTYQKNQSIKGGELTELLD

SEQ ID NO: 22365 - DNA, 1335 bp, Zea mays subsp. mays
  misc_feature (1)..(1335): Ceres Seq. ID no. 12408633
aaaaaaaactcaaacaaactcaagcctgccctgccctgccttgttaagcaaagcaacccagctgcgagacacgagagctagctagagagagatggcggccacggtttcgtccttcccggtggtgaacatggagaagctggagaccgaggagagggccacggccatggaggtcatccgcgacggctgcgagaactggggcttcttcgagctgctgaaccacggcatctcgcacgagctgatggacgaggtggagcggctgaccaaggcgcactacgccaccttccgggaggccaagttccaggagttcgcggcccggacgctggaggccggcgagaagggcgccgacgtcaaggacgtggactgggagagcaccttcttcgtccgccacctcccggcctccaacctcgccgacctccccgacgtcgacgaccgctacaggcaggtgatggagcagttcgcatcggagatccggaagctgtcggagaggctgctggacctgctgtgcgagaacctgggcctggagcccgggtacctgaaggcggccttcgcggggtcggacggcccgacgttcggcaccaaggtgagcgcgtacccgccgtgcccgcgcccggacctcgtcgacggccttcgcgcgcacaccgacgccggcggcatcgtgctgctgttccaggacgaccaggtgagcggcctgcagctgctcaggggcggggagtgggtggacgtgccgcccatgcgccacgccatcgtcgccaacgtcggcgaccagctggaggtcatcaccaacgggcggtacaagagcgtcatgcaccgcgtgctcacgcgccccgacggcaaccgcatgtccgtcgcgtccttctacaacccgggcgccgacgccgtcatcttcccggcgcccgcgctcgtcggcgccgccgaggaggaccgcgccgaggccgcgtacccgagcttcgtgttcgaggactacatgaacctgtacgtgcgccacaagttcgaggccaaggagcccaggttcgaggccatgaagtcggccatcgccaccgcgtgagaaagactgccttccgctgccggcttccttcgtggcgtcaagccttgaggcttgaacgaacaacgtacgtccatgtgcttatagtggcacagttgtgtgtgtaactaccgatcgtggaacggcctaatgtatttcggttgcctcagatcgatctatatgtgcgtatacattatgtactcaaaagtgtgtagcgtctggttaatgtacgagcagtgtgtatgtgaccaggacccggtgtgtagttgctactactaccatatccggtgaatgatcaaaccttttggtgtatt

SEQ ID NO: 22366 - protein, 317 aa, Zea mays subsp. mays
  misc_feature (1)..(317): Ceres Seq. ID no. 12408634
MAATVSSFPVVNMEKLETEERATAMEVIRDGCENWGFFELLNHGISHELMDEVERLTKAHYATFREAKFQEFAARTLEAGEKGADVKDVDWESTFFVRHLPASNLADLPDVDDRYRQVMEQFASEIRKLSERLLDLLCENLGLEPGYLKAAFAGSDGPTFGTKVSAYPPCPRPDLVDGLRAHTDAGGIVLLFQDDQVSGLQLLRGGEWVDVPPMRHAIVANVGDQLEVITNGRYKSVMHRVLTRPDGNRMSVASFYNPGADAVIFPAPALVGAAEEDRAEAAYPSFVFEDYMNLYVRHKFEAKEPRFEAMKSAIATA

SEQ ID NO: 22367 - protein, 305 aa, Zea mays subsp. mays
  misc_feature (1)..(305): Ceres Seq. ID no. 12408635
MEKLETEERATAMEVIRDGCENWGFFELLNHGISHELMDEVERLTKAHYATFREAKFQEFAARTLEAGEKGADVKDVDWESTFFVRHLPASNLADLPDVDDRYRQVMEQFASEIRKLSERLLDLLCENLGLEPGYLKAAFAGSDGPTFGTKVSAYPPCPRPDLVDGLRAHTDAGGIVLLFQDDQVSGLQLLRGGEWVDVPPMRHAIVANVGDQLEVITNGRYKSVMHRVLTRPDGNRMSVASFYNPGADAVIFPAPALVGAAEEDRAEAAYPSFVFEDYMNLYVRHKFEAKEPRFEAMKSAIATA

SEQ ID NO: 22368 - protein, 293 aa, Zea mays subsp. mays
  misc_feature (1)..(293): Ceres Seq. ID no. 12408636
MEVIRDGCENWGFFELLNHGISHELMDEVERLTKAHYATFREAKFQEFAARTLEAGEKGADVKDVDWESTFFVRHLPASNLADLPDVDDRYRQVMEQFASEIRKLSERLLDLLCENLGLEPGYLKAAFAGSDGPTFGTKVSAYPPCPRPDLVDGLRAHTDAGGIVLLFQDDQVSGLQLLRGGEWVDVPPMRHAIVANVGDQLEVITNGRYKSVMHRVLTRPDGNRMSVASFYNPGADAVIFPAPALVGAAEEDRAEAAYPSFVFEDYMNLYVRHKFEAKEPRFEAMKSAIATA

SEQ ID NO: 22369 - DNA, 1203 bp, Zea mays subsp. mays
  misc_feature (1)..(1203): Ceres Seq. ID no. 12408641
aaggcgcaaaagccatcaacctctgcagctacaggacagcgtgcttgtgagtggctgtgcttccgtaggggtagtagggtgcttgcgttgcgttgcagtgcagaggacactgacggacggcgaagaatcgaagatggaggcgtacgctgctggagccaagttcgactgcttgctgttcgacatggacgacactctgtacccgctgagccttggcatcaacctagcatgccgcaagaacatacaggagtacatgctgaagaagctgcggatcgaggagagccaggtccccaggatgtgcctggacctgtacagggagtatgggaccacaatggccggcctcaaggttttggggtacgatttcgactacgacgacttccacgcctgcgtgcacgggacgctgccgtacgagaaggtgaagcctgacccggtgctcaggcagctgctgctttccctgccgcagaggaagatcatcttcaccaactccgacaaggcccacgcggccagagtcctggagaagctcggcctccaggactgcttccaagggatcgtctgcttcgagacactgaacccgccaccaccaaccgagaccgagaagaacagtggcagtgctgggacgatcctgtgcaagccctcgctggcgtccatggaagccgtcatcgagatcgccaagctcgacgccgagagaacggtgttctttgacgacagcacgcgcaacatcgccgcagggaaggccgccggtttccgcaccgtcatcgtggggagctcggcgctggtgccaggggcggacgtggcgctggagagcatccacaacatcaaggaggcgctgccggagctctgggaggttgccgccgccgctgccgccggcgaccgcgtcgacgccgtcctccggtccaccaccgccgtggagaccacagtgattgcctgagcaataataccatatgacaaatgacattaaccgtcacggactcacggccacgtaatataatgctggcgtgtagtatttcttgtgacgtgcaaattaaaatgacttggaatgtggtgtgcctgattaagtaccgaccgaggtaactaatactactgtatatgacagaccagaactttactggtaataaggtttgtatagctcatccctgtcggcccgtgcttttttatggcgcggtccgtggtgcaaatggatgccacgtactgaatacaaataaatat

SEQ ID NO: 22370 - protein, 307 aa, Zea mays subsp. mays
  misc_feature (1)..(307): Ceres Seq. ID no. 12408642
RRKSHQPLQLQDSVLVSGCASVGVVGCLRCVAVQRTLTDGEESKMEAYAAGAKFDCLLFDMDDTLYPLSLGINLACRKNIQEYMLKKLRIEESQVPRMCLDLYREYGTTMAGLKVLGYDFDYDDFHACVHGTLPYEKVKPDPVLRQLLLSLPQRKIIFTNSDKAHAARVLEKLGLQDCFQGIVCFETLNPPPPTETEKNSGSAGTILCKPSLASMEAVIEIAKLDAERTVFFDDSTRNIAAGKAAGFRTVIVGSSALVPGADVALESIHNIKEALPELWEVAAAAAAGDRVDAVLRSTTAVETTVIA

SEQ ID NO: 22371 - protein, 263 aa, Zea mays subsp. mays
  misc_feature (1)..(263): Ceres Seq. ID no. 12408643
MEAYAAGAKFDCLLFDMDDTLYPLSLGINLACRKNIQEYMLKKLRIEESQVPRMCLDLYREYGTTMAGLKVLGYDFDYDDFHACVHGTLPYEKVKPDPVLRQLLLSLPQRKIIFTNSDKAHAARVLEKLGLQDCFQGIVCFETLNPPPPTETEKNSGSAGTILCKPSLASMEAVIEIAKLDAERTVFFDDSTRNIAAGKAAGFRTVIVGSSALVPGADVALESIHNIKEALPELWEVAAAAAAGDRVDAVLRSTTAVETTVIA

SEQ ID NO: 22372 - protein, 247 aa, Zea mays subsp. mays
  misc_feature (1)..(247): Ceres Seq. ID no. 12408644
MDDTLYPLSLGINLACRKNIQEYMLKKLRIEESQVPRMCLDLYREYGTTMAGLKVLGYDFDYDDFHACVHGTLPYEKVKPDPVLRQLLLSLPQRKIIFTNSDKAHAARVLEKLGLQDCFQGIVCFETLNPPPPTETEKNSGSAGTILCKPSLASMEAVIEIAKLDAERTVFFDDSTRNIAAGKAAGFRTVIVGSSALVPGADVALESIHNIKEALPELWEVAAAAAAGDRVDAVLRSTTAVETTVIA

SEQ ID NO: 22373 - DNA, 1629 bp, Zea mays subsp. mays
  misc_feature (1)..(1629): Ceres Seq. ID no. 12408645
accaccgtgacagttctattaacttgacgagacaaaaggggggaaagttctcctcctacaatcctacctccagtgatgtcagtaccaccgccggccggcggcggcgccatcatcaacgaggtcctcaccgacgacgagctccgcgcagtgctcaggcggctggggcccgaggcggagcgggacgcgttcgggctcgtgtgccgccgctggctccggatccagagctccgagcggcggcgcctgcgcgcgcgcgccggcccggacatgctgcgccgcctcgctgcacgcttccctggtgtcctggatctcgacctctctcagtcgccctcccgctccttctaccctggggtcatcgacgacgacctcaactttatcgccagcagcttccgcaacctgcgtgtcctcgcgctgcagaactgcaaaggtatctctgatgtcggagttgccaaattgggagatggactgccatcctctacagtcccttgatgtttctcgctgcataaagctgagtgacaaaggtttgaaggcggttgcactagggtgcaaaaaattgagtcagctgcaaatcatgggatgcaaattagtaacagataatttattgactgctctatcaaagagctgcctgcaattggtagaacttggagctgcgggatgtaacagcataacagatgctggtatatctgctctggctgatggctgtcatcacataaaatcactagacataagcaaatgcaacaaagttagtgatcctggagtctgtaagatcgctgaggtttcttcatcatgcttggtgtcaataaagctattggactgcagcaaggtgggagataagtccatctattcgttagctaagttttgcagtaacctagagactcttgtcattggtggatgtcggaacattagcgatggctccatacaagcacttgctcttgcctgctccagtagcttaaggagcctgagaatggactggtgcttgaaaataacagacacatcattgcaaagcctgctgtctaactgtaaacttcttgtagccattgatgtcggatgttgtgaccagataaccgacaatgcattcatggacggggaaggatacgggtttcagtctgaactgagagttttgaagatcagcagctgtgttcggctcacagttgcaggggtcggcagagtgattgaatccttcaaggctcttgagtacttggatgttcggtcatgccctcaggttacaagggacagctgcgagcaagctggagtgcagtttcctgctggctgtaaggtgaatttcgatggcagtttgctggaatctgatccatctgctgagatgttcttctaaaatgtgatctcggttgaaatcagatttagtgtgaactgcaaaactaagatttgaagagctcggtcatggaggcgagtgcttgacattgctgctgatctttcactgtcaaaatctatgcaagaacctgagaccacaacggatgcaagccatgatcatattcagtacccaattcaatatgcatgtgatttaatctgtagaaagtagcgcaaaagaccatgaaataagttgtctgaccaaagaacgtatttgcattatgtattgtgccagtgcagcgggtgtattaaaaaaatgtgcatttt

SEQ ID NO: 22374 - protein, 298 aa, Zea mays subsp. mays
  misc_feature (1)..(298): Ceres Seq. ID no. 12408646
MSELPNWEMDCHPLQSLDVSRCIKLSDKGLKAVALGCKKLSQLQIMGCKLVTDNLLTALSKSCLQLVELGAAGCNSITDAGISALADGCHHIKSLDISKCNKVSDPGVCKIAEVSSSCLVSIKLLDCSKVGDKSIYSLAKFCSNLETLVIGGCRNISDGSIQALALACSSSLRSLRMDWCLKITDTSLQSLLSNCKLLVAIDVGCCDQITDNAFMDGEGYGFQSELRVLKISSCVRLTVAGVGRVIESFKALEYLDVRSCPQVTRDSCEQAGVQFPAGCKVNFDGSLLESDPSAEMFF

SEQ ID NO: 22375 - protein, 290 aa, Zea mays subsp. mays
  misc_feature (1)..(290): Ceres Seq. ID no. 12408647
MDCHPLQSLDVSRCIKLSDKGLKAVALGCKKLSQLQIMGCKLVTDNLLTALSKSCLQLVELGAAGCNSITDAGISALADGCHHIKSLDISKCNKVSDPGVCKIAEVSSSCLVSIKLLDCSKVGDKSIYSLAKFCSNLETLVIGGCRNISDGSIQALALACSSSLRSLRMDWCLKITDTSLQSLLSNCKLLVAIDVGCCDQITDNAFMDGEGYGFQSELRVLKISSCVRLTVAGVGRVIESFKALEYLDVRSCPQVTRDSCEQAGVQFPAGCKVNFDGSLLESDPSAEMFF

SEQ ID NO: 22376 - protein, 253 aa, Zea mays subsp. mays
  misc_feature (1)..(253): Ceres Seq. ID no. 12408648
MGCKLVTDNLLTALSKSCLQLVELGAAGCNSITDAGISALADGCHHIKSLDISKCNKVSDPGVCKIAEVSSSCLVSIKLLDCSKVGDKSIYSLAKFCSNLETLVIGGCRNISDGSIQALALACSSSLRSLRMDWCLKITDTSLQSLLSNCKLLVAIDVGCCDQITDNAFMDGEGYGFQSELRVLKISSCVRLTVAGVGRVIESFKALEYLDVRSCPQVTRDSCEQAGVQFPAGCKVNFDGSLLESDPSAEMFF

SEQ ID NO: 22377 - DNA, 1417 bp, Zea mays subsp. mays
  misc_feature (1)..(1417): Ceres Seq. ID no. 12408649
aggtgacaaatccacgcggagtccgctgaaattttggtcgccccatgcccgttctagacgccatggacgatgcggcggcggcggcggtagataggcacggcggcttctagaccgtctccgttttctgcgcgttggccgtcgggggaagtacacaataaacaaagcaagagcagaggtgcaactgggctgctgtgtcctctgcctcttctccttcctgtcgttctgcgctgccccgacccccgagtgcccctggtcttgtcctcctctccctgctgacctcggagcggagcggagcaagcagccgccaggagggaaggatccatggccgggagatcgcggtacgacaaccccttcgaggagggcggcgccgacgaggtcaaccctttcgcggaccaagctaagagaggaggatcgagtgctcagtccggctactctggtggcgcgttctacacgacgcaatcgcaacgccctgctcctcctagcacacgcctttcgcctcttcctcctgaacctgccgacttctacaacgacttcgctaccccggtggatatccccatggacacaaacaaggacatgaagacaagggagaaggagcttctggccaaggaggccgagctgaacaggcgtgagaaggaaataaaaaggcgagaagatgctgcggcacgagctggtgtcgtgttggaagagaagaactggcccccgtttttccccatcattcataacgatatcggcaacgagatacctgtccatctgcaaagaacgctgtacgtcgcgttcgcgtcgctcttagggttggtcttgtgcctgttttggaacataatctgcgttaccgctgcctgggcaaaagggtcaggtccaaagatatggtttctcgcaatcatatacttcatcctcggatgccccggtgcatactacctttggtaccggccactataccgcgcaatgaggaacgagagcgctctcaagttcggatggtttttcctcttctacttggttcatatcgccttctgcgcgtacgcagctgtttctccttcaattctcttcgtgggaaaatcgttaaccgggattttgccagcaatcaacttgataggcgacagcgtcattgttgggatcttctacttcattggctttgcattgttctgcctggaggctttgctaagcgtgtgggtcattcagcgcgtctacctgtacttccgagggagcgggaaagaagcggagatgaggcgtgaagcagcacgcggtgcagcgagggcagcgttttgatgaaagccgtatatagatgatatattatatatataggcacgacatacatacactgttcataatagtttgaagtgttttaggtcaacaggcatgtgtgtacagtagggttggcgtcctgtattacttctagttaaaagacgcaaggttttgagtc

SEQ ID NO: 22378 - protein, 313 aa, Zea mays subsp. mays
  misc_feature (1)..(313): Ceres Seq. ID no. 12408650
MAGRSRYDNPFEEGGADEVNPFADQAKRGGSSAQSGYSGGAFYTTQSQRPAPPSTRLSPLPPEPADFYNDFATPVDIPMDTNKDMKTREKELLAKEAELNRREKEIKRREDAAARAGVVLEEKNWPPFFPIIHNDIGNEIPVHLQRTLYVAFASLLGLVLCLFWNIICVTAAWAKGSGPKIWFLAIIYFILGCPGAYYLWYRPLYRAMRNESALKFGWFFLFYLVHIAFCAYAAVSPSILFVGKSLTGILPAINLIGDSVIVGIFYFIGFALFCLEALLSVWVIQRVYLYFRGSGKEAEMRREAARGAARAAF

SEQ ID NO: 22379 - protein, 235 aa, Zea mays subsp. mays
  misc_feature (1)..(235): Ceres Seq. ID no. 12408651
MDTNKDMKTREKELLAKEAELNRREKEIKRREDAAARAGVVLEEKNWPPFFPIIHNDIGNEIPVHLQRTLYVAFASLLGLVLCLFWNIICVTAAWAKGSGPKIWFLAIIYFILGCPGAYYLWYRPLYRAMRNESALKFGWFFLFYLVHIAFCAYAAVSPSILFVGKSLTGILPAINLIGDSVIVGIFYFIGFALFCLEALLSVWVIQRVYLYFRGSGKEAEMRREAARGAARAAF

SEQ ID NO: 22380 - protein, 229 aa, Zea mays subsp. mays
  misc_feature (1)..(229): Ceres Seq. ID no. 12408652
MKTREKELLAKEAELNRREKEIKRREDAAARAGVVLEEKNWPPFFPIIHNDIGNEIPVHLQRTLYVAFASLLGLVLCLFWNIICVTAAWAKGSGPKIWFLAIIYFILGCPGAYYLWYRPLYRAMRNESALKFGWFFLFYLVHIAFCAYAAVSPSILFVGKSLTGILPAINLIGDSVIVGIFYFIGFALFCLEALLSVWVIQRVYLYFRGSGKEAEMRREAARGAARAAF

SEQ ID NO: 22381 - DNA, 1805 bp, Zea mays subsp. mays
  misc_feature (1)..(1805): Ceres Seq. ID no. 12408657
aagtcctgctagctccataaaggcgcagccggccggctggccggtagcagtcagccagccagccagccatggagacggcctccttcctctcagtggcgctggccctggcggccctcgtccccgtctcgctgctccttgtgaaccggcccctctacggcaaactgcccccggggccgcggcggcgtcccgtggtgggtaacctgttcgacgtgcagcccgtgcggtgccggtgctaccaggagtgggcgcgccggtacgggcccatcatgacggtgtggctgggcacgtcgcccacggtggtggtgtccacgtcggagctggccaaggaggtgctcaagacccacgaccagcagctcgccgaccgctgccgggaccgctccaccgagagcttcagccgaggcggccaggacctcatctgggccgactacggcccccactacatcaaggtgcgcaagctctgcaacctcgagctcttcacgcagcgccgcctcgaggcgctcaggcccatccgcgaggacgaggtcaccgccatggtcgagtccgtctacaaagccgtcaccgcgcctggcagtgcagggaagccgttggttgtaaagaaccacctctcgatggtggccttcaacaacatcacgcggctggccttcgggaagcggttcgtggacgcggccggcgagctggacgagcaagggcgcgagttcaaggggatcgtccacaacggcatcaagatcggtgcgtccctctccatcgcgcagcacatcccgtggctacgctggctggccccggtcgacgagcaggccttcaaagcccacggcgaacggcgcgaccgcctcaccgtgaagatcatggaggagcacgccagggccctcaagcagcgcggcgcccagcagcacttcgtcgacgcgctcttcactctcagggacaagtacgacctcagcgatgacaccgtcataggcctcctctgggacatgatcaccgccggcacggacacgacggtgatctcggtggagtgggcgatggcggagctgctgaggaaccccagagtgcaggagaagctgcaggaggagctggaccgtgtcgtcggccgcgaccgggtcctgtcggagacggacttcccgaacctgccttacctgcaggccgtcgtcaaggagtccctgcgcctgcacccgccgacgccgctgatgctcccccacagggccagcgccagcgtcaagatcgccggctacgacatccccaagggcgccaacgtcgtcgtcaacgtgtgggcggtggcgcgcgaccccgaggtgtgggacagcccgctcgagttccggccggagcggttcctccgggagaacatcgacatcaagggcgccgacttccgcgtgctgccgttcggcgccggccgccgggtgtgccccggcgcgcagctcgggatcaacctcgtggcgtccatgatcggccacatgctgcaccacttcacgtggacgctgccgagcgggacctgtcccgaggacgtgagcatgatggagtcccccgggctcgtcaccttcatggccacgccgctgcaggccgtcgccacgccgcgcctggacaaggaggaactgtacaggcgtgtcccttcggacgtgtgagccgtcggcgtcctggcatctgctgcgttccctgttttgaaacctgctgctgctgttgcgaatttgtgtaccattaactattcgctggtgatgtacgtgtcatagtcgtgtacgagcattttgtgtactgcagaacttgatcgctgagcatacacttttgcccggtagtaatttacaatttcagcattgcaaatt

SEQ ID NO: 22382 - protein, 513 aa, Zea mays subsp. mays
  misc_feature (1)..(513): Ceres Seq. ID no. 12408658
METASFLSVALALAALVPVSLLLVNRPLYGKLPPGPRRRPVVGNLFDVQPVRCRCYQEWARRYGPIMTVWLGTSPTVVVSTSELAKEVLKTHDQQLADRCRDRSTESFSRGGQDLIWADYGPHYIKVRKLCNLELFTQRRLEALRPIREDEVTAMVESVYKAVTAPGSAGKPLVVKNHLSMVAFNNITRLAFGKRFVDAAGELDEQGREFKGIVHNGIKIGASLSIAQHIPWLRWLAPVDEQAFKAHGERRDRLTVKIMEEHARALKQRGAQQHFVDALFTLRDKYDLSDDTVIGLLWDMITAGTDTTVISVEWAMAELLRNPRVQEKLQEELDRVVGRDRVLSETDFPNLPYLQAVVKESLRLHPPTPLMLPHRASASVKIAGYDIPKGANVVVNVWAVARDPEVWDSPLEFRPERFLRENIDIKGADFRVLPFGAGRRVCPGAQLGINLVASMIGHMLHHFTWTLPSGTCPEDVSMMESPGLVTFMATPLQAVATPRLDKEELYRRVPSDV

SEQ ID NO: 22383 - protein, 447 aa, Zea mays subsp. mays
  misc_feature (1)..(447): Ceres Seq. ID no. 12408659
MTVWLGTSPTVVVSTSELAKEVLKTHDQQLADRCRDRSTESFSRGGQDLIWADYGPHYIKVRKLCNLELFTQRRLEALRPIREDEVTAMVESVYKAVTAPGSAGKPLVVKNHLSMVAFNNITRLAFGKRFVDAAGELDEQGREFKGIVHNGIKIGASLSIAQHIPWLRWLAPVDEQAFKAHGERRDRLTVKIMEEHARALKQRGAQQHFVDALFTLRDKYDLSDDTVIGLLWDMITAGTDTTVISVEWAMAELLRNPRVQEKLQEELDRVVGRDRVLSETDFPNLPYLQAVVKESLRLHPPTPLMLPHRASASVKIAGYDIPKGANVVVNVWAVARDPEVWDSPLEFRPERFLRENIDIKGADFRVLPFGAGRRVCPGAQLGINLVASMIGHMLHHFTWTLPSGTCPEDVSMMESPGLVTFMATPLQAVATPRLDKEELYRRVPSDV

SEQ ID NO: 22384 - protein, 359 aa, Zea mays subsp. mays
  misc_feature (1)..(359): Ceres Seq. ID no. 12408660
MVESVYKAVTAPGSAGKPLVVKNHLSMVAFNNITRLAFGKRFVDAAGELDEQGREFKGIVHNGIKIGASLSIAQHIPWLRWLAPVDEQAFKAHGERRDRLTVKIMEEHARALKQRGAQQHFVDALFTLRDKYDLSDDTVIGLLWDMITAGTDTTVISVEWAMAELLRNPRVQEKLQEELDRVVGRDRVLSETDFPNLPYLQAVVKESLRLHPPTPLMLPHRASASVKIAGYDIPKGANVVVNVWAVARDPEVWDSPLEFRPERFLRENIDIKGADFRVLPFGAGRRVCPGAQLGINLVASMIGHMLHHFTWTLPSGTCPEDVSMMESPGLVTFMATPLQAVATPRLDKEELYRRVPSDV

SEQ ID NO: 22385 - DNA, 1269 bp, Zea mays subsp. mays
  misc_feature (1)..(1269): Ceres Seq. ID no. 12408669
cttgattggctcgtgaaatccatgggcgggcgcaagatgcgggcgtccatgacgacactgctgatccgcctcgtgctcaccgtcgccctcctgggcgacgaggcggcgcggcggtgcgcggcgttcaacccacgcgtgctgttcacggtgaagcccgacccgatcgtgctgcgggaccaccgcggcgcgctgctcacggggaaccacaccgtcaacctgctcttctacgggcgcttcaccgcagcgcaacgcgcgatcgtcgtcgacttcgtccgttccctctcggacgcgagcgcgcctcgcccggagccgccgggggcaccgccgtccgtggcggcgtggtggtgcaccatccggctctaccgcggcggcggcgcgcggctgcggctcggcaggcagatcatcgacgagcgcatgtcgctgggccggggccctctctctccgggcaacgtcacggcgctggcgcgggccgcggggcaccaccggggcgccatcaccgcagtgctcacggccgccgacgtccccgtggcgtccttctgcgtgtcgcgctgcggcgcccacggccacgaccgcggcggcacgcacggcagggcgcggtacacctacctgtgggcggggaatccggcgcagcagtgccccggccaatgcgcgtggccgttccacctgccgacgtacggtccccagaccccgccgctggtgccacccaacggcgacgtcggcgtcgacggcatggtcatcagcctcgccgccctcctcgccggcacggtcaccaacccgtacggggacgggtactaccagggcgacgctggcaccggcgccgggctggaggctgccacggtgtgcgccgggatcttcgggaccgggtcctaccccggctaccccgggaagctgctcacagacccggccaccggcgcgagctacaacgtcgtcgggctaggcgggaggaagtacctgctcccggcattgtgggatccggcgacctcccagtgcaagacacttgtccagacgtgacaggggtgaggggtgacgcccgcggaccgtggtgcggggagaatgtccaatgcaagggcctgcctgctgcagaagggaggaaaaataaatgcctcatttactatttccattccttattgcatgtacttgttgtctgtcctaccagcagagattgtatgatgtatttggtggatgtctatgttaatggaatttgaacgacatgcttaaatatatggtcttgaaactaaatcacatgtgtctagaatatgatttatctag

SEQ ID NO: 22386 - protein, 336 aa, Zea mays subsp. mays
  misc_feature (1)..(336): Ceres Seq. ID no. 12408670
LDWLVKSMGGRKMRASMTTLLIRLVLTVALLGDEAARRCAAFNPRVLFTVKPDPIVLRDHRGALLTGNHTVNLLFYGRFTAAQRAIVVDFVRSLSDASAPRPEPPGAPPSVAAWWCTIRLYRGGGARLRLGRQIIDERMSLGRGPLSPGNVTALARAAGHHRGAITAVLTAADVPVASFCVSRCGAHGHDRGGTHGRARYTYLWAGNPAQQCPGQCAWPFHLPTYGPQTPPLVPPNGDVGVDGMVISLAALLAGTVTNPYGDGYYQGDAGTGAGLEAATVCAGIFGTGSYPGYPGKLLTDPATGASYNVVGLGGRKYLLPALWDPATSQCKTLVQT

SEQ ID NO: 22387 - protein, 329 aa, Zea mays subsp. mays
  misc_feature (1)..(329): Ceres Seq. ID no. 12408671
MGGRKMRASMTTLLIRLVLTVALLGDEAARRCAAFNPRVLFTVKPDPIVLRDHRGALLTGNHTVNLLFYGRFTAAQRAIVVDFVRSLSDASAPRPEPPGAPPSVAAWWCTIRLYRGGGARLRLGRQIIDERMSLGRGPLSPGNVTALARAAGHHRGAITAVLTAADVPVASFCVSRCGAHGHDRGGTHGRARYTYLWAGNPAQQCPGQCAWPFHLPTYGPQTPPLVPPNGDVGVDGMVISLAALLAGTVTNPYGDGYYQGDAGTGAGLEAATVCAGIFGTGSYPGYPGKLLTDPATGASYNVVGLGGRKYLLPALWDPATSQCKTLVQT

SEQ ID NO: 22388 - protein, 324 aa, Zea mays subsp. mays
  misc_feature (1)..(324): Ceres Seq. ID no. 12408672
MRASMTTLLIRLVLTVALLGDEAARRCAAFNPRVLFTVKPDPIVLRDHRGALLTGNHTVNLLFYGRFTAAQRAIVVDFVRSLSDASAPRPEPPGAPPSVAAWWCTIRLYRGGGARLRLGRQIIDERMSLGRGPLSPGNVTALARAAGHHRGAITAVLTAADVPVASFCVSRCGAHGHDRGGTHGRARYTYLWAGNPAQQCPGQCAWPFHLPTYGPQTPPLVPPNGDVGVDGMVISLAALLAGTVTNPYGDGYYQGDAGTGAGLEAATVCAGIFGTGSYPGYPGKLLTDPATGASYNVVGLGGRKYLLPALWDPATSQCKTLVQT

SEQ ID NO: 22389 - DNA, 1023 bp, Zea mays subsp. mays
  misc_feature (1)..(1023): Ceres Seq. ID no. 12408705
agtatacgatgatttgagggtgtgagctgaaaaatctccacatcaccagattacggccggcggcggcccgctctgttccatcgcccccaagcggcgggccttggctgcgccgcctaaatccaccggcgagagtaaagggcgcccctctctcacacgatggcctcgagctccgcaagcggcgccggggtggagggcggggtcggggaggggccgacgacgctggacgagctgtaccagatcaacgtagtgccggccgagctccacttcaagttccgcaaggagctgcagggcctccgcgtcggcctcaacctcgagttctacaatcttgaggtcaatgactttgaggcaaagatagtactgaagcctctagattacgagcggaaatggaagttccagtacaagcccatcagtggcgacatacagctgctttccaagaagataccagtcacaaagtttctaaatctacaggttggcattggccacaattttcaactgaatgcaactggatggaagtggaagctttctacttgcctggggggagatggtgtgtctcagataagaaacaagtcaaaactcagcttgttcccagggtttgatttgaggattgggtggaaagcagagtatgtgcttcctgagattcatggggctgttggcacaggagaaccagccttcagtatgaactatggaaggttgcatgcatcgatagatcgggtcgaggctatcgttactcagtcagatcagtattgatcttccagtgcggaaaggcaagggagtttcttgatcaataacaaacacgttgagtagatcccagggttacaagaagcattctgaagctccgtgcctgatgtacagcaaataccaaagtttaggaccacgctttgagaagctgtttgagttctccaaagcttttgactttgagcggcttctgttgcttctgaaagcgtaactataaataatgtttatcctgcttgtgtacgaaacaccagagtatcagtaattcagtatagtgagcgacgtcaaagc

SEQ ID NO: 22390 - protein, 196 aa, Zea mays subsp. mays
  misc_feature (1)..(196): Ceres Seq. ID no. 12408706
MASSSASGAGVEGGVGEGPTTLDELYQINVVPAELHFKFRKELQGLRVGLNLEFYNLEVNDFEAKIVLKPLDYERKWKFQYKPISGDIQLLSKKIPVTKFLNLQVGIGHNFQLNATGWKWKLSTCLGGDGVSQIRNKSKLSLFPGFDLRIGWKAEYVLPEIHGAVGTGEPAFSMNYGRLHASIDRVEAIVTQSDQY

SEQ ID NO: 22391 - DNA, 1397 bp, Zea mays subsp. mays
  misc_feature (1)..(1397): Ceres Seq. ID no. 12408727
cttaaaaatagaaggcaatctctacttggtcagctggcagaatcgctgcagttggttgatccactaggtgcaaataaaaacacacatctgtccgcaaatgatgatttggtatttcttcgcattgtttctctacccaagggccggaaactactttcacgctatatcaacctcatggtacctggtagcgatcttgcaaggatagtttgcatggcagtattcaggcacctgaggtttgtgtttggaaatctgccctccgatgacggcgcagctgagacagtaactaaactggctagcgctgtagcatcatgcattcgtcggatggacttaagtggcctcagtgcttgtctcgcagcaattgtatgctcgtctgagcacccaccccttcggccccttggccatgctgccggcgatggtgccactgtcgtcataaagtctgtcctggatagagcaacagagctcctcaccgagcagcctgccgcgccagactatggcgctccaaaccgagccttgtggcaagcgtcgttcaatgccttctttgggctgctcactaagtactgcatgagtaagtttgacagcatggttcacacgatgcacaagctcggtgctgctgctgcaacagcgatacgcaaggaacttccggttgagcttctgcgcgccagccttcctcacacggatgagcagcagcgcagactactgctcgagttcgcccagcggaccgtgcccgtctctggccatggctccgacgggtgacggacggaggggcggctggtggaaccatggcatctgaaacaataccagcttaaggtggtcagcgaatattggtgcgctagatgcggtattttattctatcatacgcagacctgcccaatgaatcgagcgttccttgagctgcagttcagatgggcatgccggcgttaagtggatgtatgtcccaggtttggatccgtctgtttaggctaatagtattctctctgcacggttgcatcgcatcaccactggatagattagcatgattagcttccgtctgcagggctgtgtttcgttggctctgggtgggaacggaacccccctgcacgttccttgaaggcaattgcaagaaaatactgcgagctgttggtgtttcggtttgcagtgtttgtttgtagtggcgtcaaggcttccaaggttctcatctcatcactccggacgggtgccaggaagatgtggtttaacacatgtataaactagcaaatgcttggaaggttgatatttggttctgtagccagccattcgaagattgttgggtggggggttttgtttcctgttatattcgcaactgaatacattatcttgcgaagctgttcagtctgtaacgagttcattgggaattccactatatatccttgttatggatggtc

SEQ ID NO: 22392 - protein, 249 aa, Zea mays subsp. mays
  misc_feature (1)..(249): Ceres Seq. ID no. 12408728
LKNRRQSLLGQLAESLQLVDPLGANKNTHLSANDDLVFLRIVSLPKGRKLLSRYINLMVPGSDLARIVCMAVFRHLRFVFGNLPSDDGAAETVTKLASAVASCIRRMDLSGLSACLAAIVCSSEHPPLRPLGHAAGDGATVVIKSVLDRATELLTEQPAAPDYGAPNRALWQASFNAFFGLLTKYCMSKFDSMVHTMHKLGAAAATAIRKELPVELLRASLPHTDEQQRRLLLEFAQRTVPVSGHGSDG

SEQ ID NO: 22393 - protein, 192 aa, Zea mays subsp. mays
  misc_feature (1)..(192): Ceres Seq. ID no. 12408729
MVPGSDLARIVCMAVFRHLRFVFGNLPSDDGAAETVTKLASAVASCIRRMDLSGLSACLAAIVCSSEHPPLRPLGHAAGDGATVVIKSVLDRATELLTEQPAAPDYGAPNRALWQASFNAFFGLLTKYCMSKFDSMVHTMHKLGAAAATAIRKELPVELLRASLPHTDEQQRRLLLEFAQRTVPVSGHGSDG

SEQ ID NO: 22394 - protein, 180 aa, Zea mays subsp. mays
  misc_feature (1)..(180): Ceres Seq. ID no. 12408730
MAVFRHLRFVFGNLPSDDGAAETVTKLASAVASCIRRMDLSGLSACLAAIVCSSEHPPLRPLGHAAGDGATVVIKSVLDRATELLTEQPAAPDYGAPNRALWQASFNAFFGLLTKYCMSKFDSMVHTMHKLGAAAATAIRKELPVELLRASLPHTDEQQRRLLLEFAQRTVPVSGHGSDG

SEQ ID NO: 22395 - DNA, 1815 bp, Zea mays subsp. mays
  misc_feature (1)..(1815): Ceres Seq. ID no. 12408731
ctgttcattcagatctgctccgtgctgtgcttcttctgctgctgccttgcagcgaccagcgagaagaaatccattcgctaggccggcccacccacccacgatagcggttgtggtcactcatgcgtcgtcgccggagtccaatctcgccgctcggagtttcttgacttttctggtcggagtttccatttcctcctggaggagattatttctttctcctctttcaccccgagaatctcgtctcgggtcgcgctggtttgattcctcctcgcctgagtccaccgctttcgcttccagtggagaagcttgtccgtgaagcagcgctcgtctcctgcttaaaatttcttccttctgccttggtttctttgctcgcgcccgccgatttgcttgctgcccagtccacactcctccgttcgtgtctcgcggctttccgcactcgttttcccggtctcggatttcgttaccaatgggcaacgcgttcgcgtgcatgccgcgcaaggagcagcgaggcgcggccgcggtgtcgcgcagcaagcggatggggagcgcgcggtcggcgcgcggcgggcccaagctgacgcccgcggaggaggagctcctccaccgccaggctctggccatggccatccaccagcacctcgacgccggcggctccatgtcccgccgcatcgacgccggggcctccctgtcccggcgcatggccccgggctccaccagctcccgccgccgcggcgacctgccggactccgtcacgaatgccaagcccgccccaattgttctggagaatttggaaacaaagaaaattgtccttgttcatggagaagggttcggtgcttggtgttggtacaagaccatctcacacttggaggaagctggtctagatcctgttgccttagatctcacaggctctggcatagaccatactgatacaaacagcatagctacgttagcagattactccaagccattgattgattacctcgacagacttcctgaagatgagaaggtcattttggtcggccatagttgcggaggtgcgagtgtctcgtatgcactggagcagtacccccgaaagatctcaaaggcggtgtttcttactgctacaatggtaaaggatggccagaggccctttgacgtgttctcggaggaactccggtcggcggatgttttcttgcaagagtcacagtttctagtctatggaaatgggaaggacaagcctcctactgggctgatgttcgataagcagcagatcaaggggctgtatttcaaccaaactccttccaaggatatggcactagcagcggtgtccatgaggcctatccctctagccccaatcatggagaagctctccctcaccccggagaactacggctccgtccgtcgctacttcatccaggcactcgacgaccacatgctgtcgccggacgcccaggagaagctggtccgcgagaaccctcccgacggcatcttcaagatcaagggcggcgaccactgccccttcttctcgaagccgcagtccctcaacaagatcctgctggagatcgcacagatccaagctcctgcggcgctgctcaaggcgagctcccccgaggagaccgtcgccgccatggtgacagggccagccaagtcatgactgcatgtatgtagtgtacacgaaaagagaaatgagtaagcacataggttgcaaaagggagggggaggaggtctggggattaactgaagccaagctgtgtcggataataatgtagggagttcaaagtgtttctttctttcttctgtgatcagatcagatcatatagagaatgagaggtggtcagc

SEQ ID NO: 22396 - protein, 388 aa, Zea mays subsp. mays
  misc_feature (1)..(388): Ceres Seq. ID no. 12408732
MGNAFACMPRKEQRGAAAVSRSKRMGSARSARGGPKLTPAEEELLHRQALAMAIHQHLDAGGSMSRRIDAGASLSRRMAPGSTSSRRRGDLPDSVTNAKPAPIVLENLETKKIVLVHGEGFGAWCWYKTISHLEEAGLDPVALDLTGSGIDHTDTNSIATLADYSKPLIDYLDRLPEDEKVILVGHSCGGASVSYALEQYPRKISKAVFLTATMVKDGQRPFDVFSEELRSADVFLQESQFLVYGNGKDKPPTGLMFDKQQIKGLYFNQTPSKDMALAAVSMRPIPLAPIMEKLSLTPENYGSVRRYFIQALDDHMLSPDAQEKLVRENPPDGIFKIKGGDHCPFFSKPQSLNKILLEIAQIQAPAALLKASSPEETVAAMVTGPAKS

SEQ ID NO: 22397 - protein, 381 aa, Zea mays subsp. mays
  misc_feature (1)..(381): Ceres Seq. ID no. 12408733
MPRKEQRGAAAVSRSKRMGSARSARGGPKLTPAEEELLHRQALAMAIHQHLDAGGSMSRRIDAGASLSRRMAPGSTSSRRRGDLPDSVTNAKPAPIVLENLETKKIVLVHGEGFGAWCWYKTISHLEEAGLDPVALDLTGSGIDHTDTNSIATLADYSKPLIDYLDRLPEDEKVILVGHSCGGASVSYALEQYPRKISKAVFLTATMVKDGQRPFDVFSEELRSADVFLQESQFLVYGNGKDKPPTGLMFDKQQIKGLYFNQTPSKDMALAAVSMRPIPLAPIMEKLSLTPENYGSVRRYFIQALDDHMLSPDAQEKLVRENPPDGIFKIKGGDHCPFFSKPQSLNKILLEIAQIQAPAALLKASSPEETVAAMVTGPAKS

SEQ ID NO: 22398 - protein, 364 aa, Zea mays subsp. mays
  misc_feature (1)..(364): Ceres Seq. ID no. 12408734
MGSARSARGGPKLTPAEEELLHRQALAMAIHQHLDAGGSMSRRIDAGASLSRRMAPGSTSSRRRGDLPDSVTNAKPAPIVLENLETKKIVLVHGEGFGAWCWYKTISHLEEAGLDPVALDLTGSGIDHTDTNSIATLADYSKPLIDYLDRLPEDEKVILVGHSCGGASVSYALEQYPRKISKAVFLTATMVKDGQRPFDVFSEELRSADVFLQESQFLVYGNGKDKPPTGLMFDKQQIKGLYFNQTPSKDMALAAVSMRPIPLAPIMEKLSLTPENYGSVRRYFIQALDDHMLSPDAQEKLVRENPPDGIFKIKGGDHCPFFSKPQSLNKILLEIAQIQAPAALLKASSPEETVAAMVTGPAKS

SEQ ID NO: 22399 - DNA, 2155 bp, Zea mays subsp. mays
  misc_feature (1)..(2155): Ceres Seq. ID no. 12408748
acccctgcttgctgcagcttcaagcactaccgaatcagggcgagtgggagcagaggagggaatcccatgtctccgcccctcgctggagcagatcgttgtcgagccgacgtggagctgctgcggtagaaagctagcggagcctgcgagctagcctgatccgtccgcagtccgatcgggatcgatgggtggggaggcgccggagccgcggcggctgacccgggcgctgagcatcggcggcggtgacggcggctgggttcccgaggagatgctgcaactcgtgatggggttcgtcgaggacccgcgcgaccgggaggccgcgtcgctggtgtgtcaccggtggcaccgcgtcgacgcgctctcgcggaagcacgtgacggtgcccttctgctacgccgtttccccggcacgcctgctcgcgcggttcccgcggctcgagtcgctcgcggtgaaggggaagcccccgcgcggccatgtacgggctcatacccgacgactggggcgcctacgcccgcccgtggatcaccgagctcgccgcgccgctcgagtgcctcaaggcgctccacctccgacgcatggtcgtcacagacgacgacctcgccgagctcgtccgtgccagggggcacatgctgcaggagctgaagctcgataagtgcaccggcttctccactcatggactccgcctcgttgccccgctcctgcagatcactgaggactttatttttggaagaatgtcaaattgatgataagggcagtgaatggatccacgatctcgcagtctgctgtcctgttctgacaacattgaatttccacatgactgagcttgaagtgatgccagctgacctaaagcttcttgcaaagagctgcaagtcactgatttcattgaagattagtgactgcgatctttcagatttgatagagttcttccaatttgccacagcactggaagaatttgctggagggacattcaatgagcaaggggaactcagcaagtatgtgaatgttaaatttccatcaagactatgctccttgggacttacttacatgggaacaaatgaaatgcccattatgttccctttttctgcaatactaaagaagctggatttgcaatacactttcctcaccactgaggaccattgccagctcattgcaaaatgcccgaacttactagttctcgcggtgaggaatgtgattggagatagaggattaggagttgttgcggatacgtgcaagaagctccaaaggctcagaatagagcgaggagatgatgaaggaggtgtgcaagaagagcagggaggggtctctcaagtgggcttgacggctatagccgtaggttgccgtgagctggaatatatagctgcctatgtgtctgatataaccaatggggccttggaatctatcgggacattctgcaaaaaactatacgacttccggcttgttctacttgatagagaagagaggataacagacttgccactggacaatggtgtccgagctttgttgaggggctgcaccaagcttcggaggtttgctctgtacttgagaccaggagggctctcagatgcaggtctcggctacattggacagtgcagcggaaacatccagtacatgcttctcggtaatgttggggaaactgatgatggattgatcagcttcgcattgggttgcgtaaacctgcgaaagcttgaactcaggagttgctgcttcagcgagcgagcactggcccttgcaatactacatatgccttccctgaggtacgtatgggttcagggctacaaagcgtctcaaaccggccgagacctcatgctcatggcaaggcccttctggaacatagagtttacacctcccaatcctaagaacggaggttggctgatggaagatggggagccttgtgtagatagtcacgctcagatacttgcataccactccctcgccggtaagaggctggactgcccacaatccgtggttcctttgtatcctgcgtgagtgtaaatagactaagctggtgtctttccttagcctcctggtcaacaagaatggtgttgataactcgatatatgcggttattgtatggatctagatggctagctgctacgtactgtaataagctactagtagctgagagatgtcctggaataagcccttgctatttttgcct

SEQ ID NO: 22400 - protein, 437 aa, Zea mays subsp. mays
  misc_feature (1)..(437): Ceres Seq. ID no. 12408749
MDSASLPRSCRSLRTLFLEECQIDDKGSEWIHDLAVCCPVLTTLNFHMTELEVMPADLKLLAKSCKSLISLKISDCDLSDLIEFFQFATALEEFAGGTFNEQGELSKYVNVKFPSRLCSLGLTYMGTNEMPIMFPFSAILKKLDLQYTFLTTEDHCQLIAKCPNLLVLAVRNVIGDRGLGVVADTCKKLQRLRIERGDDEGGVQEEQGGVSQVGLTAIAVGCRELEYIAAYVSDITNGALESIGTFCKKLYDFRLVLLDREERITDLPLDNGVRALLRGCTKLRRFALYLRPGGLSDAGLGYIGQCSGNIQYMLLGNVGETDDGLISFALGCVNLRKLELRSCCFSERALALAILHMPSLRYVWVQGYKASQTGRDLMLMARPFWNIEFTPPNPKNGGWLMEDGEPCVDSHAQILAYHSLAGKRLDCPQSVVPLYPA

SEQ ID NO: 22401 - protein, 390 aa, Zea mays subsp. mays
  misc_feature (1)..(390): Ceres Seq. ID no. 12408750
MTELEVMPADLKLLAKSCKSLISLKISDCDLSDLIEFFQFATALEEFAGGTFNEQGELSKYVNVKFPSRLCSLGLTYMGTNEMPIMFPFSAILKKLDLQYTFLTTEDHCQLIAKCPNLLVLAVRNVIGDRGLGVVADTCKKLQRLRIERGDDEGGVQEEQGGVSQVGLTAIAVGCRELEYIAAYVSDITNGALESIGTFCKKLYDFRLVLLDREERITDLPLDNGVRALLRGCTKLRRFALYLRPGGLSDAGLGYIGQCSGNIQYMLLGNVGETDDGLISFALGCVNLRKLELRSCCFSERALALAILHMPSLRYVWVQGYKASQTGRDLMLMARPFWNIEFTPPNPKNGGWLMEDGEPCVDSHAQILAYHSLAGKRLDCPQSVVPLYPA

SEQ ID NO: 22402 - protein, 384 aa, Zea mays subsp. mays
  misc_feature (1)..(384): Ceres Seq. ID no. 12408751
MPADLKLLAKSCKSLISLKISDCDLSDLIEFFQFATALEEFAGGTFNEQGELSKYVNVKFPSRLCSLGLTYMGTNEMPIMFPFSAILKKLDLQYTFLTTEDHCQLIAKCPNLLVLAVRNVIGDRGLGVVADTCKKLQRLRIERGDDEGGVQEEQGGVSQVGLTAIAVGCRELEYIAAYVSDITNGALESIGTFCKKLYDFRLVLLDREERITDLPLDNGVRALLRGCTKLRRFALYLRPGGLSDAGLGYIGQCSGNIQYMLLGNVGETDDGLISFALGCVNLRKLELRSCCFSERALALAILHMPSLRYVWVQGYKASQTGRDLMLMARPFWNIEFTPPNPKNGGWLMEDGEPCVDSHAQILAYHSLAGKRLDCPQSVVPLYPA

SEQ ID NO: 22403 - DNA, 1334 bp, Zea mays subsp. mays
  misc_feature (1)..(1334): Ceres Seq. ID no. 12408768
gccgccatctctctctctctctctctctctctcttcatcgccgcagtgcgcgctcctacaacccatcgctcaccaccacctgctcctccagcggcggcgtccagggtgaacccgaatccccaacaccatggcggggggcaagatccagaagaagcgccacggcgcggcgggaggcgcccggctgcagggcggtatcccgttcgagaagtccaaggggcagcacatcctgcggaacccggcgctggtggactccatcgtcgccaaggccggtctcaagcccaccgacaccgtcctggagatcgggccgggcacaggaaacctcaccaagcgcctcctcgaggctggtgtcaaggccgtcgtcgccgtcgagctcgacccgcgcatggtgctcgagctcaaccggcggttccaggggcacccgctctcctcgcgcctcaaggttatccaaggagatgtcctcaaatgtgatctcccatactttgatatttgtgtggcaaacatcccgtaccagatctcatctccccttactttcaagcttctgtcacaccgtccaatctttaggtgtgctgtgattatgtttcaacgtgaatttgccatgagacttgtggcacaaccgggagatagcctctactgtcgtctctccgtgaatgtgcagctcctgtcacgagtgtcgcatctcctgaaggtggggaggaacaactttaggcctccacccaaagttgattcatcagttgtgcgaatagagcccaggaagcccctccctcctgtcagcttcaaggagtgggatgggcttgtgaggatttgtttcaaccggaagaacaagaccctgggctccctctttaaacagaaacgtgttctggaattgctagagaagaactacaagactatgcagtctctccaaactgtgcaagatgcagaaatgggtgaggagaagatgtccgcagacgatgtcgcgttgctggctaatatggttgaagatatgagcatggagactggctatgataaggaagatgatgaaatggaaatggatgatgcagacatggctggagatggtgctgcaagctttaaagaaaagattatgggtatattgcagcagggcgattttgcagaaaagagaggttccaagctgagccaagttgatttcttatacctgctgtccctcttcaacaaagctggtatacatttctcgtgattggtggtccagcttctcttcagtagtagtctgtttctttctgttttatttgtcgtgctgttaatgtacttattagttactgaaaaaacctctaagcttgtgctcgtagaaattttttacaggctccgtcctagtttgagct

SEQ ID NO: 22404 - protein, 354 aa, Zea mays subsp. mays
  misc_feature (1)..(354): Ceres Seq. ID no. 12408769
MAGGKIQKKRHGAAGGARLQGGIPFEKSKGQHILRNPALVDSIVAKAGLKPTDTVLEIGPGTGNLTKRLLEAGVKAVVAVELDPRMVLELNRRFQGHPLSSRLKVIQGDVLKCDLPYFDICVANIPYQISSPLTFKLLSHRPIFRCAVIMFQREFAMRLVAQPGDSLYCRLSVNVQLLSRVSHLLKVGRNNFRPPPKVDSSVVRIEPRKPLPPVSFKEWDGLVRICFNRKNKTLGSLFKQKRVLELLEKNYKTMQSLQTVQDAEMGEEKMSADDVALLANMVEDMSMETGYDKEDDEMEMDDADMAGDGAASFKEKIMGILQQGDFAEKRGSKLSQVDFLYLLSLFNKAGIHFS

SEQ ID NO: 22405 - protein, 269 aa, Zea mays subsp. mays
  misc_feature (1)..(269): Ceres Seq. ID no. 12408770
MVLELNRRFQGHPLSSRLKVIQGDVLKCDLPYFDICVANIPYQISSPLTFKLLSHRPIFRCAVIMFQREFAMRLVAQPGDSLYCRLSVNVQLLSRVSHLLKVGRNNFRPPPKVDSSVVRIEPRKPLPPVSFKEWDGLVRICFNRKNKTLGSLFKQKRVLELLEKNYKTMQSLQTVQDAEMGEEKMSADDVALLANMVEDMSMETGYDKEDDEMEMDDADMAGDGAASFKEKIMGILQQGDFAEKRGSKLSQVDFLYLLSLFNKAGIHFS

SEQ ID NO: 22406 - protein, 205 aa, Zea mays subsp. mays
  misc_feature (1)..(205): Ceres Seq. ID no. 12408771
MFQREFAMRLVAQPGDSLYCRLSVNVQLLSRVSHLLKVGRNNFRPPPKVDSSVVRIEPRKPLPPVSFKEWDGLVRICFNRKNKTLGSLFKQKRVLELLEKNYKTMQSLQTVQDAEMGEEKMSADDVALLANMVEDMSMETGYDKEDDEMEMDDADMAGDGAASFKEKIMGILQQGDFAEKRGSKLSQVDFLYLLSLFNKAGIHFS

SEQ ID NO: 22407 - DNA, 1844 bp, Zea mays subsp. mays
  misc_feature (1)..(1844): Ceres Seq. ID no. 12408772
aaaaaaagcatgcgaattattcgaggcggctttatggtcggacggatcacccccagcaaggagccgccacccgccactccgccagagcattgcagcgccagccacctcgccccctctcgctgtcccgcaccacccgctccgagggaaggagaggtaaccggtgggggggcgcggcggcgagcggagatcccgggaactccgatcgagcgcaagcggcgggacctgcgggagcagagagcgcgcagggaggacaagtgagtagcgtggttcgatggtaagggagacgggatactacgacgtgctggaagtgagcccgacggcctccgaggccgagatcaagaaggcatactacgtcaaggcgaggcaggtccatccggacaagaacccagatgatccgcttgcggcggcgaggttccaggaattgggggaggcataccaagtgctcagtaatcccaagcagcgtgaagactatgacttacatgggaaacctggtatttcaacggaagcgataattgatcctgcagcaatttttgcgatgctgttcggtagcgagctttttgaggactacattggtcagctggcgatggcatccatggcttcacttgatggttttactgaaaacgaacagatcgatccaagaaggttgcaagagcaaatgcgagttgtacaaaaagaaagagaggagaaacttgcagaggcactaaaagataggttgcatctttatgttcaaggaaacaaagaggaatttatccagtatgctgatgctgaggttactagactctctaatgccgcatacggtgttgatatgttgagtactattggttatgtgtattcgagacaagcttctaaggagcttggaaagcaagctaaatatcttggtgttccatttattgctgaatggttcagaaacaaagggcattctattaaatcccaaataactgctgcaacaggtgcattagctcttatgcagctgcaggaagactggagaaagcatctcagtgatgagtgccactacaatgaagaggaactggaggcttacatgctgacacataagagtgttatggtggactcgttatggaagcttaatgttgctgatatagaggaaaccctgtcacatgtgtgtcaaatggtgcttcatgacagcagtgccaggaaagaggaactgcgagttcgagctaaaggattgaaaactttaggcaaaatattccatcaagccaagcttagcactgctgagggagatccagcagcaatgaataatacaataaataacttggatgagaatgatgatagttcaccggagtcatctccaagatctcccagggaccaaatgttcgatacaaacccaccttattcccagagtccatacgtggaggcccctgagttgggcgggtatttttccttcgacttcccaatgcctatcgctccgcctggcgcgcagagggaccctattccgtgaccgccgtgagtgcggcggctctgttttgtgtggatcgtcattttgtacaatattgcctgtgtaaatcatttttatttgtaacattagtagcagtagtgtgagacagcagcttggcacccattgcatcgtttcttttctttttcttcgtgtaatcaatcaatcaagcatgcgacgacggcagccttgtcttgttcgtagggcttggtctgcttctggccacgggtcagccattggtgtacatgaactaccacctctttgtttcttgtgtttatcagtttatgggtgcataattgtttagcctatgggcccatctgggcaaacaacacttgcttgtgctaagctttgctcgaacttcgtctcgtgaaatttgatcatctcctcttcctgc

SEQ ID NO: 22408 - protein, 394 aa, Zea mays subsp. mays
  misc_feature (1)..(394): Ceres Seq. ID no. 12408773
MVRETGYYDVLEVSPTASEAEIKKAYYVKARQVHPDKNPDDPLAAARFQELGEAYQVLSNPKQREDYDLHGKPGISTEAIIDPAAIFAMLFGSELFEDYIGQLAMASMASLDGFTENEQIDPRRLQEQMRVVQKEREEKLAEALKDRLHLYVQGNKEEFIQYADAEVTRLSNAAYGVDMLSTIGYVYSRQASKELGKQAKYLGVPFIAEWFRNKGHSIKSQITAATGALALMQLQEDWRKHLSDECHYNEEELEAYMLTHKSVMVDSLWKLNVADIEETLSHVCQMVLHDSSARKEELRVRAKGLKTLGKIFHQAKLSTAEGDPAAMNNTINNLDENDDSSPESSPRSPRDQMFDTNPPYSQSPYVEAPELGGYFSFDFPMPIAPPGAQRDPIP

SEQ ID NO: 22409 - protein, 306 aa, Zea mays subsp. mays
  misc_feature (1)..(306): Ceres Seq. ID no. 12408774
MLFGSELFEDYIGQLAMASMASLDGFTENEQIDPRRLQEQMRVVQKEREEKLAEALKDRLHLYVQGNKEEFIQYADAEVTRLSNAAYGVDMLSTIGYVYSRQASKELGKQAKYLGVPFIAEWFRNKGHSIKSQITAATGALALMQLQEDWRKHLSDECHYNEEELEAYMLTHKSVMVDSLWKLNVADIEETLSHVCQMVLHDSSARKEELRVRAKGLKTLGKIFHQAKLSTAEGDPAAMNNTINNLDENDDSSPESSPRSPRDQMFDTNPPYSQSPYVEAPELGGYFSFDFPMPIAPPGAQRDPIP

SEQ ID NO: 22410 - protein, 290 aa, Zea mays subsp. mays
  misc_feature (1)..(290): Ceres Seq. ID no. 12408775
MASMASLDGFTENEQIDPRRLQEQMRVVQKEREEKLAEALKDRLHLYVQGNKEEFIQYADAEVTRLSNAAYGVDMLSTIGYVYSRQASKELGKQAKYLGVPFIAEWFRNKGHSIKSQITAATGALALMQLQEDWRKHLSDECHYNEEELEAYMLTHKSVMVDSLWKLNVADIEETLSHVCQMVLHDSSARKEELRVRAKGLKTLGKIFHQAKLSTAEGDPAAMNNTINNLDENDDSSPESSPRSPRDQMFDTNPPYSQSPYVEAPELGGYFSFDFPMPIAPPGAQRDPIP

SEQ ID NO: 22411 - DNA, 1185 bp, Zea mays subsp. mays
  misc_feature (1)..(1185): Ceres Seq. ID no. 12408784
aaaccagtcaccgcctaccaccgttttataatccacccctcccactccccctgttttttcttcttccgctgttctactccggcgtgttggtcgacggcggcgcagatgacgaccctcgatctgatgggagggtacgggcgggtggacgagcaggtggccatccaggaggccgccacggcgggggctgcgcgggatggagcgtctcatcttgcagctctcccaggctggcaccggggagcggtcgtcgtccccaccggcggtacaggcgcagcgccagcagcagaagcagctggagcagatccagcagcaggttgactgccgggagctcacggacatgacggtgtccaagttcaagaaggtgatctccatcctgaaccgcacggggcacgcgcggttccggcgtggccccgtggcggcgcggtcgcagtcgcagtcgcagggacctgcctcccccgagcccgcgcaatcggcgccggctcccgccgcgaggcccctgacgctggacttcaccaagtcggtgtccggttacagcagggactccgggttcagcgtgtccggcgcgagctcgtcgttcctgtcgtcggtgacgaccggggacgggagcgtgtcgaacgggcgcgcgggaggctcgtcgttcctcatgctcccaccggcgcccggcgcggccagctgcgcgaagccgccgcccgccggtgcggcgcagaagcgcaagtgccacgaccacgcgcactcggagaacgtcgccggcggcaagtacggtgctaacggcgggcgctgccactgctcgaagcgcaggaagcaccgtgtgaagcgcacgatccgcgtgccggcgatcagccccaaagtggcggacatccccgccgacgagtactcgtggcgcaagtacggccagaaacccatcaaggggtcgccctacccacgcggctactacaagtgcagcacggtgcgcggctgccccgcccggaagcatgtggagcgcgaccccgccgacccgtcgatgctgatcgtcacctacgagggcgagcaccgccacagccccgcctccggccaggacccgccgccgccgtcgctcgcgccgctgccggagctgcccagccattgatttggcttcctgcctgctctgtcctgtcaattactagtagctgttgtcataagttataaaatcaaaatcgccagttcagtttt

SEQ ID NO: 22412 - protein, 302 aa, Zea mays subsp. mays
  misc_feature (1)..(302): Ceres Seq. ID no. 12408785
MERLILQLSQAGTGERSSSPPAVQAQRQQQKQLEQIQQQVDCRELTDMTVSKFKKVISILNRTGHARFRRGPVAARSQSQSQGPASPEPAQSAPAPAARPLTLDFTKSVSGYSRDSGFSVSGASSSFLSSVTTGDGSVSNGRAGGSSFLMLPPAPGAASCAKPPPAGAAQKRKCHDHAHSENVAGGKYGANGGRCHCSKRRKHRVKRTIRVPAISPKVADIPADEYSWRKYGQKPIKGSPYPRGYYKCSTVRGCPARKHVERDPADPSMLIVTYEGEHRHSPASGQDPPPPSLAPLPELPSH

SEQ ID NO: 22413 - protein, 255 aa, Zea mays subsp. mays
  misc_feature (1)..(255): Ceres Seq. ID no. 12408786
MTVSKFKKVISILNRTGHARFRRGPVAARSQSQSQGPASPEPAQSAPAPAARPLTLDFTKSVSGYSRDSGFSVSGASSSFLSSVTTGDGSVSNGRAGGSSFLMLPPAPGAASCAKPPPAGAAQKRKCHDHAHSENVAGGKYGANGGRCHCSKRRKHRVKRTIRVPAISPKVADIPADEYSWRKYGQKPIKGSPYPRGYYKCSTVRGCPARKHVERDPADPSMLIVTYEGEHRHSPASGQDPPPPSLAPLPELPSH

SEQ ID NO: 22414 - protein, 153 aa, Zea mays subsp. mays
  misc_feature (1)..(153): Ceres Seq. ID no. 12408787
MLPPAPGAASCAKPPPAGAAQKRKCHDHAHSENVAGGKYGANGGRCHCSKRRKHRVKRTIRVPAISPKVADIPADEYSWRKYGQKPIKGSPYPRGYYKCSTVRGCPARKHVERDPADPSMLIVTYEGEHRHSPASGQDPPPPSLAPLPELPSH

SEQ ID NO: 22415 - DNA, 1201 bp, Zea mays subsp. mays
  misc_feature (1)..(1201): Ceres Seq. ID no. 12408788
aaaaacaaactaaaatcgagaaacgcgatcgtaagtagcggcggcggcggcgtggcgacagcaggagtaggattggcccagttcaatcgcacggccaatctggtaggcggtcatcgtcagaatccagactccacataccggcccatttacagcaaggaaccgcgaacgccaagctcgtcttctttcttggaagaggggccgctccactcgactgaaagcgcaatcaactctagtctctagccacaactcgaagtacgagtacctccggagtccggatggctgcagcgatggacgtcgacgaagccggcggcgaggagaggcgaccgtcggagaaggagctcttccgcgccgccgagtccggcgacgccgccgcgttcgcctccctcgcccccgccgacctctccctgcgcaacgaggacggccgctccctcctccacgtcgccgccgctgccggccatccccaggtggtgctcgcgcttgcccagtgcggtggtgacgccgcggctagcgtgctgaatgcgcaggacgaggaggggtgggcgccgatccactccgccgcgagctccggcaactctcaaatcgtcgacatcctgcttgagcgaggtgctgatgctaacctggttactgatggtggccgaactgctcttcattatgctgcgagtaaagggaggcttaacatagctgaaaaactaatagcccatggtgctaatgtcaacaagaaagacaagtttggctgcacacctttgcatagagctgcaagcactggaaacgcggagctgtgtgaattcctcattgaggaaggtgctgaagttgatgctgttgacaagacaggacaaacacctcttacgcatgctgttatatgtgagaacaaaggggctgctcttctgctaattagacatggtgctgatgttgatgtcgaggacaaggaaggctacactgcccttggccgagcatcgaacagcttcagacctgcactcatcgatgcagccaaggcaatgctcgaaggatgatctggtgctctgctcaaagacgatggaaagtgtgatacgagaaactgtgctgagtcgaggtgttaaagcttgttctggtgtgtaaacaaaggggctctacagaatcagatttgaccctgctagaattttgcccttgttgggtttatttaaccattgtgactaacatctcataagctaagctttggttctcc

SEQ ID NO: 22416 - protein, 244 aa, Zea mays subsp. mays
  misc_feature (1)..(244): Ceres Seq. ID no. 12408789
MAAAMDVDEAGGEERRPSEKELFRAAESGDAAAFASLAPADLSLRNEDGRSLLHVAAAAGHPQVVLALAQCGGDAAASVLNAQDEEGWAPIHSAASSGNSQIVDILLERGADANLVTDGGRTALHYAASKGRLNIAEKLIAHGANVNKKDKFGCTPLHRAASTGNAELCEFLIEEGAEVDAVDKTGQTPLTHAVICENKGAALLLIRHGADVDVEDKEGYTALGRASNSFRPALIDAAKAMLEG

SEQ ID NO: 22417 - protein, 240 aa, Zea mays subsp. mays
  misc_feature (1)..(240): Ceres Seq. ID no. 12408790
MDVDEAGGEERRPSEKELFRAAESGDAAAFASLAPADLSLRNEDGRSLLHVAAAAGHPQVVLALAQCGGDAAASVLNAQDEEGWAPIHSAASSGNSQIVDILLERGADANLVTDGGRTALHYAASKGRLNIAEKLIAHGANVNKKDKFGCTPLHRAASTGNAELCEFLIEEGAEVDAVDKTGQTPLTHAVICENKGAALLLIRHGADVDVEDKEGYTALGRASNSFRPALIDAAKAMLEG

SEQ ID NO: 22418 - DNA, 1287 bp, Zea mays subsp. mays
  misc_feature (1)..(1287): Ceres Seq. ID no. 12408795
gcgttgccgcctccttccttccttctcacgaaaaggcaggcaagggaaaggcaaaggccaacccatcccctgcctcctccgttgctctgctgctccccctccttatctaatcctctggttcctggaccccggcctgcaagctcaagcagcagcagcggcgccggcgacgagaagggagtaggaggaggattgctaccatcctatatcatatcatacatatacagagacagcaaggaggaggagaaggtgtgtagcgaggttgagatccggaggatgccttccagtgccatgagttccgggctgttcgtggagtccgcctccggcagcggcgccgagccggtgctctgcgcgcctcggccgcgcagggtccagcaggtgcacccctgcagcgccgacctcatccttggcgcaccgcccttcccgcgcaacgccaacagcaagggcagcagcagcagggaaggaggcaggacgacgaccaggccggcggcggaggacgaggacgaggactgccgctgggcggcgttcggcgggtcgccgccggcgcgcgcggacaacccgctggtgcacgacccccggttcctgcggaaccagcgccacccggcgccgctggagctcgggtcgccgaaccaccggcggccgacctacagcagcggtggcgacggcagcgggtttgcctcgtcgtcgttcgcgccggccgtgaggatccagggcttcgacgtcgccgcgtgccgcgcgtgagagcgagctccggccgggcggggctttggcttttcgatctattaaattaaattaacagcaggtgaggtcaggtcagatcagatcatagtagggaggaaggcgaggagggcgggagggatgggatgagatctcctcttcctcctcctcgcgagggaggcgatccagtcgtatgagtgaagtaaagaagagtactccagtcgtactataggttgatgttcgccgataccacaccacacagcagccggtcaaagggagtgaaaactgattttttgtttacggggttttgtcagcaaggttattaggttttgtgtttgtgctgtagcctgtaagatgtaagctactactagcacgggtctcttgttcgttgatgctgctctgctctggcctctgggtgcccctgtattgtagatataaatcagcacccagttcgggcggtcggccagcgttcgtttttcttctagttgacgaggaggaagaagatgtccgctcctcgccatgtaatgtaaccatggctgtactcctacatacatgcaatcatgtataaagatg

SEQ ID NO: 22419 - protein, 245 aa, Zea mays subsp. mays
  misc_feature (1)..(245): Ceres Seq. ID no. 12408796
ALPPPSFLLTKRQARERQRPTHPLPPPLLCCSPSLSNPLVPGPRPASSSSSSGAGDEKGVGGGLLPSYIISYIYRDSKEEEKVCSEVEIRRMPSSAMSSGLFVESASGSGAEPVLCAPRPRRVQQVHPCSADLILGAPPFPRNANSKGSSSREGGRTTTRPAAEDEDEDCRWAAFGGSPPARADNPLVHDPRFLRNQRHPAPLELGSPNHRRPTYSSGGDGSGFASSSFAPAVRIQGFDVAACRA

SEQ ID NO: 22420 - protein, 154 aa, Zea mays subsp. mays
  misc_feature (1)..(154): Ceres Seq. ID no. 12408797
MPSSAMSSGLFVESASGSGAEPVLCAPRPRRVQQVHPCSADLILGAPPFPRNANSKGSSSREGGRTTTRPAAEDEDEDCRWAAFGGSPPARADNPLVHDPRFLRNQRHPAPLELGSPNHRRPTYSSGGDGSGFASSSFAPAVRIQGFDVAACRA

SEQ ID NO: 22421 - protein, 149 aa, Zea mays subsp. mays
  misc_feature (1)..(149): Ceres Seq. ID no. 12408798
MSSGLFVESASGSGAEPVLCAPRPRRVQQVHPCSADLILGAPPFPRNANSKGSSSREGGRTTTRPAAEDEDEDCRWAAFGGSPPARADNPLVHDPRFLRNQRHPAPLELGSPNHRRPTYSSGGDGSGFASSSFAPAVRIQGFDVAACRA

SEQ ID NO: 22422 - DNA, 1442 bp, Zea mays subsp. mays
  misc_feature (1)..(1442): Ceres Seq. ID no. 12408799
gatccctagctctgcccctctcctccagcgccgctcgccagctctctgcccccgccgcgcccagagatgcagatcccccaccgccgttaccgctgggtgaaggagtgggtctcgcaagaactggtcgtcgccggaggcccctgcgtgctgtacaagtgggtgcgagaggacagactagcagctttgaaggctaaggacaagaagcatggggcagaatctgcaactcctgaacccaactctgaggttctcttcctgtgcagctacgaaggatgtgggaagacattttttgatgcaggggctcttaggaagcatgctcacgtccatggggagaggcaatatatctgtcactatgagaactgtggcaagaaattcttagatagttctaagttgaagagacattttcttattcatacaggagaaaagaattttgtgtgcccacatgaaggttgtgggaaggctttttcgttggattttaatttaaaggcacacatgaaaacacattctgcagataactatcatgtgtgccagtacccagaatgtggccgaagatttacacaagaatcaaaactaagagctcatatcagggcacaacatgagaaagctgtttgcctgcagaatccaggtgcttcggctatgaaccatagtgcaattggagaacagcatcagccccctaagccagcaaaggtctcagcaacgcctccagctccctcagctgagcgcccttacgtctgcccctacgatggttgcgacaaggcatacatccacgagtacaagctgaacctccatttgaaaaaggagcatcccaaccactaccaggatggtggtccacaaggcgctgccccttcaaagcgcagcatctcgaagagttcccataggagcagaccggacatcactgctagaatgccaccagccaaggtctccaagcgcaaaggagggtacgcagcgccatcgccagctgtgaacctccctgaggagcaccttcccgaggagcagcagtggccaaggaaagtgatgtacgaggatgacagcgaggagaccgaggaagaagaggggggcaacaatgtcgaggatagatggaactacaacagagctgctagtagcgatgatgaggaaaccgaagacgaacaatgagcttctagcaggcgtccatctgttctgtagttgtgcatataccataaattttaaactttgagggttatagtttttgcatacatgtaaaattttaaaataaggcggacttgttgtagacagcataggttgtaggtggtctgccccttctcaatcagacatgccatgagttcagaaaggataatggatcattgttctcgtttcgcttgtttttgtgtttgtgtttgtgccttttggttcgttatcacagatgagttattactgtaaccctgatttcagtgtttggcaatcaatctcgtcagccttacatttgt

SEQ ID NO: 22423 - protein, 354 aa, Zea mays subsp. mays
  misc_feature (1)..(354): Ceres Seq. ID no. 12408800
MQIPHRRYRWVKEWVSQELVVAGGPCVLYKWVREDRLAALKAKDKKHGAESATPEPNSEVLFLCSYEGCGKTFFDAGALRKHAHVHGERQYICHYENCGKKFLDSSKLKRHFLIHTGEKNFVCPHEGCGKAFSLDFNLKAHMKTHSADNYHVCQYPECGRRFTQESKLRAHIRAQHEKAVCLQNPGASAMNHSAIGEQHQPPKPAKVSATPPAPSAERPYVCPYDGCDKAYIHEYKLNLHLKKEHPNHYQDGGPQGAAPSKRSISKSSHRSRPDITARMPPAKVSKRKGGYAAPSPAVNLPEEHLPEEQQWPRKVMYEDDSEETEEEEGGNNVEDRWNYNRAASSDDEETEDEQ

SEQ ID NO: 22424 - protein, 213 aa, Zea mays subsp. mays
  misc_feature (1)..(213): Ceres Seq. ID no. 12408801
MKTHSADNYHVCQYPECGRRFTQESKLRAHIRAQHEKAVCLQNPGASAMNHSAIGEQHQPPKPAKVSATPPAPSAERPYVCPYDGCDKAYIHEYKLNLHLKKEHPNHYQDGGPQGAAPSKRSISKSSHRSRPDITARMPPAKVSKRKGGYAAPSPAVNLPEEHLPEEQQWPRKVMYEDDSEETEEEEGGNNVEDRWNYNRAASSDDEETEDEQ

SEQ ID NO: 22425 - DNA, 1197 bp, Zea mays subsp. mays
  misc_feature (1)..(1197): Ceres Seq. ID no. 12408810
tagaacatcctaatcgaaaaaggcgggcccaaggtcgtgactaggcacagtcgcacagaccactagaccagcacacggccacagtaccacacagaacagtagcaccgggctccgggcaccagggcaggcgaattcctaggttcgctggagcctggagcgagggatggccgccgcctcgctcgcgttggcgagtcctttccggcttctcctccgcgcccctcacccgcgcggagccatccccgtcccgtgctactttatctcgcgaggacggtatagcaccgccattgccgtcgcagcagcgagggattcggcggtgaaaggaagcgtggacaggaattcagcggaggaagtcaggaacattctgaatatggcagaaagggcttcccaacgaagagatgtttttcacaccaattttcttactccacctatagtgaaagagactatgctggcacttgaaaagtttgcagataccaaagcagtagctcagggtggctaccctcaggctgagaggtgccgaatatctgttgggcacccggacgtcatgacaagtaacccagatgtggttgctgctttgagcatctcagggaatttccggttggaatcttgttctcatggtgactttcttggtgctattcttgggacaggaataacaagggagaaagttggagatattcttttgcagggggaacgaggtgcccaggtccttgttgacccagaacttgttgactatctgatttctacccttgaaaaggtggggaaagttggtgtttcatgcactcagattcctttgcttgctctagaatatgaaccgccaaggaccaattcatttaaaactgtagaatcatcgctcagggttgatgcccttgccagtgcaggatttaaaatctcacgcacgaagcttgctagcttgataagttctggtgatgttcgtgtgaattggacaccaacaacaaaaaatggagttaccctcaaatctagagatgttgtttctgttagtgggatgggaaggttaaagattggggaaattgtgactacgaggaaaggaaaatatgcggtttgagttgattcgctatttgtaatcatgggactggtctactttcatgtctgaaactctgaatttaacggtacacattttctcctatatgtgatgagaatcatgtattaagtattacttctcagtgaagttgaaagtgatgc

SEQ ID NO: 22426 - protein, 298 aa, Zea mays subsp. mays
  misc_feature (1)..(298): Ceres Seq. ID no. 12408811
MAAASLALASPFRLLLRAPHPRGAIPVPCYFISRGRYSTAIAVAAARDSAVKGSVDRNSAEEVRNILNMAERASQRRDVFHTNFLTPPIVKETMLALEKFADTKAVAQGGYPQAERCRISVGHPDVMTSNPDVVAALSISGNFRLESCSHGDFLGAILGTGITREKVGDILLQGERGAQVLVDPELVDYLISTLEKVGKVGVSCTQIPLLALEYEPPRTNSFKTVESSLRVDALASAGFKISRTKLASLISSGDVRVNWTPTTKNGVTLKSRDVVSVSGMGRLKIGEIVTTRKGKYAV

SEQ ID NO: 22427 - protein, 230 aa, Zea mays subsp. mays
  misc_feature (1)..(230): Ceres Seq. ID no. 12408812
MAERASQRRDVFHTNFLTPPIVKETMLALEKFADTKAVAQGGYPQAERCRISVGHPDVMTSNPDVVAALSISGNFRLESCSHGDFLGAILGTGITREKVGDILLQGERGAQVLVDPELVDYLISTLEKVGKVGVSCTQIPLLALEYEPPRTNSFKTVESSLRVDALASAGFKISRTKLASLISSGDVRVNWTPTTKNGVTLKSRDVVSVSGMGRLKIGEIVTTRKGKYAV

SEQ ID NO: 22428 - protein, 205 aa, Zea mays subsp. mays
  misc_feature (1)..(205): Ceres Seq. ID no. 12408813
MLALEKFADTKAVAQGGYPQAERCRISVGHPDVMTSNPDVVAALSISGNFRLESCSHGDFLGAILGTGITREKVGDILLQGERGAQVLVDPELVDYLISTLEKVGKVGVSCTQIPLLALEYEPPRTNSFKTVESSLRVDALASAGFKISRTKLASLISSGDVRVNWTPTTKNGVTLKSRDVVSVSGMGRLKIGEIVTTRKGKYAV

SEQ ID NO: 22429 - DNA, 1643 bp, Zea mays subsp. mays
  misc_feature (1)..(1643): Ceres Seq. ID no. 12408814
gcacgagaccattacctagaacatcctaatcgaaagtctgccaacgccgctactcggcgcaccttggcttgctatttcgccaacaacctcctccctctttaccgcggcgtgccgcgtgcggcgggcgcggatggcaacggccgcctccgcctccccctcccccggcgcgttcggcgccaaaacccctgccccagcccgtgggctgagcacgcacccggtcctgaccccgagccccgcattcgcgaggtcttcgccgcgcacccccgcctgcggcaggtcccgcgccagcctccacatcggcggcctggggctcgaccagcagcagcagctgccgccgccgccggcaacggaaccgggctccacgtgccccccacggtcgcgccgctcgccgtgcctaagatggccggctccatgaagacccataagaacgtcctgctcttctactgcgaggagatgcgggacctcgcgcagcaggtggtcgcccggaacgatgacatcgaactgcgatccatctcatggaggacatttccggacggatacccgaatctgttcatctcgaatgcccataacattcgtgggcagcatgttgcctttttggcttcgtttagctcgcccagcgtcatatttgagcaactatctgtcatatataatctgccaaagttgtttatttcttcgtttactcttatactcccgtttttcccaaccgggacttctgagcgcatggaagatgagggagatgttgcaaccgcctttacacttgccagatttttgtcaaatataccaatatcacgaggcgggccatcgagtttagtaattttcgatatccatgctttgcaggagagattctactttggagactcagtcttaccatgttttgagagtggcatccccttgctgaaaagtaagcttcaggagctacctgattcccataatataactatagcatttccagatgacggtgcatggaaacgcttctataagcagcttcaacattttcctatggttatatgtaacaaagttagagaaggggagcagagaattgtacggataaaggagggagatcctagaggccgtcatgttgttatagtggatgacttggtccagtctggcagtactttgattgagtgccagaaagtactggctgctcatggagctgcaaaggtcagtgcatatgtgacacatggcattttccccaatagctcatgggagaaatttcagcatgacaatggagagggtccggagcatggcctgagccacttttggcttactgattcatgcccccttactgtcaaggcggtgaagggcagacggccatttgaaattctaagtctggccggacctattgcttctgctctccagatttaggcaaatctggtctgctcgatccttcgggatattgtgactattcagttagttcttctttcctttgttgctgttgaggaatttggtgttttcctttgtacagctattgagtgtctcgcaatgtatttactagaaaaccataaaatggcagatcttcactgcagggtctgcttggcagaaagcattcgtagtcgtagtattagctgttaataatttgactgagcaagtcaagcgttgatctgtgttctagtataaataaaactctcgaataagtttcagtg

SEQ ID NO: 22430 - protein, 454 aa, Zea mays subsp. mays
  misc_feature (1)..(454): Ceres Seq. ID no. 12408815
ARDHYLEHPNRKSANAATRRTLACYFANNLLPLYRGVPRAAGADGNGRLRLPLPRRVRRQNPCPSPWAEHAPGPDPEPRIREVFAAHPRLRQVPRQPPHRRPGARPAAAAAAAAGNGTGLHVPPTVAPLAVPKMAGSMKTHKNVLLFYCEEMRDLAQQVVARNDDIELRSISWRTFPDGYPNLFISNAHNIRGQHVAFLASFSSPSVIFEQLSVIYNLPKLFISSFTLILPFFPTGTSERMEDEGDVATAFTLARFLSNIPISRGGPSSLVIFDIHALQERFYFGDSVLPCFESGIPLLKSKLQELPDSHNITIAFPDDGAWKRFYKQLQHFPMVICNKVREGEQRIVRIKEGDPRGRHVVIVDDLVQSGSTLIECQKVLAAHGAAKVSAYVTHGIFPNSSWEKFQHDNGEGPEHGLSHFWLTDSCPLTVKAVKGRRPFEILSLAGPIASALQI

SEQ ID NO: 22431 - protein, 321 aa, Zea mays subsp. mays
  misc_feature (1)..(321): Ceres Seq. ID no. 12408816
MAGSMKTHKNVLLFYCEEMRDLAQQVVARNDDIELRSISWRTFPDGYPNLFISNAHNIRGQHVAFLASFSSPSVIFEQLSVIYNLPKLFISSFTLILPFFPTGTSERMEDEGDVATAFTLARFLSNIPISRGGPSSLVIFDIHALQERFYFGDSVLPCFESGIPLLKSKLQELPDSHNITIAFPDDGAWKRFYKQLQHFPMVICNKVREGEQRIVRIKEGDPRGRHVVIVDDLVQSGSTLIECQKVLAAHGAAKVSAYVTHGIFPNSSWEKFQHDNGEGPEHGLSHFWLTDSCPLTVKAVKGRRPFEILSLAGPIASALQI

SEQ ID NO: 22432 - protein, 317 aa, Zea mays subsp. mays
  misc_feature (1)..(317): Ceres Seq. ID no. 12408817
MKTHKNVLLFYCEEMRDLAQQVVARNDDIELRSISWRTFPDGYPNLFISNAHNIRGQHVAFLASFSSPSVIFEQLSVIYNLPKLFISSFTLILPFFPTGTSERMEDEGDVATAFTLARFLSNIPISRGGPSSLVIFDIHALQERFYFGDSVLPCFESGIPLLKSKLQELPDSHNITIAFPDDGAWKRFYKQLQHFPMVICNKVREGEQRIVRIKEGDPRGRHVVIVDDLVQSGSTLIECQKVLAAHGAAKVSAYVTHGIFPNSSWEKFQHDNGEGPEHGLSHFWLTDSCPLTVKAVKGRRPFEILSLAGPIASALQI

SEQ ID NO: 22433 - DNA, 1751 bp, Zea mays subsp. mays
  misc_feature (1)..(1751): Ceres Seq. ID no. 12408818
ataagagtaggtgcagtatatcagtaaccagtaaatacttggacccagcagtaaccaggaccaggagagatcatcaaagtaaccttgctgccttttgagaacagaagcgtcagcagcaccagcaagaagcatcttctctctggagcggcgcctccgagaagaggacgacggatcgggaccaggaggcatggatctatctggcacgcagggcgagctcgcgatcccaatgcacgccaacgtcgcgtcgccctacggaggcggcgtcggcggccatgtcctgcagctgcaccgtgacgaccacggcagcaacaacggccagtctccggcgccgctgctgccaccgccgcctgccgcggcggaggagacggagagctcggcgaagaagcgcggtccggcagccggggccggcggcggcggaggcagctccgcggtgaagtaccgggagtgcctcaagaatcacgcggcggccatcggcgggaacgccaccgacgggtgtggcgagttcatgccaagcggcgaggagggctcgttggaggcgctcaagtgctccgcctgcggctgccaccgcaatttccaccgcaaggaggtggacgacgaggacgacgacatgtacggcgccgccgaaggcttcagcggcctcggtctcggcctcggcctcgggcacggccaccgcgccgcccgccgcctcctggcccccgccatggcgcacccgcaccacaagagcggcggcggggggctcctgatctccggggccgacccctacgccgcgtacgcgtcggcgcgcgcgctccctccggcgctgccgccgccgccagggcacgcccaccaccaccaccagtacgtgatgccgctgaacatgatgcacacctcggagtccgacgacatggagggcggccgcggcggctgcggggacgcggcgcgcggcagcggcgggtcgtcgtcgtccaggaagcggttccgcaccaagttcaccccggagcagaaggcgcgcatgctggagttcgcggagcgcgtggggtggcgcctccagaagctggacgacggcatggtgcaggccttctgccaggagatcggcgtgaagcggcgcgtgctcaaggtgtggatgcacaacaacaagcacaacctcgccaccaagcgcctcgaggcctcgccggcgcaggagcaggcgatggcgggcatggcgtcgccgccgccgccgccgccacccccacagctgcacttgcctctgcagatgcccgctggagtcatgccgccgccgccgccgccgccgcaggccgggtcgtcctgtcaccgcggcggtcccggctccccgctgccgctcaagctcgagtgaccaccgacaacctgacaaaaaacaagaagagggtgaccaccattggtggccgttgatccgtcctggtggtaagtggtaaactagctagctagcagaccgacggaccgcatcgatggctatttcactgttccattagtccattccttcccaagtgatctatctaccgtcgtcgtccaagcagggagagaagtgggcgatgaacttttcttgaaacaacaaaacgaacaaagtccaggttattatcgtctcttttttttccttcccttttccggtgctcgttgctttgtcacaaggtaggggagcaagcaaccaagcatgcatgatagtagtagctgatttcgactggactggactgatttccttccaaaaatttttttcctgatggtgaagaaaactaaatatcctactagtttcctcc

SEQ ID NO: 22434 - protein, 381 aa, Zea mays subsp. mays
  misc_feature (1)..(381): Ceres Seq. ID no. 12408819
MDLSGTQGELAIPMHANVASPYGGGVGGHVLQLHRDDHGSNNGQSPAPLLPPPPAAAEETESSAKKRGPAAGAGGGGGSSAVKYRECLKNHAAAIGGNATDGCGEFMPSGEEGSLEALKCSACGCHRNFHRKEVDDEDDDMYGAAEGFSGLGLGLGLGHGHRAARRLLAPAMAHPHHKSGGGGLLISGADPYAAYASARALPPALPPPPGHAHHHHQYVMPLNMMHTSESDDMEGGRGGCGDAARGSGGSSSSRKRFRTKFTPEQKARMLEFAERVGWRLQKLDDGMVQAFCQEIGVKRRVLKVWMHNNKHNLATKRLEASPAQEQAMAGMASPPPPPPPPQLHLPLQMPAGVMPPPPPPPQAGSSCHRGGPGSPLPLKLE

SEQ ID NO: 22435 - protein, 368 aa, Zea mays subsp. mays
  misc_feature (1)..(368): Ceres Seq. ID no. 12408820
MHANVASPYGGGVGGHVLQLHRDDHGSNNGQSPAPLLPPPPAAAEETESSAKKRGPAAGAGGGGGSSAVKYRECLKNHAAAIGGNATDGCGEFMPSGEEGSLEALKCSACGCHRNFHRKEVDDEDDDMYGAAEGFSGLGLGLGLGHGHRAARRLLAPAMAHPHHKSGGGGLLISGADPYAAYASARALPPALPPPPGHAHHHHQYVMPLNMMHTSESDDMEGGRGGCGDAARGSGGSSSSRKRFRTKFTPEQKARMLEFAERVGWRLQKLDDGMVQAFCQEIGVKRRVLKVWMHNNKHNLATKRLEASPAQEQAMAGMASPPPPPPPPQLHLPLQMPAGVMPPPPPPPQAGSSCHRGGPGSPLPLKLE

SEQ ID NO: 22436 - protein, 275 aa, Zea mays subsp. mays
  misc_feature (1)..(275): Ceres Seq. ID no. 12408821
MPSGEEGSLEALKCSACGCHRNFHRKEVDDEDDDMYGAAEGFSGLGLGLGLGHGHRAARRLLAPAMAHPHHKSGGGGLLISGADPYAAYASARALPPALPPPPGHAHHHHQYVMPLNMMHTSESDDMEGGRGGCGDAARGSGGSSSSRKRFRTKFTPEQKARMLEFAERVGWRLQKLDDGMVQAFCQEIGVKRRVLKVWMHNNKHNLATKRLEASPAQEQAMAGMASPPPPPPPPQLHLPLQMPAGVMPPPPPPPQAGSSCHRGGPGSPLPLKLE

SEQ ID NO: 22437 - DNA, 1492 bp, Zea mays subsp. mays
  misc_feature (1)..(1492): Ceres Seq. ID no. 12408826
cccggacctctctctctctctctctcctcccttccatccaggctgccaagccgcctccggctccaccttaccggccggagataagaagaccctgatgcggctgcggccgcggcggccggaggcctgaggttggttggatatgggtggagtgacttcgtccgtggcctctaagatggccttcttccctcccgacccgccgtcttacggcgtggtggacgaggaggacgaggacgcggcgtgcaacaaggtggcaacaacgaggagggtggcgatgacgggcgtgcggtggagcgtgggcgtggaggcgaggcgggtgcgcacgcggcgaggctccgacatcatcgccgtctacgtgcggcaccccggggctagcctcaccctcctcttctcccacggcaacgccgccgacctcggcaagatgtacggcatcttcgtcgagctcagcgaacgactccacgtcaacctcatggggtatgattactctggttatgggcagtcatcaggcaagccaagtgaagctaatacctttgctgacatagaggctgcatacaagtgcctcgtggacgtctatggaactagggaagaagacattgttctgtatggccagtctgttggcagcggaccaacccttgatctagctgttcgtttcgatcgcgtaagagctgtggttctgcacagtccaatactgtctggattgcgtgtcatgtattctgtgaagaaaacgtactggtttgacatatacaagaacatcgacaaaatcccgcatgttaaatgcccggttttggtaatccatggcaccaaagatgacgtggtggactgctcccatggcaagcggctctacgagctgtgccagcacaagtacgaacccctgtggatcgagggaggtgaccatggcaacctggagaaattcccagtgttcattcgacatctgaagaagttcttactgtccgtaaagaagctgccatatgaaaaagacgccgcggccgagcacgagccacgggcagctgagaacagaacgcagcatggcggcgaagccatctccgaggctcctcctcgcatgatctcgcggaggctagagtcatcgaagaagagcacgatccatgaagcaaagcctaggccgagcagcgagcacacggataagcgcaggcgaagcacgggccacagggagaaggcgaggtccagcacagacaggagagagagatcgaggagaagcgtcgactgcttcgacagcatcctcgaacacgagcagccggaaaggccaaggaaaagcttcgacaggatcggagagaagattagagcaatgggtttgtgcaatgtcgactgcttcaaagagcctcctgatagcactgagctttccagaggtagttgagtggaaaaggaattctggttgctgtcagagtcagtatttttcttttcccttgctgctttagatacaaagaaaactacagctgtgtgatggcaatgttaatcataagatgttcacgaacagagc

SEQ ID NO: 22438 - protein, 409 aa, Zea mays subsp. mays
  misc_feature (1)..(409): Ceres Seq. ID no. 12408827
MGGVTSSVASKMAFFPPDPPSYGVVDEEDEDAACNKVATTRRVAMTGVRWSVGVEARRVRTRRGSDIIAVYVRHPGASLTLLFSHGNAADLGKMYGIFVELSERLHVNLMGYDYSGYGQSSGKPSEANTFADIEAAYKCLVDVYGTREEDIVLYGQSVGSGPTLDLAVRFDRVRAVVLHSPILSGLRVMYSVKKTYWFDIYKNIDKIPHVKCPVLVIHGTKDDVVDCSHGKRLYELCQHKYEPLWIEGGDHGNLEKFPVFIRHLKKFLLSVKKLPYEKDAAAEHEPRAAENRTQHGGEAISEAPPRMISRRLESSKKSTIHEAKPRPSSEHTDKRRRSTGHREKARSSTDRRERSRRSVDCFDSILEHEQPERPRKSFDRIGEKIRAMGLCNVDCFKEPPDSTELSRGS

SEQ ID NO: 22439 - protein, 398 aa, Zea mays subsp. mays
  misc_feature (1)..(398): Ceres Seq. ID no. 12408828
MAFFPPDPPSYGVVDEEDEDAACNKVATTRRVAMTGVRWSVGVEARRVRTRRGSDIIAVYVRHPGASLTLLFSHGNAADLGKMYGIFVELSERLHVNLMGYDYSGYGQSSGKPSEANTFADIEAAYKCLVDVYGTREEDIVLYGQSVGSGPTLDLAVRFDRVRAVVLHSPILSGLRVMYSVKKTYWFDIYKNIDKIPHVKCPVLVIHGTKDDVVDCSHGKRLYELCQHKYEPLWIEGGDHGNLEKFPVFIRHLKKFLLSVKKLPYEKDAAAEHEPRAAENRTQHGGEAISEAPPRMISRRLESSKKSTIHEAKPRPSSEHTDKRRRSTGHREKARSSTDRRERSRRSVDCFDSILEHEQPERPRKSFDRIGEKIRAMGLCNVDCFKEPPDSTELSRGS

SEQ ID NO: 22440 - protein, 365 aa, Zea mays subsp. mays
  misc_feature (1)..(365): Ceres Seq. ID no. 12408829
MTGVRWSVGVEARRVRTRRGSDIIAVYVRHPGASLTLLFSHGNAADLGKMYGIFVELSERLHVNLMGYDYSGYGQSSGKPSEANTFADIEAAYKCLVDVYGTREEDIVLYGQSVGSGPTLDLAVRFDRVRAVVLHSPILSGLRVMYSVKKTYWFDIYKNIDKIPHVKCPVLVIHGTKDDVVDCSHGKRLYELCQHKYEPLWIEGGDHGNLEKFPVFIRHLKKFLLSVKKLPYEKDAAAEHEPRAAENRTQHGGEAISEAPPRMISRRLESSKKSTIHEAKPRPSSEHTDKRRRSTGHREKARSSTDRRERSRRSVDCFDSILEHEQPERPRKSFDRIGEKIRAMGLCNVDCFKEPPDSTELSRGS

SEQ ID NO: 22441 - DNA, 1395 bp, Zea mays subsp. mays
  misc_feature (1)..(1395): Ceres Seq. ID no. 12408833
aaataggtagatgatgccgctaacagtaacacagagtaaaagactccaattttcccacggctactgaatcacggatgcttaaatctccccaatccgtatctctgtttccctcacagcgcggctgcctataaccactccaggtctccagcgaagcaggctcaggcgcaacgcaacaacacaaggcggcggttatggcctctgctgctgcgacggctacgatggggacggggaaggtggtgtgcgtcaccggcgcatcagggtacatcgcgtcctggattgtcaggctcctcctcgaccgcggctacaccgtccgcgccaccgtgcgagacaccgctgacccaaagaaaacattgcacctgactgcgttggatggtgctaaggataggctgcacttatttaaagctagcctgctagaagagggttctttcgatgctgcagttcatggatgcgacactgtatttcatactgcctctcccttttatcacaatgtcaaggatgctaaggcagagttacttgacccagcagttaagggaacactcaatgttctcggttcatgcaagaaagcttctattaaaaaggtggttgtaacatcatctatggctgctgtagcctacaacgggaggccaaggactcctgaggtcacagttgacgagacatggttttctgatccacaaatttgtgaaacaaatcagcaatggtatattttgtccaagacgctggcagaggaggctgcttggaagttctcaagggataatggacttgaaatcgttactataaacccagcgatggttattggtcccctgctgcagcctacactaaataccagtgctgaagcaatcctgaagttaatcaatgggtcatcgtctacatatcccaatttttgctttggatgggttaatgtcaaggatgttgccctggcccatatccttgcatacgaggttccctcatcaaatggaaggtactgcatggtggaaagagttgttcactactcagaactggtgaacattatccgcaacatgtatcctacccttcctcttccggacaagtgtgcagatgacaagccgtttgtcccaccctaccaagtatcaaaggagaagataaaaagcataggcatcgagttgattccactggagacgagcgtcaaggagaccatcgaaagcttgaaagagaaggggttcgctagtttttgactcgtgcaagctgtgaaacagaagtgttactgtactacgtgatgttgcattgtacacatgcatcggacttcgcagttcccaagctattttggtagctttggtctgtaagattacctaaaataaactgagccacgttgccacgctgtagcttttgtacatgttatgctttgatcggattgagacacgtgatatatggtcgttgctt

SEQ ID NO: 22442 - protein, 332 aa, Zea mays subsp. mays
  misc_feature (1)..(332): Ceres Seq. ID no. 12408834
MASAAATATMGTGKVVCVTGASGYIASWIVRLLLDRGYTVRATVRDTADPKKTLHLTALDGAKDRLHLFKASLLEEGSFDAAVHGCDTVFHTASPFYHNVKDAKAELLDPAVKGTLNVLGSCKKASIKKVVVTSSMAAVAYNGRPRTPEVTVDETWFSDPQICETNQQWYILSKTLAEEAAWKFSRDNGLEIVTINPAMVIGPLLQPTLNTSAEAILKLINGSSSTYPNFCFGWVNVKDVALAHILAYEVPSSNGRYCMVERVVHYSELVNIIRNMYPTLPLPDKCADDKPFVPPYQVSKEKIKSIGIELIPLETSVKETIESLKEKGFASF

SEQ ID NO: 22443 - protein, 323 aa, Zea mays subsp. mays
  misc_feature (1)..(323): Ceres Seq. ID no. 12408835
MGTGKVVCVTGASGYIASWIVRLLLDRGYTVRATVRDTADPKKTLHLTALDGAKDRLHLFKASLLEEGSFDAAVHGCDTVFHTASPFYHNVKDAKAELLDPAVKGTLNVLGSCKKASIKKVVVTSSMAAVAYNGRPRTPEVTVDETWFSDPQICETNQQWYILSKTLAEEAAWKFSRDNGLEIVTINPAMVIGPLLQPTLNTSAEAILKLINGSSSTYPNFCFGWVNVKDVALAHILAYEVPSSNGRYCMVERVVHYSELVNIIRNMYPTLPLPDKCADDKPFVPPYQVSKEKIKSIGIELIPLETSVKETIESLKEKGFASF

SEQ ID NO: 22444 - protein, 197 aa, Zea mays subsp. mays
  misc_feature (1)..(197): Ceres Seq. ID no. 12408836
MAAVAYNGRPRTPEVTVDETWFSDPQICETNQQWYILSKTLAEEAAWKFSRDNGLEIVTINPAMVIGPLLQPTLNTSAEAILKLINGSSSTYPNFCFGWVNVKDVALAHILAYEVPSSNGRYCMVERVVHYSELVNIIRNMYPTLPLPDKCADDKPFVPPYQVSKEKIKSIGIELIPLETSVKETIESLKEKGFASF

SEQ ID NO: 22445 - DNA, 1706 bp, Zea mays subsp. mays
  misc_feature (1)..(1706): Ceres Seq. ID no. 12408837
gcacgagaccattacctagaacatcctaatcgaaaaacaaacccttcttatcctatcgtcgcgcgcgcctgcctctcccacacactccacagcgcccgcgcaggctcgctgcaagcgcaaagcagccacagcaccccctgcacctgcagactgcaaccgcaatgtcggctctcgggacgctctccggcggcgctgccggtgtctccggcctcctccgcctccgccgccgggccgccccagcccccgcgatcgcggcgccgtcgcacctccccgctgggaccgtcaagtgcgcggccgccgtgcccgatgccgccccgatcgtctggggccgtcagctccgcccggcgctcctcctacccgcggcgctgctcccttcgttgcagcccgccaggaggcacacgctgcagccgcccgccgcagccgccgagtccgcaggggaggccaagtctgtgggtttcctggagaagtacccggccctggtcaccggcttcttcttcttcatgtggtacttcctcaacgtcatattcaacatcctcaacaagaagatctacaactacttcccatacccatactttgtgtccttgatccatctagtagtgggtgtcgtatactgcctcatcagctggagtgtcggtctccccaagcgagcgcctatcaatggcacgctcctcaagcttctctttccagtcgccctgtgccatggtattggtcacatcactagcaatgtgtccttcgctgctgttgcagtctcatttgctcacactatcaaagctctggagcccttcttcagcgcagcggctactcagtttatccttggacagcaagttcccttctctctgtggctttctcttgcccctgtggtcattggtgtttcaatggcatcccttactgagctttcattcaactggactggcttcatcaatgccatgatatcaaacatctcattcacttacaggagcatttattccaagaaagctatgactgacatggatagcaccaacgtgtatgcttacatctcaataatcgctctaattgtttgcattccacctgcattgatctttgaagggcccaagctaatgcagcatggatttagtgatgccattgcaaaagtaggtttgacaaagtttgtcagtgacctattcttggttggactgttctaccatctgtataaccagattgctacaaacaccttggagcgagtggctcctctgacacatgctgtcggcaatgtgttgaaacgtgtttttgtcatcggtttctcaatcattgtttttggtaacaaaattagcacacaaactggaattggcacgtccattgccatagctggtgttgctatgtactcttacattaaggctaagattgaagaggagaaaaggaaaaagagcgcatgactgctgtgaataatattatcggaccttcctcggacacaacatcgtcgacaatcacgacctacttctataccttgttttgttttcatcttgagtcagtcggtccattgtttgttcccagtctggtgattaaaagtctgcaaattctgtttgtggaattggcagcgatacaaatttggcttctttaagtaaatccggttggcggtacacagcggtattaattcacctgtaactgaatggaataccgtaatgcaaagggcacaacactctgcctgactaaaataaaatggtgaaggttcacccttgttgtggttgctg

SEQ ID NO: 22446 - protein, 409 aa, Zea mays subsp. mays
  misc_feature (1)..(409): Ceres Seq. ID no. 12408838
MSALGTLSGGAAGVSGLLRLRRRAAPAPAIAAPSHLPAGTVKCAAAVPDAAPIVWGRQLRPALLLPAALLPSLQPARRHTLQPPAAAAESAGEAKSVGFLEKYPALVTGFFFFMWYFLNVIFNILNKKIYNYFPYPYFVSLIHLVVGVVYCLISWSVGLPKRAPINGTLLKLLFPVALCHGIGHITSNVSFAAVAVSFAHTIKALEPFFSAAATQFILGQQVPFSLWLSLAPVVIGVSMASLTELSFNWTGFINAMISNISFTYRSIYSKKAMTDMDSTNVYAYISIIALIVCIPPALIFEGPKLMQHGFSDAIAKVGLTKFVSDLFLVGLFYHLYNQIATNTLERVAPLTHAVGNVLKRVFVIGFSIIVFGNKISTQTGIGTSIAIAGVAMYSYIKAKIEEEKRKKSA

SEQ ID NO: 22447 - protein, 296 aa, Zea mays subsp. mays
  misc_feature (1)..(296): Ceres Seq. ID no. 12408839
MWYFLNVIFNILNKKIYNYFPYPYFVSLIHLVVGVVYCLISWSVGLPKRAPINGTLLKLLFPVALCHGIGHITSNVSFAAVAVSFAHTIKALEPFFSAAATQFILGQQVPFSLWLSLAPVVIGVSMASLTELSFNWTGFINAMISNISFTYRSIYSKKAMTDMDSTNVYAYISIIALIVCIPPALIFEGPKLMQHGFSDAIAKVGLTKFVSDLFLVGLFYHLYNQIATNTLERVAPLTHAVGNVLKRVFVIGFSIIVFGNKISTQTGIGTSIAIAGVAMYSYIKAKIEEEKRKKSA

SEQ ID NO: 22448 - DNA, 1530 bp, Zea mays subsp. mays
  misc_feature (1)..(1530): Ceres Seq. ID no. 12408856
acttctttctcgtcttcctctcctgtctcctcgcagcagggtgctggaagaagtttctggttaggagaatccggttgaggttgccatttcccaacttcttccagcggttcggctcggaggcgaactgagatgtcctgttcgtgatcggtttgttcttgcagctgcagacagcttgtcgattccttgcttgaggagcagccatggacagaagaaaccgaccagctccgttggttgacagctctgcatgcttttgccgagtggacagatcatccgccgcggcggcggcgaggcgaatcccagtgtcgaaggcgtgcgtgcaaccgagcctcagggcgtccatccacccgctgaagccacggccgggcgcagagcggagccgcggaggggcgtgcccgctgctcccaggccttccggacgacctcgccattgcctgtctcatccgggtgcccagagccgaccactggaagctgaggctggtgtgccggaagtggtgccgcctgctcgccggcaactacttctacggcctccgccggcggctcgggctcgcggagcagtggctgtacgccgtgaagcgcgacggcagggacgggcgcgtgtcgtgggacgtgctcgacccgtcgcgcggcgagtggcgcgcgctgccgcccgtgccgggcgagtacgcggaggccgacgggttcggctgcgccgtgctcggcggctgccacctgtacctgctcggcggcagggacccgcgcaggggcagcgccatgcggcgggtggtgttctacagcgcccggagcaaccggtggcaccgcgcgccggacatgctgcgccgccggcagttcttcgacgtgtgcgtcatgggcaaccgcctgtacgtcgcgggcggtgagggtggcggcggcgggctcaggtccgctgaggtgttcgacccggccaagaaccgctggtccttcgtggccgagatggccgcgccgatggcgccgttcgtcagcgcggtgcatggcgggcggtggttcgtgaagggtattggcgcgcagcagcaggtgctaagccaggcatactccccggtgtctgactcgtggtccatcgtcctcgacggcatggtcaccggctggcggagccccagcgcgtgcctcaacggccggctctatgctgcagagtgcatggacggatgccggttgagggcctacgacgaggccgtggacgcgtggagcacctgcgccgacagcaagcagcaccgagggagctcccaggcggctgccattgtcgccctccacggaaggctcttcgtcgtccgcaacgacatgagcgtctcggccgtccaggtggcggccgaggcgggaaagcagaggtggcagaccctcgccggcaaagcgcataccaagagctttgtcacgggcctgttgtccaacctctctggtcgcagccgcgccaagaacaacatcctccattgccaagttcttgaggtctagctgtcttgctccctgatgagctatgcttataagttactagaatcacgcaatgaaaaagtacgtgagaaatctc

SEQ ID NO: 22449 - protein, 418 aa, Zea mays subsp. mays
  misc_feature (1)..(418): Ceres Seq. ID no. 12408857
MDRRNRPAPLVDSSACFCRVDRSSAAAAARRIPVSKACVQPSLRASIHPLKPRPGAERSRGGACPLLPGLPDDLAIACLIRVPRADHWKLRLVCRKWCRLLAGNYFYGLRRRLGLAEQWLYAVKRDGRDGRVSWDVLDPSRGEWRALPPVPGEYAEADGFGCAVLGGCHLYLLGGRDPRRGSAMRRVVFYSARSNRWHRAPDMLRRRQFFDVCVMGNRLYVAGGEGGGGGLRSAEVFDPAKNRWSFVAEMAAPMAPFVSAVHGGRWFVKGIGAQQQVLSQAYSPVSDSWSIVLDGMVTGWRSPSACLNGRLYAAECMDGCRLRAYDEAVDAWSTCADSKQHRGSSQAAAIVALHGRLFVVRNDMSVSAVQVAAEAGKQRWQTLAGKAHTKSFVTGLLSNLSGRSRAKNNILHCQVLEV

SEQ ID NO: 22450 - protein, 235 aa, Zea mays subsp. mays
  misc_feature (1)..(235): Ceres Seq. ID no. 12408858
MRRVVFYSARSNRWHRAPDMLRRRQFFDVCVMGNRLYVAGGEGGGGGLRSAEVFDPAKNRWSFVAEMAAPMAPFVSAVHGGRWFVKGIGAQQQVLSQAYSPVSDSWSIVLDGMVTGWRSPSACLNGRLYAAECMDGCRLRAYDEAVDAWSTCADSKQHRGSSQAAAIVALHGRLFVVRNDMSVSAVQVAAEAGKQRWQTLAGKAHTKSFVTGLLSNLSGRSRAKNNILHCQVLEV

SEQ ID NO: 22451 - protein, 216 aa, Zea mays subsp. mays
  misc_feature (1)..(216): Ceres Seq. ID no. 12408859
MLRRRQFFDVCVMGNRLYVAGGEGGGGGLRSAEVFDPAKNRWSFVAEMAAPMAPFVSAVHGGRWFVKGIGAQQQVLSQAYSPVSDSWSIVLDGMVTGWRSPSACLNGRLYAAECMDGCRLRAYDEAVDAWSTCADSKQHRGSSQAAAIVALHGRLFVVRNDMSVSAVQVAAEAGKQRWQTLAGKAHTKSFVTGLLSNLSGRSRAKNNILHCQVLEV

SEQ ID NO: 22452 - DNA, 1482 bp, Zea mays subsp. mays
  misc_feature (1)..(1482): Ceres Seq. ID no. 12408899
gctccttgctcgcctccacccgcggccaccaccgccctgcggcccccgccgcttgctagcctccaccgcgccgcgagtcacaccgttcatgcaccggctggtcctggagcacgggaggacgagcatgtcctggttcggccccagccccaaggtgaccatcgtcgacccggacctggccaaggacgtgctgtccaacaagttcggccacttcgagaagctcaaggtcccggcgctgtccaagatgctgggctccggcgtggccagccacgagggcgagaagtgggtcaagcaccggaggatcctcaaccatgcgttccatcttgagaagctcaagcgcatgctgccggcgttttctacgtgctgcgaggagctggtgagcaggtgggcggcggagtcccttggctccgacggctcgtgcgagctggacgtctggccggagctgcagaacctgacgggagacatcatttctcgcaccgcgttcagcagcagctacagcgaagggagaaggatcttccagctacaggtcgagcaagcttcgcttgtcatgaccaacattcggaagatcatgatccccggctacatgtacttgcctaccgcgaacaacaggaagatgcgcaggaacaacagggaggtggagtcaatcctgcgagagataatcgggaagaggatccaggcgatggaacaaggcgagggcaccaaagacgacctggtgggtctactgctggagacaaacatgagagacgacatggggatgacgatcgaagacatgatcgaggagtgcaaggtgttctacttcgtcgggatggagaccacgttggtgctgctcatgtggacgatggtggtgctcagcatgcacccggagtggcaggaccgcgcgagggaggaggtgacggctctgttcggcagggacggcaagcccgagtatgacggcctaagccacctcaaagttgtgaccatggtgctctacgaggtgctccgactgtacccgccggccacctccgtcgtccgacaaacgtacaaggagatggaggtcggaggcgtcacctaccccgccggcgtgatcctggagctgcccgtgctgctcatccaccacgacccggacatctggggaggcgacgcgcgtgagtttaggcccgataggttctccgagggcgtgtccagggcctccaaggaccccggcgcgttcctcccgttcggttggggcccgcgcatctgcatcggccagaacttcgcgctgctggaggccaagatggcgctctgcatgatcctccagcggtttgagttcgggctcgcgccatcctatgctcatgcgccgcataccgtgataaccttgcatcctatgcacggtgcgcagcttaagctcagagcaatatgatctcgacatgatgggtgtcccatcgttgatgccattgttatgtataaccttacaattcagataggcattcggccctgttaatgtctgaaataagtatcttcgcgttg

SEQ ID NO: 22453 - protein, 457 aa, Zea mays subsp. mays
  misc_feature (1)..(457): Ceres Seq. ID no. 12408900
LLARLHPRPPPPCGPRRLLASTAPRVTPFMHRLVLEHGRTSMSWFGPSPKVTIVDPDLAKDVLSNKFGHFEKLKVPALSKMLGSGVASHEGEKWVKHRRILNHAFHLEKLKRMLPAFSTCCEELVSRWAAESLGSDGSCELDVWPELQNLTGDIISRTAFSSSYSEGRRIFQLQVEQASLVMTNIRKIMIPGYMYLPTANNRKMRRNNREVESILREIIGKRIQAMEQGEGTKDDLVGLLLETNMRDDMGMTIEDMIEECKVFYFVGMETTLVLLMWTMVVLSMHPEWQDRAREEVTALFGRDGKPEYDGLSHLKVVTMVLYEVLRLYPPATSVVRQTYKEMEVGGVTYPAGVILELPVLLIHHDPDIWGGDAREFRPDRFSEGVSRASKDPGAFLPFGWGPRICIGQNFALLEAKMALCMILQRFEFGLAPSYAHAPHTVITLHPMHGAQLKLRAI

SEQ ID NO: 22454 - protein, 428 aa, Zea mays subsp. mays
  misc_feature (1)..(428): Ceres Seq. ID no. 12408901
MHRLVLEHGRTSMSWFGPSPKVTIVDPDLAKDVLSNKFGHFEKLKVPALSKMLGSGVASHEGEKWVKHRRILNHAFHLEKLKRMLPAFSTCCEELVSRWAAESLGSDGSCELDVWPELQNLTGDIISRTAFSSSYSEGRRIFQLQVEQASLVMTNIRKIMIPGYMYLPTANNRKMRRNNREVESILREIIGKRIQAMEQGEGTKDDLVGLLLETNMRDDMGMTIEDMIEECKVFYFVGMETTLVLLMWTMVVLSMHPEWQDRAREEVTALFGRDGKPEYDGLSHLKVVTMVLYEVLRLYPPATSVVRQTYKEMEVGGVTYPAGVILELPVLLIHHDPDIWGGDAREFRPDRFSEGVSRASKDPGAFLPFGWGPRICIGQNFALLEAKMALCMILQRFEFGLAPSYAHAPHTVITLHPMHGAQLKLRAI

SEQ ID NO: 22455 - protein, 416 aa, Zea mays subsp. mays
  misc_feature (1)..(416): Ceres Seq. ID no. 12408902
MSWFGPSPKVTIVDPDLAKDVLSNKFGHFEKLKVPALSKMLGSGVASHEGEKWVKHRRILNHAFHLEKLKRMLPAFSTCCEELVSRWAAESLGSDGSCELDVWPELQNLTGDIISRTAFSSSYSEGRRIFQLQVEQASLVMTNIRKIMIPGYMYLPTANNRKMRRNNREVESILREIIGKRIQAMEQGEGTKDDLVGLLLETNMRDDMGMTIEDMIEECKVFYFVGMETTLVLLMWTMVVLSMHPEWQDRAREEVTALFGRDGKPEYDGLSHLKVVTMVLYEVLRLYPPATSVVRQTYKEMEVGGVTYPAGVILELPVLLIHHDPDIWGGDAREFRPDRFSEGVSRASKDPGAFLPFGWGPRICIGQNFALLEAKMALCMILQRFEFGLAPSYAHAPHTVITLHPMHGAQLKLRAI

SEQ ID NO: 22456 - DNA, 1315 bp, Zea mays subsp. mays
  misc_feature (1)..(1315): Ceres Seq. ID no. 12408914
gtatagccagcggttgacctggcttcttcacatacactattatacgtacattgatatatacgaaccgtcctggttcttgcaccaccgccgcaccgattcgcgcgaaagcgaactccgtgccttagggccgaatcatcaccgtcgtccgatcgatccgggaccgggactcgggaagcatgttgttaaatggcgacagcaggcgggccgcggcgacagcagcagcgctgctggctctcgccgcctgcttctgcgcagctactggagacggggatatggcgggcctgcggccgctcgtcctcgtggttgaccagtccggcaagggcgaccacaggaggattcaggacgccatcgatgcggcgccggcgagcaaccgctccgccggcggccgcggcagcgtcgtcatccggatcaagcccggagtgtacagagagaaagtggtggtggacaagccttgcataactctcgtcggcgcgaccgccgccagctcgaccgtcgtcatcacctggaacgagtcctgggtcgccgccgacagcccgacagtctccgtgctggcctccgacttcgtcgcgaagcgcatagcgttccagaacacgttcgggactagcgggccggcggtcgccgtgagggtggccggagacagggcggcgttctacgggtgcaggttcacgtcgttccaggacacgctcctggacgacacgggtcgccactactaccgtggctgctacgtccagggaggcaccgacttcgtcttcggcaatggcaaggctctgttcgataagtgccacctccactccgtctcgccggccggcggcgcgttcacggcgcacagacggtcgtcggagtcggaggacactgggttcagcttcgtcgggtgcaagctgacggggctcggggccggcacgtccgtcctcgggagaccctggggtccctactcccgcgtcgtctttgcgctcagctacatgtccggcacggtgaggccccagggctggggacgactgggagcgactcctccagacagagcaggagcaggacagcgttctacgggcagtaccagtgctacggggaaggctccagaactgacgggagagttgcgtggtctcacgacctgtcgcaggctgaagccgcgccgttcatcaccaaagtttgggtcgggggacaggagtggcttcggtaggaaacactagctagctgtgtgtgctctgtttggttcgtcaacagtgacgctgggaataataagctagagctgcagacgcgttatggccggttggtgccgagaatacgcttgccctgaaaaaggcgagcaatgcaagcaatg

SEQ ID NO: 22457 - protein, 335 aa, Zea mays subsp. mays
  misc_feature (1)..(335): Ceres Seq. ID no. 12408915
MLLNGDSRRAAATAAALLALAACFCAATGDGDMAGLRPLVLVVDQSGKGDHRRIQDAIDAAPASNRSAGGRGSVVIRIKPGVYREKVVVDKPCITLVGATAASSTVVITWNESWVAADSPTVSVLASDFVAKRIAFQNTFGTSGPAVAVRVAGDRAAFYGCRFTSFQDTLLDDTGRHYYRGCYVQGGTDFVFGNGKALFDKCHLHSVSPAGGAFTAHRRSSESEDTGFSFVGCKLTGLGAGTSVLGRPWGPYSRVVFALSYMSGTVRPQGWGRLGATPPDRAGAGQRSTGSTSATGKAPELTGELRGLTTCRRLKPRRSSPKFGSGDRSGFGRKH

SEQ ID NO: 22458 - protein, 303 aa, Zea mays subsp. mays
  misc_feature (1)..(303): Ceres Seq. ID no. 12408916
MAGLRPLVLVVDQSGKGDHRRIQDAIDAAPASNRSAGGRGSVVIRIKPGVYREKVVVDKPCITLVGATAASSTVVITWNESWVAADSPTVSVLASDFVAKRIAFQNTFGTSGPAVAVRVAGDRAAFYGCRFTSFQDTLLDDTGRHYYRGCYVQGGTDFVFGNGKALFDKCHLHSVSPAGGAFTAHRRSSESEDTGFSFVGCKLTGLGAGTSVLGRPWGPYSRVVFALSYMSGTVRPQGWGRLGATPPDRAGAGQRSTGSTSATGKAPELTGELRGLTTCRRLKPRRSSPKFGSGDRSGFGRKH

SEQ ID NO: 22459 - DNA, 1563 bp, Zea mays subsp. mays
  misc_feature (1)..(1563): Ceres Seq. ID no. 12408925
aaaaccccctctgctccgaatcgcgcgcgtcacagcaatagcacgctgcactcctgcacgcagctacctgaccacaccttatccggacggcgcgggcgccatggagcggaggctgtcggcgacgtccaggcggtccgcgccgtcggccatccaacggctgtcccacctggcgcagcgcgtcggcgccgtcaacctcgccgagggcttccccgacttccccgcacccccccacgtcaaggccgccgccgtcgccgccattgccgcggacctcaaccagtacaggcatgtgcaggggatctgcgacatcctcgccaacacgatgaaacgtgaccatgacctcgacgtggacccgctcacggactttgtcatctgctgcggccaatccgaagcattcgccgcggccatctttgcaataatcgaccaaggagacgaagttctcatcttcgaccctgcttatgaaacgtatgagacaagcattgagctagctcgaggcgtccctgtgtatgtgccattggatccaccttcttggactctgaacgaagaaaaatttctgaaatcttttacaagtcggaccaaggcgttggtcttgaacagcccacacaatccaacagggaaggtcttcagcaaagaggagctgcttattatctcccaagcttgtcagaaaatggactgctttgtgataactgatgaggtttatgagtatattacttacgatgcgaacaagcatatctcactggcttctcttccagggatgcaagagaggaccatcatcacatcctcactgtcaaaaacttacagtgtgactggttggagactcggttgggcttgtgcagcagcaagcatcgcctcagctattagaaatatccacataaaattaacagattcagctcctgcaccattccaagaagctgcattgattgcattaacaagcacagcagattactacatatccctgagaaaagactatgaggtgaaaagagacttcatccttctgttgctgaaagacttgggcttcaaaatcagcgtcaagccacaaggttcagtatttgtgtttgctgagctgccaaggtcctgccaactttcagatgtagaatttgtgacaaagttgatcaacgatgctggtgtggttgccgtgcctggccgtgggttcttccacaagacttgtgacggtgaaagctactgccaccgatatgtcaggtttgcgttctgcaagggcgacgacacacttaaggctgctgccatgaagatgaggaagctggcaagcaggcagggagaaccatggcttactggcagacaataggataagactatgccctcctctaattgatcaaaacccttagatttattcctctttttagtttctggatacaactttgatgccatgtcacacggcccatgaaagtgtaacagctagttgcatccttttcccataaaagtgtaagggcatgtacaacctagaacccacttcacggttctccaagcgcaagacacacctaagacagtttcatacagtgggttgtatcttagattaaatgctttaataaatgcattgtatttacgtgt

SEQ ID NO: 22460 - protein, 432 aa, Zea mays subsp. mays
  misc_feature (1)..(432): Ceres Seq. ID no. 12408926
KPPLLRIARVTAIARCTPARSYLTTPYPDGAGAMERRLSATSRRSAPSAIQRLSHLAQRVGAVNLAEGFPDFPAPPHVKAAAVAAIAADLNQYRHVQGICDILANTMKRDHDLDVDPLTDFVICCGQSEAFAAAIFAIIDQGDEVLIFDPAYETYETSIELARGVPVYVPLDPPSWTLNEEKFLKSFTSRTKALVLNSPHNPTGKVFSKEELLIISQACQKMDCFVITDEVYEYITYDANKHISLASLPGMQERTIITSSLSKTYSVTGWRLGWACAAASIASAIRNIHIKLTDSAPAPFQEAALIALTSTADYYISLRKDYEVKRDFILLLLKDLGFKISVKPQGSVFVFAELPRSCQLSDVEFVTKLINDAGVVAVPGRGFFHKTCDGESYCHRYVRFAFCKGDDTLKAAAMKMRKLASRQGEPWLTGRQ

SEQ ID NO: 22461 - protein, 399 aa, Zea mays subsp. mays
  misc_feature (1)..(399): Ceres Seq. ID no. 12408927
MERRLSATSRRSAPSAIQRLSHLAQRVGAVNLAEGFPDFPAPPHVKAAAVAAIAADLNQYRHVQGICDILANTMKRDHDLDVDPLTDFVICCGQSEAFAAAIFAIIDQGDEVLIFDPAYETYETSIELARGVPVYVPLDPPSWTLNEEKFLKSFTSRTKALVLNSPHNPTGKVFSKEELLIISQACQKMDCFVITDEVYEYITYDANKHISLASLPGMQERTIITSSLSKTYSVTGWRLGWACAAASIASAIRNIHIKLTDSAPAPFQEAALIALTSTADYYISLRKDYEVKRDFILLLLKDLGFKISVKPQGSVFVFAELPRSCQLSDVEFVTKLINDAGVVAVPGRGFFHKTCDGESYCHRYVRFAFCKGDDTLKAAAMKMRKLASRQGEPWLTGRQ

SEQ ID NO: 22462 - protein, 326 aa, Zea mays subsp. mays
  misc_feature (1)..(326): Ceres Seq. ID no. 12408928
MKRDHDLDVDPLTDFVICCGQSEAFAAAIFAIIDQGDEVLIFDPAYETYETSIELARGVPVYVPLDPPSWTLNEEKFLKSFTSRTKALVLNSPHNPTGKVFSKEELLIISQACQKMDCFVITDEVYEYITYDANKHISLASLPGMQERTIITSSLSKTYSVTGWRLGWACAAASIASAIRNIHIKLTDSAPAPFQEAALIALTSTADYYISLRKDYEVKRDFILLLLKDLGFKISVKPQGSVFVFAELPRSCQLSDVEFVTKLINDAGVVAVPGRGFFHKTCDGESYCHRYVRFAFCKGDDTLKAAAMKMRKLASRQGEPWLTGRQ

SEQ ID NO: 22463 - DNA, 1815 bp, Zea mays subsp. mays
  misc_feature (1)..(1815): Ceres Seq. ID no. 12408937
aagtatcaagctaggcaggcctggtcccgaagaacacccttctctggtcgtcgcatcgcagggcagctagctaggtagctaacatccgccatggcgcgcgggggagacggcctgcaggtgctgagcgcgctggacgcggcgaagacgcagtggtaccacttcacggccatcatcgtcgccggcatgggcttcttcacggacgcctacgacctcttctgcatctccctcgtcaccaagctgctgggccgcatctactacacggacaccagcaaggacagccccgggtcgctgccgcccaacgtcgcggcggcggtcaacggcgtggccttctgcggcacgctggccggccagctcttcttcggctggctgggcgacaagctggggcgcaagagcgtgtacgggatgacgctcatggtcatggtcatctgctccgtcgcgtcgggcctctcgttcggccacacccccacgggggtcatggccacgctctgcttcttccgcttctggctcggcttcggcatcggcggcgactacccgctgtcggccaccatcatgtccgagtacgccaacaagaggacccgcggcgccttcatcgccgccgtcttcgccatgcagggcttcggcatcctcgccggcggcatcgtcacgctcgtcatctccgccgccttccgcgcggcgtacccgtccccggcgtacagggacgaccacttcacctccaccgtgccgcaggccgacttcgtgtggcgggtcatcctcatgctcggcgccgcgccggcgctgctcacctactactggcggatgaagatgcccgagacggcgcggtacacggcgctggtggccaagaacgccaagcaggccgcggccgacatgtccaaggtgctgcagactgagatcgtggacgagcaggagaagctggacgccgccgagggcgccaacagcttcggcctcttctccagggagttcgcgcgccgccacggcctccacctcgtcggcaccgccaccacctggttcctgctcgacatcgccttctacagccagaacctgttccagaaggacatcttcaccagcatcaactggatccccaaggccaacaccatgagcgcgctggaggaggtgtaccgcatctcccgcgcgcagacgctcatcgcgctctgcggcacagtcccgggctactggttcaccgtcgcgctcatcgacgtcgtcggccgcttcgccatccagctgctgggcttcttcatgatgaccgtcttcatgctcggcctcgccatcccttaccaccactggaccacgccgggcaaccacatcggcttcgtcgtcatgtacgccttcaccttcttcttcgccaacttcgggcccaacagcaccaccttcatcgtgcccgccgagatcttcccggcgcgcctgcgctccacctgccacggcatctccgccgcctcggggaaggccggggccatcatcggcgcgttcggcttcctgtacgcggcgcagaaccaggacaggagcaagacggacgccggctaccccgcgggcatcggcgtgcgcaactcgctcttcgtcctcgccgccagcaacatgctcggcttcgtcctcacgttcctcgtgccggagtccaagggcaagtcgctcgaggagatgtccggtgaggctgaagactcagaggaggagcccgtcggcgcccgtgcggtgcggccgtcggagacccagatggtgtagagaatcgatcgatcgacgcgtgttccttcctgcactgcacatggtgggctatcatgtcctcaattgtttttttccacgttaaagtcaaccctggctgtgttttgc

SEQ ID NO: 22464 - protein, 539 aa, Zea mays subsp. mays
  misc_feature (1)..(539): Ceres Seq. ID no. 12408938
MARGGDGLQVLSALDAAKTQWYHFTAIIVAGMGFFTDAYDLFCISLVTKLLGRIYYTDTSKDSPGSLPPNVAAAVNGVAFCGTLAGQLFFGWLGDKLGRKSVYGMTLMVMVICSVASGLSFGHTPTGVMATLCFFRFWLGFGIGGDYPLSATIMSEYANKRTRGAFIAAVFAMQGFGILAGGIVTLVISAAFRAAYPSPAYRDDHFTSTVPQADFVWRVILMLGAAPALLTYYWRMKMPETARYTALVAKNAKQAAADMSKVLQTEIVDEQEKLDAAEGANSFGLFSREFARRHGLHLVGTATTWFLLDIAFYSQNLFQKDIFTSINWIPKANTMSALEEVYRISRAQTLIALCGTVPGYWFTVALIDVVGRFAIQLLGFFMMTVFMLGLAIPYHHWTTPGNHIGFVVMYAFTFFFANFGPNSTTFIVPAEIFPARLRSTCHGISAASGKAGAIIGAFGFLYAAQNQDRSKTDAGYPAGIGVRNSLFVLAASNMLGFVLTFLVPESKGKSLEEMSGEAEDSEEEPVGARAVRPSETQMV

SEQ ID NO: 22465 - protein, 508 aa, Zea mays subsp. mays
  misc_feature (1)..(508): Ceres Seq. ID no. 12408939
MGFFTDAYDLFCISLVTKLLGRIYYTDTSKDSPGSLPPNVAAAVNGVAFCGTLAGQLFFGWLGDKLGRKSVYGMTLMVMVICSVASGLSFGHTPTGVMATLCFFRFWLGFGIGGDYPLSATIMSEYANKRTRGAFIAAVFAMQGFGILAGGIVTLVISAAFRAAYPSPAYRDDHFTSTVPQADFVWRVILMLGAAPALLTYYWRMKMPETARYTALVAKNAKQAAADMSKVLQTEIVDEQEKLDAAEGANSFGLFSREFARRHGLHLVGTATTWFLLDIAFYSQNLFQKDIFTSINWIPKANTMSALEEVYRISRAQTLIALCGTVPGYWFTVALIDVVGRFAIQLLGFFMMTVFMLGLAIPYHHWTTPGNHIGFVVMYAFTFFFANFGPNSTTFIVPAEIFPARLRSTCHGISAASGKAGAIIGAFGFLYAAQNQDRSKTDAGYPAGIGVRNSLFVLAASNMLGFVLTFLVPESKGKSLEEMSGEAEDSEEEPVGARAVRPSETQMV

SEQ ID NO: 22466 - protein, 435 aa, Zea mays subsp. mays
  misc_feature (1)..(435): Ceres Seq. ID no. 12408940
MTLMVMVICSVASGLSFGHTPTGVMATLCFFRFWLGFGIGGDYPLSATIMSEYANKRTRGAFIAAVFAMQGFGILAGGIVTLVISAAFRAAYPSPAYRDDHFTSTVPQADFVWRVILMLGAAPALLTYYWRMKMPETARYTALVAKNAKQAAADMSKVLQTEIVDEQEKLDAAEGANSFGLFSREFARRHGLHLVGTATTWFLLDIAFYSQNLFQKDIFTSINWIPKANTMSALEEVYRISRAQTLIALCGTVPGYWFTVALIDVVGRFAIQLLGFFMMTVFMLGLAIPYHHWTTPGNHIGFVVMYAFTFFFANFGPNSTTFIVPAEIFPARLRSTCHGISAASGKAGAIIGAFGFLYAAQNQDRSKTDAGYPAGIGVRNSLFVLAASNMLGFVLTFLVPESKGKSLEEMSGEAEDSEEEPVGARAVRPSETQMV

SEQ ID NO: 22467 - DNA, 1430 bp, Zea mays subsp. mays
  misc_feature (1)..(1430): Ceres Seq. ID no. 12408941
accatcatggcagaagcggccggcggcggacccctgctccccgaggaactcattatctgggagatcctaacccgtctgccggcgaagcccctcctccgatgccgcgctgtctgcctctcctggtgccgccgactcacctccgacgccaaattcctcctcgcccaccaccgtcgccagccctcgctcccgctcctcactgaaggggacaggagcaccgaggagaggaggatcgacgccctggactaccgcaccggcgagcggcgccccatcgcgcggacaacaggccggaccgccgccaacggggacgacctgaacgtgctggcttcctgcgaaggcctcctcatcctcctcgccaacggcggcctccagatctgcaacccggcgacccgccagcgcgcgccactcactcttctccacggcgcctattgcatctccgcgctttaccctcacatcccgtccaggtcgtaccgtgtgctctgctgcttcgagagagccgaggacggccacgccgtgtaccacgtgcacaccgtcgggtcgcgcgaactcaggtgcgtcggagaacctcccgcgccgtgggcgtccggggatatggtaatggcgatgccgatgatggtgtaccttcacccgcacgtcgtggcagacagcaggatctactggcagccggtaaagctgcccgtcggcaacggcaaggtcaacaacatgctcgtgttcgacacaatgaccgagtccttccagcaactgctgtcgcccgtggagggcccctttcttgaactgtttcagatgaacagcggcgcccttggattgtaccactgccgcagcggcaaggttgatctttgggtgttacaggatcacgggagctggtcctggtcgatgaaccaccggatcaaattggacgtgatgtttttctccctgctgccggtgctggacccggaaggagatgtgctagtgctttctaaaagaggggaaacaggcatcctgtggcaacatctgcatcacatttctggtgtcaatggcagtttgctgggccctgtatcaatggagcgcttatctgaagcttagcaggcataggctcaaagaaagtctagtccaccatgacttcttctcgatggtaggtaatgagggtggtgtggatgaaaaaccattgttcgatggcttgtcaactgtggcattgcttcgtgatgataattctgagccacattgagaaacaaaggtattactcaagctgtttcatctcatcaggatggagtcactcctgcctagtaataacagcactgcagattagtaataacctgaaactatacctcgagtctgatttttcccttttcacatgagtcataaacactgttatgactggtattttattttcccttttcacgtgagtcatgaacactgttattactggtattttattttccattttcacatgagcc

SEQ ID NO: 22468 - protein, 352 aa, Zea mays subsp. mays
  misc_feature (1)..(352): Ceres Seq. ID no. 12408942
TIMAEAAGGGPLLPEELIIWEILTRLPAKPLLRCRAVCLSWCRRLTSDAKFLLAHHRRQPSLPLLTEGDRSTEERRIDALDYRTGERRPIARTTGRTAANGDDLNVLASCEGLLILLANGGLQICNPATRQRAPLTLLHGAYCISALYPHIPSRSYRVLCCFERAEDGHAVYHVHTVGSRELRCVGEPPAPWASGDMVMAMPMMVYLHPHVVADSRIYWQPVKLPVGNGKVNNMLVFDTMTESFQQLLSPVEGPFLELFQMNSGALGLYHCRSGKVDLWVLQDHGSWSWSMNHRIKLDVMFFSLLPVLDPEGDVLVLSKRGETGILWQHLHHISGVNGSLLGPVSMERLSEA

SEQ ID NO: 22469 - protein, 350 aa, Zea mays subsp. mays
  misc_feature (1)..(350): Ceres Seq. ID no. 12408943
MAEAAGGGPLLPEELIIWEILTRLPAKPLLRCRAVCLSWCRRLTSDAKFLLAHHRRQPSLPLLTEGDRSTEERRIDALDYRTGERRPIARTTGRTAANGDDLNVLASCEGLLILLANGGLQICNPATRQRAPLTLLHGAYCISALYPHIPSRSYRVLCCFERAEDGHAVYHVHTVGSRELRCVGEPPAPWASGDMVMAMPMMVYLHPHVVADSRIYWQPVKLPVGNGKVNNMLVFDTMTESFQQLLSPVEGPFLELFQMNSGALGLYHCRSGKVDLWVLQDHGSWSWSMNHRIKLDVMFFSLLPVLDPEGDVLVLSKRGETGILWQHLHHISGVNGSLLGPVSMERLSEA

SEQ ID NO: 22470 - DNA, 1793 bp, Zea mays subsp. mays
  misc_feature (1)..(1793): Ceres Seq. ID no. 12408952
aatcacgcacggacgataaatccaagtaaggaaatccccgatgatctcctgcgcgtcgcagcgccagccactcgattagtggagtccaccaaccaagcacgcgtccctccccgtcccagatcccatcccgcggcagccggtcagtccgatccatctccagtacccagcccgtcacccgccttccccgttcgctctcgtcggcgcgcgatggagggtctcatcaaggggttggtccacgtggccatcgacgccgtggaggacgccgtgagggagagggaccacggccgcgccgacgacgacgaggtgccgaggaggagggcggcccaaagctccgatccagatgacgacggggaggaggaacgcgacgaacgatcgcggtcgacgtgggccgaggtcgtctccgagcagaagtgcagcgatccggacgagcgccgggaccatcgaagctcggggcgggacaatcgccatgagaggagggatgacgagggttggaaaagggccgatggtcggaaccagcagcagcaccacgcaggccggcagaaccagtgcgagggggaggaaaggtgggatggcagtggcagccggcggcgtcagcaacagcagcaggcacaaggatacgggaatcagcatcaggaagaagaaaggataaacgatggaggctggcagaccgtcggtgagaaaaagcgccatggaagaccacagcagtctgaagcatggaatggatacagaaagccaccatcagaacaaaagtactctgaggatgtcggtcatatccaccaaggactcaatttcgagcccaccagggaggagctgaatagcttatcgaaagcgtgtagccgactttgggagctcgatatgaaccgtattgttcctggtaaggactacataatcgactgtggcaaggggaagaaagtttatcagaagggtgatatggcatctgaaagcttgttcagctggctaggcgacgatgtgctaagaaaacccacctactcacgtttctgcgcacttctggataactacaacccccaccaggggtacaaagaagttgttacccagcaggataagcacgaagaaatagctttcgttgaagagatcgctagaacagcgccaattaagtacttgcaccggtacttagtgcagaagggggctgtgcctcaggactacgaggacttcaagagaatgctgacatccctatggtttgatttgtatggaagaggtggcaactctagctgctcttctgcctttgagcatgtgtttgttggtgagatcaaaggacggggacaaggggagagtgaggtatcaggcttccataactggattcagttttacctggaagaagccaagggaaatgtggattaccaaggttatatatttccaaggcgccgtggtgaatcgcctgattcagagatacagctgctgactgttcagtttgagtggcatggcgtgctgaaatcggtatccagcacgttgattggcgtcagtcctgagtttgaggttgcactctacacgttgtgcttttttgttggaggggaagacaaccgcgtcgatattggcccgtatagtgtgaacgtcaagtgctaccgattggggaacaacaaaattggatcagcctttcccattgtagagaactgattatctggtgctatgcttctgcaggtttccaaatattcactttcttcgtttcataatcaattacgtgaagttaacaatgtactattttacttgtgcatgaaaaggtaccatactgttcaatttgttgctgccatctgcaatagtattgctacttgcactgc

SEQ ID NO: 22471 - protein, 543 aa, Zea mays subsp. mays
  misc_feature (1)..(543): Ceres Seq. ID no. 12408953
NHARTINPSKEIPDDLLRVAAPATRLVESTNQARVPPRPRSHPAAAGQSDPSPVPSPSPAFPVRSRRRAMEGLIKGLVHVAIDAVEDAVRERDHGRADDDEVPRRRAAQSSDPDDDGEEERDERSRSTWAEVVSEQKCSDPDERRDHRSSGRDNRHERRDDEGWKRADGRNQQQHHAGRQNQCEGEERWDGSGSRRRQQQQQAQGYGNQHQEEERINDGGWQTVGEKKRHGRPQQSEAWNGYRKPPSEQKYSEDVGHIHQGLNFEPTREELNSLSKACSRLWELDMNRIVPGKDYIIDCGKGKKVYQKGDMASESLFSWLGDDVLRKPTYSRFCALLDNYNPHQGYKEVVTQQDKHEEIAFVEEIARTAPIKYLHRYLVQKGAVPQDYEDFKRMLTSLWFDLYGRGGNSSCSSAFEHVFVGEIKGRGQGESEVSGFHNWIQFYLEEAKGNVDYQGYIFPRRRGESPDSEIQLLTVQFEWHGVLKSVSSTLIGVSPEFEVALYTLCFFVGGEDNRVDIGPYSVNVKCYRLGNNKIGSAFPIVEN

SEQ ID NO: 22472 - protein, 474 aa, Zea mays subsp. mays
  misc_feature (1)..(474): Ceres Seq. ID no. 12408954
MEGLIKGLVHVAIDAVEDAVRERDHGRADDDEVPRRRAAQSSDPDDDGEEERDERSRSTWAEVVSEQKCSDPDERRDHRSSGRDNRHERRDDEGWKRADGRNQQQHHAGRQNQCEGEERWDGSGSRRRQQQQQAQGYGNQHQEEERINDGGWQTVGEKKRHGRPQQSEAWNGYRKPPSEQKYSEDVGHIHQGLNFEPTREELNSLSKACSRLWELDMNRIVPGKDYIIDCGKGKKVYQKGDMASESLFSWLGDDVLRKPTYSRFCALLDNYNPHQGYKEVVTQQDKHEEIAFVEEIARTAPIKYLHRYLVQKGAVPQDYEDFKRMLTSLWFDLYGRGGNSSCSSAFEHVFVGEIKGRGQGESEVSGFHNWIQFYLEEAKGNVDYQGYIFPRRRGESPDSEIQLLTVQFEWHGVLKSVSSTLIGVSPEFEVALYTLCFFVGGEDNRVDIGPYSVNVKCYRLGNNKIGSAFPIVEN

SEQ ID NO: 22473 - DNA, 1442 bp, Zea mays subsp. mays
  misc_feature (1)..(1442): Ceres Seq. ID no. 12408959
acgaactcagcgtgctcataggttcctgacgtacgtatctcagttgcgttcgagcgttgtggacttgtggtggtttccttcctgcgccggagaaggtagacgatgggaaggggaagcgaacagtgccggacgcccgtcgagctgcgctgctcttgatcgtctgcttggcggctcgagcggcttctgcaatccaggatggcctgttgccgaacggcaactntcgaggaggcgccgcccaagtcgcagctcaacggcacgagggtgatggggcgcaacgcgataccgcactgggagatctccgggtacgtggagtacatcgggtcgggccagaagcagggcgacatgctgctgccggtgccggagggcgcctacgccgtgcggctggggaacgaggcatccatccagcagcgcctcgccgtgacgccgggcgcgcgctactccatcaccttcagcgcggcgcggacctgcgcccaggccgagcagctcaacgtgacggtcgcccccgagtcggacgtactcccgatccagacggtctacaccagcagcggctgggactcctactcctgggccttccaggccgcgggcagcgtcgtgaccctgatcgtccacaaccccggcgtcgccgaggacgcagcctgcggccccctcatcgatctgtttgccattaagaccatgccgactcctcggagcagcaagaataatatgctgaagaacggggacttcgaggacggcccgtacatcttccccaacacgcagtggggggtgctggtgccgccgatggacgaggacgactactccccgctggccccgtggatggtcctgtcgtccaccaagtcggtgaagtacgttgacgcgccgcaccacgccgtgccgcacggcgcccgcgccgtggagctggtgtccggcatggagacggcgctggtgcagaacgtgaccaccgttcccggacagctctacaggctccagttctcggccggggacgccggcaacggctgcgtgggctccatgaccgtccaggcgtacgccgcgcggggcagcgtcaaggtnccgtaccagtcccagggcaagggcggccacacgcgcggcgtgctggacttcgcggcggtcgcggaccagaccagggtggtgttcgtcagcatgggctacatcatgaagcccgacggcacgctgtgcggancnccgtcgtcgacgacgtctcgcttgtctccacgcggaaccatcctgctcgccgcttgcttctgtgatgctaccgacaagattcgttcatgggttaatgtgaatggctgtgagtgtgctcgaactcgaatgctcgggcttcatttaaccagatctgggtagagtccacggccatcacatgtatttgcatcgttgttttgtctttcttggccaaatgtacttgcttcgttgtagttgtatagactatgtatgcttcgacgggtgcc

SEQ ID NO: 22474 - protein, 380 aa, Zea mays subsp. mays
  misc_feature (1)..(380): Ceres Seq. ID no. 12408960
  misc_feature (9)..(9): Xaa is any aa, unknown or other
  misc_feature (284)..(284): Xaa is any aa, unknown or other
  misc_feature (328)..(328): Xaa is any aa, unknown or other
MACCRTATXEEAPPKSQLNGTRVMGRNAIPHWEISGYVEYIGSGQKQGDMLLPVPEGAYAVRLGNEASIQQRLAVTPGARYSITFSAARTCAQAEQLNVTVAPESDVLPIQTVYTSSGWDSYSWAFQAAGSVVTLIVHNPGVAEDAACGPLIDLFAIKTMPTPRSSKNNMLKNGDFEDGPYIFPNTQWGVLVPPMDEDDYSPLAPWMVLSSTKSVKYVDAPHHAVPHGARAVELVSGMETALVQNVTTVPGQLYRLQFSAGDAGNGCVGSMTVQAYAARGSVKXPYQSQGKGGHTRGVLDFAAVADQTRVVFVSMGYIMKPDGTLCGXPSSTTSRLSPRGTILLAACFCDATDKIRSWVNVNGCECARTRMLGLHLTRSG

SEQ ID NO: 22475 - protein, 357 aa, Zea mays subsp. mays
  misc_feature (1)..(357): Ceres Seq. ID no. 12408961
  misc_feature (261)..(261): Xaa is any aa, unknown or other
  misc_feature (305)..(305): Xaa is any aa, unknown or other
MGRNAIPHWEISGYVEYIGSGQKQGDMLLPVPEGAYAVRLGNEASIQQRLAVTPGARYSITFSAARTCAQAEQLNVTVAPESDVLPIQTVYTSSGWDSYSWAFQAAGSVVTLIVHNPGVAEDAACGPLIDLFAIKTMPTPRSSKNNMLKNGDFEDGPYIFPNTQWGVLVPPMDEDDYSPLAPWMVLSSTKSVKYVDAPHHAVPHGARAVELVSGMETALVQNVTTVPGQLYRLQFSAGDAGNGCVGSMTVQAYAARGSVKXPYQSQGKGGHTRGVLDFAAVADQTRVVFVSMGYIMKPDGTLCGXPSSTTSRLSPRGTILLAACFCDATDKIRSWVNVNGCECARTRMLGLHLTRSG

SEQ ID NO: 22476 - protein, 331 aa, Zea mays subsp. mays
  misc_feature (1)..(331): Ceres Seq. ID no. 12408962
  misc_feature (235)..(235): Xaa is any aa, unknown or other
  misc_feature (279)..(279): Xaa is any aa, unknown or other
MLLPVPEGAYAVRLGNEASIQQRLAVTPGARYSITFSAARTCAQAEQLNVTVAPESDVLPIQTVYTSSGWDSYSWAFQAAGSVVTLIVHNPGVAEDAACGPLIDLFAIKTMPTPRSSKNNMLKNGDFEDGPYIFPNTQWGVLVPPMDEDDYSPLAPWMVLSSTKSVKYVDAPHHAVPHGARAVELVSGMETALVQNVTTVPGQLYRLQFSAGDAGNGCVGSMTVQAYAARGSVKXPYQSQGKGGHTRGVLDFAAVADQTRVVFVSMGYIMKPDGTLCGXPSSTTSRLSPRGTILLAACFCDATDKIRSWVNVNGCECARTRMLGLHLTRSG

SEQ ID NO: 22477 - DNA, 1069 bp, Zea mays subsp. mays
  misc_feature (1)..(1069): Ceres Seq. ID no. 12408967
tccaagacccgcacgcgaacgccctccctgccgctccgccgtttcgcgtgggagtcgtttcgaaaaagtctgtttcgcgagcggtgaggactgaggagtgtggaggcctaaaaccatggcggcgagcatcgggatcatggacggcgcctacttcgtcggcaggggcgagatcctgcactggatcaatgcgaccctccagctctccctcgccaaggtcgaggaggcagcgtctggcgcagtgcagtgccagctcatggatatggttcaccctggagtgggtgcccatgcataaggtcaatttcgatgcgaagacagaatatgacatgatccagaactacaaggttcttcaggacgtgttcaacaagctgcggataggcaagaatattgaggtcaacaagcttgttaaaggacggccattggacaacttggagttccttcagtggttgaaaagatattgtgattctgtgaatggtggaattatgaacgaaaattacaaccctgtagaaaggaggtcaaagggatgcaaagaacgtgtctcaaagggttccaataagccatctaaatcattgcaagccaataggctttctggtgctgatccaacagatggaggccatggagttgggaaagtatgtaacactttttctgaagagcattacatagaacagattcagaagttgtctgaaaagattgcagacctgaaagtttctgtcgatagtactgaaaaagaaagagacttctacttctcgaagttgcgtgatattgagatactgtgtcaacggcctgagttagagcatctaccgatgactaaggcggtccggaagatactttatgcagctgatgcaaaggattcaccgctacctgaggcgaatgatataatcacaaagtcaccaagcttgttctcaaatgaaaccgagtgagatgtgcggctacatgagctaattttccatgattgatcgtcttagttctgagtctgtaaatgcgtaaaataacatttgacacaagtctttttgctgtcaaaaacagttttcctgtaagaacttgagtggggttaagtagttattacgcattc

SEQ ID NO: 22478 - protein, 304 aa, Zea mays subsp. mays
  misc_feature (1)..(304): Ceres Seq. ID no. 12408968
QDPHANALPAAPPFRVGVVSKKSVSRAVRTEECGGLKPWRRASGSWTAPTSSAGARSCTGSMRPSSSPSPRSRRQRLAQCSASSWIWFTLEWVPMHKVNFDAKTEYDMIQNYKVLQDVFNKLRIGKNIEVNKLVKGRPLDNLEFLQWLKRYCDSVNGGIMNENYNPVERRSKGCKERVSKGSNKPSKSLQANRLSGADPTDGGHGVGKVCNTFSEEHYIEQIQKLSEKIADLKVSVDSTEKERDFYFSKLRDIEILCQRPELEHLPMTKAVRKILYAADAKDSPLPEANDIITKSPSLFSNETE

SEQ ID NO: 22479 - protein, 243 aa, Zea mays subsp. mays
  misc_feature (1)..(243): Ceres Seq. ID no. 12408969
MRPSSSPSPRSRRQRLAQCSASSWIWFTLEWVPMHKVNFDAKTEYDMIQNYKVLQDVFNKLRIGKNIEVNKLVKGRPLDNLEFLQWLKRYCDSVNGGIMNENYNPVERRSKGCKERVSKGSNKPSKSLQANRLSGADPTDGGHGVGKVCNTFSEEHYIEQIQKLSEKIADLKVSVDSTEKERDFYFSKLRDIEILCQRPELEHLPMTKAVRKILYAADAKDSPLPEANDIITKSPSLFSNETE

SEQ ID NO: 22480 - protein, 210 aa, Zea mays subsp. mays
  misc_feature (1)..(210): Ceres Seq. ID no. 12408970
MHKVNFDAKTEYDMIQNYKVLQDVFNKLRIGKNIEVNKLVKGRPLDNLEFLQWLKRYCDSVNGGIMNENYNPVERRSKGCKERVSKGSNKPSKSLQANRLSGADPTDGGHGVGKVCNTFSEEHYIEQIQKLSEKIADLKVSVDSTEKERDFYFSKLRDIEILCQRPELEHLPMTKAVRKILYAADAKDSPLPEANDIITKSPSLFSNETE

SEQ ID NO: 22481 - DNA, 1092 bp, Zea mays subsp. mays
  misc_feature (1)..(1092): Ceres Seq. ID no. 12408975
ctgatggcacaggcacaccaccctcttctcctactaattcttttgctcttcctctcctccactgccattccttcctccaagagaacccagccgaagttctcggccgtcttctacttcggcgactcggttctcgacaccggcaacaacaaccatctccccacggtagctgtggcgaaccatgctccttacggaagggacttcccagggaagaaaccgacggggaggttttccgacggccggcttatcccagacctcctcaacgagaggctgcagctcaaagagttctcgccgccgtttctggacgcaaggctgccgaacaacgatgtcgcgacgggggtgaacttcgcttcggctgggtcaggattcgacgaccagacgtcgcggctgtccaacactctgccgatgtcgaaacaggtggacctcttcgaggactacctgctccggctcagaggcatcgttggggacaaggaggcttccaggatcgttgccagatctctgatctttatcagctcggggaccaacgatttctcacattactaccgttcgccaaagaagaggaagatggagattggtgactaccaggatattgttctccagatggtacaggtttatgtcaaggaattgtatgaccttggggggcgacagttctgtttggcaggccttccgccgtttggctgcacacctatccaaatcacgttgagcggagaccctggcagggcatgtgtggatgagcaaaactgggatgctcatgtctacaactctaaacttcaaagactgcttgcgaagttgcaaggctcactccatgggagcagaattgtgtacgtggacgcatacagagctctcgtggagatcctggagaacccggccaaatatggatttacagagacatcacgaggatgttgtgggactgggctcagagaggtcgctctgttttgcaatgcattcactcctatctgcaaaaatgtgtcatcctatgtattttacgatgctgtgcacccaacagagagggtttacatgttagtaaacgattacatagtcaacgatgttattccacagttttaattaatcaaatacccagataaggttttctcg

SEQ ID NO: 22482 - protein, 353 aa, Zea mays subsp. mays
  misc_feature (1)..(353): Ceres Seq. ID no. 12408976
LMAQAHHPLLLLILLLFLSSTAIPSSKRTQPKFSAVFYFGDSVLDTGNNNHLPTVAVANHAPYGRDFPGKKPTGRFSDGRLIPDLLNERLQLKEFSPPFLDARLPNNDVATGVNFASAGSGFDDQTSRLSNTLPMSKQVDLFEDYLLRLRGIVGDKEASRIVARSLIFISSGTNDFSHYYRSPKKRKMEIGDYQDIVLQMVQVYVKELYDLGGRQFCLAGLPPFGCTPIQITLSGDPGRACVDEQNWDAHVYNSKLQRLLAKLQGSLHGSRIVYVDAYRALVEILENPAKYGFTETSRGCCGTGLREVALFCNAFTPICKNVSSYVFYDAVHPTERVYMLVNDYIVNDVIPQF

SEQ ID NO: 22483 - protein, 352 aa, Zea mays subsp. mays
  misc_feature (1)..(352): Ceres Seq. ID no. 12408977
MAQAHHPLLLLILLLFLSSTAIPSSKRTQPKFSAVFYFGDSVLDTGNNNHLPTVAVANHAPYGRDFPGKKPTGRFSDGRLIPDLLNERLQLKEFSPPFLDARLPNNDVATGVNFASAGSGFDDQTSRLSNTLPMSKQVDLFEDYLLRLRGIVGDKEASRIVARSLIFISSGTNDFSHYYRSPKKRKMEIGDYQDIVLQMVQVYVKELYDLGGRQFCLAGLPPFGCTPIQITLSGDPGRACVDEQNWDAHVYNSKLQRLLAKLQGSLHGSRIVYVDAYRALVEILENPAKYGFTETSRGCCGTGLREVALFCNAFTPICKNVSSYVFYDAVHPTERVYMLVNDYIVNDVIPQF

SEQ ID NO: 22484 - protein, 219 aa, Zea mays subsp. mays
  misc_feature (1)..(219): Ceres Seq. ID no. 12408978
MSKQVDLFEDYLLRLRGIVGDKEASRIVARSLIFISSGTNDFSHYYRSPKKRKMEIGDYQDIVLQMVQVYVKELYDLGGRQFCLAGLPPFGCTPIQITLSGDPGRACVDEQNWDAHVYNSKLQRLLAKLQGSLHGSRIVYVDAYRALVEILENPAKYGFTETSRGCCGTGLREVALFCNAFTPICKNVSSYVFYDAVHPTERVYMLVNDYIVNDVIPQF

SEQ ID NO: 22485 - DNA, 1177 bp, Zea mays subsp. mays
  misc_feature (1)..(1177): Ceres Seq. ID no. 12408979
atagcgtatcacaaatagaatacaaccaatggctagtcgtccgagcacattccgatttgccgtcgtggccgtgctgtcgaccctgccacttgttgccagctctgcctccggccacgagaaccccgagcccgtggtcagggactcgccgcagaacggcaccaacaggaggtacctgtgggcgtcgtcgtcggcgcgaggctacggcggctggtcctccggcggcgcgacgtggtacgggagccctaacggcgccggcaccgacggtggcgcttgtggttatcacggtgacgtcagccagcgcccattcaagtcgatgatcgcggccggcggcccttccctcttcaagaacggcaaaggatgcggcgcatgctaccaaattaggtgcacgggcaacagagcctgctccggccggccagtgaccgtcaccgtcaccgactcgtgccccggcggtgcctgcctcgccgagtcggcgcacttcgacatgagcggcacggccttcggcgccatggccaacaaccgaggcatggccgaccgcctccgctccgccggaatcctcaagatccaatacaggagggtggcctgcaactacaacggcaggaccgtcagcttcaaggtggacgcggggtctaacccgtactacctcgccgttctcatcgagtacgtggccggcgacggcgacatctccgcggcggacatcatgcaagccggctgcgactcgtgggcgccgatgcagcagtcatggggcgccgtgtggcgcgtcaactccaacaacggccagccactccgtgcgcccttctcggtccgcgtcacctcgggctccggcaaggtcctcgtcgtcaggaacgccatccccgccgggtggaccgccgggaggacctaccggtccaccgtgaactacggctactgaggcagtgcgtgcgtgcgtatctcttcttcggtcttgggttttataagtgcgtccggaaaacgcgagaggccgatctggaagaggaggtttaggtatattcgtacgcgttcgatgtaacgacgtcttggtgcctccctccacacagaccgcagtgtgttttccttgtgatgtactaatgtttttatattagtatcggttgctctaacccgacagtaatatcaaacatcacttcatgttattcttctaaaccgataatgatatctttatttg

SEQ ID NO: 22486 - protein, 292 aa, Zea mays subsp. mays
  misc_feature (1)..(292): Ceres Seq. ID no. 12408980
MASRPSTFRFAVVAVLSTLPLVASSASGHENPEPVVRDSPQNGTNRRYLWASSSARGYGGWSSGGATWYGSPNGAGTDGGACGYHGDVSQRPFKSMIAAGGPSLFKNGKGCGACYQIRCTGNRACSGRPVTVTVTDSCPGGACLAESAHFDMSGTAFGAMANNRGMADRLRSAGILKIQYRRVACNYNGRTVSFKVDAGSNPYYLAVLIEYVAGDGDISAADIMQAGCDSWAPMQQSWGAVWRVNSNNGQPLRAPFSVRVTSGSGKVLVVRNAIPAGWTAGRTYRSTVNYGY

SEQ ID NO: 22487 - protein, 197 aa, Zea mays subsp. mays
  misc_feature (1)..(197): Ceres Seq. ID no. 12408981
MIAAGGPSLFKNGKGCGACYQIRCTGNRACSGRPVTVTVTDSCPGGACLAESAHFDMSGTAFGAMANNRGMADRLRSAGILKIQYRRVACNYNGRTVSFKVDAGSNPYYLAVLIEYVAGDGDISAADIMQAGCDSWAPMQQSWGAVWRVNSNNGQPLRAPFSVRVTSGSGKVLVVRNAIPAGWTAGRTYRSTVNYGY

SEQ ID NO: 22488 - DNA, 1555 bp, Zea mays subsp. mays
  misc_feature (1)..(1555): Ceres Seq. ID no. 12408986
ttctgcaagccttgctccatttgcgactcgcgagctcaccttccacaccctacctactcctccactctgagctcacaccaaacagcccgtgcaccaaggccaccattcacctccaccaacaacaaacgggaactcttcacagcttcgcacctcgcgtcacaacaccaagacgcacgtaggagggaacctcaagcttcagtcgtccatggctcagcagcaaacaaatcctgaagaggtggtcctcgggcaggaggtcggggccgcgagggtggccactctcaaccgcccgcgccagctcaacggcatctccgacagagtggtgtacctcctcgcacagtttctggagaaatgggagaaggatgagaacgccaaattcgtcatctttaagggtgctgggcgtgcattttctgctggtggggacctaaagatgttttatgaagggaaatcaaatgattcctgcctcgaggttgtgtatagaatgtattggctttgctaccacattcacacgtacaagaaaaccatggttgctcttgttaatgggcttgtcatgggtggtggcgctgcaatggttgcgccactaaagtttgcagttgtcacagagaaaacaatctttgctactcctgaggctagtgttggattgcacacagattgtagcttttcctacatccattcccggctccctggatatttaggcgagtatctggctttaactggtgctagactgaatgcgaaggaaatgatttctgctggtcttgctactcattttgtcagttctgaaaaattggaagaacttgaaaaacgtctactggatttggacacaggtgctgagtctgcagtccgagctgttattgaagaattttcaacagatgttcaaactgatgaagatagtatattgaataagctttcaactatcaacaaatgcttctctgcagagactgttgaggatatcataaaagcatttgaatcagaagcgagcatagacggaaaccaatggatagctccagtcctaaagggtctgagaagatcatctccaactgcactgaagatcaccctgagatcgatcagagaaggtcgaaaacagagtttgcctgaatgtttgactaaggaatttaggcttacaatgaatatactgcggtctgttgtcaatggggatgtttatgagggcattagagctcttagcatcgataaagacaatgcccctaagtggaatcccactacccttgaggaggtgaagtacgaggacatcgaccgtctgttccagccgttcagtccggagctggaacttcaggtcccatctgatgattccaacaggtggagcggcaaatacgagaacacggtctatggcagagcttcccagtgactgtatacaagatcccccagccttttgttattttcatccgaaccactgcattacggaatattcagtttgcggcacgtgtgtatttcgagtgtttgtgtagcgcgacgttccaatgtatgaactgttgcaaaggttacacgatgacatgaagtttgatccaacaccaaaaccatctattagatgggaaagttctgc

SEQ ID NO: 22489 - protein, 384 aa, Zea mays subsp. mays
  misc_feature (1)..(384): Ceres Seq. ID no. 12408987
MAQQQTNPEEVVLGQEVGAARVATLNRPRQLNGISDRVVYLLAQFLEKWEKDENAKFVIFKGAGRAFSAGGDLKMFYEGKSNDSCLEVVYRMYWLCYHIHTYKKTMVALVNGLVMGGGAAMVAPLKFAVVTEKTIFATPEASVGLHTDCSFSYIHSRLPGYLGEYLALTGARLNAKEMISAGLATHFVSSEKLEELEKRLLDLDTGAESAVRAVIEEFSTDVQTDEDSILNKLSTINKCFSAETVEDIIKAFESEASIDGNQWIAPVLKGLRRSSPTALKITLRSIREGRKQSLPECLTKEFRLTMNILRSVVNGDVYEGIRALSIDKDNAPKWNPTTLEEVKYEDIDRLFQPFSPELELQVPSDDSNRWSGKYENTVYGRASQ

SEQ ID NO: 22490 - protein, 310 aa, Zea mays subsp. mays
  misc_feature (1)..(310): Ceres Seq. ID no. 12408988
MFYEGKSNDSCLEVVYRMYWLCYHIHTYKKTMVALVNGLVMGGGAAMVAPLKFAVVTEKTIFATPEASVGLHTDCSFSYIHSRLPGYLGEYLALTGARLNAKEMISAGLATHFVSSEKLEELEKRLLDLDTGAESAVRAVIEEFSTDVQTDEDSILNKLSTINKCFSAETVEDIIKAFESEASIDGNQWIAPVLKGLRRSSPTALKITLRSIREGRKQSLPECLTKEFRLTMNILRSVVNGDVYEGIRALSIDKDNAPKWNPTTLEEVKYEDIDRLFQPFSPELELQVPSDDSNRWSGKYENTVYGRASQ

SEQ ID NO: 22491 - protein, 293 aa, Zea mays subsp. mays
  misc_feature (1)..(293): Ceres Seq. ID no. 12408989
MYWLCYHIHTYKKTMVALVNGLVMGGGAAMVAPLKFAVVTEKTIFATPEASVGLHTDCSFSYIHSRLPGYLGEYLALTGARLNAKEMISAGLATHFVSSEKLEELEKRLLDLDTGAESAVRAVIEEFSTDVQTDEDSILNKLSTINKCFSAETVEDIIKAFESEASIDGNQWIAPVLKGLRRSSPTALKITLRSIREGRKQSLPECLTKEFRLTMNILRSVVNGDVYEGIRALSIDKDNAPKWNPTTLEEVKYEDIDRLFQPFSPELELQVPSDDSNRWSGKYENTVYGRASQ

SEQ ID NO: 22492 - DNA, 1620 bp, Zea mays subsp. mays
  misc_feature (1)..(1620): Ceres Seq. ID no. 12408990
actgtactaaaccgcgaggaaaagtagcaaagaaattacaagggggtggacgcgcggggggcaagtcgtctccttcgatttcgttcttgcctctttgcctctctcaaggtctgctcaaactcaaagtggattcggcagaacacgcatggcgtagagcgcggggagcaagagatttcctagcttcaagaacctggaagaacaagtcgaggatccgtcgtcgagcccgactgttctaagagaaagtaattagcaagcagctctcgattatactgtattatttatcgaaaccctatctaagctagtagcaagctagctagctagaagaggaggaggaagctggcgaactggtggtgggacgaggggcggggcggcctgccggagccatcccttggcaagaaccaagaagaaatggcaccttcctccaaggacggcgccaccgccaccgagcagccgacgagcggcgacgacgaccgggagaacggcggcacgggcgagcccaaggaaggcgcggtggtggcgggcaaccggcggccccgcgggcggccgccggggtccaagaacaagcccaagccgcccatcttcgtgacgcgcgacagccccaacgcgctgcgcagccacgtgatggaggtggccggcggcgccgacgtggccgagtccatcgcccacttcgcgcgccgcaggcagcgcggcgtgtgcgtgctcagcggcgcgggcaccgtcgccgacgtggcgctccgccagcccgcggctccgggcgccgtggtcgccctccgcggccgcttcgagatcctctcgctcaccggcacgttcctgccgggccccgcgccgccgggctccacggggctcaccgtgtacctcgcgggcggccaggggcaggtcgtcggcggcagcgtcgtcggcacgctcaccgcggcggggcccgtcatggtgatggcgtccacgttcgccaacgccacctacgagaggctgccgctggacgacgccgacgaggagcccgccgggcagcaggcggcgcagctgcctcccggaccgggcggagggcagcctatggtaatgggcgggatggccgacccctcagcggtgccaatgttcggcggcgccggcgntgtgccgccaagcctcatgccagcaggggccgcagccgcctcctccggtgcgggcctgcagctcgggcacgaccgacttgcatgggctcatgcacggccaccgccatactaggaagccggggaggatgcatcatccatgaccgaggaaattgatgaattagaaatggaggatcgttcagcgcaacaacagctagcagcagctcaaggacgactgccactcaccatcatatagtaactagaaccgaacgaagatcgaattaagcgctagcttccaggagctaataaaactctcttcgatcaattctacctattacagtactctgctaagaaggtaaactacttatagtgctatatatgtatgtatattactacactgctactgcatgcatgtgactgtgtggctgtgccaaatgtcagcgcaagatacgatggagcttgcattgttttttcccattgtaatgtttgatttatattaattattagatacagcatgataaatagatgatggatgatt

SEQ ID NO: 22493 - protein, 269 aa, Zea mays subsp. mays
  misc_feature (1)..(269): Ceres Seq. ID no. 12408991
  misc_feature (233)..(233): Xaa is any aa, unknown or other
MAPSSKDGATATEQPTSGDDDRENGGTGEPKEGAVVAGNRRPRGRPPGSKNKPKPPIFVTRDSPNALRSHVMEVAGGADVAESIAHFARRRQRGVCVLSGAGTVADVALRQPAAPGAVVALRGRFEILSLTGTFLPGPAPPGSTGLTVYLAGGQGQVVGGSVVGTLTAAGPVMVMASTFANATYERLPLDDADEEPAGQQAAQLPPGPGGGQPMVMGGMADPSAVPMFGGAGXVPPSLMPAGAAAASSGAGLQLGHDRLAWAHARPPPY

SEQ ID NO: 22494 - protein, 198 aa, Zea mays subsp. mays
  misc_feature (1)..(198): Ceres Seq. ID no. 12408992
  misc_feature (162)..(162): Xaa is any aa, unknown or other
MEVAGGADVAESIAHFARRRQRGVCVLSGAGTVADVALRQPAAPGAVVALRGRFEILSLTGTFLPGPAPPGSTGLTVYLAGGQGQVVGGSVVGTLTAAGPVMVMASTFANATYERLPLDDADEEPAGQQAAQLPPGPGGGQPMVMGGMADPSAVPMFGGAGXVPPSLMPAGAAAASSGAGLQLGHDRLAWAHARPPPY

SEQ ID NO: 22495 - DNA, 1521 bp, Zea mays subsp. mays
  misc_feature (1)..(1521): Ceres Seq. ID no. 12409001
agaaatctccgtgcgtgtttggccgaaatccacgggagggtgctcgtctttgctgagctgctccggcctccggagcggagctctgcctacttaagttcaggcttgttccgccatccgaggacaagattcggagcgtcgccgaagggaggcgatgaaggggaaaggcggggcgatggaccgcaggtcctccgccaggtggagggtgttgctgctctgcgcattcagcttcggcctcggcatgctcttcaccgaccggttctggacagcaccggatagcagtaaccatatcatgtctcaaagccggaggcaagagcaagagctccaacttgtatcagaggattgcagcacaaagaggaagcatggggaagacaaggatataatgggagaggtaaccaagacccatgaagctatacaatcattggataagtccatctcaacgctgcagatggagcttgcagcaaagcggagcacacttgagctgctccgatctagtggttcaccagtaacctttgaaactagccaaccaaggaaaaaggcatttgttgtcattggagtcaatactgcattcagcagccgcaagcgccgtgattctgtccgggagacatggatgcctcaaggagaaaaactgcaacaattagaagaacaaaagggaatagtaatccgcttcactatcgggcacagtgctacatctgacagtatactggacaaagctatagattcagaggacgctcagcatcatgactttcttaggctggaccatgttgagggataccatgaactctcagctaagacaaaaatattcttctctactgctcttggcatctgggatgctgacttctacgtcaaggttgatgatgatgtgcatgtaaacttaggaatgcttgccactacccttgctcggcataaattgaaaccaagaacttatattggctgcatgaagtcaggcccagttctcgctgacaagaatgttaagtaccatgaacctgagtactggaaatttggggaggaaggaaataaatacttccgtcatgccacggggcagatatatgccatttcgaaagatctcgctacttatatttcaatcaaccagcctatcttgcacaaatatgcaaatgaagacgtgtcgcttggatcatggttcattggtttggaagttaatcacattgatgaaaggaacatgtgctgtggaactccaccagattgtgagtggaaagggcaagctggtaatgtctgtgtagcgtccttcgattggagctgcagtggcatatgcaagtctgttgagaggatcaaagatgtacatgctcgctgtggtgagggggattcagcagtttggagtgctcttttctagcgcataccttctttgcccgtaaatatgtagcatacttgctaagctctcgcggcggacaccataggcaactcaagtaaacttgacaaaaaccaaagatcgtggagtatgatctgaaactgcagaaacagtatgttgcttggaaatattctgcaacaacataattttgctccggc

SEQ ID NO: 22496 - protein, 398 aa, Zea mays subsp. mays
  misc_feature (1)..(398): Ceres Seq. ID no. 12409002
MKGKGGAMDRRSSARWRVLLLCAFSFGLGMLFTDRFWTAPDSSNHIMSQSRRQEQELQLVSEDCSTKRKHGEDKDIMGEVTKTHEAIQSLDKSISTLQMELAAKRSTLELLRSSGSPVTFETSQPRKKAFVVIGVNTAFSSRKRRDSVRETWMPQGEKLQQLEEQKGIVIRFTIGHSATSDSILDKAIDSEDAQHHDFLRLDHVEGYHELSAKTKIFFSTALGIWDADFYVKVDDDVHVNLGMLATTLARHKLKPRTYIGCMKSGPVLADKNVKYHEPEYWKFGEEGNKYFRHATGQIYAISKDLATYISINQPILHKYANEDVSLGSWFIGLEVNHIDERNMCCGTPPDCEWKGQAGNVCVASFDWSCSGICKSVERIKDVHARCGEGDSAVWSALF

SEQ ID NO: 22497 - protein, 391 aa, Zea mays subsp. mays
  misc_feature (1)..(391): Ceres Seq. ID no. 12409003
MDRRSSARWRVLLLCAFSFGLGMLFTDRFWTAPDSSNHIMSQSRRQEQELQLVSEDCSTKRKHGEDKDIMGEVTKTHEAIQSLDKSISTLQMELAAKRSTLELLRSSGSPVTFETSQPRKKAFVVIGVNTAFSSRKRRDSVRETWMPQGEKLQQLEEQKGIVIRFTIGHSATSDSILDKAIDSEDAQHHDFLRLDHVEGYHELSAKTKIFFSTALGIWDADFYVKVDDDVHVNLGMLATTLARHKLKPRTYIGCMKSGPVLADKNVKYHEPEYWKFGEEGNKYFRHATGQIYAISKDLATYISINQPILHKYANEDVSLGSWFIGLEVNHIDERNMCCGTPPDCEWKGQAGNVCVASFDWSCSGICKSVERIKDVHARCGEGDSAVWSALF

SEQ ID NO: 22498 - protein, 369 aa, Zea mays subsp. mays
  misc_feature (1)..(369): Ceres Seq. ID no. 12409004
MLFTDRFWTAPDSSNHIMSQSRRQEQELQLVSEDCSTKRKHGEDKDIMGEVTKTHEAIQSLDKSISTLQMELAAKRSTLELLRSSGSPVTFETSQPRKKAFVVIGVNTAFSSRKRRDSVRETWMPQGEKLQQLEEQKGIVIRFTIGHSATSDSILDKAIDSEDAQHHDFLRLDHVEGYHELSAKTKIFFSTALGIWDADFYVKVDDDVHVNLGMLATTLARHKLKPRTYIGCMKSGPVLADKNVKYHEPEYWKFGEEGNKYFRHATGQIYAISKDLATYISINQPILHKYANEDVSLGSWFIGLEVNHIDERNMCCGTPPDCEWKGQAGNVCVASFDWSCSGICKSVERIKDVHARCGEGDSAVWSALF

SEQ ID NO: 22499 - DNA, 2067 bp, Zea mays subsp. mays
  misc_feature (1)..(2067): Ceres Seq. ID no. 12409009
ccatccagtcctggagcctgcgcggctgcgccttgcatcgcatctccgtcgtcgtcctcgcccacggaatccgtccaattccccacgccgcccgtcgtccttttctataaaattcactccgccaccaaatctcgaatccccatcgcgctgcttttccaccgaccccgacgccgacgccgacgccaccgccgctccctccccagtccccactccccttcccgggccgcggagcagagatccggggcgccgcgcgatggcgaacatcgacatggcgaagatcctggcggacctggaccgcggcgccagcggcggcgacgcgcgggtgcccaagaccaagctcgtatgcacgctcggcccggcctcccgcaccgtgcccatgctcgagaagctgctccgcgccggcatgaacgtcgcgcgcttcaacttctcccacggcacccacgagtaccaccaggagacgctcgacaacctccgccaggccatgcacaacaccggcatcctctgcgccgtcatgctcgacaccaagggtcctgagatccgtacagggtttttgaaggatggtaaaccgattaagctaaccaagggtcaagaaatcactgtcaccactgattatgatatcaagggtgacgaaaatacgattgctatgagttacaagaaactgcctgttgacgtgaagcctggaaatgtcatactctgcgcagatggtactatctctctggccgttctatcttgtgatcctgatgctggaactgtgaggtgtagatgcgagaacactgcaatgcttggtgagagaaagaactgcaatctgccaggaattgttgtggatcttcctacattgactgagaaagataaagaagacattttgggctggggtgttccaaatgatattgacatgattgctctatcctttgtccgtaaaggatcagatttggtgactgtgagacaggttcttgggcagcatgccaagcgcattaagttgatgtcaaaggttgaaaaccaagagggtgttgtaaactttgatgagatcttgagggagactgatgcttttatggttgctagaggtgatcttggaatggagattcctgttgagaagattttccttgcgcagaagatgatgatctacaagtgcaacattgctggcaaacctgttgttaccgctacccagatgctcgagtcgatgatcaaatcccctaggcccacccgcgcagaggccactgacgttgcaaatgctgttcttgatggaactgactgtgtcatgctcagtggtgagagtgctgctggagcctaccccgaggtggctgtgaagatcatggctcgtatctgcatcgaggcagagtcttccctggaccacgaggcagttttcaaggccatgatcaggtccgcgcctcttccaatgagccctctggagtctcttgcgtcatctgctgtgcgaactgccaacaaggccaaggccgcactgatcgtcgtcttgactcgcggtggcaccacggccaaactggtcgccaagtacccccagggttcccatcctctctgttgtggtacccgtgctaacgacggattctttcgactggaccatcagctccgagggcccagctaggcacagcctgatctatagaggcctcattcccctcctcgctgagggctccgcgaaggctacggattcagagtcaaccgaggtgatcctggaggctgcgctcaagtcggccgtgcagaagcaactttgcaagcctggtgatgccattgtggctctccatcgtatcggcgtcgcctccgtcatcaagatctgcatcgtgaagtgatcaccgtgacttgactcctaagtcccaggggggtggttctcaccgctgggacctatgaaacaacttttctgcctcctttttaactgcatttttcggagacagataattactgtatgttgtaagcccgcttctgttgtttgcagctgcaagatgtctttttttttgtttacatagtttttgagctggtaaatgaggagggagaggactccattgatgttagtggtaataagatttgtatctacggagttcagttaaaaggcttttctac

SEQ ID NO: 22500 - protein, 531 aa, Zea mays subsp. mays
  misc_feature (1)..(531): Ceres Seq. ID no. 12409010
HPVLEPARLRLASHLRRRPRPRNPSNSPRRPSSFSIKFTPPPNLESPSRCFSTDPDADADATAAPSPVPTPLPGPRSRDPGRRAMANIDMAKILADLDRGASGGDARVPKTKLVCTLGPASRTVPMLEKLLRAGMNVARFNFSHGTHEYHQETLDNLRQAMHNTGILCAVMLDTKGPEIRTGFLKDGKPIKLTKGQEITVTTDYDIKGDENTIAMSYKKLPVDVKPGNVILCADGTISLAVLSCDPDAGTVRCRCENTAMLGERKNCNLPGIVVDLPTLTEKDKEDILGWGVPNDIDMIALSFVRKGSDLVTVRQVLGQHAKRIKLMSKVENQEGVVNFDEILRETDAFMVARGDLGMEIPVEKIFLAQKMMIYKCNIAGKPVVTATQMLESMIKSPRPTRAEATDVANAVLDGTDCVMLSGESAAGAYPEVAVKIMARICIEAESSLDHEAVFKAMIRSAPLPMSPLESLASSAVRTANKAKAALIVVLTRGGTTAKLVAKYPQGSHPLCCGTRANDGFFRLDHQLRGPS

SEQ ID NO: 22501 - protein, 447 aa, Zea mays subsp. mays
  misc_feature (1)..(447): Ceres Seq. ID no. 12409011
MANIDMAKILADLDRGASGGDARVPKTKLVCTLGPASRTVPMLEKLLRAGMNVARFNFSHGTHEYHQETLDNLRQAMHNTGILCAVMLDTKGPEIRTGFLKDGKPIKLTKGQEITVTTDYDIKGDENTIAMSYKKLPVDVKPGNVILCADGTISLAVLSCDPDAGTVRCRCENTAMLGERKNCNLPGIVVDLPTLTEKDKEDILGWGVPNDIDMIALSFVRKGSDLVTVRQVLGQHAKRIKLMSKVENQEGVVNFDEILRETDAFMVARGDLGMEIPVEKIFLAQKMMIYKCNIAGKPVVTATQMLESMIKSPRPTRAEATDVANAVLDGTDCVMLSGESAAGAYPEVAVKIMARICIEAESSLDHEAVFKAMIRSAPLPMSPLESLASSAVRTANKAKAALIVVLTRGGTTAKLVAKYPQGSHPLCCGTRANDGFFRLDHQLRGPS

SEQ ID NO: 22502 - protein, 442 aa, Zea mays subsp. mays
  misc_feature (1)..(442): Ceres Seq. ID no. 12409012
MAKILADLDRGASGGDARVPKTKLVCTLGPASRTVPMLEKLLRAGMNVARFNFSHGTHEYHQETLDNLRQAMHNTGILCAVMLDTKGPEIRTGFLKDGKPIKLTKGQEITVTTDYDIKGDENTIAMSYKKLPVDVKPGNVILCADGTISLAVLSCDPDAGTVRCRCENTAMLGERKNCNLPGIVVDLPTLTEKDKEDILGWGVPNDIDMIALSFVRKGSDLVTVRQVLGQHAKRIKLMSKVENQEGVVNFDEILRETDAFMVARGDLGMEIPVEKIFLAQKMMIYKCNIAGKPVVTATQMLESMIKSPRPTRAEATDVANAVLDGTDCVMLSGESAAGAYPEVAVKIMARICIEAESSLDHEAVFKAMIRSAPLPMSPLESLASSAVRTANKAKAALIVVLTRGGTTAKLVAKYPQGSHPLCCGTRANDGFFRLDHQLRGPS

SEQ ID NO: 22503 - DNA, 1636 bp, Zea mays subsp. mays
  misc_feature (1)..(1636): Ceres Seq. ID no. 12409017
ccccaaaccctaccgccgatccggccccagatcgccatggccgcgcccaacagcaatgacgccgccagcgccagcggcaccggcccggctggcgaggaggacatctccatcgaggcgttggcgcggcgcgtgcaagagcacatgaccctcaactcgaaccccgccgctcgccgccacaagttctgggagacacagcccgtcggccagttccgcgacgccgccgacgcatcgctaccgaacggccccatcgagccgcccacgccactctccgaggtgcgcgccgacccctacccactgcccgccgccttcgagtggctcacctgcgacctcgatgacgacgcgctcctcgccgacctctactcgttgctcgcccacaactacgtcgaggatgacgagaacatgttccgcttcaactactccccggccttcctccgctgggcgctcaagccgccgtccttcttccgggcctggcacatcggcgttcgcgccaaggagtccaagaagctcgtcgccttcatctcgggcgtccccgcccgcatccgcgctcgcgacgacgtcgtccgcatggccgagatcaactttctctgcgtccacaagaagctccgatccaagcgcctggcacccgtgctcatccgggaggtcacccgccgcgtccaccaggagaacatctggcaggctgcatacaccgcggggatcgtcctcccaacccccatcaccacctgccgctactggcaccgatccctcaaccccaagaagcttatcgatgttggattctctcgccttggtccgcgcatgactatgagccgcacggtccggctatacaagctgcctgatgcgccgctcacccctgggtttcgcaggatggagctgcgggatgtcgctgcagtcacacggctgctgagggcataccttgcgaggtttgtggtggcaccggattttgatgaggtagatgtagagcactggttgctgccccaagaggatgtggtggacagctaccttgtggagagccctgagacgcatgaggtcacggatttctgcagcttttacacactgccctcatcagtgttgaacaatgctaactatgcgacgctcaaagcggcatactcatattacaacgtttcaaccaaaactccattgcagcagctgatgaatgatgctcttattgttgccaaacggaagaattatgatgtgttcaatgctctcgatgtcatggagaatgagtcattcctcaaggagctcaagtttggtcctggagatgggcagctccactattacctctacaattaccgtattcgcaatggcatcaagccctctgagcttggtcttgtgctgttatagggcagtctaatcaggacagtcctgagtttacaccttccaggtctcactgtgcaatcccagtggtttcctcattttgtctattgtggtagtggtttctttgatatgattgccatgcccattgatgggagtccaagatgatttgcaaacaaggagactggaattagaaatcctttccttaatttaaggttattattcccattagtgacattttgtgtgcgtggtccacaacttgtatgctggcattgattttactgagaaattttgatacaacttgtgttatcgaagttgtttgtgtgct

SEQ ID NO: 22504 - protein, 445 aa, Zea mays subsp. mays
  misc_feature (1)..(445): Ceres Seq. ID no. 12409018
PQTLPPIRPQIAMAAPNSNDAASASGTGPAGEEDISIEALARRVQEHMTLNSNPAARRHKFWETQPVGQFRDAADASLPNGPIEPPTPLSEVRADPYPLPAAFEWLTCDLDDDALLADLYSLLAHNYVEDDENMFRFNYSPAFLRWALKPPSFFRAWHIGVRAKESKKLVAFISGVPARIRARDDVVRMAEINFLCVHKKLRSKRLAPVLIREVTRRVHQENIWQAAYTAGIVLPTPITTCRYWHRSLNPKKLIDVGFSRLGPRMTMSRTVRLYKLPDAPLTPGFRRMELRDVAAVTRLLRAYLARFVVAPDFDEVDVEHWLLPQEDVVDSYLVESPETHEVTDFCSFYTLPSSVLNNANYATLKAAYSYYNVSTKTPLQQLMNDALIVAKRKNYDVFNALDVMENESFLKELKFGPGDGQLHYYLYNYRIRNGIKPSELGLVLL

SEQ ID NO: 22505 - protein, 433 aa, Zea mays subsp. mays
  misc_feature (1)..(433): Ceres Seq. ID no. 12409019
MAAPNSNDAASASGTGPAGEEDISIEALARRVQEHMTLNSNPAARRHKFWETQPVGQFRDAADASLPNGPIEPPTPLSEVRADPYPLPAAFEWLTCDLDDDALLADLYSLLAHNYVEDDENMFRFNYSPAFLRWALKPPSFFRAWHIGVRAKESKKLVAFISGVPARIRARDDVVRMAEINFLCVHKKLRSKRLAPVLIREVTRRVHQENIWQAAYTAGIVLPTPITTCRYWHRSLNPKKLIDVGFSRLGPRMTMSRTVRLYKLPDAPLTPGFRRMELRDVAAVTRLLRAYLARFVVAPDFDEVDVEHWLLPQEDVVDSYLVESPETHEVTDFCSFYTLPSSVLNNANYATLKAAYSYYNVSTKTPLQQLMNDALIVAKRKNYDVFNALDVMENESFLKELKFGPGDGQLHYYLYNYRIRNGIKPSELGLVLL

SEQ ID NO: 22506 - protein, 398 aa, Zea mays subsp. mays
  misc_feature (1)..(398): Ceres Seq. ID no. 12409020
MTLNSNPAARRHKFWETQPVGQFRDAADASLPNGPIEPPTPLSEVRADPYPLPAAFEWLTCDLDDDALLADLYSLLAHNYVEDDENMFRFNYSPAFLRWALKPPSFFRAWHIGVRAKESKKLVAFISGVPARIRARDDVVRMAEINFLCVHKKLRSKRLAPVLIREVTRRVHQENIWQAAYTAGIVLPTPITTCRYWHRSLNPKKLIDVGFSRLGPRMTMSRTVRLYKLPDAPLTPGFRRMELRDVAAVTRLLRAYLARFVVAPDFDEVDVEHWLLPQEDVVDSYLVESPETHEVTDFCSFYTLPSSVLNNANYATLKAAYSYYNVSTKTPLQQLMNDALIVAKRKNYDVFNALDVMENESFLKELKFGPGDGQLHYYLYNYRIRNGIKPSELGLVLL

SEQ ID NO: 22507 - DNA, 1124 bp, Zea mays subsp. mays
  misc_feature (1)..(1124): Ceres Seq. ID no. 12409031
atgagactctgaggctctgagctgagcgcgctccgtttcagtttcagagagcggttgctgtgcatgtgctggtgctgcgacttgactgttcgagcacagctgcgtctgcgtccccatggtgtagataggaggggaggaagcaggaagagggggaggcagcctgtgtgtgtgagagagaggcagaagtagtgaggaaggaagcaggaagatggcttggaatgcccgcttcggcgatgacgaggaaggcagcggccttgagctcagcctgggccttccgggctacttctccgggtcgccagaccaagccgcaggtttcgaggagaaagcgagccggggttctgctgctgctcctcctcctcctcctcccgctgctgctcgagcgaaaggaagcgacggcttcaaggcgaggccggcggcagctgctccggtcgtgggatggccgccggtgcgcgcgttccggcggaacctcgccacgtcgtcctccaagccgtcgagccacggaggcaaggagcccgccgcgagcgccgacggcggcaacaagggcctgttcgtcaaggtcaacatggacggcgtccccatcggccgtaagctcgacctggcggcgcacgccggctacgacacgctctccgccgccgttgacagcctcttccgcggcctcttcgctgctcaagcggcggggccaggcggggagcagcaggctgtcgcgggtatcctgagcggcggcggcggcggcgagcacacgctggtgtacgaggacgacgagggcgaccagatgctggtcggggacgtgccgtggccgatgttcgtcgccaccgctaggcgtctgcgcgtgctcaagagctccgacctgagcccgtcgtcgctgagggcagcgagagccgcagctgagtgctgaacgcaccctggacctggagcctgaacgttttgcggcctctccggagggcccatccgtgtaaaatcgaagcagttttcgtcgattttgcttttagcaagggattatatgtcctagtgatcaagtagggaagcaagaatctatctagaggtgatgaggggtgtcgtagaaccatgcaatcctagtgctagattttttttctgaaagtttaacaaggtttcttggcgctggc

SEQ ID NO: 22508 - protein, 228 aa, Zea mays subsp. mays
  misc_feature (1)..(228): Ceres Seq. ID no. 12409032
MAWNARFGDDEEGSGLELSLGLPGYFSGSPDQAAGFEEKASRGSAAAPPPPPPAAARAKGSDGFKARPAAAAPVVGWPPVRAFRRNLATSSSKPSSHGGKEPAASADGGNKGLFVKVNMDGVPIGRKLDLAAHAGYDTLSAAVDSLFRGLFAAQAAGPGGEQQAVAGILSGGGGGEHTLVYEDDEGDQMLVGDVPWPMFVATARRLRVLKSSDLSPSSLRAARAAAEC

SEQ ID NO: 22509 - protein, 165 aa, Zea mays subsp. mays
  misc_feature (1)..(165): Ceres Seq. ID no. 12409033
MPASAMTRKAAALSSAWAFRATSPGRQTKPQVSRRKRAGVLLLLLLLLLPLLLERKEATASRRGRRQLLRSWDGRRCARSGGTSPRRPPSRRATEARSPPRAPTAATRACSSRSTWTASPSAVSSTWRRTPATTRSPPPLTASSAASSLLKRRGQAGSSRLSRVS

SEQ ID NO: 22510 - protein, 160 aa, Zea mays subsp. mays
  misc_feature (1)..(160): Ceres Seq. ID no. 12409034
MTRKAAALSSAWAFRATSPGRQTKPQVSRRKRAGVLLLLLLLLLPLLLERKEATASRRGRRQLLRSWDGRRCARSGGTSPRRPPSRRATEARSPPRAPTAATRACSSRSTWTASPSAVSSTWRRTPATTRSPPPLTASSAASSLLKRRGQAGSSRLSRVS

SEQ ID NO: 22511 - DNA, 1472 bp, Zea mays subsp. mays
  misc_feature (1)..(1472): Ceres Seq. ID no. 12409035
actctcctctcctctccgcctcaccttgccctgcccgcacacaccacctgtccccgcacggccgcaccgctccgctcccgaggcttagggctccggccgcgctcccttcccttcccggcattcccgatctctcgccgccgcccgcctggccttgatctcgatcgccctcccctctccgctctcgctccggcaggccggcccgggtttgtctcgccgctattgggcctcggcacgctgcgatggtgtcgggcgtgtgcgtggggacggaggggcaggtggaccctgaggcggtggcgccggctgtcgcggaggaggcggtggtgccggcgcccgcgagggaggtcgtggtggggtacgcgctcacgagtaagaaggccaagagcttcctccaacccaagctccggggggctcgccaggaaaaagggaatcttgtttgtcgctattgatcagaaacgcccattgtctgatcaaggtccatttgacattgttcttcataagttgactggaagggggtggcagcaattgctggaggaatatagggaggcacacccagaagttactgttcttgatccacctggcgcaatagcaaacttgcttgatcgccagtctatgcttcaagaagtatctgaattggacctcacagattgtcatggtaaagtacgtgtgcctaagcagctattcgttaatactgatccctcatcaataccagctgcagttaggagggcaggtctctctctcccattggtggcaaaacccttggtggcgaagtcccatgagctatcccttgcttatgatccaacttcactgaccaaacttgagccccccttggttcttcaggaatttgttaaccatggtggcgtcatgtttaaggtgtacattgttggggatgcaataagggttgtacgtcgattttcactcccaaatgttgatgaaggcgatctatcgaacaatgctggggtatttcggtttccaagggtctcttgtgctgcagccagtgcagatgatgcagatcttgaccctcgtgttgctgaacttcctccgagaccattgcttgagatcttggcacgagagctgcgccgacgactgggtcttagactattcaacatcgatatgattagggagcatgggacgcgagatcggttttatgtcatagacatgaactactttcctgggtacggcaaaatgcctggatacgagcacgtgttcaccgacttcctgctgagccttgccaagaaagagtacaagagacgacaaagctatagctcgctaagctcaggcgaatggtgataagcgaggagactactcggcggggcatgtatatgtctatcatccacgatgcgtgcgtacagatgtacttgtgcatgacgagagataatgggtcgtagaagcggagggctgttgtcaggctataactaactgttgctttacatgtgctaactgttgatgcttcagaataaattttgtttgggtgg

SEQ ID NO: 22512 - protein, 428 aa, Zea mays subsp. mays
  misc_feature (1)..(428): Ceres Seq. ID no. 12409036
TLLSSPPHLALPAHTTCPRTAAPLRSRGLGLRPRSLPFPAFPISRRRPPGLDLDRPPLSALAPAGRPGFVSPLLGLGTLRWCRACAWGRRGRWTLRRWRRLSRRRRWCRRPRGRSWWGTRSRVRRPRASSNPSSGGLARKKGILFVAIDQKRPLSDQGPFDIVLHKLTGRGWQQLLEEYREAHPEVTVLDPPGAIANLLDRQSMLQEVSELDLTDCHGKVRVPKQLFVNTDPSSIPAAVRRAGLSLPLVAKPLVAKSHELSLAYDPTSLTKLEPPLVLQEFVNHGGVMFKVYIVGDAIRVVRRFSLPNVDEGDLSNNAGVFRFPRVSCAAASADDADLDPRVAELPPRPLLEILARELRRRLGLRLFNIDMIREHGTRDRFYVIDMNYFPGYGKMPGYEHVFTDFLLSLAKKEYKRRQSYSSLSSGEW

SEQ ID NO: 22513 - protein, 225 aa, Zea mays subsp. mays
  misc_feature (1)..(225): Ceres Seq. ID no. 12409037
MLQEVSELDLTDCHGKVRVPKQLFVNTDPSSIPAAVRRAGLSLPLVAKPLVAKSHELSLAYDPTSLTKLEPPLVLQEFVNHGGVMFKVYIVGDAIRVVRRFSLPNVDEGDLSNNAGVFRFPRVSCAAASADDADLDPRVAELPPRPLLEILARELRRRLGLRLFNIDMIREHGTRDRFYVIDMNYFPGYGKMPGYEHVFTDFLLSLAKKEYKRRQSYSSLSSGEW

SEQ ID NO: 22514 - DNA, 1579 bp, Zea mays subsp. mays
  misc_feature (1)..(1579): Ceres Seq. ID no. 12409052
aaaaagctaaagctgtgtaagcagcagaatccaatccaatccccagctcgcgccgccccctctaatccctcctccgcagacagaggccggcgttcactcgggcatccgcgggacggacggggagcaaagcctcagcggcgagtgcgggcgatgaggtcttcggaggcgtcgtcgcggctcgtgcaggagctcgtgctgtacgccgccagcgccgcgctcagctgcctcgtcctcttcgctggcctccgccacctagaccccaaccgcgcggcttcccagaaggcgcagcagcagaagaaggagatcgccaagcgcctcggccggcccctcgtctccaccacgccctatgaggacgtgattgcgtgcgacgtcatcaaccccgacagcatcgacgtcgaattcgactccatcggcggcctggaccagatcaagcaggcgctctacgagctcgtcatcctgcccctgcgccgccccgagctcttcaccttcggcaagctcctcagcccccagaagggcgtcctcctctatggcccgcccggcacaggcaagaccatgctcgccaaggccatcgccagggagtccggcgccgtcttcatcaatgtcaggatctccaatctcatgagcaagtggttcggggacgcacagaagcttgtggctgctgtctttagtctcgctcacaagctccagcctgctattatcttcattgacgaggtcgacagtttcttggggcagcgacggacaactgaccatgaagccatgactaatatgaagacagagttcatgtccctctgggatggcttcaccactgaccagaatgctcgtgtaatggtcctggctgctacaaacaggccttctgagctagatgaggccatccttaggcgctttactcagatatttgaaattggaattcctgttcagagtgaaaggagcaagatacttcaggttgtgttgaagggagaaaatgtcgagcataatattgattatgatcacattgcaagtttgtgcgagggctttactggatcagacatcctagaactgtgcaagcaggccgcattctatcctatcagggagctgttggacgatgagaaaaaaggtaggaaattagataaacctaggcccttgagacaatcagacttggagagagccttgtcagtgtctagaaagggcaagaaggctgcaagttcagcactgcagtcacctttgtgggtacggccgacagattcagaagacgatcagatctcgtgaaaatctgcagcggagtaaatgcaggcattacgtcgataccgttaggtttccttatgcagtttgcagaggttcaacatatttatatatgtattaattcgttttgcgtttggaacctccaccgttttttttgaagcaaactgcagctggcgaagtggcaagcgtgccctcgtgtttaagttgatcatttcaaaatacgtgccccctgtgggccgtaaaactgagaactctatagttgtctggtcaacagtcggtcttggttgcctctgtattttatcttcggtttgactactctagggtggcgaattacaacatacagtataatgcagaaaggttc

SEQ ID NO: 22515 - protein, 414 aa, Zea mays subsp. mays
  misc_feature (1)..(414): Ceres Seq. ID no. 12409053
KKLKLCKQQNPIQSPARAAPSNPSSADRGRRSLGHPRDGRGAKPQRRVRAMRSSEASSRLVQELVLYAASAALSCLVLFAGLRHLDPNRAASQKAQQQKKEIAKRLGRPLVSTTPYEDVIACDVINPDSIDVEFDSIGGLDQIKQALYELVILPLRRPELFTFGKLLSPQKGVLLYGPPGTGKTMLAKAIARESGAVFINVRISNLMSKWFGDAQKLVAAVFSLAHKLQPAIIFIDEVDSFLGQRRTTDHEAMTNMKTEFMSLWDGFTTDQNARVMVLAATNRPSELDEAILRRFTQIFEIGIPVQSERSKILQVVLKGENVEHNIDYDHIASLCEGFTGSDILELCKQAAFYPIRELLDDEKKGRKLDKPRPLRQSDLERALSVSRKGKKAASSALQSPLWVRPTDSEDDQIS

SEQ ID NO: 22516 - protein, 364 aa, Zea mays subsp. mays
  misc_feature (1)..(364): Ceres Seq. ID no. 12409054
MRSSEASSRLVQELVLYAASAALSCLVLFAGLRHLDPNRAASQKAQQQKKEIAKRLGRPLVSTTPYEDVIACDVINPDSIDVEFDSIGGLDQIKQALYELVILPLRRPELFTFGKLLSPQKGVLLYGPPGTGKTMLAKAIARESGAVFINVRISNLMSKWFGDAQKLVAAVFSLAHKLQPAIIFIDEVDSFLGQRRTTDHEAMTNMKTEFMSLWDGFTTDQNARVMVLAATNRPSELDEAILRRFTQIFEIGIPVQSERSKILQVVLKGENVEHNIDYDHIASLCEGFTGSDILELCKQAAFYPIRELLDDEKKGRKLDKPRPLRQSDLERALSVSRKGKKAASSALQSPLWVRPTDSEDDQIS

SEQ ID NO: 22517 - protein, 230 aa, Zea mays subsp. mays
  misc_feature (1)..(230): Ceres Seq. ID no. 12409055
MLAKAIARESGAVFINVRISNLMSKWFGDAQKLVAAVFSLAHKLQPAIIFIDEVDSFLGQRRTTDHEAMTNMKTEFMSLWDGFTTDQNARVMVLAATNRPSELDEAILRRFTQIFEIGIPVQSERSKILQVVLKGENVEHNIDYDHIASLCEGFTGSDILELCKQAAFYPIRELLDDEKKGRKLDKPRPLRQSDLERALSVSRKGKKAASSALQSPLWVRPTDSEDDQIS

SEQ ID NO: 22518 - DNA, 1295 bp, Zea mays subsp. mays
  misc_feature (1)..(1295): Ceres Seq. ID no. 12409068
aatcaagtgacggttacattcttatcgtaaatagtttttgcacaaatagaacggaaaaaaggaacaatttttgtggaggtgactcctcgcctgtgtcgtcaaatcctccacaccctggactggagtggctgctgctcgtgcccggcgatgagcggcggcgggcccggaggtgcgtgcgggccggactcccgcgtggagaccatctcccggctggcgcagtggcgcatcgataccttcggcccctgctcctaccgccggtcggacccctttaagctcggcatctggaactggtacctgtcggtggagaagagccgctccatctttgtgcgcctcttcccggagcccggccgggtggccaaggagcagccccctctcgcgcgcttcctgctccgcgtctcctgggccggcccgccgcgacgctcctgcgtctcccctgtgcacgagcatctcctgcgtaccagcgatgattttatatggcaagtcgatgcgatgccccatgggcgttttacgattgatgttgagtttctagacctgaggatagccacgaacaatgctacggaatcgtcatcggtgtggccaaacgaaggcatggtgcagaagatcgcgagcaagagcgccctgggctgcctgtcgcacatgctggcggactccatccacgcggacgtgaccatcaacacgacggacggggtgctgaaggcgcacaaggcggtgctggcggcgtgctcccccgtgttcaagagcatgttcgtgcacgacctgagggagaaggagtcgtcgacggtggacatcggcgacatgtgcgtggagtcgtgctcggcgctgctgggtttcgtgtacgggacgatcgagcaggggcagttctggaagcaccggctgccgctgctggcggcggcggacaagtacgggatcggcgacatcaaggactgctgcgaggagagcctgctggaggacataggctcgggcaacgtgctggagcggctccacgtggcgtggctgtaccggctggagcggctgaagaaagggtgcctcacctacctgttcgtgttcgggaagatctatgacgtgagggacgagatgcacggcttcttccaccacgcggaccgcgagctcatgcacgacatgttccaggaggtgctcagcgtgtggaagcccatgtgaatggaagtgtccctttccacgcgagctgtgtgtgtgtgtgtgtgtcgtgcttgttcagtcagcagtgtgtggagagcatgctggttatgcatatttgaaacgaaaaggatgctcagaatttgaatggaagctaaatt

SEQ ID NO: 22519 - protein, 336 aa, Zea mays subsp. mays
  misc_feature (1)..(336): Ceres Seq. ID no. 12409069
MSGGGPGGACGPDSRVETISRLAQWRIDTFGPCSYRRSDPFKLGIWNWYLSVEKSRSIFVRLFPEPGRVAKEQPPLARFLLRVSWAGPPRRSCVSPVHEHLLRTSDDFIWQVDAMPHGRFTIDVEFLDLRIATNNATESSSVWPNEGMVQKIASKSALGCLSHMLADSIHADVTINTTDGVLKAHKAVLAACSPVFKSMFVHDLREKESSTVDIGDMCVESCSALLGFVYGTIEQGQFWKHRLPLLAAADKYGIGDIKDCCEESLLEDIGSGNVLERLHVAWLYRLERLKKGCLTYLFVFGKIYDVRDEMHGFFHHADRELMHDMFQEVLSVWKPM

SEQ ID NO: 22520 - protein, 222 aa, Zea mays subsp. mays
  misc_feature (1)..(222): Ceres Seq. ID no. 12409070
MPHGRFTIDVEFLDLRIATNNATESSSVWPNEGMVQKIASKSALGCLSHMLADSIHADVTINTTDGVLKAHKAVLAACSPVFKSMFVHDLREKESSTVDIGDMCVESCSALLGFVYGTIEQGQFWKHRLPLLAAADKYGIGDIKDCCEESLLEDIGSGNVLERLHVAWLYRLERLKKGCLTYLFVFGKIYDVRDEMHGFFHHADRELMHDMFQEVLSVWKPM

SEQ ID NO: 22521 - protein, 189 aa, Zea mays subsp. mays
  misc_feature (1)..(189): Ceres Seq. ID no. 12409071
MVQKIASKSALGCLSHMLADSIHADVTINTTDGVLKAHKAVLAACSPVFKSMFVHDLREKESSTVDIGDMCVESCSALLGFVYGTIEQGQFWKHRLPLLAAADKYGIGDIKDCCEESLLEDIGSGNVLERLHVAWLYRLERLKKGCLTYLFVFGKIYDVRDEMHGFFHHADRELMHDMFQEVLSVWKPM

SEQ ID NO: 22522 - DNA, 1554 bp, Zea mays subsp. mays
  misc_feature (1)..(1554): Ceres Seq. ID no. 12409080
aaataagcccgctcccacactcctttcttcccctgcctgccgtctctcttccaccttccaccacaagcgccgccgcagccggtgcctgctccttcccgatccccgaggcaaagctgcgactccgcaaccgccgccatggcgttcgagaagatcaaggtctccaacccaatcgtcgagatggacggtgatgagatgaccagggtattctggcagtctatcaaggacaagcttatcctcccatttctggacctggacatcaagtactatgatttggggatactgcaccgtgaagcaactgatgacaaggtcacagtggaggctgcagaggctactctcaagtacaacgtggctattaagtgtgcgaccattactccagatgaaactcgggttaaggagttcaatctgaaacacatgtggaagagcccaaatggcacaattaggaacattataaatggcactgtgttcagagagcctattatatgcaaaaacgttccaagacttgttccaggatggactaagcccatctgcattggaaggcatgccttcggtgatcaataccgagctaccgatgcagttctgaaggggcctgggaagctgaagctagtttttgagggaaaagaagaacagattgatctggaggtattcaacttcactggtgctggaggagttgccttgtctatgtacaacaccgacgagtcaatccgagcttttgctgaggcttctatgacaactgcttatgagaagaaatggccactctaccttagcaccaaaaacacaatcctgaaaaaatatgatggcaggtttaaggacattttccaggaggtctatgaagctgactggaagtccaaatttgaggctgctggaatatggtatgagcatcgtcttattgatgacatggttgcgtacgcgcttaagagcgaaggaggctatgtgtgggcttgcaagaactacgatggagatgtgcagagtgatttcttagctcaaggttttggatctttgggtttgatgacatcagtgttggtgtgccctgatggaaaaaccatcgaagctgaagctgcccatggcacggttacccgtcatttccgtgtccaccagaaaggaggcgaaaccagcacgaacagcattgcttcgatctttgcatggacaagaggacttgccccacagggcaaagctcgacgacaacgctagactactcgacttcgctctcaaactcgaggctgcttgcgttgagaccgtggagtccgggaagatgactaaagatctggcgattcttgtccatggatcttccagcgtcacgagaagccattacctgaacaccgaggagttcatcgacgcagtcgctactgagctccgatcaagactgggagccaactgagcctacaagaaactttgcatggcgactttgaatgcttcgtcaccgtcaccgatctgctagtcgtcttttctgttatgaagaagtgaatgtgcgtcaccgcagtttcgatgcaagctaattatagatgtggtgtcacgtgagcgctcaaaataaaggatacacatgattaaattgttttt

SEQ ID NO: 22523 - protein, 350 aa, Zea mays subsp. mays
  misc_feature (1)..(350): Ceres Seq. ID no. 12409081
MAFEKIKVSNPIVEMDGDEMTRVFWQSIKDKLILPFLDLDIKYYDLGILHREATDDKVTVEAAEATLKYNVAIKCATITPDETRVKEFNLKHMWKSPNGTIRNIINGTVFREPIICKNVPRLVPGWTKPICIGRHAFGDQYRATDAVLKGPGKLKLVFEGKEEQIDLEVFNFTGAGGVALSMYNTDESIRAFAEASMTTAYEKKWPLYLSTKNTILKKYDGRFKDIFQEVYEADWKSKFEAAGIWYEHRLIDDMVAYALKSEGGYVWACKNYDGDVQSDFLAQGFGSLGLMTSVLVCPDGKTIEAEAAHGTVTRHFRVHQKGGETSTNSIASIFAWTRGLAPQGKARRQR

SEQ ID NO: 22524 - protein, 336 aa, Zea mays subsp. mays
  misc_feature (1)..(336): Ceres Seq. ID no. 12409082
MDGDEMTRVFWQSIKDKLILPFLDLDIKYYDLGILHREATDDKVTVEAAEATLKYNVAIKCATITPDETRVKEFNLKHMWKSPNGTIRNIINGTVFREPIICKNVPRLVPGWTKPICIGRHAFGDQYRATDAVLKGPGKLKLVFEGKEEQIDLEVFNFTGAGGVALSMYNTDESIRAFAEASMTTAYEKKWPLYLSTKNTILKKYDGRFKDIFQEVYEADWKSKFEAAGIWYEHRLIDDMVAYALKSEGGYVWACKNYDGDVQSDFLAQGFGSLGLMTSVLVCPDGKTIEAEAAHGTVTRHFRVHQKGGETSTNSIASIFAWTRGLAPQGKARRQR

SEQ ID NO: 22525 - protein, 331 aa, Zea mays subsp. mays
  misc_feature (1)..(331): Ceres Seq. ID no. 12409083
MTRVFWQSIKDKLILPFLDLDIKYYDLGILHREATDDKVTVEAAEATLKYNVAIKCATITPDETRVKEFNLKHMWKSPNGTIRNIINGTVFREPIICKNVPRLVPGWTKPICIGRHAFGDQYRATDAVLKGPGKLKLVFEGKEEQIDLEVFNFTGAGGVALSMYNTDESIRAFAEASMTTAYEKKWPLYLSTKNTILKKYDGRFKDIFQEVYEADWKSKFEAAGIWYEHRLIDDMVAYALKSEGGYVWACKNYDGDVQSDFLAQGFGSLGLMTSVLVCPDGKTIEAEAAHGTVTRHFRVHQKGGETSTNSIASIFAWTRGLAPQGKARRQR

SEQ ID NO: 22526 - DNA, 854 bp, Zea mays subsp. mays
  misc_feature (1)..(854): Ceres Seq. ID no. 12409092
acatcgccccagccccaagtccaaagccgcgagaggcaagggcgcagcaaaaccctagccgccttcccgtccttttcctttcataaaccccaagccgcgccgcaatagctcgccccctcgttcgccgcctctcctgctcctaccgcagctctccctcaggtttagtgttcgcaatggcggccttcaacaagcttggtggccttctaaggcacagtgctctggtgagcggtatcactggtggctcttctcctgcagtgttcaatgctgcacggctcatgtctaccaagctatttattggtggtcttgactggggtgttgatgacgtgaaactaagagaagcatttagcagctttggagaggttactgaagcgagggtgatcacagacagggagactgggaggtcaagaggctttggctttgtgaactactccgacagtgatgctgccaaggaagctatttctgcaatggatggcaaggaaattgatgggcggcaggtacgtgtcaacatggctaatgagagacctgctgggaaccgtggtggtggtggctatggcggcggcggctatggaggtggtggctacggaggtggcggcggctacggaggtggtggctatggtggtggcagccaaagctatgatgcttgaggggggcaggatcctattaggtgcattatcaaccaagatatttgaaataatgaactttaggacttggtatgacgttttatgttaagcgttgtcaggttttgctattcgtgttatgctgaattgttggaactcctagatgcagaatcttacgtattggttttggttccttcgagaagtgcaaatgcaagacgcatctattcccattgagtg

SEQ ID NO: 22527 - protein, 156 aa, Zea mays subsp. mays
  misc_feature (1)..(156): Ceres Seq. ID no. 12409093
MAAFNKLGGLLRHSALVSGITGGSSPAVFNAARLMSTKLFIGGLDWGVDDVKLREAFSSFGEVTEARVITDRETGRSRGFGFVNYSDSDAAKEAISAMDGKEIDGRQVRVNMANERPAGNRGGGGYGGGGYGGGGYGGGGGYGGGGYGGGSQSYDA

SEQ ID NO: 22528 - protein, 122 aa, Zea mays subsp. mays
  misc_feature (1)..(122): Ceres Seq. ID no. 12409094
MSTKLFIGGLDWGVDDVKLREAFSSFGEVTEARVITDRETGRSRGFGFVNYSDSDAAKEAISAMDGKEIDGRQVRVNMANERPAGNRGGGGYGGGGYGGGGYGGGGGYGGGGYGGGSQSYDA

SEQ ID NO: 22529 - protein, 96 aa, Zea mays subsp. mays
  misc_feature (1)..(96): Ceres Seq. ID no. 12409095
MLPRKLFLQWMARKLMGGRYVSTWLMRDLLGTVVVVAMAAAAMEVVATEVAAATEVVAMVVAAKAMMLEGGRILLGALSTKIFEIMNFRTWYDVLC

SEQ ID NO: 22530 - DNA, 1546 bp, Zea mays subsp. mays
  misc_feature (1)..(1546): Ceres Seq. ID no. 12409096
acgtctcattcaagcgctctgccggccagcctagtgctctcggctttctttcatctccctccttttgccacttgctgtagctttaatttgcctggcactttgcacgttgtggccggccggggcctgtgcttccattggtcggcagcaagcaagcaaggctagctagcgtccgtggatcagtcatgggcagccagaggcagaggcaccgagcggtcactggcctcccggcggcgggcgcgcggatgctggccctgctgtgcgcgtcgtcgtgggtgctggtgctcacgacggcgcagaactacagcgccatcttcaacttcggcgactcgatcaccgacaccggcaacctgtgcaccagcggcaggccgtcgcagatcaccttcacgcagcccccctacggcgagacctacttcggcacgccgacgtgccgctgctccgacggccgcgtcgtcgtcgacttcctgagcacccagttcgggctgccgttcctgccgccgtccaagtcgagcagcgcggacttcagtcagggcgccaacatggcgatcacgggcgccactgccatggacgcccccttcttccgctcgctcgggctctccgacaagatctggaacaacgggcccatcagctttcagctgcagtggttccagcagatcgccacctccgtctgcggacagagctgcaagagctacctgggcaactccctgttcgtgttcggcgagttcggcggcaacgactacaacgccatgatcttcggcggctactccatcgagcaggccaggaaatacgtccccaagatcgtcaacaccatctcgaggggcatcgataaactgatcgccatgggcgcgaccgacatcgtcgtccccggggtgcttcccatcgggtgcttccccatctatctgaccatctaccagagctccaacggcagcgactacgacagtctcggctgcctcaacagcttcaacgacctgtccacgtaccacaactccctgctccagaagagggtggacatcatccagagccggcacaggaagacggcgcgcatcatgtacgccgacttctactccgccgtctacgacatggtccgcaacccacagagctacgggttcagctcggtgttcgagacgtgctgcggatcaggcggcggcaagtacaactaccagaacagcgcgcggtgcggcatggcgggcgccgccgcgtgctctagcccggcgtcgcacctcagctgggacggcatccacctcacggaggccgcgtacaagcacatcaccgacgcctggctcaaggggccgtactgccgcccgcccatcctgcacaactaatcctcagtgcatatggacacgctggaccggaggccggcagcgcgttgtcttttttataaataatttatttattattcgtacaagctttggttggatccatcgcggcgggggttattaattatagcattggttggtcctttcgttatatttgaccatatttttttttgtgttcggggtaaggtgtttattatattttgcgttgctcaagaaaaagagctgacgatggc

SEQ ID NO: 22531 - protein, 378 aa, Zea mays subsp. mays
  misc_feature (1)..(378): Ceres Seq. ID no. 12409097
MGSQRQRHRAVTGLPAAGARMLALLCASSWVLVLTTAQNYSAIFNFGDSITDTGNLCTSGRPSQITFTQPPYGETYFGTPTCRCSDGRVVVDFLSTQFGLPFLPPSKSSSADFSQGANMAITGATAMDAPFFRSLGLSDKIWNNGPISFQLQWFQQIATSVCGQSCKSYLGNSLFVFGEFGGNDYNAMIFGGYSIEQARKYVPKIVNTISRGIDKLIAMGATDIVVPGVLPIGCFPIYLTIYQSSNGSDYDSLGCLNSFNDLSTYHNSLLQKRVDIIQSRHRKTARIMYADFYSAVYDMVRNPQSYGFSSVFETCCGSGGGKYNYQNSARCGMAGAAACSSPASHLSWDGIHLTEAAYKHITDAWLKGPYCRPPILHN

SEQ ID NO: 22532 - protein, 358 aa, Zea mays subsp. mays
  misc_feature (1)..(358): Ceres Seq. ID no. 12409098
MLALLCASSWVLVLTTAQNYSAIFNFGDSITDTGNLCTSGRPSQITFTQPPYGETYFGTPTCRCSDGRVVVDFLSTQFGLPFLPPSKSSSADFSQGANMAITGATAMDAPFFRSLGLSDKIWNNGPISFQLQWFQQIATSVCGQSCKSYLGNSLFVFGEFGGNDYNAMIFGGYSIEQARKYVPKIVNTISRGIDKLIAMGATDIVVPGVLPIGCFPIYLTIYQSSNGSDYDSLGCLNSFNDLSTYHNSLLQKRVDIIQSRHRKTARIMYADFYSAVYDMVRNPQSYGFSSVFETCCGSGGGKYNYQNSARCGMAGAAACSSPASHLSWDGIHLTEAAYKHITDAWLKGPYCRPPILHN

SEQ ID NO: 22533 - protein, 260 aa, Zea mays subsp. mays
  misc_feature (1)..(260): Ceres Seq. ID no. 12409099
MAITGATAMDAPFFRSLGLSDKIWNNGPISFQLQWFQQIATSVCGQSCKSYLGNSLFVFGEFGGNDYNAMIFGGYSIEQARKYVPKIVNTISRGIDKLIAMGATDIVVPGVLPIGCFPIYLTIYQSSNGSDYDSLGCLNSFNDLSTYHNSLLQKRVDIIQSRHRKTARIMYADFYSAVYDMVRNPQSYGFSSVFETCCGSGGGKYNYQNSARCGMAGAAACSSPASHLSWDGIHLTEAAYKHITDAWLKGPYCRPPILHN

SEQ ID NO: 22534 - DNA, 2219 bp, Zea mays subsp. mays
  misc_feature (1)..(2219): Ceres Seq. ID no. 12409104
attcgagccctgaaatcccaaaagcccaaaccaaatccaagcgcaagagggggcaaagccgcaaagggggaggcaccaggcaccggcagccattacttactggtcctcactcccacaccaaccaaccaacctcctctgcctgccgcttctcctgctgcgggcgggcactgctgcaagtactagaggaggacatccgcttccattactgcgcctgcggaggatcggaggaaccagtagcggaggcttcgattttcggcgggcgcaataaatttcccgcatggctcggagggccgcgtcctcgctcgtctcccgctgcctcctggcgagggcccctgccggcgcgccgcccgctgccccctctgcgccgcgcaggacagtgcctgcagatgggatgcacaggctgttgccaggtgtccttcagaggttcagcactgcagcagcagtagaggagcccatcacgccgtcagtccatgtgaactacacaaagctcctcattaatgggaactttgttgattccgcatccggcaagaccttcccaactctggaccctcgtacaggggaggtgattgctcatgtggctgagggtgacgcagaggacattaaccgtgcagtagctgcggctcgcaaggcttttgatgaagggccatggccgaagatgactgcctatgagaggtcccgtatcctactgcggtttgctgatttgatagagaagcacaatgacgagcttgctgctttggagacatgggacaacgggaagccatatgagcaagcagcccagattgaagtacccatggtggcccgtcttatgcgttactatgctggttgggctgataagatccatgggctcattgtgccggctgatggcccacaccatgtacagatcttgcatgagccaattggtgttgcaggtcagatcatcccatggaactttcctcttctgatgtatgcctggaaagttggccctgctttggcatgtggaaatactctcgtgctcaagactgctgaacaaacccctctatcggctttgtatatctccaaattgttgcatgaggctggactacctgagggtgttgtgaatgtcgtttctggttttggccctactgctggtgctgctcttgctagtcacatggatgttgataagatcgcatttactggatctaccgatactggaaaaattattctcgagttggctgcaaagagcaaccttaagacagtgacactggagttaggaggcaagtcccctttcatcataatggacgatgctgatgttgaccatgctgttgagcttgcgcactttgccctgttctttaaccagggacaatgctgctgcgctggatctcgcacgtttgtacatgagcgtgtttatgatgagtttgtggagaaggccaaggctcgtgcattgaagcgcgtcgttggtgatccgttcaggaaaggtgttgaacagggcccgcagattgacgacgagcaattcaacaagatcttgcgctacattaggtatggtgttgacggtggagctacccttgtgacgggtggtgataggttgggtgacaagggtttctacatccagccaacgattttctcagatgtccaggacggcatgaagattgctcaggaggagatatttgggcctgtgcagtcgatcctcaagttcaaagacctcaatgaggttatcaagagggcaaacgcgagccagtatggattggccgccggcgtgttcaccaacagcctggacacggccaacaccctgacgcgcgcgctcagggccgggaccgtctgggtgaactgcttcgacgtcttcgatgctgcgattccgtttggtgggtacaagatgagcggcatcgggagggagaagggcgttgacagcctgaagaactacctgcaggtgaaggcggtcgtcaccccaatcaagaacgccgcgtggttgtagacgctgcaagtgtggccttgtgcacgagaaccacgtatattcatttcctggtcacatccccgaacaatgtgaaggcgttaatcagatagatgacgatgaagaagaacaactataataagatttgccctagcctgggttctcagttatctctaataagttttatggttggtgcctatatattgtgcaatttggttgctcccttttattttgtttctttttgataagactgttctagcaacggatatgcagagttcattatgaaaatgcatttgttagtgtctttgatggttaa

SEQ ID NO: 22535 - protein, 549 aa, Zea mays subsp. mays
  misc_feature (1)..(549): Ceres Seq. ID no. 12409105
MARRAASSLVSRCLLARAPAGAPPAAPSAPRRTVPADGMHRLLPGVLQRFSTAAAVEEPITPSVHVNYTKLLINGNFVDSASGKTFPTLDPRTGEVIAHVAEGDAEDINRAVAAARKAFDEGPWPKMTAYERSRILLRFADLIEKHNDELAALETWDNGKPYEQAAQIEVPMVARLMRYYAGWADKIHGLIVPADGPHHVQILHEPIGVAGQIIPWNFPLLMYAWKVGPALACGNTLVLKTAEQTPLSALYISKLLHEAGLPEGVVNVVSGFGPTAGAALASHMDVDKIAFTGSTDTGKIILELAAKSNLKTVTLELGGKSPFIIMDDADVDHAVELAHFALFFNQGQCCCAGSRTFVHERVYDEFVEKAKARALKRVVGDPFRKGVEQGPQIDDEQFNKILRYIRYGVDGGATLVTGGDRLGDKGFYIQPTIFSDVQDGMKIAQEEIFGPVQSILKFKDLNEVIKRANASQYGLAAGVFTNSLDTANTLTRALRAGTVWVNCFDVFDAAIPFGGYKMSGIGREKGVDSLKNYLQVKAVVTPIKNAAWL

SEQ ID NO: 22536 - protein, 511 aa, Zea mays subsp. mays
  misc_feature (1)..(511): Ceres Seq. ID no. 12409106
MHRLLPGVLQRFSTAAAVEEPITPSVHVNYTKLLINGNFVDSASGKTFPTLDPRTGEVIAHVAEGDAEDINRAVAAARKAFDEGPWPKMTAYERSRILLRFADLIEKHNDELAALETWDNGKPYEQAAQIEVPMVARLMRYYAGWADKIHGLIVPADGPHHVQILHEPIGVAGQIIPWNFPLLMYAWKVGPALACGNTLVLKTAEQTPLSALYISKLLHEAGLPEGVVNVVSGFGPTAGAALASHMDVDKIAFTGSTDTGKIILELAAKSNLKTVTLELGGKSPFIIMDDADVDHAVELAHFALFFNQGQCCCAGSRTFVHERVYDEFVEKAKARALKRVVGDPFRKGVEQGPQIDDEQFNKILRYIRYGVDGGATLVTGGDRLGDKGFYIQPTIFSDVQDGMKIAQEEIFGPVQSILKFKDLNEVIKRANASQYGLAAGVFTNSLDTANTLTRALRAGTVWVNCFDVFDAAIPFGGYKMSGIGREKGVDSLKNYLQVKAVVTPIKNAAWL

SEQ ID NO: 22537 - protein, 423 aa, Zea mays subsp. mays
  misc_feature (1)..(423): Ceres Seq. ID no. 12409107
MTAYERSRILLRFADLIEKHNDELAALETWDNGKPYEQAAQIEVPMVARLMRYYAGWADKIHGLIVPADGPHHVQILHEPIGVAGQIIPWNFPLLMYAWKVGPALACGNTLVLKTAEQTPLSALYISKLLHEAGLPEGVVNVVSGFGPTAGAALASHMDVDKIAFTGSTDTGKIILELAAKSNLKTVTLELGGKSPFIIMDDADVDHAVELAHFALFFNQGQCCCAGSRTFVHERVYDEFVEKAKARALKRVVGDPFRKGVEQGPQIDDEQFNKILRYIRYGVDGGATLVTGGDRLGDKGFYIQPTIFSDVQDGMKIAQEEIFGPVQSILKFKDLNEVIKRANASQYGLAAGVFTNSLDTANTLTRALRAGTVWVNCFDVFDAAIPFGGYKMSGIGREKGVDSLKNYLQVKAVVTPIKNAAWL

SEQ ID NO: 22538 - DNA, 1411 bp, Zea mays subsp. mays
  misc_feature (1)..(1411): Ceres Seq. ID no. 12409129
cccgctgctgcctgctctcctccccgaaggccgaatccgatagctagcggctagcgccaacaaaacccctctctccgcgcccgctccccaccggtgacagcgcgcccatggctgccttactccgaacggccgcggccctcgcgcccccgccctcgtcgtccctgtccgcacgggagccgcgtgggcggtgcctgcggctagcctgctcccggcgcgcgccggcccgacagcttcgggcgtggctactgccgactccgcacgtcttcggtcgttctgggggccggttccggcgcctgagcgtcaccgaggccgaggaggccgcgcagacggcgacgcaggaggatccagaaaccgaagttactggagagagtgctgcagatgacagtgctggaagcacagacgaaactccatcatttattgtgacaacactgcaatcatacagagaagctctgattaatgatgatgaagcaaaagctgctgagatagaatcctttttactttctatcgaggatgagaagaactctcttttgagcaaaatcactgctctagatgtggaactagcaactcaacgagaacgtatcttgcggattagtgctgattttgacaatttcaggaaaaggacagaaaatgagaagcttaacatgatggaaaatgtgcaaggggaacttatagagagctttttgcctgttctcgataactttgaaagagcaaaaatgcaaataaaggtggaaacagagggagaggagaaaataaataatagctaccagagcattaataagcaatttatcgagattcttaattcattgagtgttgaagatgttgaaactgttggcaaaccatttgatcctatgctgcacgaggctattatgagagaagaatcatcggagtatgaagagggaatcatactccaggaattccgaaaaggcttcaaacttggggaaagactacttcgcccagcaatggtcaaggtgtctgcagggccaggccctgaaaattctggagatgatgaccctacagttgttgaagatagtgtggcacctcaaaaggttgaggatgttgaagaagacggttttgatgacggcgatgcagaataggtggctggagcttcagctgtgaatcaacaagaacaagtccagaaattttgatgcttttctggagcgtgccaagcaggtaataggattagtaccaattcgttcaagctagagttaggtccccaaatgtgctggttctttactgctgctgacatgggggtgttggtattgcgacaaatttgtgtttctacccgccgtggtcaactttttgttcttacgaaggggaattttcgtggttcatagatgcaaaaatgatatttgtaaggactaaattggctcagtttgctattgataatcaatatatgaattccattgtttgt

SEQ ID NO: 22539 - protein, 328 aa, Zea mays subsp. mays
  misc_feature (1)..(328): Ceres Seq. ID no. 12409130
MAALLRTAAALAPPPSSSLSAREPRGRCLRLACSRRAPARQLRAWLLPTPHVFGRSGGRFRRLSVTEAEEAAQTATQEDPETEVTGESAADDSAGSTDETPSFIVTTLQSYREALINDDEAKAAEIESFLLSIEDEKNSLLSKITALDVELATQRERILRISADFDNFRKRTENEKLNMMENVQGELIESFLPVLDNFERAKMQIKVETEGEEKINNSYQSINKQFIEILNSLSVEDVETVGKPFDPMLHEAIMREESSEYEEGIILQEFRKGFKLGERLLRPAMVKVSAGPGPENSGDDDPTVVEDSVAPQKVEDVEEDGFDDGDAE

SEQ ID NO: 22540 - DNA, 1768 bp, Zea mays subsp. mays
  misc_feature (1)..(1768): Ceres Seq. ID no. 12409131
atctcttgtgccagcacaatgatgctttgtcatatctagggagaagtgagtaaaagccatgagtgatgattatgcttctcttcttcttttccttcttaatgacgtactgccagtacgtacgtgctgttgtcagggaactgtatccgaattccaaattttgaacatgatttagcaagacagacagagagaaagagaatagttgactagttgtaaacttgtaatgtatggatcatgcctttcattcgatggctactgatcttgcttcgagcgcagtctgccgcggacctggcctgggagatagccgtcctggaggagcaagtcgtccgcaaggagctgcacctgctgtccctgtacagagccgcgttcgaccagtacctcggcgtctcccctcgcgcgtctgctcaggaaccgcgccatgagcgcagcagcagaagggctactgctgctgacgacgaaggcgcccttcgcctgaggagcatcaaggagtctgcgtcctacagcctaccaacgctctccgattctaaacgcgtagagctctccaggtgctcctcagggcggtccagcctggccaacttcctgagcgcctcgatcgctgagtacgtgcctaagatctcgtgcaagctctcggaggacatactgcggtgcgtctccgccgtctactgcaagctcgcgagcaggccgctgtcgcaggaggaggaggaggcgaggtccgagacgccgccgttcacgccttctctctcggtctcgtccgcgtcgagctccttctccctcaagaagcagcaccccgtccgtggctggagccctcggtgctactacaacgccgacgcgactgcgaccccggacgcgtacgcttcgtccggcgggagcagtgggcggtacagtggggtgatggttttcccagggatacatgtagacgaggagaagtttgagtatgcctgcaaaatcctggacactatcagatcgctgatcaaacggctggagaagattgatcctagaaagatggcacatgaagagcagctctgtttctgggtcaacatccacaatgccttggttatgcatgctttcatggcctatggattacaggaaaaacggatgaaaagcactgacttgattctgaaggctgcatacaatgtgggtgggcattcagtgaactcccaaactatccagaactcgattctaggatgccagtcccaccgcccttcactgtgggttcggacactatttacgccgacgaaaaaatctgggagctccatacatccatatgcgcttcagtacgcagagccaattgcgcactttgcgctctcgaccggcgcgttttcagacccacctgtgaggctgtacacagccaagaaactgtaccatcagctggagcaagccagggccgagttcatccaagcaaatgtcatggtccggaggcagaccatcttcctgcccaaggttctccacttctatgcgaaggatgcttccctggagctacctgaccttgttgacatagtgtgcgagagcatgcctgagctgcagcgaaaagagatcaggcagtatcttaggaggaggatcgacaagtgtgttcagtggttgccctacaagtcttctttcaggtacactgtgcatagcagtttggctgagtaggcacttttttttcttctctatgtgcttgtaaataaggagccatgattctaagaacagtcgtctgttggggtgtgtgtgtgtatgtaaaactatattgtgacagttctttctttcttagaggaaaattacagcttatctc

SEQ ID NO: 22541 - protein, 465 aa, Zea mays subsp. mays
  misc_feature (1)..(465): Ceres Seq. ID no. 12409132
MPFIRWLLILLRAQSAADLAWEIAVLEEQVVRKELHLLSLYRAAFDQYLGVSPRASAQEPRHERSSRRATAADDEGALRLRSIKESASYSLPTLSDSKRVELSRCSSGRSSLANFLSASIAEYVPKISCKLSEDILRCVSAVYCKLASRPLSQEEEEARSETPPFTPSLSVSSASSSFSLKKQHPVRGWSPRCYYNADATATPDAYASSGGSSGRYSGVMVFPGIHVDEEKFEYACKILDTIRSLIKRLEKIDPRKMAHEEQLCFWVNIHNALVMHAFMAYGLQEKRMKSTDLILKAAYNVGGHSVNSQTIQNSILGCQSHRPSLWVRTLFTPTKKSGSSIHPYALQYAEPIAHFALSTGAFSDPPVRLYTAKKLYHQLEQARAEFIQANVMVRRQTIFLPKVLHFYAKDASLELPDLVDIVCESMPELQRKEIRQYLRRRIDKCVQWLPYKSSFRYTVHSSLAE

SEQ ID NO: 22542 - protein, 246 aa, Zea mays subsp. mays
  misc_feature (1)..(246): Ceres Seq. ID no. 12409133
MVFPGIHVDEEKFEYACKILDTIRSLIKRLEKIDPRKMAHEEQLCFWVNIHNALVMHAFMAYGLQEKRMKSTDLILKAAYNVGGHSVNSQTIQNSILGCQSHRPSLWVRTLFTPTKKSGSSIHPYALQYAEPIAHFALSTGAFSDPPVRLYTAKKLYHQLEQARAEFIQANVMVRRQTIFLPKVLHFYAKDASLELPDLVDIVCESMPELQRKEIRQYLRRRIDKCVQWLPYKSSFRYTVHSSLAE

SEQ ID NO: 22543 - DNA, 1059 bp, Zea mays subsp. mays
  misc_feature (1)..(1059): Ceres Seq. ID no. 12409142
acactcttgccctctagctctagcagcagcagccaaagccatggaggcgagcggcatgaagctccgccggacgttcctcctcaccctactgctggtgctctccaccgccgtgacgcccatcctctcgctgcctgcagacaacgtggtagcctgcgactgcgacaagcccaaggcgcccaagccgtcgcactcgcgcccgcccaagacgaccaagccctcccacccgtcgccgaaacccgagaacccgaagccacccaagggccccgcgtacccggcggcggggcacccaccgcctaagagcccctcctacccaccggtcgtaggcccacccgtcacgcgcccgccggtcgtcggaccgccagtgacctacccgccgattaccggttctccgacgacgccgccggtcatcggcccaccggtcacgcgcccgccggtcgtcggaccaccggtgacctacccgccgatcaccggccctccgtcgacgccgcttccggtcaccggcccgcccgtgacctacccacccggcggaggcgggggcagctcgacgccgtgcccgccgccaccgccactgccgacgtgcccggcggactcgctgaagctgggcgcgtgcgtggacctgctgggcgggctggtgcacgtcggcctcggcgaccccgtggtgaaccagtgctgcccggtgctggaggggctggtggagctggaggcggccgtgtgcctgtgcaccaccatcaagctcaggctcctcaacgtcaacctgtacctgcccctggcgctccagctcctcctcacctgcggcaagacgccgccgccgggctacacctgcaccgtctgactgacgtcctcgatcggttagctagcgcctagcggcatagtagcagcagcccatgcattatccgtccatgcacatgcatgtacgtagctatgccttatgctatgcatgcatctctctgcaagtggttgctgtctgctgcatggtggaagactcgagagctactagctagctagtagagagtagagacgtcgtgttgttgttgcatgcaatgcatatgcgtgccttcg

SEQ ID NO: 22544 - protein, 276 aa, Zea mays subsp. mays
  misc_feature (1)..(276): Ceres Seq. ID no. 12409143
HSCPLALAAAAKAMEASGMKLRRTFLLTLLLVLSTAVTPILSLPADNVVACDCDKPKAPKPSHSRPPKTTKPSHPSPKPENPKPPKGPAYPAAGHPPPKSPSYPPVVGPPVTRPPVVGPPVTYPPITGSPTTPPVIGPPVTRPPVVGPPVTYPPITGPPSTPLPVTGPPVTYPPGGGGGSSTPCPPPPPLPTCPADSLKLGACVDLLGGLVHVGLGDPVVNQCCPVLEGLVELEAAVCLCTTIKLRLLNVNLYLPLALQLLLTCGKTPPPGYTCTV

SEQ ID NO: 22545 - protein, 263 aa, Zea mays subsp. mays
  misc_feature (1)..(263): Ceres Seq. ID no. 12409144
MEASGMKLRRTFLLTLLLVLSTAVTPILSLPADNVVACDCDKPKAPKPSHSRPPKTTKPSHPSPKPENPKPPKGPAYPAAGHPPPKSPSYPPVVGPPVTRPPVVGPPVTYPPITGSPTTPPVIGPPVTRPPVVGPPVTYPPITGPPSTPLPVTGPPVTYPPGGGGGSSTPCPPPPPLPTCPADSLKLGACVDLLGGLVHVGLGDPVVNQCCPVLEGLVELEAAVCLCTTIKLRLLNVNLYLPLALQLLLTCGKTPPPGYTCTV

SEQ ID NO: 22546 - protein, 258 aa, Zea mays subsp. mays
  misc_feature (1)..(258): Ceres Seq. ID no. 12409145
MKLRRTFLLTLLLVLSTAVTPILSLPADNVVACDCDKPKAPKPSHSRPPKTTKPSHPSPKPENPKPPKGPAYPAAGHPPPKSPSYPPVVGPPVTRPPVVGPPVTYPPITGSPTTPPVIGPPVTRPPVVGPPVTYPPITGPPSTPLPVTGPPVTYPPGGGGGSSTPCPPPPPLPTCPADSLKLGACVDLLGGLVHVGLGDPVVNQCCPVLEGLVELEAAVCLCTTIKLRLLNVNLYLPLALQLLLTCGKTPPPGYTCTV

SEQ ID NO: 22547 - DNA, 1336 bp, Zea mays subsp. mays
  misc_feature (1)..(1336): Ceres Seq. ID no. 12409154
acattaattgtctcgtcctactgctagcaccagaccgctgtcttcttgagcacattgaggtcttcggatttctccgggggtggccgcgcgcagcaccggcaatgtcgtcatgcaagcggtacttgccgtgcttgatattgttgttgctgcacggaggacgaggtgcggtggccgggaaggtgtcggcaatcgtcgtgttcggcgactcttccgtggacacggggaacaacaatttcatcccgaccatcgcgcggagcaacttctggccgtacggccgcgactacgacgatggcctccccacgggccggttctccaatgggcgcctcgccaccgacttcatctccgaggccttcggcctgccgccgtccatccccgcctacctggacaacaactgcaccatcgaccagctcgccacaggagtctccttcgcctccgctgcgacaggcctcgataacgcgacggccggcgtcttgtccgtgatcacgctggacgagcagctcgcttacttcaaggagtacacggaccgcctcaagatcgccaagggcgaggcggcggcggaggagatcatcagcgaagcgctctacatctggagcatcggcaccaatgacttcatcgagaactactacaacttgccggagcggcggatgcagtatactgtgggcgagtacgaggcctacctgctgggactcgccgaggccgccatacgccgcgtgcacaccctcggcggccgcaaaatggacttcaccgggctcacgcccatgggctgcctccccgccgagcggatcggcaaccgcgacaaccccggggagtgcaacgagcagtacaacgctgttgccaggaccttcaacgccaagctgcaggagctcgtcctcaagcttaacaaggaactgctgggactgcagctcgtcttcgccgacacgtaccagctcctcgccaacgtcgtaaacaggccggccgactacggatttgacaatgctgtgcaaggttgttgtgggacggggcttttcgaggcaggttacttttgtagcttcagcacatcaatgctatgcgaaaatgccaacaagtatgtattctttgatgcgatccatcccacggagaagatgtacaaattgctcgccaataccgtcatcaacaccaccttgcatgtattcatgtgaaattatttgatcttcctaatagaaatgcggcatggacaggtctatacggccatgcctgtgtacaatctataatgcacatagacacacctaccgctcctccacatacaactttgattgttgaaaccatatcatatacaattataaattatagcacgtgtactataaattttatcttatag

SEQ ID NO: 22548 - protein, 384 aa, Zea mays subsp. mays
  misc_feature (1)..(384): Ceres Seq. ID no. 12409155
INCLVLLLAPDRCLLEHIEVFGFLRGWPRAAPAMSSCKRYLPCLILLLLHGGRGAVAGKVSAIVVFGDSSVDTGNNNFIPTIARSNFWPYGRDYDDGLPTGRFSNGRLATDFISEAFGLPPSIPAYLDNNCTIDQLATGVSFASAATGLDNATAGVLSVITLDEQLAYFKEYTDRLKIAKGEAAAEEIISEALYIWSIGTNDFIENYYNLPERRMQYTVGEYEAYLLGLAEAAIRRVHTLGGRKMDFTGLTPMGCLPAERIGNRDNPGECNEQYNAVARTFNAKLQELVLKLNKELLGLQLVFADTYQLLANVVNRPADYGFDNAVQGCCGTGLFEAGYFCSFSTSMLCENANKYVFFDAIHPTEKMYKLLANTVINTTLHVFM

SEQ ID NO: 22549 - protein, 351 aa, Zea mays subsp. mays
  misc_feature (1)..(351): Ceres Seq. ID no. 12409156
MSSCKRYLPCLILLLLHGGRGAVAGKVSAIVVFGDSSVDTGNNNFIPTIARSNFWPYGRDYDDGLPTGRFSNGRLATDFISEAFGLPPSIPAYLDNNCTIDQLATGVSFASAATGLDNATAGVLSVITLDEQLAYFKEYTDRLKIAKGEAAAEEIISEALYIWSIGTNDFIENYYNLPERRMQYTVGEYEAYLLGLAEAAIRRVHTLGGRKMDFTGLTPMGCLPAERIGNRDNPGECNEQYNAVARTFNAKLQELVLKLNKELLGLQLVFADTYQLLANVVNRPADYGFDNAVQGCCGTGLFEAGYFCSFSTSMLCENANKYVFFDAIHPTEKMYKLLANTVINTTLHVFM

SEQ ID NO: 22550 - DNA, 1401 bp, Zea mays subsp. mays
  misc_feature (1)..(1401): Ceres Seq. ID no. 12409176
aaccaccaccatagatcgatccttgagttgacgaaaacatacacagctgctagctaatcctgccgtgagtgcaatgcatgcgaagatgacgaagcccgcagccatcgttgttgctgctatcgccgtcctctccgtcagcctgctggctggggtcgtcgtgccttgcccttgcgcggcccagcggcgacttctccatcgtgggctactcagaggaggacctgtcgtcgcacgagagcctggcggagctgttcgagcgctggctgtcccgccaccgcagggcgtacgccagcctggaggagaagctccggcggttccaggtgttcaaggacaacctgcaccacatcgacgagaccaaccgcaaggtgagcagctactggctgggcctcaacgagttcgccgacctcacgcacgacgagttcaaggccacctacctcggcctacggagcagtgttggcgatggtggtagtggtatcgatgacgacgacgagccggaggaggaggagggctacgagggtgtggacggggcgagcctccccaagtcggtggactggcggagcaagggcgcggtgacgggggtaaagaaccagggccagtgcggcagctgctgggccttctccacggtggccgccgtcgagggcatcaaccagatcgtcacgggcaacctcacggcgctgtcggagcaggagctcatcgactgcgacacggacggcaacaacggctgcaacggcggcctcatggactacgccttctcctacatcgcacacaacggcggcctccacacggaggaggcctacccgtacctcatggaggaaggcacctgccagcgcagcagcagcagcgagaagaagtggccgggatcgtcggaggacgccaacgacgatgccgcggtggtcaccatctccgggtacgaggacgtgccgaggaacaacgagcaggcgctgctcaaagcgctggcgcaacagcccgtcagcgtcgccatcgaggcctccggcaggaacttccagttctacagcggcggcgtcttcgatgggccctgcggcacgcagctggaccacggggtagcggccgtcggctacgggacggcggccaagggccatgactacatcatcgtcaagaactcgtgggggcccagctggggcgagaaggggtacatccgcatgaggaggggcaccggcaagcgccagggcctctgcggcatcaacaagatggcctcctacccaaccaagaactgaactcagatcatcgattcatcgtcaagcagcagctggctgattactcccactgctggcgctccacgcttcactagttcttcgtcgttctccttcacttccattgttttcaagattggacgatctttcgttgtttgaaatgaaataataatgatgatggaattagtgttcc

SEQ ID NO: 22551 - protein, 165 aa, Zea mays subsp. mays
  misc_feature (1)..(165): Ceres Seq. ID no. 12409177
MDYAFSYIAHNGGLHTEEAYPYLMEEGTCQRSSSSEKKWPGSSEDANDDAAVVTISGYEDVPRNNEQALLKALAQQPVSVAIEASGRNFQFYSGGVFDGPCGTQLDHGVAAVGYGTAAKGHDYIIVKNSWGPSWGEKGYIRMRRGTGKRQGLCGINKMASYPTKN

SEQ ID NO: 22552 - protein, 142 aa, Zea mays subsp. mays
  misc_feature (1)..(142): Ceres Seq. ID no. 12409178
MEEGTCQRSSSSEKKWPGSSEDANDDAAVVTISGYEDVPRNNEQALLKALAQQPVSVAIEASGRNFQFYSGGVFDGPCGTQLDHGVAAVGYGTAAKGHDYIIVKNSWGPSWGEKGYIRMRRGTGKRQGLCGINKMASYPTKN

SEQ ID NO: 22553 - protein, 130 aa, Zea mays subsp. mays
  misc_feature (1)..(130): Ceres Seq. ID no. 12409179
MHAKMTKPAAIVVAAIAVLSVSLLAGVVVPCPCAAQRRLLHRGLLRGGPVVAREPGGAVRALAVPPPQGVRQPGGEAPAVPGVQGQPAPHRRDQPQGEQLLAGPQRVRRPHARRVQGHLPRPTEQCWRWW

SEQ ID NO: 22554 - DNA, 2074 bp, Zea mays subsp. mays
  misc_feature (1)..(2074): Ceres Seq. ID no. 12409204
cggaacgcgtacaggcgccagctgctggctctgtcgcggcggatccggctcctcggccccttcgccgaggagctgcgggaggcacgccggggggtccgcggagcaggaggagcaggagcgggcgctggcgcctctcgccgacgcgctggagaaggcactcgacctgctccagctcggccgcgacggcagcaggatattcctggtccttgatagggatgaagtaatgaagaagttccatgaatcaattgctcagctggagcaagccctgtgcgattttccatatgataaactggatatatctgatgaagctagagagcaggttgagttagtgcatgcacagctcaaaagagccaaagagcgggtcgacatgcccgatgacgagttctacaacgaattatgttcgctgtataacaagagccacgacccaagtgctgagttggatatccttgggagattgtcggagaagttacacctgacgaccatcgctgatctcacgcaagaatcacttgctttgcacgagatggtggcatctggtggtggcaacgatcctggagaacacattgagaaaatgtcgatgctgctgaagaagatcaaggactttgtgcagactcagaaccctgaaacgggcccgctggtgactgccaagccaatgggttccaacgggaagccaagacctgtaaacgttcctgacgagttccggtgcccaatctctcttgagctgatgaaagacccggttatcgttgctactggccagacatacgagcgggcattgatcgagaaatggctagcttccgggcaccatacctgtccaagcactcaacaaaggatgccaaacacgacgctgacaccgaactatgttctcagaagccttatcacgcagtggtgtgaggccaacgggatcgatccaccgaagcgcccgacgcagcagcctgacagacctacatcttcatgctcttcgagcgagcgcgccagcatcgacgctctcctctccaagctatgctccgcagatcccgaggaacagagatcggctgccgcagagctccggctcctagcgaagcggaacgcgaacaaccggatctgcatcgccgaggccggtgccatccccttgctactgagcctcctgtcttcgtctgacctgcagacgcaggagcacgccgtgacggcgcttctgaacctctccatacacgaggacaacaaggcgagcatcatactgtccggcgctgtcccgggcatagttcacgtcctgaagaacgggagcatggaggcacgggagaacgctgcggccacactcttcagcctgtcggtggtggacgaatacaaggtcacgatcgggggcacaggagccatccctgccctcgtggtcttgctgagcgagggcaggcagcgcgggaagaaggacgcggcggctgccctgttcaacctgtgcatctaccaggggaacaagggccgcgccatacgggctggcctcgtgccactcgtcatggggctcgtgacgaaccccaccggagctctgctggacgaggccatggcgatcctgtcgatactgtccagccaccccgagggcaaggccgcgatcggggcggcggagcccgtccccgtcctcgtggagatgatcgcgggtgggtcgccgaggaacagggagaacgctgccgccgtgatgctgcacctgtccgccagcgtgcggcagtccgcgcatctggctccggcgcaggagtgcggcatcatggccccgctgcgggagctggcactgaatggcacggggagggggaagagaaaggccgtgcagctgctcgagcggatgagcaggttcctggtccagcagcaggaggacgcggtggatccacgtgtgcaggagctggaggagatcgagcgccagcttgccgcctttggacctggcgttacggaggctgatgtccttcaacagttgggagctctttaacctatgggacatttttcactatgatactactatactacatagaaaagttctagcggcggactttattatcagtaaaatctcaattcttgctactgaatgttagcgtgggtttcggatttcaagatttttatggtc

SEQ ID NO: 22555 - protein, 645 aa, Zea mays subsp. mays
  misc_feature (1)..(645): Ceres Seq. ID no. 12409205
GTRTGASCWLCRGGSGSSAPSPRSCGRHAGGSAEQEEQERALAPLADALEKALDLLQLGRDGSRIFLVLDRDEVMKKFHESIAQLEQALCDFPYDKLDISDEAREQVELVHAQLKRAKERVDMPDDEFYNELCSLYNKSHDPSAELDILGRLSEKLHLTTIADLTQESLALHEMVASGGGNDPGEHIEKMSMLLKKIKDFVQTQNPETGPLVTAKPMGSNGKPRPVNVPDEFRCPISLELMKDPVIVATGQTYERALIEKWLASGHHTCPSTQQRMPNTTLTPNYVLRSLITQWCEANGIDPPKRPTQQPDRPTSSCSSSERASIDALLSKLCSADPEEQRSAAAELRLLAKRNANNRICIAEAGAIPLLLSLLSSSDLQTQEHAVTALLNLSIHEDNKASIILSGAVPGIVHVLKNGSMEARENAAATLFSLSVVDEYKVTIGGTGAIPALVVLLSEGRQRGKKDAAAALFNLCIYQGNKGRAIRAGLVPLVMGLVTNPTGALLDEAMAILSILSSHPEGKAAIGAAEPVPVLVEMIAGGSPRNRENAAAVMLHLSASVRQSAHLAPAQECGIMAPLRELALNGTGRGKRKAVQLLERMSRFLVQQQEDAVDPRVQELEEIERQLAAFGPGVTEADVLQQLGAL

SEQ ID NO: 22556 - protein, 571 aa, Zea mays subsp. mays
  misc_feature (1)..(571): Ceres Seq. ID no. 12409206
MKKFHESIAQLEQALCDFPYDKLDISDEAREQVELVHAQLKRAKERVDMPDDEFYNELCSLYNKSHDPSAELDILGRLSEKLHLTTIADLTQESLALHEMVASGGGNDPGEHIEKMSMLLKKIKDFVQTQNPETGPLVTAKPMGSNGKPRPVNVPDEFRCPISLELMKDPVIVATGQTYERALIEKWLASGHHTCPSTQQRMPNTTLTPNYVLRSLITQWCEANGIDPPKRPTQQPDRPTSSCSSSERASIDALLSKLCSADPEEQRSAAAELRLLAKRNANNRICIAEAGAIPLLLSLLSSSDLQTQEHAVTALLNLSIHEDNKASIILSGAVPGIVHVLKNGSMEARENAAATLFSLSVVDEYKVTIGGTGAIPALVVLLSEGRQRGKKDAAAALFNLCIYQGNKGRAIRAGLVPLVMGLVTNPTGALLDEAMAILSILSSHPEGKAAIGAAEPVPVLVEMIAGGSPRNRENAAAVMLHLSASVRQSAHLAPAQECGIMAPLRELALNGTGRGKRKAVQLLERMSRFLVQQQEDAVDPRVQELEEIERQLAAFGPGVTEADVLQQLGAL

SEQ ID NO: 22557 - protein, 523 aa, Zea mays subsp. mays
  misc_feature (1)..(523): Ceres Seq. ID no. 12409207
MPDDEFYNELCSLYNKSHDPSAELDILGRLSEKLHLTTIADLTQESLALHEMVASGGGNDPGEHIEKMSMLLKKIKDFVQTQNPETGPLVTAKPMGSNGKPRPVNVPDEFRCPISLELMKDPVIVATGQTYERALIEKWLASGHHTCPSTQQRMPNTTLTPNYVLRSLITQWCEANGIDPPKRPTQQPDRPTSSCSSSERASIDALLSKLCSADPEEQRSAAAELRLLAKRNANNRICIAEAGAIPLLLSLLSSSDLQTQEHAVTALLNLSIHEDNKASIILSGAVPGIVHVLKNGSMEARENAAATLFSLSVVDEYKVTIGGTGAIPALVVLLSEGRQRGKKDAAAALFNLCIYQGNKGRAIRAGLVPLVMGLVTNPTGALLDEAMAILSILSSHPEGKAAIGAAEPVPVLVEMIAGGSPRNRENAAAVMLHLSASVRQSAHLAPAQECGIMAPLRELALNGTGRGKRKAVQLLERMSRFLVQQQEDAVDPRVQELEEIERQLAAFGPGVTEADVLQQLGAL

SEQ ID NO: 22558 - DNA, 1522 bp, Zea mays subsp. mays
  misc_feature (1)..(1522): Ceres Seq. ID no. 12409208
aaaaacctcgcaagcgaccccagtaatggcgaccaaggcgctatccgtctcctcgctcacctccacggcctttgcctccttttccttgccgcggccccgcaggccttcaccttcgcctcccctcctccgccttctcggccctcgcccccgcgcctccactctctccgccgccgctcccggcgacgaggacggcgtcgacaccgtggagcagctcctccacccacgcccgcctgagacctcagcccccgccggatcccgcggccggatcgaccgcctcatgaagctccagcgccgcgccgacggcgacgccgtgcccgggggccggaggaggtggttcccttacctggacgcgttccggcccgcggccgggggcgcggagctgtccagcggggaggtcatagaggtgctggagccgcacatcctagaggcgcggcgggaccggattcgacaagccgttggcaaccggagctacgccgtttgcctcgtggtggaaggcctctccgacttcggcaacgtctcggccgcgttccgctccgcggacgcgctcggcgtgcagtccgtgcacgtcatttccttgatagcagcaaaaggtgcagaggtatagagacaacaggcatgtgagcatgggtgctgagaaatggcttgacattgagatatggaactcacctgcagaatgtttcagtgcattaaaaaaacgcggttatcgcattgcgaccacttatttgggaactgattcggtttgtgtgtatgatatggattggtctcaaccaacagctattgttgtgggcaatgagcttaggggtataagtgatgatgctctagaattgtcagatttgcactgcagcattccaatgaaaggcatggtggattcgtttaatgtatctgttgcagctggaatcctcatgcaccatgctgtttgtgatagagtttcccgcctgggccatcacggtgatctcttgcctgaagaaaataggatattgcttgctgagttctatctgcgacacagagaaagcacggctactatagttcatgaatatgccaaaatgaaggcaggaaaaattatgaccagactttgaaaacatcctgagaagctgagtgacgtgtctgtcaatcaagtcttggattatctggtgcatttttctaacagaaaacgaggctattttttcctggagtttaccgctgatcccaccagattgctgggaagacgaggatccaagcccaatcattgagcagagctgttaacgattacgcatatggttttcagtgacgtggacttttgctcccaaaacagtcgcccgttaactatttttgtatgtttttgttaggatgaaagcttaatatgtttccacttgtttttcacaaacgttggcggtggttgggtttgggcggcaacgctccatgttctacagacggttacgaccggaagcttggtgtaaccgtaccagtataacctgtccttggagggttgagagcttgagatgtaaacgaactgcacttgtctacggcaggatgatgcgtctgt

SEQ ID NO: 22559 - protein, 200 aa, Zea mays subsp. mays
  misc_feature (1)..(200): Ceres Seq. ID no. 12409209
KTSQATPVMATKALSVSSLTSTAFASFSLPRPRRPSPSPPLLRLLGPRPRASTLSAAAPGDEDGVDTVEQLLHPRPPETSAPAGSRGRIDRLMKLQRRADGDAVPGGRRRWFPYLDAFRPAAGGAELSSGEVIEVLEPHILEARRDRIRQAVGNRSYAVCLVVEGLSDFGNVSAAFRSADALGVQSVHVISLIAAKGAEV

SEQ ID NO: 22560 - protein, 192 aa, Zea mays subsp. mays
  misc_feature (1)..(192): Ceres Seq. ID no. 12409210
MATKALSVSSLTSTAFASFSLPRPRRPSPSPPLLRLLGPRPRASTLSAAAPGDEDGVDTVEQLLHPRPPETSAPAGSRGRIDRLMKLQRRADGDAVPGGRRRWFPYLDAFRPAAGGAELSSGEVIEVLEPHILEARRDRIRQAVGNRSYAVCLVVEGLSDFGNVSAAFRSADALGVQSVHVISLIAAKGAEV

SEQ ID NO: 22561 - protein, 150 aa, Zea mays subsp. mays
  misc_feature (1)..(150): Ceres Seq. ID no. 12409211
MGAEKWLDIEIWNSPAECFSALKKRGYRIATTYLGTDSVCVYDMDWSQPTAIVVGNELRGISDDALELSDLHCSIPMKGMVDSFNVSVAAGILMHHAVCDRVSRLGHHGDLLPEENRILLAEFYLRHRESTATIVHEYAKMKAGKIMTRL

SEQ ID NO: 22562 - DNA, 1382 bp, Zea mays subsp. mays
  misc_feature (1)..(1382): Ceres Seq. ID no. 12409212
aaagtggaagtggaatcgagtcaaatcgaccacttctctggcaagcccgcaggccgcagcccctcctccccccaagagccgccgaggctgctccccctagcaaacccgccatggccgagcgcctcgcagcatccgccgccaccctccgcgcctcggccgccaccaccccgttcgcccgccgcgcggcgccggccaaccgcgccttcttctcgccttcgctagctcgcgcgcgcgtcgctctccgcgccgcgccctctccgctcccgcagaaggcgagggtagtgaggtgcgcggctgtggcgatggcgtctgacgcggctcaggtgaaggccgcacgcgaggacatcagggagcttctcaggacgactcactgccaccccatcctggtccgtctaggatggcatgatgctggtacgtatgacaagaatattgaggagtggccacaacgaggtggagctaatggaagtttaagatttgatgttgagttgaaacatggagccaatgctggtctgataaatgctctaaagcttatccaaccaatcaaggacaagtaccctagtatcacttatgcagatttatttcagttggcaagtgctacagcaattgaggaagctggtggcccaaagattccaatgaaatacggacgagttgatgttacaggacctgagcagtgcccccctgaggggaaacttcctgatgctggcccaagttcacctgctgaccacttgagggaggtattctacagaatgggccttaatgacaaggaaattgttgccttgtctggagcacatacacttggaaggtccaggcctgaacggagtggctgggggaaaccagaaacaaaatatactaaaaatggtcctggtgcacctggttggcaatcatggacagttgaatggctgaggtttgataacagttacttcaaggatatcaaaagaaacgagatcaggatcttctggtcctacctacagatgctgctttatttgaggacccaaagttcaaggtctatgcggagaaatatgcagaggaccaagacgcattcttcagagactacgctgaggctcatgctaaactgagcgaattgggtgcgaagttccaaccaccgcagggattctctttggatgattagtgcggcaccagaaccctaaaccctctccttgaaaaggatcaagagggagcatacaattcattgttcttctcatatcatcgtacaagatggactggtccccctttttcatgatgctatatggagtcttctaatttagctagatttctgaaccgagcttgcaaataaaaaagaaccgacacagtggcactacataattttcagagccattgggagaactgacacagtgctatcagatttggttttatcccttcct

SEQ ID NO: 22563 - protein, 357 aa, Zea mays subsp. mays
  misc_feature (1)..(357): Ceres Seq. ID no. 12409213
SGSGIESNRPLLWQARRPQPLLPPRAAEAAPPSKPAMAERLAASAATLRASAATTPFARRAAPANRAFFSPSLARARVALRAAPSPLPQKARVVRCAAVAMASDAAQVKAAREDIRELLRTTHCHPILVRLGWHDAGTYDKNIEEWPQRGGANGSLRFDVELKHGANAGLINALKLIQPIKDKYPSITYADLFQLASATAIEEAGGPKIPMKYGRVDVTGPEQCPPEGKLPDAGPSSPADHLREVFYRMGLNDKEIVALSGAHTLGRSRPERSGWGKPETKYTKNGPGAPGWQSWTVEWLRFDNSYFKDIKRNEIRIFWSYLQMLLYLRTQSSRSMRRNMQRTKTHSSETTLRLMLN

SEQ ID NO: 22564 - protein, 321 aa, Zea mays subsp. mays
  misc_feature (1)..(321): Ceres Seq. ID no. 12409214
MAERLAASAATLRASAATTPFARRAAPANRAFFSPSLARARVALRAAPSPLPQKARVVRCAAVAMASDAAQVKAAREDIRELLRTTHCHPILVRLGWHDAGTYDKNIEEWPQRGGANGSLRFDVELKHGANAGLINALKLIQPIKDKYPSITYADLFQLASATAIEEAGGPKIPMKYGRVDVTGPEQCPPEGKLPDAGPSSPADHLREVFYRMGLNDKEIVALSGAHTLGRSRPERSGWGKPETKYTKNGPGAPGWQSWTVEWLRFDNSYFKDIKRNEIRIFWSYLQMLLYLRTQSSRSMRRNMQRTKTHSSETTLRLMLN

SEQ ID NO: 22565 - protein, 257 aa, Zea mays subsp. mays
  misc_feature (1)..(257): Ceres Seq. ID no. 12409215
MASDAAQVKAAREDIRELLRTTHCHPILVRLGWHDAGTYDKNIEEWPQRGGANGSLRFDVELKHGANAGLINALKLIQPIKDKYPSITYADLFQLASATAIEEAGGPKIPMKYGRVDVTGPEQCPPEGKLPDAGPSSPADHLREVFYRMGLNDKEIVALSGAHTLGRSRPERSGWGKPETKYTKNGPGAPGWQSWTVEWLRFDNSYFKDIKRNEIRIFWSYLQMLLYLRTQSSRSMRRNMQRTKTHSSETTLRLMLN

SEQ ID NO: 22566 - DNA, 1149 bp, Zea mays subsp. mays
  misc_feature (1)..(1149): Ceres Seq. ID no. 12409227
attttttaactcgaccccgccctacctctcgccgtcgaccacaagtccacaacccacaaaatgcacgggaggacccagggcgccgccgtcggcgacatgacccagcgccttctcctcgccctctcgctcatcgcatcagcgaccgccgtgcccgctgtcatccgcacggtcccggacgaccccaccgcgggctcctctggcgcggcagacgccgcggacgcgctcttctgtgacagctggaggctgtcggtggagacggccaacgcgggcccctggagcgccgtgccctcgcgctgtggggctttcgtgcgggactacatggagggacctcgctacgcgtctgactccgccgtcgccgacgccgacgccctagccttcgcctccgaagccctggccgccgccgagtggggcggctcggcgagcgcgaggcctgcgtgggtgttcgacgtcgacgagacgctgctctctaacgcgccgtactacgcggtcaacggatggggatcacaggaattcaatgagacctcatttgatgaatgggtagatgctgcaaaggcaccaacattaccatcgagcttgaatttgtacaatcaacttcagggacttggtttccatgttatcctattgactggccggagtgaattccaacgtaatgccacagaattgaatcttttgtttgctggctacaactcatgggaaaaactcatactgaggcaaccttatgatattggcaagaacgctgtgcagtacaaatcagagagacgagcagcaatggaagcggaaggtttcaagatacttgggaactcaggggatcagtggagtgatttgataggatcgcccatggcaacgagatccttcaagctaccaaacccaatgtacttcatcagctgattttattgttagagcagtggacgaaggagcaggttttcatagggtgttcatatggtcccggtgtgaaactgcttttgttagacatccctcgggacataaatttagatttttatcttcaagcatgttgaaattcaactgaggcttgggtccgtcgaatctgccctatgatgatctgtaattacacacttcttttcccacactactggaagcatttgtggtaaggctaaaaaaaaaaaaaaaaaaatcaagaactcgcacgag

SEQ ID NO: 22567 - protein, 275 aa, Zea mays subsp. mays
  misc_feature (1)..(275): Ceres Seq. ID no. 12409228
MHGRTQGAAVGDMTQRLLLALSLIASATAVPAVIRTVPDDPTAGSSGAADAADALFCDSWRLSVETANAGPWSAVPSRCGAFVRDYMEGPRYASDSAVADADALAFASEALAAAEWGGSASARPAWVFDVDETLLSNAPYYAVNGWGSQEFNETSFDEWVDAAKAPTLPSSLNLYNQLQGLGFHVILLTGRSEFQRNATELNLLFAGYNSWEKLILRQPYDIGKNAVQYKSERRAAMEAEGFKILGNSGDQWSDLIGSPMATRSFKLPNPMYFIS

SEQ ID NO: 22568 - protein, 263 aa, Zea mays subsp. mays
  misc_feature (1)..(263): Ceres Seq. ID no. 12409229
MTQRLLLALSLIASATAVPAVIRTVPDDPTAGSSGAADAADALFCDSWRLSVETANAGPWSAVPSRCGAFVRDYMEGPRYASDSAVADADALAFASEALAAAEWGGSASARPAWVFDVDETLLSNAPYYAVNGWGSQEFNETSFDEWVDAAKAPTLPSSLNLYNQLQGLGFHVILLTGRSEFQRNATELNLLFAGYNSWEKLILRQPYDIGKNAVQYKSERRAAMEAEGFKILGNSGDQWSDLIGSPMATRSFKLPNPMYFIS

SEQ ID NO: 22569 - protein, 189 aa, Zea mays subsp. mays
  misc_feature (1)..(189): Ceres Seq. ID no. 12409230
MEGPRYASDSAVADADALAFASEALAAAEWGGSASARPAWVFDVDETLLSNAPYYAVNGWGSQEFNETSFDEWVDAAKAPTLPSSLNLYNQLQGLGFHVILLTGRSEFQRNATELNLLFAGYNSWEKLILRQPYDIGKNAVQYKSERRAAMEAEGFKILGNSGDQWSDLIGSPMATRSFKLPNPMYFIS

SEQ ID NO: 22570 - DNA, 1436 bp, Zea mays subsp. mays
  misc_feature (1)..(1436): Ceres Seq. ID no. 12409231
acccttactcagcatggaacaggttctctgtcctcataactccaaccaaacaacggcagctagcgagctcccgcggtcccgccgccgccccctggtcctccaaaaaacggctgaaccctaaaccctccctagctcccgccgcctcgcttaaccgcgcccatggccgccgccgctcgcgccgccctcccgcggccccacctctctcttttttcgtcctcccaccgcagcccccatctgtccctcacgccctcctccgcccctcgcctgcgcagcggcgctgccacctcccctgcgctgcagcagcaccaccaggtcaccacgcgcctgggcgacgtgatcgaggcgcagcagttcgaccgggacgcgctgaacgagatcttcgaggtggcgcgggagatggaggccgtggagaggggttcccacggcgcccccagccgcgtcctcgaggggtacctcatggccacgcttttctacgagccctccacgcgcacgcgcctctccttcgaggctgctatgcggaggctcggcggggaggtcctcaccaccgagaatgcgcgcgagttctcttccgccgccaagggggagacactcgaagataccataagaaccgttgagggttattccgatattattgtactgagacattttgaaagtggagctgcaaggaaagcagcagatactgcaaatattcctgttattaatgcaggtgatggaccagggcaacatccaacccaggctttgttggatgtgtacacaataaagagagaaattggcacactagatggaattaaacttggtttggttggtgaccttgctaatgggaggacagttcgttctctggcttacttgattgctaagtaccagaacattaagatatactttgtatctcctgatgttgttaaaatgaaggatgatatcaagaactacttaaattccaaaggtgttgaatgggaagaaagttcagatttgttggaggtggcatccaagtgtgatgttatttatcaaacacgtattcaaaaagaaagatttggtgagaggattgacctttatgaagctgctcgtggcaagtacatcatggataaaaaggtcttagatgtgctgccaaaacatgctgtcatcatgcatccccttccaaggcttgatgagatcacagtagaagttgatagtgatccaagagctgcatattttaggcaggctaagaatggcctctacataaggatggcattgctcaaacttctgcttgttggtcactgacatttcggctagtgctttagcttgtgctgcgtcaagggattagaaggtattattcttaatataatgatcgaggctgtcttactcacgcaggtcgagtttttagaaacatgtactaataatcagcagcttgtgtcaaaattcaatgttcgctgttgcaggtaataaaagtctgcatccatgcg

SEQ ID NO: 22571 - protein, 364 aa, Zea mays subsp. mays; identical to SEQ ID NO: 16029
  misc_feature (1)..(364): Ceres Seq. ID no. 12409232

SEQ ID NO: 22572 - protein, 285 aa, Zea mays subsp. mays; identical to SEQ ID NO: 16030
  misc_feature (1)..(285): Ceres Seq. ID no. 12409233

SEQ ID NO: 22573 - protein, 265 aa, Zea mays subsp. mays; identical to SEQ ID NO: 16031
  misc_feature (1)..(265): Ceres Seq. ID no. 12409234

SEQ ID NO: 22574 - DNA, 1253 bp, Zea mays subsp. mays
  misc_feature (1)..(1253): Ceres Seq. ID no. 12409239
ataaacgagaacccagccgctgagtagacttgtgttttcgcttccccttccccatcccctctcctcccctcgccggcttgtcggtctcgccgcgccactggccatacatccaagacgctaatccgtgtgggggaaaagcccccctctctctgaaactattcaaatggcgtggggcgtatccccgcggcggcagccgtcgttcccggtgcaggccctctacgagctctgcaagcgctccttcccctccccttccgccgcctcatcgtctcccccgcccgctgatgtcgtccgcagcatctcctcgctcatggatacaatcactcctgcggatgttgggctcagagattataatcttgaggacgacagggggcatggattttttgactccaacctcctcaagggttcaggaaggcttcctcggtgggcgcggcccatcaagtaccttcatatctacagctgtgatgcattctctattggaatattctgcttgccaacttcatcagtcattcctcttcatgatcatccaggaatgactgtactgagcaaaatcctttatggttccatgcatgtgaaatcatatgattggatagagcctactgtcctagcaagtagccagccagcaaggttggccaaattacatacagatgatgttcgtactgctccatgtccaacctccattttgtatccccaaagtggtgggaacctgcactgcttcacttcagtatcttcttgtgctgttcttgatgtccttgccccaccatataacgatgacgctggtcggatttgcacttattttcatgactatccattttcaagtctctcagcagctggacgcacgaaggtagctggtaacccagataattatgcatggctggaggccataaacactccagtgaatatcaacatgcacactggcatgtataccggtccaactgtacaggaacttcagacatgatgtaaagatgaaccggagcatcaagcagcagctgggtgcctcttcactgatagtagagctctaatatagtgatgtatgttctatactttgaggttagcttttcccctctggccccctttgttggagaaactgttgtacttcagttaagagataagttttcagagtaatttctcctaatcagtttagtagaggtttcaggttcactaacctgagcagtgatcaggcttttagcttatttatttatgtttgtgcaacgctggaatggttttgaatgcaaaattgtcactgatgttgccgc

SEQ ID NO: 22575 - protein, 263 aa, Zea mays subsp. mays
  misc_feature (1)..(263): Ceres Seq. ID no. 12409240
MAWGVSPRRQPSFPVQALYELCKRSFPSPSAASSSPPPADVVRSISSLMDTITPADVGLRDYNLEDDRGHGFFDSNLLKGSGRLPRWARPIKYLHIYSCDAFSIGIFCLPTSSVIPLHDHPGMTVLSKILYGSMHVKSYDWIEPTVLASSQPARLAKLHTDDVRTAPCPTSILYPQSGGNLHCFTSVSSCAVLDVLAPPYNDDAGRICTYFHDYPFSSLSAAGRTKVAGNPDNYAWLEAINTPVNINMHTGMYTGPTVQELQT

SEQ ID NO: 22576 - protein, 215 aa, Zea mays subsp. mays
  misc_feature (1)..(215): Ceres Seq. ID no. 12409241
MDTITPADVGLRDYNLEDDRGHGFFDSNLLKGSGRLPRWARPIKYLHIYSCDAFSIGIFCLPTSSVIPLHDHPGMTVLSKILYGSMHVKSYDWIEPTVLASSQPARLAKLHTDDVRTAPCPTSILYPQSGGNLHCFTSVSSCAVLDVLAPPYNDDAGRICTYFHDYPFSSLSAAGRTKVAGNPDNYAWLEAINTPVNINMHTGMYTGPTVQELQT

SEQ ID NO: 22577 - protein, 141 aa, Zea mays subsp. mays
  misc_feature (1)..(141): Ceres Seq. ID no. 12409242
MTVLSKILYGSMHVKSYDWIEPTVLASSQPARLAKLHTDDVRTAPCPTSILYPQSGGNLHCFTSVSSCAVLDVLAPPYNDDAGRICTYFHDYPFSSLSAAGRTKVAGNPDNYAWLEAINTPVNINMHTGMYTGPTVQELQT

SEQ ID NO: 22578 - DNA, 1450 bp, Zea mays subsp. mays
  misc_feature (1)..(1450): Ceres Seq. ID no. 12409243
agggagacggacaaaaggagaggcgtggacacgggacgcgaggtagacagcgcccggcgtgacgtggcgcgagatggagagcggagaggggggctcaccaaactgcaagtctgtctcctgactcctcgccggcgtgccggatctcctgtctctctcgcggtcggcggccgcatagcctcgttcactcgcacgacacagggcaggggggcgatgggctgcgcgacgtccaagcagttcagcaggagcgcgccggcgcacgcggatccggccgtgctggcgacccagacctcattcacggtgaacgaggtggaggcgctgtacgagctgtacaagaagctgagctgctccatcgtcaaagacgggctcatccacaaggaggagttccagctcgccttgttcaggaacagcaggagagcgaacctctttgcagacagggtcttcgatctgttcgatctcaagcggaacggagtcatcgatttcgaggagttcgtgcggtcgctcagtgtgttccaccctaaagcagatacgtcggagaagacggcgttcgctttcaagctgtatgatctgaggggaacaggctacatcgagaaagaagagctcagagagatggtcttggcgctgcttgatgagtccgacctctgcctttcagacagcaccgtcgagacgatcgtcgataacacgttcagccaagcggactcgaacggagatggcaggatagatcctgaagaatgggaggagttcgtgaagaagaacccggcaacgttaaggaacatgactctcccctatctgcaggacatcaccatgtcatttccgagcttcataatgcgttcagaagccagtgactgaaatgtttgcgtacatctgcgtgtaaggaagcaccgttccatcagctctgctgtttgttggagcctacagcttagtccatggcacgaggcaccggagaaagttcagaatgtagcagcaacggccagcagagtgcatgagggttgctgccatagctgcaggctgcagccaaacaaaatgatgaccaaagattcatctagtgtcagcttcagggttcagatggtataccagccaacaattttctttctcggtatctaaacaccgtggatgttgcgtttaaaaaaattgttgcagaggatcaacaagtctgttcatcgaagcagtgcctgagtttagaatcagaagctaactgtctattgctgagatgctttcgtctaaatcttgcgtgtagttgtaactgcaaggaaagaataacttgtggagagttggatttgttgatgaaccttagtagttcttgacttggttagttgtttccacatttcttcgcagtgccagtgcgtgcacttgtaacttgcaaattcttctcaatccacccctaatcgaagggtggatccagttccgcatgtaatgaggcaatatcatcaatagtttatgcttcgtttatccc

SEQ ID NO: 22579 - protein, 281 aa, Zea mays subsp. mays
  misc_feature (1)..(281): Ceres Seq. ID no. 12409244
RETDKRRGVDTGREVDSARRDVARDGERRGGLTKLQVCLLTPRRRAGSPVSLAVGGRIASFTRTTQGRGAMGCATSKQFSRSAPAHADPAVLATQTSFTVNEVEALYELYKKLSCSIVKDGLIHKEEFQLALFRNSRRANLFADRVFDLFDLKRNGVIDFEEFVRSLSVFHPKADTSEKTAFAFKLYDLRGTGYIEKEELREMVLALLDESDLCLSDSTVETIVDNTFSQADSNGDGRIDPEEWEEFVKKNPATLRNMTLPYLQDITMSFPSFIMRSEASD

SEQ ID NO: 22580 - protein, 211 aa, Zea mays subsp. mays
  misc_feature (1)..(211): Ceres Seq. ID no. 12409245
MGCATSKQFSRSAPAHADPAVLATQTSFTVNEVEALYELYKKLSCSIVKDGLIHKEEFQLALFRNSRRANLFADRVFDLFDLKRNGVIDFEEFVRSLSVFHPKADTSEKTAFAFKLYDLRGTGYIEKEELREMVLALLDESDLCLSDSTVETIVDNTFSQADSNGDGRIDPEEWEEFVKKNPATLRNMTLPYLQDITMSFPSFIMRSEASD

SEQ ID NO: 22581 - DNA, 1628 bp, Zea mays subsp. mays
  misc_feature (1)..(1628): Ceres Seq. ID no. 12409250
aaccccaccccaccgcccgcaaccgcaagctcagattccctccccaccccaccccaccccaccgtcccgctcactccagcccagcccgcgtccccacagcccagcgacagcgggcaccggcggcatccagccatgtgcggcggcgccatcctgtcggacatcatcccgccgccgccaccgcggcgggtcacggctggccacctctggcccgagagcaagaagccgaggagggctgcatccggcaggaggggagcccccgtggagcagcatgagcaggaggaggatttcgaggccgacttcgaggagttcgaggtggagtccggcgagtcggagctcgagtccgaggacgagcccaagcccttcgccgcccccaggagcgcgctcgccagaggtggactaaacactggtgcagctggtgtcgatggccctgctgcaaattcagttaaaaggaagaggaagaaccagttcaggggtatccgccggcgcccgtggggcaaatgggctgctgagatcagagatcctcgcaagggcgtgcgcgtctggctcggtactttcaactcccccgaagaagctgccagagcttacgacgccgaggcacgcaggatccgcggcaagaaggctaaagtcaacttcccggatgaggttcctacggcggtttctcagaagcgccgtgctgctgggcctgcctctctgaaagcgcctaagatggacgttgaggaggagaagccgatcatcaagctcgcagtgaacaatatgaccaactcaaacgcatatcactaccctgccgtcgtcggccacaacatcatacccgagccattcatgcagactcagaacatgccattcgctcctctggtgaattatgctgccctagtgaacctgtcttcagaccaaggcagcaactcgttcggttgctcggacttcagcctcgagaacgactccaggacccctgacataacttcggtgcctgcgcccgttgccaccttggccgccgttggcgagtctgtgttcgtccagaacaccgccggccatgctgtggcgtctcctgcgacggggaacactggtgttgatctcgccgagttggagccgtatatgaatttcctgatggacggtggttcagacgactcgatcagcactctcttgagctgtgatggatcccaggacgtggtcagcaacatggacctttggagcttcgaggacatgcccatgtctgctggtttctactgaggcctgaggcccagcgactggtgcttgtgtacatagggggggacaaagggtaagagcctgcagtaacagagattggctctttctggtacttgcaatttctatcccttcaactctttcttccgcccccgtgtttcaggaataatgttctggagatgaagaaacgcttgcgtgggcgtgcctgcaggcacgcgtgtagtagctgcggtattagtatatatgcttagatgttcagtcacttcctttaagtacaatttggcgctggacatgtaccttattttactatgtatccgtgacaacagctatgtgtctgctccttttattttcttgtctttgcttcaaaaaaatggctctgaacattgcgagtttgtactttgtagacaatatatatatatatatatgtgtgg

SEQ ID NO: 22582 - protein, 407 aa, Zea mays subsp. mays
  misc_feature (1)..(407): Ceres Seq. ID no. 12409251
NPTPPPATASSDSLPTPPHPTVPLTPAQPASPQPSDSGHRRHPAMCGGAILSDIIPPPPPRRVTAGHLWPESKKPRRAASGRRGAPVEQHEQEEDFEADFEEFEVESGESELESEDEPKPFAAPRSALARGGLNTGAAGVDGPAANSVKRKRKNQFRGIRRRPWGKWAAEIRDPRKGVRVWLGTFNSPEEAARAYDAEARRIRGKKAKVNFPDEVPTAVSQKRRAAGPASLKAPKMDVEEEKPIIKLAVNNMTNSNAYHYPAVVGHNIIPEPFMQTQNMPFAPLVNYAALVNLSSDQGSNSFGCSDFSLENDSRTPDITSVPAPVATLAAVGESVFVQNTAGHAVASPATGNTGVDLAELEPYMNFLMDGGSDDSISTLLSCDGSQDVVSNMDLWSFEDMPMSAGFY

SEQ ID NO: 22583 - protein, 363 aa, Zea mays subsp. mays
  misc_feature (1)..(363): Ceres Seq. ID no. 12409252
MCGGAILSDIIPPPPPRRVTAGHLWPESKKPRRAASGRRGAPVEQHEQEEDFEADFEEFEVESGESELESEDEPKPFAAPRSALARGGLNTGAAGVDGPAANSVKRKRKNQFRGIRRRPWGKWAAEIRDPRKGVRVWLGTFNSPEEAARAYDAEARRIRGKKAKVNFPDEVPTAVSQKRRAAGPASLKAPKMDVEEEKPIIKLAVNNMTNSNAYHYPAVVGHNIIPEPFMQTQNMPFAPLVNYAALVNLSSDQGSNSFGCSDFSLENDSRTPDITSVPAPVATLAAVGESVFVQNTAGHAVASPATGNTGVDLAELEPYMNFLMDGGSDDSISTLLSCDGSQDVVSNMDLWSFEDMPMSAGFY

SEQ ID NO: 22584 - DNA, 1320 bp, Zea mays subsp. mays
  misc_feature (1)..(1320): Ceres Seq. ID no. 12409283
agaaaggattctatactaatgcttgagtgtcgccttgttcaacttctcaaccaaggcagagagagttttcatccggcagccgccgagcctgagatccctgcaccgccgcccgccggcccgccggaatggagttcgccttagtcgagagtgaatcgttctcgccttcctgccccacgcttaccatgccagcgctgtcgattggcaacgtggggcagctcgccgtcgaccttctcatatcctcgtcgcgggcgaggcgggtggcctacctcgacgagccctccgtgctgccctgcgccggcaacgacgccttcggccctgacgccgtcggcgacctcgcactcgctctcgaagcttatgaatctacatctcataagctggctttcattcagcaaaggtctccagttactacaggaatgatggtttcatttgcaaaaaatgttgctgatttcataagcagcatcgggaaggaccatattgtcattatatcaagtttagattctggaaagaggagagtgattgatgcatccagtgacatgcaggtgtattacctttcaagttgcaatgaagatggttctgatccagaatatgagaaattggggtggaaaaagcttgaggattacgatccatctcagaaacgttggaattatcttgctagcctggttaagggtggtggtctttcagaagatatggatgatgatactgatgagatgacaataaatgattactatgcaagcttgccatttgcagcactattctctgcctgcaaggctaaaggcttgaaagtttcttgtgtcctgtgctactgctcggaaggcgacaacatgccagaatctttccagttagctgaagcaatatgcaaacttctaggtcatggccctgagaaattccatggaaatgggtcaaatgggtggatcgttcccttgtcatggaaatcagtttatggaccaccacctgatatgtctatcttttagtgttgaattatgatctggtgaagttgccatcacggaaaatgctgagtagaatcgaggatgttgaactcttcatttagacagagtaccagaagtatccaggaaggtgagttgcagacgtttgtggtcagttggtaaaggattactgaacactcaaggatggaacttctgcaggcaccatgatactgaacccttaaatgcatgaatcagaatatttttgcaacttgtactgtggctactgagagtcagatctttgtcaactcaggtctgctagggtgcttaccatcatactgccgtttccattctaaccatggaattccaagcttctcgtctgccgttttggcagttttgc

SEQ ID NO: 22585 - protein, 281 aa, Zea mays subsp. mays
  misc_feature (1)..(281): Ceres Seq. ID no. 12409284
MEFALVESESFSPSCPTLTMPALSIGNVGQLAVDLLISSSRARRVAYLDEPSVLPCAGNDAFGPDAVGDLALALEAYESTSHKLAFIQQRSPVTTGMMVSFAKNVADFISSIGKDHIVIISSLDSGKRRVIDASSDMQVYYLSSCNEDGSDPEYEKLGWKKLEDYDPSQKRWNYLASLVKGGGLSEDMDDDTDEMTINDYYASLPFAALFSACKAKGLKVSCVLCYCSEGDNMPESFQLAEAICKLLGHGPEKFHGNGSNGWIVPLSWKSVYGPPPDMSIF

SEQ ID NO: 22586 - protein, 262 aa, Zea mays subsp. mays
  misc_feature (1)..(262): Ceres Seq. ID no. 12409285
MPALSIGNVGQLAVDLLISSSRARRVAYLDEPSVLPCAGNDAFGPDAVGDLALALEAYESTSHKLAFIQQRSPVTTGMMVSFAKNVADFISSIGKDHIVIISSLDSGKRRVIDASSDMQVYYLSSCNEDGSDPEYEKLGWKKLEDYDPSQKRWNYLASLVKGGGLSEDMDDDTDEMTINDYYASLPFAALFSACKAKGLKVSCVLCYCSEGDNMPESFQLAEAICKLLGHGPEKFHGNGSNGWIVPLSWKSVYGPPPDMSIF

SEQ ID NO: 22587 - protein, 185 aa, Zea mays subsp. mays
  misc_feature (1)..(185): Ceres Seq. ID no. 12409286
MMVSFAKNVADFISSIGKDHIVIISSLDSGKRRVIDASSDMQVYYLSSCNEDGSDPEYEKLGWKKLEDYDPSQKRWNYLASLVKGGGLSEDMDDDTDEMTINDYYASLPFAALFSACKAKGLKVSCVLCYCSEGDNMPESFQLAEAICKLLGHGPEKFHGNGSNGWIVPLSWKSVYGPPPDMSIF

SEQ ID NO: 22588 - DNA, 1774 bp, Zea mays subsp. mays
  misc_feature (1)..(1774): Ceres Seq. ID no. 12409287
aacgcctccgctttcattcttctcttcccctcggcttcgagggttgtttttatttctttctttcctttttccgttttttattttatttttttcttttttcgttccttttctcgttccccccgttggggttttgagctccgacgaaccctaataatcgccggggaccggcggacgatcgcccgccggcatgcaccatcagcagcggatgaagcaggcggcggcggccgcggccgcggcgcagcagcagcagctgatgcagcaggcactgctcctgcagcagcagcagcagtcgcaggcgcagccgccctttttccccgggcaccacccgcaccccggcctcctcgccgcaccacagatagagcccatagtcagtggaaacctgcctcctgggtttgattcaagtacatgccgcagcgtgtatgttggcaatatccatcttcaagtgacggacacagtactgcaggaagtcttccaaagcattggtccagtagaagggtgcaagctcatcagaaaagaaaagtcatcctttggtttcattgactactatgaccgcagatatgctgcactggcaattttatctctcaatggcagacaactgtatggtcagccgattaaagtcaattgggcatatacaagtactccgagggaggacacatcaggtcattttaatatttttgttggggatctttgcccggaagtcactgatgctactttgtttgcatttttctctggatactctacttgctcagatgctagggttatgtgggaccagaaaacaggacgatccagagggtttggttttgtttctttcaggaaccagcaggatgctcaaagtgcgataaatgacttgaatgggaagtggcttgggaaccgtcaaattcgttgcaattgggcaacgaaaggtgctaatgctggtgaagagaaacaaattctggacactaaggttgacctgtcaaatggttcatcagaatctggaaaagagaatccaaatgatgatggtcctgaaaataaccctcagtttactactgtttatgttggcaatcttcctcacgaggctaccatgaatgatgtgcacctgtttttccattcactgggggctggttcaattgaggaagtccgtgtaactcgtgataaaggctttggctttgtgaggtacagcacccatgaggaggctgcattggcaattcagatgggtaatggccaacttattggcgggaggcagataaagtgttcctggggaagcaagccgactccacaagggacagcatccttgcctctgcctcccccagcactggcaccattctccactggagtgtcggccaccgacttgctggcctaccagcgcctgactctgagcaagatggcctcgaacccagccctaatgggtcagcacgccttgaagcaggtcgctgcattggggattggcggcggagccagccagtccatctatgatggcggcttccagggcatcaatactgccaccagcacaacttccgtccagcagcagcagcagctcatgtactactagagtactactactccatgaggcacccagctacctatcccttcaagaggaaggcgaggatgaatggatgatgccccttactatacccctatacatatagtagatgaagtcattactaggacctttttttccctaatctttttaagacccatctaagtaacatgtcctgtctatgctagctatataattgtgtatttctggatacataaaggcaaggttcttagtagtataatcttctgtgtttgaccg

SEQ ID NO: 22589 - protein, 446 aa, Zea mays subsp. mays
  misc_feature (1)..(446): Ceres Seq. ID no. 12409288
MHHQQRMKQAAAAAAAAQQQQLMQQALLLQQQQQSQAQPPFFPGHHPHPGLLAAPQIEPIVSGNLPPGFDSSTCRSVYVGNIHLQVTDTVLQEVFQSIGPVEGCKLIRKEKSSFGFIDYYDRRYAALAILSLNGRQLYGQPIKVNWAYTSTPREDTSGHFNIFVGDLCPEVTDATLFAFFSGYSTCSDARVMWDQKTGRSRGFGFVSFRNQQDAQSAINDLNGKWLGNRQIRCNWATKGANAGEEKQILDTKVDLSNGSSESGKENPNDDGPENNPQFTTVYVGNLPHEATMNDVHLFFHSLGAGSIEEVRVTRDKGFGFVRYSTHEEAALAIQMGNGQLIGGRQIKCSWGSKPTPQGTASLPLPPPALAPFSTGVSATDLLAYQRLTLSKMASNPALMGQHALKQVAALGIGGGASQSIYDGGFQGINTATSTTSVQQQQQLMYY

SEQ ID NO: 22590 - protein, 440 aa, Zea mays subsp. mays
  misc_feature (1)..(440): Ceres Seq. ID no. 12409289
MKQAAAAAAAAQQQQLMQQALLLQQQQQSQAQPPFFPGHHPHPGLLAAPQIEPIVSGNLPPGFDSSTCRSVYVGNIHLQVTDTVLQEVFQSIGPVEGCKLIRKEKSSFGFIDYYDRRYAALAILSLNGRQLYGQPIKVNWAYTSTPREDTSGHFNIFVGDLCPEVTDATLFAFFSGYSTCSDARVMWDQKTGRSRGFGFVSFRNQQDAQSAINDLNGKWLGNRQIRCNWATKGANAGEEKQILDTKVDLSNGSSESGKENPNDDGPENNPQFTTVYVGNLPHEATMNDVHLFFHSLGAGSIEEVRVTRDKGFGFVRYSTHEEAALAIQMGNGQLIGGRQIKCSWGSKPTPQGTASLPLPPPALAPFSTGVSATDLLAYQRLTLSKMASNPALMGQHALKQVAALGIGGGASQSIYDGGFQGINTATSTTSVQQQQQLMYY

SEQ ID NO: 22591 - protein, 424 aa, Zea mays subsp. mays
  misc_feature (1)..(424): Ceres Seq. ID no. 12409290
MQQALLLQQQQQSQAQPPFFPGHHPHPGLLAAPQIEPIVSGNLPPGFDSSTCRSVYVGNIHLQVTDTVLQEVFQSIGPVEGCKLIRKEKSSFGFIDYYDRRYAALAILSLNGRQLYGQPIKVNWAYTSTPREDTSGHFNIFVGDLCPEVTDATLFAFFSGYSTCSDARVMWDQKTGRSRGFGFVSFRNQQDAQSAINDLNGKWLGNRQIRCNWATKGANAGEEKQILDTKVDLSNGSSESGKENPNDDGPENNPQFTTVYVGNLPHEATMNDVHLFFHSLGAGSIEEVRVTRDKGFGFVRYSTHEEAALAIQMGNGQLIGGRQIKCSWGSKPTPQGTASLPLPPPALAPFSTGVSATDLLAYQRLTLSKMASNPALMGQHALKQVAALGIGGGASQSIYDGGFQGINTATSTTSVQQQQQLMYY

SEQ ID NO: 22592 - DNA, 1282 bp, Zea mays subsp. mays
  misc_feature (1)..(1282): Ceres Seq. ID no. 12409311
aaactctgctgcatcttcttccactctccagtctccactagcatcagtcgccgctgcctatcctcgagcaccatttccatcaacagcatccgcctctggcaagctagcgacanaactcatggcactccgcgcgctcgacaacacgatgcccgccgccgtcgaggagcggcccaagaaggtggctaaggtgggcgtccccgccgccgccgccaaggccgcngcctcccccgggagtggcggcaagaagaagaaggggaacgacgagaactcggcgccaagggccacggccgcggcggcggagcaggcngtggagtacatctcgtcggaggagctggaggcggcggccaaccctaaggccaagggccgcgggggctggtcgcgggccttgactccaaggactgggtcaggacctgcgaggcgctcaacgacgcgcgccgcctcgcgatccaccaccccgcgctgctgaacccgatcctggagaaggtggtgctggcggtcgtgaagacgatgaagagcccccgcagcgcggtgctcaagacgtccatcatggcctgcgccgacatcttcagctccttcggcaacctcctcgcctccgtctccgacgacgccttcgacaagctgctgctccagctcctgctgaaggcgtcccaggacaagcggttcgtgtgcgaggaggccgagaaggcgacgcgcgcgatggcggcgtcgatgccgccgctgccgctgctgaagaagctcaaggcgtacgtccaccacgccaacctcagggtcagggctaaggccgccgtcgccatctcccactgcgccgcccggatggacatcggcgcgatgaaggagttcgggatgtcggcgctgctgcagctggcggcggagctgctgaacgaccggctgccggaggcgagggaggccgcccgcggcgtggtggcgtcgacgcacgcggccttcgccaaggaggccgccgcgagcggccaggaggaggacgcggccgcgtcctgggagagcctctgcgcgctcagcctcccgcccatctccgcgcaggccgtcgccaagatcgctgccgccgcctcctcctcgcagtagccacggcacgcgtgcggacttgnccgctggcgttgtttttgggggtcgtctggttcggttcagaagtagcgctcgtgagtcttcagacagagctcgtttgtcgccgccgccgagtctgtttgtttgttctttctactccatgctatctcgcatggttagtgttctgtttatggcttcgtcaagtaataacatagtatcaatt

SEQ ID NO: 22593 - protein, 190 aa, Zea mays subsp. mays
  misc_feature (1)..(190): Ceres Seq. ID no. 12409312
MKSPRSAVLKTSIMACADIFSSFGNLLASVSDDAFDKLLLQLLLKASQDKRFVCEEAEKATRAMAASMPPLPLLKKLKAYVHHANLRVRAKAAVAISHCAARMDIGAMKEFGMSALLQLAAELLNDRLPEAREAARGVVASTHAAFAKEAAASGQEEDAAASWESLCALSLPPISAQAVAKIAAAASSSQ

SEQ ID NO: 22594 - protein, 177 aa, Zea mays subsp. mays
  misc_feature (1)..(177): Ceres Seq. ID no. 12409313
MACADIFSSFGNLLASVSDDAFDKLLLQLLLKASQDKRFVCEEAEKATRAMAASMPPLPLLKKLKAYVHHANLRVRAKAAVAISHCAARMDIGAMKEFGMSALLQLAAELLNDRLPEAREAARGVVASTHAAFAKEAAASGQEEDAAASWESLCALSLPPISAQAVAKIAAAASSSQ

SEQ ID NO: 22595 - protein, 154 aa, Zea mays subsp. mays
  misc_feature (1)..(154): Ceres Seq. ID no. 12409314
  misc_feature (38)..(38): Xaa is any aa, unknown or other
  misc_feature (73)..(73): Xaa is any aa, unknown or other
  misc_feature (102)..(102): Xaa is any aa, unknown or other
NSAASSSTLQSPLASVAAAYPRAPFPSTASASGKLATXLMALRALDNTMPAAVEERPKKVAKVGVPAAAAKAXASPGSGGKKKKGNDENSAPRATAAAAEQXVEYISSEELEAAANPKAKGRGGWSRALTPRTGSGPARRSTTRAASRSTTPRC

SEQ ID NO: 22596 - DNA, 1268 bp, Zea mays subsp. mays
  misc_feature (1)..(1268): Ceres Seq. ID no. 12409325
ctgggcccaccgtaactgactgggtgttctttacagacacgtgacgtcgcgcaccgggcccgtctatcgagtattcggtcccattcgtcagtgctcggacacctgactaataacaaaagaactcgctccattcagagattcagagaagacccgcctctcccgtgaggccgtgacgcgacgccggatcgtcctcgtctcctagctcgtggaatgaagggaggtggcgtcatcagggccgccggcggaggtgccggcggtgcgggtctgttgcgaacgcgactgcggcttcccgtggtgctcctctcctgctccctcttcttcctcgccggcttcttcggctcgctcctcttcacccaggatccggaggaggcggatatgccggtgccgagagagcggctgttggatgcggcgtggccggagatgccttacggcgagtccggcgaggctgcgccgtccttgatcccataccagattttgagctggcagcctcgtgctttgtactttccacaatttgcgacatcagaacagtgtgaaaatatagtaaaaacggcaaaggagagacttaagccatcaacattagccctgaggaaaggagaaaccgcagagagtacaaaaggaatcaggacaagttcgggaacattccttagtgctaatgaagacccaactgaaacccttgcggaaatcgagaagaagattgcaagggctaccatgttacccagaaatcatggggagccatttaatgtcctgcggtataatattggacaaaggtatgcttcacattatgacgcatttgacccagctcagtatggtccacaaaaaaatcaaagggtggcatctttcttgctttatctcacggatgtcgaagaagggggagaaactatgttcccatacgagaacagtgagaatatggatataggctatgactatgagaagtgcattggcctaaaggtaaaaccaaggaagggtgacggactcttgttttactcccttatggtaaatgggaccattgaccggacttcacttcatggtagctgccccgtcatcaaaggcgagaaatgggtcgccaccaaatggatcagagacaatatagtgtagaaatcgaaaggctcaggtgtcatgtgccctccaaaaaaatagatcatgcgcacatatactgaccatatacttcagtgtttgttcaattgccatggacagttggaccaacggaaggaaagtgtaaccaatctatttgcatcgtgtcaatatatagcctacaacttacatgtggc

SEQ ID NO: 22597 - protein, 294 aa, Zea mays subsp. mays
  misc_feature (1)..(294): Ceres Seq. ID no. 12409326
MKGGGVIRAAGGGAGGAGLLRTRLRLPVVLLSCSLFFLAGFFGSLLFTQDPEEADMPVPRERLLDAAWPEMPYGESGEAAPSLIPYQILSWQPRALYFPQFATSEQCENIVKTAKERLKPSTLALRKGETAESTKGIRTSSGTFLSANEDPTETLAEIEKKIARATMLPRNHGEPFNVLRYNIGQRYASHYDAFDPAQYGPQKNQRVASFLLYLTDVEEGGETMFPYENSENMDIGYDYEKCIGLKVKPRKGDGLLFYSLMVNGTIDRTSLHGSCPVIKGEKWVATKWIRDNIV

SEQ ID NO: 22598 - protein, 239 aa, Zea mays subsp. mays
  misc_feature (1)..(239): Ceres Seq. ID no. 12409327
MPVPRERLLDAAWPEMPYGESGEAAPSLIPYQILSWQPRALYFPQFATSEQCENIVKTAKERLKPSTLALRKGETAESTKGIRTSSGTFLSANEDPTETLAEIEKKIARATMLPRNHGEPFNVLRYNIGQRYASHYDAFDPAQYGPQKNQRVASFLLYLTDVEEGGETMFPYENSENMDIGYDYEKCIGLKVKPRKGDGLLFYSLMVNGTIDRTSLHGSCPVIKGEKWVATKWIRDNIV

SEQ ID NO: 22599 - protein, 224 aa, Zea mays subsp. mays
  misc_feature (1)..(224): Ceres Seq. ID no. 12409328
MPYGESGEAAPSLIPYQILSWQPRALYFPQFATSEQCENIVKTAKERLKPSTLALRKGETAESTKGIRTSSGTFLSANEDPTETLAEIEKKIARATMLPRNHGEPFNVLRYNIGQRYASHYDAFDPAQYGPQKNQRVASFLLYLTDVEEGGETMFPYENSENMDIGYDYEKCIGLKVKPRKGDGLLFYSLMVNGTIDRTSLHGSCPVIKGEKWVATKWIRDNIV

SEQ ID NO: 22600 - DNA, 1187 bp, Zea mays subsp. mays
  misc_feature (1)..(1187): Ceres Seq. ID no. 12409333
ccaacagcccgcatcgctcactccgtcactcactcggcgcggcgcccatccccgcggttctcacgagcgcgcgcgcctgcgtccggcgccgtccgccatggcgtcgtccaagcctttattccccttccccgtccccgcccccgacccgtccgacgaggtcgtgcgcgagttcggcccgctgctccgggtctacaagagcggccgcatcgagcggcccctggtggctccgcccgtggagcctggccacgacgccgccacgggggtccaatccaaggacgtccacctcggctcctactcggcccgcctctacctgccccccgtggccgacgccggtgccaagctgcccgtcgtcgtgttcgtgcacggcggcggcttcgtggccgagtccgccgcctcgcccaactaccacctcttcctcaacaggctcgccgccgcctgccccgcgctcgcggtctccgtcgactaccgcctggcgcccgagcacccgctcccggcggggtacgacgactgcctcgccgcgctcaagtgggtgctttccgccgccgacccctgggtcgccgcccacggggatctcgcgcgcgtcttcgtcgccggggacagcgccggcggcaacgtctgccactacctcgccatccacccggacgtcgtccaggcgcagcagcagggctgcccgccgccgctcaagggcgccgtgctcatccacccctggttctggggctccgaggccgtgggcgaggagcccagggaccccgccgtgcgcaccatgggcgccggactctggttcttcgcgtgccccgatgctaatagcatggaagacccgcggatgaaccccatggcgcccgccgcaccgggactccacacgctggcgtgtgagcgcgtcatggtgtgtaccgcggagggcgacttcctcaggtggcgcggccgcgcgtacgccgaggcggtggccgcggcgaggggaggccgcctggggcaggccgccggcgtcgagctgctggagaccatgggagagggccatgtcttcttcctcttcaaacccgactgcgacaaggccaaggagatgctggacaagatggcggctttcatcaatgcgccgtgaacgtgaacgtgatccgtgacgcgtgcgcccttgttcctttgtgtttgcgtgacaatgtggaaaataaaataatatatttcagctgttttgg

SEQ ID NO: 22601 - protein, 364 aa, Zea mays subsp. mays
  misc_feature (1)..(364): Ceres Seq. ID no. 12409334
QQPASLTPSLTRRGAHPRGSHERARLRPAPSAMASSKPLFPFPVPAPDPSDEVVREFGPLLRVYKSGRIERPLVAPPVEPGHDAATGVQSKDVHLGSYSARLYLPPVADAGAKLPVVVFVHGGGFVAESAASPNYHLFLNRLAAACPALAVSVDYRLAPEHPLPAGYDDCLAALKWVLSAADPWVAAHGDLARVFVAGDSAGGNVCHYLAIHPDVVQAQQQGCPPPLKGAVLIHPWFWGSEAVGEEPRDPAVRTMGAGLWFFACPDANSMEDPRMNPMAPAAPGLHTLACERVMVCTAEGDFLRWRGRAYAEAVAAARGGRLGQAAGVELLETMGEGHVFFLFKPDCDKAKEMLDKMAAFINAP

SEQ ID NO: 22602 - protein, 332 aa, Zea mays subsp. mays
  misc_feature (1)..(332): Ceres Seq. ID no. 12409335
MASSKPLFPFPVPAPDPSDEVVREFGPLLRVYKSGRIERPLVAPPVEPGHDAATGVQSKDVHLGSYSARLYLPPVADAGAKLPVVVFVHGGGFVAESAASPNYHLFLNRLAAACPALAVSVDYRLAPEHPLPAGYDDCLAALKWVLSAADPWVAAHGDLARVFVAGDSAGGNVCHYLAIHPDVVQAQQQGCPPPLKGAVLIHPWFWGSEAVGEEPRDPAVRTMGAGLWFFACPDANSMEDPRMNPMAPAAPGLHTLACERVMVCTAEGDFLRWRGRAYAEAVAAARGGRLGQAAGVELLETMGEGHVFFLFKPDCDKAKEMLDKMAAFINAP

SEQ ID NO: 22603 - protein, 274 aa, Zea mays subsp. mays
  misc_feature (1)..(274): Ceres Seq. ID no. 12409336
NSPHRSLRHSLGAAPIPAVLTSARACVRRRPPWRRPSLYSPSPSPPPTRPTRSCASSARCSGSTRAAASSGPWWLRPWSLATTPPRGSNPRTSTSAPTRPASTCPPWPTPVPSCPSSCSCTAAASWPSPPPRPTTTSSSTGSPPPAPRSRSPSTTAWRPSTRSRRGTTTASPRSSGCFPPPTPGSPPTGISRASSSPGTAPAATSATTSPSTRTSSRRSSRAARRRSRAPCSSTPGSGAPRPWARSPGTPPCAPWAPDSGSSRAPMLIAWKTRG

SEQ ID NO: 22604 - DNA, 1328 bp, Zea mays subsp. mays
  misc_feature (1)..(1328): Ceres Seq. ID no. 12409352
aaaacccatctcgcccccactcgtatccgcagagtactaaacatcaccagggaaggaggttgcgagttgcgaccgggggccggccgacccagccaaagtacgctaccactcttgctgcaccgaccgcgagggtgcaacaacgacttacatatatataaatatccgcgccgcagctagctagctagctagcagagcagcccggccgaagccgtgtagcctagcctcctcacatatagcagcagcaggacgagatcgtcgatcgatcgatggtgtctctgcagccctcatcagcggcgccgctcctgccggaggccgccaccgcgaacaagctcccgccgtggctctccctcgtcggcagcgtcgtcgcctcctccaccggtaccgcggccaccagcaagaagcggaagcgggacggcagcggcggcggcggcgacgaggacgaccgtggcgaggtcgtggacgggatcgagctcaatttcgacgccgcgccgctgccccccgagtggcaacgctgcctcgacatcaagtcggggcagatccactactacaacacgaggacgcagaagcggacgtgcaaggaccccagggggcacgacgggcagccggactaccgcgccgaagaaggccaggaggaggaggaggactccgcgaattattgcgcgccgccagggctggacctggagctgaacctcacgttcgagccgcgccgcgtgctcgccgcccacgggaagacgacgaagagggccaagcagcagcccgcggaggaggaggaggaggccgaggacgacgacgacagcgacagcagcagtagcagtagggagatggtggctggcgtgtgcgtgcggtgccacatgctggtgatgatgtgccgcgccagcccggcgtgccccaactgcaagttcctgcacccacccagccgcgccacgccgcctccgccgccgctcaagctcggcctccagctgctctgctgcagggactagctagagaccaaagcgtcccaacgacccatggatgggctggctccccagcaggcatgcgtgcaccagtagaacgcgcgcacgtgtgtcgcacgcatgtgcaaggaagacacagcgtaatattcaatcagaggcaggatggtgtggtagctagctagaggagttgatcagtagtggcggcgcctatgcccgtggccgaccgatcggctgtgcgtgcgtacgtacgtacggttcgccaaggggtatatcgtgtcataatgttattactcatgtggcgatggatggatggtggtggtgtagatatcataaagtgcatgcatagcataaatgtagctcggaactttcggcgtt

SEQ ID NO: 22605 - protein, 237 aa, Zea mays subsp. mays
  misc_feature (1)..(237): Ceres Seq. ID no. 12409353
MVSLQPSSAAPLLPEAATANKLPPWLSLVGSVVASSTGTAATSKKRKRDGSGGGGDEDDRGEVVDGIELNFDAAPLPPEWQRCLDIKSGQIHYYNTRTQKRTCKDPRGHDGQPDYRAEEGQEEEEDSANYCAPPGLDLELNLTFEPRRVLAAHGKTTKRAKQQPAEEEEEAEDDDDSDSSSSSREMVAGVCVRCHMLVMMCRASPACPNCKFLHPPSRATPPPPPLKLGLQLLCCRD

SEQ ID NO: 22606 - DNA, 1264 bp, Zea mays subsp. mays
  misc_feature (1)..(1264): Ceres Seq. ID no. 12409354
aattagttcctcgatcgattatcaccagcatctcacttcgttcagatatatatagcaagtctaagtcttagtttttgcttttggaacatctctctaatttcacgattgagcgtacgtgcgcacaaacaaacaaacaaacaaacaatatatgggttcttccaatgatgtcacggcgattcctctaatcgatgttgccccacttgtcaaaaagattgatgatccagacatggcaaatgataaggatttgctacgagttgttctaacgttggactatgcttgcaaggaggttggattcttttatgtgaaaggccacggcatttgtgagatgctaatgagggaagtgagggatgtgtcacacaaattctttcagcttccacatgaggaaaagatgaagattaagatgacacgtcaaagtgggtatagagggtatcaaaagctaggagagaatgttaccaaggaaaaacgtgatatgcacgaagcagtcaattgcttgactcctattgcacctggcaaatacggagaccttggtaaaacacttgaaggagacaatctgtggcctgaatacccatcaaatttgaaggtagtgctggaaaactatatcagccttgtcaaagatctgtcaaggaagatcatgcgaggtatagctttggcattgggtgggcctgctgatgcctttgaaaggggaatagcaggagatccttactgggctctcaggctggttagctaccctgtttcaagcagtgatgagaaacgcactgatgatactgggatgatgggatcgcacacagactacggacttgttacactggttaaccaggatgatgacatttgtgcccttgaggtccaaaatcgttccggtgtgtggatacgtgccaacccgattcctgaaacctttctttgcaacatcggtgacatgctccaggtctggtcaaatggaatttaccaacccacagttcatagagtcatcaacagctcccatcaacgccgcgtttctgctgtgtttttctatgagaccgattttgatgctgccgtagagcccgttgagttgtgcgtggagaaaacaggcggcgtcgccaagtatgacaaggtcgtgtatggggagcgtctggttcggaaggccttctgctgctttggccatttatagggctggagaataagttatattgctactgtgaaaacaaagggcatactatatgcattgcacacacaatgatctgttgttaaacctatgtgatatatattgtgaaataaaggaacacttatt

SEQ ID NO: 22607 - protein, 331 aa, Zea mays subsp. mays
  misc_feature (1)..(331): Ceres Seq. ID no. 12409355
MGSSNDVTAIPLIDVAPLVKKIDDPDMANDKDLLRVVLTLDYACKEVGFFYVKGHGICEMLMREVRDVSHKFFQLPHEEKMKIKMTRQSGYRGYQKLGENVTKEKRDMHEAVNCLTPIAPGKYGDLGKTLEGDNLWPEYPSNLKVVLENYISLVKDLSRKIMRGIALALGGPADAFERGIAGDPYWALRLVSYPVSSSDEKRTDDTGMMGSHTDYGLVTLVNQDDDICALEVQNRSGVWIRANPIPETFLCNIGDMLQVWSNGIYQPTVHRVINSSHQRRVSAVFFYETDFDAAVEPVELCVEKTGGVAKYDKVVYGERLVRKAFCCFGHL

SEQ ID NO: 22608 - protein, 305 aa, Zea mays subsp. mays
  misc_feature (1)..(305): Ceres Seq. ID no. 12409356
MANDKDLLRVVLTLDYACKEVGFFYVKGHGICEMLMREVRDVSHKFFQLPHEEKMKIKMTRQSGYRGYQKLGENVTKEKRDMHEAVNCLTPIAPGKYGDLGKTLEGDNLWPEYPSNLKVVLENYISLVKDLSRKIMRGIALALGGPADAFERGIAGDPYWALRLVSYPVSSSDEKRTDDTGMMGSHTDYGLVTLVNQDDDICALEVQNRSGVWIRANPIPETFLCNIGDMLQVWSNGIYQPTVHRVINSSHQRRVSAVFFYETDFDAAVEPVELCVEKTGGVAKYDKVVYGERLVRKAFCCFGHL

SEQ ID NO: 22609 - protein, 272 aa, Zea mays subsp. mays
  misc_feature (1)..(272): Ceres Seq. ID no. 12409357
MLMREVRDVSHKFFQLPHEEKMKIKMTRQSGYRGYQKLGENVTKEKRDMHEAVNCLTPIAPGKYGDLGKTLEGDNLWPEYPSNLKVVLENYISLVKDLSRKIMRGIALALGGPADAFERGIAGDPYWALRLVSYPVSSSDEKRTDDTGMMGSHTDYGLVTLVNQDDDICALEVQNRSGVWIRANPIPETFLCNIGDMLQVWSNGIYQPTVHRVINSSHQRRVSAVFFYETDFDAAVEPVELCVEKTGGVAKYDKVVYGERLVRKAFCCFGHL

SEQ ID NO: 22610 - DNA, 1315 bp, Zea mays subsp. mays
  misc_feature (1)..(1315): Ceres Seq. ID no. 12409386
aatctgacatctcatcttgatccatccagctttgcctcgatcgccggccggtagccatgtcccccacggaagaagccgctggtggtggtctcgacgactatgaccgcttgagcgagctgaaggcgttcgacgacagcaaggccggcgtcaagggcctcgtggacgctggcgtcacgaccatccctgccatcttccgcggccatctccttcaggaagggccgaaggtatcgtcctctagcagtagcagcagtactagtcttagcattatcccggtcatcgacctctcggcggcggacgcagtcgcacgggaggaggtggtcgcccagttgaaggctgcagccgagacggtggggttcttccagctggtgaaccacggcgttcccagcgagctcctgtccgagatgctggcgtcggtgaggcggttcaacgaggagccccacgaggtgaagcggccctactacacgcgggacgcacgtcgcaaggtgcggttcaactccaacttcgatctgttccagtcgccggcggccaactggcgcgacacgctcttctgcgaggcagcgccggagccgccgcgggcggaggagctgccggtcgccgtcaggcacgtgatgctggagtacggcggcgcggtgcgggaggtggcggcgcgcgtgctggggctgctctcggaggccctggggctgagccccgggcacctcgcagggatggggtgcgcggagggcctcagcctggtgtgcaagtgtgcaactactacccgccgtgcccggaaccggacctcaccctgggctgcagcaggcactcggaccccagcttcctgaccgtgctgctgcaggactcgcatgcgcagggcggcctgcaggcgctcctcgcatccaggtggctggacgtgcctccggtggccggcgcgctcctggtgaacgtcggagaccttctccagctggtcagcaacgggcggttcaagagcgtggagcaccgggtggtggctaaccggagcagggacacggcgagagtgtcagtggcgtgcttctgcaacgcggacatcgcgagatccacgaggctgtatggacccatcgcggagctcatcgccgcggacgacagcgacggcgcgggaagggcgctgtacaggaacgtgacggtcccggagttcctagcgcactacgacaagaaaggcctcgacggtcgcccggcgctccaccgcttccagctgcttcaataattttacatcacatcagtcctgactctggtgatatcatgtcagtatgtcactgtgggctactccggtactctaataaagttatggatggatcagatcaat

SEQ ID NO: 22611 - protein, 253 aa, Zea mays subsp. mays
  misc_feature (1)..(253): Ceres Seq. ID no. 12409387
MSPTEEAAGGGLDDYDRLSELKAFDDSKAGVKGLVDAGVTTIPAIFRGHLLQEGPKVSSSSSSSSTSLSIIPVIDLSAADAVAREEVVAQLKAAAETVGFFQLVNHGVPSELLSEMLASVRRFNEEPHEVKRPYYTRDARRKVRFNSNFDLFQSPAANWRDTLFCEAAPEPPRAEELPVAVRHVMLEYGGAVREVAARVLGLLSEALGLSPGHLAGMGCAEGLSLVCKCATTTRRARNRTSPWAAAGTRTPAS

SEQ ID NO: 22612 - protein, 138 aa, Zea mays subsp. mays
  misc_feature (1)..(138): Ceres Seq. ID no. 12409388
MLASVRRFNEEPHEVKRPYYTRDARRKVRFNSNFDLFQSPAANWRDTLFCEAAPEPPRAEELPVAVRHVMLEYGGAVREVAARVLGLLSEALGLSPGHLAGMGCAEGLSLVCKCATTTRRARNRTSPWAAAGTRTPAS

SEQ ID NO: 22613 - DNA, 1343 bp, Zea mays subsp. mays
  misc_feature (1)..(1343): Ceres Seq. ID no. 12409395
agttcccatccgccgcccgcgcacttgttccttccggcacagcacacaggacaccgtagacagattcatcgcgacgatggggctggacgtcgtggagatcgggatgggcgccgatttgagcctggatctgaggcacttcgcctccaaggccgtgcggcagagcaaggactacgcgccggcgccggcgccggacatggacgcctgcatccgccgcctcgaggaggagcggggcaagatcgagatgttcaagcgggagctgccgctctgcgcgcgcctcctcgcagacgtgatcgatgtgatgaaggaggaagcggggaaggcggtggcggaggaggacggcgccgccggggacaagagcaagtggatgagcacggcgcagctctggacgggcgattgcggccgcgaggacgcggaaccagagaagcaagacaaggagaggagctcgcctgaggccaggtctcgcgccgccggcggcgctttcttgccgctcaaggctgccgtgggctccggcgcgccggcgttcgcgccgctcggcttgagaatggacgacaaggccgccgcgcgcgccgggatgcccgacctgtgcttgctgtcgccgccggcgaccaagagcgccgccgaggagagccgacgccaggtggtggggtttgcgcaggcggcgacgagggcggccgccgccacggcgccagctgccccttcgcttagcgttggcgtccagtccccgtcgcagcaggcgaggaaggctcggcgttgctggtccacggagctgcatcgccagttcgtcgccgccttgaaccagctcggtggcccccaagttgccaccccaaagcagatcagggagctgatgaaggtggacggcctcacaaacgacgaagtgaaaagccaccttcagaaataccggctgcacaaccggagggcgccagggtccggcgtggtgagccagcccatcgtgctggtgggagggctgtggattccgcaggagcaaagcagctcgcagtccgggtctcccccacggcccgctccacttctccacctcaggcatcgcagtctcgtcggcggccaccgtcagctgcgaggaggaagacggacggtccgagagctatggctggaaatgatgcagaggctgctgctgctgctgctgctgagaggggagctgcagcctcaggaacgggaatcatcaggagggaaactgagagtagtgtagctgtctgtacacatacatagttacattacattacatacagggagtgagggagatcgggccttgagcgctcgagaccaaactgatgcttcgggtttgtacatcccaaagagatgagatgatacagttttgcggctaatcc

SEQ ID NO: 22614 - protein, 400 aa, Zea mays subsp. mays
  misc_feature (1)..(400): Ceres Seq. ID no. 12409396
VPIRRPRTCSFRHSTQDTVDRFIATMGLDVVEIGMGADLSLDLRHFASKAVRQSKDYAPAPAPDMDACIRRLEEERGKIEMFKRELPLCARLLADVIDVMKEEAGKAVAEEDGAAGDKSKWMSTAQLWTGDCGREDAEPEKQDKERSSPEARSRAAGGAFLPLKAAVGSGAPAFAPLGLRMDDKAAARAGMPDLCLLSPPATKSAAEESRRQVVGFAQAATRAAAATAPAAPSLSVGVQSPSQQARKARRCWSTELHRQFVAALNQLGGPQVATPKQIRELMKVDGLTNDEVKSHLQKYRLHNRRAPGSGVVSQPIVLVGGLWIPQEQSSSQSGSPPRPAPLLHLRHRSLVGGHRQLRGGRRTVRELWLEMMQRLLLLLLLRGELQPQERESSGGKLRVV

SEQ ID NO: 22615 - protein, 375 aa, Zea mays subsp. mays
  misc_feature (1)..(375): Ceres Seq. ID no. 12409397
MGLDVVEIGMGADLSLDLRHFASKAVRQSKDYAPAPAPDMDACIRRLEEERGKIEMFKRELPLCARLLADVIDVMKEEAGKAVAEEDGAAGDKSKWMSTAQLWTGDCGREDAEPEKQDKERSSPEARSRAAGGAFLPLKAAVGSGAPAFAPLGLRMDDKAAARAGMPDLCLLSPPATKSAAEESRRQVVGFAQAATRAAAATAPAAPSLSVGVQSPSQQARKARRCWSTELHRQFVAALNQLGGPQVATPKQIRELMKVDGLTNDEVKSHLQKYRLHNRRAPGSGVVSQPIVLVGGLWIPQEQSSSQSGSPPRPAPLLHLRHRSLVGGHRQLRGGRRTVRELWLEMMQRLLLLLLLRGELQPQERESSGGKLRVV

SEQ ID NO: 22616 - protein, 366 aa, Zea mays subsp. mays
  misc_feature (1)..(366): Ceres Seq. ID no. 12409398
MGADLSLDLRHFASKAVRQSKDYAPAPAPDMDACIRRLEEERGKIEMFKRELPLCARLLADVIDVMKEEAGKAVAEEDGAAGDKSKWMSTAQLWTGDCGREDAEPEKQDKERSSPEARSRAAGGAFLPLKAAVGSGAPAFAPLGLRMDDKAAARAGMPDLCLLSPPATKSAAEESRRQVVGFAQAATRAAAATAPAAPSLSVGVQSPSQQARKARRCWSTELHRQFVAALNQLGGPQVATPKQIRELMKVDGLTNDEVKSHLQKYRLHNRRAPGSGVVSQPIVLVGGLWIPQEQSSSQSGSPPRPAPLLHLRHRSLVGGHRQLRGGRRTVRELWLEMMQRLLLLLLLRGELQPQERESSGGKLRVV

SEQ ID NO: 22617 - DNA, 1173 bp, Zea mays subsp. mays
  misc_feature (1)..(1173): Ceres Seq. ID no. 12409399
atctggattatggcagcaccggaggggagtacatctctgttagttcttcacaactctagactctcagttatcttacggcggtccaaaacccgcaaactgcaggtccgtcgcgcggtacttatcccgtgacttgccatacgagctgtcgcccgacgacgtctacctgacgaacggcggcgctcaggcgatcgagatagtgtgctcggcgctggctcgtccgggcgccaacatcttgctcccgaggcccggctacaagctctacgaggcgcgcgccgtgttcagcgggatggaggcccggtacttcgaccttgtacccggcgaaggctgggaggtcgacaccgacggtgtccgagctctcgccgacaagaacacggttgccgtcgtcatcatcaaccccggaaacccgtgcggttgctgagactgcgcggaagctcggcgtgtttgtcgtagcggacgaggcttacgcgcacttgacgtttggagagaggaggttcgtgccgatgggcgtgtttggggccgtggctccggtcatcacgctggggtccatttcgaagaggtggctggtgcccggctggcggctcgggtggatcgctaccagtgaccctagtggcgtgtttcagagaaccaaggtagccagcagcatcaagacctaccattacatctgctctgaccctacgacgtttgttcagggagcggttccaaacctcctggagaacacaagcgaggagttcttccgaagaaacatcagaactctaaaagaaagcgcggacatgtgctgggagaagctgaagggcgtcaacgggatcgcatgcccaagcagaccgatggggtccatgttcgtaatggtgaaactggacctgtcctgcctgcaggggatcgaagacgacatggacttctgctgccggctcgccaaggaagaatcggtggttgttctgccagggcgtgttgtgggatgcgaggactggctccggatcaccttcgccatcgatccgtcctctctcgaagacggcctggacaggctcaggtccttctgctcgcgacacagcaagccggcggcacagggttctgctgcctctgtagtctagtagtttctgttagaggatctgaagcactccacgtcttggaaacaatgaagtttgggtcaatatgagaacgtaataataaagttgattc

SEQ ID NO: 22618 - protein, 194 aa, Zea mays subsp. mays
  misc_feature (1)..(194): Ceres Seq. ID no. 12409400
MGVFGAVAPVITLGSISKRWLVPGWRLGWIATSDPSGVFQRTKVASSIKTYHYICSDPTTFVQGAVPNLLENTSEEFFRRNIRTLKESADMCWEKLKGVNGIACPSRPMGSMFVMVKLDLSCLQGIEDDMDFCCRLAKEESVVVLPGRVVGCEDWLRITFAIDPSSLEDGLDRLRSFCSRHSKPAAQGSAASVV

SEQ ID NO: 22619 - protein, 113 aa, Zea mays subsp. mays
  misc_feature (1)..(113): Ceres Seq. ID no. 12409401
MPKQTDGVHVRNGETGPVLPAGDRRRHGLLLPARQGRIGGCSARACCGMRGLAPDHLRHRSVLSRRRPGQAQVLLLATQQAGGTGFCCLCSLVVSVRGSEALHVLETMKFGSI

SEQ ID NO: 22620 - protein, 104 aa, Zea mays subsp. mays
  misc_feature (1)..(104): Ceres Seq. ID no. 12409402
MCWEKLKGVNGIACPSRPMGSMFVMVKLDLSCLQGIEDDMDFCCRLAKEESVVVLPGRVVGCEDWLRITFAIDPSSLEDGLDRLRSFCSRHSKPAAQGSAASVV

SEQ ID NO: 22621 - DNA, 1448 bp, Zea mays subsp. mays
  misc_feature (1)..(1448): Ceres Seq. ID no. 12409411
gtgaaagggccgtgcgggaagctaaccaccgcgaaagcgcctctgggggagtcagacgaacgaagcaatccaaccgaacgaaccgacctaggtcgtcgtcggctcgtcccctccgcaggaccggttcgccgtctcgtcgcgatctcgccgcctgcccgccgcgccctattaccgccatggaggcgctgtggaagcaggcctccaggctcaaggaccaggtctctcggcagggtgtgttcaagcagtttggctacgggaattctgataatgcgtttacagatgagtcagaggttaaactgcatcagagattggaaaagctttacttatcgactcgtgctgctaaacattttcaaagggacattgttcggggcgtggagggctatatagtcacaggatctaaacaagtcgaaatagggaataaattgtctgatgacagccagaaatacggtgttggaaacacatgtacaagtggtgatactttgtccaaagctgctacatatttcggaaaggcacgctcacagatggaaaaggagcgtggcaatatgttgaaagcatttggcacacaggtggcagagccactgcgggcgatggttatgggtgcacctttagaggatgccagacatatggcccagagatatgacagaacgaggcaagaagctgaagcacaggctgtcgaagtatcaagacggcagaacagggtgagggaatctactgggaatggcgatatggtatcaaaattggaagctgccgagtacaagcttgaagaactgaagtcaaacatggtgggattagggaaggaagctattgcagcaatgtcggctgttgaggctcagcagcaacggttgaccttacagcgtctcattgcactggttgaggctgagagaacttaccatcagagagttctggagatacttgacaaattggaagaagaaatggtgtctgagcgccaaaaaaattgaagcacccccgactccagcagctgaaaattatataccaccaccagcaccaccatcttatgatgaaattaatggagcatttgcatccacttctgttaacgagtcagtccaatctgtcgatttcttccttggagaggcccttgattcatttaatgctgaaagtgagtttgagcttaccttgtcagctggtgacattgtaattgtccgaaagatctcaagcaatggttgggcagaaggtgaatgcaagggcaaagcaggatggttccctcatgcttatatcgaaaggcaggaacgtgttctagcaagcaaagttccacatatattttaggagtttctggcagtcgcattacacggttttcatttctattgttgggagctggaactgtatccatgttttcacttcctcttagtttccgcgatgtaattactggctgtcatgtgcatagattaaatttacttccctttttttagtctggaaaaggttttggatgt

SEQ ID NO: 22622 - protein, 318 aa, Zea mays subsp. mays
  misc_feature (1)..(318): Ceres Seq. ID no. 12409412
ERAVREANHRESASGGVRRTKQSNRTNRPRSSSARPLRRTGSPSRRDLAACPPRPITAMEALWKQASRLKDQVSRQGVFKQFGYGNSDNAFTDESEVKLHQRLEKLYLSTRAAKHFQRDIVRGVEGYIVTGSKQVEIGNKLSDDSQKYGVGNTCTSGDTLSKAATYFGKARSQMEKERGNMLKAFGTQVAEPLRAMVMGAPLEDARHMAQRYDRTRQEAEAQAVEVSRRQNRVRESTGNGDMVSKLEAAEYKLEELKSNMVGLGKEAIAAMSAVEAQQQRLTLQRLIALVEAERTYHQRVLEILDKLEEEMVSERQKN

SEQ ID NO: 22623 - protein, 260 aa, Zea mays subsp. mays
  misc_feature (1)..(260): Ceres Seq. ID no. 12409413
MEALWKQASRLKDQVSRQGVFKQFGYGNSDNAFTDESEVKLHQRLEKLYLSTRAAKHFQRDIVRGVEGYIVTGSKQVEIGNKLSDDSQKYGVGNTCTSGDTLSKAATYFGKARSQMEKERGNMLKAFGTQVAEPLRAMVMGAPLEDARHMAQRYDRTRQEAEAQAVEVSRRQNRVRESTGNGDMVSKLEAAEYKLEELKSNMVGLGKEAIAAMSAVEAQQQRLTLQRLIALVEAERTYHQRVLEILDKLEEEMVSERQKN

SEQ ID NO: 22624 - DNA, 1800 bp, Zea mays subsp. mays
  misc_feature (1)..(1800): Ceres Seq. ID no. 12409414
acaagcgcaagcagggcaagaaaactccgcaggccagtctgcgcgagttggatggccttcttcttggccctcgtgtgcatcctcgtcttgctagccatcgcctcctacgtccagtacactcgctggcagaaggggaaaggccgcttcggcggccatgggaggtctgctcccttgaagctgcctcctggctccatgggctggccttaccttggcgagaccctccagctttactcccaggaccccagcgtcttcttcgcttccaaacagaagaggtacggcgagatcttcaagacgcaccttctgggctgcccgtgcgtgatgctggcgagcccggaggcggcgcggttcgtgctggtgacgcaggcgcacctgttcaagccgacctacccgcggagcaaggagcgcatgatcgggccgtcggctctcttcttccaccagggcgactaccacctccgcctccgcaagctcgtccagggcgcgctcggccccgacgcgctgcgcgcgctcgttcctgaggtggaggccgccgtgcggtccactctcgcttcctgggacgccggccacgtcagaagcacgttccacgccatgaagacgctgtcgtttgacgtgggcatcgtgacgatcttcggcggccggctggacgagtggcgcaaggcggagctgaggaagaattactccgtcgtggagaaggggtacaactccttccccaacagcctgccggggacgctccattacaaggcgatgcaggcgcggcggcggctgcacggcgtgctgtgcgacatcatgcgggagcgtcgtggccaggcccaggcgggcaccaccggcctgctgggctgcctgatgcggtcccggggcgacgacggcgcgccgctgctgagcgacgagcagatcgccgacaacgtcatcggcgtgctgttcgcggcgcaggacacgacggccagcgcgctcacctggatcgtcaagtacctccacgaccaccccaagctcctcgaggccgtccgggcggagcaggcggcggtccgcgaggccaccggcggcgggaggcagccgctggcgtgggcgcacacgaagagcatggcgctaacgcatagggtgattttggagagcttaaggatggcgagcatcatctcgttcacgttcagggaggccgtggccgacgtggagtacaaagggttccttatccccaaggggtgggaaggtgatgcctctcttcaggaacatccaccacagccctgactacttccaggatccacacaagttcgacccttctagattccaggtggcgccgcgtccgagcacgttcctgccgtttgggcacggcgtgcacgcgtgccccgggaacgagctgggccaagctcgagatgctcgtcctcatccaccacctggtcaccggctacaggtggcaaatcgttggatccagtgacgaggtcgagtacagcccgttccctgtgcccaagcacggcttgcctgtcagattatggagacaaaacaatccggtcgtcgacagaaaggggcgtgagaccgacgacgatgatgtggaggatattttagtttgactcttgagttaggcatgaatttaaccccaagctagctagagaagttttttttccctttgaaattcttctttgctcgccttcctcctggatcaaattacgttggaggacaagaaacggcagctttctctttcgttttctttgcctgcttcaccgcgacgataatggtgaaaatatgtaagctacgtggacatcaatgatccacagcatcgttgatatatataatatagagagaaaattctctgct

SEQ ID NO: 22625 - protein, 411 aa, Zea mays subsp. mays
  misc_feature (1)..(411): Ceres Seq. ID no. 12409415
TSASRARKLRRPVCASWMAFFLALVCILVLLAIASYVQYTRWQKGKGRFGGHGRSAPLKLPPGSMGWPYLGETLQLYSQDPSVFFASKQKRYGEIFKTHLLGCPCVMLASPEAARFVLVTQAHLFKPTYPRSKERMIGPSALFFHQGDYHLRLRKLVQGALGPDALRALVPEVEAAVRSTLASWDAGHVRSTFHAMKTLSFDVGIVTIFGGRLDEWRKAELRKNYSVVEKGYNSFPNSLPGTLHYKAMQARRRLHGVLCDIMRERRGQAQAGTTGLLGCLMRSRGDDGAPLLSDEQIADNVIGVLFAAQDTTASALTWIVKYLHDHPKLLEAVRAEQAAVREATGGGRQPLAWAHTKSMALTHRVILESLRMASIISFTFREAVADVEYKGFLIPKGWEGDASLQEHPPQP

SEQ ID NO: 22626 - protein, 394 aa, Zea mays subsp. mays
  misc_feature (1)..(394): Ceres Seq. ID no. 12409416
MAFFLALVCILVLLAIASYVQYTRWQKGKGRFGGHGRSAPLKLPPGSMGWPYLGETLQLYSQDPSVFFASKQKRYGEIFKTHLLGCPCVMLASPEAARFVLVTQAHLFKPTYPRSKERMIGPSALFFHQGDYHLRLRKLVQGALGPDALRALVPEVEAAVRSTLASWDAGHVRSTFHAMKTLSFDVGIVTIFGGRLDEWRKAELRKNYSVVEKGYNSFPNSLPGTLHYKAMQARRRLHGVLCDIMRERRGQAQAGTTGLLGCLMRSRGDDGAPLLSDEQIADNVIGVLFAAQDTTASALTWIVKYLHDHPKLLEAVRAEQAAVREATGGGRQPLAWAHTKSMALTHRVILESLRMASIISFTFREAVADVEYKGFLIPKGWEGDASLQEHPPQP

SEQ ID NO: 22627 - protein, 347 aa, Zea mays subsp. mays
  misc_feature (1)..(347): Ceres Seq. ID no. 12409417
MGWPYLGETLQLYSQDPSVFFASKQKRYGEIFKTHLLGCPCVMLASPEAARFVLVTQAHLFKPTYPRSKERMIGPSALFFHQGDYHLRLRKLVQGALGPDALRALVPEVEAAVRSTLASWDAGHVRSTFHAMKTLSFDVGIVTIFGGRLDEWRKAELRKNYSVVEKGYNSFPNSLPGTLHYKAMQARRRLHGVLCDIMRERRGQAQAGTTGLLGCLMRSRGDDGAPLLSDEQIADNVIGVLFAAQDTTASALTWIVKYLHDHPKLLEAVRAEQAAVREATGGGRQPLAWAHTKSMALTHRVILESLRMASIISFTFREAVADVEYKGFLIPKGWEGDASLQEHPPQP

SEQ ID NO: 22628 - DNA, 1685 bp, Zea mays subsp. mays
  misc_feature (1)..(1685): Ceres Seq. ID no. 12409422
attcgccctgcctctagctgctgcttcttccaggatcggggatcggagcttgtgctgctactgctactataccagcgctagctagcagcagccgccggccggctcgcgcaagctaaggaagggtcgacatgacgatggggctccgcgtccgcgactcctccgcgctgctggctctggccgtcgcgctcgcctgctgctccgttgcagtggtggcctacgaccccctggacccgaacggcaacatcaccatcaagtgggacgtgatctcgtggacgcccgacgggtacgtggcgatggtgacgatgagcaactaccagatgtaccggcacatcatggcgcccgggtggacgttggggtggtcgtgggccaagaaggaggtgatctggtccatcgtgggggcgcaggccacggagcagggggactgctccaagttcaagggcggcatcccgcactgctgcaagcgcaccccggccgtggtggacctcctcccgggggtgccctacaaccagcagatcgccaactgctgcaaggccggcgtggtgtcggcgtacgggcaggacccggcggggtccgtctccgcgttccaggtctccgtcggcctggccggtaccaccaacaagacggtgaagctgcccaggaacttcacgctcatggggcccgggctgggctacacctgcgggcccgccgccgtggtgccgtccaccgtgtactggacgcccgaccaccggcgccggacgcaggcgctcatgacgtggacggtgacctgcacctactcgcagcagctggcgtcccggtacccgtcctgctgcgtctccttctcctccttctacaacagcaccatcgtgccgtgcgcccggtgcgcgtgcggctgcggcggccacggcggccacgcgggtccgggcggctgcatcgagggggactccaagcgcgcgctgtcggccggggtgaacacgccgngcaaggacggccaggcgctgctgcagtgcacgccgcacatgtgccccatccgggtgcactggcangtcaagctcaactacaaggantactggcgcgccaagatcgccatcaccaactacaactacaggatgaactacacgcagtggacgctggtggcgcagcaccccaacctggacaacgtcaccgaggtcttcagcttccagtacaagccgctgcaaccatacgggagcatcaatgacactggcatgttctacgggctcaagttctacaacgactttctcatggaggccggcccgttcggcaacgtgcagtcggaggtgctcatgcgcaaggacgcaaggaccttcaccttcagcatgggctgggcgttcccgcgcaagatctacttcaacggcgacgagtgcaagatgccgccgccggactcctacccctacctgcccaacgccgcgcccgtcgtcgcctcgcagctggtcctgtccgccgccgcctcggcgttcctactgttgctgctcctggtggcatgaccgtgaccgaaccaagggcaaggcctccgttttgttttcccgtctcgtcccgtgggcagggagcagacttcagtaggcagggcattttatttggtttttttgccaaggattcaacacttgggttttcgtcagaggaaaactgtcgtgtatgtagtgtgagttgcaggtcgtcggatccccacgtacaagacaatctttggatcg

SEQ ID NO: 22629 - protein, 450 aa, Zea mays subsp. mays
  misc_feature (1)..(450): Ceres Seq. ID no. 12409423
  misc_feature (277)..(277): Xaa is any aa, unknown or other
  misc_feature (298)..(298): Xaa is any aa, unknown or other
  misc_feature (305)..(305): Xaa is any aa, unknown or other
MTMGLRVRDSSALLALAVALACCSVAVVAYDPLDPNGNITIKWDVISWTPDGYVAMVTMSNYQMYRHIMAPGWTLGWSWAKKEVIWSIVGAQATEQGDCSKFKGGIPHCCKRTPAVVDLLPGVPYNQQIANCCKAGVVSAYGQDPAGSVSAFQVSVGLAGTTNKTVKLPRNFTLMGPGLGYTCGPAAVVPSTVYWTPDHRRRTQALMTWTVTCTYSQQLASRYPSCCVSFSSFYNSTIVPCARCACGCGGHGGHAGPGGCIEGDSKRALSAGVNTPXKDGQALLQCTPHMCPIRVHWXVKLNYKXYWRAKIAITNYNYRMNYTQWTLVAQHPNLDNVTEVFSFQYKPLQPYGSINDTGMFYGLKFYNDFLMEAGPFGNVQSEVLMRKDARTFTFSMGWAFPRKIYFNGDECKMPPPDSYPYLPNAAPVVASQLVLSAAASAFLLLLLLVA

SEQ ID NO: 22630 - protein, 448 aa, Zea mays subsp. mays
  misc_feature (1)..(448): Ceres Seq. ID no. 12409424
  misc_feature (275)..(275): Xaa is any aa, unknown or other
  misc_feature (296)..(296): Xaa is any aa, unknown or other
  misc_feature (303)..(303): Xaa is any aa, unknown or other
MGLRVRDSSALLALAVALACCSVAVVAYDPLDPNGNITIKWDVISWTPDGYVAMVTMSNYQMYRHIMAPGWTLGWSWAKKEVIWSIVGAQATEQGDCSKFKGGIPHCCKRTPAVVDLLPGVPYNQQIANCCKAGVVSAYGQDPAGSVSAFQVSVGLAGTTNKTVKLPRNFTLMGPGLGYTCGPAAVVPSTVYWTPDHRRRTQALMTWTVTCTYSQQLASRYPSCCVSFSSFYNSTIVPCARCACGCGGHGGHAGPGGCIEGDSKRALSAGVNTPXKDGQALLQCTPHMCPIRVHWXVKLNYKXYWRAKIAITNYNYRMNYTQWTLVAQHPNLDNVTEVFSFQYKPLQPYGSINDTGMFYGLKFYNDFLMEAGPFGNVQSEVLMRKDARTFTFSMGWAFPRKIYFNGDECKMPPPDSYPYLPNAAPVVASQLVLSAAASAFLLLLLLVA

SEQ ID NO: 22631 - protein, 395 aa, Zea mays subsp. mays
  misc_feature (1)..(395): Ceres Seq. ID no. 12409425
  misc_feature (222)..(222): Xaa is any aa, unknown or other
  misc_feature (243)..(243): Xaa is any aa, unknown or other
  misc_feature (250)..(250): Xaa is any aa, unknown or other
MVTMSNYQMYRHIMAPGWTLGWSWAKKEVIWSIVGAQATEQGDCSKFKGGIPHCCKRTPAVVDLLPGVPYNQQIANCCKAGVVSAYGQDPAGSVSAFQVSVGLAGTTNKTVKLPRNFTLMGPGLGYTCGPAAVVPSTVYWTPDHRRRTQALMTWTVTCTYSQQLASRYPSCCVSFSSFYNSTIVPCARCACGCGGHGGHAGPGGCIEGDSKRALSAGVNTPXKDGQALLQCTPHMCPIRVHWXVKLNYKXYWRAKIAITNYNYRMNYTQWTLVAQHPNLDNVTEVFSFQYKPLQPYGSINDTGMFYGLKFYNDFLMEAGPFGNVQSEVLMRKDARTFTFSMGWAFPRKIYFNGDECKMPPPDSYPYLPNAAPVVASQLVLSAAASAFLLLLLLVA

SEQ ID NO: 22632 - DNA, 1070 bp, Zea mays subsp. mays
  misc_feature (1)..(1070): Ceres Seq. ID no. 12409467
aaataaaacacagcctcacgatccccgcactgcccggtgccccgcgagctgctcctctacacacgccagcgagaaccagcccaccccacctgctcgatcggcgcaccgtcccgcaggccgcagggccgtcgtcagccatgatccagctcctgttctcgctgctggccgcggaggcggcgctggtgctggcgctgctcttccccacgcccgtgcgccgcctggctctgctcgccatcgatcgcgccaagagggggcgcggacccgtcatggccaagaccatcgcgggcaccatgctcctcgtactagtctctgctttctacagcgtcgctaagatccgccgccgcgagggggagctcggacagctcacgcccaccgaccaggtgctcgccagtcgccacctcctcgaggcgtcgctcatgggatactctctgtttcttggattaattattgaccgattacatcactatattagagagttgagaatgttgaggaaagacatggaggctgtaacagagcagggccggacactagaagcagcaaaatccggaagcactgacgagattcaaggataccagaaagaggttgcgagtttgaaggaacaagtgcaagagctccagaaccaatcacaaaagaaaacagagcgactaaaaaccgccgaagcaaattctgtagctttacagaaacaatcggaaggtttactcgctgaatatgaccgtctcattgcggagaacagggatttgagggaccaactgcagtcaattgacctccgcctgtcccattctggcggaaagaagaactcgtaaagcaagttctgcaattttgaagagcatgattttctgtagattttcttccaataggttaactgtactcggttttctctattatcataatcgcccatgtaattcagtagatggatttgcctatgtaattcagtagatgcgtgcgtgtatgtatgagtggaccatttaatgctttatggactgggtggcatggactcagacccggcatttggccatagtttatggcctaacgtcttggttcagtgagatcaaataagaacctgcatcttc

SEQ ID NO: 22633 - protein, 266 aa, Zea mays subsp. mays
  misc_feature (1)..(266): Ceres Seq. ID no. 12409468
IKHSLTIPALPGAPRAAPLHTPARTSPPHLLDRRTVPQAAGPSSAMIQLLFSLLAAEAALVLALLFPTPVRRLALLAIDRAKRGRGPVMAKTIAGTMLLVLVSAFYSVAKIRRREGELGQLTPTDQVLASRHLLEASLMGYSLFLGLIIDRLHHYIRELRMLRKDMEAVTEQGRTLEAAKSGSTDEIQGYQKEVASLKEQVQELQNQSQKKTERLKTAEANSVALQKQSEGLLAEYDRLIAENRDLRDQLQSIDLRLSHSGGKKNS

SEQ ID NO: 22634 - protein, 221 aa, Zea mays subsp. mays
  misc_feature (1)..(221): Ceres Seq. ID no. 12409469
MIQLLFSLLAAEAALVLALLFPTPVRRLALLAIDRAKRGRGPVMAKTIAGTMLLVLVSAFYSVAKIRRREGELGQLTPTDQVLASRHLLEASLMGYSLFLGLIIDRLHHYIRELRMLRKDMEAVTEQGRTLEAAKSGSTDEIQGYQKEVASLKEQVQELQNQSQKKTERLKTAEANSVALQKQSEGLLAEYDRLIAENRDLRDQLQSIDLRLSHSGGKKNS

SEQ ID NO: 22635 - protein, 178 aa, Zea mays subsp. mays
  misc_feature (1)..(178): Ceres Seq. ID no. 12409470
MAKTIAGTMLLVLVSAFYSVAKIRRREGELGQLTPTDQVLASRHLLEASLMGYSLFLGLIIDRLHHYIRELRMLRKDMEAVTEQGRTLEAAKSGSTDEIQGYQKEVASLKEQVQELQNQSQKKTERLKTAEANSVALQKQSEGLLAEYDRLIAENRDLRDQLQSIDLRLSHSGGKKNS

SEQ ID NO: 22636 - DNA, 1550 bp, Zea mays subsp. mays
  misc_feature (1)..(1550): Ceres Seq. ID no. 12409494
acactccaaaccacaagcgcagccgccgtcacttctgccccatcgcggccccatcctgccgctcgtcgacgacgccaccccgcccctcgaccgcggctaacgccgccagtgtcgcaagcaagctttggtgccgccgccttcacacaggctttgaaggaggtggagcgccgggagcacgaggccgagacgaagacccgccacctccagggatggcccaagcaccgccatgacccgaggagtgaggatgaggatcccgaggaggtggagtcatatgtggaggattcccgcgaggagaacgcggaggcggtgcccgtagctgtagggaaccgggccaagagcactggaaaggggaaggcgcagatgtaccgccacctggtgttccccgtgctggagttcctccaggagcggcagctcttctcggagtcagagatcctggaggccaagatccgcctcctcagcggcacgggccacgtcaggggtagcctccccaagggaaatggaggatagcttctgggtccggcgacaagttgcagttgcagcagtgctccaatgttttggtcaatggatttgttctaaaagaatacacagaaagatagtcagaagcacaccaatatagggcatttccacttacttggatggtaaagaagacactcctacaaattgaaatgcacgtacttcgggcttcacgacaactggactggacaggtgtctgcacgcttcagttgaagccccagatatcacagagctcatgctgtccatggagctgcttggtgatgcacggtcaacatggcccttagttgggatcctgttccctgatgatcttgagggtatagtttttctgatataagattttgatgacggacgaacagggaccctctgagcagttccctttactttcaaaaagtgcctttcttgaacggtcaattgaagaaaattctgaccaagaagaatgcatcatcaagctaaatgacattcctaggggtgccaagtcatttgagctagttgcaaggttctgctatggtgtgaaaatagagctttcacctgcaaatgttgtctacctacggtgtgcctcaaagcatctagaaatgactgaagaagtagctgaggaaaacctgattgcacagtcagaaatgtttctcaaccaagtggttctccgtaactggaaagattatttggcagcattggaaacacgtgatgacctactcccccatgctgaagacctccagattgtgaacagatgtatcgagccattggcatcaaaagctactagagtgaacagatgcttttgtgactgatcagctctggagcagctagagtgatgtagttgtgggcttttgaacaatagttagagtgatatgaaacattagtgatgtagttgtgggcttttgaactacttcaagctggagtgatgtcgctgtggtgtttttgtgactgatcatctctggagcttttgtgaatgatctagctagctatccgtaaatgatctagttatgaatgatattataattgtgatgcttttgtgaatatataattgtggtgcttttgtgttc

SEQ ID NO: 22637 - protein, 168 aa, Zea mays subsp. mays
  misc_feature (1)..(168): Ceres Seq. ID no. 12409495
TLQTTSAAAVTSAPSRPHPAARRRRHPAPRPRLTPPVSQASFGAAAFTQALKEVERREHEAETKTRHLQGWPKHRHDPRSEDEDPEEVESYVEDSREENAEAVPVAVGNRAKSTGKGKAQMYRHLVFPVLEFLQERQLFSESEILEAKIRLLSGTGHVRGSLPKGNGG

SEQ ID NO: 22638 - protein, 146 aa, Zea mays subsp. mays
  misc_feature (1)..(146): Ceres Seq. ID no. 12409496
MTDEQGPSEQFPLLSKSAFLERSIEENSDQEECIIKLNDIPRGAKSFELVARFCYGVKIELSPANVVYLRCASKHLEMTEEVAEENLIAQSEMFLNQVVLRNWKDYLAALETRDDLLPHAEDLQIVNRCIEPLASKATRVNRCFCD

SEQ ID NO: 22639 - DNA, 1547 bp, Zea mays subsp. mays
  misc_feature (1)..(1547): Ceres Seq. ID no. 12409501
gcacaagtcgagggccaccgctccgcatccgcatcttcttccagagcaagtcgagcgcggcggccacaaaacccagtcccatacgcacccgtccgttccgcgcgatcagccgagcgatgtcgtcgtcggcgcccgcaccggccgccatggccgtggacgacgcggaggacgaccagctcgcctccatgtccacggaggagatcatcagggcctcccgtctcctcgacaacgagatccgcgtccacaaggatgagctgcagcgggtcgaacctggagctggagtctatcaaggagaagaccaaggagaaccaggagaagattaagctcaacaagcagctgccgtacctcgtcggcaacatcgtcgagattttggaaatgaaccctgaggatgaggctgaagaagatggtgctaacatcgatctggactcacaaaggaaaggaaaatgtgttgttctgaagacatccaccagacaaaccatattccttcctgtaattgggttagttgaccccgataagctaaagcctggcgatttagttggagttaacaaagacagctacttgatactagatacattgccttcagagtatgactcacgggttaaggcaatggaagtagatgagaaacctactgaggattacaatgacattggcggacttgagaaacagattcaagagcttgtggaagcaatagtgttaccaatgacacacaaggaccgatttcaaaaattgggcattcgtccccccaaaggggttcttttgtatggaccccctgggaccgggaaaacactcatggctcgtgcatgcgctgcacagactaatgcaacatttctgaaattggctggtccacaacttgtccagatgttcattggtgatggagctaagcttgttagagatgcttttcagcttgctaaggagaaagccccgtgcatcatctttattgatgaaattgatgccattggaacaaagcgttttgacagtgaagttagtggcgatagagaagtgcaaaggacaatgttggaattgctgaatcagcttgatggatttagcagcgatgagaggataaaggtgatagctgcaacaaatcgtgctgatattcttgatcctgctctgatgagatctggtcgtctggaccgtaagattgagttccctcatccatcagaggaagcaagagctagaatcctgcagatccactcgaggaaaatgaatgtgaatccagatgtcaactttgaagagttggcgcgttcaaccgatgatttcaatggcgctcagctaaaggctgtttgcgtagaggctggcatgctcgctctacgccgagatgctacagaggttacccacgaggatttcaacgaggggatcatccaagtgcaggcaaagaagaagtccagcttgaattactacgcgtaagggggggaacgcccggtacttggtgatcattcagttgtttgtgacactgccattgtctgggcaggctaacttactatttgtactataagcaagctgttgcttttgtgtcttactccgtatgagagtatcatttatgaaatatt

SEQ ID NO: 22640 - protein, 467 aa, Zea mays subsp. mays
  misc_feature (1)..(467): Ceres Seq. ID no. 12409502
AQVEGHRSASASSSRASRARRPQNPVPYAPVRSARSAERCRRRRPHRPPWPWTTRRTTSSPPCPRRRSSGPPVSSTTRSASTRMSCSGSNLELESIKEKTKENQEKIKLNKQLPYLVGNIVEILEMNPEDEAEEDGANIDLDSQRKGKCVVLKTSTRQTIFLPVIGLVDPDKLKPGDLVGVNKDSYLILDTLPSEYDSRVKAMEVDEKPTEDYNDIGGLEKQIQELVEAIVLPMTHKDRFQKLGIRPPKGVLLYGPPGTGKTLMARACAAQTNATFLKLAGPQLVQMFIGDGAKLVRDAFQLAKEKAPCIIFIDEIDAIGTKRFDSEVSGDREVQRTMLELLNQLDGFSSDERIKVIAATNRADILDPALMRSGRLDRKIEFPHPSEEARARILQIHSRKMNVNPDVNFEELARSTDDFNGAQLKAVCVEAGMLALRRDATEVTHEDFNEGIIQVQAKKKSSLNYYA

SEQ ID NO: 22641 - protein, 384 aa, Zea mays subsp. mays
  misc_feature (1)..(384): Ceres Seq. ID no. 12409503
MSCSGSNLELESIKEKTKENQEKIKLNKQLPYLVGNIVEILEMNPEDEAEEDGANIDLDSQRKGKCVVLKTSTRQTIFLPVIGLVDPDKLKPGDLVGVNKDSYLILDTLPSEYDSRVKAMEVDEKPTEDYNDIGGLEKQIQELVEAIVLPMTHKDRFQKLGIRPPKGVLLYGPPGTGKTLMARACAAQTNATFLKLAGPQLVQMFIGDGAKLVRDAFQLAKEKAPCIIFIDEIDAIGTKRFDSEVSGDREVQRTMLELLNQLDGFSSDERIKVIAATNRADILDPALMRSGRLDRKIEFPHPSEEARARILQIHSRKMNVNPDVNFEELARSTDDFNGAQLKAVCVEAGMLALRRDATEVTHEDFNEGIIQVQAKKKSSLNYYA

SEQ ID NO: 22642 - protein, 342 aa, Zea mays subsp. mays
  misc_feature (1)..(342): Ceres Seq. ID no. 12409504
MNPEDEAEEDGANIDLDSQRKGKCVVLKTSTRQTIFLPVIGLVDPDKLKPGDLVGVNKDSYLILDTLPSEYDSRVKAMEVDEKPTEDYNDIGGLEKQIQELVEAIVLPMTHKDRFQKLGIRPPKGVLLYGPPGTGKTLMARACAAQTNATFLKLAGPQLVQMFIGDGAKLVRDAFQLAKEKAPCIIFIDEIDAIGTKRFDSEVSGDREVQRTMLELLNQLDGFSSDERIKVIAATNRADILDPALMRSGRLDRKIEFPHPSEEARARILQIHSRKMNVNPDVNFEELARSTDDFNGAQLKAVCVEAGMLALRRDATEVTHEDFNEGIIQVQAKKKSSLNYYA

SEQ ID NO: 22643 - DNA, 1268 bp, Zea mays subsp. mays
  misc_feature (1)..(1268): Ceres Seq. ID no. 12409505
ctcttgctcggtcgcctttcccggtctttggtgtggataaaccggctttcttgctgttctcgatccttcttcaattcgctgtagtttttccttttgtcgcttgctcttgttctctttccaagaccgaggaagacgagtcagatttggtgattgtgtagagcgtacaagtgattgttcttggagaagcataggcctctcttggctgctcttgtcttcttgagcaaggaggcggaggaaaggaaagacatggaagaggaatccgtcgcagcttcaaggtactactgccacatgtgctcgctgatcataaggcccgaactgggcatcgaggaggtgaagtgcccccactgccacaccggcttcgtggaggagatggcgggcgaccggcgaggcagcgacgacgcagccatcagaggccgtcctcccggcggcgaggcgagctctaacgcctcggacgcggcgctggagcgcgaggtttcgctctgggcgcctgtgctcatggacttcatcgccgcctcgtccggccgccacggcctcgacggccacggaggggacctcgccgctttggcgcgaaggcagtaccgcaacatcgccctcctgcagctgctcaacgcgctccaggaaggcgacaccgatgccgggcgcgagcgggtcgtgctcatgagccccgcggacgcgcgcgccatgcttatgggacaagagcgaggggacggcgccgccgccctgggccccggcggtctgacgctcggggacctgttcctcggcccggggctggacttgctgctggagtacctggccgagaccgacccaaaccggcagggcacgccgccggccaggaaggaggccgtggccgcgttgccgacggtccgggtgcgcgaggacttcacctgccccgtgtgcctggacgaggtcgcgggcggcggcgacgcgcgcgagatgccgtgcaagcaccggttccacgaccagtgcatcctgccctggctggagatgcacagctcctgccccgtgtgcaggcaccagctgcccacggaggagccggcggaggcaattggcagcgacagaggcgccggtgttgagtccagtggcaacgcgcgcggcggcgggaggaggcattggttctcgtggcccttcggagggttgttctcgcaaagatccagcgggaactcctcgtcgtcctgatgatgcatgaacacgataataatatgcaagggaacacctcatcgtccctgatgatgctaatgaacaggataataatatgcgtcgatgtagcc

SEQ ID NO: 22644 - protein, 309 aa, Zea mays subsp. mays
  misc_feature (1)..(309): Ceres Seq. ID no. 12409506
MEEESVAASRYYCHMCSLIIRPELGIEEVKCPHCHTGFVEEMAGDRRGSDDAAIRGRPPGGEASSNASDAALEREVSLWAPVLMDFIAASSGRHGLDGHGGDLAALARRQYRNIALLQLLNALQEGDTDAGRERVVLMSPADARAMLMGQERGDGAAALGPGGLTLGDLFLGPGLDLLLEYLAETDPNRQGTPPARKEAVAALPTVRVREDFTCPVCLDEVAGGGDAREMPCKHRFHDQCILPWLEMHSSCPVCRHQLPTEEPAEAIGSDRGAGVESSGNARGGGRRHWFSWPFGGLFSQRSSGNSSSS

SEQ ID NO: 22645 - protein, 295 aa, Zea mays subsp. mays
  misc_feature (1)..(295): Ceres Seq. ID no. 12409507
MCSLIIRPELGIEEVKCPHCHTGFVEEMAGDRRGSDDAAIRGRPPGGEASSNASDAALEREVSLWAPVLMDFIAASSGRHGLDGHGGDLAALARRQYRNIALLQLLNALQEGDTDAGRERVVLMSPADARAMLMGQERGDGAAALGPGGLTLGDLFLGPGLDLLLEYLAETDPNRQGTPPARKEAVAALPTVRVREDFTCPVCLDEVAGGGDAREMPCKHRFHDQCILPWLEMHSSCPVCRHQLPTEEPAEAIGSDRGAGVESSGNARGGGRRHWFSWPFGGLFSQRSSGNSSSS

SEQ ID NO: 22646 - protein, 268 aa, Zea mays subsp. mays
  misc_feature (1)..(268): Ceres Seq. ID no. 12409508
MAGDRRGSDDAAIRGRPPGGEASSNASDAALEREVSLWAPVLMDFIAASSGRHGLDGHGGDLAALARRQYRNIALLQLLNALQEGDTDAGRERVVLMSPADARAMLMGQERGDGAAALGPGGLTLGDLFLGPGLDLLLEYLAETDPNRQGTPPARKEAVAALPTVRVREDFTCPVCLDEVAGGGDAREMPCKHRFHDQCILPWLEMHSSCPVCRHQLPTEEPAEAIGSDRGAGVESSGNARGGGRRHWFSWPFGGLFSQRSSGNSSSS

SEQ ID NO: 22647 - DNA, 1366 bp, Zea mays subsp. mays
  misc_feature (1)..(1366): Ceres Seq. ID no. 12409557
aaatgagcgccagctgtgcgccacagtaccccaaccgaccctgccggcgacggcgttcataaattgggctagggcaaaaactgattcgcgccgccacctctagagagaactgtagatccctgtcatccaatcacccaccatgcaatacctcaccgatgttgctcgctccaaggacctgctcaaggttgtaggccattcggtgatcaaggcgatgtgcgatggggagttcctcatgtcgaggaaatgggccgtcggtggccacgattgggaggtccacttgcgtcccaaggatcactcggagggccacgagcgcccggtgacgctgaggctcgtcttgatctccgaagcgcgcggcggcgacgtcaaggccaagctcagctgccgcctggttgatccgaccgggaggctgaagccgtcgaaggagaatagcaaatcgcataagttctacaagtccggcgattactccggtgcaatccaggtgacgggaagagaggatctggagaagtctggctacctggtggacgattcctacaccgtggagtgcagcatcacggtgctaaaaaaagcgccggcgcggaatactgcggctgcggctgcggcgacggccatggatcgcgatgctgcgatgctgccgtccctcgaactgcaccggcacttgggcgaacttctgcagaaggggacgggcgcggacgtcacgttccatgtgtccggcgagaagttcgccgcgcacaaggccatccttgcctcgaggtcgccggtgttcatggcggagctgtttgggggaatgaaggaggaggcgtcccggcacatcgaggtgaaggacataaagcccgcggcgttcaaggccgtgcttcgcttcatctacactggcacggcgccggaactggacaagaagggcgacggcgggacgtcgttggcgcagcatctgcttgccggcgcggacaggtacggcctggacatgctcaaacttatctgcgtgggctggctcgcggaccgcatcaccgtcgacacggtggcgaccacactggcgctagcggagcagcatggctgctcgcagctcaaggctagctgcatcgagttcatcgcgggatatcttgacgccgtcctggagacagaggggtacaagcacctggaagcaagctgcccctcggtgctcactgatatcctcaaggctacgctgcgaccaaccaattgaagcgtcgagcgggatgactccatcttcatgtgaacgatcagttacactagttgctacattctttatctttcatccacttctgattctggaatcttgatgcagtaattctggccttggcaacatgttcagaatcattgcttctctatttcagattatattttccagttttgc

SEQ ID NO: 22648 - protein, 351 aa, Zea mays subsp. mays
  misc_feature (1)..(351): Ceres Seq. ID no. 12409558
MQYLTDVARSKDLLKVVGHSVIKAMCDGEFLMSRKWAVGGHDWEVHLRPKDHSEGHERPVTLRLVLISEARGGDVKAKLSCRLVDPTGRLKPSKENSKSHKFYKSGDYSGAIQVTGREDLEKSGYLVDDSYTVECSITVLKKAPARNTAAAAAATAMDRDAAMLPSLELHRHLGELLQKGTGADVTFHVSGEKFAAHKAILASRSPVFMAELFGGMKEEASRHIEVKDIKPAAFKAVLRFIYTGTAPELDKKGDGGTSLAQHLLAGADRYGLDMLKLICVGWLADRITVDTVATTLALAEQHGCSQLKASCIEFIAGYLDAVLETEGYKHLEASCPSVLTDILKATLRPTN

SEQ ID NO: 22649 - protein, 327 aa, Zea mays subsp. mays
  misc_feature (1)..(327): Ceres Seq. ID no. 12409559
MCDGEFLMSRKWAVGGHDWEVHLRPKDHSEGHERPVTLRLVLISEARGGDVKAKLSCRLVDPTGRLKPSKENSKSHKFYKSGDYSGAIQVTGREDLEKSGYLVDDSYTVECSITVLKKAPARNTAAAAAATAMDRDAAMLPSLELHRHLGELLQKGTGADVTFHVSGEKFAAHKAILASRSPVFMAELFGGMKEEASRHIEVKDIKPAAFKAVLRFIYTGTAPELDKKGDGGTSLAQHLLAGADRYGLDMLKLICVGWLADRITVDTVATTLALAEQHGCSQLKASCIEFIAGYLDAVLETEGYKHLEASCPSVLTDILKATLRPTN

SEQ ID NO: 22650 - protein, 320 aa, Zea mays subsp. mays
  misc_feature (1)..(320): Ceres Seq. ID no. 12409560
MSRKWAVGGHDWEVHLRPKDHSEGHERPVTLRLVLISEARGGDVKAKLSCRLVDPTGRLKPSKENSKSHKFYKSGDYSGAIQVTGREDLEKSGYLVDDSYTVECSITVLKKAPARNTAAAAAATAMDRDAAMLPSLELHRHLGELLQKGTGADVTFHVSGEKFAAHKAILASRSPVFMAELFGGMKEEASRHIEVKDIKPAAFKAVLRFIYTGTAPELDKKGDGGTSLAQHLLAGADRYGLDMLKLICVGWLADRITVDTVATTLALAEQHGCSQLKASCIEFIAGYLDAVLETEGYKHLEASCPSVLTDILKATLRPTN

SEQ ID NO: 22651 - DNA, 982 bp, Zea mays subsp. mays
  misc_feature (1)..(982): Ceres Seq. ID no. 12409573
aaacaaagtaaagtgggggggaaagcatggcgatagctcttctcccatccgttcgtcttcttccacaaagtctctccagaaggccaccaccaacctcgtcgccattatccgttcgccgcccacggccaagagcccttcccctccctcgcgtccactgccgcgccggccggaccccggaccccctcaccgctgctagggaggctgctgccttttgggttgggaagctcgccggcgttgtgccatggaaggccgcggtctccggcgtggtcgccctcgccgtctccttcacctgccttgttggtttggccaatgccagaactggggtaaacaaaccagaattgcttcctaaagaatttactaccgtcatcgatgttgctggttttctctcgtcaggccaggaaaaccgtttgcgccaagagatagaagacctggagaaagatacagggtacaaactgcgagttcttgcacaaaattatcctgatacacctggattggctatcaaagatttttggcaggttgatgagcgtactattgtttttgttgctgatccaacctttggtaacataataaattttaacattggtccattagttgatttagacgtccctcggagcttttggagtcaggtttcagggaagtatgggaacatgttctactggaaagaaaagggagaggacgcctcaatcgaagctgctgtgacggcaatatctcgatgtctaaggaaccccgccgggacaaataactgttcggaggtattatagaaagtgatgagttatgccgcacaaaggaacatggaaatgacagatgcatgtgtacagaagtgaaatactagaacaacatagaggctaaagatgtctcatggtctccagagaactaaggcttcactctttgaaatcgagagctttatctggtcgtgaatatggatagttttacaatgtgactggattttaaaatgtctaaataagagagaaatttgagatct

SEQ ID NO: 22652 - protein, 244 aa, Zea mays subsp. mays
  misc_feature (1)..(244): Ceres Seq. ID no. 12409574
MAIALLPSVRLLPQSLSRRPPPTSSPLSVRRPRPRALPLPRVHCRAGRTPDPLTAAREAAAFWVGKLAGVVPWKAAVSGVVALAVSFTCLVGLANARTGVNKPELLPKEFTTVIDVAGFLSSGQENRLRQEIEDLEKDTGYKLRVLAQNYPDTPGLAIKDFWQVDERTIVFVADPTFGNIINFNIGPLVDLDVPRSFWSQVSGKYGNMFYWKEKGEDASIEAAVTAISRCLRNPAGTNNCSEVL

SEQ ID NO: 22653 - DNA, 1131 bp, Zea mays subsp. mays
  misc_feature (1)..(1131): Ceres Seq. ID no. 12409590
ctaatcaaaaatcgctcactacgcgaccgctagctactcgatcggatcctgaccacgcccgcctaccagaccaccaccaccaccaccaccaccacccacaaatccccaatggcgaggcgcatcgccgtggcggcagcgttcctggcgctggccgtggtggctcccgccgcgctggcgcaggctcccgggcccgcggcgacgccgagcgggccgcccgaacgtgacggcgatcctggagaagggcgggcagttcaccatgttcatgcggctgatgaaggagacgcagcaggacacgcagctgaacagccagctgaacagctcgtactgccagcagcggcggcgggtacacggtgttcgcgcccaccgacaacgccttcaacaacctcaagcccggcacgctcaactcgctgacgcagcagcagcaggtggcgctggtgcagggccacgtcctgccccagttctacagcatggactccttccagaccgccagcaaccccgtccgcacccaggcctccggccgcgacgggccctacacgctcaacatcaccgccaccgccaacaaccaggtcaacgtctcctcgggcgtcgccgaggtcaccatcaacaacgcgctcagcgccgtcaagcccctcgccgtctactccgtcgacaaggtgctcctgcccctggagctgttcggggccaaggcgcccgccgccgngcccgccgcgtcccaggggaagcccaagaagggcgggtcctcggacgctccctccgggtcggccggctccgacgacgccgcgccaacgggcgccgccggcgccagggccgtcggctggagcttcgccggcctcgccgccgtccttggctgcctgttgtgagagtgagaccgtgcgtcgtttctagggacggacggacggacgacaagctagttgaagatgagaatgccatgaccgaggccgggcatgggcgccttcttccatttccatctttgtctgagattgtcagtggccgtgttcccttgcccttctttctctctgtttatttatttaaacttctttcatctcgctagtttctttaatttgtactattggtggtttgtaagattggcttatgtgattcaatttatgcgcctgccgctgttgatactgc

SEQ ID NO: 22654 - protein, 264 aa, Zea mays subsp. mays
  misc_feature (1)..(264): Ceres Seq. ID no. 12409591
  misc_feature (148)..(148): Xaa is any aa, unknown or other
MFMRLMKETQQDTQLNSQLNSSYCQQRRRVHGVRAHRQRLQQPQARHAQLADAAAAGGAGAGPRPAPVLQHGLLPDRQQPRPHPGLRPRRALHAQHHRHRQQPGQRLLGRRRGHHQQRAQRRQAPRRLLRRQGAPAPGAVRGQGARRXARRVPGEAQEGRVLGRSLRVGRLRRRRANGRRRRQGRRLELRRPRRRPWLPVVRVRPCVVSRDGRTDDKLVEDENAMTEAGHGRLLPFPSLSEIVSGRVPLPFFLSVYLFKLLSSR

SEQ ID NO: 22655 - protein, 262 aa, Zea mays subsp. mays
  misc_feature (1)..(262): Ceres Seq. ID no. 12409592
  misc_feature (146)..(146): Xaa is any aa, unknown or other
MRLMKETQQDTQLNSQLNSSYCQQRRRVHGVRAHRQRLQQPQARHAQLADAAAAGGAGAGPRPAPVLQHGLLPDRQQPRPHPGLRPRRALHAQHHRHRQQPGQRLLGRRRGHHQQRAQRRQAPRRLLRRQGAPAPGAVRGQGARRXARRVPGEAQEGRVLGRSLRVGRLRRRRANGRRRRQGRRLELRRPRRRPWLPVVRVRPCVVSRDGRTDDKLVEDENAMTEAGHGRLLPFPSLSEIVSGRVPLPFFLSVYLFKLLSSR

SEQ ID NO: 22656 - protein, 259 aa, Zea mays subsp. mays
  misc_feature (1)..(259): Ceres Seq. ID no. 12409593
  misc_feature (143)..(143): Xaa is any aa, unknown or other
MKETQQDTQLNSQLNSSYCQQRRRVHGVRAHRQRLQQPQARHAQLADAAAAGGAGAGPRPAPVLQHGLLPDRQQPRPHPGLRPRRALHAQHHRHRQQPGQRLLGRRRGHHQQRAQRRQAPRRLLRRQGAPAPGAVRGQGARRXARRVPGEAQEGRVLGRSLRVGRLRRRRANGRRRRQGRRLELRRPRRRPWLPVVRVRPCVVSRDGRTDDKLVEDENAMTEAGHGRLLPFPSLSEIVSGRVPLPFFLSVYLFKLLSSR

SEQ ID NO: 22657 - DNA, 1629 bp, Zea mays subsp. mays
  misc_feature (1)..(1629): Ceres Seq. ID no. 12409598
actaccgtcctgctccacgctcctcggttcccgtgctcgtgtcatcgaccgccggggcccactcaccagtctcccaacacgcagcgagcggcagctcctcctcgtctctcaaagtcgagccgccactcgattaagcgattccaaggcggagcggtgaggtggctatggagtacaggagggtgaaggatcagatttatgatgatttatctcagaaggatgtggaaagcctgagtgggaggacactatctagtgccaatactacagctattggtcccgcttctgcaggaggcgcaaaagccaactctagttggaagctaaagtctgttgttactcttgcattgacattgctaacaagttctcaggcaatattaattgtgtggtcaaaaagagctggaaaatatgaatatagtgtcacaacagctaatttttcggtggaggctttaaaatgccttctatcactagctgctctttttaggacgtggaactgccatggtgtcactgatgataatagattaaccacatcttttgatgaagttggtgtatatccgattcctgctgttctttacatggtaaagaacttattgcagtactatatctttgtctacgtggatgcaccagcttatcaaatcttgaagaacctaaatatcatcagcacaggtgttttgtaccgcatcattttgaagaaaaagctaagtgaaattcagtgggcagcatttgttcttctatgtgctggttgcacaacagctcaacttaatccttcgtctgaccatgtgcttcaaactcctattcaaggttggatgatggcaattgtgatggctcttttgagtggttttgctggggtgtatacagaagctatcattaaaaaacggccatcaagaaacatcaacgtgcagaacttttggctatacatatttggggtgatcttcaatctagttgcaatttgtgttcaggattatgatgcagtcatgaataaaggctttttccatgggtattcattcatcacagttttgatgattctgaaccacgcactgagtggaattgctgtttcaatggtgatgaaatatgctgataacatagtcaaggtctattcaacttcagttgcaatgcttctgacagcagttgtatctgtcttcttgttcaacttccatttatccctcgcattcttccttggatccacagttgtttccgtctcagtgtacctgcactcaattggaaaacttcaaccacagaaataaggattggtgaagatggaatatgggattcattatcggtgtttggtgctttgaggctataagaaaagcttcagtggagatgagatttgattgcatagttgtgaaagttagtaggtggtcaaagtaagaaccagaaatgtatttttggaggggttctagctattatccggtctagtttttgttctattctatcaagtcgagttcgttgatcgctaaccgcatccgtgcctagtttttgatatatcaaacgcacatttattgtaatgctagtattttgaaatactaggtagtacccaattgttgtatggagctagttgtcttttcattctaatgtatagaattaccattctttttaccaccgagcgtgtggaccgatgttgaggccctttttactccc

SEQ ID NO: 22658 - protein, 356 aa, Zea mays subsp. mays
  misc_feature (1)..(356): Ceres Seq. ID no. 12409599
MEYRRVKDQIYDDLSQKDVESLSGRTLSSANTTAIGPASAGGAKANSSWKLKSVVTLALTLLTSSQAILIVWSKRAGKYEYSVTTANFSVEALKCLLSLAALFRTWNCHGVTDDNRLTTSFDEVGVYPIPAVLYMVKNLLQYYIFVYVDAPAYQILKNLNIISTGVLYRIILKKKLSEIQWAAFVLLCAGCTTAQLNPSSDHVLQTPIQGWMMAIVMALLSGFAGVYTEAIIKKRPSRNINVQNFWLYIFGVIFNLVAICVQDYDAVMNKGFFHGYSFITVLMILNHALSGIAVSMVMKYADNIVKVYSTSVAMLLTAVVSVFLFNFHLSLAFFLGSTVVSVSVYLHSIGKLQPQK

SEQ ID NO: 22659 - protein, 222 aa, Zea mays subsp. mays
  misc_feature (1)..(222): Ceres Seq. ID no. 12409600
MVKNLLQYYIFVYVDAPAYQILKNLNIISTGVLYRIILKKKLSEIQWAAFVLLCAGCTTAQLNPSSDHVLQTPIQGWMMAIVMALLSGFAGVYTEAIIKKRPSRNINVQNFWLYIFGVIFNLVAICVQDYDAVMNKGFFHGYSFITVLMILNHALSGIAVSMVMKYADNIVKVYSTSVAMLLTAVVSVFLFNFHLSLAFFLGSTVVSVSVYLHSIGKLQPQK

SEQ ID NO: 22660 - DNA, 1465 bp, Zea mays subsp. mays
  misc_feature (1)..(1465): Ceres Seq. ID no. 12409617
agctgcagccagagccacccaccttatcgtcatcctcgctcgctcctcatcgccagcgcctcctcctcctcctccttcttccccaccgctgccgacatggctgcgcaagaagagaagaccgctgttgttgttgctgctgctgccgatgtcgcgacagaggagcctacgccggcggcggagcagcaacctcagccggctggggcggcgcgcagggcaggaccatcggcgcccggcggggctccgcccaaccccttcgacttctccaccatgatgaaccttctcaatgaccctagcatcaaggagatggcagagcagatcgccaaggacccggcgttcacggagatggcggagcagctgcagaagacggtggtgtccccgcggcagcaacagcagcagcaggcgcggcagcagcagcagcagctggacccgcagaagtacgtggcgacgatgcagcagctgatgcagaacccgcagttcgtggccatggcggagcggctaggcagcgcgctgatgcaggaccctgccatgtccgccatgctggggggcctcaccaacccggcgcacaaggagcagctggaggcccgcgtcgcgcgcatgaaagaggaccccacgctcaagcccatcctcgacgagatcgagtccggcggccccgccgccatgatgaagtactggaacgaccctgaggctctgcagaagttcggccgcgcgatgggcgtcggcgtcggcccgtccggcgaggccggcggtgcggagcacgccgaggcggaggacgacgctggggaggaaggcgagtatgaggacgagtccatcgtccaccacaccgccagtgttggcgacgtcgagggcctcaagaaagcgctggaggacggcgcggacaaggacgaggaggactcggaagggcggcgtggcctccacttcgcgtgcggctacggcgagctccagtgcgcgcaggcgctcctggaggccggcgccgcggtggacgccgtcgacaagaacaagaacaccgcgctgcactacgccgccggatacggccgcaaggactgcgtcgcgctccttctcgagagcggcgccgccgtgacgctgcagaacctggacgggaagacgcccatcgacgtggccaagctcaacaaccaggatgacgtcctcaagctgctggagaagcacgccttcgtatagacgtcccatgccgccggccggcccgtcttgctcgtctgctcctgtcgccgccgccgccgccacgtcgcttgcctctgctactgctgctgccgccaccgccattaatgctttgttaatttctctcctggtgtagacaacgcaggttccttcatcacttcactgttgagtatttgcattgggtgtgtatgtatcggattttgctttgcgtgatcacggtatcatatttatttgtcggactcctcgttcatcaggaggttttcgtaatgaataaggaagaaatttccatttc

SEQ ID NO: 22661 - protein, 391 aa, Zea mays subsp. mays
  misc_feature (1)..(391): Ceres Seq. ID no. 12409618
SCSQSHPPYRHPRSLLIASASSSSSFFPTAADMAAQEEKTAVVVAAAADVATEEPTPAAEQQPQPAGAARRAGPSAPGGAPPNPFDFSTMMNLLNDPSIKEMAEQIAKDPAFTEMAEQLQKTVVSPRQQQQQQARQQQQQLDPQKYVATMQQLMQNPQFVAMAERLGSALMQDPAMSAMLGGLTNPAHKEQLEARVARMKEDPTLKPILDEIESGGPAAMMKYWNDPEALQKFGRAMGVGVGPSGEAGGAEHAEAEDDAGEEGEYEDESIVHHTASVGDVEGLKKALEDGADKDEEDSEGRRGLHFACGYGELQCAQALLEAGAAVDAVDKNKNTALHYAAGYGRKDCVALLLESGAAVTLQNLDGKTPIDVAKLNNQDDVLKLLEKHAFV

SEQ ID NO: 22662 - protein, 359 aa, Zea mays subsp. mays
  misc_feature (1)..(359): Ceres Seq. ID no. 12409619
MAAQEEKTAVVVAAAADVATEEPTPAAEQQPQPAGAARRAGPSAPGGAPPNPFDFSTMMNLLNDPSIKEMAEQIAKDPAFTEMAEQLQKTVVSPRQQQQQQARQQQQQLDPQKYVATMQQLMQNPQFVAMAERLGSALMQDPAMSAMLGGLTNPAHKEQLEARVARMKEDPTLKPILDEIESGGPAAMMKYWNDPEALQKFGRAMGVGVGPSGEAGGAEHAEAEDDAGEEGEYEDESIVHHTASVGDVEGLKKALEDGADKDEEDSEGRRGLHFACGYGELQCAQALLEAGAAVDAVDKNKNTALHYAAGYGRKDCVALLLESGAAVTLQNLDGKTPIDVAKLNNQDDVLKLLEKHAFV

SEQ ID NO: 22663 - protein, 302 aa, Zea mays subsp. mays
  misc_feature (1)..(302): Ceres Seq. ID no. 12409620
MMNLLNDPSIKEMAEQIAKDPAFTEMAEQLQKTVVSPRQQQQQQARQQQQQLDPQKYVATMQQLMQNPQFVAMAERLGSALMQDPAMSAMLGGLTNPAHKEQLEARVARMKEDPTLKPILDEIESGGPAAMMKYWNDPEALQKFGRAMGVGVGPSGEAGGAEHAEAEDDAGEEGEYEDESIVHHTASVGDVEGLKKALEDGADKDEEDSEGRRGLHFACGYGELQCAQALLEAGAAVDAVDKNKNTALHYAAGYGRKDCVALLLESGAAVTLQNLDGKTPIDVAKLNNQDDVLKLLEKHAFV

SEQ ID NO: 22664 - DNA, 1415 bp, Zea mays subsp. mays
  misc_feature (1)..(1415): Ceres Seq. ID no. 12409621
gtcggcgaccccaaacctctgtcgagagtttcacctccggtcgctggtttcctccaatctccgtggtagttcagcgcgagcgggcggcggggtttgagctcgatggccacttccggcgaacaatcggctggcggcgggtctgcggcgagggcgtcgaagctgcggtacccgctgcggtcggcgagcaaggggaaggcggcggtcgttcccccggcggctgatgctcctcccaccatctctgctccgcgacgggcaaaaccatcttcagatgtcagcaagagcatgtgtttagacctttctgtgaaggataattctgccaaacccccacggaggcactcaatacaaaccaagctaggagctagtccaaggccaacaccttctggaactgtgactccggtgtctggggttcggtcaaagagatcggaaagccaggggaggtttgataccccgacatcagaagtgtccatgtccatctcaaggcgcaagttcagcacgctttcttcaatctcgtactggatgacacagatcaggctggcagaggctgcttccaagcactcggtttctctgggcttctttaagcttgctcttgaatcagaatgtgagcctttggaccggatgagggaagaactcaagtcctacgtagcacggcatggcctggcgacagaattggaggacccagttaaggacattctccaggtttatgatattttggatgattttgagaagctgaagatctctgcagagccctcacagcaaccaaaaaagtctgacaaggctgctcgtactgccacaaatgcgtcaccgaatggtaacctgaagccaagatcactgaactctgatgctactgaaagcaaggatgctgtaaagaaagagggcatccagaaagtaaatcctggtgcaagggtcagaggctcctgtaacaggaatccagtcaaaaacaccaccgcaaaggaagcagttgccaagaacaccggtaaggaaaccaagaaaggggccaagggtcagcaggaagttagcgaggctccgtcagcccttccaaatcaggaatctgctgatgttgtgaaggagatgacccatgaagataaagagaacaatggcgatattgaaatggcagtggatgttgccgtagcccaagatatctagaacagccggaccaacttcagattcgatccccttttttttctatcgctgaagatgaagtgttagcgtgtggttgcttattttggttttcaattgttaatatgttattagtagagcttgtctgtgtgattgctgtctggctggaccttgaacggtcttcaagagcgtgtcataagttgatgattgctttcattcctctgtcaagtttgcggctttgcatgtgataatccgtgcaactgaatatagttgaatttatctattctcgtggttcctcc

SEQ ID NO: 22665 - protein, 346 aa, Zea mays subsp. mays
  misc_feature (1)..(346): Ceres Seq. ID no. 12409622
MATSGEQSAGGGSAARASKLRYPLRSASKGKAAVVPPAADAPPTISAPRRAKPSSDVSKSMCLDLSVKDNSAKPPRRHSIQTKLGASPRPTPSGTVTPVSGVRSKRSESQGRFDTPTSEVSMSISRRKFSTLSSISYWMTQIRLAEAASKHSVSLGFFKLALESECEPLDRMREELKSYVARHGLATELEDPVKDILQVYDILDDFEKLKISAEPSQQPKKSDKAARTATNASPNGNLKPRSLNSDATESKDAVKKEGIQKVNPGARVRGSCNRNPVKNTTAKEAVAKNTGKETKKGAKGQQEVSEAPSALPNQESADVVKEMTHEDKENNGDIEMAVDVAVAQDI

SEQ ID NO: 22666 - protein, 286 aa, Zea mays subsp. mays
  misc_feature (1)..(286): Ceres Seq. ID no. 12409623
MCLDLSVKDNSAKPPRRHSIQTKLGASPRPTPSGTVTPVSGVRSKRSESQGRFDTPTSEVSMSISRRKFSTLSSISYWMTQIRLAEAASKHSVSLGFFKLALESECEPLDRMREELKSYVARHGLATELEDPVKDILQVYDILDDFEKLKISAEPSQQPKKSDKAARTATNASPNGNLKPRSLNSDATESKDAVKKEGIQKVNPGARVRGSCNRNPVKNTTAKEAVAKNTGKETKKGAKGQQEVSEAPSALPNQESADVVKEMTHEDKENNGDIEMAVDVAVAQDI

SEQ ID NO: 22667 - protein, 225 aa, Zea mays subsp. mays
  misc_feature (1)..(225): Ceres Seq. ID no. 12409624
MSISRRKFSTLSSISYWMTQIRLAEAASKHSVSLGFFKLALESECEPLDRMREELKSYVARHGLATELEDPVKDILQVYDILDDFEKLKISAEPSQQPKKSDKAARTATNASPNGNLKPRSLNSDATESKDAVKKEGIQKVNPGARVRGSCNRNPVKNTTAKEAVAKNTGKETKKGAKGQQEVSEAPSALPNQESADVVKEMTHEDKENNGDIEMAVDVAVAQDI

SEQ ID NO: 22668 - DNA, 964 bp, Zea mays subsp. mays
  misc_feature (1)..(964): Ceres Seq. ID no. 12409637
cccaccatcccagggccgccgcgctgcttctctttcccgtcgcacctccaacgctgccgccgcggcagattaatccaacaccgggccgggatacgtgacaggtttctgagctcgcagctctacgccagcgatgccggagacggcggcgccgatcggcctgtcatgggcgcccaagcttccttccttcgcaacgaccagcggcggcagcaagagcgaccacgcgccgaacccgagcgctgcgcagggatcgctctggaaccgcgcgagcgacctcgtggacgggctgttcgttgccccgagggaccctaggcagctgaataagctggccaggaagaacgtcaaggacactgccggcaagggctggttcgacatgccagctccgaccatcactcccgagttgaagaaggatctcgagattttgcagctgaggcacgtaattgacccaaaaaggcacttcaagcgggcaggaaaatccaaggcccttcccaagtacttccaagtcggtacggtcgttgagcctgcatctgagttctactcaagtaggctgaaaaatagggaacgcaaggcaacattggttgacgagctgttatcagatcaatctctgaagagctacaggatgcgcaaggtacgtgaaattcaggagatccgtacaccaggaggcaaccaaaagtggaagaacaagggcaagaaaacgctcaagagggccaaggataggaggaaatgagactggcgtgctagccttgtggtccagttgtgagagaacagattggagaagtgaaccaaggagcgccttcaaataccccctctctcgatttgtgcggggtatatagattctggttccagtgtagtgtggtgaacttcagtaacatgatgaattgctttagatacttcaaaaaatgttgctgtaagtctgtaacacacatgtatggttttcagcccgtggttatcaattctgtcggttggg

SEQ ID NO: 22669 - protein, 197 aa, Zea mays subsp. mays
  misc_feature (1)..(197): Ceres Seq. ID no. 12409638
MPETAAPIGLSWAPKLPSFATTSGGSKSDHAPNPSAAQGSLWNRASDLVDGLFVAPRDPRQLNKLARKNVKDTAGKGWFDMPAPTITPELKKDLEILQLRHVIDPKRHFKRAGKSKALPKYFQVGTVVEPASEFYSSRLKNRERKATLVDELLSDQSLKSYRMRKVREIQEIRTPGGNQKWKNKGKKTLKRAKDRRK

SEQ ID NO: 22670 - protein, 117 aa, Zea mays subsp. mays; identical to SEQ ID NO: 15564
  misc_feature (1)..(117): Ceres Seq. ID no. 12409639

SEQ ID NO: 22671 - protein, 102 aa, Zea mays subsp. mays
  misc_feature (1)..(102): Ceres Seq. ID no. 12409640
PTIPGPPRCFSFPSHLQRCRRGRLIQHRAGIRDRFLSSQLYASDAGDGGADRPVMGAQASFLRNDQRRQQERPRAEPERCAGIALEPRERPRGRAVRCPEGP

SEQ ID NO: 22672 - DNA, 1718 bp, Zea mays subsp. mays
  misc_feature (1)..(1718): Ceres Seq. ID no. 12409645
attcagcagcaccggcggcaccccgcagtcccggcgtcccgcacccacgccctacaggcagaccaagcaaatggcgatctcgatctcgcaggaggccttcgactccatggtccgggagaacatggaggacctcggcatggaccccgatgaggccctcgctgacgccgttgaggcgctcaccctccagggcgccgatctctcaggtatcgttaagcgcgtgccgggagaggccaccgcggcggaggtgagcccggtggtgcgggttctggacgaactgaaggcctctctcagcgccagcggcggggtcggagcaggatctcgacggactcgtctctctgttcgatgagttgcgcaatctgtgctgctccggcgagggttcggagaatgcagcgatcgcggtacggaatggcgtcgtggaggcgctcgtcgccctgtgcgcgtccgctcgggtcgagcaggagaggttgcttgcttcggccttgaagagtctgagctccgtactccgtgatgtggcaagcactgaaaagttcagacgaagtgagggacccaaaattgtcatggatctcttgcaaggaggctcagaaaattcagatttattggatgctggatttagtgttgtggcagcaggttctgctggcaatgaagttgtgaaagagtcctttatggacctgaaggtcgatgaactcattctgcgggttatgaaggataaatcaaaatctaatgtgcaaagtttgtatgatgccatacgtgttctgttgaaacctgatgacaaccgagtggtagcttctcaggtatatggatactcccggagatttgctgaaatcggggttgcagaagttcttgtcaatgcacttcgtgagcaagtcgctccttccagtttgccatctgcttgtgctgctttaaagtcgattgcagtcaatgatgaaatatgccgttccatatctgaaaatggtggaattgatgtgcttcttcaatgcatcgacgaggcaggtgagcagaagaacaaagttgtagcaagatcttgctgctctttgttgtccaagcttgctgcaagcgatgcaaacaagtccattatcattcagcgaggtggttttgataggttcctaaagttgacatccagattttctgaagatcctgctataattcaagaggttatgtctatggtgacggtcctcacactgaggtcaccagaaaatgcagcacgtgcaatggaagaaggctatgggacactggctatacagtcaatgcaaaggttcccctcctccgggcagactcagaagcaagcatgccttatgattcgcaatcttgttgcccgaaaccctgagaacaggaccgtcctgcttaatgatggtgcagaaaagcttattagaaaggccatggccctgcacggaagctgtaaagatgctgcctcgtctgccttgagggacctgggcctcgacaactacaatgcatagacaccagtgaccagtcacaccatagaaagtgtgcgtcgagttagtttggtcgcggtagaatgttttggaggagaaatacattgtgagttatcgaggtgccgcactgaaatgagtttgtagaattgcgctactgtggttgcatcaatggtttcagtttgttgggcaatcaaacttcagggctattaggttgtctccggtaaatcttacatatgatcatacaatttttttttacagagtgaagtttaaaataggaaatgtttcaag

SEQ ID NO: 22673 - protein, 298 aa, Zea mays subsp. mays
  misc_feature (1)..(298): Ceres Seq. ID no. 12409646
MDLLQGGSENSDLLDAGFSVVAAGSAGNEVVKESFMDLKVDELILRVMKDKSKSNVQSLYDAIRVLLKPDDNRVVASQVYGYSRRFAEIGVAEVLVNALREQVAPSSLPSACAALKSIAVNDEICRSISENGGIDVLLQCIDEAGEQKNKVVARSCCSLLSKLAASDANKSIIIQRGGFDRFLKLTSRFSEDPAIIQEVMSMVTVLTLRSPENAARAMEEGYGTLAIQSMQRFPSSGQTQKQACLMIRNLVARNPENRTVLLNDGAEKLIRKAMALHGSCKDAASSALRDLGLDNYNA

SEQ ID NO: 22674 - protein, 263 aa, Zea mays subsp. mays
  misc_feature (1)..(263): Ceres Seq. ID no. 12409647
MDLKVDELILRVMKDKSKSNVQSLYDAIRVLLKPDDNRVVASQVYGYSRRFAEIGVAEVLVNALREQVAPSSLPSACAALKSIAVNDEICRSISENGGIDVLLQCIDEAGEQKNKVVARSCCSLLSKLAASDANKSIIIQRGGFDRFLKLTSRFSEDPAIIQEVMSMVTVLTLRSPENAARAMEEGYGTLAIQSMQRFPSSGQTQKQACLMIRNLVARNPENRTVLLNDGAEKLIRKAMALHGSCKDAASSALRDLGLDNYNA

SEQ ID NO: 22675 - protein, 251 aa, Zea mays subsp. mays
  misc_feature (1)..(251): Ceres Seq. ID no. 12409648
MKDKSKSNVQSLYDAIRVLLKPDDNRVVASQVYGYSRRFAEIGVAEVLVNALREQVAPSSLPSACAALKSIAVNDEICRSISENGGIDVLLQCIDEAGEQKNKVVARSCCSLLSKLAASDANKSIIIQRGGFDRFLKLTSRFSEDPAIIQEVMSMVTVLTLRSPENAARAMEEGYGTLAIQSMQRFPSSGQTQKQACLMIRNLVARNPENRTVLLNDGAEKLIRKAMALHGSCKDAASSALRDLGLDNYNA

SEQ ID NO: 22676 - DNA, 1227 bp, Zea mays subsp. mays
  misc_feature (1)..(1227): Ceres Seq. ID no. 12409649
actacctcaggctgcttgaagtagtatgcatcagcggccctggtcctctctcccgctcccgctcaagggcagcagagaaagcagctgagcgctgactgtggatctcatccgtatcgcgtatatacgtcgtcctgtttggatccaccgcgttttgctaattcccttcgaaccggccggtggccttcgttctcccaccaggcctgtctgtctgctgtatccgccagagcttccatggattccaccctcttcatcatcggcgtcataggcaacatcatctcagttctcgtcttcatatcgcctatcaagacgttctggaggatcgtgcggggcgggacgacggaggagttcgagccggcgccgtacgtgttgacgctgctcaacgcgctgctgtggctctactacggcctcaccaagcccgacggcttcctcgtcgccaccgtcaatggctttggggctgtcatggaggccatctacgtcgtcctcttcatcgtctacgccgccaaccatgccacaagggttaagaccgcaaagctggcagcagcgttggacatcggtggcttcggagtcgtgtttgcggccaccacattcgccatcagtgaatttgaattgagaattatggtgataggaatgatatgtgcctgcctcaatgtgctcatgtacgggtcaccccttgcttctatgaaaacggtgatcacgacaaagagcgtggagttcatgccattcttcctgtccttcttcctcttcctcaacggaggcgtctgggcaacgtacgcggtgcttgaccgcgacatcttcctcgggatccccaatgggataggcttcgtgcttggcaccatccagctgatcgtctacgcgatctacatgaacagcaaggcctcccaatgcagcaaggaaacagcgtcctcgcctcttctgatggcctccgaccggggagaagcatctagccatgtctgatgatgagcttcgatcagtgcgcgcgctggagtatagcatagaagtctcttgctgtcaaaaacttcccagaccaacggtacctaccagcatgcatgcatgcaagaggttaccaatttttattgtttgaaaattcatgtaaaacttgtgacctccatggattgtttctttctttggtataagcttccaagatgttagattattagcacgatagttttgccagagaaggatgttgtcaatataatgaagaaatggtgaaaatccatacctttgatt

SEQ ID NO: 22677 - protein, 240 aa, Zea mays subsp. mays
  misc_feature (1)..(240): Ceres Seq. ID no. 12409650
MDSTLFIIGVIGNIISVLVFISPIKTFWRIVRGGTTEEFEPAPYVLTLLNALLWLYYGLTKPDGFLVATVNGFGAVMEAIYVVLFIVYAANHATRVKTAKLAAALDIGGFGVVFAATTFAISEFELRIMVIGMICACLNVLMYGSPLASMKTVITTKSVEFMPFFLSFFLFLNGGVWATYAVLDRDIFLGIPNGIGFVLGTIQLIVYAIYMNSKASQCSKETASSPLLMASDRGEASSHV

SEQ ID NO: 22678 - protein, 164 aa, Zea mays subsp. mays
  misc_feature (1)..(164): Ceres Seq. ID no. 12409651
MEAIYVVLFIVYAANHATRVKTAKLAAALDIGGFGVVFAATTFAISEFELRIMVIGMICACLNVLMYGSPLASMKTVITTKSVEFMPFFLSFFLFLNGGVWATYAVLDRDIFLGIPNGIGFVLGTIQLIVYAIYMNSKASQCSKETASSPLLMASDRGEASSHV

SEQ ID NO: 22679 - DNA, 1402 bp, Zea mays subsp. mays
  misc_feature (1)..(1402): Ceres Seq. ID no. 12409656
agaagacagaggccagtcacaaggcgatagcagcaggtggtggcaagatgacggtgctccactctccggttggagttaggagcatcgtgacctccttggtggctttcttcatcctagccagctccatcgtgttcctcctcgacagaggccaggaagagcaagtgcaagtggcagtcgagcatggacgccaagaagtgcaggtgaagctggaatccgggctgcaagaaccggcgataagagggacaacccaagagggggacgccagcaacgaggagtgcaactggtccaggggaaggtgggtgtacgacaacgtgtcccgcccattgtacagcgggctcaagtgctccttcatcttccccgaggtggcctgtgacaagtatggcaggaaggatgccatgtaccagcactggagatggcagcctcatggtcatggatgcgacctcccaagatttgatgccatcaagctgcttgaaaatctgagaaacaagagaatggtgtttgtgggcgactcagtcaacaggaaccaatgggtctctctcgtgtgcatggtggaggcctcaatacctgacgacaggctcaagatacgcaccttcaatggctcactcatctccttcaaggcattggaatacaacgcaacgatagatttctactggtcaccactactggtggaatctaacagcgacaaccccattatccaccgggtggagtaccggatcataagggcagacagaattgagaagcatgccagtgtctggagggatgccgacatcattgtcttcaattcttacctgtggtggaggaagcagaaggatgacatgaggatgaaggtcatgtatggttcattcgaagatggtgatgcaaagttagacgagatggaaatggtcgatggtttcgagatagctctcaagaaactaaccgaatggctgggggagaatattgacaagaacaagactaggatatttttcgcaggatcgtcaccaacacattcctgggctagcaactggggtggagaagacaagaacaagtgccttaacgaaacagagccgatctacaaaaccggatacaaagctgcaactacagactacagcttgatggccaaagctaagcactactttcgaacattggagccgaaaggcatacatgttcagatactgaacatcaccgagctgtctgactaccgcaaggacgggcatcctacggtgtacaggaaacagtttgctcctctgacgaaagagcaaatcgcagacccagccagttacgcggattgcacgcactggtgcctccccggagttccagatgtctggaacgagtttttatatggctacctcgtgcaaaaatgatgtacaaaactgtcagtcaggttcgttttgccccttatatataatgtacaaatggcatactc

SEQ ID NO: 22680 - protein, 445 aa, Zea mays subsp. mays
  misc_feature (1)..(445): Ceres Seq. ID no. 12409657
KTEASHKAIAAGGGKMTVLHSPVGVRSIVTSLVAFFILASSIVFLLDRGQEEQVQVAVEHGRQEVQVKLESGLQEPAIRGTTQEGDASNEECNWSRGRWVYDNVSRPLYSGLKCSFIFPEVACDKYGRKDAMYQHWRWQPHGHGCDLPRFDAIKLLENLRNKRMVFVGDSVNRNQWVSLVCMVEASIPDDRLKIRTFNGSLISFKALEYNATIDFYWSPLLVESNSDNPIIHRVEYRIIRADRIEKHASVWRDADIIVFNSYLWWRKQKDDMRMKVMYGSFEDGDAKLDEMEMVDGFEIALKKLTEWLGENIDKNKTRIFFAGSSPTHSWASNWGGEDKNKCLNETEPIYKTGYKAATTDYSLMAKAKHYFRTLEPKGIHVQILNITELSDYRKDGHPTVYRKQFAPLTKEQIADPASYADCTHWCLPGVPDVWNEFLYGYLVQK

SEQ ID NO: 22681 - protein, 430 aa, Zea mays subsp. mays
  misc_feature (1)..(430): Ceres Seq. ID no. 12409658
MTVLHSPVGVRSIVTSLVAFFILASSIVFLLDRGQEEQVQVAVEHGRQEVQVKLESGLQEPAIRGTTQEGDASNEECNWSRGRWVYDNVSRPLYSGLKCSFIFPEVACDKYGRKDAMYQHWRWQPHGHGCDLPRFDAIKLLENLRNKRMVFVGDSVNRNQWVSLVCMVEASIPDDRLKIRTFNGSLISFKALEYNATIDFYWSPLLVESNSDNPIIHRVEYRIIRADRIEKHASVWRDADIIVFNSYLWWRKQKDDMRMKVMYGSFEDGDAKLDEMEMVDGFEIALKKLTEWLGENIDKNKTRIFFAGSSPTHSWASNWGGEDKNKCLNETEPIYKTGYKAATTDYSLMAKAKHYFRTLEPKGIHVQILNITELSDYRKDGHPTVYRKQFAPLTKEQIADPASYADCTHWCLPGVPDVWNEFLYGYLVQK

SEQ ID NO: 22682 - protein, 314 aa, Zea mays subsp. mays
  misc_feature (1)..(314): Ceres Seq. ID no. 12409659
MYQHWRWQPHGHGCDLPRFDAIKLLENLRNKRMVFVGDSVNRNQWVSLVCMVEASIPDDRLKIRTFNGSLISFKALEYNATIDFYWSPLLVESNSDNPIIHRVEYRIIRADRIEKHASVWRDADIIVFNSYLWWRKQKDDMRMKVMYGSFEDGDAKLDEMEMVDGFEIALKKLTEWLGENIDKNKTRIFFAGSSPTHSWASNWGGEDKNKCLNETEPIYKTGYKAATTDYSLMAKAKHYFRTLEPKGIHVQILNITELSDYRKDGHPTVYRKQFAPLTKEQIADPASYADCTHWCLPGVPDVWNEFLYGYLVQK

SEQ ID NO: 22683 - DNA, 1195 bp, Zea mays subsp. mays
  misc_feature (1)..(1195): Ceres Seq. ID no. 12409665
cgcgactcgcgagcggcaattggacgcatcgcatcggatctcttcctccggtcttctctgacctctgggcctctgactccgcgcccacaccgccactgcctctggcctccagccacctcccgatctggccgagctcgcctccccggaggcggcgcatggatcccgcctcgtcggtggccgccgagttttggcggccgccgtaccaccacctccgggcctcgtccgtcgtcaccgccgccgcccgctccgggggcggctccagcagccgcaggagaccgcggcgcgacgccgcggcgtcgtccgaggaggagccgtccaagctcgtttccacgtcgggcaccgccgccagcagcagcgcgggctgccaggactcggctgacccagaagcaaaacggttgaaacagatagcacctagtgaaaaaaatgacagaaggacagaagctgaaacaaattcagggaacgctagcaagtctgctgataaaaagcctgcacctaaagagccaccaaaagactacatccatgtgagggctagaagaggtcaagcaacggacagccatagcctcgcagaaagagcacgacgagagaagataagtgaacggatgaaagttcttcaagatattgtccctggatgcaacaaggttatcgggaaagcatcagtccttgatgagataataaattacatccagtctttacagcgtcaagtagagtttttgtccatgaaacttgaagcgattaatgctcatgtgagcaatgcaactgtagcttttccaaccaaagattttggtgttgcgccatataatactgctcctagcctgacgttggacccacaaacgccaagggaatacgcccagggctcgatgtcagattggcttcacatgcaggtcggcaacgcatatgaaagagtgacatgaataaaacgaggaatccataaaacaagctgaattccttgtggtagccaataaagagtaccaggatcaaccgagttcacagtaccaggttcattttcttcttcttctcgtggtcatcgtgacgccaaagttagtttattttattcctagtttgggggcattagcgccgtagatgcgtcattccacatccatctaggagggagcactgtcgtttactgtatacggatttcgtgatgtatcccgggaaatttttgtagatcggactcgtagaagaagagattgcaatt

SEQ ID NO: 22684 - protein, 302 aa, Zea mays subsp. mays
  misc_feature (1)..(302): Ceres Seq. ID no. 12409666
RLASGNWTHRIGSLPPVFSDLWASDSAPTPPLPLASSHLPIWPSSPPRRRRMDPASSVAAEFWRPPYHHLRASSVVTAAARSGGGSSSRRRPRRDAAASSEEEPSKLVSTSGTAASSSAGCQDSADPEAKRLKQIAPSEKNDRRTEAETNSGNASKSADKKPAPKEPPKDYIHVRARRGQATDSHSLAERARREKISERMKVLQDIVPGCNKVIGKASVLDEIINYIQSLQRQVEFLSMKLEAINAHVSNATVAFPTKDFGVAPYNTAPSLTLDPQTPREYAQGSMSDWLHMQVGNAYERVT

SEQ ID NO: 22685 - protein, 251 aa, Zea mays subsp. mays
  misc_feature (1)..(251): Ceres Seq. ID no. 12409667
MDPASSVAAEFWRPPYHHLRASSVVTAAARSGGGSSSRRRPRRDAAASSEEEPSKLVSTSGTAASSSAGCQDSADPEAKRLKQIAPSEKNDRRTEAETNSGNASKSADKKPAPKEPPKDYIHVRARRGQATDSHSLAERARREKISERMKVLQDIVPGCNKVIGKASVLDEIINYIQSLQRQVEFLSMKLEAINAHVSNATVAFPTKDFGVAPYNTAPSLTLDPQTPREYAQGSMSDWLHMQVGNAYERVT

SEQ ID NO: 22686 - DNA, 1435 bp, Zea mays subsp. mays
  misc_feature (1)..(1435): Ceres Seq. ID no. 12409675
atcatgcattcttcatggcgacggtgaccagtttgagcttctcaggcagctgcagacacgggccacgctatactgcccggccggcggccagttctcgtagtagtcagctacttaatgatcagctagctagagcatcgcggagattacaagtggcggcgggcatggcggtggcggcgttcccttcctgcggcgccttcgcccctccttgcctagtgagtacaaggagagccttctcctcggtggtggccatggcttccgcagccccggtgagagctcccagcaggaagcccttcgcccctcctcgcgaggtacaccgccccgtggcgcactcgctgcccccgcagaagcgggagatcttcgagtcgctcgagtcgtgggcggcggacaacatcctggtgctcctcaagcccgtggagaggtcctggcagccgcaggactacctgccggacgccgcctccgagtccttcgacgacgaggtccgggagctgcgagagcgcgcccgggagatccccgacgactacttcgtctgcttcgtgggcgacatggtcaccgaggaggcgctgccgacgtaccagaccatgctcaacaccctggacggcggcgtccgcgacgagaccggcgccagctcgaccagctgggcggtgtggaccagggcgtgggccgccgaggagaacaggcacggcgacctcatgaacaaatacctcttcctgacggggagggtggacatgaggcagatcgagaagaccgtccagtacctcatcgcctcagggatggatcccaagacggagacgaacccgtacatgggcttcgtctacacgtcgttccaggagcgcgccaccttcatctcccacggcaacacggcgcgccacgccaggcggtacggcgacaccaagctggcgcagatctgcggcacaatcgccgccgacgagaagcgccacgagtcggcgtacgagcggatcgtcgagaagctgttcgaggtggacccggactacacggtgcgcgccttcgcggacaccatgaggaagaaggtggccatgcccgcccacctcatgtacgacggccaggacgacgggctgttcgcgcgcttcagcgctgtcgcgcagcgcatcggtgtctacacggccagggactacgtcgacatcctcgagttcctggtccgccggtggggcgtccaggaactcacggggctgtccggggaaggccgccgcgcgcaggagttcgtgtgcgagctggggccccggttcaggaggctggaggagagggcgcacgacaacaaggccaaggatccggagttcgcgccattcagctggattcacgggcgccaggttcagctttgattaaagatgatgactgggggattcgccgactctctccgtcctcagatgatatgttgtactgtactagcatataactaagaattgattgaagttgctgt

SEQ ID NO: 22687 - protein, 444 aa, Zea mays subsp. mays
  misc_feature (1)..(444): Ceres Seq. ID no. 12409676
HAFFMATVTSLSFSGSCRHGPRYTARPAASSRSSQLLNDQLARASRRLQVAAGMAVAAFPSCGAFAPPCLVSTRRAFSSVVAMASAAPVRAPSRKPFAPPREVHRPVAHSLPPQKREIFESLESWAADNILVLLKPVERSWQPQDYLPDAASESFDDEVRELRERAREIPDDYFVCFVGDMVTEEALPTYQTMLNTLDGGVRDETGASSTSWAVWTRAWAAEENRHGDLMNKYLFLTGRVDMRQIEKTVQYLIASGMDPKTETNPYMGFVYTSFQERATFISHGNTARHARRYGDTKLAQICGTIAADEKRHESAYERIVEKLFEVDPDYTVRAFADTMRKKVAMPAHLMYDGQDDGLFARFSAVAQRIGVYTARDYVDILEFLVRRWGVQELTGLSGEGRRAQEFVCELGPRFRRLEERAHDNKAKDPEFAPFSWIHGRQVQL

SEQ ID NO: 22688 - protein, 440 aa, Zea mays subsp. mays
  misc_feature (1)..(440): Ceres Seq. ID no. 12409677
MATVTSLSFSGSCRHGPRYTARPAASSRSSQLLNDQLARASRRLQVAAGMAVAAFPSCGAFAPPCLVSTRRAFSSVVAMASAAPVRAPSRKPFAPPREVHRPVAHSLPPQKREIFESLESWAADNILVLLKPVERSWQPQDYLPDAASESFDDEVRELRERAREIPDDYFVCFVGDMVTEEALPTYQTMLNTLDGGVRDETGASSTSWAVWTRAWAAEENRHGDLMNKYLFLTGRVDMRQIEKTVQYLIASGMDPKTETNPYMGFVYTSFQERATFISHGNTARHARRYGDTKLAQICGTIAADEKRHESAYERIVEKLFEVDPDYTVRAFADTMRKKVAMPAHLMYDGQDDGLFARFSAVAQRIGVYTARDYVDILEFLVRRWGVQELTGLSGEGRRAQEFVCELGPRFRRLEERAHDNKAKDPEFAPFSWIHGRQVQL

SEQ ID NO: 22689 - protein, 391 aa, Zea mays subsp. mays
  misc_feature (1)..(391): Ceres Seq. ID no. 12409678
MAVAAFPSCGAFAPPCLVSTRRAFSSVVAMASAAPVRAPSRKPFAPPREVHRPVAHSLPPQKREIFESLESWAADNILVLLKPVERSWQPQDYLPDAASESFDDEVRELRERAREIPDDYFVCFVGDMVTEEALPTYQTMLNTLDGGVRDETGASSTSWAVWTRAWAAEENRHGDLMNKYLFLTGRVDMRQIEKTVQYLIASGMDPKTETNPYMGFVYTSFQERATFISHGNTARHARRYGDTKLAQICGTIAADEKRHESAYERIVEKLFEVDPDYTVRAFADTMRKKVAMPAHLMYDGQDDGLFARFSAVAQRIGVYTARDYVDILEFLVRRWGVQELTGLSGEGRRAQEFVCELGPRFRRLEERAHDNKAKDPEFAPFSWIHGRQVQL

SEQ ID NO: 22690 - DNA, 1536 bp, Zea mays subsp. mays
  misc_feature (1)..(1536): Ceres Seq. ID no. 12409679
atggtggcaagtgagcagcaaacacacagctagactccgcgagaaccgtcaatgggttctataggaggacccacagccacagccaccgccgaccggcgccgccgcgtgctgttcttcccgctcccgtaccagggccatatcaaccccatgttccaactcgccggcctcctccacttgcgcggtttctccgtcaccgtcttccacaccgacttcaacgctcccgacaagtcccgccaccctgcctacgacttcgtccccgttcccgtccgcggctgcttgccgaagggcagctcggatgccttgcaggtgaccgtggagcgcatcctcgccgtgaaccgcgcctgcgaggctccgttccgggagcgcctggccgctctgctggcgcgggaggacgtcgcgtgcctggtcgctgacgcccacctgctgacgctgctggacgtggcgcgggggctcggcgtgccgacgctggtgctgcgcaccggcagcgcggcgtgcctccgcatgttcgcggcgttccccgcgctctgcgacaaggggtatcagccggcgcaagagtcgcagctggaggcgccggtgactgagctgccgccgtaccgcgtccgggacctgccgtccaccaccagcgcctgccacggcgtaataagcgaggtgatttcccgtttagtgacggccgtgacgacctcctcgggtctcatcctcaacaccatggacgctctcgagtgcggcgagctggcgtcgctccggcgagacctcggcgtccccgtgttcgacatcggcccgctccacatgctctctccggcggcctcgagcagcttgctactgcaagaccgcggctgcctcgagtggctcgacgcgcaagccccggcgtccgtgctctacgtcagcttcggcagcctcgccagcatgtccgccgccgagctggtggaaacagcctggggcatagccaacagcggctatcccttcctgtgggttctccggccgggcctcgtccgcggctcgcagacgtcggaggcggcgccacccctgcccgacggcttcgacgccgcgacgcgcgggcggggcatggtcgtgagctgggcggccgcaggaggaggtcctggcgcaccctgccgtgggcgcgttctggacgcactgtggctggaactcgacgctagagagcttgtgcgcgggcgtgccggtcattgcccgcccgtgcttcggcgaccagatggggaacgcgaggtacgtggaccacgtgtggcggaccggcctcacgctcgacggcgtgctcgagaggggcgaggtggaggcggccgtcgcggcgttgatggcgcctggagagcccggcgacggactgcgtcggagggcgcgggagctcaagagcagcgcggcggagtgcatggccaaggatgggtcgtcctgcacgaatgtcgacaagctggtagaccacattctgacactgtaggcgtttggtacaggagcagccacgtggtgctgttcttgggtactgtttttctttgcggttgaaaaataaataaataaaacccgatggagctt

SEQ ID NO: 22691 - protein, 484 aa, Zea mays subsp. mays
  misc_feature (1)..(484): Ceres Seq. ID no. 12409680
MGSIGGPTATATADRRRRVLFFPLPYQGHINPMFQLAGLLHLRGFSVTVFHTDFNAPDKSRHPAYDFVPVPVRGCLPKGSSDALQVTVERILAVNRACEAPFRERLAALLAREDVACLVADAHLLTLLDVARGLGVPTLVLRTGSAACLRMFAAFPALCDKGYQPAQESQLEAPVTELPPYRVRDLPSTTSACHGVISEVISRLVTAVTTSSGLILNTMDALECGELASLRRDLGVPVFDIGPLHMLSPAASSSLLLQDRGCLEWLDAQAPASVLYVSFGSLASMSAAELVETAWGIANSGYPFLWVLRPGLVRGSQTSEAAPPLPDGFDAATRGRGMVVSWAAAGGGPGAPCRGRVLDALWLELDARELVRGRAGHCPPVLRRPDGEREVRGPRVADRPHARRRAREGRGGGGRRGVDGAWRARRRTASEGAGAQEQRGGVHGQGWVVLHECRQAGRPHSDTVGVWYRSSHVVLFLGTVFLCG

SEQ ID NO: 22692 - protein, 452 aa, Zea mays subsp. mays
  misc_feature (1)..(452): Ceres Seq. ID no. 12409681
MFQLAGLLHLRGFSVTVFHTDFNAPDKSRHPAYDFVPVPVRGCLPKGSSDALQVTVERILAVNRACEAPFRERLAALLAREDVACLVADAHLLTLLDVARGLGVPTLVLRTGSAACLRMFAAFPALCDKGYQPAQESQLEAPVTELPPYRVRDLPSTTSACHGVISEVISRLVTAVTTSSGLILNTMDALECGELASLRRDLGVPVFDIGPLHMLSPAASSSLLLQDRGCLEWLDAQAPASVLYVSFGSLASMSAAELVETAWGIANSGYPFLWVLRPGLVRGSQTSEAAPPLPDGFDAATRGRGMVVSWAAAGGGPGAPCRGRVLDALWLELDARELVRGRAGHCPPVLRRPDGEREVRGPRVADRPHARRRAREGRGGGGRRGVDGAWRARRRTASEGAGAQEQRGGVHGQGWVVLHECRQAGRPHSDTVGVWYRSSHVVLFLGTVFLCG

SEQ ID NO: 22693 - protein, 334 aa, Zea mays subsp. mays
  misc_feature (1)..(334): Ceres Seq. ID no. 12409682
MFAAFPALCDKGYQPAQESQLEAPVTELPPYRVRDLPSTTSACHGVISEVISRLVTAVTTSSGLILNTMDALECGELASLRRDLGVPVFDIGPLHMLSPAASSSLLLQDRGCLEWLDAQAPASVLYVSFGSLASMSAAELVETAWGIANSGYPFLWVLRPGLVRGSQTSEAAPPLPDGFDAATRGRGMVVSWAAAGGGPGAPCRGRVLDALWLELDARELVRGRAGHCPPVLRRPDGEREVRGPRVADRPHARRRAREGRGGGGRRGVDGAWRARRRTASEGAGAQEQRGGVHGQGWVVLHECRQAGRPHSDTVGVWYRSSHVVLFLGTVFLCG

SEQ ID NO: 22694 - DNA, 1661 bp, Zea mays subsp. mays
  misc_feature (1)..(1661): Ceres Seq. ID no. 12409686
gtgttcacaaagccggcgccttttgctccccgatctcagttcccgcccacctctaagctcccaaggcgacgctgcggcggcgggacaagcggaaggacaagaggcggacttgtctccctgcccccaccccctccctcgcttcgcgcgtacccccttcagttcagccgggcggtaccgtcgacggcgccggcattgtacttctgctgcgcagctatcactgctctgagaaaatggttgcagcagcctttactgttgatttggacaagcctctagtattccaggttggccatctagaggagcagtatcaggagtgggttcaccagccgattgtttgcaaggaagggccacggttttttgaaaatgatatattggagttcttaacacgcacgaaatggtgggcagttcctcttatctggttgcctgttgtatgttggtgcctgagtacttctatcaagatgggcaatactatcacagatgtagctatgatgattgggtttggaatatttctgtggacactgatcgaatatgtgttacaccgattcttgttccacataaaaaccaaaagttactggggaaacacagcacattatcttcttcatggatgtcatcacaagcatccgatggatggacttcgacttgtctttccaccagctgccgcagctattttgtgctttccggtaaataatcttccttatgtattacgtaccagggtatgggtatctactctgctgttgctgacaatatgtcagatttccacaacactgatgttgaaattacttactacatttgttaaatgttgcatcctaatccttttttttctaaagctggttgaagtggcctgtttgtacatggaaatcgtcatggtttcaagctaatcagaattccttttaactttgttaactttcagttggatatcgataattttaatgccttttttttctgaactgttcatatagttctggaacatgatcaagctattttcgaccccgtctacaactcctggtctgtttggaggtggcctgttgggctacgtgatctatgattgcacacactactacctgcatcatggccagccatcatcagatcctgcaaagtatctccaagaagtaccatctcaaccatcacttcagaattcaaacaaagggctttggaataacttcgaccctgtgggatcatgtatttggcacgctgccttctacgaaaactgtcgacaagagcatttgattttgactggatcttctgctttgcaaagctcttatagtgatgttaggctttgctcgcattgcctgtgtccactttttgaggccagcttccctgttccatcatgtagatttggctttggcagtgtctctatttttttttatctctagcagaggactttaaaatcatcaattacagattggtcatcatcggtggaggttctgttggacaaatttctatccagtttctgattcttctccatggaccaactgtatgaaggcgatcaccagttgctggctcacagacgcgactgaagcgatcaccagtttggtttcaagtcaatgccatcagcggtcgtgttcacattatgtctagctagtgccagctgttagatcagcatgtaatgtatgtacagtgttttcttctctagtagcgtagcctctctgcaagggctgtttggc

SEQ ID NO: 22695 - protein, 214 aa, Zea mays subsp. mays
  misc_feature (1)..(214): Ceres Seq. ID no. 12409687
MVAAAFTVDLDKPLVFQVGHLEEQYQEWVHQPIVCKEGPRFFENDILEFLTRTKWWAVPLIWLPVVCWCLSTSIKMGNTITDVAMMIGFGIFLWTLIEYVLHRFLFHIKTKSYWGNTAHYLLHGCHHKHPMDGLRLVFPPAAAAILCFPVNNLPYVLRTRVWVSTLLLLTICQISTTLMLKLLTTFVKCCILILFFLKLVEVACLYMEIVMVSS

SEQ ID NO: 22696 - protein, 139 aa, Zea mays subsp. mays
  misc_feature (1)..(139): Ceres Seq. ID no. 12409688
MGNTITDVAMMIGFGIFLWTLIEYVLHRFLFHIKTKSYWGNTAHYLLHGCHHKHPMDGLRLVFPPAAAAILCFPVNNLPYVLRTRVWVSTLLLLTICQISTTLMLKLLTTFVKCCILILFFLKLVEVACLYMEIVMVSS

SEQ ID NO: 22697 - protein, 134 aa, Zea mays subsp. mays
  misc_feature (1)..(134): Ceres Seq. ID no. 12409689
MIKLFSTPSTTPGLFGGGLLGYVIYDCTHYYLHHGQPSSDPAKYLQEVPSQPSLQNSNKGLWNNFDPVGSCIWHAAFYENCRQEHLILTGSSALQSSYSDVRLCSHCLCPLFEASFPVPSCRFGFGSVSIFFYL

SEQ ID NO: 22698 - DNA, 1844 bp, Zea mays subsp. mays
  misc_feature (1)..(1844): Ceres Seq. ID no. 12409726
atgtgcgggagccttatggtcatctgcctcctctaaaatatctgtcttgcaaacgaaaatagatggacggcagtccgtaggccactccacctccacgatacaccacggcaccactcaacctgtcaggtagacttctctctcccgcggaagctcttacctccggctccgcaagcaagacttcatggagaagacggtcgttctgtaccccggcctatccgtcagccatttcgtcccgatgatgcagctcgccgacatgttcctagaggagggttacgctgttgcggtcgcgctcatcgacctcaccttggaccaagacgccgccttggcagacgccgtcgaccgcgtcgcctccgccaagccgtccgtcgccttccacaggctccttcggatccagaatcctcccactgtcacagacgacgggggagccgttcctctggtacttccagatactgaaacgctacaacgaccgcctccgtgagttcctctgctccctgcctccccgaagcgtccacgcggtgatcgtggacgcgctttccgtcgacgcgctcgacgtcaccaaggagcttgggctcccggcctacaccttctgcgccgccaacgcctccgcgctcgccgtgttcctccagcttccttggatccgcgcggaaggccaaccaagcttcaaggagctcggagacgcccccgtcaacttctccggcgtgcctcccattccggcgtcacacctcgtgcgccagatgctggacccggagagcgagatatacaccgcgatgatgaacgcgatgcgaaggggagcggaggaccccgacggcatcttggtgaacacgttcgcgtcgctggaagctcgggcggtgggagctctccgggacccacagctggttcctcctagcagcggcagagcacgcaggacgcctccggtgtactgcgtcgggccactggtcgccggtgccggcgcagaggcaaaagagaagcacgaatgcctggcgtggctcgacgggcaaccagagcgcagcgtggtgttgctctgcttcgggagcataggcgcggccacccactcggaagagcagctcagggaggttgccgtcggcctgcagagatccggccaccgtttcctgtgggtggtgcgagccccgctgcgcggtgacaccgagaggctgttcgatccccgtgcggacaccgacctcgacgcccttctgccggacgggttcctcgaggccacaagagaccgcggcctggtcgtcaagcactgggcgccgcaggtggaagtgctcaaccatagggcgacaggcgttcgtgacgcactgtgggtggaactcggtgctggaaggtatcacggctggcgtgccgatgctttgctggccgatgtacgcggagcagaaaatgaacaagctgttcatggtggaggaagccatggtcggcgtggaaatggttggatggcagcaggggctggtcagtgctgaggaggtggaggccaaggtaaggttggtgttggaggagtccgaggaaggcaaccagctcaggacgcgggtggccgcgcataggaatgccgcgaccatggcccggaggggcggcggctcatcgcgcgctgcgtttggccagttcttgtcggacgccgccaaactcgcacgggagtagacgcgtacgcgctggatgcattgccgattgctgaatttcaccatcatcggttgtgattcgatgttgagaattgagatgaaactgcgatgcttgcatgtactctgtggtaacttttatttctatatctgtgagtgctcggcgttgcaacaggaccactatattacaacctttaatatcatacagacttctatatatgatagtacaatacttgc

SEQ ID NO: 22699 - protein, 240 aa, Zea mays subsp. mays
  misc_feature (1)..(240): Ceres Seq. ID no. 12409727
MLDPESEIYTAMMNAMRRGAEDPDGILVNTFASLEARAVGALRDPQLVPPSSGRARRTPPVYCVGPLVAGAGAEAKEKHECLAWLDGQPERSVVLLCFGSIGAATHSEEQLREVAVGLQRSGHRFLWVVRAPLRGDTERLFDPRADTDLDALLPDGFLEATRDRGLVVKHWAPQVEVLNHRATGVRDALWVELGAGRYHGWRADALLADVRGAENEQAVHGGGSHGRRGNGWMAAGAGQC

SEQ ID NO: 22700 - protein, 229 aa, Zea mays subsp. mays
  misc_feature (1)..(229): Ceres Seq. ID no. 12409728
MMNAMRRGAEDPDGILVNTFASLEARAVGALRDPQLVPPSSGRARRTPPVYCVGPLVAGAGAEAKEKHECLAWLDGQPERSVVLLCFGSIGAATHSEEQLREVAVGLQRSGHRFLWVVRAPLRGDTERLFDPRADTDLDALLPDGFLEATRDRGLVVKHWAPQVEVLNHRATGVRDALWVELGAGRYHGWRADALLADVRGAENEQAVHGGGSHGRRGNGWMAAGAGQC

SEQ ID NO: 22701 - protein, 228 aa, Zea mays subsp. mays
  misc_feature (1)..(228): Ceres Seq. ID no. 12409729
MNAMRRGAEDPDGILVNTFASLEARAVGALRDPQLVPPSSGRARRTPPVYCVGPLVAGAGAEAKEKHECLAWLDGQPERSVVLLCFGSIGAATHSEEQLREVAVGLQRSGHRFLWVVRAPLRGDTERLFDPRADTDLDALLPDGFLEATRDRGLVVKHWAPQVEVLNHRATGVRDALWVELGAGRYHGWRADALLADVRGAENEQAVHGGGSHGRRGNGWMAAGAGQC

SEQ ID NO: 22702 - DNA, 1482 bp, Zea mays subsp. mays
  misc_feature (1)..(1482): Ceres Seq. ID no. 12409738
cccaatccaagcatccattcctgaattcctccctggccagcggcgccgccaccgccatgaaccgcgttcacagcgaggctgccgctgctgcgaaggagcagcgcaagaacgacaagagggagaagaggaagaagcacaaggatgccaaggaggatgactgcggcgcctcgatggccgaggaagaagcacccaaagagaagaagcagaagcagaagcagaggaaggataaggacgagcgggaggagaagaaaaagctgaagccgacggttagcatagccgttgccggctccatcattgacaacgcccagtccctcgagctcgccaccctcctggctggtcagatcgctcgcgccgccaccgtctttcgcatagacgaggtcgtcgtctttgacagtactcccgcggcggagaacggcagcgccggtgatggtgaagagagcggcgcgcggttccttgttcggattttggagtatctggaaactccacagtacctccgccgccgcctctttccgatgcacaagaacctgaagtttgtgggactgcttccaccgctcgatgcaccacaccatgtgcgcaagcacgaatggtccgagtttcgtgaaggtgtaacattggaaagtgatccctcaaaggggactcttgttgatgtcggattaagtaagaatgttctggttgaacaaaaactagaaccaggcaaaagagttactgtagccatgggaacaaaccgtgacctaacgacagcttgcataaggaaagtcgtccccccttcgacacccagggaacagatgggatcttattggggctacaaagtccgttatacttcaaatttaagtggtgttttcaaaaattccccattcaaggaagaatacgaccacatcattggcacctcagagcatggacaaatagttaattcttccgagcttaccttacctacttttaggcacctactgattgcatttggtggacttgctggtttggaagaaagcattgaagaagatacaaacttgaagggtaaacgtgcagatgatgtattcacatcttatttcaatacatgccccaaccaagggagcagaacaataagaacagaggaggcacttctcatttcccttcaatacttccaagatcccattaggcgagcggaacagaaattgtagaagggaatacagaaaactgcaaatctagccatggccaacaagttccagttgtaatagtggagttttctcactgagtatcttgacccttcatgtatgcgttggtgtcattggagccaagaggttgtgagccatcgaggacattttgacacaaccatttcagtttagaaaatttgatgcggagctgacttcagtggaagagtgttagcttgccatttcagtgtatccaattgttgtccactgtagtctatatcggtgtttcatacctttgaccctgtactagaacgacacggaggatcactgttaacaccagagcgtcatgcatgccttg

SEQ ID NO: 22703 - protein, 383 aa, Zea mays subsp. mays
  misc_feature (1)..(383): Ceres Seq. ID no. 12409739
QSKHPFLNSSLASGAATAMNRVHSEAAAAAKEQRKNDKREKRKKHKDAKEDDCGASMAEEEAPKEKKQKQKQRKDKDEREEKKKLKPTVSIAVAGSIIDNAQSLELATLLAGQIARAATVFRIDEVVVFDSTPAAENGSAGDGEESGARFLVRILEYLETPQYLRRRLFPMHKNLKFVGLLPPLDAPHHVRKHEWSEFREGVTLESDPSKGTLVDVGLSKNVLVEQKLEPGKRVTVAMGTNRDLTTACIRKVVPPSTPREQMGSYWGYKVRYTSNLSGVFKNSPFKEEYDHIIGTSEHGQIVNSSELTLPTFRHLLIAFGGLAGLEESIEEDTNLKGKRADDVFTSYFNTCPNQGSRTIRTEEALLISLQYFQDPIRRAEQKL

SEQ ID NO: 22704 - protein, 365 aa, Zea mays subsp. mays
  misc_feature (1)..(365): Ceres Seq. ID no. 12409740
MNRVHSEAAAAAKEQRKNDKREKRKKHKDAKEDDCGASMAEEEAPKEKKQKQKQRKDKDEREEKKKLKPTVSIAVAGSIIDNAQSLELATLLAGQIARAATVFRIDEVVVFDSTPAAENGSAGDGEESGARFLVRILEYLETPQYLRRRLFPMHKNLKFVGLLPPLDAPHHVRKHEWSEFREGVTLESDPSKGTLVDVGLSKNVLVEQKLEPGKRVTVAMGTNRDLTTACIRKVVPPSTPREQMGSYWGYKVRYTSNLSGVFKNSPFKEEYDHIIGTSEHGQIVNSSELTLPTFRHLLIAFGGLAGLEESIEEDTNLKGKRADDVFTSYFNTCPNQGSRTIRTEEALLISLQYFQDPIRRAEQKL

SEQ ID NO: 22705 - protein, 327 aa, Zea mays subsp. mays
  misc_feature (1)..(327): Ceres Seq. ID no. 12409741
MAEEEAPKEKKQKQKQRKDKDEREEKKKLKPTVSIAVAGSIIDNAQSLELATLLAGQIARAATVFRIDEVVVFDSTPAAENGSAGDGEESGARFLVRILEYLETPQYLRRRLFPMHKNLKFVGLLPPLDAPHHVRKHEWSEFREGVTLESDPSKGTLVDVGLSKNVLVEQKLEPGKRVTVAMGTNRDLTTACIRKVVPPSTPREQMGSYWGYKVRYTSNLSGVFKNSPFKEEYDHIIGTSEHGQIVNSSELTLPTFRHLLIAFGGLAGLEESIEEDTNLKGKRADDVFTSYFNTCPNQGSRTIRTEEALLISLQYFQDPIRRAEQKL

SEQ ID NO: 22706 - DNA, 1968 bp, Zea mays subsp. mays
  misc_feature (1)..(1968): Ceres Seq. ID no. 12409766
ataaaacacgcaccggcacctaccagccgccaccttcccggctcctttactcgccggaggcgaaccagaactcgtgccacctcctcctgttccttgccatctccgaattcccatctgagattccaagggccgcgccgtgcaatcgaggctctccccgctcaccatatatcggaggctccgcccccgcgcctcgaatccttcgcgagaggtgctgttgtttgccgtgatttgagccgggtggaggtgtctcgcttcttgatcttgagaggtgttcctagttgattgttgggagcgaagaaggcatgataccttctgtgaggatctctcctggctctgcagccttctctggctccagcctacgcttaaaattacattcaattccatccatctctagtctcaaaccctccaaatatgtggtctcctcgctgaaaccactctacctagcaccgctagatggtccacacacttctgagcttaagtcttggagacaaccacttgagttccgttgtgctgcttctgctgccgatgacaaggagtcaaagactcaggtggtgccagttcagttggaaggcgcacagaggttaaagatctccatctatttcgcgacctggtgggcgcttaatgtgatatttaacatttacaacaagaaggttctcaatgctttcccttacccctggctcacctccacactctcccttgcctgcggctctgcgatgatgcttttctcgtgggccactcgtcttgttgaggcccccaagaccgacctagacttctggaaagtccttttcccggttgctgtggcacatacaattggccatgttgctgcgacagtgagcatgtctaaggtggcagtgtcattcacacacataattaaaagtgcagaacctgcattcactgttttggtgtcaaagttcctccttggggagacgtttccagttccagtctatctttctcttcttccaatcattggtggttgtgctctagctgctgtcacagagctgaactttaatatggttggatttatgggtgctatgatgtccaaccttgcatttgttttccgcaacatcttctcgaagaggggcatgaaggggaagtccgtcagtggcatgaattactatgcttgcctgtcaataatgtcgctggtcatactgactccatttgctatagctatggaaggtcctcagatgtgggctgctggttggcaaaaggctgttgcagaagttggacccaatgttgtctggtggatcgctgcacagagcgtgttctatcacttatataaccaggtgtcctacatgtctctcgatcagatctctccattgacgtttagcattggcaatacaatgaaacgtatatcagtgattgtttcatctataattatcttccacacgcctgtccgccctgtcaatgcactgggagctgccattgccatccttggcacattcctgtactctcaggcaaaggcgtgaggctaaagctttggccaaaggatcggagccagtagcaggcactggatccagttttgcttgttggagtggcatgtagatataaggttcggttttcgtgagagagagggtaataatggatcagtggctctgctgttccgttcttgtttgttgaccagattgaaatgcacaggccgtgacatgaaccgtcgtcaagtgtacctgaataacaccgtaacgaaattcaccgatgctgtttctttatggtattttagcagagctaagctgcgagccatgaccatgaccatgagcgcttgaacctccctacctttctggcgtttgagcatcatcagaagttagcttgaacaagcaagagtgaagatttcgaaggcttgaagaatgttctctgcatcagtgtacaaatatattgcagggctagtacaacaaagtagaatgtgatgttatgtttagctgcattgtgattgctttgccagtttacatgtaacaaaaagatagctgggacgtg

SEQ ID NO: 22707 - protein, 387 aa, Zea mays subsp. mays
  misc_feature (1)..(387): Ceres Seq. ID no. 12409767
MIPSVRISPGSAAFSGSSLRLKLHSIPSISSLKPSKYVVSSLKPLYLAPLDGPHTSELKSWRQPLEFRCAASAADDKESKTQVVPVQLEGAQRLKISIYFATWWALNVIFNIYNKKVLNAFPYPWLTSTLSLACGSAMMLFSWATRLVEAPKTDLDFWKVLFPVAVAHTIGHVAATVSMSKVAVSFTHIIKSAEPAFTVLVSKFLLGETFPVPVYLSLLPIIGGCALAAVTELNFNMVGFMGAMMSNLAFVFRNIFSKRGMKGKSVSGMNYYACLSIMSLVILTPFAIAMEGPQMWAAGWQKAVAEVGPNVVWWIAAQSVFYHLYNQVSYMSLDQISPLTFSIGNTMKRISVIVSSIIIFHTPVRPVNALGAAIAILGTFLYSQAKA

SEQ ID NO: 22708 - protein, 250 aa, Zea mays subsp. mays
  misc_feature (1)..(250): Ceres Seq. ID no. 12409768
MMLFSWATRLVEAPKTDLDFWKVLFPVAVAHTIGHVAATVSMSKVAVSFTHIIKSAEPAFTVLVSKFLLGETFPVPVYLSLLPIIGGCALAAVTELNFNMVGFMGAMMSNLAFVFRNIFSKRGMKGKSVSGMNYYACLSIMSLVILTPFAIAMEGPQMWAAGWQKAVAEVGPNVVWWIAAQSVFYHLYNQVSYMSLDQISPLTFSIGNTMKRISVIVSSIIIFHTPVRPVNALGAAIAILGTFLYSQAKA

SEQ ID NO: 22709 - protein, 249 aa, Zea mays subsp. mays
  misc_feature (1)..(249): Ceres Seq. ID no. 12409769
MLFSWATRLVEAPKTDLDFWKVLFPVAVAHTIGHVAATVSMSKVAVSFTHIIKSAEPAFTVLVSKFLLGETFPVPVYLSLLPIIGGCALAAVTELNFNMVGFMGAMMSNLAFVFRNIFSKRGMKGKSVSGMNYYACLSIMSLVILTPFAIAMEGPQMWAAGWQKAVAEVGPNVVWWIAAQSVFYHLYNQVSYMSLDQISPLTFSIGNTMKRISVIVSSIIIFHTPVRPVNALGAAIAILGTFLYSQAKA

SEQ ID NO: 22710 - DNA, 2088 bp, Zea mays subsp. mays
  misc_feature (1)..(2088): Ceres Seq. ID no. 12409774
gaccggccactcgtctgacgctacgctgcctactatctatctacctctaccctccctcatcacttgttccactacgaccggccacctagctcgccgcgcgcgcaagcctgcgccaccacccactctactagcttagtctcccctcgtgcagcgcgacgacagccagcaatggccgccgcccagtgaggcagggtcgcagtgacggcacgagacgcacacccacgggcgctggcggcatgccgggcgacgcctacgacctcctgtgcgccgaggacgacgccgccggcagcgccctgctgtgcaccaccgacgacgacgacgggtgctgctccgctgtcgaggaggactcggcggcggcggcggcctccatcgccgagctcatcggcggcgaggcccagtactcgcccaggccggactaccccgacaggctccgctccaggtccatcgacccggccgcccgcgccgagtcggtcgcatggattctcaaggtgcaagaatactatgggtttcttccattgacagcctacctcgccgtcaactacatggaccggttcctctctctccaccgtttgccgcaggaggacgggtgggcgatgcagctgctggccgtgacctgcctctccctcgctgccaagatggaggagaccctcgtgccctccctcctggacctgcaggttgagggcaccagcagatacgactgcttcgagcctgggacggtcggccggatggagctcctcgtcctgatggcgctcaactggcggctccgctcggttactcccttcaccttcgtcgacttcttcgcgtgcaaggtcgacccaggagggaggcacaccaggtgcctcattgcccgggccacgcaagtcattctggctgcgatgcatgacgtcgagttcttggaccactgcccgtcatcaatggcggcagcggccgtgctctgcgccatcggtgagacgccgtcactggagtcggtcagccctggggctgccgtcagctggtgcatcggccttgcagaggaagggatcagcagctgctacagactgatgcagcggctggtgataggcaacgtccggacaagggtcgccagcacgacgaccatggcagcagtgaacctgtgctgctcggatgaggcgctgtcctcgcattcctccgccacctcctcgccacccccggccaagaggaggaagaggtcgccgacggccacgtgaaaactgaagaacgcaagtagataggattatttatacgcttttggggggcagattaacagggtttgatcgatttctttgcagtttgtttgtcgttttttcttctttgtgattctttctcctttttcccccttttgccatttatttgttctgttcttttgggttggatctctactcctcggtggggggattctgcctgcctgctcgaccggcccagtcatcatggcggcctctggcctctgcaccgccagccagtatgtgaaggcgacgagactcgagagagagaaagaaagacagctactacgtataacagacacatctgtgtttctctgtgcaacactctgtggggcttcttcaaccccgacgcagagctgcagagagggaccattgattggtgagcgagggcagccatggcggcagatggagatggagagggaggggggaagaggcaatgagttgcggtggatggatgatgattggtagggttaaatgaggtggtcaaagggccgggcggtcagtgctcctgccaagatgcagccctgcctgcaaagtttctgttcatattcatgagggcaaaaattgtttgtttccgagtggtttgtttgtattttgttgatgccgctgaggcgagggcgtcagagagagagaaagaggggcatgctttgctttgctgtgatgggagtcacatggatatgccctactgtggtggtgctctggagggaaatatttgtccatctccagagctaacagtgtccaagcatggggcttttgggggcccttgctgattgtttgtatctcttttttcttgcttgtgtatcaatgaagattttgccatttgaattggcctgagaagagagtacaagctgaagagagagtttctgtgttc

SEQ ID NO: 22711 - protein, 322 aa, Zea mays subsp. mays
  misc_feature (1)..(322): Ceres Seq. ID no. 12409775
MPGDAYDLLCAEDDAAGSALLCTTDDDDGCCSAVEEDSAAAAASIAELIGGEAQYSPRPDYPDRLRSRSIDPAARAESVAWILKVQEYYGFLPLTAYLAVNYMDRFLSLHRLPQEDGWAMQLLAVTCLSLAAKMEETLVPSLLDLQVEGTSRYDCFEPGTVGRMELLVLMALNWRLRSVTPFTFVDFFACKVDPGGRHTRCLIARATQVILAAMHDVEFLDHCPSSMAAAAVLCAIGETPSLESVSPGAAVSWCIGLAEEGISSCYRLMQRLVIGNVRTRVASTTTMAAVNLCCSDEALSSHSSATSSPPPAKRRKRSPTAT

SEQ ID NO: 22712 - protein, 220 aa, Zea mays subsp. mays
  misc_feature (1)..(220): Ceres Seq. ID no. 12409776
MDRFLSLHRLPQEDGWAMQLLAVTCLSLAAKMEETLVPSLLDLQVEGTSRYDCFEPGTVGRMELLVLMALNWRLRSVTPFTFVDFFACKVDPGGRHTRCLIARATQVILAAMHDVEFLDHCPSSMAAAAVLCAIGETPSLESVSPGAAVSWCIGLAEEGISSCYRLMQRLVIGNVRTRVASTTTMAAVNLCCSDEALSSHSSATSSPPPAKRRKRSPTAT

SEQ ID NO: 22713 - protein, 203 aa, Zea mays subsp. mays
  misc_feature (1)..(203): Ceres Seq. ID no. 12409777
MQLLAVTCLSLAAKMEETLVPSLLDLQVEGTSRYDCFEPGTVGRMELLVLMALNWRLRSVTPFTFVDFFACKVDPGGRHTRCLIARATQVILAAMHDVEFLDHCPSSMAAAAVLCAIGETPSLESVSPGAAVSWCIGLAEEGISSCYRLMQRLVIGNVRTRVASTTTMAAVNLCCSDEALSSHSSATSSPPPAKRRKRSPTAT

SEQ ID NO: 22714 - DNA, 1203 bp, Zea mays subsp. mays
  misc_feature (1)..(1203): Ceres Seq. ID no. 12409796
agcttgattctctctggctggtacgcggtagcctcgctctctctcctacctacacggctacacttaaacggcagcaggcacctgcaggcagggagagctgctaacggaccgatcggggagctgctggccatggagcctggtccggatgcgcccgctggtggtggtggcggaggaggaaccagtattagtgagccagcagaggccgggccgtcgccgtcgtcgtcctcggccgccgcagcagcctcgtcgtcgagccggcagcaggcagagcaggaagcacagcagcaacaaggagcacagcagagggaacagccagcagtaagggcccaggcgcagccgcagccgcagccgcatcagcagcagcctccggcggggctcagccggtacgagtcgcagaagcgccgggactggaacacgttcctgcagtacctgcggaaccacaagccgccgctgacgctggcacgctgcagcggcgcacacgtcatcgagttcctccgctacctggaccagttcggcaagacgaaggtgcacgctgagggctgcgcctacttcgggcagccgaacccgccggcgccctgcacgtgcccgctgcgccaggcctggggtagcctcgacgcgctcatcggccgcctccgcgccgcgtacgaggagtccggcggccgccccgagtccaacccgttcgcggccaaggccgtgcgcatctacctccgcgacgtgcgggaggcgcaggccaaggcccgcggcatcccgtacgagaagaagaagcggaagcgcgggagcgccgccgcgcctccggtcgcgccgcctcctgttgtgactgcagaggccgccgggacgtcgtcaggggccggcggtggtgatgacgaggacgacgacgaaccaccgccatctgcagatgaaccacgacgacagcagaccgccgcgccgactcctcctcctcctgcaagtatgatttccagcactagtgcaagcagtagcagtgtcgccccagtcacgacgacgacgacgacaagcaaggagaaagaaggatccgcgccaagctcgtgataagtttgtagatcatctactagccttctgattcaattctatcatcgccggcctccaaattataatcccaaccgcctccatcttaaatttttagttgctcactattactatatattgttattgtttactggcatatataagagagaggtctaaggg

SEQ ID NO: 22715 - protein, 348 aa, Zea mays subsp. mays
  misc_feature (1)..(348): Ceres Seq. ID no. 12409797
SLILSGWYAVASLSLLPTRLHLNGSRHLQAGRAANGPIGELLAMEPGPDAPAGGGGGGGTSISEPAEAGPSPSSSSAAAAASSSSRQQAEQEAQQQQGAQQREQPAVRAQAQPQPQPHQQQPPAGLSRYESQKRRDWNTFLQYLRNHKPPLTLARCSGAHVIEFLRYLDQFGKTKVHAEGCAYFGQPNPPAPCTCPLRQAWGSLDALIGRLRAAYEESGGRPESNPFAAKAVRIYLRDVREAQAKARGIPYEKKKRKRGSAAAPPVAPPPVVTAEAAGTSSGAGGGDDEDDDEPPPSADEPRRQQTAAPTPPPPASMISSTSASSSSVAPVTTTTTTSKEKEGSAPSS

SEQ ID NO: 22716 - protein, 305 aa, Zea mays subsp. mays
  misc_feature (1)..(305): Ceres Seq. ID no. 12409798
MEPGPDAPAGGGGGGGTSISEPAEAGPSPSSSSAAAAASSSSRQQAEQEAQQQQGAQQREQPAVRAQAQPQPQPHQQQPPAGLSRYESQKRRDWNTFLQYLRNHKPPLTLARCSGAHVIEFLRYLDQFGKTKVHAEGCAYFGQPNPPAPCTCPLRQAWGSLDALIGRLRAAYEESGGRPESNPFAAKAVRIYLRDVREAQAKARGIPYEKKKRKRGSAAAPPVAPPPVVTAEAAGTSSGAGGGDDEDDDEPPPSADEPRRQQTAAPTPPPPASMISSTSASSSSVAPVTTTTTTSKEKEGSAPSS

SEQ ID NO: 22717 - DNA, 1429 bp, Zea mays subsp. mays
  misc_feature (1)..(1429): Ceres Seq. ID no. 12409803
aagctgctccagtaattaggcgaccttgcagaattcctttttttatctccaggaaagttcagagacaaacagaaagctgggcgaagaacgaaggcacctcgaaaccaagcctggccatgagaccatcaaaatctgcaaacagcacgtagtcacggtggggcgcgggcctatatattgtattgtcaggccttgttcgtttcttcagaatcttcagacatccgagcgtcttgcgcgttcgatttgaaccacttggcgctgcctgaccgctcctcaccccctcaacccgccgaacttcctcgtcaccgccggcggcgatcgatcgttgccaagtctcccaccatcgcctccacggggaaaaaaatggcgcaggaggctgcaccggcgaggccggcgggccccaccaggctcgtctacttcgatgatatgggggcactccaccactcatccgccaccgttctctccgtccaccaggaggagggcggccgggtagcggtggtgctggacgccacggtcttccacccgcagggcggcggccaaccggcggacacgggcgtcatctccgccggcggagccaggttcctcgttgaggatgtgcgggcgaaagacggagtggttttccactacggaagatttgagggcacggagcaaggatgtgggactgtatttaaggagggggaaaccgttagcttgcaggtcgacgcagaacgacgcagctttaattcaaggcttcattctgctggccatttgttggacatctgtgttcacaatgtaggcctctttcatctggagcctgggaaaggctatcattttcctgatggaccgtttgttgagtataagggaataattcctccagatcaaataccggttaagaaaaatgaactggaaagagaggccaatagactaatttcagaaggagcgaaggtcttagcttctgtttttccttatgaggaggcagccatattatgcggaggttctttgcctagctacatttcaaaggatagcaatcctcgcattgttaagtttggggataaccctggtggtccttgcggtggcactcatgttgccgacatttcaatcatcaacagcctaaaggtgacaaacataagagtcaagaaaggcctcactaaagtctcatacagcatcagcccatgatccttttccagcagccgcagtagacaacacctggaatttatcggagcgagaattattaattgaatcagaaggctgtactttagttttgtggcagcacatgtatacgtaggggacagataaacaatttctatgtagtaaagcctgccagttcctcatgtacttcaatagatgatttgtttctgtactgagtcgtagcagagccgttaaggttctgatgtagatgatgacacatgtaaaactgccacggcaccatcatacagcaacttgaaggagattc

SEQ ID NO: 22718 - protein, 263 aa, Zea mays subsp. mays
  misc_feature (1)..(263): Ceres Seq. ID no. 12409804
MAQEAAPARPAGPTRLVYFDDMGALHHSSATVLSVHQEEGGRVAVVLDATVFHPQGGGQPADTGVISAGGARFLVEDVRAKDGVVFHYGRFEGTEQGCGTVFKEGETVSLQVDAERRSFNSRLHSAGHLLDICVHNVGLFHLEPGKGYHFPDGPFVEYKGIIPPDQIPVKKNELEREANRLISEGAKVLASVFPYEEAAILCGGSLPSYISKDSNPRIVKFGDNPGGPCGGTHVADISIINSLKVTNIRVKKGLTKVSYSISP

SEQ ID NO: 22719 - protein, 242 aa, Zea mays subsp. mays
  misc_feature (1)..(242): Ceres Seq. ID no. 12409805
MGALHHSSATVLSVHQEEGGRVAVVLDATVFHPQGGGQPADTGVISAGGARFLVEDVRAKDGVVFHYGRFEGTEQGCGTVFKEGETVSLQVDAERRSFNSRLHSAGHLLDICVHNVGLFHLEPGKGYHFPDGPFVEYKGIIPPDQIPVKKNELEREANRLISEGAKVLASVFPYEEAAILCGGSLPSYISKDSNPRIVKFGDNPGGPCGGTHVADISIINSLKVTNIRVKKGLTKVSYSISP

SEQ ID NO: 22720 - DNA, 1407 bp, Zea mays subsp. mays
  misc_feature (1)..(1407): Ceres Seq. ID no. 12409806
atccatcccgagcaagcaagtaatatggcttggtcttgtgctcgtccgatgagcatcgccctcgctgccgtcctcctgctgtgcggcggcgcgtggctgcagcaggcggcggaggcgcgcccccaccacatggacgacgacagcagcatcgacatggaccgcggcagcgacgacttcttctccatcgtggggtactcgccggaggacctgacgcagcacgaccggctcgtcaggctgttcgaggagtgggtggccaagtaccgcaaggcgtacggcagcttcgaggagaagctgcgccggttcgaggtgttcaaggacaacctgcaccacatcgacgaggccaacaggaaggaggtcaccagctactggctggggcctcaacgccttcgccgacctcacgcacgacgagttcaaggccacctacctgggcctcctgcccgaagaggaccagcggtggccggttcaggtacggcggcgtgggcgacggcggcgacgaggtgcccgcgtccgtggactggcggaagaagggcgccgtgacggaggtcaagaaccaggggcagtgcggcagctgctgggccttctccacggtggcggccgtggaagggatcaaccagatcgtgacgggcaacctcacgtcgctgtcggagcagcagctggtcgactgcagcaccgacgggaacaacgggtgcagcggcggcgtcatggacaacgccttctcgttcatcgccaccggcgccgggctccgctccgaggaggcgtacccgtacctcatggaggaaggggactgcgacgacagggcccgcgacggcgaggtgctcgtcactatatccgggtacgaggacgtgccggccaacgacgagcaggcgctcgtcaaggccctcgcccaccagcccgtcagcgtcgccatcgaggcgtccgggaggcacttccagttctacagcgggggcgtgttcgatggaccgtgcgggtcggagctggaccacggcgtggcggcggtgggctacggcagcagcaaggggcaggactacatcatcgtcaagaactcgtggggcacccactggggcgagaagggctacatccgcatgaagaggggcaccggcaagccggagggcctctgcggcatcaacaagatggcatcctacccgaccaaggaccattgatggatcatggacgacggagatcatatctatcttcccttccctttcatccgactctttcgatttccatcgtttgcccccttttcctgaatgtgtgtgttttttttatatattactgtgtcaagtaatttctcgatggatcgatcgaggaagaacgacaaacatgcactcaagcacgagcgcagcaatgtcatctttctcttcatttggtgcgttgaaatgacgaatatcaaataaagtggtttatttc

SEQ ID NO: 22721 - protein, 178 aa, Zea mays subsp. mays
  misc_feature (1)..(178): Ceres Seq. ID no. 12409807
IHPEQASNMAWSCARPMSIALAAVLLLCGGAWLQQAAEARPHHMDDDSSIDMDRGSDDFFSIVGYSPEDLTQHDRLVRLFEEWVAKYRKAYGSFEEKLRRFEVFKDNLHHIDEANRKEVTSYWLGPQRLRRPHARRVQGHLPGPPARRGPAVAGSGTAAWATAATRCPRPWTGGRRAP

SEQ ID NO: 22722 - protein, 170 aa, Zea mays subsp. mays
  misc_feature (1)..(170): Ceres Seq. ID no. 12409808
MAWSCARPMSIALAAVLLLCGGAWLQQAAEARPHHMDDDSSIDMDRGSDDFFSIVGYSPEDLTQHDRLVRLFEEWVAKYRKAYGSFEEKLRRFEVFKDNLHHIDEANRKEVTSYWLGPQRLRRPHARRVQGHLPGPPARRGPAVAGSGTAAWATAATRCPRPWTGGRRAP

SEQ ID NO: 22723 - protein, 162 aa, Zea mays subsp. mays
  misc_feature (1)..(162): Ceres Seq. ID no. 12409809
MSIALAAVLLLCGGAWLQQAAEARPHHMDDDSSIDMDRGSDDFFSIVGYSPEDLTQHDRLVRLFEEWVAKYRKAYGSFEEKLRRFEVFKDNLHHIDEANRKEVTSYWLGPQRLRRPHARRVQGHLPGPPARRGPAVAGSGTAAWATAATRCPRPWTGGRRAP

SEQ ID NO: 22724 - DNA, 1204 bp, Zea mays subsp. mays
  misc_feature (1)..(1204): Ceres Seq. ID no. 12409816
agtcgccccccagtccatcaccacttctccattcctctttcccagtgcccccagtccatcaccacatccgttcaaatgggccgcaaccgcaagggccgcaaggctagggtttcgcacgacgccgacgccgacgccgacgccgatggcagcgaggatgagagggccaccactgcgggcaggagcctctacgagattctaggagttgagaagaccgcttctcaacaagaaataaagaaggcgtatcacaaattggctctgcgcctccacccagataagaatcctggggatgaggaagccaaagagaagtttcagcagctgcagaaggttatatccattcttggagatgtagagaaaagagctttatatgatgagactggcatcactgatgatgatgcactggtgggagaagctgcaaacaatcttcaggagtacttcagaacaatgtacaagaaagtcacggaggctgacattgaagaatttgaagctaaatatagagggtcagattctgagaaaacggacttgaaggaactctacacaaaatataagggcaacatgaacaggctttctgcgcaatgatttgctcagaaccaaagcttgattctcaccgcttcaaggatataattgacgaggcgattggtgaaggtgagctgaagtcaactaaggtgtatgagaaatgggctaaaaagatctcagggatggagccaccaacaaatccgctagagaggagagtgaagaagaggaagaacagtgaggagaatgatctgatactggctatctcacagcgcagggctgagcggaaaaaaacagttcaactccatcctctcgaacatcatgtccaagtgtgactccaaggcgagcagctcggagcccacggaagaagagtttgagcaggcgcaacagaggctggagagcagaagggccaagaggcgcaagtgatgctgctgccagccttcttgccctatgctgaacattgtctgaagcttttggtgtgacctgattttaccagcatgcaagtgatgtttctaagacccagctcagtttgagcgtgtcagggtggggtgtgtgtcatatctcttgtcctctcacgatacactatgtcgtatggttatcggcttatcaccttgccgagagggaagctctatctgaacttttaattccgtagcatttggcaagtactagtagattgcaatgtaatgtttattcc

SEQ ID NO: 22725 - protein, 191 aa, Zea mays subsp. mays
  misc_feature (1)..(191): Ceres Seq. ID no. 12409817
SRPPVHHHFSIPLSQCPQSITTSVQMGRNRKGRKARVSHDADADADADGSEDERATTAGRSLYEILGVEKTASQQEIKKAYHKLALRLHPDKNPGDEEAKEKFQQLQKVISILGDVEKRALYDETGITDDDALVGEAANNLQEYFRTMYKKVTEADIEEFEAKYRGSDSEKTDLKELYTKYKGNMNRLSAQ

SEQ ID NO: 22726 - protein, 166 aa, Zea mays subsp. mays
  misc_feature (1)..(166): Ceres Seq. ID no. 12409818
MGRNRKGRKARVSHDADADADADGSEDERATTAGRSLYEILGVEKTASQQEIKKAYHKLALRLHPDKNPGDEEAKEKFQQLQKVISILGDVEKRALYDETGITDDDALVGEAANNLQEYFRTMYKKVTEADIEEFEAKYRGSDSEKTDLKELYTKYKGNMNRLSAQ

SEQ ID NO: 22727 - DNA, 1705 bp, Zea mays subsp. mays
  misc_feature (1)..(1705): Ceres Seq. ID no. 12409831
ggctatccaggctccagtcgtccccggattagttgtactgtacattgttcctgcgaagacactgggtcgtccgggtcaatcggcagcttgaacaagccatggcggcgcaccggccgaacgccgcggcgccgctgctcgccaagctcgacgccaccgccacgccgccggcgaagcgcaacaagtaccccttcttctgcgccgtgctcgcatccatgacctccgtgctcatgggctacaacgtcgcggtgacgagcggcgcgcagatcttcatggcggaggacctcgggatgagcgacgcgcagatcgaggtgctctcgggggtcatcaacatatactcgctcgtcggcgcgctgctggcaggctggacctccgaccgtctcggccggcgcctcaccatcgtcctcgccaacgccttcttcctcgtcggcccgctcgccatggcgcttgccggcgggtacaccttgctcatggtgggccgcttcatcgccggcgtcggcgtcgggtacgcgctcgtcatcgcgccagtctacgctgccgagatcgcgccggcgtcatcccgcgggctcctcagctcacttcctgagatttttatcaacactggggtgatgctgagttacgtgtcgaatctcgccttctcggggctgcccgtgcacctgtcgtggcgggtgatgttcgcggcgggcgtggtgcccaccgtgttcatggcggccggggtgttcaccatgccggagtcgccgcggtggctggttatgaagggccgggtcgccgaggccaaggccgtgctcgacaagacgtcggacacgcccgctgaggccgagcagcggctgctcgagatcgaggacgtcgtgatggacagcagcggcgacagcggcgcgtggaaggaggtggcgacnaaggctggcgtccagcgcgtgttggcaaccgtggtgacgctgcagttcttccagcaggcgtcaggcatcgactcggtggtgctgtacggcccgcgcgttctcgccatggctggtgtcacgtccaacagcttgctcctgagcctcaacatcctcttcggcgttgccaaggttggctccatcctcatcgccatggcgctagccgaccgcgtcgggcggcgcccactcctgctggtcagcactagcggcatgacggtggcgctgctcgtcctaggctccctgttcgcggtgtttgcgggagccaaggataacgctgcggtggctgcggtgagtgtggtggccgtcatggcgttcgtgatggccttctccgtcggcttgggccctctggcgtgggtgtacagctccgagatactgccgctccgacttcgcgggcagggtgccggggctcggcaccgccatgaaccggatcatgagcggcgtgatcaccatgaccttcatctcgctctaccagggcatcaccatggccggcgcgttctacctctacgccgccatcgccgccgcgtcgttcgtgttcgtgtacgcctgcctgccggagaccaggggccggagcctcgaggacatggaagagctcttccacaccaagtgatttcgtatgtgctgatccaaccaccatttggttcaattctcgattcagtggcaatgcagattttgccattgttggagctggttttgagcttggtcgttatcatcatgggcacatgcgtatacaattgcaagattatattgaaatcgattgattgagccggttggcgtcg

SEQ ID NO: 22728 - protein, 530 aa, Zea mays subsp. mays
  misc_feature (1)..(530): Ceres Seq. ID no. 12409832
  misc_feature (265)..(265): Xaa is any aa, unknown or other
MAAHRPNAAAPLLAKLDATATPPAKRNKYPFFCAVLASMTSVLMGYNVAVTSGAQIFMAEDLGMSDAQIEVLSGVINIYSLVGALLAGWTSDRLGRRLTIVLANAFFLVGPLAMALAGGYTLLMVGRFIAGVGVGYALVIAPVYAAEIAPASSRGLLSSLPEIFINTGVMLSYVSNLAFSGLPVHLSWRVMFAAGVVPTVFMAAGVFTMPESPRWLVMKGRVAEAKAVLDKTSDTPAEAEQRLLEIEDVVMDSSGDSGAWKEVAXKAGVQRVLATVVTLQFFQQASGIDSVVLYGPRVLAMAGVTSNSLLLSLNILFGVAKVGSILIAMALADRVGRRPLLLVSTSGMTVALLVLGSLFAVFAGAKDNAAVAAVSVVAVMAFVMAFSVGLGPLAWVYSSEILPLRLRGQGAGARHRHEPDHERRDHHDLHLALPGHHHGRRVLPLRRHRRRVVRVRVRLPAGDQGPEPRGHGRALPHQVISYVLIQPPFGSILDSVAMQILPLLELVLSLVVIIMGTCVYNCKIILKSID

SEQ ID NO: 22729 - protein, 492 aa, Zea mays subsp. mays
  misc_feature (1)..(492): Ceres Seq. ID no. 12409833
  misc_feature (227)..(227): Xaa is any aa, unknown or other
MTSVLMGYNVAVTSGAQIFMAEDLGMSDAQIEVLSGVINIYSLVGALLAGWTSDRLGRRLTIVLANAFFLVGPLAMALAGGYTLLMVGRFIAGVGVGYALVIAPVYAAEIAPASSRGLLSSLPEIFINTGVMLSYVSNLAFSGLPVHLSWRVMFAAGVVPTVFMAAGVFTMPESPRWLVMKGRVAEAKAVLDKTSDTPAEAEQRLLEIEDVVMDSSGDSGAWKEVAXKAGVQRVLATVVTLQFFQQASGIDSVVLYGPRVLAMAGVTSNSLLLSLNILFGVAKVGSILIAMALADRVGRRPLLLVSTSGMTVALLVLGSLFAVFAGAKDNAAVAAVSVVAVMAFVMAFSVGLGPLAWVYSSEILPLRLRGQGAGARHRHEPDHERRDHHDLHLALPGHHHGRRVLPLRRHRRRVVRVRVRLPAGDQGPEPRGHGRALPHQVISYVLIQPPFGSILDSVAMQILPLLELVLSLVVIIMGTCVYNCKIILKSID

SEQ ID NO: 22730 - protein, 487 aa, Zea mays subsp. mays
  misc_feature (1)..(487): Ceres Seq. ID no. 12409834
  misc_feature (222)..(222): Xaa is any aa, unknown or other
MGYNVAVTSGAQIFMAEDLGMSDAQIEVLSGVINIYSLVGALLAGWTSDRLGRRLTIVLANAFFLVGPLAMALAGGYTLLMVGRFIAGVGVGYALVIAPVYAAEIAPASSRGLLSSLPEIFINTGVMLSYVSNLAFSGLPVHLSWRVMFAAGVVPTVFMAAGVFTMPESPRWLVMKGRVAEAKAVLDKTSDTPAEAEQRLLEIEDVVMDSSGDSGAWKEVAXKAGVQRVLATVVTLQFFQQASGIDSVVLYGPRVLAMAGVTSNSLLLSLNILFGVAKVGSILIAMALADRVGRRPLLLVSTSGMTVALLVLGSLFAVFAGAKDNAAVAAVSVVAVMAFVMAFSVGLGPLAWVYSSEILPLRLRGQGAGARHRHEPDHERRDHHDLHLALPGHHHGRRVLPLRRHRRRVVRVRVRLPAGDQGPEPRGHGRALPHQVISYVLIQPPFGSILDSVAMQILPLLELVLSLVVIIMGTCVYNCKIILKSID

SEQ ID NO: 22731 - DNA, 1393 bp, Zea mays subsp. mays
  misc_feature (1)..(1393): Ceres Seq. ID no. 12409839
ctcctcccctcttcctaccattagcagtagccacagccagaacaccagcagacagcagcatcagcagggaggaacacgatgagcggcgccggtccggatctgcagctgccaccggggttccggtttccacccgacggacgaggagctggtgatgcactacctctgccgccgctgcgccggcctgcccatcgccgtccccatcatcgccgagatcgacctctacaagttcgacccatggcagctcccaaggatggcgctgtacggcgagaaggagtggtacttcttctccccgcgggaccgcaagtacccgaacgggtccaggcccaaccgcgccgccggggctgggtactggaaggccaccggcgctgacaagcccgtgggcacgcccaagccgctggccatcaagaaggcgctcgtcttctacgccggcaaggcgcccaagggcgagaagaccaactggatcatgcacgagtaccgcctcgccgacgtcgaccgctcggcgcgcaagaagaacagcctcaggttggatgactgggtcctgtgccgcatctacaacaagaagggcggcgggctggagaaggcgccggcggctggcggcgaccacaagcctatgttcgccacgccggcggtgagctccccgccggagcagaagccgttcgtggcggcggcgggcgggctgcccccggcgttcccggagctggcggcgtactacgaccggccgtcggactcgatgccgcggctgcacgcggactactccagctgctcggagcaggtgctgtccccggagcagctggcgtgcgaccgggaggtgcagagccagcccaagatcagcgagtgggagcggaccttcgcctccgaccccgtgaaccccgcgggctccatgctcgaccccgtcgtcggccacgccggcggcgacccgctgctgcaggacatcctcatgtactggggcaagccgttctagacgacgccgcccatcatgtcctgagggcgaggggaggtgggggtggcgaagcatgcatgcaaacacccatcctcggctgcggttggttggttgattgatctgtcttgggcagcgcaatgcaatgcaaccgcacggtgtgggctttgactcaggcgagccgccattgttgacttgcaaggaggatataatatgaaactatagctggattacatggagaggcggcaatgagaccgtctggccccgccggaagggagacggagacggagacggagacggatggcgcagtgcatcgggtgtggtggatcgtgcgcggcatgtgtgtgtgtgtctgtaatcgactccatcagcttgccgcctttcctgtcctattctgattgttttcatccattgatgccgtcgtcgcagtaataaacttggaacgaacgattccac

SEQ ID NO: 22732 - protein, 269 aa, Zea mays subsp. mays
  misc_feature (1)..(269): Ceres Seq. ID no. 12409840
MHYLCRRCAGLPIAVPIIAEIDLYKFDPWQLPRMALYGEKEWYFFSPRDRKYPNGSRPNRAAGAGYWKATGADKPVGTPKPLAIKKALVFYAGKAPKGEKTNWIMHEYRLADVDRSARKKNSLRLDDWVLCRIYNKKGGGLEKAPAAGGDHKPMFATPAVSSPPEQKPFVAAAGGLPPAFPELAAYYDRPSDSMPRLHADYSSCSEQVLSPEQLACDREVQSQPKISEWERTFASDPVNPAGSMLDPVVGHAGGDPLLQDILMYWGKPF

SEQ ID NO: 22733 - protein, 236 aa, Zea mays subsp. mays
  misc_feature (1)..(236): Ceres Seq. ID no. 12409841
MALYGEKEWYFFSPRDRKYPNGSRPNRAAGAGYWKATGADKPVGTPKPLAIKKALVFYAGKAPKGEKTNWIMHEYRLADVDRSARKKNSLRLDDWVLCRIYNKKGGGLEKAPAAGGDHKPMFATPAVSSPPEQKPFVAAAGGLPPAFPELAAYYDRPSDSMPRLHADYSSCSEQVLSPEQLACDREVQSQPKISEWERTFASDPVNPAGSMLDPVVGHAGGDPLLQDILMYWGKPF

SEQ ID NO: 22734 - protein, 165 aa, Zea mays subsp. mays
  misc_feature (1)..(165): Ceres Seq. ID no. 12409842
MHEYRLADVDRSARKKNSLRLDDWVLCRIYNKKGGGLEKAPAAGGDHKPMFATPAVSSPPEQKPFVAAAGGLPPAFPELAAYYDRPSDSMPRLHADYSSCSEQVLSPEQLACDREVQSQPKISEWERTFASDPVNPAGSMLDPVVGHAGGDPLLQDILMYWGKPF

SEQ ID NO: 22735 - DNA, 1667 bp, Zea mays subsp. mays
  misc_feature (1)..(1667): Ceres Seq. ID no. 12409847
atccctgactattttcctgccttctgtctccattttcctagtgctatactaatttctgaagacctcctggaggaattctctgcttcatttctcgagcgggagancggccgccttcagtcaaggaaaatcgctgaagacagccgcagattcccagattcgtagttccgcttctgcttcggcgcacctgttcggtgtggaatgatggaggtgagcccgtctccggagcaaggagtgatggcgggaagggagccgttcgggctgccgaagaccccggcaacgccgccgtcctccgggggcacgcagggcctgcgcatggcgtacacgacggacggcaccgccatcttcaccccggtgagctccgtgccgcccgcgacggcgacataccagcccgtgggcggcagcgcnngtnctgcttcaagcttggctggngtaggangcaatggtggcgcgcccgtncactcgggtggcgcgggtgagccggggaccaagaaaaagcgtggccggccaagaaagtacggccccgacggctccatgtcgctggcattggtgcccgcatccatggctggggagccggcgccggcggctcttggagcttccggtcctttctcgcctaacggcccgaaggcgccgaacactgcgccgtcagcgtcgccggacggcgcgaagaagcggggccggccgaagggctccaccaacaagaagcacgtggctgcgctcgggccagcgggggcaggttttacgcctcatcttatttttgtaaaagccggagaggacgtatcggcaaagatcatgtcgttctcgcagcacgggacacgcgcggtctgcatcctttcagcaaacggcgccatatcaaatgtgacgcttcggcaatctgccacttcgggtggaacggtgacatacgagggtcgtttcgagatactgtctctgtccgggtcgtttcttctgtcagagaacggtggccagcgcagtcgaactggtgggctcagcgtttcgctagcaggccccgacggncgtgtcctgggtggctgtgttgccggactcctgacggctgcttcaccggtacagatcgtagtggggagcttcgacgccggtggaaagaagcagccgaagcagcagcagcagcagcagcttgctccgtcaccggcgccactaaatctcgcgccgacgggcgtggcggcagggccgagcagcccgccgtccagaggcacattgagcctaagcgagtcgtccagtggcgccccgccgagcccgccgcacgcaggggccagcggtggccatgggcagcagcagcagcagccacagccaggtggcttctccggtctgttctggaaatgacgagacccccggacaccgtctgaccgtggtagaactggcagaaaggactaaaggcgcgtgaggcactcgtcgaggccgaagctcactcggtgagaagcagcggtagcttgtaggtggtgtcaagactgtgtagctcttgctgttgctgtaggtgtaaatcgtgcgttgtgattgtgaggtggttgcttattgtctgtcgtctggaatggatgccgtgtactgaacctgtgcccccaatgcagcatgtcggaagttcttggtttcttctgcttgggtgcatcggcttgccgcacgatatgcatccatgcccataataatacgtgtatagattc

SEQ ID NO: 22736 - protein, 378 aa, Zea mays subsp. mays
  misc_feature (1)..(378): Ceres Seq. ID no. 12409848
  misc_feature (69)..(69): Xaa is any aa, unknown or other
  misc_feature (70)..(70): Xaa is any aa, unknown or other
  misc_feature (71)..(71): Xaa is any aa, unknown or other
  misc_feature (77)..(77): Xaa is any aa, unknown or other
  misc_feature (80)..(80): Xaa is any aa, unknown or other
  misc_feature (86)..(86): Xaa is any aa, unknown or other
  misc_feature (271)..(271): Xaa is any aa, unknown or other
MMEVSPSPEQGVMAGREPFGLPKTPATPPSSGGTQGLRMAYTTDGTAIFTPVSSVPPATATYQPVGGSXXXASSLAXVGXNGGAPXHSGGAGEPGTKKKRGRPRKYGPDGSMSLALVPASMAGEPAPAALGASGPFSPNGPKAPNTAPSASPDGAKKRGRPKGSTNKKHVAALGPAGAGFTPHLIFVKAGEDVSAKIMSFSQHGTRAVCILSANGAISNVTLRQSATSGGTVTYEGRFEILSLSGSFLLSENGGQRSRTGGLSVSLAGPDXRVLGGCVAGLLTAASPVQIVVGSFDAGGKKQPKQQQQQQLAPSPAPLNLAPTGVAAGPSSPPSRGTLSLSESSSGAPPSPPHAGASGGHGQQQQQPQPGGFSGLFWK

SEQ ID NO: 22737 - protein, 377 aa, Zea mays subsp. mays
  misc_feature (1)..(377): Ceres Seq. ID no. 12409849
  misc_feature (68)..(68): Xaa is any aa, unknown or other
  misc_feature (69)..(69): Xaa is any aa, unknown or other
  misc_feature (70)..(70): Xaa is any aa, unknown or other
  misc_feature (76)..(76): Xaa is any aa, unknown or other
  misc_feature (79)..(79): Xaa is any aa, unknown or other
  misc_feature (85)..(85): Xaa is any aa, unknown or other
  misc_feature (270)..(270): Xaa is any aa, unknown or other
MEVSPSPEQGVMAGREPFGLPKTPATPPSSGGTQGLRMAYTTDGTAIFTPVSSVPPATATYQPVGGSXXXASSLAXVGXNGGAPXHSGGAGEPGTKKKRGRPRKYGPDGSMSLALVPASMAGEPAPAALGASGPFSPNGPKAPNTAPSASPDGAKKRGRPKGSTNKKHVAALGPAGAGFTPHLIFVKAGEDVSAKIMSFSQHGTRAVCILSANGAISNVTLRQSATSGGTVTYEGRFEILSLSGSFLLSENGGQRSRTGGLSVSLAGPDXRVLGGCVAGLLTAASPVQIVVGSFDAGGKKQPKQQQQQQLAPSPAPLNLAPTGVAAGPSSPPSRGTLSLSESSSGAPPSPPHAGASGGHGQQQQQPQPGGFSGLFWK

SEQ ID NO: 22738 - protein, 366 aa, Zea mays subsp. mays
  misc_feature (1)..(366): Ceres Seq. ID no. 12409850
  misc_feature (57)..(57): Xaa is any aa, unknown or other
  misc_feature (58)..(58): Xaa is any aa, unknown or other
  misc_feature (59)..(59): Xaa is any aa, unknown or other
  misc_feature (65)..(65): Xaa is any aa, unknown or other
  misc_feature (68)..(68): Xaa is any aa, unknown or other
  misc_feature (74)..(74): Xaa is any aa, unknown or other
  misc_feature (259)..(259): Xaa is any aa, unknown or other
MAGREPFGLPKTPATPPSSGGTQGLRMAYTTDGTAIFTPVSSVPPATATYQPVGGSXXXASSLAXVGXNGGAPXHSGGAGEPGTKKKRGRPRKYGPDGSMSLALVPASMAGEPAPAALGASGPFSPNGPKAPNTAPSASPDGAKKRGRPKGSTNKKHVAALGPAGAGFTPHLIFVKAGEDVSAKIMSFSQHGTRAVCILSANGAISNVTLRQSATSGGTVTYEGRFEILSLSGSFLLSENGGQRSRTGGLSVSLAGPDXRVLGGCVAGLLTAASPVQIVVGSFDAGGKKQPKQQQQQQLAPSPAPLNLAPTGVAAGPSSPPSRGTLSLSESSSGAPPSPPHAGASGGHGQQQQQPQPGGFSGLFWK

SEQ ID NO: 22739 - DNA, 1522 bp, Zea mays subsp. mays
  misc_feature (1)..(1522): Ceres Seq. ID no. 12409851
attattagagagagctacaacaagcatgaagctaagactggtagcgctagtgctggcggtagcgtccggtgtacgcttgctcgtcggcggcatcagcgttcgcgggggacgacgtcgtccgtgtcgcgctaaagcatgtcgacgctgggaagcagctgtccaggcccgagctgatccggcgcgccatgcggaggagcaaggcgagggcggccgcgctctccgcggtgaggaaccgcgcccgcttctctggcaagaacgagcagcaaacgcccgccggcgtgctgccggtgcgcccgtcgggggacctcgagtacgtcatcgacctcgccatcggcacgccgccgcagcccgtctcggcgctgctcgacaccggcagcgacctcatctggacgcagtgcgcgccgtgcgccagctgcctctcgcagccggacccgctgttcgcgccggggcagtcggcgtcgtacgagcccatgcggtgcgccgggacgctctgctctgacatcctgcaccacagctgcgagaggcccgacacgtgcacctaccgctacaactacggcgacggcacgatgaccgtgggcgtgtacgccacggagcgcttcaccttcgcgtcgtcgggcggcggcgggctcacgactaccgtcccgctcggcttcgggtgcggctccgtgaacgtcggcagcctcaacaacggctccggcatcgtgggcttcggccggaacccgctctcgctcgtgtcccagctctccatccgccgcttctcctactgcctcacgtcctacgccagccgcaggcagagcaccctcctgtttggctccctgtccgacggagtctacggtgacgccacgggccgcgtgcagaccacaccgctcctccagagcccccagaacccgaccttctactacgtacacttcacgggcctgaccgtcggcgccaggcggctgcggataccggagtcagcgttcgcgctccggcccgacggctcgggcggcgtgatcgtcgactccggcacggcgctcacgctcctcccagccgcggtgctcgcgggaggtggtgcgggcgttccgccagcagctgaggctgccgttcgcaaacggcggcaaccccgaggacggcgtgtgcttcctggtgcccgcggcctggcggcgctcgtcgtcgacgtcacagatgccggtcccgaggatggtgctccacttccagggcgcggacctcgacctgccgcgccgaaactacgtcctggacgaccacaggaggggccgcctgtgcctcctcctggcagactccggcgacgatggctccacgattggcaacctggtgcagcaggacatgcgcgtgctctacgatttggaggcagagaccttgtcgatcgctccggcacgatgctgacacgcgcgcaactagtagaaaggccgccgactactcgactactctcactgtatgcaagttagtgttaaccatgcaaatgcatgccaaccataccgggtcgcactttgcacgcaggcaaacaaattttttttgtcggtcg

SEQ ID NO: 22740 - protein, 419 aa, Zea mays subsp. mays
  misc_feature (1)..(419): Ceres Seq. ID no. 12409852
MRRSKARAAALSAVRNRARFSGKNEQQTPAGVLPVRPSGDLEYVIDLAIGTPPQPVSALLDTGSDLIWTQCAPCASCLSQPDPLFAPGQSASYEPMRCAGTLCSDILHHSCERPDTCTYRYNYGDGTMTVGVYATERFTFASSGGGGLTTTVPLGFGCGSVNVGSLNNGSGIVGFGRNPLSLVSQLSIRRFSYCLTSYASRRQSTLLFGSLSDGVYGDATGRVQTTPLLQSPQNPTFYYVHFTGLTVGARRLRIPESAFALRPDGSGGVIVDSGTALTLLPAAVLAGGGAGVPPAAEAAVRKRRQPRGRRVLPGARGLAALVVDVTDAGPEDGAPLPGRGPRPAAPKLRPGRPQEGPPVPPPGRLRRRWLHDWQPGAAGHARALRFGGRDLVDRSGTMLTRAQLVERPPTTRLLSLYAS

SEQ ID NO: 22741 - protein, 324 aa, Zea mays subsp. mays
  misc_feature (1)..(324): Ceres Seq. ID no. 12409853
MRCAGTLCSDILHHSCERPDTCTYRYNYGDGTMTVGVYATERFTFASSGGGGLTTTVPLGFGCGSVNVGSLNNGSGIVGFGRNPLSLVSQLSIRRFSYCLTSYASRRQSTLLFGSLSDGVYGDATGRVQTTPLLQSPQNPTFYYVHFTGLTVGARRLRIPESAFALRPDGSGGVIVDSGTALTLLPAAVLAGGGAGVPPAAEAAVRKRRQPRGRRVLPGARGLAALVVDVTDAGPEDGAPLPGRGPRPAAPKLRPGRPQEGPPVPPPGRLRRRWLHDWQPGAAGHARALRFGGRDLVDRSGTMLTRAQLVERPPTTRLLSLYAS

SEQ ID NO: 22742 - protein, 292 aa, Zea mays subsp. mays
  misc_feature (1)..(292): Ceres Seq. ID no. 12409854
MTVGVYATERFTFASSGGGGLTTTVPLGFGCGSVNVGSLNNGSGIVGFGRNPLSLVSQLSIRRFSYCLTSYASRRQSTLLFGSLSDGVYGDATGRVQTTPLLQSPQNPTFYYVHFTGLTVGARRLRIPESAFALRPDGSGGVIVDSGTALTLLPAAVLAGGGAGVPPAAEAAVRKRRQPRGRRVLPGARGLAALVVDVTDAGPEDGAPLPGRGPRPAAPKLRPGRPQEGPPVPPPGRLRRRWLHDWQPGAAGHARALRFGGRDLVDRSGTMLTRAQLVERPPTTRLLSLYAS

SEQ ID NO: 22743 - DNA, 1217 bp, Zea mays subsp. mays
  misc_feature (1)..(1217): Ceres Seq. ID no. 12409859
gcaaattaaggcttcagctcgcgcgagacctcagctttcactcgagtgagtgcgagtccatcgccggagagagagagagcgagagcacgcaatcgagttaaacaagccctgtctcttggttctctgtccacggcgggagagtggtagagatgggcaggcagccgtgctgcgagaagatcggtatcaagaaggggccgtggaccgcggaggaggaccagaagctggtcaccttcctcctgtctcacggccattgctgctggcggctcgtccccaagctcgcggggctgctgaggtgcgggaagagctgccggctgcggtggaccaactacctgaggccggacctcaagcgcggcctcctctcggaggaggaagaggcgctggtcatcgacctccacgcgcagctcggcaaccggtggtccaagatcgcggcgcggctgccggggaggacggacaacgagataaagaaccactggaacacccacatcaagaagaagctcaagaagatgggcatcgaccccgtcacccacgggccgctcgcgccggccactcaacctctggcgctggcgcagcagcgcgatcctccgcaggtggtgcgagaagaggaacgttgcgacgacgaccccagcaagcaggcatcgtcgcaagggctggcggcgggcgccgacgaggacgacgacgtggaggagacgccggcgagcgccgcccagccgcacggcgcgacgaccacctcccctgcttccgcagcggctggatccgtctcgccgtcctgctcctcctcggcctccggcgcggacgcggacgcggccgcctggcccggccccatcgacctcttcctcgaagtggacggcatcatggacatggactgggcgggcatcctttcgggctgcggcgatgacgacgccgcggacataagcgtcgatcttttcgaccattacgcaggcgatggctttgatgaacaagtctggatgtgatgcttgctcttcctgcaggtagcagcagtacactgggcggtaggatggttagaactgtgttgtgttgttactggtgatcgtatctctgctcttgcgtttgcgtgtccagttgcctctcttgttttcttgggtcaattcaagttcgcccgcgtccatgcatgcatggttgctggtatgggggagaggcacggcctggtttgtgtggtacgttcttcgtgaagattgaggaaatgaattgtgattgcg

SEQ ID NO: 22744 - protein, 273 aa, Zea mays subsp. mays
  misc_feature (1)..(273): Ceres Seq. ID no. 12409860
MGRQPCCEKIGIKKGPWTAEEDQKLVTFLLSHGHCCWRLVPKLAGLLRCGKSCRLRWTNYLRPDLKRGLLSEEEEALVIDLHAQLGNRWSKIAARLPGRTDNEIKNHWNTHIKKKLKKMGIDPVTHGPLAPATQPLALAQQRDPPQVVREEERCDDDPSKQASSQGLAAGADEDDDVEETPASAAQPHGATTTSPASAAAGSVSPSCSSSASGADADAAAWPGPIDLFLEVDGIMDMDWAGILSGCGDDDAADISVDLFDHYAGDGFDEQVWM

SEQ ID NO: 22745 - protein, 155 aa, Zea mays subsp. mays
  misc_feature (1)..(155): Ceres Seq. ID no. 12409861
MGIDPVTHGPLAPATQPLALAQQRDPPQVVREEERCDDDPSKQASSQGLAAGADEDDDVEETPASAAQPHGATTTSPASAAAGSVSPSCSSSASGADADAAAWPGPIDLFLEVDGIMDMDWAGILSGCGDDDAADISVDLFDHYAGDGFDEQVWM

SEQ ID NO: 22746 - DNA, 1490 bp, Zea mays subsp. mays
  misc_feature (1)..(1490): Ceres Seq. ID no. 12409866
aaagagggacgagggagacgttggggaggggagcgagcgagccgtaacatccgagctgttccaatggcgacccctgccgttgctttcgtcgccagcgctttgttggggcggtggtagcgctaggagcggagcagtactaggttggtaggtggttgtagctttgcgcgtgacccgagcgcgcgctcgctcgctcctgtgcctctctacctcgcttgcgtgcgccgggaaggcagtgggtggctggtcggttctcgcaagaggttgctggtgctgttcctcctcccccggttgatgagcatggggcattgctccgagcagcggacggggttcgaggtgactaaggactggaacggcgccgaccagttcgcgatccggtcccccgcggggggcgtccgttcgggtctgcctgcacggcgggcaggtcgtctcgtggaggaaccaccgcggcgaggaactcctcttcagcagcagcaaggcaatcttcaagccgccaagagcgacccgtggtggcattccgatatgcttcccacagtttggaaactgtggaacattggagcagcatggatttgcaaggaacaagatatggacaatagacgatgaggctccacctctaaattatggtgataataacagcaacaaagcttctgttgaccttctgctaaagccatctgaagatgacctgaagtgctggccacactgttttgagttacgtctcagagtctctctttcaatggatggagacctttcactgatatcacgggtcagaaatgttaatgggaagccattcagtttcgcatttgcttaccatacatacctttctgtttctgacatcagtgaagtgaggatagaaggtctggagacccttgattatcttgacaaccttagccagcgggaacgttttaccgaacagggagatgccataacatttgaatcagaggttgatcgagtctatgttggctgcccaggcgtaatagctgttcttgaccatggaaagaaacgcacattcatcgtgcggaaagaagggcttcctgatattgttgtgtggaacccctgggagaagaagtccaagacgatggcagacttcggcgacgacgagtacaagcagatgctgtgcgtggatgcagccgcggtcgagagggccatcacgctgaagcccggggaggagtggacggggaagctggagctctccgccgtggcgtcgaccaactgcagcgaccacctggatcgcccgggcaggctgtagagcgctgggtgggtgggttcgttcgcccctgacgaaaggcatgtactagttttttttcatgtacatgggggcgctaggtccggcccttgcaggctgcagtatcatctacctgtcaggtgtgtcatgtgtgagtttaaacttatgtcagatccaagtattgctgtgatcgacatgttcgatgttcctggactgcgaagtctcaagcgcaggctgttcgtttggctggctttaatccgaaacggcatct

SEQ ID NO: 22747 - protein, 170 aa, Zea mays subsp. mays; identical to SEQ ID NO: 15677
  misc_feature (1)..(170): Ceres Seq. ID no. 12409867

SEQ ID NO: 22748 - protein, 102 aa, Zea mays subsp. mays
  misc_feature (1)..(102): Ceres Seq. ID no. 12409868
MSMGHCSEQRTGFEVTKDWNGADQFAIRSPAGGVRSGLPARRAGRLVEEPPRRGTPLQQQQGNLQAAKSDPWWHSDMLPTVWKLWNIGAAWICKEQDMDNRR

SEQ ID NO: 22749 - protein, 100 aa, Zea mays subsp. mays
  misc_feature (1)..(100): Ceres Seq. ID no. 12409869
MGHCSEQRTGFEVTKDWNGADQFAIRSPAGGVRSGLPARRAGRLVEEPPRRGTPLQQQQGNLQAAKSDPWWHSDMLPTVWKLWNIGAAWICKEQDMDNRR

SEQ ID NO: 22750 - DNA, 1388 bp, Zea mays subsp. mays
  misc_feature (1)..(1388): Ceres Seq. ID no. 12409874
acagaggggcagccgcctgcgcggtggccagcatcgtccggccgggttcgtcgggaagcgacccaaccccacgcccgcttccaacctcgttctgaccgacggcgaccgccgtgccgcgccaccgctatacttacatctgctccatcatccctcgccgcgaccaccaacctcggcagggaaatccaactccggtttctcctcctcgcagcgtctctcccgcagtcggggagatccgggttggcccgcccggtaatccatccctcgccctcgtgccgcctgtaatttcgcctcctaacccgaccgccgggggccacagcggcgccggaggcggtggagtggggacgatggggatcggggcggtgtcggacgagttgctgggcacgttcgtgccgatcgccgtgtactggctctactcagggctctacgtcgcgctggatggggtggggcggctcgacggataccggctgcacaccagggaggaggccgctacgaagaacgtcgtctccaaggccgccgtcgtcagaggcgttctcgtccagcaggtcttccaggtcgccgtctcgctcaccctctttgcggttattggtgatgagagtagtactggacagaagcaacctcctgttcttgtcatagtgttgcagtttataactgcaatggttgttatggacacatggcagtacttcatgcacagatacatgcacattaacaagtttctgtataaacacatccattctaagcaccatactcttgtagtcccttattcctttggagctctatacaaccatcctcttgagggccttattttggacaccattggtggtgcactctcattcctcgtctctggtatgactccacggacatccatattctttttctcctttgcaaccatcaaaactgtggatgatcattgtgggctgtggcttcctggtaatatcctccaggcgctgttcagcaataacagtgcttatcatgacattcaccatcagctctatggaaacaagtacaacttttcacaacccttctttgtgatgtgggacaagattctcggaacttacatgccctactctattgaacaacgaaaaggaggggggatcgaatcaaaaccagctaaactcgactgagctgaggataccaagactgattagtacatgcatgcatagtttctattttttttttttgacttgtccaatactcatgccttgtggtactgctgactgcgcaaatgatgtacacaccctgtgtcataacttcatatagtgaggctgcttttgctctctacatttcttgttttgttttttagggtgttctatcttgtaacaagatacagtgagtaaagtattgtaatgtaccaaagaatactcaacaccacttggatttgtgttctgttg

SEQ ID NO: 22751 - protein, 258 aa, Zea mays subsp. mays
  misc_feature (1)..(258): Ceres Seq. ID no. 12409875
MGIGAVSDELLGTFVPIAVYWLYSGLYVALDGVGRLDGYRLHTREEAATKNVVSKAAVVRGVLVQQVFQVAVSLTLFAVIGDESSTGQKQPPVLVIVLQFITAMVVMDTWQYFMHRYMHINKFLYKHIHSKHHTLVVPYSFGALYNHPLEGLILDTIGGALSFLVSGMTPRTSIFFFSFATIKTVDDHCGLWLPGNILQALFSNNSAYHDIHHQLYGNKYNFSQPFFVMWDKILGTYMPYSIEQRKGGGIESKPAKLD

SEQ ID NO: 22752 - protein, 155 aa, Zea mays subsp. mays
  misc_feature (1)..(155): Ceres Seq. ID no. 12409876
MVVMDTWQYFMHRYMHINKFLYKHIHSKHHTLVVPYSFGALYNHPLEGLILDTIGGALSFLVSGMTPRTSIFFFSFATIKTVDDHCGLWLPGNILQALFSNNSAYHDIHHQLYGNKYNFSQPFFVMWDKILGTYMPYSIEQRKGGGIESKPAKLD

SEQ ID NO: 22753 - protein, 152 aa, Zea mays subsp. mays
  misc_feature (1)..(152): Ceres Seq. ID no. 12409877
MDTWQYFMHRYMHINKFLYKHIHSKHHTLVVPYSFGALYNHPLEGLILDTIGGALSFLVSGMTPRTSIFFFSFATIKTVDDHCGLWLPGNILQALFSNNSAYHDIHHQLYGNKYNFSQPFFVMWDKILGTYMPYSIEQRKGGGIESKPAKLD

SEQ ID NO: 22754 - DNA, 1547 bp, Zea mays subsp. mays
  misc_feature (1)..(1547): Ceres Seq. ID no. 12409896
attttcaaacccggaaaaaccccaagcgcattgaggaagcggccagcggtggtcccttcccccctccagtctccactctccagagtccagacctccactccactgtccactccaaagcgcagcagcgggcaaaaccaggcacccgcccgatccgattcggcttccgtctcactcatctcgcccggcctccacggagagatctggcggcggaggcgatgccactgggcgacggcgcggaggcggcggacttcgtgctgccggacgagctcctggcggcgctgccgcgggacccctacgagcagctggatctggcacgccgcatcaccgcgctggcggtgtccgggcgggtgtccggcctggagcgggaggcggggcgcctgcgggcggaggccgcggggaaggaccgcgagaacgccgagctccgggagcgagtggtgctgctcgacaccgcgctgcaggagaccaacgccaggctcccgcgccgcgctcgaggacaatattaagctcagcaaggagcgagactcgctggcgcagacgtccaagaagctggcgcgcgacctgcagaagctggagtcattcaagaggcatctgatgcagtcattgcgtgatgatagttcatcaccacaggaaacagttgacattacaacatgtgaccagtcagtagcaacaaaagcatcgtctagtggagatggtggatctggcagccaccctacaacaaatatatttagtgaatctttggatgctggaagtacgaaccgagacggtacggcatcaaggcctccgatccaaaaatatgccccctcatcgcacatcactccttggcttacccccaaggccactcctaaaataatgtccacttctgcttctccaaggcaaatatctaccacagcaacaccgaagctgatgtctggtgctacctcgccaacaaaatctcgaattgaagctcacatgtcaatgacaccatggtacccatcaagcaagcagtcatcggcagctagctcacctccacgaggaggttcaaacccaggtcggactcctcgtgttgatggaaaggaattttttcgccaagccaggagtcgtctatcctatgaacaatttggagcattcttagccaacatcaaagaactcaatgcccataagcagtcccgtgaggaaactctcaagaaagctgaggacatctttggtcccgaaaacaaagatctatatctgtctttccgaggcttgctaaatcgtagcatgccgtaggctccgtatgtctcttttttgttgttgggtttgcaggtaatgaagttgccgcattggcaacttattgccatctaagttgtggatttgaagatctagttggaagttttgccccccataatccacactaggtttaacgagcgtcgagcggacctctctgaacaactgagtgcgctaacccagagttgctcctgtaagtggtgcacctgtcgagtgctaaactataggatgcatcctgtcatggtgcctacattcttcgtaaaaccatgaaacagaatcttgggagtaaaattccatctcgtctc

SEQ ID NO: 22755 - protein, 414 aa, Zea mays subsp. mays
  misc_feature (1)..(414): Ceres Seq. ID no. 12409897
IFKPGKTPSALRKRPAVVPSPLQSPLSRVQTSTPLSTPKRSSGQNQAPARSDSASVSLISPGLHGEIWRRRRCHWATARRRRTSCCRTSSWRRCRGTPTSSWIWHAASPRWRCPGGCPAWSGRRGACGRRPRGRTARTPSSGSEWCCSTPRCRRPTPGSRAALEDNIKLSKERDSLAQTSKKLARDLQKLESFKRHLMQSLRDDSSSPQETVDITTCDQSVATKASSSGDGGSGSHPTTNIFSESLDAGSTNRDGTASRPPIQKYAPSSHITPWLTPKATPKIMSTSASPRQISTTATPKLMSGATSPTKSRIEAHMSMTPWYPSSKQSSAASSPPRGGSNPGRTPRVDGKEFFRQARSRLSYEQFGAFLANIKELNAHKQSREETLKKAEDIFGPENKDLYLSFRGLLNRSMP

SEQ ID NO: 22756 - protein, 217 aa, Zea mays subsp. mays
  misc_feature (1)..(217): Ceres Seq. ID no. 12409898
MQSLRDDSSSPQETVDITTCDQSVATKASSSGDGGSGSHPTTNIFSESLDAGSTNRDGTASRPPIQKYAPSSHITPWLTPKATPKIMSTSASPRQISTTATPKLMSGATSPTKSRIEAHMSMTPWYPSSKQSSAASSPPRGGSNPGRTPRVDGKEFFRQARSRLSYEQFGAFLANIKELNAHKQSREETLKKAEDIFGPENKDLYLSFRGLLNRSMP

SEQ ID NO: 22757 - DNA, 1600 bp, Zea mays subsp. mays
  misc_feature (1)..(1600): Ceres Seq. ID no. 12409921
atcctgtttcttgccgcactagaaacgtcgatccagcaatggctgctaccccgaccatcgttctggtgcccgtctggggcattggccacttcgtaccaatgctcgaggtcggcaagcggctgctcgcacgcagcgcactgcccctcaccgtcaccgtgctcgtaatgccgttgcctgcagaggcgaagcgggcgtccgagatcaccgagcacatacgccagcaggaagcctccggcctcgccatccgcttccaccatctgccagcggtggaacccccaaccgaccactcgggcatcgaggagtacatatcccgctacgtgcagctgtactcgccccacgtcaaggcggccgtcgccggggttgacgtgcccggtggccggcgtcgttgtcgacatcttctgcacggcgctgttcgacgcggcgcaccagctcggcgtgcccggcctacgtgtacctgatcaccagcgccgcgatgtgcgcgctcttgctgcgctccccgacgctcgacgaggaggtagccgtcgaggtcgagttcgagcaaatggaaggcggagtggacgtgccagggctgccgccggtgccggcgtcctgcctgccgacggggctggagaacagaaagatcccgacctatcgctggttcctgtacaacggcaggcgctatatggaagcagcaggcatcatcgtcaacaccattgccgaggccgagccgcgcgtcctcgcggccatcgccgacgggcggtgcacgcgtggtgtcccggcacctccggtgtactcgatcgggccggtgatcccctccaccccgcccgccgagcagcaggcgcaggagtgcgtgcgctggctcgactcgcagcctccgagctccgtggtgttcctatgcttcggcagcggtggctgcttcacggcgccccaagcgcacgagatagcgcacggcctggaccgcagcgggcatcgattcctgtgggtgctgcgcgggacgccggagcccggcacgaagttgccctcggacgggaacctcgcggagctgcttccggcggatttcttggcgaggacgaaggatagagggctcgtgtggcctaccaaggcgccgcagaaggagatactcgcccacgccgccgtgggaggcttcgtcacgcactgtggctggaactcggtcctcgagagcctctggcatggcgtgccgatggtgccatggccgcttggcgccgagcagcactacaacgcgttcacgctggtggccgacatgggcgtcgccgtggcgctgaacgtggaaaggaagaggaagaatttcgtggaggcgaccgagctggagcgagcggttaaagctctgatgtgcgacggcgagacagcgaggaaggttagggacaaggtcatggagataaaagccgcgtgccggaaggcaatggaggagggcggatcatcgaacatgtcgttgcagaggctctgtgatgcgctcgtcgaaggcgcggtgcacccgggaaagtgatgcccacagagttcaatcaggaggctctgtccaccagccatccaatggtgtacatgtattctgttatgagttctctgtttttagagcaagttaaataatattttttatgagttctcg

SEQ ID NO: 22758 - protein, 336 aa, Zea mays subsp. mays
  misc_feature (1)..(336): Ceres Seq. ID no. 12409922
MCALLLRSPTLDEEVAVEVEFEQMEGGVDVPGLPPVPASCLPTGLENRKIPTYRWFLYNGRRYMEAAGIIVNTIAEAEPRVLAAIADGRCTRGVPAPPVYSIGPVIPSTPPAEQQAQECVRWLDSQPPSSVVFLCFGSGGCFTAPQAHEIAHGLDRSGHRFLWVLRGTPEPGTKLPSDGNLAELLPADFLARTKDRGLVWPTKAPQKEILAHAAVGGFVTHCGWNSVLESLWHGVPMVPWPLGAEQHYNAFTLVADMGVAVALNVERKRKNFVEATELERAVKALMCDGETARKVRDKVMEIKAACRKAMEEGGSSNMSLQRLCDALVEGAVHPGK

SEQ ID NO: 22759 - protein, 313 aa, Zea mays subsp. mays
  misc_feature (1)..(313): Ceres Seq. ID no. 12409923
MEGGVDVPGLPPVPASCLPTGLENRKIPTYRWFLYNGRRYMEAAGIIVNTIAEAEPRVLAAIADGRCTRGVPAPPVYSIGPVIPSTPPAEQQAQECVRWLDSQPPSSVVFLCFGSGGCFTAPQAHEIAHGLDRSGHRFLWVLRGTPEPGTKLPSDGNLAELLPADFLARTKDRGLVWPTKAPQKEILAHAAVGGFVTHCGWNSVLESLWHGVPMVPWPLGAEQHYNAFTLVADMGVAVALNVERKRKNFVEATELERAVKALMCDGETARKVRDKVMEIKAACRKAMEEGGSSNMSLQRLCDALVEGAVHPGK

SEQ ID NO: 22760 - protein, 273 aa, Zea mays subsp. mays
  misc_feature (1)..(273): Ceres Seq. ID no. 12409924
MEAAGIIVNTIAEAEPRVLAAIADGRCTRGVPAPPVYSIGPVIPSTPPAEQQAQECVRWLDSQPPSSVVFLCFGSGGCFTAPQAHEIAHGLDRSGHRFLWVLRGTPEPGTKLPSDGNLAELLPADFLARTKDRGLVWPTKAPQKEILAHAAVGGFVTHCGWNSVLESLWHGVPMVPWPLGAEQHYNAFTLVADMGVAVALNVERKRKNFVEATELERAVKALMCDGETARKVRDKVMEIKAACRKAMEEGGSSNMSLQRLCDALVEGAVHPGK

SEQ ID NO: 22761 - DNA, 1000 bp, Zea mays subsp. mays
  misc_feature (1)..(1000): Ceres Seq. ID no. 12409957
acacgctcggctgagcactttcccgccgtcttcagaccgtcacaccctcggtcgtgacaggtttctgcctccactgccttccccgccgccgccatgccctcctccgccgcccgggccctcacatccgtctcccgcgcagccttctcctggaagccgacggggcggccgcagcaaacgctggcggcggcggtgagcaggtcgggcgtggggctccactcgggagcgcgcgtcaccgccacgctgtttccgacgcaagctggagagggtaggtatttcctcgtggagggtgatgaggaggcgagggtggcggcagaggtggggaacgccgagccactgtcgcagctctgcacgacgcttcgtcggggcgatggcgcccacacgcgggtccggacggtggaacaccttctttcggcgatggaggcgcttggcgtcgacaactgccgtatcgaggttagcggcggggatgagattcctttgcttgatggatcagcgcaagagtgggtagaggcagtacaaggcgttggcttgtgtgcggcagaggatgccaatggggaaaagttggataaactggcgcctgaaattcaggagcctgtttacctacggaaacacgattgctttatagctgcattccctagcccacaaatccacataacctgtggcattgatttcccaaaggtgccagcgattgagtgtcaatgggtttctacattcctggatgataatatatactcaagcaagattgcgcctgcaagaactttctgtatatttgaagaggttgaaaaaatgcgtgctgctggactcatcaaaggagggtcactagaaaatgctatggtttgcagcatatctggtggctggctgaatccaccactgcggttcgaggatgagcttccgccacaagattttagatcttattggtgacttctcgctgtttgcacagaatggtaaccagggctttccaattgctcatataattgcctataaggctggtcacgcgctgcac

SEQ ID NO: 22762 - protein, 274 aa, Zea mays subsp. mays
  misc_feature (1)..(274): Ceres Seq. ID no. 12409958
MPSSAARALTSVSRAAFSWKPTGRPQQTLAAAVSRSGVGLHSGARVTATLFPTQAGEGRYFLVEGDEEARVAAEVGNAEPLSQLCTTLRRGDGAHTRVRTVEHLLSAMEALGVDNCRIEVSGGDEIPLLDGSAQEWVEAVQGVGLCAAEDANGEKLDKLAPEIQEPVYLRKHDCFIAAFPSPQIHITCGIDFPKVPAIECQWVSTFLDDNIYSSKIAPARTFCIFEEVEKMRAAGLIKGGSLENAMVCSISGGWLNPPLRFEDELPPQDFRSYW

SEQ ID NO: 22763 - protein, 167 aa, Zea mays subsp. mays
  misc_feature (1)..(167): Ceres Seq. ID no. 12409959
MEALGVDNCRIEVSGGDEIPLLDGSAQEWVEAVQGVGLCAAEDANGEKLDKLAPEIQEPVYLRKHDCFIAAFPSPQIHITCGIDFPKVPAIECQWVSTFLDDNIYSSKIAPARTFCIFEEVEKMRAAGLIKGGSLENAMVCSISGGWLNPPLRFEDELPPQDFRSYW

SEQ ID NO: 22764 - DNA, 1895 bp, Zea mays subsp. mays
  misc_feature (1)..(1895): Ceres Seq. ID no. 12409967
accctcataccacactcaaactcgcatcctgtggagtttttacatagaagtcgtcacttattgcgccgtggtggatgggcagggggctcgtgtcgaacactcgaacagaaccaccgccattctagaggcatccagtattccagcccaatcctatctttgtattcctctccctcgtctcggaagtctggttcgccgaacagtcccgaacccccgattcactgccgctgccccgtctcgtcctcttcgccagcgaaaaccctagtctaggggacgggagcgcaatccacgcacggcaacatggacgccatccgcaagcagctcgaccagctcatgggggccaaccgcaacggcgatgtacgggaggtcagccgcaagtactatgatcgcgacgtctgccgcctctacctcgccggcctctgcccccacgacctcttccagcttaccaagatggacatgggcccgtgcccgaagctgcactcgctgcaactgcgcaaagaatatgaagaagccaaagccaaagattcagagagcccttaagcggttggaggaagaggatgctaaggcagctattgctatttctgttactgaggttacacagactaaagaagtaatggagttatccaaacaaattaggcagaagatgaaggatattgatgcttttgatcttgagggtaacaccgaggggaaaattcgggccactgaagaacttgacaagctaaaagaacaaagggcagaagagcaggcaaagatgttacttgaagctttcaacaaagaccgtgcttctttaataaactctcttcaaaatgccactcaaacaactacacctgtcccccctgctgctccggatgcacggacacaagaaatgataaacgagaaactgaaaaaggcagaagaactaggtgagaatgggatggttgatgaagcccaaaaattgttggatgaggcggaagctctgaagaagctggccacccgaccacaggctgttccagactctacaaaaatgagcgctcatgtccagataactgaccaaaagctgcgcctgtgtgacatatgtggagcattcttgagcgtatatgacagtgaccgtcgcttggcagatcattttggagggaaacttcatatgggttatatgcttatacgtgagagattgtctgaactgcaggaagagaagaacaaaaaacggaagctagaccgagctgagtatgacagaaggtccagggaaaggagcggggaacgtgccagggattcgagcagggatcgctacatagaccgcagcagcagccgtgacagggagtatgaccgcagaagaagccatgatcgctaccatgacagggaaagagagagagattccaggcagtctcgtagttatgattccagaagccaccgcaggtcatattcaccaaggggaagttctagggattatgatcgatctgggcgtcatgaacgccgtgatcggtactaggagcaaggaagcctccttgaaatttagggtactagattgcgttgcctcagggctagtttggccacctcatttttccaaggattgacaaccttatttttttaagggatttctattttcctaagaaaaattagttcattttcccctgggagggaataccttggggaaatggaggtgccaaactagcctaagtgttgttcgggaattctaagagggggcttaggtccaactggagaaaggcatcagctctttgcattataactaagggataggatctgacgtaatctatgcgtatcatattgttgtgttagctggtgttcatcgtgtaaacacaatgtggtggcgacgtgtcatgctttaatacgcttatatgcatttgaattaagttaatctgcccttgccatgtgtcttttattctggtaataagtttgtactc

SEQ ID NO: 22765 - protein, 369 aa, Zea mays subsp. mays
  misc_feature (1)..(369): Ceres Seq. ID no. 12409968
MYGRSAASTMIATSAASTSPASAPTTSSSLPRWTWARARSCTRCNCAKNMKKPKPKIQRALKRLEEEDAKAAIAISVTEVTQTKEVMELSKQIRQKMKDIDAFDLEGNTEGKIRATEELDKLKEQRAEEQAKMLLEAFNKDRASLINSLQNATQTTTPVPPAAPDARTQEMINEKLKKAEELGENGMVDEAQKLLDEAEALKKLATRPQAVPDSTKMSAHVQITDQKLRLCDICGAFLSVYDSDRRLADHFGGKLHMGYMLIRERLSELQEEKNKKRKLDRAEYDRRSRERSGERARDSSRDRYIDRSSSRDREYDRRRSHDRYHDRERERDSRQSRSYDSRSHRRSYSPRGSSRDYDRSGRHERRDRY

SEQ ID NO: 22766 - protein, 360 aa, Zea mays subsp. mays
  misc_feature (1)..(360): Ceres Seq. ID no. 12409969
MIATSAASTSPASAPTTSSSLPRWTWARARSCTRCNCAKNMKKPKPKIQRALKRLEEEDAKAAIAISVTEVTQTKEVMELSKQIRQKMKDIDAFDLEGNTEGKIRATEELDKLKEQRAEEQAKMLLEAFNKDRASLINSLQNATQTTTPVPPAAPDARTQEMINEKLKKAEELGENGMVDEAQKLLDEAEALKKLATRPQAVPDSTKMSAHVQITDQKLRLCDICGAFLSVYDSDRRLADHFGGKLHMGYMLIRERLSELQEEKNKKRKLDRAEYDRRSRERSGERARDSSRDRYIDRSSSRDREYDRRRSHDRYHDRERERDSRQSRSYDSRSHRRSYSPRGSSRDYDRSGRHERRDRY

SEQ ID NO: 22767 - protein, 320 aa, Zea mays subsp. mays
  misc_feature (1)..(320): Ceres Seq. ID no. 12409970
MKKPKPKIQRALKRLEEEDAKAAIAISVTEVTQTKEVMELSKQIRQKMKDIDAFDLEGNTEGKIRATEELDKLKEQRAEEQAKMLLEAFNKDRASLINSLQNATQTTTPVPPAAPDARTQEMINEKLKKAEELGENGMVDEAQKLLDEAEALKKLATRPQAVPDSTKMSAHVQITDQKLRLCDICGAFLSVYDSDRRLADHFGGKLHMGYMLIRERLSELQEEKNKKRKLDRAEYDRRSRERSGERARDSSRDRYIDRSSSRDREYDRRRSHDRYHDRERERDSRQSRSYDSRSHRRSYSPRGSSRDYDRSGRHERRDRY

SEQ ID NO: 22768 - DNA, 1454 bp, Zea mays subsp. mays
  misc_feature (1)..(1454): Ceres Seq. ID no. 12409971
aagagctaagagggaagaacaatcgagctactaataaggtcgtatacatatcttctatatactcctctgaaagttgtgaactccggtcgagcttaaaaacagcagcaatggcgaagctttggacattgctgctggctgcagtggtggtcctctcactcctagtgagccccattgcttgcacccgaaagctcaacaaacccaagccgaagccgggcagctacaggcggccggtcaagccgaagccaaaaccggtcacgggcagctacaagccggcgcctgtggccgccagaagaaaccacacagctacacccacgccatcgccgactgtctacggccccggtggctggctgtcaggcgccggcgccacgtactacggcgcgaccaacggcgacgggagcgacggcggcgcgtgcggctaccagacggccgtcggaaagaagccattcgactcgatgatcgccgccgggagcacgccactgtacaggggaggcgagggctgcggcgcctgctacgaggtgaaatgcacgaccaacgccgcgtgctccggccagcccgtgaccatcgtaatcaccgaccagtcccctggcgggctgttccccggcgaggtcgagcactttgacatgagcggcaccgccatgggcgccatggcccggcccggcatggccgacaagctccgcgctggcggcgtgctcaggatcctgtacaggagggtgccgtgcaagtacaccggcgtcaacatcgcgttcaaggtggatcagggcgcgaacccgtactacttcgacgtgctcatcgagttcgaggacgacgacggcgacctcagcgccgtggacctcatggaggccggcagcggcgtctggactcctatggcgcacaactggggcgccacgtggcgcctcaacaacggcaggaagctcaaagcgccgttcgggctccggctcacctccgactcccgcagggtgctcgtcgccaacaacgccatcccggccgcgtggaagcccggcaagacctaccgctccttggtcaactacccctgaaaagagaaataccgacaagtggatggcgtgtattgtgcgtccgggtgttgcgagtggcggcggtgtactactggtgtcggaaaacagaagagaatgaaagaggaggttgaagaagagaataatgtccttcttccctccctggacggtctctgcagtccccaaaagtgatgtgtgacggtgttagtcaaatcatgccggtaatttgatacttcatctcgatttgagttttactgctatactactgtgattgaggtaagacagaatcttatttcttgaccacgtagtacataaactacaaagcatgcccgttgcgttggtaattagactcttgtagtggtttttgccaatatcaagatgtatgtagaatgtgtgtgcatgcgttcacagtgatgagaatatacatgcgtgtatctgatcctg

SEQ ID NO: 22769 - protein, 343 aa, Zea mays subsp. mays
  misc_feature (1)..(343): Ceres Seq. ID no. 12409972
ELRGKNNRATNKVVYISSIYSSESCELRSSLKTAAMAKLWTLLLAAVVVLSLLVSPIACTRKLNKPKPKPGSYRRPVKPKPKPVTGSYKPAPVAARRNHTATPTPSPTVYGPGGWLSGAGATYYGATNGDGSDGGACGYQTAVGKKPFDSMIAAGSTPLYRGGEGCGACYEVKCTTNAACSGQPVTIVITDQSPGGLFPGEVEHFDMSGTAMGAMARPGMADKLRAGGVLRILYRRVPCKYTGVNIAFKVDQGANPYYFDVLIEFEDDDGDLSAVDLMEAGSGVWTPMAHNWGATWRLNNGRKLKAPFGLRLTSDSRRVLVANNAIPAAWKPGKTYRSLVNYP

SEQ ID NO: 22770 - protein, 308 aa, Zea mays subsp. mays
  misc_feature (1)..(308): Ceres Seq. ID no. 12409973
MAKLWTLLLAAVVVLSLLVSPIACTRKLNKPKPKPGSYRRPVKPKPKPVTGSYKPAPVAARRNHTATPTPSPTVYGPGGWLSGAGATYYGATNGDGSDGGACGYQTAVGKKPFDSMIAAGSTPLYRGGEGCGACYEVKCTTNAACSGQPVTIVITDQSPGGLFPGEVEHFDMSGTAMGAMARPGMADKLRAGGVLRILYRRVPCKYTGVNIAFKVDQGANPYYFDVLIEFEDDDGDLSAVDLMEAGSGVWTPMAHNWGATWRLNNGRKLKAPFGLRLTSDSRRVLVANNAIPAAWKPGKTYRSLVNYP

SEQ ID NO: 22771 - protein, 193 aa, Zea mays subsp. mays
  misc_feature (1)..(193): Ceres Seq. ID no. 12409974
MIAAGSTPLYRGGEGCGACYEVKCTTNAACSGQPVTIVITDQSPGGLFPGEVEHFDMSGTAMGAMARPGMADKLRAGGVLRILYRRVPCKYTGVNIAFKVDQGANPYYFDVLIEFEDDDGDLSAVDLMEAGSGVWTPMAHNWGATWRLNNGRKLKAPFGLRLTSDSRRVLVANNAIPAAWKPGKTYRSLVNYP

SEQ ID NO: 22772 - DNA, 1667 bp, Zea mays subsp. mays
  misc_feature (1)..(1667): Ceres Seq. ID no. 12409988
aaactgttaacaggtgataaagcttttctctctcttggccggccagtgacatcagacatcaccaactcgtcgacggtagagagagcaagctcttcggcgatttgagaagaatcgaggagcgagcgagcgagcgagcgagagaggaggaggaggagctggggcttgagcctgcgcccgggggccccgggtcacggaatcctaccattaccaaccctagccttcgttgatcgccgtctcaggtcatggcagggccggcgccggatcgggccgccctgactgtggggccgggcatggacatgccaatcatgcacgacagcgaccggtacgagctcgtgcgcgatatcggctccggcaacttcggcgttgcccgcctcatgcgcgaccgccgcaccagcgaactcgtcgccgtcaagtacatcgagcgcggcgagaagatagatgagaatgtccagcgtgagataattaaccatagatcattgaagcaccctaacattattaggtttaaagaggttattttaacaccgacccatcttgctattgtcatggaatatgcctctggcggtgagctttttgagaggatatgtaagaacgtgcgattcagtgaagatgaggctcgctacttcttccagcagcttatttcaggagtaagctactgccattcaatgcaagtatgccaccgtgatttgaagttggagaacacacttctagatgggagtgacgctcctcgcttgaagatttgcgatttcggttattccaagtcatctgttcttcattcccagccgaagtccactgttggaacacctgcttatattgcacctgaagttttgttgaaaaaagaatatgatggcaagattgctgacgtttggtcatgtggtgtaaccctctatgtaatggttgttggcgcatatccttttgaagatccagaagagcctaagaacttccgcaagacaattcagcgtatcttgaatgttcagtacgcaattccagacaacgtgaacatatctccagagtgcaggcatctaatttcgaggatttttgttggcgatcctgctacgcgaataacaatccctgaaatccggaatcatagttggttcctgaagaaccttcctgctgatctgatggatgatgatagcatgagcaaccaatatgaggagcctgaccagccaatgcagaccatggatcagatcatgcagattttaacagaggccaccataccacctgcctgttctcgcagtataaatgtcctagctgatggactggacatggacgacgacatggatgatcttgattccgactcagatcttgatgttgacagcagcggtgagattgtgtacgcaatgtgagtaacatctcagcagccatctcagcagtcaaccaaggaaccaatcaggcatgggatgccctgttgtatactctggcaaagggcatgcttccttttgtgaaaaacatccatgtagttttctcaaggaatcgcaatgtgttctgtggaacacatatgttgtagtcaaactcgggttactcagcttgtaaaactagcctcctcttgcttcctggttactgggctttggatactctcaggcttcgacttgtgtgttgctgttaaatatgtataagaaacttctactcaggttgatctgtgaatctggattcgggtagtggttttgctc

SEQ ID NO: 22773 - protein, 366 aa, Zea mays subsp. mays
  misc_feature (1)..(366): Ceres Seq. ID no. 12409989
MAGPAPDRAALTVGPGMDMPIMHDSDRYELVRDIGSGNFGVARLMRDRRTSELVAVKYIERGEKIDENVQREIINHRSLKHPNIIRFKEVILTPTHLAIVMEYASGGELFERICKNVRFSEDEARYFFQQLISGVSYCHSMQVCHRDLKLENTLLDGSDAPRLKICDFGYSKSSVLHSQPKSTVGTPAYIAPEVLLKKEYDGKIADVWSCGVTLYVMVVGAYPFEDPEEPKNFRKTIQRILNVQYAIPDNVNISPECRHLISRIFVGDPATRITIPEIRNHSWFLKNLPADLMDDDSMSNQYEEPDQPMQTMDQIMQILTEATIPPACSRSINVLADGLDMDDDMDDLDSDSDLDVDSSGEIVYAM

SEQ ID NO: 22774 - protein, 350 aa, Zea mays subsp. mays
  misc_feature (1)..(350): Ceres Seq. ID no. 12409990
MDMPIMHDSDRYELVRDIGSGNFGVARLMRDRRTSELVAVKYIERGEKIDENVQREIINHRSLKHPNIIRFKEVILTPTHLAIVMEYASGGELFERICKNVRFSEDEARYFFQQLISGVSYCHSMQVCHRDLKLENTLLDGSDAPRLKICDFGYSKSSVLHSQPKSTVGTPAYIAPEVLLKKEYDGKIADVWSCGVTLYVMVVGAYPFEDPEEPKNFRKTIQRILNVQYAIPDNVNISPECRHLISRIFVGDPATRITIPEIRNHSWFLKNLPADLMDDDSMSNQYEEPDQPMQTMDQIMQILTEATIPPACSRSINVLADGLDMDDDMDDLDSDSDLDVDSSGEIVYAM

SEQ ID NO: 22775 - protein, 348 aa, Zea mays subsp. mays
  misc_feature (1)..(348): Ceres Seq. ID no. 12409991
MPIMHDSDRYELVRDIGSGNFGVARLMRDRRTSELVAVKYIERGEKIDENVQREIINHRSLKHPNIIRFKEVILTPTHLAIVMEYASGGELFERICKNVRFSEDEARYFFQQLISGVSYCHSMQVCHRDLKLENTLLDGSDAPRLKICDFGYSKSSVLHSQPKSTVGTPAYIAPEVLLKKEYDGKIADVWSCGVTLYVMVVGAYPFEDPEEPKNFRKTIQRILNVQYAIPDNVNISPECRHLISRIFVGDPATRITIPEIRNHSWFLKNLPADLMDDDSMSNQYEEPDQPMQTMDQIMQILTEATIPPACSRSINVLADGLDMDDDMDDLDSDSDLDVDSSGEIVYAM

SEQ ID NO: 22776 - DNA, 1191 bp, Zea mays subsp. mays
  misc_feature (1)..(1191): Ceres Seq. ID no. 12409992
attcattttttttcttttttggtattttccggacagtggagtggagggcgatagatagggcagcatggcggcaaccttctgcgctggacccgccgcatccgcgggcagtaaaccctagctccgccggctgccgaccccagaacctaactcgggctgccgtgctgtctgcttgctggcggcccagcaggccgactcccgctttcgtctccctccggcgccccaatgccgagctgcggccgctgcgcgtggccgccggctccggcgttgacccgaaggttgtcaacggggaagattttcctcccatgaaggacctaattcagctatacaggacagcttttctagaaggaaatgaggaggttcttggtgtagttgagaaggcaatcactgctgtggaaaaagagaagagtacgatagcttcccaatttgaaagtattacaaccgaaataacttctgggaaggaaaagtttattcgcttaaatgccgacctggagaatttccggaaacagactgaaaaggaccgtgcaaagttaacatcaaatatacgggtggaagttgttcagagtctgttacctctagttgatagttttgagaaaacgaatctagagaacaccccagagactgagaaggagcaaaagatcagcgcaagctatcaaggcatatacaagcagttagttgaaacactaagatatttgggtgtgggagttgtggaaacagttggcaagccatttgatccttcggtccatgaggccatctcacgagaagcatccatgcaattcaaggcagggattgtcatgcatgaagtccgcagagggttccatttgaaggagaggctgctaaggcctgctactgtgaaggtctctactggctctggcaaacaaagtgcaagctcataggcgggggacaaagatgctgctttgtgaatctgatcaaacgaccaacaggaactgataggcacacatttttctgttcataacatgccgaatgtgtttgatctcaaatgagacgggatcagctatgtatggtgttgacagggagcaccagcttgaagttttgctgttgcttgtaatctgctagaattttgtccaccagaagagagagaatgaaacattggacattcataccggatttatattgagttccttgctcacttcattggacatccataccggatttatattgacttccttgccc

SEQ ID NO: 22777 - protein, 296 aa, Zea mays subsp. mays
  misc_feature (1)..(296): Ceres Seq. ID no. 12409993
SFFFFFGIFRTVEWRAIDRAAWRQPSALDPPHPRAVNPSSAGCRPQNLTRAAVLSACWRPSRPTPAFVSLRRPNAELRPLRVAAGSGVDPKVVNGEDFPPMKDLIQLYRTAFLEGNEEVLGVVEKAITAVEKEKSTIASQFESITTEITSGKEKFIRLNADLENFRKQTEKDRAKLTSNIRVEVVQSLLPLVDSFEKTNLENTPETEKEQKISASYQGIYKQLVETLRYLGVGVVETVGKPFDPSVHEAISREASMQFKAGIVMHEVRRGFHLKERLLRPATVKVSTGSGKQSASS

SEQ ID NO: 22778 - protein, 196 aa, Zea mays subsp. mays
  misc_feature (1)..(196): Ceres Seq. ID no. 12409994
MKDLIQLYRTAFLEGNEEVLGVVEKAITAVEKEKSTIASQFESITTEITSGKEKFIRLNADLENFRKQTEKDRAKLTSNIRVEVVQSLLPLVDSFEKTNLENTPETEKEQKISASYQGIYKQLVETLRYLGVGVVETVGKPFDPSVHEAISREASMQFKAGIVMHEVRRGFHLKERLLRPATVKVSTGSGKQSASS

SEQ ID NO: 22779 - DNA, 1133 bp, Zea mays subsp. mays
  misc_feature (1)..(1133): Ceres Seq. ID no. 12409997
acacggcgtctttgggtgagcacaccgcgcagcaacgagaggggcaaacaagcttgctactgtgatttctcgtccgagcagcggcggaggagagagagagagcatggccgaccacaaggaggagcctgtgccggagtctgtgatggacaagatcaccgagaagttccacggcggggactcgtcgtcgtcgtcgtctgactcggacgacgagaagaaggggtcctcgttggcgtcggcggcggaagccatgaaggccaagatctaccgccttttcggccgggagaggcccgtccactccgtcctcggcggcggcaagcctgccgatcttatcctatggaggaacaggaagatctctggcggggtacttgctggtgccacggccatctggctcctattcgaggtcatggagtaccatctcctcaccttggtgtgccactgtctcatcctctcgctggccatcctcttcctgtggtccaatgcctccactttcatcaacaagtccccaccgaacattcctgaggtcaaaatccctgaggatgtggctgttaatgttgccctgtcactgagatatgagatcaacaggggctttgctaccttaagggagattgggcatggccgtgatctgaagaaattcctaattgttattgcaggtctctggcttctttcagttctcgggagctgctgcaacttcctgacactgttctatattgtctttgtggcactgtacactgtaccagttctgtatgagaaatatgaggacaaggttgatgcttttggtgagaaggctatgactgaactgaagaagtattatgccattttcgatgagaagtgcctatcgaagattccaaagggcccccttaaggataagaagcactagattggtagtaaggtatttgctatgaatcaacatctacattatgtcactagctgtcacctctttctctgaaggatggtgcttggtcctggtctctagttgatagtatataatctgtatgggcaactttggtgtgactgacagtctgctgaaaactgttgatcttgtttttgggtttcagctttcaccatagttgcctggaagcttgaaatatattatgcgctctatcaatgtcatgtgaactttgtcatgtaccttc

SEQ ID NO: 22780 - protein, 257 aa, Zea mays subsp. mays
  misc_feature (1)..(257): Ceres Seq. ID no. 12409998
MADHKEEPVPESVMDKITEKFHGGDSSSSSSDSDDEKKGSSLASAAEAMKAKIYRLFGRERPVHSVLGGGKPADLILWRNRKISGGVLAGATAIWLLFEVMEYHLLTLVCHCLILSLAILFLWSNASTFINKSPPNIPEVKIPEDVAVNVALSLRYEINRGFATLREIGHGRDLKKFLIVIAGLWLLSVLGSCCNFLTLFYIVFVALYTVPVLYEKYEDKVDAFGEKAMTELKKYYAIFDEKCLSKIPKGPLKDKKH

SEQ ID NO: 22781 - protein, 244 aa, Zea mays subsp. mays
  misc_feature (1)..(244): Ceres Seq. ID no. 12409999
MDKITEKFHGGDSSSSSSDSDDEKKGSSLASAAEAMKAKIYRLFGRERPVHSVLGGGKPADLILWRNRKISGGVLAGATAIWLLFEVMEYHLLTLVCHCLILSLAILFLWSNASTFINKSPPNIPEVKIPEDVAVNVALSLRYEINRGFATLREIGHGRDLKKFLIVIAGLWLLSVLGSCCNFLTLFYIVFVALYTVPVLYEKYEDKVDAFGEKAMTELKKYYAIFDEKCLSKIPKGPLKDKKH

SEQ ID NO: 22782 - protein, 209 aa, Zea mays subsp. mays
  misc_feature (1)..(209): Ceres Seq. ID no. 12410000
MKAKIYRLFGRERPVHSVLGGGKPADLILWRNRKISGGVLAGATAIWLLFEVMEYHLLTLVCHCLILSLAILFLWSNASTFINKSPPNIPEVKIPEDVAVNVALSLRYEINRGFATLREIGHGRDLKKFLIVIAGLWLLSVLGSCCNFLTLFYIVFVALYTVPVLYEKYEDKVDAFGEKAMTELKKYYAIFDEKCLSKIPKGPLKDKKH

SEQ ID NO: 22783 - DNA, 1268 bp, Zea mays subsp. mays
  misc_feature (1)..(1268): Ceres Seq. ID no. 12410087
agggagaaaaatagcaggccgccttgagctggcataggatgcgacggtccggcaggggcagggctcggcggtcgacggaggccaattctttaacttccttcctccgtcgatcatccagcaccagcaggagaatcccgtcgaatccccctccccaacccaagggagcgcgcgcgtatgcctcctccagatccaaagcaacaagcaacagacagcgaggggcaccggggtccgccgcatgtgtgtggttcatggaggatcatgctttcctgcttactgcattagctcctgacgcgccaccctcccctcgcgttcattgatttctgttataattactcacattattattggtaaagaaagatagggcaccgcttctaatttgatgggcattccgttaccgtctcaacgtcaacaacaggtcttttcagcggctcgggcaaaaggcgacaagtcagtgcagagaagatagtgtttgatctaaccccactacaggaacagaggctgcaaagtctgaaggaaaggctaaatgtgccatatgacgaaactcggacagatcatcaagaatcgcttagggctctatggaatgcctcctttcccgatacggagctcactagcttagtttcagaacagtggaaagacatggggtggcagggcgtgaacccagcaactgatttcaggggctgtgggtttgtttcgctcgagaaccttttgttttttgcaagaacatacccggcttctttcaagaggctgatgctgaagcagcaaggaatgcgaactacatgggagtacccatttgcggtcgcgggtgtaaacatctcatacatgctgattcaactgctggagctcaactcagggcgcccgaagtctttgccagggattaacttcatcaaagtgttgacagaacacgaggatgcgttcgacgtgctgtactgcatagcgttcgagatgatggacgcccagtggctagcaatgcgagcctcgtacatgcagttcaaagaggtgctggaggccacaaggcagcagctcgagagggagctctccctggaggatctcaatggcatccatgacctccctgcctgcaacctcttgtacaaatagtgctactggtacttagattatattactgggatgcagtcaaaggaaaatttgatcaggttacatcgtaaccagcatcatcagcctgtaaaaaagaaaaaggaaaagaaaaggagagaagggagacacacatctctggttgtcagtaattcacgtacgccacagttttgcccagg

SEQ ID NO: 22784 - protein, 152 aa, Zea mays subsp. mays
  misc_feature (1)..(152): Ceres Seq. ID no. 12410088
MGWQGVNPATDFRGCGFVSLENLLFFARTYPASFKRLMLKQQGMRTTWEYPFAVAGVNISYMLIQLLELNSGRPKSLPGINFIKVLTEHEDAFDVLYCIAFEMMDAQWLAMRASYMQFKEVLEATRQQLERELSLEDLNGIHDLPACNLLYK

SEQ ID NO: 22785 - protein, 115 aa, Zea mays subsp. mays
  misc_feature (1)..(115): Ceres Seq. ID no. 12410089
MLKQQGMRTTWEYPFAVAGVNISYMLIQLLELNSGRPKSLPGINFIKVLTEHEDAFDVLYCIAFEMMDAQWLAMRASYMQFKEVLEATRQQLERELSLEDLNGIHDLPACNLLYK

SEQ ID NO: 22786 - protein, 109 aa, Zea mays subsp. mays
  misc_feature (1)..(109): Ceres Seq. ID no. 12410090
MRTTWEYPFAVAGVNISYMLIQLLELNSGRPKSLPGINFIKVLTEHEDAFDVLYCIAFEMMDAQWLAMRASYMQFKEVLEATRQQLERELSLEDLNGIHDLPACNLLYK

SEQ ID NO: 22787 - DNA, 1275 bp, Zea mays subsp. mays
  misc_feature (1)..(1275): Ceres Seq. ID no. 12410098
gagtcacatgctagcgtgcgtgtgcgtgtgcaacggctataccacctgcgcgacccaccgcgagcgcccgcagctaagctagctctcgctcgcgcgctctgggagaggagagatcaatggcgtcccgtggcagcatgacctgtagtcttcagctcgccgtcctcgtttccgccgccatcgcgctcgggttcggcgtccgggccggcgaggcgcagctgtccagcgagtactacggccagacgtgccccgtcgtgcaccgggtcgcgcggcgggtgctgaagaaggcgcacgaggccgacgtccgcatctacgccagcctcacccgcctccatttccacgactgcttcgtgcaaggctgcgacggctccatcctgctggacaacagctcgagcatcgtgtcggagaagttcgccacgcccaacaacaactcggcgcgcgggtaccccgtggtcgacgccgtcaaggcggcgctggaggagggcttgcccaggcgttgtctcctgcgctgacatactggcccatcgcccgccaagatctcggtcgaactgtccggcgggccaaggtggcgcgtgcctctcggccggcgcgacggcaccacggccaacatcaccgccgccaacaacctcccgagccccttcgacaacctcactacgctccagcagaagttcggcgccgtcggcctcgacgacaccgacctcgtcgcgctctcaggggcgcacacgttcgggcgcgtgcagtgccagttcgtgacggcgcggctgtacaacttcagcgggacgaaccggccggacccgacgctggacagggggtaccgggcgttcctctccctgcggtgcccgagggccggcaacgcgtcggcgctcaacgacctcgacccgaccacgccggacaccttcgacaacaattactacaccaacatcgaggcgcgccgtgggacgctgcagtccgaccaggagctgctgtcgacgcccggcgcgcccacggcgccgatcgtcggacggttcgccgccagccagaaggagttcttcaggagcttcgccaggtccatggtcaacatggggaacatccaggtgctgacggggagtcagggtgagatcaggaagaactgtaggatggtcaacggaagctagacccgtcgacggcacaagttactggtgaactgaaagcagttctgctgtatgtacgatgcctcaaacatgttgatgggataatggtgcgccgatcgatttatttgtcaaggagatccaataaattggttttttgcattttttttcc

SEQ ID NO: 22788 - protein, 130 aa, Zea mays subsp. mays
  misc_feature (1)..(130): Ceres Seq. ID no. 12410099
MASRGSMTCSLQLAVLVSAAIALGFGVRAGEAQLSSEYYGQTCPVVHRVARRVLKKAHEADVRIYASLTRLHFHDCFVQGCDGSILLDNSSSIVSEKFATPNNNSARGYPVVDAVKAALEEGLPRRCLLR

SEQ ID NO: 22789 - protein, 124 aa, Zea mays subsp. mays
  misc_feature (1)..(124): Ceres Seq. ID no. 12410100
MTCSLQLAVLVSAAIALGFGVRAGEAQLSSEYYGQTCPVVHRVARRVLKKAHEADVRIYASLTRLHFHDCFVQGCDGSILLDNSSSIVSEKFATPNNNSARGYPVVDAVKAALEEGLPRRCLLR

SEQ ID NO: 22790 - DNA, 1233 bp, Zea mays subsp. mays
  misc_feature (1)..(1233): Ceres Seq. ID no. 12410129
atgtataacgcgacccccctccccagtccccccagcggcaaggcggcaaccgttctcccgcgtcccgcactcccgccccttttccttttgctccttccttcctcgggaagcctagggcttaggctttaagcgccgcgatgtacggcggcggcggcggcggcgggcactacgacggaggcagcggtggcgccgggaacgctaacgcgctcttcggcggcgggggcttcatgccctcacagtccacggtggtcccggagaacagcggcctctctaagggtcggagcgcgcagacgctgctcccgctcaccgtgaaacagaccatggacgcggcgcaaaccagcggtgacaggtctaatttcgccatcaacggcgttgaggtgtctacgattaggcttgttggacgcatgctaggtaaggttgagcgtgtcacagatgttgtattcactcttgatgatggtactggcaagatagatgtgaatcgctgggaaaatgaggcttccgatgctaaggagatggctgatgctaataacgagaactatgtcatagtcattggcggtttgaaaggttttcaaggaaagcgccatgtagttgcctatgctgtgcggcgtgtgacaaacttcaatgaaataacctgtcactttctgcactgcattcaggtgcatatggagctcacagggttaaagatctattcttcagctgcaacatatggaggagtagcccatgccccatcacagccaaatccggttgatggaaactacatatccaacttggtcttgagtgtttttcatgacccatctgtcatggaccaggagcatggactgcacatcaaagatgtcatagatcgtctcaaactaccagatgatgtagtcagtgcggccatccaaggtcatgttgatgtgggcaacatttacaacacaattgatgacttccactacaaatctgtccggaatggatgaccacgttgcaagtccagcgttcaggctccgtgtaggtatggagccgtttcaaggaagaagaaatgtaaaccctcttcaggatcgcctatattttgcagataggcttcatggtcaacagcttagcatatcggtttaggtgtgtattgctctcatatgtaatgatacataagatgtgagtagactaggtctacctgcaggacatcagtccgttcctacggaaatttgttatgaacgttttacattctaagacctatataaccgtgaagcacgcaaatcg

SEQ ID NO: 22791 - protein, 272 aa, Zea mays subsp. mays
  misc_feature (1)..(272): Ceres Seq. ID no. 12410130
MYGGGGGGGHYDGGSGGAGNANALFGGGGFMPSQSTVVPENSGLSKGRSAQTLLPLTVKQTMDAAQTSGDRSNFAINGVEVSTIRLVGRMLGKVERVTDVVFTLDDGTGKIDVNRWENEASDAKEMADANNENYVIVIGGLKGFQGKRHVVAYAVRRVTNFNEITCHFLHCIQVHMELTGLKIYSSAATYGGVAHAPSQPNPVDGNYISNLVLSVFHDPSVMDQEHGLHIKDVIDRLKLPDDVVSAAIQGHVDVGNIYNTIDDFHYKSVRNG

SEQ ID NO: 22792 - protein, 242 aa, Zea mays subsp. mays
  misc_feature (1)..(242): Ceres Seq. ID no. 12410131
MPSQSTVVPENSGLSKGRSAQTLLPLTVKQTMDAAQTSGDRSNFAINGVEVSTIRLVGRMLGKVERVTDVVFTLDDGTGKIDVNRWENEASDAKEMADANNENYVIVIGGLKGFQGKRHVVAYAVRRVTNFNEITCHFLHCIQVHMELTGLKIYSSAATYGGVAHAPSQPNPVDGNYISNLVLSVFHDPSVMDQEHGLHIKDVIDRLKLPDDVVSAAIQGHVDVGNIYNTIDDFHYKSVRNG

SEQ ID NO: 22793 - protein, 211 aa, Zea mays subsp. mays
  misc_feature (1)..(211): Ceres Seq. ID no. 12410132
MDAAQTSGDRSNFAINGVEVSTIRLVGRMLGKVERVTDVVFTLDDGTGKIDVNRWENEASDAKEMADANNENYVIVIGGLKGFQGKRHVVAYAVRRVTNFNEITCHFLHCIQVHMELTGLKIYSSAATYGGVAHAPSQPNPVDGNYISNLVLSVFHDPSVMDQEHGLHIKDVIDRLKLPDDVVSAAIQGHVDVGNIYNTIDDFHYKSVRNG

SEQ ID NO: 22794 - DNA, 1466 bp, Zea mays subsp. mays
  misc_feature (1)..(1466): Ceres Seq. ID no. 12410153
aacaaaaaaaaaaccctagaactccaaaaccttcagccccacgctatggccctcgcactgcgcctccgtcgggtcctcgcggcggcctccaccgcggcacccctgctccgcccgtccacctcggtcgcccggccttgcccgctcgttcccctcgcctccccggtcgcgccgctcccgctgccgccgtggcgattcctgcccggcggcggcgccgggttcaggtccacggcggcggcggctgcgcggggcgggaccgactatgggacggacgacagcaagatctcccccgacgagatcctcttcgagggctgcgactacaaccactggctcatcaccatggacttcccggaccccaagccgtcgcgcgaagagatgatcgagacatacctccagactctcgccaaggtcgtcgggagttatgaggaggccaagaagaggatgtatgcttttagtacgacgacttatgttggttttcaggctgtaatgaccgaggaaatgtcagaaaaatttcgcggtttgcctggagtagttttcattttgcctgattcatatctatatccagaaacaaaggagtacggaggagacaaatatgacaatggtgtcatcactccaagaccaccacctgttcattatagcagaccatcaagaactgacaggaaccgtaactaccgaggaaactaccaggatggccctccacagcaaggaaattaccagaacaaccgtcctccaccagaaggtggttaccagaacaacccgccgcagcaaggaaactaccagacataccgctcgcagcaagatggaagaggctatgccccacagcagaattatgcacaaggtggtcaggatggtagaggtttggaaggaatgattacacagaccgttcaggctacaatggaccacctgattttcgaagtcaaactcagtaccaagggcatgtaaatccagctgggcaaggtcaaggttacaacaacccccaagagcgtagcaacttctcgcaagggcagggaggaggttttaggcctggtggtccttcagcacctgggtcttatggccaaccatcagcacctggatcttatggtcaacctaatacacttggtaactatgggcaggtacctccatcagtgaatcctggtggtaacagagttcctggtgtgaatcctagttatggtggggatggcagacagggggctggaccagcatatggtggagataactggcaaagaggttctggtcagtatcctagcccaggtgaaggacaaggaaactggcaggtatgagagcatttgatatacacatttcacttttaaaatgccgttactgtttgaattgaaatacagcagtttaaagttaaaccgggacatcctttgtttgaccagttctagattgaattcgtaaactgtgtgccgagtttcagatgtacgactacagtttttctccctgttaaatgttttttagatttatgagct

SEQ ID NO: 22795 - protein, 312 aa, Zea mays subsp. mays
  misc_feature (1)..(312): Ceres Seq. ID no. 12410154
NKKKTLELQNLQPHAMALALRLRRVLAAASTAAPLLRPSTSVARPCPLVPLASPVAPLPLPPWRFLPGGGAGFRSTAAAAARGGTDYGTDDSKISPDEILFEGCDYNHWLITMDFPDPKPSREEMIETYLQTLAKVVGSYEEAKKRMYAFSTTTYVGFQAVMTEEMSEKFRGLPGVVFILPDSYLYPETKEYGGDKYDNGVITPRPPPVHYSRPSRTDRNRNYRGNYQDGPPQQGNYQNNRPPPEGGYQNNPPQQGNYQTYRSQQDGRGYAPQQNYAQGGQDGRGLEGMITQTVQATMDHLIFEVKLSTKGM

SEQ ID NO: 22796 - protein, 297 aa, Zea mays subsp. mays
  misc_feature (1)..(297): Ceres Seq. ID no. 12410155
MALALRLRRVLAAASTAAPLLRPSTSVARPCPLVPLASPVAPLPLPPWRFLPGGGAGFRSTAAAAARGGTDYGTDDSKISPDEILFEGCDYNHWLITMDFPDPKPSREEMIETYLQTLAKVVGSYEEAKKRMYAFSTTTYVGFQAVMTEEMSEKFRGLPGVVFILPDSYLYPETKEYGGDKYDNGVITPRPPPVHYSRPSRTDRNRNYRGNYQDGPPQQGNYQNNRPPPEGGYQNNPPQQGNYQTYRSQQDGRGYAPQQNYAQGGQDGRGLEGMITQTVQATMDHLIFEVKLSTKGM

SEQ ID NO: 22797 - protein, 200 aa, Zea mays subsp. mays
  misc_feature (1)..(200): Ceres Seq. ID no. 12410156
MDFPDPKPSREEMIETYLQTLAKVVGSYEEAKKRMYAFSTTTYVGFQAVMTEEMSEKFRGLPGVVFILPDSYLYPETKEYGGDKYDNGVITPRPPPVHYSRPSRTDRNRNYRGNYQDGPPQQGNYQNNRPPPEGGYQNNPPQQGNYQTYRSQQDGRGYAPQQNYAQGGQDGRGLEGMITQTVQATMDHLIFEVKLSTKGM

SEQ ID NO: 22798 - DNA, 1339 bp, Zea mays subsp. mays
  misc_feature (1)..(1339): Ceres Seq. ID no. 12410169
aagtcgggttggttagaagaacccaatgcaagtgtgagtgagctgacggcacggcggacgcgctctcctctcctctcctcttcttccggctctccctctccgcatgccattccaacgcattacaggttggcttttggctatgcctatcctgcctacgaatgctacaagactgttgaactaaacaaaccagagattgcgcantcatattttggtgtcagtattggattttagttgccctgttgacagttttggagagatttggagatttcacaatatcatggctaccattttactcggaagcaaagctgatgttctttgtatacttgtggtaccctaagacaaagggaactacgtatgtttatggaactttctttaaaccatatatttctcagcatgagaatgaaatagaccggaatctccttgagctgagagctcgagccaccgacacggttgtcctttattttcagaaggctgcttcggcaggacaaagtactttctttgacgttttaaaatatgttgctgcccagtcaccttctcagaaatcaaggcaacgccttcatcaggaatcacagcagccgccacaacaacagcaaccacaagtgcaggtgcagcaagcgcaaccacaaaaacaagcagcacctgttatgcgcagagcatcatccattgctgctcggcaagcagcaatggcacagcaatctcaggagactaaacccgtttcatcttctcccaagatcaagcgtcaaacatcagcaagatctggttcagtggcatccacaaagcctccggtagctgcatccgcaccaaaacctggcggtagcccaaagaaaggcgaggtcaaacctgctgccggcccagttcaaactccaaccacaggtgccgattcaccaaaacccgagcctagcgccccatcactccctggagccgaaggggtggacaatatagccatcgatgaggccagtggtgacgccccagagggcgcagaagagcttgaccctgcgctcgaagaggagacgccgatggaggagacgatccgtgtgacgcgcgccaagctaaggaggcgcatgaccaccgaagatcctgctgggaattagctgcaggccattgtttttccttcccctgcacattgtgttggtgttttttttgggggggggggggggntaggctgtcatgttgtttggtgggatggagatgtactgttgaattggttctttgtgacacagctgattactgtaccttgtttccgtgctttcttagtgcccttgtgatttaagttgtaagtaacacttttcctccgcatgtgaatacatgttagtggcacgggcaacgaacgcaacattat

SEQ ID NO: 22799 - protein, 260 aa, Zea mays subsp. mays
  misc_feature (1)..(260): Ceres Seq. ID no. 12410170
MFFVYLWYPKTKGTTYVYGTFFKPYISQHENEIDRNLLELRARATDTVVLYFQKAASAGQSTFFDVLKYVAAQSPSQKSRQRLHQESQQPPQQQQPQVQVQQAQPQKQAAPVMRRASSIAARQAAMAQQSQETKPVSSSPKIKRQTSARSGSVASTKPPVAASAPKPGGSPKKGEVKPAAGPVQTPTTGADSPKPEPSAPSLPGAEGVDNIAIDEASGDAPEGAEELDPALEEETPMEETIRVTRAKLRRRMTTEDPAGN

SEQ ID NO: 22800 - protein, 148 aa, Zea mays subsp. mays
  misc_feature (1)..(148): Ceres Seq. ID no. 12410171
MRRASSIAARQAAMAQQSQETKPVSSSPKIKRQTSARSGSVASTKPPVAASAPKPGGSPKKGEVKPAAGPVQTPTTGADSPKPEPSAPSLPGAEGVDNIAIDEASGDAPEGAEELDPALEEETPMEETIRVTRAKLRRRMTTEDPAGN

SEQ ID NO: 22801 - protein, 135 aa, Zea mays subsp. mays
  misc_feature (1)..(135): Ceres Seq. ID no. 12410172
MAQQSQETKPVSSSPKIKRQTSARSGSVASTKPPVAASAPKPGGSPKKGEVKPAAGPVQTPTTGADSPKPEPSAPSLPGAEGVDNIAIDEASGDAPEGAEELDPALEEETPMEETIRVTRAKLRRRMTTEDPAGN

SEQ ID NO: 22802 - DNA, 1766 bp, Zea mays subsp. mays
  misc_feature (1)..(1766): Ceres Seq. ID no. 12410193
atcaggatcatcatcaggttctccgttccactccatggccttccctgctgtgcccctcctcgccgctctgctcctggtcgccgccacgcggctgtgggactacgtcttcgtgcgcctcgtatggcggccgtacgccatcaccaaggggttcagagagcaagggatccatggaccctcctacaggttcttcaagggctgcaacgaggagatcaggagcatgaaggagaagaccgacggtctcgtgctggacgtcggcgaccacaagtacctcccgcggatcgcgccgcactacctcgaatggagggctcagtacggagaaccatttctatattggtacggggcacaagcccgaatttgcatatttgactacgaactagcaaggcaaatcctttcgagcaagtctgggcatttcgtgaagaacgatgcgcaccctactttgttggctctggtcggcaagggactcgggttcatggaaggctctgactgggtgcgccatcgcagggtgatcaaccctgctttcaccattgacaagcttaagattgtgaccgagacgatgctggacttcgccgatagcatggcagatgagttggaagctgaagcatcccagaacgagaacggagaaacacaagtggatatatacaaacatttcagcgatctgacagttgacaatatcgcctacgccatctttggaagcagctacaagttaggcaaacaagtgttcgaggcacaaactgagctgctggggatcaccatggctactttccttgacgtgcccataccaggatccaaataccttccaacccaagcgaatcggcgaaaatggatgctggagacgaagctcaagagcttactcacgcggatcatacagccacggttagcaagcggtgagcacggaaacgatctgctgggcgtgatgctggactcctgcactgagaccaagcaaggagggaagcagcagcaagtggatcgtctgcgtctcagcttgagcatggaggagatcatacacgagtgcaagctgttcttcttcgctggccacgagaacacagcccttctcctcacgtggtccgtgtatttgctcagcatataccccgagtggcaagaaaggctccggaaggaggtcttgagggagttcgggagggacgctcctaaccccaacgcgctcaacagattgaaagagatgacaatggtgttgttcgagaccttgaggctctactcgcctgctctcttcatgcaaaggaagaccctggccgacatgaccgtggggccaataaaactgcccaaaggcactgcaattgtgatacccattccgatcatgcatcgagacaagcaggcatggggcgacgacgcagacgagttcagtccgatgagatttgcgaatgggatcacgggagcagcgaaagttcctcacggcctgctggcgttctcgatggggccaaggtcttgcatcggccagaacttgtcgatgctggaagccaagtcgacgctggccctgatgctccgcaagttctccttcgctctctcccctgactacgtgcacgcgcccgtggatctcttcactctcaaacctaagtttggccttcccgtcattctgaggccactggataatgttttgatttgagttgggcatatagtacaacaggaagtaacttaggtacatatcaaatttgctagctggtcaaaacgttatatgatgttctcaaccctccgttgttctatatcgttgaaaacaagtattttaatttaggtgcggtttggtttggcgctgc

SEQ ID NO: 22803 - protein, 538 aa, Zea mays subsp. mays
  misc_feature (1)..(538): Ceres Seq. ID no. 12410194
SGSSSGSPFHSMAFPAVPLLAALLLVAATRLWDYVFVRLVWRPYAITKGFREQGIHGPSYRFFKGCNEEIRSMKEKTDGLVLDVGDHKYLPRIAPHYLEWRAQYGEPFLYWYGAQARICIFDYELARQILSSKSGHFVKNDAHPTLLALVGKGLGFMEGSDWVRHRRVINPAFTIDKLKIVTETMLDFADSMADELEAEASQNENGETQVDIYKHFSDLTVDNIAYAIFGSSYKLGKQVFEAQTELLGITMATFLDVPIPGSKYLPTQANRRKWMLETKLKSLLTRIIQPRLASGEHGNDLLGVMLDSCTETKQGGKQQQVDRLRLSLSMEEIIHECKLFFFAGHENTALLLTWSVYLLSIYPEWQERLRKEVLREFGRDAPNPNALNRLKEMTMVLFETLRLYSPALFMQRKTLADMTVGPIKLPKGTAIVIPIPIMHRDKQAWGDDADEFSPMRFANGITGAAKVPHGLLAFSMGPRSCIGQNLSMLEAKSTLALMLRKFSFALSPDYVHAPVDLFTLKPKFGLPVILRPLDNVLI

SEQ ID NO: 22804 - protein, 527 aa, Zea mays subsp. mays
  misc_feature (1)..(527): Ceres Seq. ID no. 12410195
MAFPAVPLLAALLLVAATRLWDYVFVRLVWRPYAITKGFREQGIHGPSYRFFKGCNEEIRSMKEKTDGLVLDVGDHKYLPRIAPHYLEWRAQYGEPFLYWYGAQARICIFDYELARQILSSKSGHFVKNDAHPTLLALVGKGLGFMEGSDWVRHRRVINPAFTIDKLKIVTETMLDFADSMADELEAEASQNENGETQVDIYKHFSDLTVDNIAYAIFGSSYKLGKQVFEAQTELLGITMATFLDVPIPGSKYLPTQANRRKWMLETKLKSLLTRIIQPRLASGEHGNDLLGVMLDSCTETKQGGKQQQVDRLRLSLSMEEIIHECKLFFFAGHENTALLLTWSVYLLSIYPEWQERLRKEVLREFGRDAPNPNALNRLKEMTMVLFETLRLYSPALFMQRKTLADMTVGPIKLPKGTAIVIPIPIMHRDKQAWGDDADEFSPMRFANGITGAAKVPHGLLAFSMGPRSCIGQNLSMLEAKSTLALMLRKFSFALSPDYVHAPVDLFTLKPKFGLPVILRPLDNVLI

SEQ ID NO: 22805 - protein, 466 aa, Zea mays subsp. mays
  misc_feature (1)..(466): Ceres Seq. ID no. 12410196
MKEKTDGLVLDVGDHKYLPRIAPHYLEWRAQYGEPFLYWYGAQARICIFDYELARQILSSKSGHFVKNDAHPTLLALVGKGLGFMEGSDWVRHRRVINPAFTIDKLKIVTETMLDFADSMADELEAEASQNENGETQVDIYKHFSDLTVDNIAYAIFGSSYKLGKQVFEAQTELLGITMATFLDVPIPGSKYLPTQANRRKWMLETKLKSLLTRIIQPRLASGEHGNDLLGVMLDSCTETKQGGKQQQVDRLRLSLSMEEIIHECKLFFFAGHENTALLLTWSVYLLSIYPEWQERLRKEVLREFGRDAPNPNALNRLKEMTMVLFETLRLYSPALFMQRKTLADMTVGPIKLPKGTAIVIPIPIMHRDKQAWGDDADEFSPMRFANGITGAAKVPHGLLAFSMGPRSCIGQNLSMLEAKSTLALMLRKFSFALSPDYVHAPVDLFTLKPKFGLPVILRPLDNVLI

SEQ ID NO: 22806 - DNA, 1471 bp, Zea mays subsp. mays
  misc_feature (1)..(1471): Ceres Seq. ID no. 12410223
agtccacccccttcccttctttcccctttgcttgctgctgcctgcttctcgccgtcgccgcctcaattccctcctcctcgtccgtcgcctcgtccacgcgcacctcgtcctcctctccgttcccaccacctcctcgaccgcaccgtcgtcgtctagctagcggagcgagctgcgaccagatcggagagccaagcacccaggaagagggggccggggaacaagaagaagccgccggaagccgggcgtggacgtgtggtggttttctgccggcggctgacaagtggtgtaggctacccgctctggccatggatccgtcgggcggcgcgttcctgccgccgctgcagcaagggagctcctccttcccgcggtcctccagcaacgcgtcgctcgccaggagcggcagcggcggcggcggcgttggcgccgggcgcgggaccaggggcaggaagatgatgcgcagggtctgccgcggcgtcatcaccttcatcttcgccatcgctgggctgttcctgggagcggtgaccggcggtctgatcgggctggcgacggagagcggtctgttccgcggcaccgggatcggcgccatcactggcgcgctcgtctccatcgaggtcgtcgactcctccatccgcctctggcaggcgcgccgatccgggatctggagcatcctctacgtgctgaacgtgatctacagcctcctgacgggcaggctggtgcgcgagaaggtcgacccggcggtgcagcgggtggtccgcagccagatgaacgcggtggactcgtcgccgttcagggagtcgccggacctgttcgaggtggaggccaccaacggcatgccgcgggcgtccatcgacaagctccccgagtcgtggatcaccgaggagtacaggcgcgacgccgtcggcgacctctccggctgctccgtctgcctccaggatttccaggtcggggagaaggtgcggagcctgccggactgctggcacgtgttccacgtgccgtgcatcgacggctggctcatcaagcacggctcctgcccgctctgcaggaggaagctgtaggcggatcgaccggacgacgccatgaacgatgttcttctctgcgatcgagccgatgatgtgtgtgtgtgtgcccccgccgccaccaccgatagctgctgctaggatcggaggaggggaggaggaagaagagactgacatctatagaacccttaatttatagagagggcttttgctttgctacttgtacgtgctctactacgtacctattgcatcttttttttttttttgattcaccatgatcgacctccttcctcagatccatccatgcatgtaatataccctggaccggcttgtgcttcgttcgatccattccatgcatctccggactgtgatctcgatctggtgtaatatatataaaaaaactactagtatgtaccatcgcactttggacatctatacatgcatgctggttggtc

SEQ ID NO: 22807 - protein, 350 aa, Zea mays subsp. mays
  misc_feature (1)..(350): Ceres Seq. ID no. 12410224
STPFPSFPFACCCLLLAVAASIPSSSSVASSTRTSSSSPFPPPPRPHRRRLASGASCDQIGEPSTQEEGAGEQEEAAGSRAWTCGGFLPAADKWCRLPALAMDPSGGAFLPPLQQGSSSFPRSSSNASLARSGSGGGGVGAGRGTRGRKMMRRVCRGVITFIFAIAGLFLGAVTGGLIGLATESGLFRGTGIGAITGALVSIEVVDSSIRLWQARRSGIWSILYVLNVIYSLLTGRLVREKVDPAVQRVVRSQMNAVDSSPFRESPDLFEVEATNGMPRASIDKLPESWITEEYRRDAVGDLSGCSVCLQDFQVGEKVRSLPDCWHVFHVPCIDGWLIKHGSCPLCRRKL

SEQ ID NO: 22808 - protein, 249 aa, Zea mays subsp. mays
  misc_feature (1)..(249): Ceres Seq. ID no. 12410225
MDPSGGAFLPPLQQGSSSFPRSSSNASLARSGSGGGGVGAGRGTRGRKMMRRVCRGVITFIFAIAGLFLGAVTGGLIGLATESGLFRGTGIGAITGALVSIEVVDSSIRLWQARRSGIWSILYVLNVIYSLLTGRLVREKVDPAVQRVVRSQMNAVDSSPFRESPDLFEVEATNGMPRASIDKLPESWITEEYRRDAVGDLSGCSVCLQDFQVGEKVRSLPDCWHVFHVPCIDGWLIKHGSCPLCRRKL

SEQ ID NO: 22809 - protein, 201 aa, Zea mays subsp. mays
  misc_feature (1)..(201): Ceres Seq. ID no. 12410226
MMRRVCRGVITFIFAIAGLFLGAVTGGLIGLATESGLFRGTGIGAITGALVSIEVVDSSIRLWQARRSGIWSILYVLNVIYSLLTGRLVREKVDPAVQRVVRSQMNAVDSSPFRESPDLFEVEATNGMPRASIDKLPESWITEEYRRDAVGDLSGCSVCLQDFQVGEKVRSLPDCWHVFHVPCIDGWLIKHGSCPLCRRKL

SEQ ID NO: 22810 - DNA, 1632 bp, Zea mays subsp. mays
  misc_feature (1)..(1632): Ceres Seq. ID no. 12410235
agccctcttcctcgggaagatttcaaatccccgcggcctcttccatctcctgctcggcacggcacctccggctgcccgaaaaatttcgcacatcccagattcccgcccgctctggttcgcgccctcgtctggttcccttgccaacccggtcattcaacgtcgcagccaccccgcgcggctagggctgggactcgaggcctagggtttggctgtaagtttggtaacacgatggcgggggccgcgggggagagcagcggcgagcggcaggggacggtggagcggcggatgctgcggtcgcggtaccacgccgtgaagagcatcatcagcgatgagcgggatgagatgtcgagggcggattcggacaggttcacagccatcatccagcaggtggattgcctacacgagctcgtgcagaggcctagggagcaaatagcggatgcagaagctctgcttggcattacaaacactttggtaacttcggtgaggtcccactcaagtgaaggaatcagcccttctgatttcataacagctttactcaagaagtttgggcagcaagggaatcatgatgatgagtctgtctcattacgatggggtgatcttgggctttctgtttcacatatcttcaggcctgtgcctggatgctgtaccatgcttggtcctatgaatactgaagtaaagcaacggaaagttgtagctgtcggtaggaaacggactgcacggccaacagaaaatacctgtcctgaagagcttgctgagtcttcagaggaagtaaagacagacactgacaggaatgtcttagttatgtttgatatcctcaggcgaaagaagagcgcaaaattggaaaaccttgtgttgaataggctttcatttgcccaaacagttgaaaatgtttttgcactatctttcttagtgaaagatggtagggtggaaataactgtagatgatagcgggcatatagtacggccaaggaatgcacctgctgctagcgctatagcctcaggagaagtctcatacagtcattttgtttttagatttgacttcaaggactggaagcttatgaaagaagttgttacagagggagaagagctgttgccacataggacttcccagagcaatctttgcaacgaagaaaacgaccaaccaaatctggaggcacgtgcgcaaataacacctatcaggaaactcacccggaaccgaggattggtctttcaggatcatgtagtcgaggaaactcctgaagagaaccaagcgtctaagcgcaggcgccttttcaggaatcaagattgacctagcaattgcttggcatgagtagtgtaggcaggcaacctggcttgtgttgtatgcaaaaaattgcctgagcctgagtaacgtgtctttcactaggtctgttgtgccatgctgtcttgttcttggcacagctcgtgcttatctgaacttccagttgtgccagcggagtagagctgtaattataaattgtttgaagttctggtcacatcttgcaactacagaatggtgtttgtagggctgagtgtaactagctagcttggctcggtctggtctgggtcattaactcatttattatcatggcaagatgtgcctcgggtcagcttgttaggctgtcatagcttactg

SEQ ID NO: 22811 - protein, 428 aa, Zea mays subsp. mays
  misc_feature (1)..(428): Ceres Seq. ID no. 12410236
SPLPREDFKSPRPLPSPARHGTSGCPKNFAHPRFPPALVRALVWFPCQPGHSTSQPPRAARAGTRGLGFGCKFGNTMAGAAGESSGERQGTVERRMLRSRYHAVKSIISDERDEMSRADSDRFTAIIQQVDCLHELVQRPREQIADAEALLGITNTLVTSVRSHSSEGISPSDFITALLKKFGQQGNHDDESVSLRWGDLGLSVSHIFRPVPGCCTMLGPMNTEVKQRKVVAVGRKRTARPTENTCPEELAESSEEVKTDTDRNVLVMFDILRRKKSAKLENLVLNRLSFAQTVENVFALSFLVKDGRVEITVDDSGHIVRPRNAPAASAIASGEVSYSHFVFRFDFKDWKLMKEVVTEGEELLPHRTSQSNLCNEENDQPNLEARAQITPIRKLTRNRGLVFQDHVVEETPEENQASKRRRLFRNQD

SEQ ID NO: 22812 - protein, 352 aa, Zea mays subsp. mays
  misc_feature (1)..(352): Ceres Seq. ID no. 12410237
MAGAAGESSGERQGTVERRMLRSRYHAVKSIISDERDEMSRADSDRFTAIIQQVDCLHELVQRPREQIADAEALLGITNTLVTSVRSHSSEGISPSDFITALLKKFGQQGNHDDESVSLRWGDLGLSVSHIFRPVPGCCTMLGPMNTEVKQRKVVAVGRKRTARPTENTCPEELAESSEEVKTDTDRNVLVMFDILRRKKSAKLENLVLNRLSFAQTVENVFALSFLVKDGRVEITVDDSGHIVRPRNAPAASAIASGEVSYSHFVFRFDFKDWKLMKEVVTEGEELLPHRTSQSNLCNEENDQPNLEARAQITPIRKLTRNRGLVFQDHVVEETPEENQASKRRRLFRNQD

SEQ ID NO: 22813 - protein, 333 aa, Zea mays subsp. mays
  misc_feature (1)..(333): Ceres Seq. ID no. 12410238
MLRSRYHAVKSIISDERDEMSRADSDRFTAIIQQVDCLHELVQRPREQIADAEALLGITNTLVTSVRSHSSEGISPSDFITALLKKFGQQGNHDDESVSLRWGDLGLSVSHIFRPVPGCCTMLGPMNTEVKQRKVVAVGRKRTARPTENTCPEELAESSEEVKTDTDRNVLVMFDILRRKKSAKLENLVLNRLSFAQTVENVFALSFLVKDGRVEITVDDSGHIVRPRNAPAASAIASGEVSYSHFVFRFDFKDWKLMKEVVTEGEELLPHRTSQSNLCNEENDQPNLEARAQITPIRKLTRNRGLVFQDHVVEETPEENQASKRRRLFRNQD

SEQ ID NO: 22814 - DNA, 1725 bp, Zea mays subsp. mays
  misc_feature (1)..(1725): Ceres Seq. ID no. 12410243
aggaggtggggtgagttcgcgggtcgagcggaggagaagcttctggtggtggtggctctcgtcgtcaagcaggaggggagagaggagccggcggcggaggtgaatggcggtggagtaccactgctgctcggcggcctttttcgagcacatcgtcatcatcatcgtgctcgtgctcttcgcgggcctcatgtcgggcctcaccctgggcctcatgtcccttagcctcgtcgatctcgaggtcctcgccaagtccggcaccgagcaggatcgcaagcacgcagctaagattttacctgttgtgaagaaccagcaccttctgctatgcactcttctaatctgcaatgcggctgcaatggaggctttgcccatattccttgatagcttggtgacagcttggggtgctattttaatatcagtgacactgattctgctttttggtgagatcttaccacagtccatctgctcacattatgggctggctattggtgcctcagttgctccattagtccgtgtgcttgtttgggtctgctttcctattgcctatcctataagcaagctattggactatgtgctgggtcatggtcagacagctctcttccgtagagctgaactaaaaacacttgtcactctgcacgggaatgaggctggcaaaggtggagaattaacccatgatgaaactaccataatatcaggagctcttgaactgactgaaaagaaagctaaagatgctatgacacccttgtgtcaaacatttgcaattgatataaatgcaaaacttgacaggaatctaatgcaagaggtacttgagaaagggcatagcagagttcctgtgtattatgaaaagaaaacgaatattattggattgatattggtgaagaatttattatcagttagtgctgatgatgaggttcctataaaaagtgtaactatccgcaaaattcctcgtgttctagaagaaatgcccctctatgacatcctaaacgaatttcagaaaggtcacagccacatggctgtagtcataaggaaaaacaatccaagttaccaaccagctgaacaagctgctaatgatggtggaacttttgaggtgtccattgctattgatgataagaacaacgaaaaggtcgtgaaaaaccttccgccaccactgcaaagatggaagagctaccctaacactcagaacacatcaaatagaggaaataggcctaaaaaatggtccaaagatcaagcagacgttctgcaggtccataaagagcccttgcccacactgagcgaagatgaagaggctgttggtatcataaccatggaggatgtcatagaggagctcctgcaggaggagatatacgacgagacagacgtacatgaggaacaatgacgctggccttgcgccctccctccagctgttagaaagtgcgcttttatgcaaaacttatgtatagataggcagatacactgagagatattttagccgtagcccgtagccgttcattgtagtactataggtggctggctgtctcgagtattggtaaagactgttcggagtgcgtcgttcgttctcgtccagaacagctgggttctgggcatccggggaagaaacggaggcgttgacgcgtgtgtgtaggttcagaagaaaccccaataagataattgcgttgttatatgatgccgctcgcattattaggacgaatctgttgacatatagtcttataaattaaaaacaatgtttcg

SEQ ID NO: 22815 - protein, 422 aa, Zea mays subsp. mays
  misc_feature (1)..(422): Ceres Seq. ID no. 12410244
MAVEYHCCSAAFFEHIVIIIVLVLFAGLMSGLTLGLMSLSLVDLEVLAKSGTEQDRKHAAKILPVVKNQHLLLCTLLICNAAAMEALPIFLDSLVTAWGAILISVTLILLFGEILPQSICSHYGLAIGASVAPLVRVLVWVCFPIAYPISKLLDYVLGHGQTALFRRAELKTLVTLHGNEAGKGGELTHDETTIISGALELTEKKAKDAMTPLCQTFAIDINAKLDRNLMQEVLEKGHSRVPVYYEKKTNIIGLILVKNLLSVSADDEVPIKSVTIRKIPRVLEEMPLYDILNEFQKGHSHMAVVIRKNNPSYQPAEQAANDGGTFEVSIAIDDKNNEKVVKNLPPPLQRWKSYPNTQNTSNRGNRPKKWSKDQADVLQVHKEPLPTLSEDEEAVGIITMEDVIEELLQEEIYDETDVHEEQ

SEQ ID NO: 22816 - protein, 394 aa, Zea mays subsp. mays
  misc_feature (1)..(394): Ceres Seq. ID no. 12410245
MSGLTLGLMSLSLVDLEVLAKSGTEQDRKHAAKILPVVKNQHLLLCTLLICNAAAMEALPIFLDSLVTAWGAILISVTLILLFGEILPQSICSHYGLAIGASVAPLVRVLVWVCFPIAYPISKLLDYVLGHGQTALFRRAELKTLVTLHGNEAGKGGELTHDETTIISGALELTEKKAKDAMTPLCQTFAIDINAKLDRNLMQEVLEKGHSRVPVYYEKKTNIIGLILVKNLLSVSADDEVPIKSVTIRKIPRVLEEMPLYDILNEFQKGHSHMAVVIRKNNPSYQPAEQAANDGGTFEVSIAIDDKNNEKVVKNLPPPLQRWKSYPNTQNTSNRGNRPKKWSKDQADVLQVHKEPLPTLSEDEEAVGIITMEDVIEELLQEEIYDETDVHEEQ

SEQ ID NO: 22817 - protein, 386 aa, Zea mays subsp. mays
  misc_feature (1)..(386): Ceres Seq. ID no. 12410246
MSLSLVDLEVLAKSGTEQDRKHAAKILPVVKNQHLLLCTLLICNAAAMEALPIFLDSLVTAWGAILISVTLILLFGEILPQSICSHYGLAIGASVAPLVRVLVWVCFPIAYPISKLLDYVLGHGQTALFRRAELKTLVTLHGNEAGKGGELTHDETTIISGALELTEKKAKDAMTPLCQTFAIDINAKLDRNLMQEVLEKGHSRVPVYYEKKTNIIGLILVKNLLSVSADDEVPIKSVTIRKIPRVLEEMPLYDILNEFQKGHSHMAVVIRKNNPSYQPAEQAANDGGTFEVSIAIDDKNNEKVVKNLPPPLQRWKSYPNTQNTSNRGNRPKKWSKDQADVLQVHKEPLPTLSEDEEAVGIITMEDVIEELLQEEIYDETDVHEEQ

SEQ ID NO: 22818 - DNA, 1465 bp, Zea mays subsp. mays
  misc_feature (1)..(1465): Ceres Seq. ID no. 12410261
acggcagagccaccaccagcagcagccccagaaatcgagcaaacacaagctgctccatggcctcaccaacccgaacaccatcgcctccgccggcggtcgagcccatcgcgccttctctctcttcagaacatccgcctgtcaacccctcctgtgacggatccttctcgccggagaacccagcgccagctccacctcctccccctgctactccgcatcctcatactcccggcgatagctctccttcctcaattccgcatccctcggcgccacagcctcttccatctccgcctcctcatactcccgacgatagctctccttcctcaactccgcatccctcggcgccacagcccccaccatctccgcctccgccgagcgctgatgtttctcctcccctctcgcgacagggcgaaacgtcaccgcggcgcccattgccccctccctcacccgctccagtatccccgcctactccagcgccggcgtcctcggaagccaagtcggagcaggaggaggcggaatcggctagcgaatcggggagcatgacgctagccatcgttctagccaaaactgaagatgcaacgccgcctaaggcctcctcggccgaggcgtccccaaccagatcgccgcagaaggaatcggccgtcaccatcgcgaagctcctctccgccgaagacctcgcggcgatggaggctaaggccacgccggacaaggttacacctccgagcgacgctgggtccctcgccgccgccgttactaccgttgggggagtcagtggcggcgtggggtccaagaggtggctcctaggcggcgtcccggagaaggtgcggcgcgctgagctgaggagggccgagctagggtttagggtttcggccgccgtgttctgcctggtcgcgctctccgtcatggcggccgataccacgacgggctggtccggcgactccttccgccgctacaacgagtacaggtacgtacttgctgcgagcgtcgtgacttttacctactgtggattccagttggtagccgaggtgcattacgttgtcacagggagacacatgattcgagccccattccgcagctacttcaatcttgccatggatcagatgttagcttacctcctgttgtcagcatcttcagcagcgctttctcgtaatggtgtttggatgtcacggtttggaggggatcagtttaccaaactgatcaatgtctcggcttccatggcattcctagctttcattgctctgggtcttaactcggtgatctctgcttactgcttcttcagcttggtttcatagagctaccgttgtgcattgcatgatgtgaataatactacctgtatgcttcttggagcactgaaccttgattcatgtgaaatttctacatgatttctgtgaaatccctaaactccaaagtgggcctatattgtagcagtacattgagtcaaggttggcctttaaaattttggaagcgg

SEQ ID NO: 22819 - protein, 428 aa, Zea mays subsp. mays
  misc_feature (1)..(428): Ceres Seq. ID no. 12410262
GRATTSSSPRNRANTSCSMASPTRTPSPPPAVEPIAPSLSSEHPPVNPSCDGSFSPENPAPAPPPPPATPHPHTPGDSSPSSIPHPSAPQPLPSPPPHTPDDSSPSSTPHPSAPQPPPSPPPPSADVSPPLSRQGETSPRRPLPPPSPAPVSPPTPAPASSEAKSEQEEAESASESGSMTLAIVLAKTEDATPPKASSAEASPTRSPQKESAVTIAKLLSAEDLAAMEAKATPDKVTPPSDAGSLAAAVTTVGGVSGGVGSKRWLLGGVPEKVRRAELRRAELGFRVSAAVFCLVALSVMAADTTTGWSGDSFRRYNEYRYVLAASVVTFTYCGFQLVAEVHYVVTGRHMIRAPFRSYFNLAMDQMLAYLLLSASSAALSRNGVWMSRFGGDQFTKLINVSASMAFLAFIALGLNSVISAYCFFSLVS

SEQ ID NO: 22820 - protein, 410 aa, Zea mays subsp. mays
  misc_feature (1)..(410): Ceres Seq. ID no. 12410263
MASPTRTPSPPPAVEPIAPSLSSEHPPVNPSCDGSFSPENPAPAPPPPPATPHPHTPGDSSPSSIPHPSAPQPLPSPPPHTPDDSSPSSTPHPSAPQPPPSPPPPSADVSPPLSRQGETSPRRPLPPPSPAPVSPPTPAPASSEAKSEQEEAESASESGSMTLAIVLAKTEDATPPKASSAEASPTRSPQKESAVTIAKLLSAEDLAAMEAKATPDKVTPPSDAGSLAAAVTTVGGVSGGVGSKRWLLGGVPEKVRRAELRRAELGFRVSAAVFCLVALSVMAADTTTGWSGDSFRRYNEYRYVLAASVVTFTYCGFQLVAEVHYVVTGRHMIRAPFRSYFNLAMDQMLAYLLLSASSAALSRNGVWMSRFGGDQFTKLINVSASMAFLAFIALGLNSVISAYCFFSLVS

SEQ ID NO: 22821 - protein, 250 aa, Zea mays subsp. mays
  misc_feature (1)..(250): Ceres Seq. ID no. 12410264
MTLAIVLAKTEDATPPKASSAEASPTRSPQKESAVTIAKLLSAEDLAAMEAKATPDKVTPPSDAGSLAAAVTTVGGVSGGVGSKRWLLGGVPEKVRRAELRRAELGFRVSAAVFCLVALSVMAADTTTGWSGDSFRRYNEYRYVLAASVVTFTYCGFQLVAEVHYVVTGRHMIRAPFRSYFNLAMDQMLAYLLLSASSAALSRNGVWMSRFGGDQFTKLINVSASMAFLAFIALGLNSVISAYCFFSLVS

SEQ ID NO: 22822 - DNA, 1961 bp, Zea mays subsp. mays
  misc_feature (1)..(1961): Ceres Seq. ID no. 12410265
atatatttatattagaaaagaaaactctgttcaaccacccgccgagttcagcagcactctcctccgccctcttccaggtccagcagagattgggggcgcgtgggcatcggagattgcctcgggagcgcgtttcctggtcaactaaggccggcatgaagggctgctcagagcgcttgctgtttctgctgctgctgctggcatcgtcgtcgttactgtccgctgtgattgccgcgcagcagacttgccccgccgacctcgacagcaaatgcgatggtggcgcgtctgatgatgattgggagggggagttcttccccggcgtcccgaaaatcaagtatgagggtccaacaagcaagaaccctcttgcttataagtggtataacaaggaggaagtgattctcggtaagaagatgaaggattggatgcgcttcagtgttgcgttctggcacacgttccgcggtactggcgctgatcctttcggtgctcctacaaagacttggccttgggaggatggcacaaattcgttggccatggctaagagaagaatgagagctcactttgagttcatggagaagttgggagtcgacaaatggtgcttccatgacagggatattgccccggatgggaagacacttgaagaaacaaattctaacttggatgagatagtccagctggcaaagcagctgcagggtgagaccaatataaagccattgtggggtaccgcacagctctttatgcatccacgttacatgcatggtgctgctacgagcccagaggttaaagtatatgcttatgcggctgcacaagttaagaaagctttggaggtcactcactacctaggtggtgaaaactatgtgttctggggtggaagagagggttaccaaactcttctgaatactgatatgaagagagaacttgaccatctggctaactttcttcaagctgctgttgactacaagaagaagattggattcaacggaacactattgatagagcctaaaccacaggaaccaacaaaacaccagtatgactgggatgttgcgactacgtttgcttttctacagaagtacggtcttacaggagagttcaagattaatgttgagtgcaaccatgctactctatctggacacagctgccatcatgaattggagactgcacggattaatgggctgcttggaaatatcgatgcaaacactggtgatcctcaagttggttgggacacagatcagttcatgacagacattgcagaggctactttggttatgtcaagtgtagttaagaatggtggacttgcacctggtggtttcaactttgatgccaaattgcggagggaaagtactgatgttgaggacatgtttcttgtccatatctccggaatggacaccctggcacgtggcctccgcaacgttgccaagctgattgaggatggttccctagatgatcttgtccgcaagcggtaccagagctttgatagtgatatcggtgccttgatcgaggctgggaaaggagactttgagacgctagaaaagaaggttctagagtggggtgagcccactgttgcatccggcaagcaggaactggcggagattctgttccagtctgccctatagatggtgccatgtccataggtccaggaataagcaagggtgcgccctcctccgaacacgcactcgtcctcctcatcacggggatgttatggttccgtgcgatggactacctacaataagcatggaactgagataattaggatgtaatctgtcagaaaatttccagaattgttacctccttttgtttagagtggattagtggaatcaaactggagttagttaaagcttatcctgcattttggtgtggcgatcgtgtttggtccttccttgaatgctgtttcatagcgtggcaacgatgttgctgcttagtcctacaactggtggtagtaatggatcatagttcgaatgtttcttccc

SEQ ID NO: 22823 - protein, 534 aa, Zea mays subsp. mays
  misc_feature (1)..(534): Ceres Seq. ID no. 12410266
IFILEKKTLFNHPPSSAALSSALFQVQQRLGARGHRRLPRERVSWSTKAGMKGCSERLLFLLLLLASSSLLSAVIAAQQTCPADLDSKCDGGASDDDWEGEFFPGVPKIKYEGPTSKNPLAYKWYNKEEVILGKKMKDWMRFSVAFWHTFRGTGADPFGAPTKTWPWEDGTNSLAMAKRRMRAHFEFMEKLGVDKWCFHDRDIAPDGKTLEETNSNLDEIVQLAKQLQGETNIKPLWGTAQLFMHPRYMHGAATSPEVKVYAYAAAQVKKALEVTHYLGGENYVFWGGREGYQTLLNTDMKRELDHLANFLQAAVDYKKKIGFNGTLLIEPKPQEPTKHQYDWDVATTFAFLQKYGLTGEFKINVECNHATLSGHSCHHELETARINGLLGNIDANTGDPQVGWDTDQFMTDIAEATLVMSSVVKNGGLAPGGFNFDAKLRRESTDVEDMFLVHISGMDTLARGLRNVAKLIEDGSLDDLVRKRYQSFDSDIGALIEAGKGDFETLEKKVLEWGEPTVASGKQELAEILFQSAL

SEQ ID NO: 22824 - protein, 484 aa, Zea mays subsp. mays
  misc_feature (1)..(484): Ceres Seq. ID no. 12410267
MKGCSERLLFLLLLLASSSLLSAVIAAQQTCPADLDSKCDGGASDDDWEGEFFPGVPKIKYEGPTSKNPLAYKWYNKEEVILGKKMKDWMRFSVAFWHTFRGTGADPFGAPTKTWPWEDGTNSLAMAKRRMRAHFEFMEKLGVDKWCFHDRDIAPDGKTLEETNSNLDEIVQLAKQLQGETNIKPLWGTAQLFMHPRYMHGAATSPEVKVYAYAAAQVKKALEVTHYLGGENYVFWGGREGYQTLLNTDMKRELDHLANFLQAAVDYKKKIGFNGTLLIEPKPQEPTKHQYDWDVATTFAFLQKYGLTGEFKINVECNHATLSGHSCHHELETARINGLLGNIDANTGDPQVGWDTDQFMTDIAEATLVMSSVVKNGGLAPGGFNFDAKLRRESTDVEDMFLVHISGMDTLARGLRNVAKLIEDGSLDDLVRKRYQSFDSDIGALIEAGKGDFETLEKKVLEWGEPTVASGKQELAEILFQSAL

SEQ ID NO: 22825 - protein, 399 aa, Zea mays subsp. mays
  misc_feature (1)..(399): Ceres Seq. ID no. 12410268
MKDWMRFSVAFWHTFRGTGADPFGAPTKTWPWEDGTNSLAMAKRRMRAHFEFMEKLGVDKWCFHDRDIAPDGKTLEETNSNLDEIVQLAKQLQGETNIKPLWGTAQLFMHPRYMHGAATSPEVKVYAYAAAQVKKALEVTHYLGGENYVFWGGREGYQTLLNTDMKRELDHLANFLQAAVDYKKKIGFNGTLLIEPKPQEPTKHQYDWDVATTFAFLQKYGLTGEFKINVECNHATLSGHSCHHELETARINGLLGNIDANTGDPQVGWDTDQFMTDIAEATLVMSSVVKNGGLAPGGFNFDAKLRRESTDVEDMFLVHISGMDTLARGLRNVAKLIEDGSLDDLVRKRYQSFDSDIGALIEAGKGDFETLEKKVLEWGEPTVASGKQELAEILFQSAL

SEQ ID NO: 22826 - DNA, 1538 bp, Zea mays subsp. mays
  misc_feature (1)..(1538): Ceres Seq. ID no. 12410280
gcgatctcggtttttacccaaagacgaagccgacgacaaggagaacagagactccggcgagccccagccaccgtgaagccgcgcgaattgcaggagcgaagcaaaggagatgcttctcgaggagctgctccggtgccaaatccacgagtggtacccggccttccgtcgccactccatccccaccgtcatcatcccgctccccgccgccttcctccgctacctcgccggccagcgggcctaccccaacgccgacgccgacgctgaagatggcgctgatgaggagccactaccgttcctccttccggcgataacttccggccgccagcccttcgcgcccatccacgcgcaccaccccgaccccgactctctcctcaactccgacttgttcttcggctccagcagcgaagacgtcttcgaccccgacgccgaccacccgctccggccggaattcccggagctggaggtggccatcgactccgccatcgccgagctaggcggcgccgcgctccccaagctcaactggagcgcgcccaaggatgccaccttcatgtctgccgatggcacgagtcggtgcacgtgcttcgccgaggttgccatgctgctccgctcctccgactgtgtagcccacgaccttgcctccgcgcgacaatcatgcaaggatttcgtgcgcccggagggtgctcgacggaatgcccaaaaagttagtgccggttctgaggaaggtgctcgaccaaatgccgatgggattcgtggctgcgaaggcaccaatggagcaccaagtaattcaagcaagacaggtgaggagggaggcaagacaaatgatggggactgtgatgttgaagatgcaaccgaagaagaacataacgagaatacttgggtggacgatgggttccaatactaccttgccctccgcaagtggtacccaggcctacgccctgagtcagagttccgatgcttcgttcgggagcagaagctggttgctgtgtcccagagagacccatcagcttactacccatcactgcctggatggagttccgaggtgcaaccgaaaattgaggctttcttcaacgaagtgattgagccacagtttgcttcaaacaattatacgtttgatgtgtatgtgaggacagatgggcgagtcaagctcatagatttcaatccatggggtggttataccttgccgctgctgtttacttgggaggagcttgagaaggggagagggtctgagctggagtttcgggtggtcatgcagcagggtgcagtgaggccaggattgatgacagctgtgccatatgatatgctggattggggtgaggggagtggctgggatgtttttctgaagaaggctgacgaggagcttgacagacagatatgaactccctggatggtgattcatgattgtggttcgaaaaaaaagtcttaattatgctgtaggcacacaatttaaagtgatgactgctgttttttttacctgctactgtgctacatactagcagtcacctcctttcttaaaattgctatgcagtctcttgccattt

SEQ ID NO: 22827 - protein, 421 aa, Zea mays subsp. mays
  misc_feature (1)..(421): Ceres Seq. ID no. 12410281
MLLEELLRCQIHEWYPAFRRHSIPTVIIPLPAAFLRYLAGQRAYPNADADAEDGADEEPLPFLLPAITSGRQPFAPIHAHHPDPDSLLNSDLFFGSSSEDVFDPDADHPLRPEFPELEVAIDSAIAELGGAALPKLNWSAPKDATFMSADGTSRCTCFAEVAMLLRSSDCVAHDLASARQSCKDFVRPEGARRNAQKVSAGSEEGARPNADGIRGCEGTNGAPSNSSKTGEEGGKTNDGDCDVEDATEEEHNENTWVDDGFQYYLALRKWYPGLRPESEFRCFVREQKLVAVSQRDPSAYYPSLPGWSSEVQPKIEAFFNEVIEPQFASNNYTFDVYVRTDGRVKLIDFNPWGGYTLPLLFTWEELEKGRGSELEFRVVMQQGAVRPGLMTAVPYDMLDWGEGSGWDVFLKKADEELDRQI

SEQ ID NO: 22828 - protein, 275 aa, Zea mays subsp. mays
  misc_feature (1)..(275): Ceres Seq. ID no. 12410282
MSADGTSRCTCFAEVAMLLRSSDCVAHDLASARQSCKDFVRPEGARRNAQKVSAGSEEGARPNADGIRGCEGTNGAPSNSSKTGEEGGKTNDGDCDVEDATEEEHNENTWVDDGFQYYLALRKWYPGLRPESEFRCFVREQKLVAVSQRDPSAYYPSLPGWSSEVQPKIEAFFNEVIEPQFASNNYTFDVYVRTDGRVKLIDFNPWGGYTLPLLFTWEELEKGRGSELEFRVVMQQGAVRPGLMTAVPYDMLDWGEGSGWDVFLKKADEELDRQI

SEQ ID NO: 22829 - protein, 259 aa, Zea mays subsp. mays
  misc_feature (1)..(259): Ceres Seq. ID no. 12410283
MLLRSSDCVAHDLASARQSCKDFVRPEGARRNAQKVSAGSEEGARPNADGIRGCEGTNGAPSNSSKTGEEGGKTNDGDCDVEDATEEEHNENTWVDDGFQYYLALRKWYPGLRPESEFRCFVREQKLVAVSQRDPSAYYPSLPGWSSEVQPKIEAFFNEVIEPQFASNNYTFDVYVRTDGRVKLIDFNPWGGYTLPLLFTWEELEKGRGSELEFRVVMQQGAVRPGLMTAVPYDMLDWGEGSGWDVFLKKADEELDRQI

SEQ ID NO: 22830 - DNA, 1343 bp, Zea mays subsp. mays
  misc_feature (1)..(1343): Ceres Seq. ID no. 12410293
atatcttagttgcacggttaggtaagacatatggacacaggcagttgcgtctctgtctcttatatacatatgctagatttgctatattgagttgacatgccgttagttgcgatttgcgaagctagctcccaccatctgcgacgccatgtcttcttcctctgtccaacaaacggcctttcccgagcaagaagccgatgcggaaggcgaaacgaaccctgagctctaccagcatttcgccaacttggtctcctccctgccgagctccaaaggcttgtccaacaacaaattctaccgccacgaccaaggctggcactgcagcgtggtgggcatagtgggcgccatggtcgccgacgcgtgcttcagcgcgcgcccctcggacgtcatcgtcgccaccctgcccaagtccggcaccacgtggatgaagtcgctcctgtacgccaccgtgcaccggagagagcgtcccgtcgtcggcgccgccgccgaccagcatcctctcaacagctggggcccccacgaactcatcaagttcttcgagtaccagctctacacgcgggacagggtcccggacctggacaggctccccgaccctcggctcttcgcgacgcacgtccctttcgtgtcgctgccgagctccgtggtcgccacgccgggctgcaagatcgtctacgtgtgccgcgaccccaaggaccacctcgtctccctgtgggacttcgtcaacaaatacttcagggtcaaggatgggctcgagcctctctccgtggaggccgccgccgagctgttctgcgccggcctgaccccgttcgggccgtactgggaccacgtgctcggctactggcgcgcgcaccgcgcggaccccgacaaggtgctcttcttcaggtacgaggagatgcagagggaccccgcggcgcacgtccgcaggctggcggagttcgtcggcctcccattcagctccgaggaggaggacggcggcgtggtggatgccgtcgtggggctgtgctcgttcgagcgcatgaggggcatggcgccgaccaaggcgtggcaggactgagttcccgatcggcgtggtgcccaacagctccttcttccggcagggcgtggtgggggactgggtgaaccacctgtcaccggagatggcgcgccgcattgacgcgatcactgcagacaagttcaggggttcgagtctcgtcgtctagctagctgttacggatcaatcatcactcatcatcagtgcgccactctaccgtggtttctcaaatgctcaataatgcaaggactacctattagtattctatatctatactattctattaataagaacttatatatgttgctatcgcggctcc

SEQ ID NO: 22831 - protein, 300 aa, Zea mays subsp. mays
  misc_feature (1)..(300): Ceres Seq. ID no. 12410294
MSSSSVQQTAFPEQEADAEGETNPELYQHFANLVSSLPSSKGLSNNKFYRHDQGWHCSVVGIVGAMVADACFSARPSDVIVATLPKSGTTWMKSLLYATVHRRERPVVGAAADQHPLNSWGPHELIKFFEYQLYTRDRVPDLDRLPDPRLFATHVPFVSLPSSVVATPGCKIVYVCRDPKDHLVSLWDFVNKYFRVKDGLEPLSVEAAAELFCAGLTPFGPYWDHVLGYWRAHRADPDKVLFFRYEEMQRDPAAHVRRLAEFVGLPFSSEEEDGGVVDAVVGLCSFERMRGMAPTKAWQD

SEQ ID NO: 22832 - protein, 235 aa, Zea mays subsp. mays
  misc_feature (1)..(235): Ceres Seq. ID no. 12410295
MVADACFSARPSDVIVATLPKSGTTWMKSLLYATVHRRERPVVGAAADQHPLNSWGPHELIKFFEYQLYTRDRVPDLDRLPDPRLFATHVPFVSLPSSVVATPGCKIVYVCRDPKDHLVSLWDFVNKYFRVKDGLEPLSVEAAAELFCAGLTPFGPYWDHVLGYWRAHRADPDKVLFFRYEEMQRDPAAHVRRLAEFVGLPFSSEEEDGGVVDAVVGLCSFERMRGMAPTKAWQD

SEQ ID NO: 22833 - protein, 209 aa, Zea mays subsp. mays
  misc_feature (1)..(209): Ceres Seq. ID no. 12410296
MKSLLYATVHRRERPVVGAAADQHPLNSWGPHELIKFFEYQLYTRDRVPDLDRLPDPRLFATHVPFVSLPSSVVATPGCKIVYVCRDPKDHLVSLWDFVNKYFRVKDGLEPLSVEAAAELFCAGLTPFGPYWDHVLGYWRAHRADPDKVLFFRYEEMQRDPAAHVRRLAEFVGLPFSSEEEDGGVVDAVVGLCSFERMRGMAPTKAWQD

SEQ ID NO: 22834 - DNA, 1631 bp, Zea mays subsp. mays
  misc_feature (1)..(1631): Ceres Seq. ID no. 12410297
gcgcagcaatcctgcctcgcttccctccaaattcccaaagctctcgcgcgcggtgccatggcggagcgcctcgccgcctccctcctccctgccgcctcgccgtccccgtccgcccgccgcgcaacggtcgcagccgcagccgccgcctctttcccctccccatgctccgcccgcgcggggctgcgcctacgctcccgcccgcccctcttctcgcagaaggcggccgggcgcgggtgtggcctgcgggtggtgcggtgcatggcagcgtcggacgcggcgcagctcaaggccgcgcgggaggacatcaaggaactccttaagagcacatactgccaccccatcatggtccgtctggggtggcatgattctggtacctatgacaaggatattaaggactggccacagcgaggtggagctaatggaagtttaaggttcgatgctgagctgagtcatggagccaatgccggcctgattaatgcattgaagcttatccagcctatcaaggacaaatacccaggtatcacttatgcagatttgttccagttagcaagtgctacggcgattgaggaagctggtggtccaaaacttccaatgaaatatggacgtgttgatgtcacagcagctgaacagtgtccgcccgaggggaggcttcctgatgctggcccacgtgatcctgctgaacaccttagggaggtattttatagaatgggccttgatgacaaggaaattgttgcactatctggagcacacacacttggaagagcaaggcctgaccggagtggctggggaaagctagaaacaaaatatactaaggatgggcctggtgagcctggagggcaatcatggacagttgagtggttgaagtttgataatagttacttcaaggagatgaagttattttttttgaacgaaattcaggacatgaagtttttgagccagcttccctggaaagagcagaaggaacaggatcttctagttttgcctacagatgctgcattatttgaggacccatcgttcaaggtatacgcagaaaagtatgcagatgaccaggaagcgttctttaaagactatggtgaagctcatgctaagctgagcgatcttggtgcaaagtttgatcctcctgagggattctcactcgacgatgacacaagctcttcaccttccgacgagaagacggaagaacctacactggtagcggtaggagcggcagtagcaacagcgacagcggacgacaacaacggcgcagctccgcagccggagcccttcgtcgctgccaaatactcgtatggaaagagggagttgtcggatgcgatgaagcaaaagatcagggcggagtacgaggggtttggaggcagcccggacaagcccatgcagtccaactacttcctcaacatcatgatcctgattgcggggttggcgttcttgacatctctgcttgggaactgagtgttatatcatcatatgattatgatccgatttctgaagtctacgagtgtccactattgcaaactctgtaaacgtatgaaacatatctacgactagcattagagctacgtacactgtgcaaacagtttttttttttcgcgaattttggagagagacgagcaaaagaaatgtataacgagtgttcg

SEQ ID NO: 22835 - protein, 481 aa, Zea mays subsp. mays
  misc_feature (1)..(481): Ceres Seq. ID no. 12410298
AQQSCLASLQIPKALARGAMAERLAASLLPAASPSPSARRATVAAAAAASFPSPCSARAGLRLRSRPPLFSQKAAGRGCGLRVVRCMAASDAAQLKAAREDIKELLKSTYCHPIMVRLGWHDSGTYDKDIKDWPQRGGANGSLRFDAELSHGANAGLINALKLIQPIKDKYPGITYADLFQLASATAIEEAGGPKLPMKYGRVDVTAAEQCPPEGRLPDAGPRDPAEHLREVFYRMGLDDKEIVALSGAHTLGRARPDRSGWGKLETKYTKDGPGEPGGQSWTVEWLKFDNSYFKEMKLFFLNEIQDMKFLSQLPWKEQKEQDLLVLPTDAALFEDPSFKVYAEKYADDQEAFFKDYGEAHAKLSDLGAKFDPPEGFSLDDDTSSSPSDEKTEEPTLVAVGAAVATATADDNNGAAPQPEPFVAAKYSYGKRELSDAMKQKIRAEYEGFGGSPDKPMQSNYFLNIMILIAGLAFLTSLLGN

SEQ ID NO: 22836 - protein, 462 aa, Zea mays subsp. mays
  misc_feature (1)..(462): Ceres Seq. ID no. 12410299
MAERLAASLLPAASPSPSARRATVAAAAAASFPSPCSARAGLRLRSRPPLFSQKAAGRGCGLRVVRCMAASDAAQLKAAREDIKELLKSTYCHPIMVRLGWHDSGTYDKDIKDWPQRGGANGSLRFDAELSHGANAGLINALKLIQPIKDKYPGITYADLFQLASATAIEEAGGPKLPMKYGRVDVTAAEQCPPEGRLPDAGPRDPAEHLREVFYRMGLDDKEIVALSGAHTLGRARPDRSGWGKLETKYTKDGPGEPGGQSWTVEWLKFDNSYFKEMKLFFLNEIQDMKFLSQLPWKEQKEQDLLVLPTDAALFEDPSFKVYAEKYADDQEAFFKDYGEAHAKLSDLGAKFDPPEGFSLDDDTSSSPSDEKTEEPTLVAVGAAVATATADDNNGAAPQPEPFVAAKYSYGKRELSDAMKQKIRAEYEGFGGSPDKPMQSNYFLNIMILIAGLAFLTSLLGN

SEQ ID NO: 22837 - protein, 395 aa, Zea mays subsp. mays
  misc_feature (1)..(395): Ceres Seq. ID no. 12410300
MAASDAAQLKAAREDIKELLKSTYCHPIMVRLGWHDSGTYDKDIKDWPQRGGANGSLRFDAELSHGANAGLINALKLIQPIKDKYPGITYADLFQLASATAIEEAGGPKLPMKYGRVDVTAAEQCPPEGRLPDAGPRDPAEHLREVFYRMGLDDKEIVALSGAHTLGRARPDRSGWGKLETKYTKDGPGEPGGQSWTVEWLKFDNSYFKEMKLFFLNEIQDMKFLSQLPWKEQKEQDLLVLPTDAALFEDPSFKVYAEKYADDQEAFFKDYGEAHAKLSDLGAKFDPPEGFSLDDDTSSSPSDEKTEEPTLVAVGAAVATATADDNNGAAPQPEPFVAAKYSYGKRELSDAMKQKIRAEYEGFGGSPDKPMQSNYFLNIMILIAGLAFLTSLLGN

SEQ ID NO: 22838 - DNA, 1481 bp, Zea mays subsp. mays
  misc_feature (1)..(1481): Ceres Seq. ID no. 12410320
gccaaccgatcctcctcctcctcgctcgacgagtcgtctgtgagaacaatggcaactgccgcgggtggagccaccgccggctcgcgccgtcgggcgctgctcctgatcgcgaactacgccgcgctgctggtggggtccgtctcgtcgagcctgctgtccaggttctacttcgcgcgaggcgggcggaaccggtgggtggtgacgctggtgcagtcggcgggcttcccactgctggtcgtcgccgtcctcgtcgccggccgccccgccgccgcgccgcgccccttcacgtggttctcgaggcggttcctcacggtgtgcctcgtcatcggcgcgctcatgggcgccaacaacctgctcttctcgtacagcacgtcgttcctgcccgtgtccacgtcgtcgctgctgctgtcgacgcagttggcgttcacgctcgtgctggccgccgtcatcgtccgccacccgctcaccttcgtcaacctcaatgccgtcgtgctcctgaccgtcagctccgtgctcctggcgctccgctcgggggactccggcgagaacccggacgggggcggcgcggccgcggcgcactacttcgccgggtacgtggtcacgctgggcgcggcggggctgttcgccgcgtacctgcccgtcatggagctcctgtaccgccaggccgtgtccggcgggttcgtcctggccgtggaggtgcaggcggtgatgcaggccatggcctcgctggtggcggcgatcgggctggcggccaagggaggcctgggcggcgacgtggcgcgctggaagggctcggcggcgctctactgggtcgtggtgtccaccctggtcctgacttggcaggcgtgcttcatgggcacggcgggggtgatctacctcacgtcgtcgctacacagcggcgtgtgcatgaccgccgtgctgacggcgaacgtgctgggcggcgtgttggtgttcggcgacccattcggcgccgagaagggcatcgcgaccgcgctctgcgcctggggcctcgcctcctacctctacggcgagtacaccaagaaaaagaaagaagaagaggatgaggccgtcgccgacgcgtccgcttccgacgccgacagcgtccggaagagccttacaggcggcgccggagacgagctagaagacgtctgaaaacaaactaaaggccacaggggaatgaaccgtgtgatcagggacgaagcaagaatggaaactgaaaagggtgtagctgcagttgttgagtcatgttagatcgatggattataggcaaagttacaagcaaccaaacttgtaactgatggccagctcttctggctgctagctagtagctattaatctagtcatgaggtttcactagcggtttaagtgatcagggtttagtactttagtgtagtgtggggtgggtggaatacaacatgtaaaccagctgttcctcctccttactcactgtcgtcatcaatattcaatagccgccgttgttg

SEQ ID NO: 22839 - protein, 383 aa, Zea mays subsp. mays
  misc_feature (1)..(383): Ceres Seq. ID no. 12410321
ANRSSSSSLDESSVRTMATAAGGATAGSRRRALLLIANYAALLVGSVSSSLLSRFYFARGGRNRWVVTLVQSAGFPLLVVAVLVAGRPAAAPRPFTWFSRRFLTVCLVIGALMGANNLLFSYSTSFLPVSTSSLLLSTQLAFTLVLAAVIVRHPLTFVNLNAVVLLTVSSVLLALRSGDSGENPDGGGAAAAHYFAGYVVTLGAAGLFAAYLPVMELLYRQAVSGGFVLAVEVQAVMQAMASLVAAIGLAAKGGLGGDVARWKGSAALYWVVVSTLVLTWQACFMGTAGVIYLTSSLHSGVCMTAVLTANVLGGVLVFGDPFGAEKGIATALCAWGLASYLYGEYTKKKKEEEDEAVADASASDADSVRKSLTGGAGDELEDV

SEQ ID NO: 22840 - protein, 367 aa, Zea mays subsp. mays
  misc_feature (1)..(367): Ceres Seq. ID no. 12410322
MATAAGGATAGSRRRALLLIANYAALLVGSVSSSLLSRFYFARGGRNRWVVTLVQSAGFPLLVVAVLVAGRPAAAPRPFTWFSRRFLTVCLVIGALMGANNLLFSYSTSFLPVSTSSLLLSTQLAFTLVLAAVIVRHPLTFVNLNAVVLLTVSSVLLALRSGDSGENPDGGGAAAAHYFAGYVVTLGAAGLFAAYLPVMELLYRQAVSGGFVLAVEVQAVMQAMASLVAAIGLAAKGGLGGDVARWKGSAALYWVVVSTLVLTWQACFMGTAGVIYLTSSLHSGVCMTAVLTANVLGGVLVFGDPFGAEKGIATALCAWGLASYLYGEYTKKKKEEEDEAVADASASDADSVRKSLTGGAGDELEDV

SEQ ID NO: 22841 - protein, 353 aa, Zea mays subsp. mays
  misc_feature (1)..(353): Ceres Seq. ID no. 12410323
QPILLLLARRVVCENNGNCRGWSHRRLAPSGAAPDRELRRAAGGVRLVEPAVQVLLRARRAEPVGGDAGAVGGLPTAGRRRPRRRPPRRRAAPLHVVLEAVPHGVPRHRRAHGRQQPALLVQHVVPARVHVVAAAVDAVGVHARAGRRHRPPPAHLRQPQCRRAPDRQLRAPGAPLGGLRREPGRGRRGRGALLRRVRGHAGRGGAVRRVPARHGAPVPPGRVRRVRPGRGGAGGDAGHGLAGGGDRAGGQGRPGRRRGALEGLGGALLGRGVHPGPDLAGVLHGHGGGDLPHVVATQRRVHDRRADGERAGRRVGVRRPIRRREGHRDRALRLGPRLLPLRRVHQEKERRRG

SEQ ID NO: 22842 - DNA, 1338 bp, Zea mays subsp. mays
  misc_feature (1)..(1338): Ceres Seq. ID no. 12410332
aagcccattcgcgtcccgtcccgtcccgtcaaacaagcactcaaacctccctcccaagccctcttttttccctcgccgcggcgcaggcagagcagaggcagcagcatgccgccgttcgccgcccgcctggccgcaccggtcgccttggccgcgctgctgctcgccctcctgctcgcggcgccggcctcggccgccaacttcacctgcgccacggtgggcaaaacgtgccagtcggcgatcgggtacgcggtgcccaacggcgaccacgtacggggagctggtggcgcggttcaacgccaccacgacgctggcggagctgctgggcgccaacggcctccccgccacgacgccggcctcgacgccgctggcggccaaggccacggtgcgcgtgccgttccggtgccggtgcgggagcaacggcgtggggcagtcggacgggggacccttctacgtggtgtacccgctggacgggctggaccacatcgcgcgggaggtgttcggcgccttcgtcacctaccaggagatcgccaccgccaacaacatcaccaacgtcaacctcatcgtcgtcgggcagaagctcaggatcccgctgccctgcacctgcgaccaggtggacggcgccgacgtcatgcacttcgcctacagcgtcgccaagggggacgacccgcccggcatcgccgccaggttcggggtcaccgagaccacgctgctgagtgtgaataagatcaccgaccccaagaccagcctgcagcaggggcagatcctggatgtccccctccctgtgtgcaagtcatcggtcggcaacgcctcggctgactacaacctgctcgtcccgaacggcacctacgtgctcaccgccgacgactgcatccagtgcagctgcagcgcgagcaactacgagcaactgcactccggtgaaaggcggaaggtgcccggcggtgccgccgtgcagtggaggcctgacgctcgggcaggtcaacggcaccggttgcgcgtccaggatgtgcgcttacagcggttataccaacaccacgtccctcaccatacataccagccttgtgcctgcaaatgagactgcgtgccagaagggaggagctgcgagagcggagtttgccgggtccgtgttgaggacgtctctcatcgccttcatcatgtcgctgatcctcatctgcttgctatagacgttagagcagtagatggtgtattatatgccactgtcagatactcagattgctgttgtggtctattcattggcgattggtctagctgtttgaataaagcaaacattaaagtttgcatctgtgagtgaatacgtatttattagaattgggatgatcc

SEQ ID NO: 22843 - protein, 356 aa, Zea mays subsp. mays
  misc_feature (1)..(356): Ceres Seq. ID no. 12410333
SPFASRPVPSNKHSNLPPKPSFFPRRGAGRAEAAACRRSPPAWPHRSPWPRCCSPSCSRRRPRPPTSPAPRWAKRASRRSGTRCPTATTYGELVARFNATTTLAELLGANGLPATTPASTPLAAKATVRVPFRCRCGSNGVGQSDGGPFYVVYPLDGLDHIAREVFGAFVTYQEIATANNITNVNLIVVGQKLRIPLPCTCDQVDGADVMHFAYSVAKGDDPPGIAARFGVTETTLLSVNKITDPKTSLQQGQILDVPLPVCKSSVGNASADYNLLVPNGTYVLTADDCIQCSCSASNYEQLHSGERRKVPGGAAVQWRPDARAGQRHRLRVQDVRLQRLYQHHVPHHTYQPCACK

SEQ ID NO: 22844 - protein, 240 aa, Zea mays subsp. mays
  misc_feature (1)..(240): Ceres Seq. ID no. 12410334
KPIRVPSRPVKQALKPPSQALFFPSPRRRQSRGSSMPPFAARLAAPVALAALLLALLLAAPASAANFTCATVGKTCQSAIGYAVPNGDHVRGAGGAVQRHHDAGGAAGRQRPPRHDAGLDAAGGQGHGARAVPVPVREQRRGAVGRGTLLRGVPAGRAGPHRAGGVRRLRHLPGDRHRQQHHQRQPHRRRAEAQDPAALHLRPGGRRRRHALRLQRRQGGRPARHRRQVRGHRDHAAECE

SEQ ID NO: 22845 - protein, 236 aa, Zea mays subsp. mays
  misc_feature (1)..(236): Ceres Seq. ID no. 12410335
AHSRPVPSRQTSTQTSLPSPLFSLAAAQAEQRQQHAAVRRPPGRTGRLGRAAARPPARGAGLGRQLHLRHGGQNVPVGDRVRGAQRRPRTGSWWRGSTPPRRWRSCWAPTASPPRRRPRRRWRPRPRCACRSGAGAGATAWGSRTGDPSTWCTRWTGWTTSRGRCSAPSSPTRRSPPPTTSPTSTSSSSGRSSGSRCPAPATRWTAPTSCTSPTASPRGTTRPASPPGSGSPRPRC

SEQ ID NO: 22846 - DNA, 1127 bp, Zea mays subsp. mays
  misc_feature (1)..(1127): Ceres Seq. ID no. 12410358
aaatcacctcacacaacaagctgcaccgcagcaacgaacacgaaccttggcagaacgaagctgaagtagttcgctgtgaacccagtatggcaaacgcgccgaggatcctggccctcggcctgctagcgctcctgtgcgctgccgccggcccggccgccgcgcagaactgcggctgccagccaaacttctgctgcagcaagttcggctactgcggcacgaccgacgcctactgcggcgacgggtgccagtcgggcccgtgccgctcggacggcggcggcggcggcggcggcggcggaggcggcggaggcagtggcggtgcgaacgtggctaatgtggtcaccgacgcgttcttcaacggcatcaagaaccaggccgggagcgggtgcgagggcaagaacttctacacccggagcgcgttcctgagcgccgtcaacaagtacccgggcttcgcccatggcgggacggaggtggagggcaagcgcgagatcgccgccttcttcgcgcacgtcacgcacgagaccggacatttctgctacatcagcgagatcaacaagagcaacgcctactgcgacgcgagcaacaggcagtggccgtgcgcggcggggcagaagtactacgggcgcggcccgctgcagatctcgtggaactacaactacgggcccgccgggagggacatcggcttcaacgggctcgccgaccccaacagggtggcgcaggacgccgtgatcgcgttcaagacggcgctctggttctggatgaacaacgtgcaccgtgtgatgccgcagggcttcggcgccaccatcagggccatcaacggcgccctcgagtgcaacgggaacaaccccgcccagatgaacgcgcgcgtcggctactacaagcagtactgccagcagctccgcgtcgacccagggcccaacctcacttgctaggccagcagctcctgctagctcgtccacaataaatgttcggcgtcgcaccctcgcgaaaccaagagtttactgactagtacgagctagctagcatgcagtaataataatcatcgtaataataataataaaacgacggggctgagccactttgttcgacctgtatgaataatgaaacaactgtatgttccctcggtacgc

SEQ ID NO: 22847 - protein, 308 aa, Zea mays subsp. mays
  misc_feature (1)..(308): Ceres Seq. ID no. 12410359
ITSHNKLHRSNEHEPWQNEAEVVRCEPSMANAPRILALGLLALLCAAAGPAAAQNCGCQPNFCCSKFGYCGTTDAYCGDGCQSGPCRSDGGGGGGGGGGGGGSGGANVANVVTDAFFNGIKNQAGSGCEGKNFYTRSAFLSAVNKYPGFAHGGTEVEGKREIAAFFAHVTHETGHFCYISEINKSNAYCDASNRQWPCAAGQKYYGRGPLQISWNYNYGPAGRDIGFNGLADPNRVAQDAVIAFKTALWFWMNNVHRVMPQGFGATIRAINGALECNGNNPAQMNARVGYYKQYCQQLRVDPGPNLTC

SEQ ID NO: 22848 - protein, 280 aa, Zea mays subsp. mays
  misc_feature (1)..(280): Ceres Seq. ID no. 12410360
MANAPRILALGLLALLCAAAGPAAAQNCGCQPNFCCSKFGYCGTTDAYCGDGCQSGPCRSDGGGGGGGGGGGGGSGGANVANVVTDAFFNGIKNQAGSGCEGKNFYTRSAFLSAVNKYPGFAHGGTEVEGKREIAAFFAHVTHETGHFCYISEINKSNAYCDASNRQWPCAAGQKYYGRGPLQISWNYNYGPAGRDIGFNGLADPNRVAQDAVIAFKTALWFWMNNVHRVMPQGFGATIRAINGALECNGNNPAQMNARVGYYKQYCQQLRVDPGPNLTC

SEQ ID NO: 22849 - DNA, 1312 bp, Zea mays subsp. mays
  misc_feature (1)..(1312): Ceres Seq. ID no. 12410390
aatcatgctagttgttctcgttcccttgttagttgagctctttcccttcctcgcttggaaccaaatcaaatcggagcggcggagcaatacgatccctcgcctcgcttccattcgaatcatctcgaacggggcactaatcgggaagctaatgtcgcgcaattcgcgagatctgtagcgccactcggcttcaccggcggcgcggcgggcatggaagcgcagaacggctccggcgtaggggcgcccgtggtgctcaacgtgtacgaccttacgcccatgaacaactacctctactggttcggcctcggtattttccactccggaatcgaagtccacggcatggagtacggatatggagcacacgagtttccaacaagtggggtatttgaggtggaaccaaagagctgtcctggtttcacctacagaagatctgtgtggatgggcacaactgacttgtctagaacagagttccgctcgttcattgaaaaccttgcaggaaagtacaatggcaacacataccatttgatttcaaagaactgcaaccattttacagatgatgtctgtaagaacttgaccaggaaatcaatccctgggtgggtcaatcggctagcaagagtgggttcatttttcaactgtcttctaccagaaagcatccaagtttccacagtaagacacgtccctactcatcctgcattttctgatgatgatatggattcggtatcttcatcggttattggagacagtgatctggaagagctggaccaacaccttctgccatcaactgctgacgtccattctatagacgtgccgccaaagctagcgaaagatcttctctgagttattcagcactttgggttttcacatagcaaggataacttggactgctgcagtggatgtccgctgagtgcttctctgggtggcgcagccgcgcaggactccaggaatgtcgaatgctgctaattgtatcgattcttttgccactgaggtccttacatgcacacagagctctcgacagaaatgacacgctttctaatcctttgcctgttacttgtatgttgtgacttcatcctaggtattttgtgttcgagtgatactgtatgcattcagaatgccgtcaatggcgtgtctggttcgaggcatacaaagtagtatcttgtgttcgagtgatactgtaggcactgagaatgccgtcaatggtgtgtgtgtttgaggggtcacaggtaatccatcgagtgtagttaaaccaaacaaatcttaatatcatctgacttcaatccgtgcagcttttcctagtgatatatataatttttgtttt

SEQ ID NO: 22850 - protein, 208 aa, Zea mays subsp. mays
  misc_feature (1)..(208): Ceres Seq. ID no. 12410391
MEAQNGSGVGAPVVLNVYDLTPMNNYLYWFGLGIFHSGIEVHGMEYGYGAHEFPTSGVFEVEPKSCPGFTYRRSVWMGTTDLSRTEFRSFIENLAGKYNGNTYHLISKNCNHFTDDVCKNLTRKSIPGWVNRLARVGSFFNCLLPESIQVSTVRHVPTHPAFSDDDMDSVSSSVIGDSDLEELDQHLLPSTADVHSIDVPPKLAKDLL

SEQ ID NO: 22851 - protein, 186 aa, Zea mays subsp. mays
  misc_feature (1)..(186): Ceres Seq. ID no. 12410392
MNNYLYWFGLGIFHSGIEVHGMEYGYGAHEFPTSGVFEVEPKSCPGFTYRRSVWMGTTDLSRTEFRSFIENLAGKYNGNTYHLISKNCNHFTDDVCKNLTRKSIPGWVNRLARVGSFFNCLLPESIQVSTVRHVPTHPAFSDDDMDSVSSSVIGDSDLEELDQHLLPSTADVHSIDVPPKLAKDLL

SEQ ID NO: 22852 - protein, 165 aa, Zea mays subsp. mays
  misc_feature (1)..(165): Ceres Seq. ID no. 12410393
MEYGYGAHEFPTSGVFEVEPKSCPGFTYRRSVWMGTTDLSRTEFRSFIENLAGKYNGNTYHLISKNCNHFTDDVCKNLTRKSIPGWVNRLARVGSFFNCLLPESIQVSTVRHVPTHPAFSDDDMDSVSSSVIGDSDLEELDQHLLPSTADVHSIDVPPKLAKDLL

SEQ ID NO: 22853 - DNA, 938 bp, Zea mays subsp. mays
  misc_feature (1)..(938): Ceres Seq. ID no. 12410394
agtgtctccactcgcacttccgcgacgcgcaacccaaagcaaacgcaccgggtcgagccaatccaccacccagccatgcctcccaagcgcaagtccccggcgacgattgcccctgcggcggggtccccgaggaagacgcggagcatggctgctgctgctgctgcagggaagcgggcaacggagcctgctccggcgaaggcagtgccggccaagaaggaagacgaggcggcggttgccgagttgaaagggaggaagaggggcaagaaggaagccgaggcggtgacggtggccaccgagccgaaagggaggaatagggacaagaaggaagccgaggcggtgacggtggccaccgagccgaaagggaggaagaggggcaagaaggaagccgaggcggtggcaccagcggcagaggaggaggatggggttgatgtggcggctgtagggaagcgtgtcatcgtcgaggcctgcactcagtgcagacagtttaagatccgagctcagaaggtgaaggaggacctggaaagttatgtttcgggggtgtctgtgataatcaaccctcagaagccacgccgtggttgccttgagatacgtgaagaaggcggtgaagtgttcatatcactgctgaacatgccacgccccttcacaccaatgaagaagctcgacatggacaaggttatcaaggacatcgccaagaagatctcctaaaccatgttggctggctatggctcggcggcaccattttgtgattgaaatattcaatctaagatcgtaatcttcaaagggtacggtgtaccttaggtgtaggttccaatcagtggcgtttcctattgcattggccatgtgcccatgtctcgtactcgtacctatgcttgtcctgcattgctggggcatatcgttttctgttatatgatatatgccctgaaaattccttgacttcc

SEQ ID NO: 22854 - protein, 234 aa, Zea mays subsp. mays
  misc_feature (1)..(234): Ceres Seq. ID no. 12410395
SVSTRTSATRNPKQTHRVEPIHHPAMPPKRKSPATIAPAAGSPRKTRSMAAAAAAGKRATEPAPAKAVPAKKEDEAAVAELKGRKRGKKEAEAVTVATEPKGRNRDKKEAEAVTVATEPKGRKRGKKEAEAVAPAAEEEDGVDVAAVGKRVIVEACTQCRQFKIRAQKVKEDLESYVSGVSVIINPQKPRRGCLEIREEGGEVFISLLNMPRPFTPMKKLDMDKVIKDIAKKIS

SEQ ID NO: 22855 - protein, 209 aa, Zea mays subsp. mays
  misc_feature (1)..(209): Ceres Seq. ID no. 12410396
MPPKRKSPATIAPAAGSPRKTRSMAAAAAAGKRATEPAPAKAVPAKKEDEAAVAELKGRKRGKKEAEAVTVATEPKGRNRDKKEAEAVTVATEPKGRKRGKKEAEAVAPAAEEEDGVDVAAVGKRVIVEACTQCRQFKIRAQKVKEDLESYVSGVSVIINPQKPRRGCLEIREEGGEVFISLLNMPRPFTPMKKLDMDKVIKDIAKKIS

SEQ ID NO: 22856 - protein, 186 aa, Zea mays subsp. mays
  misc_feature (1)..(186): Ceres Seq. ID no. 12410397
MAAAAAAGKRATEPAPAKAVPAKKEDEAAVAELKGRKRGKKEAEAVTVATEPKGRNRDKKEAEAVTVATEPKGRKRGKKEAEAVAPAAEEEDGVDVAAVGKRVIVEACTQCRQFKIRAQKVKEDLESYVSGVSVIINPQKPRRGCLEIREEGGEVFISLLNMPRPFTPMKKLDMDKVIKDIAKKIS

SEQ ID NO: 22857 - DNA, 1775 bp, Zea mays subsp. mays
  misc_feature (1)..(1775): Ceres Seq. ID no. 12410409
aatccctccctccctcatcgcgttttattattcccgtccttcttcattcggcccttcgccgctgctatatttcgcggccgccttgcctcctaataatagccgccgcggcagtggataccgccaccgccatgggagcgctcgaggaggcccacctcgcggccgccgcgtgcgcgtgcgaggaggaggaggaaagcgactacatcggcctcctcgcaggggaagcggcggcgggcgacgccgtggagccggccgtgcgcgccctgctgctggggctcggtgaggacgaccgccgcgagggcctgctccggacgcccaagcgcgtcgccaaggccttccgcgacggcacccgaggctacaggcaaaaagtaaaagacatagtgcaaggtgctctgtttccagaggttggtgtggataaaaggactggatctgctggtggaactggcgggcaagtagttgttcgagacattgaacttttctcctattgtgagtcatgcttgcttccattcagcatacagtgccatgtcgggtatgttccctcaggtggaagagtggttgggttaagcaagctttctagagtatctgatgtctttgccaagagattgcaaaaccctcaaagactagctaatgaaatctgtggtgcactgcatgctagcattcaacctgccggcgtggctgttgctctgcagtgctggcacattcctttaccagaaaacttggaatgcaagactttggaaggttggattagaacttcacattcatctcgctctggagtctttgaaggtgaaagcagcactttctggactgacttcttggctcttgttaagcttaggggcatagacgtggaggctaaggaccatactgtttctattccttggtgccctttaaggtctcatgaggttctactctctaacgggctctgcaagaaaaactcaactaatggcatggtttctgctgttacctcgatgctcttatcactcggagaggaccccctcaggaaagagcttttaggcactcctcagcgttatgtgcagtggctgatgaagttcaaagcatgtaatctactagacgtgaagctgaatggttttacacttagtaatgttagcttatatgagaggctaggtggaggcacaactgatcatggagcaatccgatcggagctgcacttgccattttgtgctcaatgtgaacaccatcttctgcccttctacggagtagttcacattgggtactttgacaatggaagcggagaaggcattgatcggtcgcattttcaggcgttggttcatttctacgggtgcaagcttcaggttcaagaaaggatgacaaggcagatagctgaagcggtttattcggtttcgcaccatggggccatggtcgttgttgaggccaaccacatttgcatgatctcaagggggatagagaaaataaggagcaacacggcaacaattgcagttttgggccagtttttggccgacccttctgccaaggcgtgcttcttacaaaatgttttggattctgttggttctgcggtatgaatcgtatcgcaagcagcaaaggaaaaaaatgtctagttgggagtcactatccagcaattgaaatttttagcaatctacttgtctagcatgattcttctcgggtgcaaatttgtcacctgtgggactgtaccgaggatgtcacaagaaagcaccaaaagggttttggttctctcgtgttgtaccatgtcacttgtaaggcacttcaaataaaaaagaaatagtaatagttacaactgtgcc

SEQ ID NO: 22858 - protein, 510 aa, Zea mays subsp. mays
  misc_feature (1)..(510): Ceres Seq. ID no. 12410410
SLPPSSRFIIPVLLHSALRRCYISRPPCLLIIAAAAVDTATAMGALEEAHLAAAACACEEEEESDYIGLLAGEAAAGDAVEPAVRALLLGLGEDDRREGLLRTPKRVAKAFRDGTRGYRQKVKDIVQGALFPEVGVDKRTGSAGGTGGQVVVRDIELFSYCESCLLPFSIQCHVGYVPSGGRVVGLSKLSRVSDVFAKRLQNPQRLANEICGALHASIQPAGVAVALQCWHIPLPENLECKTLEGWIRTSHSSRSGVFEGESSTFWTDFLALVKLRGIDVEAKDHTVSIPWCPLRSHEVLLSNGLCKKNSTNGMVSAVTSMLLSLGEDPLRKELLGTPQRYVQWLMKFKACNLLDVKLNGFTLSNVSLYERLGGGTTDHGAIRSELHLPFCAQCEHHLLPFYGVVHIGYFDNGSGEGIDRSHFQALVHFYGCKLQVQERMTRQIAEAVYSVSHHGAMVVVEANHICMISRGIEKIRSNTATIAVLGQFLADPSAKACFLQNVLDSVGSAV

SEQ ID NO: 22859 - protein, 468 aa, Zea mays subsp. mays
  misc_feature (1)..(468): Ceres Seq. ID no. 12410411
MGALEEAHLAAAACACEEEEESDYIGLLAGEAAAGDAVEPAVRALLLGLGEDDRREGLLRTPKRVAKAFRDGTRGYRQKVKDIVQGALFPEVGVDKRTGSAGGTGGQVVVRDIELFSYCESCLLPFSIQCHVGYVPSGGRVVGLSKLSRVSDVFAKRLQNPQRLANEICGALHASIQPAGVAVALQCWHIPLPENLECKTLEGWIRTSHSSRSGVFEGESSTFWTDFLALVKLRGIDVEAKDHTVSIPWCPLRSHEVLLSNGLCKKNSTNGMVSAVTSMLLSLGEDPLRKELLGTPQRYVQWLMKFKACNLLDVKLNGFTLSNVSLYERLGGGTTDHGAIRSELHLPFCAQCEHHLLPFYGVVHIGYFDNGSGEGIDRSHFQALVHFYGCKLQVQERMTRQIAEAVYSVSHHGAMVVVEANHICMISRGIEKIRSNTATIAVLGQFLADPSAKACFLQNVLDSVGSAV

SEQ ID NO: 22860 - DNA, 1506 bp, Zea mays subsp. mays
  misc_feature (1)..(1506): Ceres Seq. ID no. 12410412
cccggctcggctcggctcggcacaggatccggccggccttttcactcaactcgcttcagcagctcagcctccaaccaaccgagagaagccagagaaaaggttactccacagaaagcaaaaccctagcccactccggcgcgccaccggccgatggtttcgatgagcaccacgccgaagccgcttgactccgccgtcgtcagcgcagccgttgacggcggggatgagggtggtggtggaggcggtggcgggaagaagcaggcgcacggggcggtgatggcgccgccaccgatggtggtcccggccgcggcgcccgcggccgaggaggaggttcggaaggtcaggaagccgtacaccatcaccaagtcgcgggagagctggacggagccggagcacgacaagttcctcgaggccctgcagctttttgatcgtgattggaagaaaattgaagcatatgttggctcaaagactgttatacagataaggagccatgcacagaagtacttcctgaaggttcagaagaatggtacgggcgagcatctgcccccacccaggccaaaacgaaaggcagctcatccatatccacagaaggcatctaaaaatgctcctgcagtttctcaagctattttatcacaagaacaacctacccagagggagcaaggttctgtcatgcctatggatactgctactgtgagaaacacaaatgcgaatgtggcggtgccttcctgggacaatactcttgctcaacctttcagcgctggtcatgttcaaggtgcagctgcaacaaataactgttcaagtagcatggagagtccatctggtacttggccaacttctgaagcagtcgagcaagaaaatatggttccaccactccgtgccatgccagattttgcccaagtatacaacttcctgggaagcatatttgatccggatacaagtgggcatttgcagatgttaaaagcgatggatccagttgatattgaaacggcactactacttatgaggaatctttccatgaaccttaggagtcccgactttgagcaacatcggaggttgctatcatcatatagctatggtggcgcggaccatgtcaaatctgaagccatggaaaatcttggatctcctcagagtggccatcttccatccctggtaacaagcgaatgagagcacacttccaatttgcggtcggagctttggttgtttacacgggacattcctgtgcgctcccagcaatggagttgtggagacggctggtctgtttatgaatgctagagacgtatcgtggcagtaacatctgtatagcttccaataaatggtctgaccctaggcaagttttgctttttcgcgtacgtgtagatagccagttttgtgtgctcatgcaattttttcctgggtggggcctagatcgtatgtttttttatatacacactattggacgcgtgatgtaaatatgtgcaatctttgtaatgcttgaggtactataattatataatggatatgttatgatcg

SEQ ID NO: 22861 - protein, 336 aa, Zea mays subsp. mays
  misc_feature (1)..(336): Ceres Seq. ID no. 12410413
MVSMSTTPKPLDSAVVSAAVDGGDEGGGGGGGGKKQAHGAVMAPPPMVVPAAAPAAEEEVRKVRKPYTITKSRESWTEPEHDKFLEALQLFDRDWKKIEAYVGSKTVIQIRSHAQKYFLKVQKNGTGEHLPPPRPKRKAAHPYPQKASKNAPAVSQAILSQEQPTQREQGSVMPMDTATVRNTNANVAVPSWDNTLAQPFSAGHVQGAAATNNCSSSMESPSGTWPTSEAVEQENMVPPLRAMPDFAQVYNFLGSIFDPDTSGHLQMLKAMDPVDIETALLLMRNLSMNLRSPDFEQHRRLLSSYSYGGADHVKSEAMENLGSPQSGHLPSLVTSE

SEQ ID NO: 22862 - protein, 333 aa, Zea mays subsp. mays
  misc_feature (1)..(333): Ceres Seq. ID no. 12410414
MSTTPKPLDSAVVSAAVDGGDEGGGGGGGGKKQAHGAVMAPPPMVVPAAAPAAEEEVRKVRKPYTITKSRESWTEPEHDKFLEALQLFDRDWKKIEAYVGSKTVIQIRSHAQKYFLKVQKNGTGEHLPPPRPKRKAAHPYPQKASKNAPAVSQAILSQEQPTQREQGSVMPMDTATVRNTNANVAVPSWDNTLAQPFSAGHVQGAAATNNCSSSMESPSGTWPTSEAVEQENMVPPLRAMPDFAQVYNFLGSIFDPDTSGHLQMLKAMDPVDIETALLLMRNLSMNLRSPDFEQHRRLLSSYSYGGADHVKSEAMENLGSPQSGHLPSLVTSE

SEQ ID NO: 22863 - protein, 295 aa, Zea mays subsp. mays
  misc_feature (1)..(295): Ceres Seq. ID no. 12410415
MAPPPMVVPAAAPAAEEEVRKVRKPYTITKSRESWTEPEHDKFLEALQLFDRDWKKIEAYVGSKTVIQIRSHAQKYFLKVQKNGTGEHLPPPRPKRKAAHPYPQKASKNAPAVSQAILSQEQPTQREQGSVMPMDTATVRNTNANVAVPSWDNTLAQPFSAGHVQGAAATNNCSSSMESPSGTWPTSEAVEQENMVPPLRAMPDFAQVYNFLGSIFDPDTSGHLQMLKAMDPVDIETALLLMRNLSMNLRSPDFEQHRRLLSSYSYGGADHVKSEAMENLGSPQSGHLPSLVTSE

SEQ ID NO: 22864 - DNA, 1565 bp, Zea mays subsp. mays
  misc_feature (1)..(1565): Ceres Seq. ID no. 12410445
ggcaacgagcctgctgctccagctaccccgaaaccccgtccaacgtccatggctatccacctccgggcacacgccttcgcggccaacccgctgcgtggcgtctccgccgccaccaccgccatgtccccctccgcggccgccgaggcactccgctacctcctcgaccccagctccgccgccgccgccgccaatcccagccagtacctctccaagatccttcctttccgcaggggccgcccactcgcgcgctccactgaccctcccgcggcgccggcctggcgcctcgcgtggctcccgccgtcccgcgtccccggggtggccccggacgccttcgtcttcctgggcgcgctcgtcgagggggacggcaaggaggccgccgcgtactgggcggtcgacgtcagcgagggcgagggagccagggttggtgggccggcggacggggatgggccgtcggcgtttgtggacttgaggacgctcatggtggccacggactggagcgacaaggacgccatggcggagctcgccatcgcaggacatgctcgagcactgctagaatggcacagcacggcaaaattttgtggagcttgtggagcaaaggctgtacctactgaagccgggaggcgtaagcagtgcagcaacgattcctgcaagaagaggatataccctagaattgatccggttgtgatcatgttggtcattgataaagaaaatgatcgggcactcttaagccgccagtcaagatttgtgcctcgtatgtggagttgtcttgctggtttcatagagccaggagaaagcctggaagaggcagtgagacgagaaacatgggaggaaactggtatcgaagttgggcaagtcgtttatcacagttctcaaccatggcctgttgggccaaatactatgccgtgtcaactgatggtgggcttctttgcttatgctaaatcattggagataaacgtggaacaagcaggagcttgaagatgcccagtggcacaaccgcgaagacgtcaagaaagcgttgacgtttgctgaatacgagaaagcccagagaacaagcgctgccaaggtcgatcagatctgcaagggcgctgagaaagggcagaacccctctgccgacttcaaagttggaagcggcgagcctgctccaatgtttgtcccaggaccctacgccattgctcaccaccttatctcgtcgtgggctttcgagggagcaccgaagctgcctagttcattctcaaacctataagcctggaccctggtgttcagacagacgatgacaggaactggacccctgtgctgcgggctcatggatcacctgtgttgccgtgagtgtaattctgatagtgtgtgtccgttgccggttgtgataaaataaaatagcaatagagtactgggtacagaagacttgccggaggatttggcatcaatggacatgtatatccattgcctttttacatgttgatcctctttgtatcacacgtaatgttgcatacttgcatagatacaacaatgatatacatcacacagtgtactcatgcatttatacatgtattcagataactggattc

SEQ ID NO: 22865 - protein, 324 aa, Zea mays subsp. mays
  misc_feature (1)..(324): Ceres Seq. ID no. 12410446
GNEPAAPATPKPRPTSMAIHLRAHAFAANPLRGVSAATTAMSPSAAAEALRYLLDPSSAAAAANPSQYLSKILPFRRGRPLARSTDPPAAPAWRLAWLPPSRVPGVAPDAFVFLGALVEGDGKEAAAYWAVDVSEGEGARVGGPADGDGPSAFVDLRTLMVATDWSDKDAMAELAIAGHARALLEWHSTAKFCGACGAKAVPTEAGRRKQCSNDSCKKRIYPRIDPVVIMLVIDKENDRALLSRQSRFVPRMWSCLAGFIEPGESLEEAVRRETWEETGIEVGQVVYHSSQPWPVGPNTMPCQLMVGFFAYAKSLEINVEQAGA

SEQ ID NO: 22866 - protein, 308 aa, Zea mays subsp. mays
  misc_feature (1)..(308): Ceres Seq. ID no. 12410447
MAIHLRAHAFAANPLRGVSAATTAMSPSAAAEALRYLLDPSSAAAAANPSQYLSKILPFRRGRPLARSTDPPAAPAWRLAWLPPSRVPGVAPDAFVFLGALVEGDGKEAAAYWAVDVSEGEGARVGGPADGDGPSAFVDLRTLMVATDWSDKDAMAELAIAGHARALLEWHSTAKFCGACGAKAVPTEAGRRKQCSNDSCKKRIYPRIDPVVIMLVIDKENDRALLSRQSRFVPRMWSCLAGFIEPGESLEEAVRRETWEETGIEVGQVVYHSSQPWPVGPNTMPCQLMVGFFAYAKSLEINVEQAGA

SEQ ID NO: 22867 - protein, 284 aa, Zea mays subsp. mays
  misc_feature (1)..(284): Ceres Seq. ID no. 12410448
MSPSAAAEALRYLLDPSSAAAAANPSQYLSKILPFRRGRPLARSTDPPAAPAWRLAWLPPSRVPGVAPDAFVFLGALVEGDGKEAAAYWAVDVSEGEGARVGGPADGDGPSAFVDLRTLMVATDWSDKDAMAELAIAGHARALLEWHSTAKFCGACGAKAVPTEAGRRKQCSNDSCKKRIYPRIDPVVIMLVIDKENDRALLSRQSRFVPRMWSCLAGFIEPGESLEEAVRRETWEETGIEVGQVVYHSSQPWPVGPNTMPCQLMVGFFAYAKSLEINVEQAGA

SEQ ID NO: 22868 - DNA, 1634 bp, Zea mays subsp. mays
  misc_feature (1)..(1634): Ceres Seq. ID no. 12410453
acacttcaattacgattattccagataagcacgatccgatgatggccccaccgatatccgccgatgccttggtggaggctgcctcggccgtcgccgcgtacccagccatcgngccgaacagaatgctttgcaaggacgcgccggcgccggccatctctgtcgtctcgaagcagacggtccggcccgccggcgcgtcggcggcggtcggcagtggagacctcaggctctcggtgtcggacatgccgatgctatcgtgccactacatccagaaggggctgttcttcccgccgcctcctcccggcgtgctggcggcctcgctggtgtcgtcgctcgtggcggcgctctcccgcgcgctcggcgtcttccccgcgctcgccggccgcctcgtcacgctccacgacgacagcatcgtgatacggtgcggcggcgacgacgccgccgtcgagttctaccacgcggtggcgccgtctctgtcgctcggcgacttcctggtgcccggcgccgacgtgccgacccgtttgacgaacggcctgttccccatggaccggacggtgagctacggcggccacggccgcccgctcacggcgttccagctcaccgtgctcggcgacggcgccgtgttcgtcggcttcgtcgccaaccacgccgtcgtggacggcacctccttctggcacttcttcaacacgtgggcggggctgtgccgcggcgcgccggtccgggagcccgacttccgccgcaacttcttcggcgactccaccgccgtcctacgcttccccggaggcgcgagccccgccgtgacgttcgacgccgacgcgccgctccgcgagcggatcctccacttcagtgctgccgcaatcagcgagctgaaggcgacggccaaccgctcgaaaagagcaggtcaggaagccgtgctaacggcaagctcgcgcacgacgactccagacttgaagggcgttccggtgaaatctcgtcgtttcagtcgctgtgcgcgcacatctggagggcggtgacgcgcgcgcgccggctgctggctgccgacaagacgacgacgttccgcatggccgtgaactgccggcaccgtctgcgcccggcgatctccccgctctacttcggcaacgcgatccagagcgtggcgacgacggccaccgtagccgagctggcgtccaacgacctgggctgggcggccgcccggctgaacgccaccgtggcgtcgcacaaggacggcgcgatccggcgcgccgcggcggagtgggaggccgcgccccgttgcttcccgctaggcaaccccgacggggcggccctcacgatggggagctcgcctcggttcccgatgtacgacgggaacgacttcgggtggggccgcgcgctcgccgtgcggagcggccgcgcgaacaaattcgacggcaagatgtcttcgttccccggacaggctggggacggtagcatcgacgtggaggtgtgcctcgcgccagacaccatggcgcatctcctcctcgacaaggagttcttgcagtacgtgtcctcccctgcaccgtgaggcggtgacagagtgaatgtgtggcttgttgctgcgcagctacatatagtaactggatttgtaccctttcagcagatatcaagtgcttgccaacttt

SEQ ID NO: 22869 - protein, 335 aa, Zea mays subsp. mays
  misc_feature (1)..(335): Ceres Seq. ID no. 12410454
  misc_feature (37)..(37): Xaa is any aa, unknown or other
TSITIIPDKHDPMMAPPISADALVEAASAVAAYPAIXPNRMLCKDAPAPAISVVSKQTVRPAGASAAVGSGDLRLSVSDMPMLSCHYIQKGLFFPPPPPGVLAASLVSSLVAALSRALGVFPALAGRLVTLHDDSIVIRCGGDDAAVEFYHAVAPSLSLGDFLVPGADVPTRLTNGLFPMDRTVSYGGHGRPLTAFQLTVLGDGAVFVGFVANHAVVDGTSFWHFFNTWAGLCRGAPVREPDFRRNFFGDSTAVLRFPGGASPAVTFDADAPLRERILHFSAAAISELKATANRSKRAGQEAVLTASSRTTTPDLKGVPVKSRRFSRCARTSGGR

SEQ ID NO: 22870 - protein, 323 aa, Zea mays subsp. mays
  misc_feature (1)..(323): Ceres Seq. ID no. 12410455
  misc_feature (25)..(25): Xaa is any aa, unknown or other
MMAPPISADALVEAASAVAAYPAIXPNRMLCKDAPAPAISVVSKQTVRPAGASAAVGSGDLRLSVSDMPMLSCHYIQKGLFFPPPPPGVLAASLVSSLVAALSRALGVFPALAGRLVTLHDDSIVIRCGGDDAAVEFYHAVAPSLSLGDFLVPGADVPTRLTNGLFPMDRTVSYGGHGRPLTAFQLTVLGDGAVFVGFVANHAVVDGTSFWHFFNTWAGLCRGAPVREPDFRRNFFGDSTAVLRFPGGASPAVTFDADAPLRERILHFSAAAISELKATANRSKRAGQEAVLTASSRTTTPDLKGVPVKSRRFSRCARTSGGR

SEQ ID NO: 22871 - protein, 322 aa, Zea mays subsp. mays
  misc_feature (1)..(322): Ceres Seq. ID no. 12410456
  misc_feature (24)..(24): Xaa is any aa, unknown or other
MAPPISADALVEAASAVAAYPAIXPNRMLCKDAPAPAISVVSKQTVRPAGASAAVGSGDLRLSVSDMPMLSCHYIQKGLFFPPPPPGVLAASLVSSLVAALSRALGVFPALAGRLVTLHDDSIVIRCGGDDAAVEFYHAVAPSLSLGDFLVPGADVPTRLTNGLFPMDRTVSYGGHGRPLTAFQLTVLGDGAVFVGFVANHAVVDGTSFWHFFNTWAGLCRGAPVREPDFRRNFFGDSTAVLRFPGGASPAVTFDADAPLRERILHFSAAAISELKATANRSKRAGQEAVLTASSRTTTPDLKGVPVKSRRFSRCARTSGGR

SEQ ID NO: 22872 - DNA, 1298 bp, Zea mays subsp. mays
  misc_feature (1)..(1298): Ceres Seq. ID no. 12410473
acaatattattggactattcctaacacaacggaggccataggatgggatggtcatctataaatacgtagcccggcgcagccttctttggagcagggagaagaacacagggcacacgcacggcacgcagatacatatagagagaggttagctatagcttgcacatctatttaactaactaactaactggctagctagctcgatcggcagagcaaagcgaaagcagcaagaagcaaagcaatggagaaccctgcgagtgtgctagttctaccagcgcagttcaccaaactcaccttccgaaacctgtacatccgccgggccgggccgggcagcagggagataaccgaggagggcaggtgcgacctggacaagagatacgtgagtgacttccccgtctacgacggccgcggccccgacgccagccttgtggcccgcgtgcaggggatcaccagcgaaatcgggaacgcgcaccaactgttcgtcgttgttttcgacaccgacaggctcaagggctccacgctcgtcaccaatggcgtgataacggccgggtctgacgagtgggcgatctacggcggaaccggggtgtttgccatggcgaggggcgtcataaggagaaggtatctcgccgacagggccggcgggaacactgatgagctcaacatggatgtcttctgccggccgtttggctcacagtcagagctgcaagataagatgcaggtgcaggggcagggctctagcgtcaccaagattggactatggggtggaccgggagggtcggcacaggacatcacggcggagcggccgccgcagcgtctgcacagcgtcaccgttcgtgctggcgtcgccgtcgactccatcgagttcacctatactgacagcgcttggcagaggcgcgccgctgggcgatggggtggactcgggggcaatgttcgaacgatcgaccttggcgacgccgaggatgtcagggaagtctcgggaacatacggcgcatttgaaggtgccactacgctgacctcgctcaggctcgtcaccagcagcagaacctggggcccctggggtgtcgagaacgggacgcgtttctccgtcacggcgcccatcggcagcagcatcgtgggattctatgcgcgggcgggaaccaggctcgtcgatgctatcggtgtttacttgcgtcagatttaattcgaataatagcaggggagctactgctagctacgtacctgctccatcctccattatcctttatttcaattcgctcatcatcgtcgtgtgtaaattaaataaataaagctcttgtgcccat

SEQ ID NO: 22873 - protein, 312 aa, Zea mays subsp. mays
  misc_feature (1)..(312): Ceres Seq. ID no. 12410474
MENPASVLVLPAQFTKLTFRNLYIRRAGPGSREITEEGRCDLDKRYVSDFPVYDGRGPDASLVARVQGITSEIGNAHQLFVVVFDTDRLKGSTLVTNGVITAGSDEWAIYGGTGVFAMARGVIRRRYLADRAGGNTDELNMDVFCRPFGSQSELQDKMQVQGQGSSVTKIGLWGGPGGSAQDITAERPPQRLHSVTVRAGVAVDSIEFTYTDSAWQRRAAGRWGGLGGNVRTIDLGDAEDVREVSGTYGAFEGATTLTSLRLVTSSRTWGPWGVENGTRFSVTAPIGSSIVGFYARAGTRLVDAIGVYLRQI

SEQ ID NO: 22874 - protein, 195 aa, Zea mays subsp. mays
  misc_feature (1)..(195): Ceres Seq. ID no. 12410475
MARGVIRRRYLADRAGGNTDELNMDVFCRPFGSQSELQDKMQVQGQGSSVTKIGLWGGPGGSAQDITAERPPQRLHSVTVRAGVAVDSIEFTYTDSAWQRRAAGRWGGLGGNVRTIDLGDAEDVREVSGTYGAFEGATTLTSLRLVTSSRTWGPWGVENGTRFSVTAPIGSSIVGFYARAGTRLVDAIGVYLRQI

SEQ ID NO: 22875 - protein, 172 aa, Zea mays subsp. mays
  misc_feature (1)..(172): Ceres Seq. ID no. 12410476
MDVFCRPFGSQSELQDKMQVQGQGSSVTKIGLWGGPGGSAQDITAERPPQRLHSVTVRAGVAVDSIEFTYTDSAWQRRAAGRWGGLGGNVRTIDLGDAEDVREVSGTYGAFEGATTLTSLRLVTSSRTWGPWGVENGTRFSVTAPIGSSIVGFYARAGTRLVDAIGVYLRQI

SEQ ID NO: 22876 - DNA, 1532 bp, Zea mays subsp. mays
  misc_feature (1)..(1532): Ceres Seq. ID no. 12410481
agagagtcagagactgagagactggaagcgcccgcgcgtgccggcgatggagagggacgtcgtgctctccgcacccgaggccgctgggtcctcgtcctcccccgcctcctcgtcgtactcctccttcgccgagaccagggtcatctgccgcgtgtgtcagaagcagttcgcgcagtacacttgcccccgctgtaacgcccggtactgctcgctctcgtgctacaagggtcatagtgttcaatgcactgaatccttcatgcgtgagaatgttatggacgagcttaagcagatgcaacctgaggatgaatcaaagaaaaagatgctagatatcctcaagcggctccacttggaagaagagatggcatcagatggtgaagatgagtccatgctatcagaggagcttattcaaaaagttatgtctggggaagagataaagctggaagacctctctgattgtgaaatcaaacgattccgtcaagctctggcctcaggtgagctcagtaagatgattgaaccgtggacaccttggtggaaaaaaccctcagccagatctatttcccttggcccggatggaagccagcttatcagacaagtaaacgcagaagacactgctgtaccatatccagatgcaaatactgaccaagaggctagcatcaacgaaatccctgaagggccagaatctcctctcccgtcactgaaacagttaacaaggacagagccatctcctttgcttgctgtccacttggttgacattctgtacagttactgcttcacacttcggctctacaacggtgattggcactcagatcctttgggtgcttccactgtcgccctgtcgatgtcgaaagtcatgggccaggatgctaaacctgagactgtacctgaagcactcgcagcctgcatcgaggagacatgctcaccagcttacaggcatactggtggtttcaggtttgctattggactcgtggacgatatcatcgccattctctccttgggacagaacgcacttatttgtgccctatgcgacttccatcgactcgttgaagttggtaagagcatgctcaaagtggagaaggtgggcaagacggagagggcacagggctctccaaagcttcgcagtgcagctaggaagctattcttcatgacttgttgggtccatgagcagccagatgaggcgtggccatctttagctcacatcgtccaggtgcagaaagcatctatggaggagttggagaccgggaattggaaggcggatagaaagagcaaaccacaatccgcggttcttatcgaggagctgtaggcatatggatgtaccactggaaactggatcgcgaagctctgtacccttgtgtatcgctcaggatgaatccaacgagagaccttgtccttgtaatgcagttagttgcttttgtgtacacttttttttttgaaaaaaattgtatttgttgaaatcctggttgaagcgatcctgctttactttgcttgttaagttgcgggctgatttaatccatgcgttggagcttatgcagttc

SEQ ID NO: 22877 - protein, 432 aa, Zea mays subsp. mays
  misc_feature (1)..(432): Ceres Seq. ID no. 12410482
ESQRLRDWKRPRVPAMERDVVLSAPEAAGSSSSPASSSYSSFAETRVICRVCQKQFAQYTCPRCNARYCSLSCYKGHSVQCTESFMRENVMDELKQMQPEDESKKKMLDILKRLHLEEEMASDGEDESMLSEELIQKVMSGEEIKLEDLSDCEIKRFRQALASGELSKMIEPWTPWWKKPSARSISLGPDGSQLIRQVNAEDTAVPYPDANTDQEASINEIPEGPESPLPSLKQLTRTEPSPLLAVHLVDILYSYCFTLRLYNGDWHSDPLGASTVALSMSKVMGQDAKPETVPEALAACIEETCSPAYRHTGGFRFAIGLVDDIIAILSLGQNALICALCDFHRLVEVGKSMLKVEKVGKTERAQGSPKLRSAARKLFFMTCWVHEQPDEAWPSLAHIVQVQKASMEELETGNWKADRKSKPQSAVLIEEL

SEQ ID NO: 22878 - protein, 417 aa, Zea mays subsp. mays
  misc_feature (1)..(417): Ceres Seq. ID no. 12410483
MERDVVLSAPEAAGSSSSPASSSYSSFAETRVICRVCQKQFAQYTCPRCNARYCSLSCYKGHSVQCTESFMRENVMDELKQMQPEDESKKKMLDILKRLHLEEEMASDGEDESMLSEELIQKVMSGEEIKLEDLSDCEIKRFRQALASGELSKMIEPWTPWWKKPSARSISLGPDGSQLIRQVNAEDTAVPYPDANTDQEASINEIPEGPESPLPSLKQLTRTEPSPLLAVHLVDILYSYCFTLRLYNGDWHSDPLGASTVALSMSKVMGQDAKPETVPEALAACIEETCSPAYRHTGGFRFAIGLVDDIIAILSLGQNALICALCDFHRLVEVGKSMLKVEKVGKTERAQGSPKLRSAARKLFFMTCWVHEQPDEAWPSLAHIVQVQKASMEELETGNWKADRKSKPQSAVLIEEL

SEQ ID NO: 22879 - protein, 347 aa, Zea mays subsp. mays
  misc_feature (1)..(347): Ceres Seq. ID no. 12410484
MRENVMDELKQMQPEDESKKKMLDILKRLHLEEEMASDGEDESMLSEELIQKVMSGEEIKLEDLSDCEIKRFRQALASGELSKMIEPWTPWWKKPSARSISLGPDGSQLIRQVNAEDTAVPYPDANTDQEASINEIPEGPESPLPSLKQLTRTEPSPLLAVHLVDILYSYCFTLRLYNGDWHSDPLGASTVALSMSKVMGQDAKPETVPEALAACIEETCSPAYRHTGGFRFAIGLVDDIIAILSLGQNALICALCDFHRLVEVGKSMLKVEKVGKTERAQGSPKLRSAARKLFFMTCWVHEQPDEAWPSLAHIVQVQKASMEELETGNWKADRKSKPQSAVLIEEL

SEQ ID NO: 22880 - DNA, 1359 bp, Zea mays subsp. mays
  misc_feature (1)..(1359): Ceres Seq. ID no. 12410500
gctcggcgctcgctcgctcgttcgcgcttcgctcccttccttccgtttcgctcgctgccgcggacacgccgcacacggtcgaggagacgacagctgccgcgcggcactgggctcgggggagctggaccgccgggcgaggacaagagacggtatcgatggcctacgcgcgcaccgtgatggcggcggccgcctctgcgctgctgatggccgtgggcgtgcggttcctgggccccgcggcggcggcgttcgtggaggaagagctgccgcgcgcccgcgcggtggccgccacctggctcacgccgccgtacctgtacctcgtcatcaacgccatcatcatctccatcgccgcgtcgtcccgcttccagtcgagcggcggcgccggcggacgtccgtcagccccgtcgtatgcgcccgccgcggaccccgacgccgacgccatcggaggagaaggagcgggcgaggagatagcagcagcaggatgggatccagccggcggttgcgtcgttgcaggtgcctgcggcggtgcccgtggtggcagcgaaggccgcggaggttgctgctgtcgtcgaggagccagtggtggtggagatccacactgtagcggtggcgccggagggcgaggtggacgaggactattcggtttcgaggtcgacatggacgccgcgtcggaggggcgcggagccggaggtggcggcggaggtgccgccgttcgcggacctgaccaactccaggaagaagccgctcgtgtcggcgaggttcagcaggaaggcgaccaaaccaagccccgaaggtagcagggctctgcgggtggcgcggccgcggaaggaggagacgctggagagcacgtggaaggccatcacggagggccgggggccgacgctagctcggcacctcaagaagtccgacacctgggacaccccgtccccgggcgccgcccgtccggcggcggcagcagcggggaggtcgatccagcggccgcggcaccggcggggacgatgcggaaggccgagactttcaacgacggtggcgccggaaggagcagacctgctcccgctgcgctggtgcggcgggagccgtcgctggggcaggacgagctgaaccgccgcgtggaggcgttcatccacaagttcaacatggagatgcggctgcagcggcaggagtcgctcaagcactacaacgacatgattggcaggggcaggggcagccgttagtgggaagtcttgctgcaaatagctgcggctccgcaagaaggattctgcttttttgttccgtgatatttctcgattttggttcttggtctctgtaagatatggttttgtgtaaatggttttatcaagtaacgaggacaagttcgatcgc

SEQ ID NO: 22881 - protein, 263 aa, Zea mays subsp. mays
  misc_feature (1)..(263): Ceres Seq. ID no. 12410501
SALARSFALRSLPSVSLAAADTPHTVEETTAAARHWARGSWTAGRGQETVSMAYARTVMAAAASALLMAVGVRFLGPAAAAFVEEELPRARAVAATWLTPPYLYLVINAIIISIAASSRFQSSGGAGGRPSAPSYAPAADPDADAIGGEGAGEEIAAAGWDPAGGCVVAGACGGARGGSEGRGGCCCRRGASGGGDPHCSGGAGGRGGRGLFGFEVDMDAASEGRGAGGGGGGAAVRGPDQLQEEAARVGEVQQEGDQTKPRR

SEQ ID NO: 22882 - protein, 212 aa, Zea mays subsp. mays
  misc_feature (1)..(212): Ceres Seq. ID no. 12410502
MAYARTVMAAAASALLMAVGVRFLGPAAAAFVEEELPRARAVAATWLTPPYLYLVINAIIISIAASSRFQSSGGAGGRPSAPSYAPAADPDADAIGGEGAGEEIAAAGWDPAGGCVVAGACGGARGGSEGRGGCCCRRGASGGGDPHCSGGAGGRGGRGLFGFEVDMDAASEGRGAGGGGGGAAVRGPDQLQEEAARVGEVQQEGDQTKPRR

SEQ ID NO: 22883 - protein, 205 aa, Zea mays subsp. mays
  misc_feature (1)..(205): Ceres Seq. ID no. 12410503
MAAAASALLMAVGVRFLGPAAAAFVEEELPRARAVAATWLTPPYLYLVINAIIISIAASSRFQSSGGAGGRPSAPSYAPAADPDADAIGGEGAGEEIAAAGWDPAGGCVVAGACGGARGGSEGRGGCCCRRGASGGGDPHCSGGAGGRGGRGLFGFEVDMDAASEGRGAGGGGGGAAVRGPDQLQEEAARVGEVQQEGDQTKPRR

SEQ ID NO: 22884 - DNA, 1675 bp, Zea mays subsp. mays
  misc_feature (1)..(1675): Ceres Seq. ID no. 12410523
acacggttcctctctgaccactcctctcctctcctctcctctcctctcgccggcgcatcgcccgactgtcagtcagcctcagccatggccgcggaggaggagcagggcttccgcccgctggacgaggcgtccctgctcgcctacatcaaggccacgccggcgctcgcctcccgcctcggcggcggtggcagtctagactccatcgagatcaaggaggtcggcgacggcaacctcaacttcgtctacatcgtgcagtccgaggccggcgccatcgtcgtcaagcaggcgctcccgtacgtgcgctgcgtgggggactcgtggcccatgacgcgggagcgcgcctacttcgaggcctccacgctgcgggagcacggccgcctgtgcccggagcacacccccgagggtgtaccacttcgaccggaccttgtcgctgatggggatgcgctacatcgagcccccgcacatcatcctccggaagggcctcgtcgccggtgtcgagtacccgctgctcgccgaccacatgtccgattacatggccaagacgctcttcttcacctccctcctctataacaataccacggatcataagaacggagttgctaagtactctgcgaacgtggagatgtgtaggctcacggagcaagttgtgttctcggacccataccgtgtttccaaatttaatcggtggacctcgccttatctcgacaaagatgctgaggcagttcgcgaggatgatgagctcaagttggaagtagctgggctgaaatcgatgtttatcgagagagctcaagctctgattcatggagatctccacactggttctatcatggtgaccgaaggttcaactcaagtcattgatccagaatttgggttctatgggccaatgggttttgatattggagccttccttggaaacctgattttggcatactatgcacagaatgggcatgctgatcaagcgaatgatcgtaaggcttacaagaaatggatcttgaagacaattgaagagtcgtggaatttgttccagaaaaagtttgttgaactatggaataaacacaaagaaagcaatggggaggcatacctgcctgatatatacaacaagccaaagcttttgagcgttgttcagaagaagtacatgacaaacctatttcatgatagccttgggtttggttcagccaaaatgatcaggagaatagtcggaatcgctcacgtagaggatctcgagtcaatcaaggatgccagcaagagagcagagtgcgagcgtgctgccctcaactgtgcgaagacgatcctcaagggaagacaccagtttgagacgatcgagcaagtcgtcgagcatattcagtcattcgatcaggactgagaagacgacagtctatttgtgcgctgaagcctgaaggagccatactctcgtcaattaacccacgcatgcccgagtatcgatgaatcgtctgttttgtagtgatgaagcgcccggttgtttgtgatctctgtattggttgctaggtgagaaaagtatgtggtctcctggcttgaactgtgtgtacactattattccgggccggcatagcgagcagctgaataatgaaatgtacgggtcctcagtgaccatctcagtgcatataaacacgtgtgttaccaataaattttgttatggtgctggtggttctatggt

SEQ ID NO: 22885 - protein, 309 aa, Zea mays subsp. mays
  misc_feature (1)..(309): Ceres Seq. ID no. 12410524
MGMRYIEPPHIILRKGLVAGVEYPLLADHMSDYMAKTLFFTSLLYNNTTDHKNGVAKYSANVEMCRLTEQVVFSDPYRVSKFNRWTSPYLDKDAEAVREDDELKLEVAGLKSMFIERAQALIHGDLHTGSIMVTEGSTQVIDPEFGFYGPMGFDIGAFLGNLILAYYAQNGHADQANDRKAYKKWILKTIEESWNLFQKKFVELWNKHKESNGEAYLPDIYNKPKLLSVVQKKYMTNLFHDSLGFGSAKMIRRIVGIAHVEDLESIKDASKRAECERAALNCAKTILKGRHQFETIEQVVEHIQSFDQD

SEQ ID NO: 22886 - protein, 307 aa, Zea mays subsp. mays
  misc_feature (1)..(307): Ceres Seq. ID no. 12410525
MRYIEPPHIILRKGLVAGVEYPLLADHMSDYMAKTLFFTSLLYNNTTDHKNGVAKYSANVEMCRLTEQVVFSDPYRVSKFNRWTSPYLDKDAEAVREDDELKLEVAGLKSMFIERAQALIHGDLHTGSIMVTEGSTQVIDPEFGFYGPMGFDIGAFLGNLILAYYAQNGHADQANDRKAYKKWILKTIEESWNLFQKKFVELWNKHKESNGEAYLPDIYNKPKLLSVVQKKYMTNLFHDSLGFGSAKMIRRIVGIAHVEDLESIKDASKRAECERAALNCAKTILKGRHQFETIEQVVEHIQSFDQD

SEQ ID NO: 22887 - protein, 280 aa, Zea mays subsp. mays
  misc_feature (1)..(280): Ceres Seq. ID no. 12410526
MSDYMAKTLFFTSLLYNNTTDHKNGVAKYSANVEMCRLTEQVVFSDPYRVSKFNRWTSPYLDKDAEAVREDDELKLEVAGLKSMFIERAQALIHGDLHTGSIMVTEGSTQVIDPEFGFYGPMGFDIGAFLGNLILAYYAQNGHADQANDRKAYKKWILKTIEESWNLFQKKFVELWNKHKESNGEAYLPDIYNKPKLLSVVQKKYMTNLFHDSLGFGSAKMIRRIVGIAHVEDLESIKDASKRAECERAALNCAKTILKGRHQFETIEQVVEHIQSFDQD

SEQ ID NO: 22888 - DNA, 1669 bp, Zea mays subsp. mays
  misc_feature (1)..(1669): Ceres Seq. ID no. 12410539
gtctgcgtcatctcatttccgtttccgtctctccctctcctcgcccacacgtccaaaaccgaagggagcaaacgaacaaaacccggccgagtaacgcaggagacgaagctgcggaaggcgagcaagcacgatggaggcggcagcgtcagccgagtacgggtactacggcggaggcgcgggcccacacgagacgaagaccgccgggtgcggggaccacttcgtcgtggacgacctcctcgcgctgccgccgtacgacgaggaggaggagggggcgacaggcgagaccccgctgtgcctgcagcctgtcaaggaggagggcggcctcgggaatttctcggccgactcttccatcgtcacagcaatcgacagctgcagcaactccttctgtaggctagccgatgacgacttcccgggggaattctacgagccgtacgaccaactggtggagctagaatggttatcaaactacatgggcgagggcgaggaaactttcgcggcggaggacctggagaagctgaagctcatttccggtgggttctccccggcggctgtgaacgtgtcagcaccagctccagtgggcgtagcttcagccgcctctgcgacacagtccggtatgttcctgccggtcccggcaaaggcccgtagcaagcggtcccgcgcagctccgggcaactggtcgtcacggttggtcgtgctcccgccgaccccggcctcaccaccggcccctgcagcgtccatggccatttcgccctcggagtccggcatctcggcgcagcaggcgttccgcgccaagaagccgccgccgtcgaagaagaaagacgcggcggcaccggcagaagggcgacggtgcgtgcactgcgacacggacaagacgccgcagtggaggacggggcccatgggccccaagacgctgtgcaacgcgtgcggggtgcggtacaagtcggggcggctggtgccggagtacaggcccgcggcgagccccaccttcgtgatgtccaagcactccaactcccaccgaaaggtgctggagctgcgccgccagaaggaggtggtggtgcagcagccgccgcacgtgatggccggcgccggcggtcctgcaggcgggctgatgcgcatgcagagcgcgatgctgttggacgggccggtggcggcggtgtcgtcgtcgtcccccatcgtcggcggcgacgagtttttgatccaccagcacttagggacggcagactaccggcagcgcatctaactagatgagtttttgatcagttagcctactagcccagtaataatcaatatgcgcaccagcttaaatccaagtaccctccttaaaaacatgaaagaactaataatcttgccttaattaattaattaggagttatttttcctcttcactatattttgtttattaattagttgctgtgttccggttcagatccttggaaattttttcgtggcgactttcgtatggttttgtatctctctttttttttattttttgctagactctcctaattaacatgcctatgagaactctacgagagagagagagagagagagagttttcctatctattttcttcctttgtttcttagcattatatatgtaatttaaggggctagctctcgttctgcttccggtccggagcacgcatgaaaagaagactggaaattttggt

SEQ ID NO: 22889 - protein, 369 aa, Zea mays subsp. mays
  misc_feature (1)..(369): Ceres Seq. ID no. 12410540
MEAAASAEYGYYGGGAGPHETKTAGCGDHFVVDDLLALPPYDEEEEGATGETPLCLQPVKEEGGLGNFSADSSIVTAIDSCSNSFCRLADDDFPGEFYEPYDQLVELEWLSNYMGEGEETFAAEDLEKLKLISGGFSPAAVNVSAPAPVGVASAASATQSGMFLPVPAKARSKRSRAAPGNWSSRLVVLPPTPASPPAPAASMAISPSESGISAQQAFRAKKPPPSKKKDAAAPAEGRRCVHCDTDKTPQWRTGPMGPKTLCNACGVRYKSGRLVPEYRPAASPTFVMSKHSNSHRKVLELRRQKEVVVQQPPHVMAGAGGPAGGLMRMQSAMLLDGPVAAVSSSSPIVGGDEFLIHQHLGTADYRQRI

SEQ ID NO: 22890 - protein, 256 aa, Zea mays subsp. mays
  misc_feature (1)..(256): Ceres Seq. ID no. 12410541
MGEGEETFAAEDLEKLKLISGGFSPAAVNVSAPAPVGVASAASATQSGMFLPVPAKARSKRSRAAPGNWSSRLVVLPPTPASPPAPAASMAISPSESGISAQQAFRAKKPPPSKKKDAAAPAEGRRCVHCDTDKTPQWRTGPMGPKTLCNACGVRYKSGRLVPEYRPAASPTFVMSKHSNSHRKVLELRRQKEVVVQQPPHVMAGAGGPAGGLMRMQSAMLLDGPVAAVSSSSPIVGGDEFLIHQHLGTADYRQRI

SEQ ID NO: 22891 - protein, 208 aa, Zea mays subsp. mays
  misc_feature (1)..(208): Ceres Seq. ID no. 12410542
MFLPVPAKARSKRSRAAPGNWSSRLVVLPPTPASPPAPAASMAISPSESGISAQQAFRAKKPPPSKKKDAAAPAEGRRCVHCDTDKTPQWRTGPMGPKTLCNACGVRYKSGRLVPEYRPAASPTFVMSKHSNSHRKVLELRRQKEVVVQQPPHVMAGAGGPAGGLMRMQSAMLLDGPVAAVSSSSPIVGGDEFLIHQHLGTADYRQRI

SEQ ID NO: 22892 - DNA, 1572 bp, Zea mays subsp. mays
  misc_feature (1)..(1572): Ceres Seq. ID no. 12410547
gcacaaccaagaggcaacagagcaacgccagccacacacgacacgaaccaggtaaccagctgccgaggaaccctagcggaacactgtgcaggtgacggcggcgcgctaccggtgacggggtataccgtatacggcggcatcgtccccctcggcccctcctccatcccggcgcggcggcgcaggcagccagccttcaggggttaaacctgatgccaatccgcaggggttaaacctaatgccaatccgaagggccttgctgagctcgcctccatcgcccaggacctcgccgcctcctctgtgtcgttgcccagaacctcacagccaacacacgcatcctcttatcgtgcctcatcctccaagacgatgggctgctccccctacgtgcctcctcctccacgccgacaagcatctccccccgacacgcatcctcctccacgccgtgcttggtggtggcggcggacggtggttacctggggctgcggtgggccgtgcctggcatgcaaggtgagcagtccagcatcgagtggtcagtgtagggtgtgccgcggtctgccattgcgctgattgaagcagagtcagtgagttactgccgtgcgctgattggagccttcgtagccggctggagcgccgccgagaggtgaaggccacacgcgattgctgattagagattagagcagatccattgagccaccactccacctctgttcaccggcacgagtgaattgaattgggttttctgactcagattacttgttcactgtggggtgcaagcttaatcggccaccatggatgttgataagcaagaaacaatggaggagaccatccttgttggtgatgatctcatgcgtgggccgccatcccctgtcataccgaaagagatcgcatcacatgtccttgaagatgttgagctttgtgatggtatactcaagaaccttttcttatgcctacagatcaatgatattgagccattctgccaagatgaaattgtgctatatcgacagtgtgctgagaaaagggacaaggaaataagagagcggatgcaaaatagtgaatataaattgggtttttcaatgcccctggaagaagcgaaagagagagctactcaactccaatcagaagtaacactgctagaaaggcgcatgattcttgctagtggacttgagggtatggaaggatttcgccagagatggagcttgcatggacagcttgaagacacaaggaaaaggctagaagcactgaaccatggcatggcaaaacgagagaaccaaagttctacggcggagaggacaaaatctccagctaggaagaagtggttcttttggtaggttagtatcattgtcagacttgagaaatattgtagcttgagttgtattagcggcaatgctacacactttttaacttccacagcactctgcctccaactagccacttaatttgctaacaagtaacaagcgatttgcttatatatagctgcagttttaaatgtttaaatcatgtattaaaccttgtaactgcaggtgatggtacggttgcattccattttgtgatttatgacagccacttgccctcctc

SEQ ID NO: 22893 - protein, 179 aa, Zea mays subsp. mays
  misc_feature (1)..(179): Ceres Seq. ID no. 12410548
MDVDKQETMEETILVGDDLMRGPPSPVIPKEIASHVLEDVELCDGILKNLFLCLQINDIEPFCQDEIVLYRQCAEKRDKEIRERMQNSEYKLGFSMPLEEAKERATQLQSEVTLLERRMILASGLEGMEGFRQRWSLHGQLEDTRKRLEALNHGMAKRENQSSTAERTKSPARKKWFFW

SEQ ID NO: 22894 - protein, 171 aa, Zea mays subsp. mays
  misc_feature (1)..(171): Ceres Seq. ID no. 12410549
MEETILVGDDLMRGPPSPVIPKEIASHVLEDVELCDGILKNLFLCLQINDIEPFCQDEIVLYRQCAEKRDKEIRERMQNSEYKLGFSMPLEEAKERATQLQSEVTLLERRMILASGLEGMEGFRQRWSLHGQLEDTRKRLEALNHGMAKRENQSSTAERTKSPARKKWFFW

SEQ ID NO: 22895 - protein, 160 aa, Zea mays subsp. mays
  misc_feature (1)..(160): Ceres Seq. ID no. 12410550
MRGPPSPVIPKEIASHVLEDVELCDGILKNLFLCLQINDIEPFCQDEIVLYRQCAEKRDKEIRERMQNSEYKLGFSMPLEEAKERATQLQSEVTLLERRMILASGLEGMEGFRQRWSLHGQLEDTRKRLEALNHGMAKRENQSSTAERTKSPARKKWFFW

SEQ ID NO: 22896 - DNA, 1589 bp, Zea mays subsp. mays
  misc_feature (1)..(1589): Ceres Seq. ID no. 12410562
gtcgatttggattcgcagcggcggcggcggccaatcaaagcaatcatcacccagtcgcccagccccaacagacgctccagtccccagccctcccacccgcatcgatcgatgcgaggcacaatgccggccaccgactcctcctcctcgtcgtcgccggcggcggcgccgctgtcctctatcggccgctccatccgctcgctccgccgtgaccagaaccagatccactccttcccgccgccgccagacgccacagacgccttccagcgccgcgccgcccaactcctggccgacctcccggcagccgacgacgtcctctccctcgcctggacgcgccgcctcctcgaatccttcctcctctgcctcgaggagttccgcgccctgctcttcggctccggggactcgcccgccgctcgccccccgctcgaccgcctcgtcgccgacttctccgaccgcgccgtcaaggcgctcgacctctgcaacgccgtccgcgacggcctcgacctcgtccgccagtggcgcaagcacctcgccatcgccgcagccgtcctcgcctcgtcctctgattcctcctcgccgctcggggaggcccagatccgccgcgcccgcaaggcgctcaccgacctcaccatcctcatgctcgacgacagggacggcgggggcgtcgtcggccagcgcaaccgatccttcggccgcgccaacgagaagccccctcgccaccaccgccggagcagcagcggcgggagctccggctccggctccggctcccacctcaggtccctctcctggagcgtgtcccgggcctggtccgccgcgcgccagctgcaggccatcgggggaggactccccgtgccccgcccgcacgacaacgctgccacgggaggcctcgcctccgccgtctacaccatgggcgccgtcctcttcatcgtcgccttcgcgctcgtcgccgcaatcccgtgccaggaccgcggcctccacgcgcatttctccgtcatcaggaacctcccctgctcggcccccatcacaacgctctacgagcgcatcctcgacgagtccaagaagaaggaccgcaagaactcgtgcggcctgctcaaggagatccaccagattgagctctgctccaggcacctcatggagatcactgacgccgccgacttcccgttgcgcgaggacaaggacgccgtcttgcgggaggccgcgcaggacctagtgcacctgtgcgaatccatcaaggaagggctcgacccgctcgagcgccaggtcagagagatgttccacaggattgtgcgcacccgcacagaaatccttgactgcttgagtaagccacatggcaccgggtgatgggatacaggagattgccagcccgtttgcttgctgtgatgccccttaaccaaacattcttgtgaaatgcagcagcggtgttcagatgaggtagccttttctctgcataagttagcaactactgcatcatacaaatgcgtcttcatagaggcttgtccttctgtttgatataaattggtttgtttattatttttatttcatttcctcatctgtgtagattgtgaatccatacttggcagtgcttcgtagtc

SEQ ID NO: 22897 - protein, 445 aa, Zea mays subsp. mays
  misc_feature (1)..(445): Ceres Seq. ID no. 12410563
VDLDSQRRRRPIKAIITQSPSPNRRSSPQPSHPHRSMRGTMPATDSSSSSSPAAAPLSSIGRSIRSLRRDQNQIHSFPPPPDATDAFQRRAAQLLADLPAADDVLSLAWTRRLLESFLLCLEEFRALLFGSGDSPAARPPLDRLVADFSDRAVKALDLCNAVRDGLDLVRQWRKHLAIAAAVLASSSDSSSPLGEAQIRRARKALTDLTILMLDDRDGGGVVGQRNRSFGRANEKPPRHHRRSSSGGSSGSGSGSHLRSLSWSVSRAWSAARQLQAIGGGLPVPRPHDNAATGGLASAVYTMGAVLFIVAFALVAAIPCQDRGLHAHFSVIRNLPCSAPITTLYERILDESKKKDRKNSCGLLKEIHQIELCSRHLMEITDAADFPLREDKDAVLREAAQDLVHLCESIKEGLDPLERQVREMFHRIVRTRTEILDCLSKPHGTG

SEQ ID NO: 22898 - protein, 409 aa, Zea mays subsp. mays
  misc_feature (1)..(409): Ceres Seq. ID no. 12410564
MRGTMPATDSSSSSSPAAAPLSSIGRSIRSLRRDQNQIHSFPPPPDATDAFQRRAAQLLADLPAADDVLSLAWTRRLLESFLLCLEEFRALLFGSGDSPAARPPLDRLVADFSDRAVKALDLCNAVRDGLDLVRQWRKHLAIAAAVLASSSDSSSPLGEAQIRRARKALTDLTILMLDDRDGGGVVGQRNRSFGRANEKPPRHHRRSSSGGSSGSGSGSHLRSLSWSVSRAWSAARQLQAIGGGLPVPRPHDNAATGGLASAVYTMGAVLFIVAFALVAAIPCQDRGLHAHFSVIRNLPCSAPITTLYERILDESKKKDRKNSCGLLKEIHQIELCSRHLMEITDAADFPLREDKDAVLREAAQDLVHLCESIKEGLDPLERQVREMFHRIVRTRTEILDCLSKPHGTG

SEQ ID NO: 22899 - protein, 405 aa, Zea mays subsp. mays
  misc_feature (1)..(405): Ceres Seq. ID no. 12410565
MPATDSSSSSSPAAAPLSSIGRSIRSLRRDQNQIHSFPPPPDATDAFQRRAAQLLADLPAADDVLSLAWTRRLLESFLLCLEEFRALLFGSGDSPAARPPLDRLVADFSDRAVKALDLCNAVRDGLDLVRQWRKHLAIAAAVLASSSDSSSPLGEAQIRRARKALTDLTILMLDDRDGGGVVGQRNRSFGRANEKPPRHHRRSSSGGSSGSGSGSHLRSLSWSVSRAWSAARQLQAIGGGLPVPRPHDNAATGGLASAVYTMGAVLFIVAFALVAAIPCQDRGLHAHFSVIRNLPCSAPITTLYERILDESKKKDRKNSCGLLKEIHQIELCSRHLMEITDAADFPLREDKDAVLREAAQDLVHLCESIKEGLDPLERQVREMFHRIVRTRTEILDCLSKPHGTG

SEQ ID NO: 22900 - DNA, 1544 bp, Zea mays subsp. mays
  misc_feature (1)..(1544): Ceres Seq. ID no. 12410573
ctacgcgacacacacacaccatcactgcgctgcgctactctactccccaccaccgccgccacccaagagctttcctcgctgcacaagaaatggccacgaaccatctctcccaagggcagcacccgcaggcctggccctggggcgtggccatgtacaccaacctacactaccaccaccagcagcaccaccactacgagaaggagcacctgttcgagaagccgctgacgccgagcgacgtgggcaagctcaacaggctggtgatccccaagcagcacgccgagaggtacttccctctcagcagcagcggcgccggcgacaaaggcctcatcctgtgcttcgaggacgacgacgacgaggaggctgctgccgccaacaagccgtggcggttccgctactcgtactggaccagcagccagagctacgtgctcaccaagggctggagccgctacgtcaaggagaagcagcttgacgccggcgacgtcgtgcgcttccagaggatgcgtggtttcggcatgcccgaccgcctgttcatcagccacagccgccgcggcgagactactgctactgctgcaacaacagtgccaccgccacctgctgctgctgccgtgcgcgtagtagtggcacctgcacagagcgctggcttagagcaccagcagcagcagccgtcgccttggagcccaatgtgctacagcacatcgggctcgtactcgtacccccccaccagcagcccagccaattcccagcatgcctaccaccgccactcagctgaccatgaccacagcaacaacatgcaacatgcaggagaatctcagtccgacagagacaacaggagctgcagtgcagcttcggcaccgccgccgccgccgtcgcggcggctccggctgttcggcgtcaacctcgactgcgggccggggccggagccggagacaccaacggcgatgtacggctacatgcaccaaagcccctacgcttacaacaactggggcagtccataccagcatgacgaggagatttaagattatgcctgcagaatccaaacagccaaagtagtagcagactagtagttgctagcagcagcagcctagtactacttgcacacgaagtgacaggattgaattgacctgtacacggggagaaaaaaaaaggaaggaaggaagtggagagagatcccttgtttcccgggcaatcttccttccaagttccatccccgcccccagaagaatgctgctgcctttttgctgttccgttttttttaaaattttattttcttctccatggcttccagaaaaccctacttactgtaggggatctggtagcagggggccgggcatgcgtgggaggtttgcaggaagcatcaagctgcgaaggagctggaacgagagacaacagacagagagaaagatgtgtgtgtgtatgtatgtgtgtgtcatctgtacctatatgtcttaatttgtgggtccgatagagaacaaactgcgaagttgatgtgtgtgcctgcctgcctcctgaagaaacaatgcaatatccccatggggattttgttc

SEQ ID NO: 22901 - protein, 337 aa, Zea mays subsp. mays
  misc_feature (1)..(337): Ceres Seq. ID no. 12410574
TRHTHTITALRYSTPHHRRHPRAFLAAQEMATNHLSQGQHPQAWPWGVAMYTNLHYHHQQHHHYEKEHLFEKPLTPSDVGKLNRLVIPKQHAERYFPLSSSGAGDKGLILCFEDDDDEEAAAANKPWRFRYSYWTSSQSYVLTKGWSRYVKEKQLDAGDVVRFQRMRGFGMPDRLFISHSRRGETTATAATTVPPPPAAAAVRVVVAPAQSAGLEHQQQQPSPWSPMCYSTSGSYSYPPTSSPANSQHAYHRHSADHDHSNNMQHAGESQSDRDNRSCSAASAPPPPPSRRLRLFGVNLDCGPGPEPETPTAMYGYMHQSPYAYNNWGSPYQHDEEI

SEQ ID NO: 22902 - protein, 308 aa, Zea mays subsp. mays
  misc_feature (1)..(308): Ceres Seq. ID no. 12410575
MATNHLSQGQHPQAWPWGVAMYTNLHYHHQQHHHYEKEHLFEKPLTPSDVGKLNRLVIPKQHAERYFPLSSSGAGDKGLILCFEDDDDEEAAAANKPWRFRYSYWTSSQSYVLTKGWSRYVKEKQLDAGDVVRFQRMRGFGMPDRLFISHSRRGETTATAATTVPPPPAAAAVRVVVAPAQSAGLEHQQQQPSPWSPMCYSTSGSYSYPPTSSPANSQHAYHRHSADHDHSNNMQHAGESQSDRDNRSCSAASAPPPPPSRRLRLFGVNLDCGPGPEPETPTAMYGYMHQSPYAYNNWGSPYQHDEEI

SEQ ID NO: 22903 - protein, 288 aa, Zea mays subsp. mays
  misc_feature (1)..(288): Ceres Seq. ID no. 12410576
MYTNLHYHHQQHHHYEKEHLFEKPLTPSDVGKLNRLVIPKQHAERYFPLSSSGAGDKGLILCFEDDDDEEAAAANKPWRFRYSYWTSSQSYVLTKGWSRYVKEKQLDAGDVVRFQRMRGFGMPDRLFISHSRRGETTATAATTVPPPPAAAAVRVVVAPAQSAGLEHQQQQPSPWSPMCYSTSGSYSYPPTSSPANSQHAYHRHSADHDHSNNMQHAGESQSDRDNRSCSAASAPPPPPSRRLRLFGVNLDCGPGPEPETPTAMYGYMHQSPYAYNNWGSPYQHDEEI

SEQ ID NO: 22904 - DNA, 1421 bp, Zea mays subsp. mays
  misc_feature (1)..(1421): Ceres Seq. ID no. 12410589
aatatcatgcgcaggggctgaaagcctgaaactgctcaagacgccaccgtcttcctccgcgatcttcagttctctgtctctccctctctctttcctctagctcccaaccaagccaagagtacgtcgtcaagcgcgccgcgcgtgtgtgtgtcagtaggctacagggctcggaggaacgccgtcatgagcttgatcagcatgatggaggcgcggctgccgccgggggttccggttccacccgagggacgacgagctcgtgctcgactacctctgccgcaagctctccggcaaaggcggcggcggagcgtacggcggcatcgccatggtcgacgtcgacctcaacaagtgcgagccgtgggatcttccagacgaggcgtgcgtgggcggccgcgagtggtacttcttcagcctgcacgaccgcaagtacgccacggggcagcggaccaaccgcgccacgcgcaccgggtactggaaggccacgggcaaggaccgccccatctccgtctccggccgccgcggggccggcgacaccgccgcgctggtcgggatgcgcaagacgctggtgttctaccagggcagggcgccccgcgggagcaagaccgagtgggtcatgcacgagttccgcgtggacggcccgcccgttgccgaccgccccggctcacctctcctccagctccagctccaggaggattgggtcctgtgcagggtgttctacaagagccgaactgccagcacaagaccagcagcaggccccgacgaggccgggccgctgtccagccagctgatcggcggcctgccgatgccgcgaatggccgcccctgctgacgccgcctacctgtccttcgacgtcacacctgccgctggcggctactaccaccaccaagactccggccccgcggacgcgcgccaccacctgccgccgccgccggcgcagcctttcagcaggagtagcctgtccagcttgcgggacttgctcagcagcatggcctgaaggcagcgacgccgccgccgccgttcgggagacggagctccacctgcagctggagggctggaccgaggcggcctacgcgcagcagcagggcggcgccatgccggcgcacccgcagcagacgtggagcccgtttctgagctcgggatgacggcacgcggctgggggctcacgtgtgcgtggcgccctggcgcctggcgggcatcgcgtgcgtagtgaatagtcaacaatttgcttgtctttcttgcaatgtaacgttgacttggttagtgcatgcgatctctgccgtttgttaggcgtagggtaaaaacccacgcagcggataggtggaatgccttggtgattattggtgcagtaacttttgtacagttgattgttgcagaaaattactctctctttgtctgccttctaaaaaaaaaaaagaaannaaaaa

SEQ ID NO: 22905 - protein, 222 aa, Zea mays subsp. mays
  misc_feature (1)..(222): Ceres Seq. ID no. 12410590
MVDVDLNKCEPWDLPDEACVGGREWYFFSLHDRKYATGQRTNRATRTGYWKATGKDRPISVSGRRGAGDTAALVGMRKTLVFYQGRAPRGSKTEWVMHEFRVDGPPVADRPGSPLLQLQLQEDWVLCRVFYKSRTASTRPAAGPDEAGPLSSQLIGGLPMPRMAAPADAAYLSFDVTPAAGGYYHHQDSGPADARHHLPPPPAQPFSRSSLSSLRDLLSSMA

SEQ ID NO: 22906 - protein, 213 aa, Zea mays subsp. mays
  misc_feature (1)..(213): Ceres Seq. ID no. 12410591
MSLISMMEARLPPGVPVPPEGRRARARLPLPQALRQRRRRSVRRHRHGRRRPQQVRAVGSSRRGVRGRPRVVLLQPARPQVRHGAADQPRHAHRVLEGHGQGPPHLRLRPPRGRRHRRAGRDAQDAGVLPGQGAPREQDRVGHARVPRGRPARCRPPRLTSPPAPAPGGLGPVQGVLQEPNCQHKTSSRPRRGRAAVQPADRRPADAANGRPC

SEQ ID NO: 22907 - protein, 208 aa, Zea mays subsp. mays
  misc_feature (1)..(208): Ceres Seq. ID no. 12410592
MMEARLPPGVPVPPEGRRARARLPLPQALRQRRRRSVRRHRHGRRRPQQVRAVGSSRRGVRGRPRVVLLQPARPQVRHGAADQPRHAHRVLEGHGQGPPHLRLRPPRGRRHRRAGRDAQDAGVLPGQGAPREQDRVGHARVPRGRPARCRPPRLTSPPAPAPGGLGPVQGVLQEPNCQHKTSSRPRRGRAAVQPADRRPADAANGRPC

SEQ ID NO: 22908 - DNA, 1734 bp, Zea mays subsp. mays
  misc_feature (1)..(1734): Ceres Seq. ID no. 12410608
atagaagaagagcaggcaggagctataagtaccccgcccccttccaccctctccttccacctccctcccttgctgcctcatccattccagagctgcgaagacagacagacagagagaaagagggatcgacggagcaaggcggggccgtgtccggtcacacacgagcgagccctctcggccgcgcgtttgtgaatggtgaacggcgagcggcgggcggacgcggagtgcacgcgggcgtcgctgctggggaggtatgagatcgggcggaccctcggcgagggcaacttcggcaaggtgaagtacgcgcgccacatcgccagcggcggccacttcgccatcaagatcctcgaccgcagcaagatcctctccctccgcatcgacgaccagatcaggagggagatcgggacgctcaagctgctcaagcacccgaatgtcgtccgcttgcacgaggttgctgccagtaaaacgaagatctacatggtgcttgagtttgtcaacggcggcgagctcttcgacaagatcgctatcaaggggaaactgtccgaacacgagggcaggaggctcttccagcagctaatcgacggcgtcagctattgccatgacagaggtgtctaccaccgagacctcaagccagagaatgtccttgttgatcggaagggcaccatcaagatctctgacttcggcctcagcgctctacctcaacatctcgggagtgacggacttctgcacacaacatgtggcagccccaactacatagctcctgaggttctgcaaaacagaggctatgacggctccttgtcagatctctggtcgtgtggggtgatcctctacgtgatgcttgttggctgccttcccctcgacgacaggaacctcgtcgttctttatcagaagattttcaagggagactgtcagatccccaagtggctttcgcctgccgcgcaggaccttctcaagaggatcctccaaccgaatccgatgaagaggatcaacgtcgcggggatcagggagcacgagtggttcaagaaggactacgtgcctgctgttccgcacgatgatgacgaagacgtccttcctagtccagctccctcgataaagccaatcgatgagccggcgcaagagaagtgttctcctatcaacgcttttcagttgatcgggatggcctcttcccttgacctttctggtttcttcgaggaagaggatgcagcgcaaagaaagattcggttcacttcgacgcacccacccaaggatctatttgacaagatcgagagcgttgtcatggagatgggattcaaagtccataggggggcaggcaagctcaaggtcttgaagaatagcaagtgttccaggaacccgtcatcattgttggtgtgcaccgaggtgtttgagctcggtccatcattatatgtcgtagagcttaggaaatcccacggagactctacgttgtatagacagctgtgcgaaaggctctccgatgagctaggtgcctgcaagacagaccagatcgcgaggactgaatcatcgagtgacgacctctcgagcgtcgatggcgaagcgttccctctatctgggttctgatcatattgctttccctgtgttgttttgggaacaggggatgaggaacatgctcgttcctgatgcaattctagattaggatcatgaatatagtgtacaaagccagcggcggcggcggtgcaaattagccaccgggttgaatataaataatatatatatatg

SEQ ID NO: 22909 - protein, 460 aa, Zea mays subsp. mays
  misc_feature (1)..(460): Ceres Seq. ID no. 12410609
MVNGERRADAECTRASLLGRYEIGRTLGEGNFGKVKYARHIASGGHFAIKILDRSKILSLRIDDQIRREIGTLKLLKHPNVVRLHEVAASKTKIYMVLEFVNGGELFDKIAIKGKLSEHEGRRLFQQLIDGVSYCHDRGVYHRDLKPENVLVDRKGTIKISDFGLSALPQHLGSDGLLHTTCGSPNYIAPEVLQNRGYDGSLSDLWSCGVILYVMLVGCLPLDDRNLVVLYQKIFKGDCQIPKWLSPAAQDLLKRILQPNPMKRINVAGIREHEWFKKDYVPAVPHDDDEDVLPSPAPSIKPIDEPAQEKCSPINAFQLIGMASSLDLSGFFEEEDAAQRKIRFTSTHPPKDLFDKIESVVMEMGFKVHRGAGKLKVLKNSKCSRNPSSLLVCTEVFELGPSLYVVELRKSHGDSTLYRQLCERLSDELGACKTDQIARTESSSDDLSSVDGEAFPLSGF

SEQ ID NO: 22910 - protein, 365 aa, Zea mays subsp. mays
  misc_feature (1)..(365): Ceres Seq. ID no. 12410610
MVLEFVNGGELFDKIAIKGKLSEHEGRRLFQQLIDGVSYCHDRGVYHRDLKPENVLVDRKGTIKISDFGLSALPQHLGSDGLLHTTCGSPNYIAPEVLQNRGYDGSLSDLWSCGVILYVMLVGCLPLDDRNLVVLYQKIFKGDCQIPKWLSPAAQDLLKRILQPNPMKRINVAGIREHEWFKKDYVPAVPHDDDEDVLPSPAPSIKPIDEPAQEKCSPINAFQLIGMASSLDLSGFFEEEDAAQRKIRFTSTHPPKDLFDKIESVVMEMGFKVHRGAGKLKVLKNSKCSRNPSSLLVCTEVFELGPSLYVVELRKSHGDSTLYRQLCERLSDELGACKTDQIARTESSSDDLSSVDGEAFPLSGF

SEQ ID NO: 22911 - protein, 246 aa, Zea mays subsp. mays
  misc_feature (1)..(246): Ceres Seq. ID no. 12410611
MLVGCLPLDDRNLVVLYQKIFKGDCQIPKWLSPAAQDLLKRILQPNPMKRINVAGIREHEWFKKDYVPAVPHDDDEDVLPSPAPSIKPIDEPAQEKCSPINAFQLIGMASSLDLSGFFEEEDAAQRKIRFTSTHPPKDLFDKIESVVMEMGFKVHRGAGKLKVLKNSKCSRNPSSLLVCTEVFELGPSLYVVELRKSHGDSTLYRQLCERLSDELGACKTDQIARTESSSDDLSSVDGEAFPLSGF

SEQ ID NO: 22912 - DNA, 1360 bp, Zea mays subsp. mays
  misc_feature (1)..(1360): Ceres Seq. ID no. 12410616
aattactgtgcctttatcttcaacccaaaccatccattaccatattcctaagctatcatggtgcaccggacttccatagccgatgtgcatgtgatgtgcatggatctaagcccaaagaaacccaacaaggccagcgccagcgacggcggagcctactacgactggtcccccgccgatctgcccatgctcggcgttgcctccattggtgccgccaagctctgcctcaccgccggaggtcttgccctacccagctactccgactctgccaagatcgcctacgtcctccaaggcaaaggtatattcggcgtggttctcccggaggcgaccaaggagaaggtcatctccgtcaaggaaggcgacgcgctggcgctccccttcggcgtcgtcacctggtggcacaacaacgccgacgccgctatctccgacctcgtggtgctcttcctcggcgacacctccacgggccacaagccgggccagttcacaaacttccagctcaccggctccacgggcatcttcacgggcttctccacagagttcgttgcccgcgcatgggacctcacccaggacgacgccgccaagctcgtctccacccagcccggatccggcattgtcagggtcaaggacgggcacaagatgcccgaggcgcgcgacgaggacaggcagggcctggtcctcaactgcctagaggcgccgcttgacgtcgacatcaagaacggagggcgcgtcgtggtcctcaacacccagaacctgccgctcgtcaaggaggtcgggctcggtgctgaccttgtcaggatcgacgcccactccatgtgctcgcccggcttctcctgcgactccgcctaccaggtcacctacatcgtgcgcggcagtggccgcgtccaggttgttgggatcgacggcacgcgagtgctcgagactcgcgccgagggaggctgcctcttcatcgtgccaaggttcttcgttgtctcaaagatcgccgacgaaaccggcatggagtggttctccatcatcaccacccccaacccaatctttagccacttggcgggccggacatcggtgtggaaggcaatatctccggcggtcttgcagtcgtcgttcaacaccacgccggagatggagaagctgttccgtagcaagaggcttgactcggagatcttctttgcgccttcaaactgattcattcgccggtggaaattggtccatccatctcgagtaaacttggtgtcctgggtgtgttcttagcagcttcagtttagaataatcatgttatgtcttcatcatcagttttttagatcgcttcatgtaataataaacttgagatggtacacatgtttcttaattagttctcttggtatttttt

SEQ ID NO: 22913 - protein, 372 aa, Zea mays subsp. mays
  misc_feature (1)..(372): Ceres Seq. ID no. 12410617
MVHRTSIADVHVMCMDLSPKKPNKASASDGGAYYDWSPADLPMLGVASIGAAKLCLTAGGLALPSYSDSAKIAYVLQGKGIFGVVLPEATKEKVISVKEGDALALPFGVVTWWHNNADAAISDLVVLFLGDTSTGHKPGQFTNFQLTGSTGIFTGFSTEFVARAWDLTQDDAAKLVSTQPGSGIVRVKDGHKMPEARDEDRQGLVLNCLEAPLDVDIKNGGRVVVLNTQNLPLVKEVGLGADLVRIDAHSMCSPGFSCDSAYQVTYIVRGSGRVQVVGIDGTRVLETRAEGGCLFIVPRFFVVSKIADETGMEWFSIITTPNPIFSHLAGRTSVWKAISPAVLQSSFNTTPEMEKLFRSKRLDSEIFFAPSN

SEQ ID NO: 22914 - protein, 360 aa, Zea mays subsp. mays
  misc_feature (1)..(360): Ceres Seq. ID no. 12410618
MCMDLSPKKPNKASASDGGAYYDWSPADLPMLGVASIGAAKLCLTAGGLALPSYSDSAKIAYVLQGKGIFGVVLPEATKEKVISVKEGDALALPFGVVTWWHNNADAAISDLVVLFLGDTSTGHKPGQFTNFQLTGSTGIFTGFSTEFVARAWDLTQDDAAKLVSTQPGSGIVRVKDGHKMPEARDEDRQGLVLNCLEAPLDVDIKNGGRVVVLNTQNLPLVKEVGLGADLVRIDAHSMCSPGFSCDSAYQVTYIVRGSGRVQVVGIDGTRVLETRAEGGCLFIVPRFFVVSKIADETGMEWFSIITTPNPIFSHLAGRTSVWKAISPAVLQSSFNTTPEMEKLFRSKRLDSEIFFAPSN

SEQ ID NO: 22915 - protein, 358 aa, Zea mays subsp. mays
  misc_feature (1)..(358): Ceres Seq. ID no. 12410619
MDLSPKKPNKASASDGGAYYDWSPADLPMLGVASIGAAKLCLTAGGLALPSYSDSAKIAYVLQGKGIFGVVLPEATKEKVISVKEGDALALPFGVVTWWHNNADAAISDLVVLFLGDTSTGHKPGQFTNFQLTGSTGIFTGFSTEFVARAWDLTQDDAAKLVSTQPGSGIVRVKDGHKMPEARDEDRQGLVLNCLEAPLDVDIKNGGRVVVLNTQNLPLVKEVGLGADLVRIDAHSMCSPGFSCDSAYQVTYIVRGSGRVQVVGIDGTRVLETRAEGGCLFIVPRFFVVSKIADETGMEWFSIITTPNPIFSHLAGRTSVWKAISPAVLQSSFNTTPEMEKLFRSKRLDSEIFFAPSN

SEQ ID NO: 22916 - DNA, 1325 bp, Zea mays subsp. mays
  misc_feature (1)..(1325): Ceres Seq. ID no. 12410620
actacaccagggcacgacgagcgttgcgtcgtgagtgtttgtgtttcagagctgagactgagagagagagagagaggtggtgatggctctgcaggcgcaggggacgcgggtgccgctggtcctggcgctcttcctcctcctggccggttgtggcagcgaggcgcagccgctggtgccggcgctgtttacgttcggtgactcgtcggtggacgtcgggaacaacgactacctccacaccatcatcaaggccaacttcccgccctacggcagggacttcgccaaccacgtcgccaccgggaggttctgcaacggcaagctggcgaccgacatcaccgccgacacgctggggttcactacctatcctgccgtgtacctcagcccacaggcgtcggggcagaacctcctcatcggcgccaacttcgcgtccgcggggtctgggtactacgaccacacggcacttatgtatcacgcgatcccgctgtcccagcagctggagtacttcagggagtaccagacgaagctggcggcggtggccggcgcggggcaggcgcgctccatcctcagcggcgcgctgtacatcgtcagcgccggcgccagcgacttcgtgcagaactactacataaacccgctgctgttcaagacgcagacggccgaccagttctccgaccgcctcgtggccatcttcggccgcaccgtgcaggagctctacggcatgggggcgcgccgcgtcggcgtcacgtcgctgccgccgctgggctgcctgccggcgtccatcacgctgttcgggcacggcgccgccgggtgcgtgtccaggctcaacagcgacgcgcagagcttcaaccggaagatgaacgccaccgtggacgcgctggcgcggcggtacccggacctcaagatcgccgtcttcgacatctacacgccgctgtacgacctggccacggacccccagtcgcagggcttcgcggaggcccggcggggatgctgcgggacgggcacggtggagaccaccgtgctcctctgcaaccccaagtccgtcgggacgtgccccaacgccacgtcctacgtcttctgggacgccgtccacccgtccgaggcggccaaccaggtcatcgctgactcgctcatcaccgagggcctcatcctcgtcacgtaatcatgcttttgttttggcttcaaatcgatcagactacacaaaagtcgtcgttcctaaacgtatactatgcctgtaaatttattcctcttgtttttcttatttgcgttgattaatgttttcggaagtataagcaacaacatgaatgaatgaatgaatgaatgaatggactcct

SEQ ID NO: 22917 - protein, 356 aa, Zea mays subsp. mays
  misc_feature (1)..(356): Ceres Seq. ID no. 12410621
MALQAQGTRVPLVLALFLLLAGCGSEAQPLVPALFTFGDSSVDVGNNDYLHTIIKANFPPYGRDFANHVATGRFCNGKLATDITADTLGFTTYPAVYLSPQASGQNLLIGANFASAGSGYYDHTALMYHAIPLSQQLEYFREYQTKLAAVAGAGQARSILSGALYIVSAGASDFVQNYYINPLLFKTQTADQFSDRLVAIFGRTVQELYGMGARRVGVTSLPPLGCLPASITLFGHGAAGCVSRLNSDAQSFNRKMNATVDALARRYPDLKIAVFDIYTPLYDLATDPQSQGFAEARRGCCGTGTVETTVLLCNPKSVGTCPNATSYVFWDAVHPSEAANQVIADSLITEGLILVT

SEQ ID NO: 22918 - protein, 230 aa, Zea mays subsp. mays
  misc_feature (1)..(230): Ceres Seq. ID no. 12410622
MYHAIPLSQQLEYFREYQTKLAAVAGAGQARSILSGALYIVSAGASDFVQNYYINPLLFKTQTADQFSDRLVAIFGRTVQELYGMGARRVGVTSLPPLGCLPASITLFGHGAAGCVSRLNSDAQSFNRKMNATVDALARRYPDLKIAVFDIYTPLYDLATDPQSQGFAEARRGCCGTGTVETTVLLCNPKSVGTCPNATSYVFWDAVHPSEAANQVIADSLITEGLILVT

SEQ ID NO: 22919 - DNA, 1843 bp, Zea mays subsp. mays
  misc_feature (1)..(1843): Ceres Seq. ID no. 12410645
aggaagccatccgctccctctcgaacattggatcctatgctctcctctccctgctcgcagtcagggcacagggactgcctccggagaccggagcaggccgcaagcgtccaggttcgagacgccagcacgctctcgcagtacagcagcattatcagggagcgtgccgtgggagtgggaggttgcctcaggtgcggagcagtcgccggcggcgaccatcggtgtctgagatgaaggagagaggcggctccagggcggcagtggacgagcgctacgcgcagtggaagtcgctcatccccgttctctacgactggtttgccaaccacaacctcgtttggccatccctctcctgccggtgggggccacagtttgagaaagctacctacaagaatcgtcaacgcctttacctatctgaacagaccgatgggagtgtgcctaatactctggttatcgcaaactgtgaagttgtgaaaccaagggttgcagctgctgaacatatctcgcagtttaacgaggaagcacgatcaccttttgtaaagaagtacaagactatagttcatcctggtgaagttaacagaatcagggagcttccacagaacagtaagatcatagccacacacactgacagtccagatgtacttgtttgggatgttgaagcacaaccaaatagacatgctgtcttaggagcttctgaatctcgtcctgatctgatattaacgggacaccaggaaaatgcagaatttgcgcttgccatgtgtccagcagaaccatatgtcctgtcaggaggaaaggacaaatttgttgtcttgtggagcatccaagaccacatatctgcccttggggattcctcgtcttctcccggagcatctggcagcaagcagtctggcaaaattgcaaatgaaaaggagagtcctaaagttgatcctagaggtatattccatggccatgacagtactgttgaagatgttcagttctgcccttccagtgcgcaggagttttgtagtgtgggtgatgatgcttgtcttattctgtgggatgctcgaactggcactgacccagctgttaaggttgagaaagctcacagtggagatgttcattgtgttgattggaatccccttgatgttaactatatcttaactggttctgccgataactctgtccgaatgtgggatcgtcgcaatctgggttcgggaggagctggttctccaattcacaaatttgagggccataaagctgctgttctttgtgttcagtggtcacctgacagagcatctgtttttggaagttctgcagaagatggtttcttaaatgtttgggaccatgagaaggttgggaagaagaaaaattctaatgtcccagctgggcttttctttcagcatgctggtcatagggataagatcgtagacttccactggaattcgtcagatccttggacaattgtcagtgtctcagatgatggtgagagcactggtggaggtggaacactgcagatatggcgaatgagtgatttgatctaccgcccagaggatgaagttcttacagagctggagaatttcaaggctcacctggccagttgcgctccgaggaattgagtcatgtgaaaactctgagtaggttatgtagtttcctggccctaagtagtttcctggccataagtatggccccaattgacattggatctgtcttctcatgctcctagagctgtacccttcgaggtgcttgtgcctttgtgagcttgtgttgaaccatgttgtatgactaaatagtccgcaaacgagtcagctggatggctaatctgtaggccaactattgggatattgttggatattatcaacaaccggttcag

SEQ ID NO: 22920 - protein, 528 aa, Zea mays subsp. mays
  misc_feature (1)..(528): Ceres Seq. ID no. 12410646
EAIRSLSNIGSYALLSLLAVRAQGLPPETGAGRKRPGSRRQHALAVQQHYQGACRGSGRLPQVRSSRRRRPSVSEMKERGGSRAAVDERYAQWKSLIPVLYDWFANHNLVWPSLSCRWGPQFEKATYKNRQRLYLSEQTDGSVPNTLVIANCEVVKPRVAAAEHISQFNEEARSPFVKKYKTIVHPGEVNRIRELPQNSKIIATHTDSPDVLVWDVEAQPNRHAVLGASESRPDLILTGHQENAEFALAMCPAEPYVLSGGKDKFVVLWSIQDHISALGDSSSSPGASGSKQSGKIANEKESPKVDPRGIFHGHDSTVEDVQFCPSSAQEFCSVGDDACLILWDARTGTDPAVKVEKAHSGDVHCVDWNPLDVNYILTGSADNSVRMWDRRNLGSGGAGSPIHKFEGHKAAVLCVQWSPDRASVFGSSAEDGFLNVWDHEKVGKKKNSNVPAGLFFQHAGHRDKIVDFHWNSSDPWTIVSVSDDGESTGGGGTLQIWRMSDLIYRPEDEVLTELENFKAHLASCAPRN

SEQ ID NO: 22921 - protein, 453 aa, Zea mays subsp. mays
  misc_feature (1)..(453): Ceres Seq. ID no. 12410647
MKERGGSRAAVDERYAQWKSLIPVLYDWFANHNLVWPSLSCRWGPQFEKATYKNRQRLYLSEQTDGSVPNTLVIANCEVVKPRVAAAEHISQFNEEARSPFVKKYKTIVHPGEVNRIRELPQNSKIIATHTDSPDVLVWDVEAQPNRHAVLGASESRPDLILTGHQENAEFALAMCPAEPYVLSGGKDKFVVLWSIQDHISALGDSSSSPGASGSKQSGKIANEKESPKVDPRGIFHGHDSTVEDVQFCPSSAQEFCSVGDDACLILWDARTGTDPAVKVEKAHSGDVHCVDWNPLDVNYILTGSADNSVRMWDRRNLGSGGAGSPIHKFEGHKAAVLCVQWSPDRASVFGSSAEDGFLNVWDHEKVGKKKNSNVPAGLFFQHAGHRDKIVDFHWNSSDPWTIVSVSDDGESTGGGGTLQIWRMSDLIYRPEDEVLTELENFKAHLASCAPRN

SEQ ID NO: 22922 - protein, 279 aa, Zea mays subsp. mays
  misc_feature (1)..(279): Ceres Seq. ID no. 12410648
MCPAEPYVLSGGKDKFVVLWSIQDHISALGDSSSSPGASGSKQSGKIANEKESPKVDPRGIFHGHDSTVEDVQFCPSSAQEFCSVGDDACLILWDARTGTDPAVKVEKAHSGDVHCVDWNPLDVNYILTGSADNSVRMWDRRNLGSGGAGSPIHKFEGHKAAVLCVQWSPDRASVFGSSAEDGFLNVWDHEKVGKKKNSNVPAGLFFQHAGHRDKIVDFHWNSSDPWTIVSVSDDGESTGGGGTLQIWRMSDLIYRPEDEVLTELENFKAHLASCAPRN

SEQ ID NO: 22923 - DNA, 1328 bp, Zea mays subsp. mays
  misc_feature (1)..(1328): Ceres Seq. ID no. 12410649
accaaagccctagctcggctcacttgctttcctggccgccgtctcctccgcggctcttaacgccgcatccactcgccggttcttaacgccgcccgccgcctcctccgcggctctgccctcccgccgctgccgccgcctacccaggaatcaggatgcgggtgaagaagcggtcgaagcaccgcaaagcggtcaagttctacgccacatgcttcggcttccgcgagccctataaagtcctcatcgacggcaccttcgtccaccacctcctcacccagcgcctcctcccggccgacgaggctctccgagacctcctctcggcctccaggacgccagccctcttcacctccaagtgcatcctcgcagagctcagacgtctcggcaagtcacatgccgaatcatttgacgccgcgcagcttctcaccacaaccaagtgtgagcatgacaaggtggtcggtgcagttaactgtgtccagtcactgataggtgataaaaatcctgaacatttcttcgttgccacccaggatcctggtctccgagaaaacttacgagagattcctggggttcctgtgatatatggtctgaagaactctttatgcatagaacggccctctatgcagcaacgcaagtttgctcaattggatgaggagaagcgtctcaatatggatatctctgaatacaagaagttactgaaggctgcatcagaaggaaagacaattgccagtgaaaatggaagtggcgaagaacaacatgagatgcctattagttctcttgtaaaaaatgcacttcatgttactgataaaaccaagtttaagaggaacaaagcaaagggtccaaacccactctcctgtaagaagaagaaaccaaagctccccacggctattcaaaagcaggcaggtacggctgatggcgaggcaaagaggaagagggttcggaagcggaagagaggccaaaaagataacaagcaattggaggctgcgaactagaaggatgggcttgcgtaggaagtttcagtgctcttgctagacatccatcctgactccggagcaagtcaactatggaggagttcctttctcccacacaggattcagtatgccatgccataccatgctcattatatgttgaagatgcttcttgcaacgtaacacttgattggttatggtgatcgtgaatccttctctagaggatgttattggatgtttcttttgtcgcaagatgcaactttaaatgttttttgaagcaaaagtttgatgccagtagctctaccaggttcttgcttgccctgctacatgtgtgatcccattcttcaattgtaagatgtgtttgttgag

SEQ ID NO: 22924 - protein, 276 aa, Zea mays subsp. mays
  misc_feature (1)..(276): Ceres Seq. ID no. 12410650
MRVKKRSKHRKAVKFYATCFGFREPYKVLIDGTFVHHLLTQRLLPADEALRDLLSASRTPALFTSKCILAELRRLGKSHAESFDAAQLLTTTKCEHDKVVGAVNCVQSLIGDKNPEHFFVATQDPGLRENLREIPGVPVIYGLKNSLCIERPSMQQRKFAQLDEEKRLNMDISEYKKLLKAASEGKTIASENGSGEEQHEMPISSLVKNALHVTDKTKFKRNKAKGPNPLSCKKKKPKLPTAIQKQAGTADGEAKRKRVRKRKRGQKDNKQLEAAN

SEQ ID NO: 22925 - DNA, 1401 bp, Zea mays subsp. mays
  misc_feature (1)..(1401): Ceres Seq. ID no. 12410655
aactttgggctgtcgccaccagaaagccctcacgagtcctttgcctcctcactccgtcaggctcgtcgccacagggttttgttcctaactttttagcttcaatttttgtcttgaatggcaacacctctggatgttccactggatgatttgattaagagcagagctgggaggggaacaggaagaggcaggggacaaggagggggtcgaggcagaggtgatggccaaaggttggctcgtggttcgtggcgtgggcgtggtactggcaacttccgtgaaaggggacttggggtgtcttcgcggaggccacttggtgttaatacttggtcctcatcatttgctattgccaagtcattcaataaagcaaaggattttgtgtggagacatgatctctttgaggatagcatggtagcagctgggctttctgggatagaatctggaacaaagctttacatttcaaatttgcactatggagtgacaagtgaagatctacaggagcttttttcagaaatgggtcatttgaagcactgtgctgttcattatgacagttatagacacccaactggttcggctgaggtgatattcaccaggagaagtgaagctctcgcagcactgaagcgatataataatatgcgccttgatgggaaggccatgaagattgaagtaataggagcagaattgggtctatcagctgctgccgtaccccagattagtgttgttcctggtgcaagcagaagagggcagagagaagttgttatgatgcctggtggaagtgggtttggacaaggtgcatctggcccatctagttcgcttcctgggtggaagcgtggaggctttgttcgaagaggacaagggcgtgttagttttcctcaaagagggcgagggcaagtgcgcagccgtggccgtggccgtggccgcagtagccttgttcagagccgtggacgtggctatgtgcgcaggggtaatgcagagaaatcagccaaacaattggacaatgaacttgacaactacaactctggtgcgatgaatgtcgactaagttaatccatcgtgacatcattcaatccaacctggaagttggaactatgttgaagctaagcttgttttctgtcggtattctgtcaaatgtgcacacttctgtcatgctctagtggcatcagttgaagattagatattccattattcctactgcaatagtcttgtgatatcagaatttgctgtaattgaatgatgaattatgttttcaaccgttgaaaggtttgctgtcaaaatttcaatattatcctagttattgtcagaattttcagtaggcattagccaaaaagattggtgctgactactggtatatcagaatttgctgtaattgaatgatgaattatgttttcaaccgttgaaaggtttggtg

SEQ ID NO: 22926 - protein, 306 aa, Zea mays subsp. mays
  misc_feature (1)..(306): Ceres Seq. ID no. 12410656
MATPLDVPLDDLIKSRAGRGTGRGRGQGGGRGRGDGQRLARGSWRGRGTGNFRERGLGVSSRRPLGVNTWSSSFAIAKSFNKAKDFVWRHDLFEDSMVAAGLSGIESGTKLYISNLHYGVTSEDLQELFSEMGHLKHCAVHYDSYRHPTGSAEVIFTRRSEALAALKRYNNMRLDGKAMKIEVIGAELGLSAAAVPQISVVPGASRRGQREVVMMPGGSGFGQGASGPSSSLPGWKRGGFVRRGQGRVSFPQRGRGQVRSRGRGRGRSSLVQSRGRGYVRRGNAEKSAKQLDNELDNYNSGAMNVD

SEQ ID NO: 22927 - protein, 210 aa, Zea mays subsp. mays
  misc_feature (1)..(210): Ceres Seq. ID no. 12410657
MVAAGLSGIESGTKLYISNLHYGVTSEDLQELFSEMGHLKHCAVHYDSYRHPTGSAEVIFTRRSEALAALKRYNNMRLDGKAMKIEVIGAELGLSAAAVPQISVVPGASRRGQREVVMMPGGSGFGQGASGPSSSLPGWKRGGFVRRGQGRVSFPQRGRGQVRSRGRGRGRSSLVQSRGRGYVRRGNAEKSAKQLDNELDNYNSGAMNVD

SEQ ID NO: 22928 - protein, 175 aa, Zea mays subsp. mays
  misc_feature (1)..(175): Ceres Seq. ID no. 12410658
MGHLKHCAVHYDSYRHPTGSAEVIFTRRSEALAALKRYNNMRLDGKAMKIEVIGAELGLSAAAVPQISVVPGASRRGQREVVMMPGGSGFGQGASGPSSSLPGWKRGGFVRRGQGRVSFPQRGRGQVRSRGRGRGRSSLVQSRGRGYVRRGNAEKSAKQLDNELDNYNSGAMNVD

SEQ ID NO: 22929 - DNA, 1234 bp, Zea mays subsp. mays
  misc_feature (1)..(1234): Ceres Seq. ID no. 12410659
atataatccgctctctctcccccggtttctcttgtcttcttgctgcggcgatggaccaagaaacctcacgggaaccccactccttgaggagccgtccagtgccgcattagtgggttccattcttctttggatcgctgctcgcgatcgcattgcccgcgtttcttttggccgtcttggttcgttcttgattcttggacgaggtgggatttggagagccgagagcggcgcggcagcggcgggtttctcggtcgggctagattgtttccatcgagatggtgggcggcggagggcattcgtcgatggaccacactggcgccaaggacctcgagcgcggcgagctgcgccgtggcgcgcctgagtttgcggacggcgacgatggagacggggaagaaagccagtacttctcggacgcggaggaccggtcgtggccgtcgcactcacgccacgactccaccgcctacgaggactacgtctcgccgtgcgtgtccgcccgcgcaagctccgtcgacgccgacgccgacgccgacgccgacggcgaggccgtcagacaacactgcaggaagtcgtcgtgcgtgtcagagggctcgctggacgacgttgacctggaggccggactgagcgagatcatcaaggccagccctgagaaggccgaacagaactgtcgcatttgccaccttggcctggagagcgcggcggccgagtccggtgccggcatcacgctcggctgctcctgcaagggggacttatcctacgcccacaagcagtgcgccgacacctggttcaagatcagaggcaacaaggtctgtgagatatgtagctcgactgcatccaacgtggtagtcttgggggatcccgagttcagcgaccagtggagtgaaacaaacagtgccgccgccgcggcgcaggcgccgccgccaccagccgaaccccggaggttctggcaggggcatcggttcctcaacttcctcctcgcctgcatggtgttcgccttcgtcatctcttggctcttccacttcaacgtccccggctaacaagttctttggcgcacatacatggcccccgaataaaaaaaaaagctccaaaaaagccatcactccggacgccgggtcggtaagttagcggatctggaagaacaggctggtgggtgctgggttggttgaagtaaaagctcgacatgggtgggggggccgggggacgatgatactgcattttttgtttatgatgaatgcctttg

SEQ ID NO: 22930 - protein, 252 aa, Zea mays subsp. mays
  misc_feature (1)..(252): Ceres Seq. ID no. 12410660
MVGGGGHSSMDHTGAKDLERGELRRGAPEFADGDDGDGEESQYFSDAEDRSWPSHSRHDSTAYEDYVSPCVSARASSVDADADADADGEAVRQHCRKSSCVSEGSLDDVDLEAGLSEIIKASPEKAEQNCRICHLGLESAAAESGAGITLGCSCKGDLSYAHKQCADTWFKIRGNKVCEICSSTASNVVVLGDPEFSDQWSETNSAAAAAQAPPPPAEPRRFWQGHRFLNFLLACMVFAFVISWLFHFNVPG

SEQ ID NO: 22931 - protein, 243 aa, Zea mays subsp. mays
  misc_feature (1)..(243): Ceres Seq. ID no. 12410661
MDHTGAKDLERGELRRGAPEFADGDDGDGEESQYFSDAEDRSWPSHSRHDSTAYEDYVSPCVSARASSVDADADADADGEAVRQHCRKSSCVSEGSLDDVDLEAGLSEIIKASPEKAEQNCRICHLGLESAAAESGAGITLGCSCKGDLSYAHKQCADTWFKIRGNKVCEICSSTASNVVVLGDPEFSDQWSETNSAAAAAQAPPPPAEPRRFWQGHRFLNFLLACMVFAFVISWLFHFNVPG

SEQ ID NO: 22932 - DNA, 1263 bp, Zea mays subsp. mays
  misc_feature (1)..(1263): Ceres Seq. ID no. 12410662
atcctcaagtcatcagctagctagccttccctacagcaactgcatacatacaacacttccatctgcccgctcgtcttcgatcaattcccaagtcaaataatataacagcaatggtggttcccgtgatcgacttctccaagctggacggcgctgagagggccgaaaccctggcgcagatcgccaatggctgcgaggagtggggattcttccagctcgtgaaccacggcatcccgctggagctgctcgagcgcgtcaagaaggtgtgctccgacagctaccgcctccgggaggccgggttcaaggcgtcggagccggtgcgcacgctggaggcgctcgtcgacgcggagcggcgcggtgaggtggtggcgccggtggacgacctggactgggaggacatcttctacattcatgacggatgccagtggccgtccgacccgccggcgttcaaggagaccatgcgcgagtaccgcgccgagctgaggaagctcgccgagcgagtcatggaggccatggacgagaacctcggcctcgccaggggcaccatcaaggacgccttcaccggcggcagccggcacgagcccttcttcggcaccaaggtcagccactacccgccgtgcccacgcccggacctcatcacgggcctgcgcgcgcacaccgacgccggcggcgtcatcctcctgttccaggacgacaaggtcggtggcctggaggtgctcaaggacggcgagtgggccgacgtacagccgctcgagggcgccatcgtcgtcaacaccggcgaccagatcgaggtgctcagcaacgggcggtaccgcagcgcctggcaccgcgtgctgcccatgcgccgacggcaatcgccgctccatcgcatccttctacaacccggccaaccgaagccaccatctcgccggcggcggtgcaggtcagcggcggtgacgcgtatcccaagtacttgttcggcgattacatggacgtgtacgtcaagcagaagttccaggccaaggagcctaggttcgaagccgtcaagacgggggcgccaaagtcatctccagcggcataaataaatagggaaaacaattattgaatgcattattaaaagtagtaataagtttgttaaatataaactagctcgaccggattgcaccgtccgatctggacttcctctagttattggaagcttatatatatatatatatatagccagttgccagtgctttgactatggatctaaatatattatataaataggtattgtcatatttatcc

SEQ ID NO: 22933 - protein, 316 aa, Zea mays subsp. mays
  misc_feature (1)..(316): Ceres Seq. ID no. 12410663
MVVPVIDFSKLDGAERAETLAQIANGCEEWGFFQLVNHGIPLELLERVKKVCSDSYRLREAGFKASEPVRTLEALVDAERRGEVVAPVDDLDWEDIFYIHDGCQWPSDPPAFKETMREYRAELRKLAERVMEAMDENLGLARGTIKDAFTGGSRHEPFFGTKVSHYPPCPRPDLITGLRAHTDAGGVILLFQDDKVGGLEVLKDGEWADVQPLEGAIVVNTGDQIEVLSNGRYRSAWHRVLPMRRRQSPLHRILLQPGQPKPPSRRRRCRSAAVTRIPSTCSAITWTCTSSRSSRPRSLGSKPSRRGRQSHLQRHK

SEQ ID NO: 22934 - protein, 213 aa, Zea mays subsp. mays
  misc_feature (1)..(213): Ceres Seq. ID no. 12410664
MPVAVRPAGVQGDHARVPRRAEEARRASHGGHGREPRPRQGHHQGRLHRRQPARALLRHQGQPLPAVPTPGPHHGPARAHRRRRRHPPVPGRQGRWPGGAQGRRVGRRTAARGRHRRQHRRPDRGAQQRAVPQRLAPRAAHAPTAIAAPSHPSTTRPTEATISPAAVQVSGGDAYPKYLFGDYMDVYVKQKFQAKEPRFEAVKTGAPKSSPAA

SEQ ID NO: 22935 - protein, 201 aa, Zea mays subsp. mays
  misc_feature (1)..(201): Ceres Seq. ID no. 12410665
MREYRAELRKLAERVMEAMDENLGLARGTIKDAFTGGSRHEPFFGTKVSHYPPCPRPDLITGLRAHTDAGGVILLFQDDKVGGLEVLKDGEWADVQPLEGAIVVNTGDQIEVLSNGRYRSAWHRVLPMRRRQSPLHRILLQPGQPKPPSRRRRCRSAAVTRIPSTCSAITWTCTSSRSSRPRSLGSKPSRRGRQSHLQRHK

SEQ ID NO: 22936 - DNA, 1522 bp, Zea mays subsp. mays
  misc_feature (1)..(1522): Ceres Seq. ID no. 12410682
ctgggcctttaggtttttctgcgtatgtgttggacgcacgccaccctcctctctcctctacggctcagccggccgccgccctcctctctcggtctctcctctcctccaacggctcagccggcgccaccgccctcctccctcctatcctccaacatctccggcgcgtctctcctcagccgcggaggcaaagccggccgccggccgtggaggcacagcagacctgcgccaccgctggccgcctaccccacagcagatctgcactcaagaccagcagccagccagccatcctctgcggctccactctgccagcgcccaagaccagcgctagcagccagccatcctccacctccactgctctccatttgatcatttgctttggtaattggtcgtatagtccctcatcatcggaatggtggggtcacttatctttcccacacctaatgtggatccgaaggcagagaatcctaatgagatggttacagctggtgtgctttcaagccttcagaatttcctacgcaagtgcctcatagctatcctctcatatggcccaatgccgaagcacattgcatttattatggatggcaatcgtcgatatgctaaattcagaagcatgcaagaaggagctggtcacaggatgggtttctctacccttattgcaagtctaatgtactgctatgaaatgggtgtgaagtacatcactgtctacgcattcagcatcgacaattttaaaagggacccaagtgaggtggaatccttgatgcagttaatggaggaaaaaatcaacgaactcttagagaaccgaagtgtaatcaacaagattaactgtaagatcaacttttggggtaacttggacttgttatatgagccggtgcggttggcggctgagaagctgatggcgagcacagctgggaacacagggctggtcttttctatctgcatgccatacaactcgacttctgagattgtcaatgctgtcagtgaagtctgtgcggaaaggatggaaatgtttcagagtgaacatattggcgactgcaatggtcatgctgcaaataacggtgtgcgttcagagatttcagtggcggatttggatcgccacatgtatagtgccggatgcccagatcctgatatcgtcatccggacttcgggcgagactcgattgagcaatttcctcctttggcagacaacgtttagtcacttgcagaatccagatcctctgtggcccgagttctcttttaggcaccttgtttgggctatcttgcagtatcagagagtttaccctgctctggagcataacagaaagttggctaagaagcagttgtgattccatgttacttgcaaggaggtatcatgaagggctattaacatcaaacttttccttctcaatttcctggtaatggtaaatgcaaagaagaacatactagcatataacattatgaatagatcaccatgtaacttaagtgtgattgctaccgtaaccatgtaacttatttgagctcgtacaaatgctgtgattcctatatat

SEQ ID NO: 22937 - protein, 303 aa, Zea mays subsp. mays
  misc_feature (1)..(303): Ceres Seq. ID no. 12410683
MVGSLIFPTPNVDPKAENPNEMVTAGVLSSLQNFLRKCLIAILSYGPMPKHIAFIMDGNRRYAKFRSMQEGAGHRMGFSTLIASLMYCYEMGVKYITVYAFSIDNFKRDPSEVESLMQLMEEKINELLENRSVINKINCKINFWGNLDLLYEPVRLAAEKLMASTAGNTGLVFSICMPYNSTSEIVNAVSEVCAERMEMFQSEHIGDCNGHAANNGVRSEISVADLDRHMYSAGCPDPDIVIRTSGETRLSNFLLWQTTFSHLQNPDPLWPEFSFRHLVWAILQYQRVYPALEHNRKLAKKQL

SEQ ID NO: 22938 - protein, 282 aa, Zea mays subsp. mays
  misc_feature (1)..(282): Ceres Seq. ID no. 12410684
MVTAGVLSSLQNFLRKCLIAILSYGPMPKHIAFIMDGNRRYAKFRSMQEGAGHRMGFSTLIASLMYCYEMGVKYITVYAFSIDNFKRDPSEVESLMQLMEEKINELLENRSVINKINCKINFWGNLDLLYEPVRLAAEKLMASTAGNTGLVFSICMPYNSTSEIVNAVSEVCAERMEMFQSEHIGDCNGHAANNGVRSEISVADLDRHMYSAGCPDPDIVIRTSGETRLSNFLLWQTTFSHLQNPDPLWPEFSFRHLVWAILQYQRVYPALEHNRKLAKKQL

SEQ ID NO: 22939 - protein, 256 aa, Zea mays subsp. mays
  misc_feature (1)..(256): Ceres Seq. ID no. 12410685
MPKHIAFIMDGNRRYAKFRSMQEGAGHRMGFSTLIASLMYCYEMGVKYITVYAFSIDNFKRDPSEVESLMQLMEEKINELLENRSVINKINCKINFWGNLDLLYEPVRLAAEKLMASTAGNTGLVFSICMPYNSTSEIVNAVSEVCAERMEMFQSEHIGDCNGHAANNGVRSEISVADLDRHMYSAGCPDPDIVIRTSGETRLSNFLLWQTTFSHLQNPDPLWPEFSFRHLVWAILQYQRVYPALEHNRKLAKKQL

SEQ ID NO: 22940 - DNA, 1239 bp, Zea mays subsp. mays
  misc_feature (1)..(1239): Ceres Seq. ID no. 12410710
atcatccagaccaccattaccagagtgctctgctctcgctggaggccgtggttcattcacgttcatggaggccgccgccattcccaccagtgccccggaaaccaggattgccgttgtcaccggcggcaacaaagggatcgggctagaggtgtgccggcagctggccggcgccggcgccaccgtcgtcgtcttaacagccagggacgagacgaggggtgcagccgctgcacaagagctcagagaatctgggctctccgatgtcatcttccatcagctggacatcaccgacgctgcgagcgtcagtcggctggctgagttcctcaaggctcgttttggaaagctagatatcctggtaaataatgccgcagttggtgctgttgagtacgtccaagatcctgctgacagttcaacgagcgaggaagagctgagtggcatggatatggtccaaaggcttcagtgcatgcttaagagagtccgggagacctacgacgctgcgacagaaggcatcaagacaaactactatggcataaagcatgtgatcgaagccttgctgcctctgcttcaagcttcctccgatgggaggatcgttaacgtctcctctgacttcggactgctaaggctgatcaacaacgaggaagctaaggcaggagctaaacgacgtggagaagctcaccgaggagaggctggacgaggtgctggccgcgtacctgagagacttcgacgccggcgaggtgggggcgcgcgggtggccggtggacttctcggcctacaaggtggccaaggtggccatgaacgcgtacacgaggatcctagcgaggagccacccggggctgcgcgtcaactgcgcgcaccccggctacgtgagcaccgacatgaccgtccacaccgggcctctcacgcccgagcaaggcgcggccaacgtcgtgaaggtggcgctgctgccggagggcggcccgaccggcgcgtacttcgcgttgggagaggaggcgtcctttatgtgacgaaagcaccgtcgtcgttaagttcgtcgttgttcgccaactccctgttagtcgatttctaaatcgacgtacaatgaaatacatcatcgctgcaaactcacaaatgaaaacaagggaaccttgtagcaaaaaaaaaaaagaagtggacagaataatgaataagcatgtcaaatatctcttgagtatctatttgttcaagtatcaatgactttgtacaaatatcaaagattgtgagtgg

SEQ ID NO: 22941 - protein, 353 aa, Zea mays subsp. mays
  misc_feature (1)..(353): Ceres Seq. ID no. 12410711
SSRPPLPECSALAGGRGSFTFMEAAAIPTSAPETRIAVVTGGNKGIGLEVCRQLAGAGATVVVLTARDETRGAAAAQELRESGLSDVIFHQLDITDAASVSRLAEFLKARFGKLDILVNNAAVGAVEYVQDPADSSTSEEELSGMDMVQRLQCMLKRVRETYDAATEGIKTNYYGIKHVIEALLPLLQASSDGRIVNVSSDFGLLRLINNEEAKAGAKRRGEAHRGEAGRGAGRVPERLRRRRGGGARVAGGLLGLQGGQGGHERVHEDPSEEPPGAARQLRAPRLREHRHDRPHRASHARARRGQRREGGAAAGGRPDRRVLRVGRGGVLYVTKAPSSLSSSLFANSLLVDF

SEQ ID NO: 22942 - protein, 332 aa, Zea mays subsp. mays
  misc_feature (1)..(332): Ceres Seq. ID no. 12410712
MEAAAIPTSAPETRIAVVTGGNKGIGLEVCRQLAGAGATVVVLTARDETRGAAAAQELRESGLSDVIFHQLDITDAASVSRLAEFLKARFGKLDILVNNAAVGAVEYVQDPADSSTSEEELSGMDMVQRLQCMLKRVRETYDAATEGIKTNYYGIKHVIEALLPLLQASSDGRIVNVSSDFGLLRLINNEEAKAGAKRRGEAHRGEAGRGAGRVPERLRRRRGGGARVAGGLLGLQGGQGGHERVHEDPSEEPPGAARQLRAPRLREHRHDRPHRASHARARRGQRREGGAAAGGRPDRRVLRVGRGGVLYVTKAPSSLSSSLFANSLLVDF

SEQ ID NO: 22943 - protein, 209 aa, Zea mays subsp. mays
  misc_feature (1)..(209): Ceres Seq. ID no. 12410713
MDMVQRLQCMLKRVRETYDAATEGIKTNYYGIKHVIEALLPLLQASSDGRIVNVSSDFGLLRLINNEEAKAGAKRRGEAHRGEAGRGAGRVPERLRRRRGGGARVAGGLLGLQGGQGGHERVHEDPSEEPPGAARQLRAPRLREHRHDRPHRASHARARRGQRREGGAAAGGRPDRRVLRVGRGGVLYVTKAPSSLSSSLFANSLLVDF

SEQ ID NO: 22944 - DNA, 1415 bp, Zea mays subsp. mays
  misc_feature (1)..(1415): Ceres Seq. ID no. 12410718
gatcgatggatttctacggttcctgcctgtcaagtgtttgtcctcgtctcgtcttcggaaaacaccaaacgacaagtccaaggcagagcagatttagaccgaaatatacaaaaactggatcgaaaattgcatatcggactggaccgagaacgaaaaaagaaaccgagggaaagttcaagtgttcaaccttgaatggccatggccttcttttcgttttcggccctataaaactgatgatctgctgatgagacatcccactcgccggccgtccttgaagagcgagcagcaatggcgcaggagatcgagcacacccacctccccatccgcggcctcaacctccacgtcgcacaagtaggcacaggtgaactgggcacggtggtgttcctgcacggcttcccggagatatggtactcgtggcgccaccagatgcgggcccgtggccgcggcggggtaccgcgccatcgcgccggactgccgcgggtacggcctgtcggagcagccgccggagcacgaggaggtctctcctgacgacctcatcgccgacgtgctgggcatcctcgacgccctcagcgtcccgaaggcgttcttggtgggcaaggacttcggcgccatgccggcgtacgagttcgcgctgcagcacccgggccgcacctgcggcgtggtgtgcctgggcatccccttcaacccggcccccatatccttcgacgccatcatgcccgaaggattctacatcctgcgctggcgcgagccgggcagggcggaggccgacttcggccggttcgacgtgaggcgcgtggtgcgcaccatctacgtgctcttcgccggcgccgagatcccgattgccaaggaagggcaggagatcatggacctggccgacctgtccacgcccctcccggagtggttcaccgaggaggacctggacgcctacgccaagctctacgagaagtccggcttcgggtacccgctcaagatgccgtacagatctatgcacaagctcccgaaccggctggacgccaagttccaggtgccggtgttcatggtgatgggggagaaggactacgcgttcaagttcccggggttcgagaccgccatgcgcggcggggtcatggacaacttcatgccggacctcaagatcacctacatccctgaggggagccacttcgtgcaggagcagctcccagagcaggtcaacgacctgctcctcggcttcctcagggaccatccctccgccgcataagcagtgggtgagaccgtcagaataatggaatgcttcctgagcaacggtttctctactctattgccgttgcctggatccatgaccgtgttaattaattaattagtgcatatacttcctactcaaatcagatgtacgttttttttatctgcaataaaaatcatcgtcgctgcattactcg

SEQ ID NO: 22945 - protein, 208 aa, Zea mays subsp. mays
  misc_feature (1)..(208): Ceres Seq. ID no. 12410719
MPAYEFALQHPGRTCGVVCLGIPFNPAPISFDAIMPEGFYILRWREPGRAEADFGRFDVRRVVRTIYVLFAGAEIPIAKEGQEIMDLADLSTPLPEWFTEEDLDAYAKLYEKSGFGYPLKMPYRSMHKLPNRLDAKFQVPVFMVMGEKDYAFKFPGFETAMRGGVMDNFMPDLKITYIPEGSHFVQEQLPEQVNDLLLGFLRDHPSAA

SEQ ID NO: 22946 - protein, 174 aa, Zea mays subsp. mays
  misc_feature (1)..(174): Ceres Seq. ID no. 12410720
MPEGFYILRWREPGRAEADFGRFDVRRVVRTIYVLFAGAEIPIAKEGQEIMDLADLSTPLPEWFTEEDLDAYAKLYEKSGFGYPLKMPYRSMHKLPNRLDAKFQVPVFMVMGEKDYAFKFPGFETAMRGGVMDNFMPDLKITYIPEGSHFVQEQLPEQVNDLLLGFLRDHPSAA

SEQ ID NO: 22947 - protein, 127 aa, Zea mays subsp. mays
  misc_feature (1)..(127): Ceres Seq. ID no. 12410721
MVLVAPPDAGPWPRRGTAPSRRTAAGTACRSSRRSTRRSLLTTSSPTCWASSTPSASRRRSWWARTSAPCRRTSSRCSTRAAPAAWCAWASPSTRPPYPSTPSCPKDSTSCAGASRAGRRPTSAGST

SEQ ID NO: 22948 - DNA, 1479 bp, Zea mays subsp. mays
  misc_feature (1)..(1479): Ceres Seq. ID no. 12410751
agtcgctcgtcccgcttcctgatcctcacccctgcctgcgcggctcggctcctcggctttccgcgttcgctacggtcggtttgtgccagcagccgtgccggatcgttggccttgcgccgttgcgcggttacaccgtgctccaggcaatggcgagccaacagcaagcaaaaggcacaatcctgtgagccaatcaacactcactaggactctaggagccagggcattgattcagagaactctgagaccatttttgttgcatcttttgacaggattacatgatgagtgctcttgtttttcctctggttgtatatgttatccagtgaacacatgtttaattttataaacatttcaatttttgtcatgtttgaatctattattttctagctttcgcagtttcaaaaaagtgtggtccagtgtctgtacttttatgctgtttaggttttcgcggccactgcctcctcccatcgtggtattcattccttccggactgtcagagagcggggatctatctacgctagtattcagttcttccattactggtctaccacacgatggttccctgtcatggagcggctactgcgaatcctcagcagtttggtgttattgccgcaaaccgctatggttctcctgtgaagccatctttatgccctagtgttgcgtttctgagactgcagggttccgcatttcgtcttgggaataaatccttggctttgagagctggtgcggattctcaccgttatgcgacatcttcagcatttgcaaagtataatcctgtcaagaacatcaagccactactgtcatccccaaagttgaaaccaagaactaaagttggttgtcaagcatccttgtcgtcattcagctaccctgagttatcttccaaaccgaaatggtggtggaggaccctagcatgtgtaccttatcttctgccactgcacaacatgtgggggcatgcagatgctatctatcagcttcatccatacttgcaaagatttagcctgccttacgctttcatcgatacaatggctctgctccctgggtggcttttcctggcgatcttcatgactatatacttctttgttgtgaggcggaagtggtcgccacacttcttgcgcttccacatcatattggctatcctgcttgacacgggctcacaagctctggccactgcctgcaactggaatccaagcattgcttttcagggcaaacaaatggcacatttctggatggcaatggccttcattcaaatcttcacggttgccgagtgtgtaaggtgtgcactttcaggggtgtatgcaaatgttccatttatatgtcatgcagcactcatccattcagatcttaacctgtttaggtagttgatcattgcaaagtgcatttttggaattaagaggtactgaattggttaaactgtcgagtagaggactaatcagactatcagaggaaattaatgtaaccattgctcttcactgcattgttgtc

SEQ ID NO: 22949 - protein, 267 aa, Zea mays subsp. mays
  misc_feature (1)..(267): Ceres Seq. ID no. 12410752
MVPCHGAATANPQQFGVIAANRYGSPVKPSLCPSVAFLRLQGSAFRLGNKSLALRAGADSHRYATSSAFAKYNPVKNIKPLLSSPKLKPRTKVGCQASLSSFSYPELSSKPKWWWRTLACVPYLLPLHNMWGHADAIYQLHPYLQRFSLPYAFIDTMALLPGWLFLAIFMTIYFFVVRRKWSPHFLRFHIILAILLDTGSQALATACNWNPSIAFQGKQMAHFWMAMAFIQIFTVAECVRCALSGVYANVPFICHAALIHSDLNLFR

SEQ ID NO: 22950 - protein, 138 aa, Zea mays subsp. mays
  misc_feature (1)..(138): Ceres Seq. ID no. 12410753
MWGHADAIYQLHPYLQRFSLPYAFIDTMALLPGWLFLAIFMTIYFFVVRRKWSPHFLRFHIILAILLDTGSQALATACNWNPSIAFQGKQMAHFWMAMAFIQIFTVAECVRCALSGVYANVPFICHAALIHSDLNLFR

SEQ ID NO: 22951 - DNA, 1632 bp, Zea mays subsp. mays
  misc_feature (1)..(1632): Ceres Seq. ID no. 12410754
agacgtgcagccagcgccggggcgtccagctaactcgcaaacatttttataacccgagcacgcgtcagacatgggaaacggcggtgggactggcgataagacgaagacgaaggcgacaggagggctcaccggtcgcgaatcctcctcctccagccacgcctcgaaacggcgtcggggcctgcgcggcgagtccatggctgatcgcttcattcccaatgactttcctgacttcgtcgccgaggctgaggcctccgacggcgaggggcaccgccccgcagggcatcggggcctgctctcgcttccgtacaccaggctctccgaccacttcgtccgcgccgcgcgccgcctcaaggacaaggtggttgaggagacgtgggtgaaagccggacggaaggtgacggactacacgctctacacgggctctctcgggacagcgctgctgctgttcaagtccttccaggtcactggagaccgcggggacctcgccctcgccgctgatatcgtccgcgcgtgcgatgatgcatcgcggggcctgccgttcttgacattcatatgcgggagggcgggtgtctgcgctcttggggcggtgattgccaagcattgcgatgatcagctgagggtcactcagtatctgagctcctttgatgagataacaatcaccgagaaagttccaaatgagttgctgtatggaagggcaggctatctgtgggcttgtttgttcttgaataagcatctcagcgagaagacgatccctctcgatcacattaattctgtggcgaaggacattattaatgagggaagaggttttgcaagcaaggggagtagccctctgatgtacgaatggcatgggaagaaatactggggggctgcgcatggtcttgctggaatcatgcacgtgctaatgcacaccgaactgaaaccagatgagcaggatgatgtaaagaacaccctgcggtatatgatcaaaaacaagtttcctagtggcaattatccctcaagtgaaggcaatgaatcagatcacttggtgcactggtgtcatggtgccccaggtgttgctcttacccttgctaaagcatatgaggtcttccatgatgattatttcgagcaatcagctgcagaggctgctgaggttgtctggaaccgagggcttctgaagagagtcggaatatgccacggtgtaagcgggaatgcctatgcgtttctctcactctacaggctaaccggtaatgttgagtacctctaccgggcaaaggcttttgcctgctttcttctggagaaagctgatcagttgatagccgagggggccatgcatggtggtgatcgcccgttttcactgtttgaagggaaagctgggatgtcatacctcctcttggacatggttgatccatctgaatcaaggttccctgcgtatgaactttgagatatactattaccctgcgacttgtgaggctgttcgatgatccatcagtcacgaaaactctgtttgtattttctcgtctagtatgtgatgtgtgcttagacctcggtggtctgttgtgtttgtagatttggcgttcgtgatgttgcaaacttgaatcttctgtgaagtatgtgtgaccatcacattctgctaaatagattataatctcaaac

SEQ ID NO: 22952 - protein, 449 aa, Zea mays subsp. mays
  misc_feature (1)..(449): Ceres Seq. ID no. 12410755
MGNGGGTGDKTKTKATGGLTGRESSSSSHASKRRRGLRGESMADRFIPNDFPDFVAEAEASDGEGHRPAGHRGLLSLPYTRLSDHFVRAARRLKDKVVEETWVKAGRKVTDYTLYTGSLGTALLLFKSFQVTGDRGDLALAADIVRACDDASRGLPFLTFICGRAGVCALGAVIAKHCDDQLRVTQYLSSFDEITITEKVPNELLYGRAGYLWACLFLNKHLSEKTIPLDHINSVAKDIINEGRGFASKGSSPLMYEWHGKKYWGAAHGLAGIMHVLMHTELKPDEQDDVKNTLRYMIKNKFPSGNYPSSEGNESDHLVHWCHGAPGVALTLAKAYEVFHDDYFEQSAAEAAEVVWNRGLLKRVGICHGVSGNAYAFLSLYRLTGNVEYLYRAKAFACFLLEKADQLIAEGAMHGGDRPFSLFEGKAGMSYLLLDMVDPSESRFPAYEL

SEQ ID NO: 22953 - protein, 408 aa, Zea mays subsp. mays
  misc_feature (1)..(408): Ceres Seq. ID no. 12410756
MADRFIPNDFPDFVAEAEASDGEGHRPAGHRGLLSLPYTRLSDHFVRAARRLKDKVVEETWVKAGRKVTDYTLYTGSLGTALLLFKSFQVTGDRGDLALAADIVRACDDASRGLPFLTFICGRAGVCALGAVIAKHCDDQLRVTQYLSSFDEITITEKVPNELLYGRAGYLWACLFLNKHLSEKTIPLDHINSVAKDIINEGRGFASKGSSPLMYEWHGKKYWGAAHGLAGIMHVLMHTELKPDEQDDVKNTLRYMIKNKFPSGNYPSSEGNESDHLVHWCHGAPGVALTLAKAYEVFHDDYFEQSAAEAAEVVWNRGLLKRVGICHGVSGNAYAFLSLYRLTGNVEYLYRAKAFACFLLEKADQLIAEGAMHGGDRPFSLFEGKAGMSYLLLDMVDPSESRFPAYEL

SEQ ID NO: 22954 - DNA, 1359 bp, Zea mays subsp. mays
  misc_feature (1)..(1359): Ceres Seq. ID no. 12410786
aaaaaatgccgtgagcgcagcagatgtcgtgcggtgcagtgcagtgcaggtgcgggatctctgaatcgctgacgcccagcctcctctgtcatctccctcctcggacctcgccacctcacgcggaaggaggggaagaggaagcgcggagactggaaatcgggccccaaatccgcttcggtctctcgatcggcgaggcatgattcatacaaccggctaggatggcctcaaaagctataaaaagaaggcctatcagcgctgagactgatacaacaggggaaaaacaaatggatacagcactgtcagatcctgtaacagaacctcttctaggaaacactcctcaggaagaaaatccaagacatatgagcctattacacggtcaggtttctgggatgggacggcacaggagtgtcttcgttggacacatcttttagcagcttttgttgctcaatctgcaagaaacatagtaaatgttctttctgaatttggatatttgctagcaagactctttggttgctcttctgcttccaaaagttcacaaaatggacagacacttccagttaacctcagtccattacaggaagaaaggttaagattgttgagacaaaggatagatgtgccatatgactgctcctctgtcaagcatcaggatgccctgaaagaactttggaagttggcttaccctaacagacaacttcctcctctgaagtcagatctctggaaggagatgggctggcagaactccgatccatccacagattttagagcagctgggttcatgtccttggagaatctaatatattttgccagaaattacccagattcctttcacaggctactgcataaagcagatggtaagagagctgaatgggagtatccttttgcagtaggcggcgtaaacatatcctatatgttagttcaaatgctggatttacagtcaggaaaaatgagaacaaaagctggtgttcactttgttcaactactcgatgatgacggtgtggctttcgataaccttttctgtgtagcatttcaggtgcttgattctcaatggcttgcaaggcgagcgagttatatggaattcaatgaggttctgaagtctacacggggtcagttagagcaagagcttactatcggaggtatttctcgcattcaagacatgccatcattcagaatgctgagaaggtagcgctgtttgtacttcacaggaaaagagatacattttagattccaatatattgtttaaatttgttgtccgttctttcactggattttgaagacgtgacattgtgtatgttattgagtatattgtttgtaatgtcgcagcttaaagctacagatcataatatatgatatgatatcttg

SEQ ID NO: 22955 - protein, 152 aa, Zea mays subsp. mays
  misc_feature (1)..(152): Ceres Seq. ID no. 12410787
MGWQNSDPSTDFRAAGFMSLENLIYFARNYPDSFHRLLHKADGKRAEWEYPFAVGGVNISYMLVQMLDLQSGKMRTKAGVHFVQLLDDDGVAFDNLFCVAFQVLDSQWLARRASYMEFNEVLKSTRGQLEQELTIGGISRIQDMPSFRMLRR

SEQ ID NO: 22956 - protein, 135 aa, Zea mays subsp. mays
  misc_feature (1)..(135): Ceres Seq. ID no. 12410788
MSLENLIYFARNYPDSFHRLLHKADGKRAEWEYPFAVGGVNISYMLVQMLDLQSGKMRTKAGVHFVQLLDDDGVAFDNLFCVAFQVLDSQWLARRASYMEFNEVLKSTRGQLEQELTIGGISRIQDMPSFRMLRR

SEQ ID NO: 22957 - protein, 91 aa, Zea mays subsp. mays
  misc_feature (1)..(91): Ceres Seq. ID no. 12410789
MLVQMLDLQSGKMRTKAGVHFVQLLDDDGVAFDNLFCVAFQVLDSQWLARRASYMEFNEVLKSTRGQLEQELTIGGISRIQDMPSFRMLRR

SEQ ID NO: 22958 - DNA, 1286 bp, Zea mays subsp. mays
  misc_feature (1)..(1286): Ceres Seq. ID no. 12410790
gagagccccgcccccgggaggccgggagagaagagaacacgcgcgtcaggagcgcacaccgcacggcgcacacacacacgcctcccgcggcaagcagcgcaggacaccgacgacgaagcgaggagaggggaggaggcggagccgagcgcccgagcccaaccccgcaaccacgacccacttccccgtcgcgattcgcattgcccttccctcgggttctacccccagcctcgcgccgccgccgccgccgccgcccttgccagagagatcaccccccattcccacaatcccgtccctccctccgtccctcgacgagccgagccctccgcgcggccgtgggatggggcagtgaccggtgagtggcgtggggagccggtgggcggtggcgagggcatatcatggtgcagtgcctggacggggtgaggcagctgctcgcggtcctgctcaattgctgcgacgtcgagctcaagcagccgcgggggctccaagacccccaggtcctcgcgagggagaccgtcttcagcgtgagtgaggtcgaggcgctgtacgagctgtttaagaggatcagcagcgccgtcattgatgatgggctgattaacaaggaggaatttcagttggcgctatttaagaccaacaagaaggagagcctgttcgcggatcgcgtatttgatttatttgacacaaagcacagtggaattttgggatttgaagaatttgctcgtgctctctcagtatttcatcctaatgctccccttgatgagaaaattgatttttcattccggctgtatgatctcaagcagcaaggctatattgagagacaagaggttaagcagatggttgttgcaacacttgccgagtcaggaatgaatctttcggatgaaattgtagagagtataattgacaagacatttgaggaggcagacacaaagcatgatggaagaattgacaaggaagagtggcgcaatctagtcattcggcatccttctttgctgaagaacatgactcttcagtacctcaaggacatcaccactacatttccaagctttgtctttcactctcaggttgatgataactgaaattgatggggttactttgaaaagaaacattagaagatattctcatgggttctgatatggttttcatttttcaaaattgggttgttggattgaaagattgtagtgttgtgaagtacgtgcatgttggattcgaggactcgattttttttgtcaaccttgtttctttcatttgcatgtctggatgcgcatgaataagatatgaagtttatgtct

SEQ ID NO: 22959 - protein, 225 aa, Zea mays subsp. mays
  misc_feature (1)..(225): Ceres Seq. ID no. 12410791
MVQCLDGVRQLLAVLLNCCDVELKQPRGLQDPQVLARETVFSVSEVEALYELFKRISSAVIDDGLINKEEFQLALFKTNKKESLFADRVFDLFDTKHSGILGFEEFARALSVFHPNAPLDEKIDFSFRLYDLKQQGYIERQEVKQMVVATLAESGMNLSDEIVESIIDKTFEEADTKHDGRIDKEEWRNLVIRHPSLLKNMTLQYLKDITTTFPSFVFHSQVDDN

SEQ ID NO: 22960 - protein, 139 aa, Zea mays subsp. mays
  misc_feature (1)..(139): Ceres Seq. ID no. 12410792
ESPAPGRPGEKRTRASGAHTARRTHTRLPRQAAQDTDDEARRGEEAEPSARAQPRNHDPLPRRDSHCPSLGFYPQPRAAAAAAALAREITPHSHNPVPPSVPRRAEPSARPWDGAVTGEWRGEPVGGGEGISWCSAWTG

SEQ ID NO: 22961 - protein, 117 aa, Zea mays subsp. mays
  misc_feature (1)..(117): Ceres Seq. ID no. 12410793
EPRPREAGREENTRVRSAHRTAHTHTPPAASSAGHRRRSEERGGGGAERPSPTPQPRPTSPSRFALPFPRVLPPASRRRRRRRPCQRDHPPFPQSRPSLRPSTSRALRAAVGWGSDR

SEQ ID NO: 22962 - DNA, 1425 bp, Zea mays subsp. mays
  misc_feature (1)..(1425): Ceres Seq. ID no. 12410794
attagcacagactgaagcgcaactagaggatacagccatccattggtagtacacagggtcccacccacaagagaggcatggcggccacatcgtccctgaagagcagccttctcctcccgtctaccatctccgacttcagtggcgcacgcaggccgtctccatctcaacgcagcgccaccatggaatttgatttggcagaagaggagatcacggggggcgagggtgcaggtctcagcggctgcggactccaagaacattctggtcatgggggggactaggttcatcggggtcttcctgtccaggctccttgtcaaggagggccaccaggtcacattgttcaccaggggaaaggcacccataactcagcagctgccaggggagtccgacgcggagtacgcagacttctcctccaaggttctgcacttgaaaggtgacaggcaggacttcgaattcgtgaagacaagcttggctgccaatggatacgatgtggtttacgacatcaatggacgtgaggctgtgcaagttgagcccataattgaggccttgcctaacctgcaacagtacatctattgctcatcggcaggagtgtacctgaaatctgacattcttccgcactgtgaggttgacgcggtggaccccaagagccgtcacaagggcaagctggagacggagagcctgctgacctcgcgcggcgtgaaactggacgtccatcaggcccgtgtacatctacggccccgctcaactacaaccccgtcgaggagtggtttttccaccgcctcaaggccggccgccccatccccatccccggcgccggcaaccagatcacgcagctcggccatgtcaaggatctggcaagagccttcaacctggtgctcgggaacccccaggcgagcaagcagatcttcaacatctccggggccaagtatgtcaccttcgacggccttgcgcgggcatgcgcaaaggctggagggttccctgagccggagctcgtccactacaatcccaaggaattcgacttcggcaagaagaaggccttcccattcagagaccagcacttctttgcgtctgtggagaaggcgacgagcgaactcgggtggacgccggagtttgacctcgtccaggggctcaccaactcgtacaacctcgacttcggccgcggcacgttccggaaggaggcggacttcaccacagacgacatgatcctcgacaagaagcttggccaccgtttgatgcatgtctcgggctagctgtacgtacgtacgattagagaagagataaatgatagcaaatcaaaatttgttgttaagtaaagtgagctcttagcttctatcagggacgattattaaggatacccgaattattcctcccaagaacacactcagagaagtaaggtacctcttaggccgaggcttctcctcgagagtc

SEQ ID NO: 22963 - protein, 311 aa, Zea mays subsp. mays
  misc_feature (1)..(311): Ceres Seq. ID no. 12410795
MGGTRFIGVFLSRLLVKEGHQVTLFTRGKAPITQQLPGESDAEYADFSSKVLHLKGDRQDFEFVKTSLAANGYDVVYDINGREAVQVEPIIEALPNLQQYIYCSSAGVYLKSDILPHCEVDAVDPKSRHKGKLETESLLTSRGVKLDVHQARVHLRPRSTTTPSRSGFSTASRPAAPSPSPAPATRSRSSAMSRIWQEPSTWCSGTPRRASRSSTSPGPSMSPSTALRGHAQRLEGSLSRSSSTTIPRNSTSARRRPSHSETSTSLRLWRRRRANSGGRRSLTSSRGSPTRTTSTSAAARSGRRRTSPQTT

SEQ ID NO: 22964 - DNA, 1618 bp, Zea mays subsp. mays
  misc_feature (1)..(1618): Ceres Seq. ID no. 12410796
ctcatcgctgacgctgatggcggagcccagtcctcacccgaccgtggtgctgcacgcttgcctcggcgtgggccacctgatccccatggtggagctcgccaagctcctcctccgccgcgacctggctgtcataatcgccgtcccgaccccgccgtcgtccactgccgacttcttcgcctcctccgcatccgccgtcgccacgctcgaggccgccaaccccgccgtatccttccaccacctcccgccgccggactaccctgtcccggacccggaccccttcctccggatgctggacgcgctccgcctcacagtcccctccctcaccgccttcctccgctcccttccctccgtcgccggggctcgtgctcgacctcttctgcggcgacgcgctcgacgcggccgcatccgccggcatcccggcctacttctactacacctcctgcgctggcgacctcgccgcgttcctccaccttccccactacttcgccacgacggagggcgggcccagcttcaaagacatgggcaaggcgctcctccacttccccggcgtcccgccgatcccggcttcggacatgcctcacaccgtgctcgaccgcgcggcccggacctgcgcctcgcggatcgtgcactacggccgcgtgccccgaggctcggggcttgctgatcaacacctacgagtggctggaggcgcgggccgtcagggcactcagggacggcgtctgcgtccctggtcgccccacgccgccggtttaccccatcggcccgattatcgtcaggggccaggaggcggcggagaaaggggagcggcacgcgtgcctgtcgtggctggacgcacagccggaacggagcgtggtgttcctctgcttcggcagcctgggcgccgtctccgcggcgcaggtgaaggagatcgctcgcgggctggagagctccgggcatcggttcctgtgggtcgtgcggagcccgccggaggacccgaccaagttcttcctcgcgcgtcctgagccggacctggactcgctgctcccggaggggtttctggagcgcacgagtgacagggggatggtggtgaagatgtgggcgccgcaggtggaggtgctgcggcacgcagccacgggcgcgttcatgacccactgcgggtggaactcggtgctggaggcggcgtcggccggcgtccccatgctgtgctggccgatgtacgccgagcagagggtgaacaaggtgttcgtagtggacgagatcaaggccggggtggtgatggacggctacgacgaggagctggtgagcgcggcggaggtggagaagaaggtgaggctggtgatggagtctgaggaaggggagaagctcagggagaggctggcgttggcaaaggagaaggcggcagaggcgctggctgatggcgggccgtcgcggatggcgtttgaggagttcttgaaggatatcatgctcgccaaatgatcatgcactaaagtgagcatcatggctgatcctgttacctgatctgttctaatgttagcttggactatgatctatgtgagatatttccgggtttgttcggttgatttctcccaaagagattcgagggagcatgagtttgacaaataaatatatgctgggtgat

SEQ ID NO: 22965 - protein, 484 aa, Zea mays subsp. mays
  misc_feature (1)..(484): Ceres Seq. ID no. 12410797
LIADADGGAQSSPDRGAARLPRRGPPDPHGGARQAPPPPRPGCHNRRPDPAVVHCRLLRLLRIRRRHARGRQPRRILPPPPAAGLPCPGPGPLPPDAGRAPPHSPLPHRLPPLPSLRRRGSCSTSSAATRSTRPHPPASRPTSTTPPALATSPRSSTFPTTSPRRRAGPASKTWARRSSTSPASRRSRLRTCLTPCSTARPGPAPRGSCTTAACPEARGLLINTYEWLEARAVRALRDGVCVPGRPTPPVYPIGPIIVRGQEAAEKGERHACLSWLDAQPERSVVFLCFGSLGAVSAAQVKEIARGLESSGHRFLWVVRSPPEDPTKFFLARPEPDLDSLLPEGFLERTSDRGMVVKMWAPQVEVLRHAATGAFMTHCGWNSVLEAASAGVPMLCWPMYAEQRVNKVFVVDEIKAGVVMDGYDEELVSAAEVEKKVRLVMESEEGEKLRERLALAKEKAAEALADGGPSRMAFEEFLKDIMLAK

SEQ ID NO: 22966 - DNA, 1323 bp, Zea mays subsp. mays
  misc_feature (1)..(1323): Ceres Seq. ID no. 12410806
gcctctcttgtcatcatcggcctgccgcctgcccgcctgctcctcctgccccattaacgccgccggctgccgtgccgccgcgtcctgctccccgccaccgcgttcctcgcccgaagcaccgccgcggcctcgcgccaccgcccagaaaccatctccgggcctcgttcgaccgaagcgccttgtgtcatatctccgcgacctagccgccgcccgccgcngacgctgccgtcgtcgtcatcctcgctggcggtgctgtacctgcgtgccagcgcagatccatccgagctcggattgatttcttcctttgctgtactgtcataaccgaactaaaacagtttcagaggaagcatcgcgattgccatggaagctgggagaatggatcagccatttatggctgctatcaatagccagcctttcgtggaggatattgagccagtgaagaaagccagtggggacatgcctgcgacaacaggaagcggatgcttcgaatgcaacatctgccttgattttgcatcagaaccagtggttactttctgtggtcatctctactgctggccttgtatctacgagtggctgcgccctggggtggagtcagctgccagcgacaacagcagttcggcaaggcggcaatgtcctgtatgcaaggcaacactctcaacggacacccttgtgccactatacggccgtggaggcaactcaaagaagtcacttgatggcatggccatcccgcgccgccccatggtacaccgggagactgttgaggagcaacagaatgcacagagcaatgtcaatgaccagcactaccaccagagcatggaagacaactctcagcgccagccattgctgcaagcgcaccaccatcccattcccactgggtttgacttcatctaccctccagcaccagtagggcgtggcttgatccactcaactgccggaggggtgctcggagggatggcagagattgtgcttcccttggcgctccgtggccagatgccagcgagcttgtactacacgaatccataccatgctgcgacgcagaacgtgaaccccaggctgaggcggcatcagatggaaatcgagaggtccctgcaccagatctggttcttcctctgtgtgtttgtggtgctgtgcctgctcttgttctgagacaagactattctatacacctctttgtagatattgaaagtgggagggggatactaatggatgatgcgtatagtaaacagggtaatggtctgtgtcgacaggcatgtgcttaagcatgctgatgtagagttgtaatatgatgagacacggaggtgaaatgcatatttcattcttccc

SEQ ID NO: 22967 - protein, 261 aa, Zea mays subsp. mays
  misc_feature (1)..(261): Ceres Seq. ID no. 12410807
MEAGRMDQPFMAAINSQPFVEDIEPVKKASGDMPATTGSGCFECNICLDFASEPVVTFCGHLYCWPCIYEWLRPGVESAASDNSSSARRQCPVCKATLSTDTLVPLYGRGGNSKKSLDGMAIPRRPMVHRETVEEQQNAQSNVNDQHYHQSMEDNSQRQPLLQAHHHPIPTGFDFIYPPAPVGRGLIHSTAGGVLGGMAEIVLPLALRGQMPASLYYTNPYHAATQNVNPRLRRHQMEIERSLHQIWFFLCVFVVLCLLLF

SEQ ID NO: 22968 - protein, 256 aa, Zea mays subsp. mays
  misc_feature (1)..(256): Ceres Seq. ID no. 12410808
MDQPFMAAINSQPFVEDIEPVKKASGDMPATTGSGCFECNICLDFASEPVVTFCGHLYCWPCIYEWLRPGVESAASDNSSSARRQCPVCKATLSTDTLVPLYGRGGNSKKSLDGMAIPRRPMVHRETVEEQQNAQSNVNDQHYHQSMEDNSQRQPLLQAHHHPIPTGFDFIYPPAPVGRGLIHSTAGGVLGGMAEIVLPLALRGQMPASLYYTNPYHAATQNVNPRLRRHQMEIERSLHQIWFFLCVFVVLCLLLF

SEQ ID NO: 22969 - protein, 251 aa, Zea mays subsp. mays
  misc_feature (1)..(251): Ceres Seq. ID no. 12410809
MAAINSQPFVEDIEPVKKASGDMPATTGSGCFECNICLDFASEPVVTFCGHLYCWPCIYEWLRPGVESAASDNSSSARRQCPVCKATLSTDTLVPLYGRGGNSKKSLDGMAIPRRPMVHRETVEEQQNAQSNVNDQHYHQSMEDNSQRQPLLQAHHHPIPTGFDFIYPPAPVGRGLIHSTAGGVLGGMAEIVLPLALRGQMPASLYYTNPYHAATQNVNPRLRRHQMEIERSLHQIWFFLCVFVVLCLLLF

SEQ ID NO: 22970 - DNA, 1476 bp, Zea mays subsp. mays
  misc_feature (1)..(1476): Ceres Seq. ID no. 12410810
atctcttctcctcacaaggcttcctcccaccacctccagtcctccaccggaccaccacctccaccactccctctctcacgacacgcgcaaaccgcttgaaccctagctggcggcgggaggcggaggtggctccgggatgacgcggcggtgctcgcactgcagccacaacgggcacaactcgcggacgtgccccaaccgcggggtcaagatcttcggggtgcacctcaccgatggctcggccatccgcaagagcgcgagcatggggaacctctccctcctctccgcgggatccaccagcggcggcgcttcccccgccgacgggcccgacctcgccgacggcggcgggggctacgcctccgacgacttcgtccaggggtcgtcctccgccagccgcgatcgcaagaaaggtgttccttggactgaagaagaacaccggaggtttttgctgggattacaaaagctcgggaaaggggattggcgaggaatttctcgtaattttgtggtctcaagaacacctactcaagtagcaagtcatgctcaaaagtattttatacgccaatcaaatatgagcagaaggaagagaaggtctagccttttcgacatggttcctgatgagtccatggaccttccaccccttcctggaagtcaagaaccagagatctcacagttaaatcaaccgccactgccgcctcctgtggaggaggaggtggaatcgatggagtcagatacttctgctgtcgcagagagttctggagcttctgctctcatgcccgagagtttacagcctacctatccgatgattgttccagcttatttctcgccgttcttgcaattctcagttcctttctggccaaatcaggaagatggaggcgatcttccccaagaaacacacgagattgtcaagcctgttgcagttcattcccagaatccaattaatgttgatgaactcgtgggcatgtcaaagctaagcatatgggagcatggtcaggagacagtgtctacttctctgtcgctaaatctgctagggggtcaaaataggcagtcggctttccatgcaaaccctcaaacaagagctcaagcctgatcatcccctaccagcacagaaactgtattttagatggaatcctgggcaaaataagctttgctctttttttcttcttctaaatttaagatcaccgagtcacaaggtcactggttggaagtagcttctccgtatttgcggggaaagcctgccctggtttctctccatcatcagagccttcaatattgtcttttttatatatttaagattgaccgtgctctgtagcttgtatcatgtgctgtaagttatgctatgtatgaatgtacctgtagtttgtatggcacgcatggtatgacactcttatgttagcaaagtcattaatgttagtgctgatctttatggttgtaatgttataaacttctaaaaaaaagtataagccagttcttttcaactgc

SEQ ID NO: 22971 - protein, 315 aa, Zea mays subsp. mays
  misc_feature (1)..(315): Ceres Seq. ID no. 12410811
MTRRCSHCSHNGHNSRTCPNRGVKIFGVHLTDGSAIRKSASMGNLSLLSAGSTSGGASPADGPDLADGGGGYASDDFVQGSSSASRDRKKGVPWTEEEHRRFLLGLQKLGKGDWRGISRNFVVSRTPTQVASHAQKYFIRQSNMSRRKRRSSLFDMVPDESMDLPPLPGSQEPEISQLNQPPLPPPVEEEVESMESDTSAVAESSGASALMPESLQPTYPMIVPAYFSPFLQFSVPFWPNQEDGGDLPQETHEIVKPVAVHSQNPINVDELVGMSKLSIWEHGQETVSTSLSLNLLGGQNRQSAFHANPQTRAQA

SEQ ID NO: 22972 - protein, 274 aa, Zea mays subsp. mays
  misc_feature (1)..(274): Ceres Seq. ID no. 12410812
MGNLSLLSAGSTSGGASPADGPDLADGGGGYASDDFVQGSSSASRDRKKGVPWTEEEHRRFLLGLQKLGKGDWRGISRNFVVSRTPTQVASHAQKYFIRQSNMSRRKRRSSLFDMVPDESMDLPPLPGSQEPEISQLNQPPLPPPVEEEVESMESDTSAVAESSGASALMPESLQPTYPMIVPAYFSPFLQFSVPFWPNQEDGGDLPQETHEIVKPVAVHSQNPINVDELVGMSKLSIWEHGQETVSTSLSLNLLGGQNRQSAFHANPQTRAQA

SEQ ID NO: 22973 - protein, 172 aa, Zea mays subsp. mays
  misc_feature (1)..(172): Ceres Seq. ID no. 12410813
MSRRKRRSSLFDMVPDESMDLPPLPGSQEPEISQLNQPPLPPPVEEEVESMESDTSAVAESSGASALMPESLQPTYPMIVPAYFSPFLQFSVPFWPNQEDGGDLPQETHEIVKPVAVHSQNPINVDELVGMSKLSIWEHGQETVSTSLSLNLLGGQNRQSAFHANPQTRAQA

SEQ ID NO: 22974 - DNA, 1422 bp, Zea mays subsp. mays
  misc_feature (1)..(1422): Ceres Seq. ID no. 12410825
agatctccggatcgttcatccactggtcgagaatccagatctctcgccttctcgctaccaaataccaaccacgaagaacaggaagaatgcccaaactgtcgtgtcgggtgctctttgcggctcttctcatcgcttcgctagccgctctgctcgtccggttcccgatccacaggctcctcaacccccacgccgccatggaccccgactccgagctcgagttcgagatgcccggcgtcttgcgtgtgtacaagaccggccgcgtcgagcgcttcgacggcaccgagaccgtcccgccctgccccgatggcgatcccgccaacggcgtcgcgtccaaggacatcgtcctggaccccgccgcaggcatctccgcccgcctctacctacccgcgggagtggatgccgggaagaagctccccgtcgttgtgttcttccacggcggtgcgttcatggtccacaccgccgcctccccgctgtaccacatctacgccgcctccctcgctgccgcggtgcccgccgtcgtcgtctccgttgactaccgcctagctcccgagcaccgcatccccgccgcctacgacgacgcattcgcggccctgaaggcggtcatcgccgcgtgccgcgcggatggcgccgaggcggaggctgagccctggctcgcctctcacggcgacgcctcccgcatcgtccttgcgggggacagcgccggcggtaacatggcgcacaacgtggcgataaggctgcgcaaggaaggcggcatcgagggttacggcgacatggtcagcggcgtcgtcctcctgtacccttatttctgggggaaggagccgctgggcgcggagcccacggatcccggctaccgcgcaatgttcgatcccacttgggaattcatctgcggcggaaagttcggcctcgaccacccctacgtcaacccaatggcatcgccggaggagttgaggcagctcggttcccgccgcgtgctggtgaccacggcggaccagtgctggttcgtggagagggcaagggcgtacgcagagggaatcaagaaatgcggctgggagggggagctcgagttctacgagaccaagggtgaggcgcacgtcttcttcttgcctaaacacggcagcgaaaaagccgtgaaggagctcgccctcgtggccgaattcgtccggcgctgttgaggtacctttcgctttgtttgcccggacctggtgagtagttcagcgagaaaaaaaatcgcacaattagtgacttttattcatattgcaaattaaggacagaggttcagtctcgattcagaatcctgatcttgaatttctgttgtgcatcgaaatttatcctgaacagtacacactgtaattctgaagtacaggcaagcgagtggctaaatgtattgtatacttgaaaactgtccaatgtattgtatactcg

SEQ ID NO: 22975 - protein, 389 aa, Zea mays subsp. mays
  misc_feature (1)..(389): Ceres Seq. ID no. 12410826
ISGSFIHWSRIQISRLLATKYQPRRTGRMPKLSCRVLFAALLIASLAALLVRFPIHRLLNPHAAMDPDSELEFEMPGVLRVYKTGRVERFDGTETVPPCPDGDPANGVASKDIVLDPAAGISARLYLPAGVDAGKKLPVVVFFHGGAFMVHTAASPLYHIYAASLAAAVPAVVVSVDYRLAPEHRIPAAYDDAFAALKAVIAACRADGAEAEAEPWLASHGDASRIVLAGDSAGGNMAHNVAIRLRKEGGIEGYGDMVSGVVLLYPYFWGKEPLGAEPTDPGYRAMFDPTWEFICGGKFGLDHPYVNPMASPEELRQLGSRRVLVTTADQCWFVERARAYAEGIKKCGWEGELEFYETKGEAHVFFLPKHGSEKAVKELALVAEFVRRC

SEQ ID NO: 22976 - protein, 361 aa, Zea mays subsp. mays
  misc_feature (1)..(361): Ceres Seq. ID no. 12410827
MPKLSCRVLFAALLIASLAALLVRFPIHRLLNPHAAMDPDSELEFEMPGVLRVYKTGRVERFDGTETVPPCPDGDPANGVASKDIVLDPAAGISARLYLPAGVDAGKKLPVVVFFHGGAFMVHTAASPLYHIYAASLAAAVPAVVVSVDYRLAPEHRIPAAYDDAFAALKAVIAACRADGAEAEAEPWLASHGDASRIVLAGDSAGGNMAHNVAIRLRKEGGIEGYGDMVSGVVLLYPYFWGKEPLGAEPTDPGYRAMFDPTWEFICGGKFGLDHPYVNPMASPEELRQLGSRRVLVTTADQCWFVERARAYAEGIKKCGWEGELEFYETKGEAHVFFLPKHGSEKAVKELALVAEFVRRC

SEQ ID NO: 22977 - protein, 325 aa, Zea mays subsp. mays
  misc_feature (1)..(325): Ceres Seq. ID no. 12410828
MDPDSELEFEMPGVLRVYKTGRVERFDGTETVPPCPDGDPANGVASKDIVLDPAAGISARLYLPAGVDAGKKLPVVVFFHGGAFMVHTAASPLYHIYAASLAAAVPAVVVSVDYRLAPEHRIPAAYDDAFAALKAVIAACRADGAEAEAEPWLASHGDASRIVLAGDSAGGNMAHNVAIRLRKEGGIEGYGDMVSGVVLLYPYFWGKEPLGAEPTDPGYRAMFDPTWEFICGGKFGLDHPYVNPMASPEELRQLGSRRVLVTTADQCWFVERARAYAEGIKKCGWEGELEFYETKGEAHVFFLPKHGSEKAVKELALVAEFVRRC

SEQ ID NO: 22978 - DNA, 1763 bp, Zea mays subsp. mays
  misc_feature (1)..(1763): Ceres Seq. ID no. 12410839
ctgcctgcccacgcgctccgctcctcgccccctcctcttcccacgccgccgccgtacccacgggcagggggcacggctggtggctcatcgctcggcccgctccccctccgtcgcaaccggaacataccagcaccggcgctgcggtattattcagctccgtccgccggccggcgcggacggacgccaggcttccttcctgtctgcataacaaagccgccgccattatgatctccacatatgatgcttagcatttgtcgctcgcagctgtattgctcctctagctgcatccttgtactagagcatggcgaagctcgcatctattgctcgcagtatgcttagattcccaaacggaagcatgaggcttgttatggtaacggttattggagcagtccttggctttttcattgggatttcattcccttcggtcagcataacaaagcttcactttccagatagctttatttcgtacattgaagacaaagacgctggactcacgacccaagctatactcaatcatgcttggacttctgccagaaacgcaaggggaaatggtaccgaaccgacttcaaacagtaccttaaagatttatgtcccaacgaaccccaagggtgcagaggggctagcaccaggtatcgttgtatcagagtctgacttccatttgcgcaggttatggggagacccaagtgaggacctgcctttcaaaccaaagtaccttgttacctttactgttggagttgagcagaaagcaaatataaacagagctgtgaagaagttttctgacaattttgctattctgttattccactatgatggccgggtgagtgagtgggatgaatttgagtggtcccagcgagctatccatattagtgtcaggaaacaaactaaatggtggtatgccaagagattcctgcatcctgatattgtggcagcttatgagtacatattcatttgggatgaggaccttggggttgaacattttaatgcagaggagtacatcaaacttgttaagaagcataacttggacatctctcaacctggattagagcctgatcgggggttaacatggcagatgaccaaaagaagaggtgacagtgaggttcacaaggacacagaggagaggcctggctggtgctctgaccctcatcttccaccgtgtgctgcttttgttgaaataatggctccagtcttctcaagagatgcatggagatgtgtgtggcatatgattcagaacgacttggttcatggttggggcttggattttgcgctcaggaaatgtgtggagcctgctcatgaaaagattggagttgtcgattcgcagtggatcgttcaccaagtggttccttctctggggaaccaggggcagtcagaaaacggaagggcgccatgggaaggggtgagggcgcggtgcaggaaggaatggggcatgttccagaccaggatggcggaggcggagaaggcgtattacaagatgatgggcatcacccctccaaactccacgcgtgtctagccgcgcctctcttcttggttttccatccccgccaccctgacctttgtggtggcgggtgagctgatgatactatactatagcactacttgattatagggagttagagatggtgggtgtagctgcttttgatggagaggtccttctgtaagtaaatgcgaggcgaaactgtgatgagaaaacatgtacacgaggatgattacctgatgatgatgatgatgatctatctattataaaaaacatatataccgttaccgag

SEQ ID NO: 22979 - protein, 401 aa, Zea mays subsp. mays
  misc_feature (1)..(401): Ceres Seq. ID no. 12410840
MAKLASIARSMLRFPNGSMRLVMVTVIGAVLGFFIGISFPSVSITKLHFPDSFISYIEDKDAGLTTQAILNHAWTSARNARGNGTEPTSNSTLKIYVPTNPKGAEGLAPGIVVSESDFHLRRLWGDPSEDLPFKPKYLVTFTVGVEQKANINRAVKKFSDNFAILLFHYDGRVSEWDEFEWSQRAIHISVRKQTKWWYAKRFLHPDIVAAYEYIFIWDEDLGVEHFNAEEYIKLVKKHNLDISQPGLEPDRGLTWQMTKRRGDSEVHKDTEERPGWCSDPHLPPCAAFVEIMAPVFSRDAWRCVWHMIQNDLVHGWGLDFALRKCVEPAHEKIGVVDSQWIVHQVVPSLGNQGQSENGRAPWEGVRARCRKEWGMFQTRMAEAEKAYYKMMGITPPNSTRV

SEQ ID NO: 22980 - protein, 391 aa, Zea mays subsp. mays
  misc_feature (1)..(391): Ceres Seq. ID no. 12410841
MLRFPNGSMRLVMVTVIGAVLGFFIGISFPSVSITKLHFPDSFISYIEDKDAGLTTQAILNHAWTSARNARGNGTEPTSNSTLKIYVPTNPKGAEGLAPGIVVSESDFHLRRLWGDPSEDLPFKPKYLVTFTVGVEQKANINRAVKKFSDNFAILLFHYDGRVSEWDEFEWSQRAIHISVRKQTKWWYAKRFLHPDIVAAYEYIFIWDEDLGVEHFNAEEYIKLVKKHNLDISQPGLEPDRGLTWQMTKRRGDSEVHKDTEERPGWCSDPHLPPCAAFVEIMAPVFSRDAWRCVWHMIQNDLVHGWGLDFALRKCVEPAHEKIGVVDSQWIVHQVVPSLGNQGQSENGRAPWEGVRARCRKEWGMFQTRMAEAEKAYYKMMGITPPNSTRV

SEQ ID NO: 22981 - protein, 383 aa, Zea mays subsp. mays
  misc_feature (1)..(383): Ceres Seq. ID no. 12410842
MRLVMVTVIGAVLGFFIGISFPSVSITKLHFPDSFISYIEDKDAGLTTQAILNHAWTSARNARGNGTEPTSNSTLKIYVPTNPKGAEGLAPGIVVSESDFHLRRLWGDPSEDLPFKPKYLVTFTVGVEQKANINRAVKKFSDNFAILLFHYDGRVSEWDEFEWSQRAIHISVRKQTKWWYAKRFLHPDIVAAYEYIFIWDEDLGVEHFNAEEYIKLVKKHNLDISQPGLEPDRGLTWQMTKRRGDSEVHKDTEERPGWCSDPHLPPCAAFVEIMAPVFSRDAWRCVWHMIQNDLVHGWGLDFALRKCVEPAHEKIGVVDSQWIVHQVVPSLGNQGQSENGRAPWEGVRARCRKEWGMFQTRMAEAEKAYYKMMGITPPNSTRV

SEQ ID NO: 22982 - DNA, 1484 bp, Zea mays subsp. mays
  misc_feature (1)..(1484): Ceres Seq. ID no. 12410870
agtatccagactctctctcgggcctctcggctctcctctccccgatttccttccccacccgctgtcagtctcactccccccgcgcgcgctctctctttcctcgccttcgccgccggcgacgagcttgagctcgagctggttcctcgtatagaagacgacggccgcggtatggagcccatgaacgtagacaacggcggctgcggaggccttgacgcgcagatcgaacagctgatgcagtgccgcccgctcgccgagcaagaggttaaggcactgtgcgagaaggccaaggagatattgatggaggaaagcaacgttcagcctgtcaagagtccagtgacaatatgtggtgatatacatggacaattccatgatcttgtagagcttttccgaattggcgggaagtgtccagacaccaattacttatttatgggagattatgtagatcgtggctactattctgttgagactgtcacgatgctagtagcactaaaagtgaggtatccacatcgaattacaatccttcgtggaaaccacgagagtcggcagatcacacaggtgtatggattctacgacgaatgcctacgaaagtatggcaatgcaaatgtatggaagacatttacggatctttttgattattttcctctgacagctctggtggaatctgagattttctgccttcacggtggtctatctccatcaattgaaaatcttgatagtgtgcgcagcttagatcgagtccaagaggttccccatgagggacctatgtgcgatctcttatggtcagatccagacgaccgatgtggttggggcatctcccctcgcggtgctggctacactttcgggcaggacatatcagagcagtttaatcacacaaacaatctcaaactcgtagctcgggctcatcaattagttatggagggatataactgggctcatgagcaaaaggttgtcaccatattcagtgctccaaattactgctatcgatgcggcaatatggcatccattttggaagttgacgactgcaacagccacacattcatccagtttgaaccagcccctaggagaggtgagccagatgtgacgcgaagaacaccggattatttcctttgagctgtcgatgttaccgtttcccagcctgtgtcgtgataatcgatgccaacgtctgctggatcaagggccagacagaaataacaggggaatgccgaagcactatgcccagagtttcacccttttcaggcgacagagaagggcggccatccacctacaactctggccgccctctgttttatgcactttttacagagtcgtggaactggccaaaaagaccggagtaccatttgcacctgtgtagcgtaagcttgtactacaaataggcgtgtgctaatctgtatcaccattcatcaattgcaacgaactgttgaactccttccatcagtaaagtaaattttggtaaaagaacggcttacagtgtcggtaatgacact

SEQ ID NO: 22983 - protein, 369 aa, Zea mays subsp. mays
  misc_feature (1)..(369): Ceres Seq. ID no. 12410871
SIQTLSRASRLSSPRFPSPPAVSLTPPARALSFLAFAAGDELELELVPRIEDDGRGMEPMNVDNGGCGGLDAQIEQLMQCRPLAEQEVKALCEKAKEILMEESNVQPVKSPVTICGDIHGQFHDLVELFRIGGKCPDTNYLFMGDYVDRGYYSVETVTMLVALKVRYPHRITILRGNHESRQITQVYGFYDECLRKYGNANVWKTFTDLFDYFPLTALVESEIFCLHGGLSPSIENLDSVRSLDRVQEVPHEGPMCDLLWSDPDDRCGWGISPRGAGYTFGQDISEQFNHTNNLKLVARAHQLVMEGYNWAHEQKVVTIFSAPNYCYRCGNMASILEVDDCNSHTFIQFEPAPRRGEPDVTRRTPDYFL

SEQ ID NO: 22984 - protein, 313 aa, Zea mays subsp. mays
  misc_feature (1)..(313): Ceres Seq. ID no. 12410872
MEPMNVDNGGCGGLDAQIEQLMQCRPLAEQEVKALCEKAKEILMEESNVQPVKSPVTICGDIHGQFHDLVELFRIGGKCPDTNYLFMGDYVDRGYYSVETVTMLVALKVRYPHRITILRGNHESRQITQVYGFYDECLRKYGNANVWKTFTDLFDYFPLTALVESEIFCLHGGLSPSIENLDSVRSLDRVQEVPHEGPMCDLLWSDPDDRCGWGISPRGAGYTFGQDISEQFNHTNNLKLVARAHQLVMEGYNWAHEQKVVTIFSAPNYCYRCGNMASILEVDDCNSHTFIQFEPAPRRGEPDVTRRTPDYFL

SEQ ID NO: 22985 - protein, 310 aa, Zea mays subsp. mays
  misc_feature (1)..(310): Ceres Seq. ID no. 12410873
MNVDNGGCGGLDAQIEQLMQCRPLAEQEVKALCEKAKEILMEESNVQPVKSPVTICGDIHGQFHDLVELFRIGGKCPDTNYLFMGDYVDRGYYSVETVTMLVALKVRYPHRITILRGNHESRQITQVYGFYDECLRKYGNANVWKTFTDLFDYFPLTALVESEIFCLHGGLSPSIENLDSVRSLDRVQEVPHEGPMCDLLWSDPDDRCGWGISPRGAGYTFGQDISEQFNHTNNLKLVARAHQLVMEGYNWAHEQKVVTIFSAPNYCYRCGNMASILEVDDCNSHTFIQFEPAPRRGEPDVTRRTPDYFL

SEQ ID NO: 22986 - DNA, 1413 bp, Zea mays subsp. mays
  misc_feature (1)..(1413): Ceres Seq. ID no. 12410874
atccattgcgatacttgagacgcttcgctctctctcttgttcttctcgccttctgcccgagtgatggccagcctcaccgacctcgtcaacctcgacctgagtgactgcaccgacaggatcatcgccgagtacatctggattggaggaaccgggatagacctcaggagcaaagcgaggacggtgaaaggccccatcaccgacccgatccagctgccgaaatggaactacgacggctccagcaccgggcaggctcccggagaggacagcgaagtcatcctctaccctcaagccattttcaaggacccgttcaggaagggtaaccacatccttgtgatgtgtgactgctacacgccacaaggcgagccaatccccaccaacaagaggtacagcgccgccaaggttttcagccaccccgacgtcgcagctgaggtgccgtggtacggtattgagcaggagtacaccctccttcagaaggacgtgagctggcccctcggctggcccgttggtggataccctggtccccagggaccatactactgcgccgccggtgccgacaaggcctttgggcgcgacgtggttgacgcccactacaaggcctgcctctacgccggcatcaacatcagcggcatcaacggcgaagtcatgcctggacagtgggagttccaagtggggccgtccgttgggatctctgccggcgacgagatatgggtcgcccgctacattctcgagaggatcaccgagatggccggaatcgtcctctccctcgacccgaagccgatcaagggcgactggaacggcgccggcgcccacaccaactacagcaccaagtcgatgagggaggccgggggatacgaggtcatcaaggcggcgatcgacaagctggggaagaggcacaaggagcacatcgccgcgtacggcgagggcaacgagcgccgcctcacgggccgccacgagaccgccgacatcaacaccttcaaatggggcgtggcgaaccgcggcgcgtccatccgcgtcggccgcgacaccgagagggagggcaagggctacttcgaggaccgcaggccggcgtccaacatggacccctacgtcgtcaccggcatgatcgccgagaccaccatcctgtggaatggaaactgatcaagcatgtgcattctcgagggagcccactgtttttcttctgcacaacgcatccgccgtggtgtcgctttggttttgaaatttagattccgttgtcctaaaatttatcactacggtctccagtgtattgctcgggaacgaatgaataacgactgcgatgtttgtttttttttttgctggcgtagtagatgtacgtttggctgtgcttccagtttattgggtaaatgaaaaaatgtaatggtctaccggtcttaaaatagtagtcattttagctct

SEQ ID NO: 22987 - protein, 357 aa, Zea mays subsp. mays
  misc_feature (1)..(357): Ceres Seq. ID no. 12410875
MASLTDLVNLDLSDCTDRIIAEYIWIGGTGIDLRSKARTVKGPITDPIQLPKWNYDGSSTGQAPGEDSEVILYPQAIFKDPFRKGNHILVMCDCYTPQGEPIPTNKRYSAAKVFSHPDVAAEVPWYGIEQEYTLLQKDVSWPLGWPVGGYPGPQGPYYCAAGADKAFGRDVVDAHYKACLYAGINISGINGEVMPGQWEFQVGPSVGISAGDEIWVARYILERITEMAGIVLSLDPKPIKGDWNGAGAHTNYSTKSMREAGGYEVIKAAIDKLGKRHKEHIAAYGEGNERRLTGRHETADINTFKWGVANRGASIRVGRDTEREGKGYFEDRRPASNMDPYVVTGMIAETTILWNGN

SEQ ID NO: 22988 - protein, 267 aa, Zea mays subsp. mays; identical to SEQ ID NO: 14740
  misc_feature (1)..(267): Ceres Seq. ID no. 12410876

SEQ ID NO: 22989 - DNA, 1418 bp, Zea mays subsp. mays
  misc_feature (1)..(1418): Ceres Seq. ID no. 12410901
aggcacacacacttagacttagctatagtagctactactgtagtagatatatatgggtatggctgcaacaaggaggacgagagcaagctcaggtaataatgtcctcctcctgctggccatcggccttgtgttctccgcggcatcgacgacgacaccggctgtagcagctgcggcgttgaacggcagcgacgacgacattggtgctgctgccagggcggcgggcctgtccgtggacttccacgcggcgtcgtgcccggacctggacggcatcgtgcgctccgccgttgaggaggcgcggcggtgggacgcccaggtcacggcgggcctcctccgcatcttcttccacgactgcttcccgcagggctgcgacgcgtcgatcctgctgggcaggaaccagggcggcagcgagcaggacgcaccccagaacacgggcctgcagcaggcggcgctggacctcgtcgagaggatccgcggcagggtgcactcccgctgcggcgcctccgtctcctgcgccgacatcctggcgctcgccaccagccacgccgtcaaccaggccggcggccccttcatccctatggagctgggccgcagcgacagcaggggccccgctccaggatgggccgtcaacaggctcccgccccccaccgatggcgtctccgagctcctcggcaacttcggtaacaggggcctcgatggctccgacgtcgtggtgctctccggcgcgcacaccgtgggcgtggcgcgttgctcctcgttccaggaccgtatcgacaagaagaccggcaaggataacttcgagtgggggctcaccggctactgcaacggagacaaggagaagaagcacgcgctggaccgtacgcccttcaacttcgacaacagctacttcgtggagctgcagaacggcagaggggtgctcacctccgaccaggcgctctacagggacggccgcaccaggtggctcgtcgaccgctgcgcctccagccaggacgaattcttcaagcgcttcgtggaatccatgctcaagctcagcaggctcaggggggccgatccgggcccagtgcgcaacaactgcttcgtccgcgccagcttcggcgctagtagcgctaccaaagacgaccttgtcattgacaccaccgccggagacggagacggagacgaggaccttattcttgcagcagctgcatgatcgctgctgctacagtgtacttacatccgatccggccgctatcatatcgtcgtcgtcgtcgaataattaagcagatcaacatgtttgtttatttgcttattagtttctattccgcagtccgcactagctagctagctgctgtagtacctctcgtaatacaatgcatgcatgtaccttgcgtgttttagcgtggcacgcctccttaattcactcggtatttctttgatcatgc

SEQ ID NO: 22990 - protein, 377 aa, Zea mays subsp. mays
  misc_feature (1)..(377): Ceres Seq. ID no. 12410902
MGMAATRRTRASSGNNVLLLLAIGLVFSAASTTTPAVAAAALNGSDDDIGAAARAAGLSVDFHAASCPDLDGIVRSAVEEARRWDAQVTAGLLRIFFHDCFPQGCDASILLGRNQGGSEQDAPQNTGLQQAALDLVERIRGRVHSRCGASVSCADILALATSHAVNQAGGPFIPMELGRSDSRGPAPGWAVNRLPPPTDGVSELLGNFGNRGLDGSDVVVLSGAHTVGVARCSSFQDRIDKKTGKDNFEWGLTGYCNGDKEKKHALDRTPFNFDNSYFVELQNGRGVLTSDQALYRDGRTRWLVDRCASSQDEFFKRFVESMLKLSRLRGADPGPVRNNCFVRASFGASSATKDDLVIDTTAGDGDGDEDLILAAAA

SEQ ID NO: 22991 - protein, 375 aa, Zea mays subsp. mays
  misc_feature (1)..(375): Ceres Seq. ID no. 12410903
MAATRRTRASSGNNVLLLLAIGLVFSAASTTTPAVAAAALNGSDDDIGAAARAAGLSVDFHAASCPDLDGIVRSAVEEARRWDAQVTAGLLRIFFHDCFPQGCDASILLGRNQGGSEQDAPQNTGLQQAALDLVERIRGRVHSRCGASVSCADILALATSHAVNQAGGPFIPMELGRSDSRGPAPGWAVNRLPPPTDGVSELLGNFGNRGLDGSDVVVLSGAHTVGVARCSSFQDRIDKKTGKDNFEWGLTGYCNGDKEKKHALDRTPFNFDNSYFVELQNGRGVLTSDQALYRDGRTRWLVDRCASSQDEFFKRFVESMLKLSRLRGADPGPVRNNCFVRASFGASSATKDDLVIDTTAGDGDGDEDLILAAAA

SEQ ID NO: 22992 - protein, 203 aa, Zea mays subsp. mays
  misc_feature (1)..(203): Ceres Seq. ID no. 12410904
MELGRSDSRGPAPGWAVNRLPPPTDGVSELLGNFGNRGLDGSDVVVLSGAHTVGVARCSSFQDRIDKKTGKDNFEWGLTGYCNGDKEKKHALDRTPFNFDNSYFVELQNGRGVLTSDQALYRDGRTRWLVDRCASSQDEFFKRFVESMLKLSRLRGADPGPVRNNCFVRASFGASSATKDDLVIDTTAGDGDGDEDLILAAAA

SEQ ID NO: 22993 - DNA, 1365 bp, Zea mays subsp. mays
  misc_feature (1)..(1365): Ceres Seq. ID no. 12410913
atataccctttcgtctccgcccagcagcaacggcacccaccgaatccgcccctccctctttccgttccgcctcgtcgcgctcgctctcgctgcgccgcccgccccacctcacggagctcacggcaacaccggcagggacggaaaaggaaagccgaggaggcgaggagagagagatacaaggcaggcagccaggcacaggcagcccgcggctggctacggggccaaaacccttacgcgcgacgcggccccctcctcttcttctctctcccaccaccgccctccccttgccatttttgccgcaggagccgccgccatccgatccggaagagggaggaggggggagggaggaggatctgtgtcccgattcgattggagctctcgtccccggcggtccaggatggtgcggggcaagacgcagatgaagcggatagagaacccggccagtcgccaggtcaccttctccaagcgccgcaacggcctgctcaagaaggcgttcgagctctccgtcctctgcgacgccgaggtcgcgctcgtcgtcttctccccgcgcggcaagctctacgaattcgccagcggaagtgcccagaaaacaattgaacgttatagaacgtacacaaaggataatgtcagcaacaagacagcacatcaggacattgagcaagtaaaagctgatgctgagggcctggcaaagaaactggaagcacttgaagcttacaaaagaaaacttttgggtgagaggttggaagaatgctcctttgaagaactgcacagtttggaagtgaaactcgaaaagagccttcattgcatcaggggaagaaagactcagctgctggaggagcaactccataagctgaaggagaaggagatgaatctgcgcaagagcaacgaagatttacgtgaaaagtgcaagaagcagccgccgccgccgccgccctatgctgatggctcctccgccgcctccagccgccggcagccatcgatcacacggggccgaaggatgtcgggatggacgtggagacggagctgtacataggattgcccggcagagattaccgctcaaacaacaaagacatgactgcacagtagctgtcaggtcaggtcaggtcaggctagccagcagtgcagagaataatcttagatctgtggtgcggagaactggagatgcaagccaagcccaagccaatcaacatgataaggatcatgagtgtcgcgtcgtgttttacaaacctgtccaccgtccgtcaaaggcacatgcgccagaacgtccgtcagagaacacttaccccctcatctccctctattagctagctgctccggcctgctcatgtcgaaaccttctgttcaagtatgttctcctcctgatgt

SEQ ID NO: 22994 - protein, 343 aa, Zea mays subsp. mays
  misc_feature (1)..(343): Ceres Seq. ID no. 12410914
YTLSSPPSSNGTHRIRPSLFPFRLVALALAAPPAPPHGAHGNTGRDGKGKPRRRGERDTRQAARHRQPAAGYGAKTLTRDAAPSSSSLSHHRPPLAIFAAGAAAIRSGRGRRGEGGGSVSRFDWSSRPRRSRMVRGKTQMKRIENPASRQVTFSKRRNGLLKKAFELSVLCDAEVALVVFSPRGKLYEFASGSAQKTIERYRTYTKDNVSNKTAHQDIEQVKADAEGLAKKLEALEAYKRKLLGERLEECSFEELHSLEVKLEKSLHCIRGRKTQLLEEQLHKLKEKEMNLRKSNEDLREKCKKQPPPPPPYADGSSAASSRRQPSITRGRRMSGWTWRRSCT

SEQ ID NO: 22995 - protein, 211 aa, Zea mays subsp. mays
  misc_feature (1)..(211): Ceres Seq. ID no. 12410915
MVRGKTQMKRIENPASRQVTFSKRRNGLLKKAFELSVLCDAEVALVVFSPRGKLYEFASGSAQKTIERYRTYTKDNVSNKTAHQDIEQVKADAEGLAKKLEALEAYKRKLLGERLEECSFEELHSLEVKLEKSLHCIRGRKTQLLEEQLHKLKEKEMNLRKSNEDLREKCKKQPPPPPPYADGSSAASSRRQPSITRGRRMSGWTWRRSCT

SEQ ID NO: 22996 - protein, 204 aa, Zea mays subsp. mays
  misc_feature (1)..(204): Ceres Seq. ID no. 12410916
MKRIENPASRQVTFSKRRNGLLKKAFELSVLCDAEVALVVFSPRGKLYEFASGSAQKTIERYRTYTKDNVSNKTAHQDIEQVKADAEGLAKKLEALEAYKRKLLGERLEECSFEELHSLEVKLEKSLHCIRGRKTQLLEEQLHKLKEKEMNLRKSNEDLREKCKKQPPPPPPYADGSSAASSRRQPSITRGRRMSGWTWRRSCT

SEQ ID NO: 22997 - DNA, 1270 bp, Zea mays subsp. mays
  misc_feature (1)..(1270): Ceres Seq. ID no. 12410926
agaaacccccttccttcccattcccactgctcggattgctttccccacctccaccgccaccagaccagatagcaagcaaccgacccctcctcgctgtattcgcagggaaggagaagatggagcctggccagagcgggactgagcaggcctctccacgcgggaacgattgggaggtcgtgcagctcaccgcgtccgcatacgccgccgcgcccgctccgaggaagcccgagccctccgacgaagcggaagctaagagatacggcgcaaagggggacgatctagccgccggcctactcatgtccggccacttctccgtgtctcagagcgaggtcgagagcctcctcgtaggcgccgacaccaaagaaccaccgcccaaggacaaggaggagccttgcgagcatactaagctgctggaggacgacgtccccaccatcccgttcgatgacggcaaggcgctgaaaggcatgggtctggtcggggaagagccggccgggttctcgtcgcctgtctacagctccatcacggagagcaggagtgacaagaggagcgaggagcctactactctgcatagtttgaaccccgtgactggctcaacaaaggtcgtctcacctgacgagcagagcgagcctgctgctgggtctgggtccgggtctgggtcaggcccgcgtgaagcgtggtggaagaagcagcttctctccctttacaggaacgccaaggagagcaagcatctctggcctatcgtcgccaccactgctgctttggtgggcctggcgtatctggggcggcgctggcataagggcaggctgcactttcagctgctcaagatatcgccgtctaccaacaacgagaaaatcagcgacgcggttggaccgttaaaccgcatcaacgacattctcgttgctggcaaccacccaagtcacggtgtccatgggcatgcccgtgcaggctgaatgcagtcagttcgcgaacccatcgggcgtcctggacccatatactatcatgtgtcgctttgagaatcggctcaagacaaaccatcgggcaggactggagtagttgtccaaggactgaggatgtttatgcagacacaagtatgtttggtggctcgatgtatgtgaattccaaaactccatctgggtatgtaaatatttgtatgggtttagtttggttgctttttcgtttggtcatctcatgaaacctctgctggtggtttccttgtctatattactgtcttatttggggttcgttcatgcatgcatacatgtgatggggc

SEQ ID NO: 22998 - protein, 315 aa, Zea mays subsp. mays
  misc_feature (1)..(315): Ceres Seq. ID no. 12410927
KPPSFPFPLLGLLSPPPPPPDQIASNRPLLAVFAGKEKMEPGQSGTEQASPRGNDWEVVQLTASAYAAAPAPRKPEPSDEAEAKRYGAKGDDLAAGLLMSGHFSVSQSEVESLLVGADTKEPPPKDKEEPCEHTKLLEDDVPTIPFDDGKALKGMGLVGEEPAGFSSPVYSSITESRSDKRSEEPTTLHSLNPVTGSTKVVSPDEQSEPAAGSGSGSGSGPREAWWKKQLLSLYRNAKESKHLWPIVATTAALVGLAYLGRRWHKGRLHFQLLKISPSTNNEKISDAVGPLNRINDILVAGNHPSHGVHGHARAG

SEQ ID NO: 22999 - protein, 277 aa, Zea mays subsp. mays
  misc_feature (1)..(277): Ceres Seq. ID no. 12410928
MEPGQSGTEQASPRGNDWEVVQLTASAYAAAPAPRKPEPSDEAEAKRYGAKGDDLAAGLLMSGHFSVSQSEVESLLVGADTKEPPPKDKEEPCEHTKLLEDDVPTIPFDDGKALKGMGLVGEEPAGFSSPVYSSITESRSDKRSEEPTTLHSLNPVTGSTKVVSPDEQSEPAAGSGSGSGSGPREAWWKKQLLSLYRNAKESKHLWPIVATTAALVGLAYLGRRWHKGRLHFQLLKISPSTNNEKISDAVGPLNRINDILVAGNHPSHGVHGHARAG

SEQ ID NO: 23000 - protein, 217 aa, Zea mays subsp. mays
  misc_feature (1)..(217): Ceres Seq. ID no. 12410929
MSGHFSVSQSEVESLLVGADTKEPPPKDKEEPCEHTKLLEDDVPTIPFDDGKALKGMGLVGEEPAGFSSPVYSSITESRSDKRSEEPTTLHSLNPVTGSTKVVSPDEQSEPAAGSGSGSGSGPREAWWKKQLLSLYRNAKESKHLWPIVATTAALVGLAYLGRRWHKGRLHFQLLKISPSTNNEKISDAVGPLNRINDILVAGNHPSHGVHGHARAG

SEQ ID NO: 23001 - DNA, 1414 bp, Zea mays subsp. mays
  misc_feature (1)..(1414): Ceres Seq. ID no. 12410938
acacaagctagcaattgaaaaaaaaaacaggcaaggaaaatggctccgaccgccgccaaggacagtggctccgccgatcgctggcgcgaggtgcaggcgttcgaggacagcaagctgggtgtgaagggcctggtcgactccggcgtcaagtccatcccggccatgttccaccacccgccggagtccctcaaggatgtcatttctccaccagctctgccctcctccgacgatgcgccggccatcccagtggtggacctgtccgtggcgcggcgcgaggatctggtggcccaggtgaagcacgcggccgggacggtgggcttcttctgggtggtgaaccacggcgtgccggaggagctgatggccagcatgctcagcggggtgcgccagttcaacgagggctctctggaggccaagcaggcgctctactcacgggaccccgctcgcaacgtgcgcttcgcttccaacttcgacctcttcgagtccgcggcggccgactggcgcgacacgctctactgcaagattgcgccggatccggcgccgcgggagctcgtgccggagcctctccggaacgtgatgatggaatacggcgaggaactgacgaagctggcgcggtccatgttcgagctgctgtcggagtccctcggcatgcccagcgaccacctgcacaagatggagtgcatgcagcagctccacatcgtgtgccagtactacccgccatgcccggagccgcacctcaccatcggcgtcaggaagcactcggacaccggtttcttcaccatcctcctgcaggacggcatgggcggcctgcaggtgctagtcgatcgcggaggcggccgccagacgtgggtggacgtcactccccgacctggggcactcatggtcaacatgggcagctttcttcagcttgtgacgaatgaccggtacaagagcgtggatcaccgggtgccggctaacaagagcagtgacacggcgagggtctcggtagctgccttcttcaaccccgacgagaagagaaccgagaggctgtatggccccattccagaccccagcaagcctccgctgtacaggagcgtcacgttcccggacttcatcgccaagttcaacagcatcggactggacggtcgcgtgctcgaccacttccggttggaggacgacggccctactcgtcttgctgctcctgcacaccacgtctagtcttgttttcgttcgatcgaacaaacagttctcgtcgtcgtctcttttatttttcctgcaatctgaatttcgagttctccaaataaataagggtatccattcccttcatccgcagagcgcgcggatgccttcactagcagctctagttttgctatgtatatagctgtgtgtgtggtacctttgtgactcatatattatgcaataaagtatgctttctcct

SEQ ID NO: 23002 - protein, 384 aa, Zea mays subsp. mays
  misc_feature (1)..(384): Ceres Seq. ID no. 12410939
MAPTAAKDSGSADRWREVQAFEDSKLGVKGLVDSGVKSIPAMFHHPPESLKDVISPPALPSSDDAPAIPVVDLSVARREDLVAQVKHAAGTVGFFWVVNHGVPEELMASMLSGVRQFNEGSLEAKQALYSRDPARNVRFASNFDLFESAAADWRDTLYCKIAPDPAPRELVPEPLRNVMMEYGEELTKLARSMFELLSESLGMPSDHLHKMECMQQLHIVCQYYPPCPEPHLTIGVRKHSDTGFFTILLQDGMGGLQVLVDRGGGRQTWVDVTPRPGALMVNMGSFLQLVTNDRYKSVDHRVPANKSSDTARVSVAAFFNPDEKRTERLYGPIPDPSKPPLYRSVTFPDFIAKFNSIGLDGRVLDHFRLEDDGPTRLAAPAHHV

SEQ ID NO: 23003 - protein, 343 aa, Zea mays subsp. mays
  misc_feature (1)..(343): Ceres Seq. ID no. 12410940
MFHHPPESLKDVISPPALPSSDDAPAIPVVDLSVARREDLVAQVKHAAGTVGFFWVVNHGVPEELMASMLSGVRQFNEGSLEAKQALYSRDPARNVRFASNFDLFESAAADWRDTLYCKIAPDPAPRELVPEPLRNVMMEYGEELTKLARSMFELLSESLGMPSDHLHKMECMQQLHIVCQYYPPCPEPHLTIGVRKHSDTGFFTILLQDGMGGLQVLVDRGGGRQTWVDVTPRPGALMVNMGSFLQLVTNDRYKSVDHRVPANKSSDTARVSVAAFFNPDEKRTERLYGPIPDPSKPPLYRSVTFPDFIAKFNSIGLDGRVLDHFRLEDDGPTRLAAPAHHV

SEQ ID NO: 23004 - protein, 278 aa, Zea mays subsp. mays
  misc_feature (1)..(278): Ceres Seq. ID no. 12410941
MASMLSGVRQFNEGSLEAKQALYSRDPARNVRFASNFDLFESAAADWRDTLYCKIAPDPAPRELVPEPLRNVMMEYGEELTKLARSMFELLSESLGMPSDHLHKMECMQQLHIVCQYYPPCPEPHLTIGVRKHSDTGFFTILLQDGMGGLQVLVDRGGGRQTWVDVTPRPGALMVNMGSFLQLVTNDRYKSVDHRVPANKSSDTARVSVAAFFNPDEKRTERLYGPIPDPSKPPLYRSVTFPDFIAKFNSIGLDGRVLDHFRLEDDGPTRLAAPAHHV

SEQ ID NO: 23005 - DNA, 1375 bp, Zea mays subsp. mays
  misc_feature (1)..(1375): Ceres Seq. ID no. 12410950
actggcatgggcagggacaagtaattcattctgatacatataatcccaagctcctctatcatagggatatatggatataagacgtgatttccatatggccgaaggggaaggagaatggagctactccaagaattgtaggcgccaacaagtagctgtccgcgagaccaggccaatggtcgagactgccgtcaagcaggtatacgcagctctcctccccagaaccatggtcgtcgccgacctcggatgctctgcaggaccgaacacgctgctcttcatctctagcgtcctgagcagcatcgctgctgcggctggtgctgaacggtgcaagccgccgagcggcggcggagacgatgacgaccatcacgtggagcttcagttcgtcctgaacgacctccccggcaacgacttcaaccacctgtttcggtcagtcgaggaggagttcagaagggcagcaggttgtgaaaggggtcctcctcctcctccctactatgtcatggggctaccggagtcctattacaacaggctgtttcctcgtcagagtgtgcatctgttccactcctcctactgcctccactggcgctcccaggaacctgagggactagaggcgtggagaaagccttgcctgaacgaggacaacatctacatcgcaaggagtaggaccacgacaccttctgtggcgaaactgttccaggagcagttccagaaggacttctccctcttcctcaagctgcgccacgaagagctcgtgcatggagggcgaatggtgcttgtatttctcggcaggaagaacgaggacgcgtacagtggcgacctcaaccagctcttcgcactggtcgcaacagcgttgcagtctcttgttttgaagggccttgtggagaaggaaaagctagagtctttcaacctaccgatctacgggccgtcggtgggagaagtggaggatctggtcacgcagagcggtctgttcagcatggatctgatcaagcagttcgagatgaactgggaccctctcgacgactcggagggtgacgacgtcgtcgaggacagcgctcgcagcagcatgaatgtcgccaagtacatcagatccgtgctgaagtctttaattgtccgccattttggagaagccataattgatgcatggtttgccgagttcaggcgccttgtcgctgagcacctcgagaaggagaagaccaagttcactaccttcgccatgtgcttgaagaaagagtgatatagatgtatcgatctacatatacgtatgtgtattgtatttcgtacggtgtagctaatatactcatatgtgatatatcatgtgtatttcatgggacacgtacaattgagtatatgtgtgcatgcattatacatatggtacggtcgt

SEQ ID NO: 23006 - protein, 385 aa, Zea mays subsp. mays
  misc_feature (1)..(385): Ceres Seq. ID no. 12410951
MDIRRDFHMAEGEGEWSYSKNCRRQQVAVRETRPMVETAVKQVYAALLPRTMVVADLGCSAGPNTLLFISSVLSSIAAAAGAERCKPPSGGGDDDDHHVELQFVLNDLPGNDFNHLFRSVEEEFRRAAGCERGPPPPPYYVMGLPESYYNRLFPRQSVHLFHSSYCLHWRSQEPEGLEAWRKPCLNEDNIYIARSRTTTPSVAKLFQEQFQKDFSLFLKLRHEELVHGGRMVLVFLGRKNEDAYSGDLNQLFALVATALQSLVLKGLVEKEKLESFNLPIYGPSVGEVEDLVTQSGLFSMDLIKQFEMNWDPLDDSEGDDVVEDSARSSMNVAKYIRSVLKSLIVRHFGEAIIDAWFAEFRRLVAEHLEKEKTKFTTFAMCLKKE

SEQ ID NO: 23007 - protein, 377 aa, Zea mays subsp. mays
  misc_feature (1)..(377): Ceres Seq. ID no. 12410952
MAEGEGEWSYSKNCRRQQVAVRETRPMVETAVKQVYAALLPRTMVVADLGCSAGPNTLLFISSVLSSIAAAAGAERCKPPSGGGDDDDHHVELQFVLNDLPGNDFNHLFRSVEEEFRRAAGCERGPPPPPYYVMGLPESYYNRLFPRQSVHLFHSSYCLHWRSQEPEGLEAWRKPCLNEDNIYIARSRTTTPSVAKLFQEQFQKDFSLFLKLRHEELVHGGRMVLVFLGRKNEDAYSGDLNQLFALVATALQSLVLKGLVEKEKLESFNLPIYGPSVGEVEDLVTQSGLFSMDLIKQFEMNWDPLDDSEGDDVVEDSARSSMNVAKYIRSVLKSLIVRHFGEAIIDAWFAEFRRLVAEHLEKEKTKFTTFAMCLKKE

SEQ ID NO: 23008 - protein, 351 aa, Zea mays subsp. mays
  misc_feature (1)..(351): Ceres Seq. ID no. 12410953
MVETAVKQVYAALLPRTMVVADLGCSAGPNTLLFISSVLSSIAAAAGAERCKPPSGGGDDDDHHVELQFVLNDLPGNDFNHLFRSVEEEFRRAAGCERGPPPPPYYVMGLPESYYNRLFPRQSVHLFHSSYCLHWRSQEPEGLEAWRKPCLNEDNIYIARSRTTTPSVAKLFQEQFQKDFSLFLKLRHEELVHGGRMVLVFLGRKNEDAYSGDLNQLFALVATALQSLVLKGLVEKEKLESFNLPIYGPSVGEVEDLVTQSGLFSMDLIKQFEMNWDPLDDSEGDDVVEDSARSSMNVAKYIRSVLKSLIVRHFGEAIIDAWFAEFRRLVAEHLEKEKTKFTTFAMCLKKE

SEQ ID NO: 23009 - DNA, 1651 bp, Zea mays subsp. mays
  misc_feature (1)..(1651): Ceres Seq. ID no. 12410958
aataccagcagtggccagtgggggggagactgggatctgcgaacgggagggcgttataattgtcggcgcgcggtagccagtaggcgccgttccgccgccgccgccccctcgcccgacgttactcgccgccagcacaggcgcggaccccgcgcgccactatggcaaggtcatggctgataacttgtaggggaattgctaagaaaataagatatgcaaatcctagcgctaatcgccaaataagccaactgattgcagaagcacggagggaatgcccaaactgcagttatgttattgataacagcgatgttgccatgcagtggcctggggctgcctgctggagtcaagtttgatccttctgaattggagttgcttcaacatttagaacaaaaggttggcctgggagattcaagaccacatgtgctcattgatgaatttattccaactatagacaatgatgagggaatctgctattcgcatcctgaaaatcttcctggtatgaaaacagatggtagcaatgctcatttcttccatagagtttcaaaagcgtatggttatggccagcgcaagcgtcgaaggattatcaactgcagcgatcacactgttcctgatgatcgtgtgagatggcacaagactggaagatccaaagccatatatgacaatggcgttataaaaggttggaagaagataatggtgctgcacaaaactttgcgaagtggtggtaagcgggagagagctaaatgggtaatgcatcagtatcaccttggaaaagaggaagatgaaaaggacggggagcttgtagtatctaaaatcttcttccagttggcaaataagagtatggaaatttctgaaacagaaactgcttgtgaagaacctgaagcacctgcttcagtgattggtccgaaaactccaaagacaatcacaccgcagccacgtcatcctaaaagtagtccatgtgaaactcagcagaatatttccattgtgcaggatcagctactactggacagcgaaggcgagcctaccatgcctattgttagtctggaggatgatgctatgaaccctgcatggtgtgctgtagctgaagaacggcaggttgttggagaggcatctcgggctcagtcgaactcagttgaaactcttctttgtcgtgaagacccaaattccttaaactacgaagcattgcttccctgggactatccgattctgtcccaatgcaggaatgagatgcttgatgggaacctgaatggatatgggttgcctgatcaccataatgtggatcttggaacgcctccagatcttcagcttgctgactttcagtttggttctcaggaaagccttggcagctggctggatcgcatctaggaagataactagtgtgaactgtttgctcgaacagcctgatcgatgggcttctttttgcacaggatatggtaaccggtggtggctattttgggacttacacaacacaaagattgcatgcttgcattagtattgtatttgtgttgcgctgtcaaacatcatctggaaaccaagaacctttcgcccttttctattttctttagaagaaatgaacaacctttaacagctggctactagacttgaagtttagttgtatgtttggcacggttggtgcaaccctgcattgccccgttgt

SEQ ID NO: 23010 - protein, 357 aa, Zea mays subsp. mays
  misc_feature (1)..(357): Ceres Seq. ID no. 12410959
MLLITAMLPCSGLGLPAGVKFDPSELELLQHLEQKVGLGDSRPHVLIDEFIPTIDNDEGICYSHPENLPGMKTDGSNAHFFHRVSKAYGYGQRKRRRIINCSDHTVPDDRVRWHKTGRSKAIYDNGVIKGWKKIMVLHKTLRSGGKRERAKWVMHQYHLGKEEDEKDGELVVSKIFFQLANKSMEISETETACEEPEAPASVIGPKTPKTITPQPRHPKSSPCETQQNISIVQDQLLLDSEGEPTMPIVSLEDDAMNPAWCAVAEERQVVGEASRAQSNSVETLLCREDPNSLNYEALLPWDYPILSQCRNEMLDGNLNGYGLPDHHNVDLGTPPDLQLADFQFGSQESLGSWLDRI

SEQ ID NO: 23011 - protein, 351 aa, Zea mays subsp. mays
  misc_feature (1)..(351): Ceres Seq. ID no. 12410960
MLPCSGLGLPAGVKFDPSELELLQHLEQKVGLGDSRPHVLIDEFIPTIDNDEGICYSHPENLPGMKTDGSNAHFFHRVSKAYGYGQRKRRRIINCSDHTVPDDRVRWHKTGRSKAIYDNGVIKGWKKIMVLHKTLRSGGKRERAKWVMHQYHLGKEEDEKDGELVVSKIFFQLANKSMEISETETACEEPEAPASVIGPKTPKTITPQPRHPKSSPCETQQNISIVQDQLLLDSEGEPTMPIVSLEDDAMNPAWCAVAEERQVVGEASRAQSNSVETLLCREDPNSLNYEALLPWDYPILSQCRNEMLDGNLNGYGLPDHHNVDLGTPPDLQLADFQFGSQESLGSWLDRI

SEQ ID NO: 23012 - protein, 287 aa, Zea mays subsp. mays
  misc_feature (1)..(287): Ceres Seq. ID no. 12410961
MKTDGSNAHFFHRVSKAYGYGQRKRRRIINCSDHTVPDDRVRWHKTGRSKAIYDNGVIKGWKKIMVLHKTLRSGGKRERAKWVMHQYHLGKEEDEKDGELVVSKIFFQLANKSMEISETETACEEPEAPASVIGPKTPKTITPQPRHPKSSPCETQQNISIVQDQLLLDSEGEPTMPIVSLEDDAMNPAWCAVAEERQVVGEASRAQSNSVETLLCREDPNSLNYEALLPWDYPILSQCRNEMLDGNLNGYGLPDHHNVDLGTPPDLQLADFQFGSQESLGSWLDRI

SEQ ID NO: 23013 - DNA, 1692 bp, Zea mays subsp. mays
  misc_feature (1)..(1692): Ceres Seq. ID no. 12410974
atcaacgacagtcgacagttgcagtgcagccggtgagcttagatgacgcgcgtcccctaaaagcaggatctggcataaggctacgtgctggtttacagttacagctcaggcttaccatttctttaaccaattcgcttcttgttctttaaaagttcagagttcaagagttcagtttagagagagagagagggagagtgatttgccgacttgccagttgccgcacaaagctcctctagcacctctgtgtggccgacttgtccccggtatcaccaagtctgcaggcctccccagtcgtcgccggcgagggaacgcgccgcccgtgacgccgcgggttgttggcgccggcgttgaggccacaagcgcgccagcatcaggacctcacaggtgattcaatcctgaaggcatcaactatgttcaattttcaagaaatgtcttgctgttttacgtgtgcgacgggcatggaacgaaataatgaaaacgaaggaggaagcaaggtgaggattttttcctacagtgagatgaggaaagctacgcatgattttagtggagcaaacaagattggcgagggcggtttcggctccgttttcagggggaagcttaaagatggaacgatcgtcgcggtgaaagtcctttctgctaattcaaggcagggtgttcgagagttcgtaaccgaacttacagcaatttcagatatcgtgcatgaaaacctaattacattggttggttgctgtgccgaagggtcccagaggattcttgtgtacaattatctcgagaacaatagtctttcatatacacttctaggttcgggccggagcaacattcggttcaactggagagcccgtgtcaagattgctgtaggcgttgctcgtgggcttgcttatcttcacgatggaattcggccccctataattcatcgagatataaaggcgagcaacattctccttgacaaggacctcaccccaaagatctctgatttcgggctggcaaggctcctccccccaaacgcaactcatgtgagcactagggttgcaggaacaataggatacctggctcctgaatacgctgtgagggggcaagtgacgaagaaatcggatatctatagtttcggcgttttgctactggaaattgttgctggtagatgtaactacaacagtagattgcctcagggagaccagtttctgcttgagaagacatgggcatactacgtgcagggaaagctagagaaggtcatagacgccgaagcaggggaggacctgaacgtcgaggaggcatgccgtttcttgaaggttggcctactatgcgcccaagacgcgatgaagctgcgtccgaacatggccagcgtcgtcctgatgctgataggagagaagggaatctccgtggacaggatcaccaagccagccgtgatcggtgacccgtacctcgaccggaggccaagcaacgcagactctaccacgatgaagtccttcgccacgaccgaagctttaacgtcatcagaggcaaacacggagtggtctctgtgatggggggaaaaaacgtcatcatcgatggagatttgtttttgtggatgctgcagttgccaaacaaataccgcatcgcttctgttgattatgtttgtttgttatttttgtgtgtgtgtatatatacttgaaatggaaccacgggagtgaaacgaggattgaatatgctttaccc

SEQ ID NO: 23014 - protein, 369 aa, Zea mays subsp. mays
  misc_feature (1)..(369): Ceres Seq. ID no. 12410975
MFNFQEMSCCFTCATGMERNNENEGGSKVRIFSYSEMRKATHDFSGANKIGEGGFGSVFRGKLKDGTIVAVKVLSANSRQGVREFVTELTAISDIVHENLITLVGCCAEGSQRILVYNYLENNSLSYTLLGSGRSNIRFNWRARVKIAVGVARGLAYLHDGIRPPIIHRDIKASNILLDKDLTPKISDFGLARLLPPNATHVSTRVAGTIGYLAPEYAVRGQVTKKSDIYSFGVLLLEIVAGRCNYNSRLPQGDQFLLEKTWAYYVQGKLEKVIDAEAGEDLNVEEACRFLKVGLLCAQDAMKLRPNMASVVLMLIGEKGISVDRITKPAVIGDPYLDRRPSNADSTTMKSFATTEALTSSEANTEWSL

SEQ ID NO: 23015 - protein, 363 aa, Zea mays subsp. mays
  misc_feature (1)..(363): Ceres Seq. ID no. 12410976
MSCCFTCATGMERNNENEGGSKVRIFSYSEMRKATHDFSGANKIGEGGFGSVFRGKLKDGTIVAVKVLSANSRQGVREFVTELTAISDIVHENLITLVGCCAEGSQRILVYNYLENNSLSYTLLGSGRSNIRFNWRARVKIAVGVARGLAYLHDGIRPPIIHRDIKASNILLDKDLTPKISDFGLARLLPPNATHVSTRVAGTIGYLAPEYAVRGQVTKKSDIYSFGVLLLEIVAGRCNYNSRLPQGDQFLLEKTWAYYVQGKLEKVIDAEAGEDLNVEEACRFLKVGLLCAQDAMKLRPNMASVVLMLIGEKGISVDRITKPAVIGDPYLDRRPSNADSTTMKSFATTEALTSSEANTEWSL

SEQ ID NO: 23016 - protein, 353 aa, Zea mays subsp. mays
  misc_feature (1)..(353): Ceres Seq. ID no. 12410977
MERNNENEGGSKVRIFSYSEMRKATHDFSGANKIGEGGFGSVFRGKLKDGTIVAVKVLSANSRQGVREFVTELTAISDIVHENLITLVGCCAEGSQRILVYNYLENNSLSYTLLGSGRSNIRFNWRARVKIAVGVARGLAYLHDGIRPPIIHRDIKASNILLDKDLTPKISDFGLARLLPPNATHVSTRVAGTIGYLAPEYAVRGQVTKKSDIYSFGVLLLEIVAGRCNYNSRLPQGDQFLLEKTWAYYVQGKLEKVIDAEAGEDLNVEEACRFLKVGLLCAQDAMKLRPNMASVVLMLIGEKGISVDRITKPAVIGDPYLDRRPSNADSTTMKSFATTEALTSSEANTEWSL

SEQ ID NO: 23017 - DNA, 1614 bp, Zea mays subsp. mays
  misc_feature (1)..(1614): Ceres Seq. ID no. 12410981
aaactgcctcattcattcgagctgtggcgaatcggaggcaatggcgtggccgcgtgggggtcagcaaggcagccgcggcggcagcagcgtccacctcgcgcacggcggcgcttctctgttcccaggcgctgcgaggtgacacaacaggagtctggcgacagccctctggcaagaaggaacggctcgctctcgactccgatgcgtgggagacaagcgctgcgacggtggatccggcgacccacgggcgtgggagacgaagacgagcggttataaacgtccctcaatgacaaggactcgtcatctgctccactgccactgcccttatcatcattcatcagcggcctgcctgcacgagattccgagggacagggagatccatggccgcgtcagaccaaccgccgcagccagagaagcccccgctgccgtggcgcgcgaggctgcttgtgggcgccgcctccgcgctgcacgccgcctcgctccgccgcgacggcaccgtcaaccgcttcctgctctccctcttcgaccgcgccgcgccgcccaccccgacggcccccctcggcggcgtggcatccacggaccacgccgtctccgaccacctgcgcgcccnnntcttcgtcccggagatccccggcggcggcaacgagctcccggtggtcgtgtacttccacggcggcggcttcgtcttccactccgcggcgtcggcgcagtacgacgcgctgtgccgccgcctggcgtcggccatcccggccgtcatcgcctccgtcgactaccgcctcgcgcccgagcaccgcttcccggctccctacgacgacggcgaggcagccctccggtgggccctagccggcgcggcaggcgcgctgccgtatccccccgccgccgtcttcgtggccggggacagcgccggcggcaacgtcgcccaccacgtcgccgcgcgcctccccgacgccgtcgcgggcctcctcgccgtgcagcctttcttcagcggcgaggcgccgacggggtcggagatgcggctccgcgacgccccgttcgggagccccgagcggctggcgtggctgtggcgcgcgttcctgccgcccggcgccacgcgggaccacgaggccgccaacgtgcccgccgcgatcaggcgcgacgcgggcgcgggcgcggaccggtggcgggcgttcccgcccacgctggtgtgcgtcggcgggtgggacgtgcatcaggacaggcagagggcgtacgcggacgcgctccgcgccgtgtgctccgaggaggtcaccgtggcggagtacccggacgccatccacgccttctacgtgttggacgacctcgcggacagcaagaagtttctgggtgacgtcgcggagttcgtgaaccggcatgcacaacagcggaggaaacccgcactaggccatgccaaggactagtgttatccgcttgcaaggatggcaagaaatcataggactggataagcttccttttgtggaaaatggaggcagcgactgatagattaagctggcagtgtttgtcactccctctatcatattgttagttaccagctggtttagattgattgttagatcactctgccatgtattcctttcgtttctatgtattaaatctactttt

SEQ ID NO: 23018 - protein, 352 aa, Zea mays subsp. mays
  misc_feature (1)..(352): Ceres Seq. ID no. 12410982
  misc_feature (108)..(108): Xaa is any aa, unknown or other
  misc_feature (109)..(109): Xaa is any aa, unknown or other
MTRTRHLLHCHCPYHHSSAACLHEIPRDREIHGRVRPTAAAREAPAAVAREAACGRRLRAARRLAPPRRHRQPLPALPLRPRRAAHPDGPPRRRGIHGPRRLRPPARXXLRPGDPRRRQRAPGGRVLPRRRLRLPLRGVGAVRRAVPPPGVGHPGRHRLRRLPPRARAPLPGSLRRRRGSPPVGPSRRGRRAAVSPRRRLRGRGQRRRQRRPPRRRAPPRRRRGPPRRAAFLQRRGADGVGDAAPRRPVREPRAAGVAVARVPAARRHAGPRGRQRARRDQARRGRGRGPVAGVPAHAGVRRRVGRASGQAEGVRGRAPRRVLRGGHRGGVPGRHPRLLRVGRPRGQQEVSG

SEQ ID NO: 23019 - protein, 344 aa, Zea mays subsp. mays
  misc_feature (1)..(344): Ceres Seq. ID no. 12410983
  misc_feature (77)..(77): Xaa is any aa, unknown or other
  misc_feature (78)..(78): Xaa is any aa, unknown or other
MAASDQPPQPEKPPLPWRARLLVGAASALHAASLRRDGTVNRFLLSLFDRAAPPTPTAPLGGVASTDHAVSDHLRAXXFVPEIPGGGNELPVVVYFHGGGFVFHSAASAQYDALCRRLASAIPAVIASVDYRLAPEHRFPAPYDDGEAALRWALAGAAGALPYPPAAVFVAGDSAGGNVAHHVAARLPDAVAGLLAVQPFFSGEAPTGSEMRLRDAPFGSPERLAWLWRAFLPPGATRDHEAANVPAAIRRDAGAGADRWRAFPPTLVCVGGWDVHQDRQRAYADALRAVCSEEVTVAEYPDAIHAFYVLDDLADSKKFLGDVAEFVNRHAQQRRKPALGHAKD

SEQ ID NO: 23020 - DNA, 1231 bp, Zea mays subsp. mays
  misc_feature (1)..(1231): Ceres Seq. ID no. 12410989
attggtttcgccaaaaacctcaccggctccattcgaccattccatcctttccttatcccctcccacttcgtctcccttcctggcttcctttcttcgccatggcaaccatgtccctccgctccctcgccatggccatggccgacaccgcgctcccgcccgcccacaagctcctccccacagtttccctcccgctcctctcctcgtccacccgcgccgcgccgctcctcctcttcgccaggcgccgcctgccgctcgcgcccctcgttacctcctccgacgccgttgaggccaagtcggcagacgaggaggaggagaaggccggagagcccgtcgacatggaagctggggagtttgaggaggtgctagcctcaggcggcgagggtgaggggcagtacgctgcggtggagccgccagaggaggccaaggtctacgttgggaaccttccctacgacgtcgacagcgagggactcgcgcagatcttcgaccaggccggcgtcgtcgaggtcgccgaggttatctacaacagagaaactggccagagccgtgggtttggctttgttaccatgagcactgttgaggaagctgacaaagccattgagatgttcaaccgctatgatattagcgggaggcttctgaatgtaaacagggcatcttctaggggcactcgcatggaaagacctcagagacaatttgcaccagctttcagagcttatgttggcaacttgccatggcaagttgatgactctaggctggtgcagttgttcagcgagcatggagaagttgttgatgctaaggttgtctacgacagagaaactgggcgctcacgaggattcggttttgtatcaatggtgtcaaaggaggaactcaatgatgctatttcggccctagatggacaggaattggacggccgccctcttcgagtgaatgttgcagcagagcggccacagaggggcttttgatgcggttgtatgagagagatgactgcttgtttgtaatgagcatggagacacagagacacaatggactgaatggaggagcaatggtacaaattagcggaagcggatgctgtcacaagttgctagatctttctcccttagcttcttgacatttggttcttgccacagctttttgatgcttctcttggcagctggacttaatgttttgctattcttgtcgacatcacgagttgaattgtcaaactagtctcttatgttctatgctgatatgcctt

SEQ ID NO: 23021 - protein, 318 aa, Zea mays subsp. mays
  misc_feature (1)..(318): Ceres Seq. ID no. 12410990
WFRQKPHRLHSTIPSFPYPLPLRLPSWLPFFAMATMSLRSLAMAMADTALPPAHKLLPTVSLPLLSSSTRAAPLLLFARRRLPLAPLVTSSDAVEAKSADEEEEKAGEPVDMEAGEFEEVLASGGEGEGQYAAVEPPEEAKVYVGNLPYDVDSEGLAQIFDQAGVVEVAEVIYNRETGQSRGFGFVTMSTVEEADKAIEMFNRYDISGRLLNVNRASSRGTRMERPQRQFAPAFRAYVGNLPWQVDDSRLVQLFSEHGEVVDAKVVYDRETGRSRGFGFVSMVSKEELNDAISALDGQELDGRPLRVNVAAERPQRGF

SEQ ID NO: 23022 - protein, 286 aa, Zea mays subsp. mays
  misc_feature (1)..(286): Ceres Seq. ID no. 12410991
MATMSLRSLAMAMADTALPPAHKLLPTVSLPLLSSSTRAAPLLLFARRRLPLAPLVTSSDAVEAKSADEEEEKAGEPVDMEAGEFEEVLASGGEGEGQYAAVEPPEEAKVYVGNLPYDVDSEGLAQIFDQAGVVEVAEVIYNRETGQSRGFGFVTMSTVEEADKAIEMFNRYDISGRLLNVNRASSRGTRMERPQRQFAPAFRAYVGNLPWQVDDSRLVQLFSEHGEVVDAKVVYDRETGRSRGFGFVSMVSKEELNDAISALDGQELDGRPLRVNVAAERPQRGF

SEQ ID NO: 23023 - protein, 283 aa, Zea mays subsp. mays
  misc_feature (1)..(283): Ceres Seq. ID no. 12410992
MSLRSLAMAMADTALPPAHKLLPTVSLPLLSSSTRAAPLLLFARRRLPLAPLVTSSDAVEAKSADEEEEKAGEPVDMEAGEFEEVLASGGEGEGQYAAVEPPEEAKVYVGNLPYDVDSEGLAQIFDQAGVVEVAEVIYNRETGQSRGFGFVTMSTVEEADKAIEMFNRYDISGRLLNVNRASSRGTRMERPQRQFAPAFRAYVGNLPWQVDDSRLVQLFSEHGEVVDAKVVYDRETGRSRGFGFVSMVSKEELNDAISALDGQELDGRPLRVNVAAERPQRGF

SEQ ID NO: 23024 - DNA, 1399 bp, Zea mays subsp. mays
  misc_feature (1)..(1399): Ceres Seq. ID no. 12411002
atcactagaacgttttccttattcgtccctctcaattgggcggatagtttcatcctccgcgggacaaggcccctcacgatcccttctcatcctcgtcctcagatccgcctccttcaccccactggtcggcgagcagcaaaatccattcaccccactggccggcgagcagcaaactccattcaccccactagcaggcgagcagcaaactggagatctcgtcctcacgagcgctttggtaattggtcgtatagtccctcatcatcggaatggtggggtcacttatctttcactcacctaatgtggatccgaaggcagagaatcctaatgagatggttacagctggtgtgctttcaagccttcagaatttcctacgcaagtgcctcatagctatcctctcatatggcccaatgccgaagcacattgcatttattatggatggcaatcgtcgatatgctaaattcagaagcatgcaagaaggagctggtcacaggatgggtttctctacccttattgcaagtctgatgtactgctatgaaatgggtgtgaagtacatcactgtctacgcattcagcatcgacaattttaaaagggacccaagtgaggtggaatccttgatgcagttaatggaggaaaaaatcaacgaactcttagagaaccaaagtgtaatcaacaagattaactgtaagatcaacttttggggtaacttggacttgttatatgagccggtgcggttggcggctgagaagctgatggcgagcacagctgggaacacagggctggtcttttctatctgcatgccatacaactcgacttctgagattgtcaatgctgtcagtcaagtctgtgcggaaaggatggaaatgtttcagagcgaacatattggcgaatgcaatggtcatgctgcaaataacggtgtgcgatcagagatttcagtggcggatttggatcgccacatgtatagtgccgaatgcccagatcctgatattgtcatccggacttcgggcgagactcgattgagcaatttcctcctttggcagacaacgtttagtcacttgcagaatccagatcctctgtggcccgagttctcttttaggcaccttgtttgggctatcttgcagtatcagagagtttaccctgctctggagcataacagaaagttggctaagaagcagttgtgattccatgttatttgcaaggaggtatcatgaagggctattaacatcaaacttttccttctcaatttcccggtaatgggaaatgcaaagaacatactagcatataacattatgaatagatcaccatgtaacttaagtgtgattgctaccataaccatgtaacttatttgagctcgtacaaatgctgtgattcctaaatatatatatatagagtgcccggggtg

SEQ ID NO: 23025 - protein, 303 aa, Zea mays subsp. mays
  misc_feature (1)..(303): Ceres Seq. ID no. 12411003
MVGSLIFHSPNVDPKAENPNEMVTAGVLSSLQNFLRKCLIAILSYGPMPKHIAFIMDGNRRYAKFRSMQEGAGHRMGFSTLIASLMYCYEMGVKYITVYAFSIDNFKRDPSEVESLMQLMEEKINELLENQSVINKINCKINFWGNLDLLYEPVRLAAEKLMASTAGNTGLVFSICMPYNSTSEIVNAVSQVCAERMEMFQSEHIGECNGHAANNGVRSEISVADLDRHMYSAECPDPDIVIRTSGETRLSNFLLWQTTFSHLQNPDPLWPEFSFRHLVWAILQYQRVYPALEHNRKLAKKQL

SEQ ID NO: 23026 - protein, 282 aa, Zea mays subsp. mays
  misc_feature (1)..(282): Ceres Seq. ID no. 12411004
MVTAGVLSSLQNFLRKCLIAILSYGPMPKHIAFIMDGNRRYAKFRSMQEGAGHRMGFSTLIASLMYCYEMGVKYITVYAFSIDNFKRDPSEVESLMQLMEEKINELLENQSVINKINCKINFWGNLDLLYEPVRLAAEKLMASTAGNTGLVFSICMPYNSTSEIVNAVSQVCAERMEMFQSEHIGECNGHAANNGVRSEISVADLDRHMYSAECPDPDIVIRTSGETRLSNFLLWQTTFSHLQNPDPLWPEFSFRHLVWAILQYQRVYPALEHNRKLAKKQL

SEQ ID NO: 23027 - protein, 256 aa, Zea mays subsp. mays
  misc_feature (1)..(256): Ceres Seq. ID no. 12411005
MPKHIAFIMDGNRRYAKFRSMQEGAGHRMGFSTLIASLMYCYEMGVKYITVYAFSIDNFKRDPSEVESLMQLMEEKINELLENQSVINKINCKINFWGNLDLLYEPVRLAAEKLMASTAGNTGLVFSICMPYNSTSEIVNAVSQVCAERMEMFQSEHIGECNGHAANNGVRSEISVADLDRHMYSAECPDPDIVIRTSGETRLSNFLLWQTTFSHLQNPDPLWPEFSFRHLVWAILQYQRVYPALEHNRKLAKKQL

SEQ ID NO: 23028 - DNA, 1588 bp, Zea mays subsp. mays
  misc_feature (1)..(1588): Ceres Seq. ID no. 12411029
accaaaaggggtttcggcatggatggatagcacacagcgagcgagcgagagcggtgagcccggccaccagcgccggaggccgtcgtcgtcttactagccgacgctcgacttgggcatgaattgctagccgcgcgggtgagagattgctaggtagccagctaggtacggtgtggggagttgaatcggaggtctgccgctcgaggcggcggcggcagaaggccggtaggatgaagaagctccactggctggtgcggttcctgttcgggccggtgccggtctacttctcggcgctggccatcctcatcgtgctcaccaacgcgcagtacttcgggctggtgggcgtcggcgtggcgccgcgcaccgcgaagctggcctcctcggcgcccgtggtcagcgtcatgaagtactgcgacatcttccgcggcgagtgggtgccggacgcggaggcgccctactacaaccacaagacgtgccacatgatccaggagcaccagaactgcctcaagtacggccgccccgacctgggcttcctcaagtggcggtggcggccctccggatgcgagctgccgcgcttcgacccgctgcagttcctgcagttcgcccgcgggaagtcgctggccttcgtcggggactcgctggcgcggaaccacatgcagtcgctgctctgcctcctgtcccaggtggcgtatcccaaggacctgtcggcgaacccgtcggaccagaacaaggtgtaccactaccgggcgtacaacttcaccatcagcatgttctggtcgccgttcctggtgcgcgcccgggagcccgaccacgacggccccgcgcacacgggccactggagcctctacctggacgagcccgacgacaagtgggtgtcccagatgccccgcttcgactacgtgctggtgtcggcggccaactggttctcccgcccctccctcttctacgagcggcggcgcctcgtcgggtgcagcttctgcagccgccagtacggcgtgcccgacctgacgctctactactcgcagcgccgcgcgtggcgcgtggcgctgcgcgccatcaacgacctggagcgcctgcgagggcgcgtcatcgtgcgcatgctctccccgatgtcgcacttcgagaacgggacctgggaccacggcggcgactgcaggcgcacgcagccgctgcgggcgaaccagaccgccatggagggccgcgacctgcacttctacaccgcgcagatggaggagttccgcgccgcggagaaggccgccgccgagaaggggcggcgcctgatgctcatggacgccacggcggcgatgctgatgcggcccgacggccaccccagccgctacgggcactggcccaacgagaaggtgcagctctacaacgactgcatccactggtgcctcccgggacccatcgacatctggaacgacatgctcttccagatgctcctcgcctagcagcaagcagcaaagattaaaaaaaaaactcagcaattcggtcgccggtaaccgtgcacagattggccttcttttttttgccttgtttcgtttttttaaaaaaagaagaaaatggtgcaattttgacaagcaaggattcg

SEQ ID NO: 23029 - protein, 406 aa, Zea mays subsp. mays
  misc_feature (1)..(406): Ceres Seq. ID no. 12411030
MKKLHWLVRFLFGPVPVYFSALAILIVLTNAQYFGLVGVGVAPRTAKLASSAPVVSVMKYCDIFRGEWVPDAEAPYYNHKTCHMIQEHQNCLKYGRPDLGFLKWRWRPSGCELPRFDPLQFLQFARGKSLAFVGDSLARNHMQSLLCLLSQVAYPKDLSANPSDQNKVYHYRAYNFTISMFWSPFLVRAREPDHDGPAHTGHWSLYLDEPDDKWVSQMPRFDYVLVSAANWFSRPSLFYERRRLVGCSFCSRQYGVPDLTLYYSQRRAWRVALRAINDLERLRGRVIVRMLSPMSHFENGTWDHGGDCRRTQPLRANQTAMEGRDLHFYTAQMEEFRAAEKAAAEKGRRLMLMDATAAMLMRPDGHPSRYGHWPNEKVQLYNDCIHWCLPGPIDIWNDMLFQMLLA

SEQ ID NO: 23030 - protein, 349 aa, Zea mays subsp. mays
  misc_feature (1)..(349): Ceres Seq. ID no. 12411031
MKYCDIFRGEWVPDAEAPYYNHKTCHMIQEHQNCLKYGRPDLGFLKWRWRPSGCELPRFDPLQFLQFARGKSLAFVGDSLARNHMQSLLCLLSQVAYPKDLSANPSDQNKVYHYRAYNFTISMFWSPFLVRAREPDHDGPAHTGHWSLYLDEPDDKWVSQMPRFDYVLVSAANWFSRPSLFYERRRLVGCSFCSRQYGVPDLTLYYSQRRAWRVALRAINDLERLRGRVIVRMLSPMSHFENGTWDHGGDCRRTQPLRANQTAMEGRDLHFYTAQMEEFRAAEKAAAEKGRRLMLMDATAAMLMRPDGHPSRYGHWPNEKVQLYNDCIHWCLPGPIDIWNDMLFQMLLA

SEQ ID NO: 23031 - protein, 323 aa, Zea mays subsp. mays
  misc_feature (1)..(323): Ceres Seq. ID no. 12411032
MIQEHQNCLKYGRPDLGFLKWRWRPSGCELPRFDPLQFLQFARGKSLAFVGDSLARNHMQSLLCLLSQVAYPKDLSANPSDQNKVYHYRAYNFTISMFWSPFLVRAREPDHDGPAHTGHWSLYLDEPDDKWVSQMPRFDYVLVSAANWFSRPSLFYERRRLVGCSFCSRQYGVPDLTLYYSQRRAWRVALRAINDLERLRGRVIVRMLSPMSHFENGTWDHGGDCRRTQPLRANQTAMEGRDLHFYTAQMEEFRAAEKAAAEKGRRLMLMDATAAMLMRPDGHPSRYGHWPNEKVQLYNDCIHWCLPGPIDIWNDMLFQMLLA

SEQ ID NO: 23032 - DNA, 1522 bp, Zea mays subsp. mays
  misc_feature (1)..(1522): Ceres Seq. ID no. 12411062
ttccgctcgtcccgccaatcgccattattaacagctccgcggtccctccctccctcggtcggtcggcgtcggtccctccctccccacccagttagtcctcagcctatcccgtgcccgcgcagagcaccgcctctgctcgacccaccaccctctgtgcagagttaattaaccttgaggtttccgattgcccttcccttccgctcctctcgcccattcgcggcgagattcagcggcaaggatgcgcctgcacgcggaggtgcgggatgagatggaggaggggagcgaggagggggctgtgacggcttcggcggggctgtcgccaccgccactcatcggtgcggcggcgccggttccccggctagtggtggggttcgcccctcacgaagaagaaggtgaagagcttcctgcagcccaagctgctcctgctggccaggaagaatggaatcagttttgtatctattgatgagtctcttcccctctcagaacaaggcccttttgatgttattttacacaagattactaggaaggagtggcagaaggttctggaggactatcacgaagaacatccagaagttactgtccttgacccaccaaatgctatcgagcatctgaacaatcgacaatcaatgcttgaagaagtagctgatttgaacctgtcaaatttctatggagaagtttgtatcccacgccagctggtcattacgaaagatccatcctctataccaacttctgtagctatggctggactaactttgcccttggttgccaagccattggttgttgatgggacgtctaaaggtcatgaactatatcttgcatatgacgaggcatccttgtcaatgcttgatccgcctctggttctacaggaattcataaaccatggcgggatcctctttaaggtgtatatcattggtgaaacaatacaggttgtccgcaggttctctcttcctgatgttaacacatatgacttactaaacaacgttggcatctatcgattgccaagagtttcatgtgctgcagctagtgcggatgatgcagatcttgaccctcttattgcagagcttcctccaaggccacttctagagaaactgggcagggagcttcgtggccggcttggtttgagattgttcaatatagatatgattagagaacttggaaccaaagatcggtactacataattgatatcaactacttcccaggttacggcaaaatgccaggatatgagcgcatgttcacagacttcttactaagtctcgcacaaagcaagtacaaaaggtatgcttccccaccgcgccaatgtacatttgctggagacataagcataagcgggaggcttgaggaagttggcaagtctcagtgtgtgtgttcaaaatcggtggcacatgctggactggagtaggaaataaccaaggaaacgcttggatgcgctgtactcatgttgtaaaatgtttaactgaatgaacaccttcctcgtgatggctccctccatcgtaatttggcaaccatgagaattaattctgc

SEQ ID NO: 23033 - protein, 257 aa, Zea mays subsp. mays
  misc_feature (1)..(257): Ceres Seq. ID no. 12411063
MLEEVADLNLSNFYGEVCIPRQLVITKDPSSIPTSVAMAGLTLPLVAKPLVVDGTSKGHELYLAYDEASLSMLDPPLVLQEFINHGGILFKVYIIGETIQVVRRFSLPDVNTYDLLNNVGIYRLPRVSCAAASADDADLDPLIAELPPRPLLEKLGRELRGRLGLRLFNIDMIRELGTKDRYYIIDINYFPGYGKMPGYERMFTDFLLSLAQSKYKRYASPPRQCTFAGDISISGRLEEVGKSQCVCSKSVAHAGLE

SEQ ID NO: 23034 - protein, 220 aa, Zea mays subsp. mays
  misc_feature (1)..(220): Ceres Seq. ID no. 12411064
MAGLTLPLVAKPLVVDGTSKGHELYLAYDEASLSMLDPPLVLQEFINHGGILFKVYIIGETIQVVRRFSLPDVNTYDLLNNVGIYRLPRVSCAAASADDADLDPLIAELPPRPLLEKLGRELRGRLGLRLFNIDMIRELGTKDRYYIIDINYFPGYGKMPGYERMFTDFLLSLAQSKYKRYASPPRQCTFAGDISISGRLEEVGKSQCVCSKSVAHAGLE

SEQ ID NO: 23035 - protein, 186 aa, Zea mays subsp. mays
  misc_feature (1)..(186): Ceres Seq. ID no. 12411065
MLDPPLVLQEFINHGGILFKVYIIGETIQVVRRFSLPDVNTYDLLNNVGIYRLPRVSCAAASADDADLDPLIAELPPRPLLEKLGRELRGRLGLRLFNIDMIRELGTKDRYYIIDINYFPGYGKMPGYERMFTDFLLSLAQSKYKRYASPPRQCTFAGDISISGRLEEVGKSQCVCSKSVAHAGLE

SEQ ID NO: 23036 - DNA, 2064 bp, Zea mays subsp. mays
  misc_feature (1)..(2064): Ceres Seq. ID no. 12411078
aagcttttcccattctcgttgatacgagcgagagtcgagacaggtcaaaaggagattgagtaaggaaaagaaaaaaaaaatcgctgctcccgaggcacggcggcggcgagcgtgcgacacctccggcggctccacagatccggcgaccgatctccggccgcctgcggatgctccggggccggcgcggtaaggcccaggggtccacgctcgtagccagatctcggggcgctgctgggaagtggggttcgttccgtccctgcctccctggtggtggggatggggtggtccgcggggctgtggtggctcgtggccgcgctgtgggtggtggcggcggcggcggcggcggcggagggtgaggtcgtggtcgggtcagcgccgaggcggcacgcgtacgcgtcgatgatgtacatgggcactccacgggactacgagttctacgtggccacgcgcgtcatgatgcagtccctgcgccggctcagcgccgacgccgaccgcgtcgtgatcgcctccctcgacgtcccaccgctctgggtccaggcgctatgatggtgtaaaggtggtctctgtggagaatttgaaaaatccatacgagagacaagagaatttcaacatgcgattcaagttgaccttaaacaagctgtatgcatggagcttggtttcgtatgagcgagttgttatgcttgactccgacaacattttcctccaaaatactgattagttatttcagtgtggtcagttctgtgctgtcttcatcaatccctgtatcttccatacaggtctctttgtgcttcagccctcaatgaacgtttttaagaatatgctacatgagctatcggttggacgtgaaaacccagatggtgcagaccaaggctttcttgctagttatttcccggacttacttgatcagccaatgttccatccaccagctaatggtacaaaacttcagggtacttaccgcctccctctaggctaccagatggatgcgtcttactattatctgaagcttcgctggagtattccatgtggaccgaacagtgtgattacatttccaagtgctccatggtttaagccatggtactggtggtcttggccagttttacctttggggctctcttggcatgaacaacgtcgtgaaaacctagggtattcatctgagataccagtagtattaattcaggctgtactgtacattggagtcatagcagtgacccgactggcgaagcctaccttgaacaagatgtgctacaacagaagaatggagaaaaacactatgttcttgctctctgttctcagagtcgtggctgcttggtccatacttgctgcctacaccatacccttcttcatcatcccaaggaccgtgcatccactgcttggctggcctctctacttgctcggttcttttgctctttcttccattgttatcaacattttcctcttccacccgatcaccgtcctcacaacatggtttggattcataggcgcactcctggtgatggccttcccttggtatctaaatggttttgtcagggccttggcagtgtttgcgtatgctttctgctgcgcgcccttgatctgggcatctttgggtcaagacaatgagctccttgcaggtcctgattgagagggatgcattcaggctcggagaacctagccagaatgcggagttcacaaagctatactgaggtgggcatggcagatacatgtgatttatcactttcgttgctcagtttgaacagttaatctgcattcacattgtcaaattctgatggccaattcaaatgtacaactaaacctgcagcctgggagcaagagtggttgtacacaatggaactatctggaaacctctagaatccatgaatgttgttatcttagacatgtaggtgacatatacagtggaaaaggggggagggctgtagaattggtgctgaactgaagaggaactgactggggtcagttgttagttattttgatttattgttcctctgaaaagccaaggcatttttggctttgtttgtaattgatatgatatgttccttcacaaatgaagaaaagggttgaaagtgc

SEQ ID NO: 23037 - protein, 273 aa, Zea mays subsp. mays
  misc_feature (1)..(273): Ceres Seq. ID no. 12411079
MNVFKNMLHELSVGRENPDGADQGFLASYFPDLLDQPMFHPPANGTKLQGTYRLPLGYQMDASYYYLKLRWSIPCGPNSVITFPSAPWFKPWYWWSWPVLPLGLSWHEQRRENLGYSSEIPVVLIQAVLYIGVIAVTRLAKPTLNKMCYNRRMEKNTMFLLSVLRVVAAWSILAAYTIPFFIIPRTVHPLLGWPLYLLGSFALSSIVINIFLFHPITVLTTWFGFIGALLVMAFPWYLNGFVRALAVFAYAFCCAPLIWASLGQDNELLAGPD

SEQ ID NO: 23038 - protein, 267 aa, Zea mays subsp. mays
  misc_feature (1)..(267): Ceres Seq. ID no. 12411080
MLHELSVGRENPDGADQGFLASYFPDLLDQPMFHPPANGTKLQGTYRLPLGYQMDASYYYLKLRWSIPCGPNSVITFPSAPWFKPWYWWSWPVLPLGLSWHEQRRENLGYSSEIPVVLIQAVLYIGVIAVTRLAKPTLNKMCYNRRMEKNTMFLLSVLRVVAAWSILAAYTIPFFIIPRTVHPLLGWPLYLLGSFALSSIVINIFLFHPITVLTTWFGFIGALLVMAFPWYLNGFVRALAVFAYAFCCAPLIWASLGQDNELLAGPD

SEQ ID NO: 23039 - protein, 236 aa, Zea mays subsp. mays
  misc_feature (1)..(236): Ceres Seq. ID no. 12411081
MFHPPANGTKLQGTYRLPLGYQMDASYYYLKLRWSIPCGPNSVITFPSAPWFKPWYWWSWPVLPLGLSWHEQRRENLGYSSEIPVVLIQAVLYIGVIAVTRLAKPTLNKMCYNRRMEKNTMFLLSVLRVVAAWSILAAYTIPFFIIPRTVHPLLGWPLYLLGSFALSSIVINIFLFHPITVLTTWFGFIGALLVMAFPWYLNGFVRALAVFAYAFCCAPLIWASLGQDNELLAGPD

SEQ ID NO: 23040 - DNA, 1050 bp, Zea mays subsp. mays
  misc_feature (1)..(1050): Ceres Seq. ID no. 12411097
ccgtggttcaactcctaccactaccacagcaccaacgacggaccaggcagcagagaaaaagcagaccagacgagacctctcgcgttccgtcctcctcccccctgcccctgctgccgttccccttcttcctcagttctcccgcccgctgctgccctccgtccgcgtccagatcccgccaccaaccgatccggcgccctccagcatggcgggggcgggggcgaaggcggcgggagccctggctctggcgctcgtgctcgcgctcgcgggggccaactccgagggcgacgcgctctcggcgctgcgccggagcctcagggaccccggcggcgttctgcagagctgggaccccacgctcgtcaacccctgcacctggttccacgtcacctgcgaccgcgacaaccgcgtcacccgcctagatcttggtaatttgaacttatctggtcatctggtgcctgagcttgggaaactggagcatcttcagtatctggaactttataagaataacattcaaggaacagtcccttctgagcttggcaacttgaagaatctaataagcttcgacttgtacaagaacaacatttcggggacaatacctcctgcccttggaaagttgaagtcccttgtattcttgcgtctcaatggcaatcatttgactgggcccatcccaagggaactcgctggaatatctagtctcaaagttgttgatgtttcaagtaatgatttgtgcgggacgattcccacgtctggaccatttgaacatattcctctgagcaactttgagaagaacccgcgcttggaaggtccagagctacaaggcctggccatatacgacaccaactgctagaggcaccacgaagataagaactgctagaaagtaacgagcgaacaaggttacgagaaattgggcgatatagatttactaggtctggatctgtaatcctccctgcatagctcttattcgtaactcgctgcctgcacgaaagttggtgtgtgtttttagcagaatgctttctgtccgtgaaagtaaacttgaactgcttattacgactg

SEQ ID NO: 23041 - protein, 280 aa, Zea mays subsp. mays
  misc_feature (1)..(280): Ceres Seq. ID no. 12411098
RGSTPTTTTAPTTDQAAEKKQTRRDLSRSVLLPPAPAAVPLLPQFSRPLLPSVRVQIPPPTDPAPSSMAGAGAKAAGALALALVLALAGANSEGDALSALRRSLRDPGGVLQSWDPTLVNPCTWFHVTCDRDNRVTRLDLGNLNLSGHLVPELGKLEHLQYLELYKNNIQGTVPSELGNLKNLISFDLYKNNISGTIPPALGKLKSLVFLRLNGNHLTGPIPRELAGISSLKVVDVSSNDLCGTIPTSGPFEHIPLSNFEKNPRLEGPELQGLAIYDTNC

SEQ ID NO: 23042 - protein, 213 aa, Zea mays subsp. mays; identical to SEQ ID NO: 18568
  misc_feature (1)..(213): Ceres Seq. ID no. 12411099

SEQ ID NO: 23043 - protein, 141 aa, Zea mays subsp. mays
  misc_feature (1)..(141): Ceres Seq. ID no. 12411100
PWFNSYHYHSTNDGPGSREKADQTRPLAFRPPPPCPCCRSPSSSVLPPAAALRPRPDPATNRSGALQHGGGGGEGGGSPGSGARARARGGQLRGRRALGAAPEPQGPRRRSAELGPHARQPLHLVPRHLRPRQPRHPPRSW

SEQ ID NO: 23044 - DNA, 1389 bp, Zea mays subsp. mays
  misc_feature (1)..(1389): Ceres Seq. ID no. 12411109
actcgtccacacgcgaaggcacccagcagcagccgctcccgaactgaggaaccctaccacgcgggcgacggcggtgcgcgaccggtgacgggacagcggcagcgccccctcctccatctgctggtcccaccgcctcctgacgttatccgatactgccaatccccctcttcgccgttgacggagcttaccgaggaaagaagggcagggccatggcgggagccttcgctttccgcctcgtgcctcgcctcgccgcagagccggcggcgagggggaagggtggcggaggaggagccaaccgcgacgccggcagcagggcgctggtgtcaaagaaaccaaacaagcagcagcatttgtggatcaggaaggagacagctgggtcagggaagaaggctctccgtcttattgatgctgtttcgaagttaccaaatgaaagagaagctatttatggtgcattggacaagtggagtgctttcgaacctgaatttcctattatagcagcagcaaaagctttggggatgttgaaaaggcgacgacaatggttaagaataatccaggtaaccaagtggttgatgagcaaaggacaggtgctgacatggacaacatatgatacacttctgctcgcacttcttatggataaacgggtagacgaagctgagtcagtttggaacactgtaatacagactcatacccgctcagtgcccaagaggttgttctctcggatgatcttgatctacgacattcaccagcgcccagataaagttttggagatattcgcggatatggaggagttaggtgtgcgtccggacgaggatacagcgagacggatcggaaaggcattcgtggcttctggccaagaagaaaaggagaagcatgtcctcgagaaatacttgaagaagtggaagtacatccatttcaacggcgagcgcgttcgcgtgcggagggacggaccattggcgtagtgcccgttttctgaaaaatgctcgaacctatcagagtatcgtgccggtaggcggtagggcaggggagatgctgttactgccgctgtgacagtcaggcacatggatatcggcactagtccctatcctatgtatgtggaatggaacggaaactggagattggttccatggctctagcctgtggaggagacgagcggatggggggtggctggctactaccggcgagatagtgatttaataggcactacataggcgtccagtgattgcgatggctttaacttgcgtatgtgtctgcggaatggtcccgtgctatttcggtgacttgtgcttgtggaattgtgaacacccactggaaagtgtatatcatgagagggacgatacctgacgtctgggcccatggcttgctgatttcacgcaacgaaccattttctgc

SEQ ID NO: 23045 - protein, 249 aa, Zea mays subsp. mays
  misc_feature (1)..(249): Ceres Seq. ID no. 12411110
MAGAFAFRLVPRLAAEPAARGKGGGGGANRDAGSRALVSKKPNKQQHLWIRKETAGSGKKALRLIDAVSKLPNEREAIYGALDKWSAFEPEFPIIAAAKALGMLKRRRQWLRIIQVTKWLMSKGQVLTWTTYDTLLLALLMDKRVDEAESVWNTVIQTHTRSVPKRLFSRMILIYDIHQRPDKVLEIFADMEELGVRPDEDTARRIGKAFVASGQEEKEKHVLEKYLKKWKYIHFNGERVRVRRDGPLA

SEQ ID NO: 23046 - protein, 164 aa, Zea mays subsp. mays
  misc_feature (1)..(164): Ceres Seq. ID no. 12411111
TRPHAKAPSSSRSRTEEPYHAGDGGARPVTGQRQRPLLHLLVPPPPDVIRYCQSPSSPLTELTEERRAGPWREPSLSASCLASPQSRRRGGRVAEEEPTATPAAGRWCQRNQTSSSICGSGRRQLGQGRRLSVLLMLFRSYQMKEKLFMVHWTSGVLSNLNFLL

SEQ ID NO: 23047 - protein, 147 aa, Zea mays subsp. mays
  misc_feature (1)..(147): Ceres Seq. ID no. 12411112
MLKRRRQWLRIIQVTKWLMSKGQVLTWTTYDTLLLALLMDKRVDEAESVWNTVIQTHTRSVPKRLFSRMILIYDIHQRPDKVLEIFADMEELGVRPDEDTARRIGKAFVASGQEEKEKHVLEKYLKKWKYIHFNGERVRVRRDGPLA

SEQ ID NO: 23048 - DNA, 1211 bp, Zea mays subsp. mays
  misc_feature (1)..(1211): Ceres Seq. ID no. 12411121
acacatttcaatcactcgcttcccatgaattcgctcgctttccctagctgcccgtcagcattgacgcccgcctccaccaccgcccccgcgtcctctccctttccctcgccgcgtataaagattcgctgcccgcgacaagaagatgcagctcattaccacctccgcctccgcgatcgaagctcctcacaaaccgttatcgtcgccatggcagccgccgcgcctgcaagctccgtgaaggaagtgctgccatctcccctgacctccgcctccgagccccctcccctcttcgatggcaccaccaggctgtacgttgcctatcattgcccgtacgcgcagcgcgcttggattgccaggaactacaagggtttgcaggacaagattaagatagtcgccatcgatcttgctgacaggccaacatggtacaaggagaaggtttatccagaaaacaaggtgccttctctggagcacaacaaccaggtgaaaggtgagagtttggatctggtcaagtacattgacagcaactttgaaggcccatcgttgctcccagaggatccttcaaaaaagcagttcgctgaggagctgcttgcatatactgatgcatttaacaaagcattatacttttgtatagtctccaaggaagatgtgtctgaggaagctgtcgctgctttggataaaatagaagacgccctcgggaaattcaacgagggtccattctcccttggtcagttcagtctggtggacattgcgtatgtaccattcatcgagaggtttcagatattctattccaacataaagaactatgatattacaaagggcagacccaaccttcagaagttcattgaggaagtggacaagattgatgcatacacacagactaaacaggacccacagtttttacttgagcagacaaagaagcggcttgggattgcttaaagcttgcggccgaggatgactctcgacagaaataccagcatagtagatcgacacttgtttagtcatttgtgtgcttgaataatgaatactacatatatggttttcaataagacatggtcctctatactgggttgtacttctgaaaacaaactagttgtcctgatattatagctttcgtggtgtgtttacgtcactgtatatgaaagggtggggagagagaatgatatgccatgtattctgtcaaatgtttttttataatgtcaagagctctgactttt

SEQ ID NO: 23049 - protein, 310 aa, Zea mays subsp. mays
  misc_feature (1)..(310): Ceres Seq. ID no. 12411122
THFNHSLPMNSLAFPSCPSALTPASTTAPASSPFPSPRIKIRCPRQEDAAHYHLRLRDRSSSQTVIVAMAAAAPASSVKEVLPSPLTSASEPPPLFDGTTRLYVAYHCPYAQRAWIARNYKGLQDKIKIVAIDLADRPTWYKEKVYPENKVPSLEHNNQVKGESLDLVKYIDSNFEGPSLLPEDPSKKQFAEELLAYTDAFNKALYFCIVSKEDVSEEAVAALDKIEDALGKFNEGPFSLGQFSLVDIAYVPFIERFQIFYSNIKNYDITKGRPNLQKFIEEVDKIDAYTQTKQDPQFLLEQTKKRLGIA

SEQ ID NO: 23050 - protein, 302 aa, Zea mays subsp. mays
  misc_feature (1)..(302): Ceres Seq. ID no. 12411123
MNSLAFPSCPSALTPASTTAPASSPFPSPRIKIRCPRQEDAAHYHLRLRDRSSSQTVIVAMAAAAPASSVKEVLPSPLTSASEPPPLFDGTTRLYVAYHCPYAQRAWIARNYKGLQDKIKIVAIDLADRPTWYKEKVYPENKVPSLEHNNQVKGESLDLVKYIDSNFEGPSLLPEDPSKKQFAEELLAYTDAFNKALYFCIVSKEDVSEEAVAALDKIEDALGKFNEGPFSLGQFSLVDIAYVPFIERFQIFYSNIKNYDITKGRPNLQKFIEEVDKIDAYTQTKQDPQFLLEQTKKRLGIA

SEQ ID NO: 23051 - protein, 242 aa, Zea mays subsp. mays
  misc_feature (1)..(242): Ceres Seq. ID no. 12411124
MAAAAPASSVKEVLPSPLTSASEPPPLFDGTTRLYVAYHCPYAQRAWIARNYKGLQDKIKIVAIDLADRPTWYKEKVYPENKVPSLEHNNQVKGESLDLVKYIDSNFEGPSLLPEDPSKKQFAEELLAYTDAFNKALYFCIVSKEDVSEEAVAALDKIEDALGKFNEGPFSLGQFSLVDIAYVPFIERFQIFYSNIKNYDITKGRPNLQKFIEEVDKIDAYTQTKQDPQFLLEQTKKRLGIA

SEQ ID NO: 23052 - DNA, 1469 bp, Zea mays subsp. mays
  misc_feature (1)..(1469): Ceres Seq. ID no. 12411125
gcacgagaccattacctagaacatcctaatcgaaaaaaaaagagcgggcagtactggtggcccgtggccctggtggggcaccactaggctgctacgtgttcttccccaaatcggcctcacagccctcactgttgcaaagtagggactagggagtacctgctctctcgctctcgcccatcccattgccttcatcatcaaatcgccaccgaaaattccccccaaaaaacaataagcacttgttcatcatcatcagagtaaacacagcagaaccctagcgcgccgttcctccgacgactcacatcccacccactcacccaccccatggcggccaagctctccaccagcgccgacgccccggcctcggtgcggctctccgcagcagcgcaggcggctgcgatccagccctcctctccgcgcttcttcttctcctcgctggccgggaccaacccggcctccccgcatcgccgcatcgccattgccgtcgatctctccgacgagtccgccttcgccgtcaagtgggccgtgcagaactacctccgccccggggacgccgtcgtgctgctccacgtgcgccccacctccgttctctacggcgccgactggggttccatcccggtctccgtcgctgacgaggccgacgctgccgaggacgccgccgccgccgccgagggcggcccctccgaggaggagctgcagaagaagcgggaggaggaatacgacgccttcacctctaccaaggcgcaggacctcgcgcagccgcttgtcgatgcccagatccccttcaagatccatgtcgtcaaggaccacgacatgaaggagcgcctctgcctcgaggctgagcgccttggcctgtccgctatgatcatggggagccgcggttttggggcctctcggaaaggcggcaaggggaggcttgggagtgttagtgattactgtgtacaccactgtgtatgccccgttgtggttgttcgctaccctgatgatgctgcagatgccagtggagatgcatcaggggcgacagatgagttgcacactgtaccagaggacgaacctgtttatcacgatgcgcctgaggtgcagaaagaaaactgaggcaatggccgcaagcagctgaagaacgaaggaaaacatggggcctgtagtgactagtgaggcgattctgtgtatctgaaagatgggactggctgtttatcttcgcttctgtatatcaactgcgtgtcatgatcagtggctgcttcgcgtttgagtttcatatcggagtcctagatcatcgaagtctttgttggtttgcttgtgagatgtttatgttgtgaacaccatgtagagtactcttctcgtaggtagaagctgccttgaagatgcttatgcagttatgctggggtctgggctctcttgtcttgttttgcggagccggtgatgagctttattttctcaaatggtagttatctacacggtattatgtgctctgt

SEQ ID NO: 23053 - protein, 256 aa, Zea mays subsp. mays; identical to SEQ ID NO: 15139
  misc_feature (1)..(256): Ceres Seq. ID no. 12411126

SEQ ID NO: 23054 - DNA, 863 bp, Zea mays subsp. mays
  misc_feature (1)..(863): Ceres Seq. ID no. 12411158
atcccaattcttgcctaccggctaccgctgctcctgttaggagtacttgccaattactgttggaatcaccttcnccgcctcctcgagaaccaattctagcctaaaacccgcagtgatccgcccaactcccgacccactcatggtcgatcggcgcggccgctgaactgcctgcggcgggggcgagaggacgcgggtcgaggcgggcgatggccgggctggcggggaggcctggttcctggggcggccttgtgctgcgggtggggcaggctctcttcgccgccgcctgcatcggcgtcatgggcagctcgctcggattcgccagctacaccgccttctgctacttgattgcgtcaatggggcttcaaatgctgtggagtttcggacttgcatgtcttgatggatatgccattagagccaataaagatctcaccagtcccattctattgagcttgtttgtcgttggagactgggtaacagcaatcctgtcattcgccgcatcaagctcagctgccggtgtagtaatcctatttcaaaaggacgtgctcttctgcagaaggtatccccagctcccctgcggaaaatacgagctcgccacggcgttcgccttcctgtcttgggcgctcagtgcgacatcagcattgatcatgttttggctcctggctgcgttctgattttgtgtaaaaattttgtgacagcgatgttcatagtgcccacttcgctgttctctcatcgcattcttttacgaccatgtcacatatttagagccacatagccccccccccccccccaccccccaaaaaaaagaatgttgggatcatgtaaagtccttgaagggaacagttactaatggaagaaattcactg

SEQ ID NO: 23055 - protein, 154 aa, Zea mays subsp. mays
  misc_feature (1)..(154): Ceres Seq. ID no. 12411159
MAGLAGRPGSWGGLVLRVGQALFAAACIGVMGSSLGFASYTAFCYLIASMGLQMLWSFGLACLDGYAIRANKDLTSPILLSLFVVGDWVTAILSFAASSSAAGVVILFQKDVLFCRRYPQLPCGKYELATAFAFLSWALSATSALIMFWLLAAF

SEQ ID NO: 23056 - protein, 124 aa, Zea mays subsp. mays
  misc_feature (1)..(124): Ceres Seq. ID no. 12411160
MGSSLGFASYTAFCYLIASMGLQMLWSFGLACLDGYAIRANKDLTSPILLSLFVVGDWVTAILSFAASSSAAGVVILFQKDVLFCRRYPQLPCGKYELATAFAFLSWALSATSALIMFWLLAAF

SEQ ID NO: 23057 - protein, 105 aa, Zea mays subsp. mays
  misc_feature (1)..(105): Ceres Seq. ID no. 12411161
MGLQMLWSFGLACLDGYAIRANKDLTSPILLSLFVVGDWVTAILSFAASSSAAGVVILFQKDVLFCRRYPQLPCGKYELATAFAFLSWALSATSALIMFWLLAAF

SEQ ID NO: 23058 - DNA, 1263 bp, Zea mays subsp. mays
  misc_feature (1)..(1263): Ceres Seq. ID no. 12411178
acaactcgtaaaaaatagcgtcttttatcatatccgttgctcgcaaaacgcccccacacgccgccggcgaatcggcgactccccttgcgacgggaggaagcagccacgccgccgtctcggcgcctccccgacgactgcctctccggtctcgaacgcgatctggcccatggtggctctggcgccgttggttcgtgagatctagggttgtcgagcgccgcgtagtgggagcggatggggcgccggaagatgtctgcagcggcgccgccgtcccggagctggtccaacgttggcgggagcgtaatccccgaactacggggcaaaacacaaaacggacttggaaaatttgacgctgacaaaacatccaatcagaacattacattttttcctgttagccatgttacaatacttgaaaagattagcaacatatatcctgagaaagagtggtttgttctttctcttaattgttttggtggtagcttccggaatcttgctctctatttcagatggcctgcataagaagcatgtgcaggagttccttaattatgctaaattcgtgttgtggtggatttcattaggtgtggcttcatcaattggactaggttctgggttgcatacatttgtgctgtatctaggtcctcatattgctctgttcactattaaagctgttcagtgtggccgaattgatttgaaaatggctccatatgataccatacagcttaaggttgggccatcatggctcgacaagaaatgttctgaatttggtccgcctgtgtatccagcatcagctcattctgttaggatccccgtctttgatttactacctcagatacagctggaagcagttctttggggcattgggactgcacttggcgagcttcccccttattttatatcacgagcagctcgcttatcaggaagcaagtcaaaagctgttaaggagcttgatgccgctacttccaaagaagatgggacagtagcatccactcttgatcgctccaagcgttggcttctttctcactctcaacatctcaacttcttctctatcttgatacttgcttcggttccgaacccactctttgatctcgctggaattatgtgtggccaatttggtgtacctttctgggagttcttttttgcaactttgattgggaaggccatcatcaagactcatattcagacgctgtttatcgtgtccttatgcaacaaccagctcctgtatcttatggaaaaggagctaatctggatattcggtcacattcctgg

SEQ ID NO: 23059 - protein, 289 aa, Zea mays subsp. mays
  misc_feature (1)..(289): Ceres Seq. ID no. 12411179
MLQYLKRLATYILRKSGLFFLLIVLVVASGILLSISDGLHKKHVQEFLNYAKFVLWWISLGVASSIGLGSGLHTFVLYLGPHIALFTIKAVQCGRIDLKMAPYDTIQLKVGPSWLDKKCSEFGPPVYPASAHSVRIPVFDLLPQIQLEAVLWGIGTALGELPPYFISRAARLSGSKSKAVKELDAATSKEDGTVASTLDRSKRWLLSHSQHLNFFSILILASVPNPLFDLAGIMCGQFGVPFWEFFFATLIGKAIIKTHIQTLFIVSLCNNQLLYLMEKELIWIFGHIP

SEQ ID NO: 23060 - protein, 190 aa, Zea mays subsp. mays
  misc_feature (1)..(190): Ceres Seq. ID no. 12411180
MAPYDTIQLKVGPSWLDKKCSEFGPPVYPASAHSVRIPVFDLLPQIQLEAVLWGIGTALGELPPYFISRAARLSGSKSKAVKELDAATSKEDGTVASTLDRSKRWLLSHSQHLNFFSILILASVPNPLFDLAGIMCGQFGVPFWEFFFATLIGKAIIKTHIQTLFIVSLCNNQLLYLMEKELIWIFGHIP

SEQ ID NO: 23061 - DNA, 1325 bp, Zea mays subsp. mays
  misc_feature (1)..(1325): Ceres Seq. ID no. 12411183
gcaaaaagtcgccctcttcctccactcgccgacacacacggcgcaaatccccacaaccccaagcgggcgggcggacttccacccaccttctcgcgcggcgacgtgctcggctcgcttccagccacctcgctcgccgcccgcctcggaatccccgccgcgagatcttgttccccggaggatggaggtgaaaacagtaaaagttagcaatctttcattaaatgctttgaaaagagagatcacagagttcttcagtttctcaggagatatagaatatgttgaaatgcaaagtgaatctgaatggtcacagcttgcttatgtcacatttaaagactcacagggagcagacactgctgttcttctctcgggggcaacaatcgtggatcgtgctgtcattataactcctgctgagaactatcagctgcctctggaagcacacaaacaattatcgggagcaaacgtctctactgaatcagcagtaaggaaggcagaagatgttgtgagcagcatgctggccaagggcttcgtcctcagcaaagacgcactcaacttggcaagatcatttgacgagcgtcacaacatcctatccaacgccactgccactgttgcatccctagaccgccagtatggcctgagcgaaaagatcagtctcggaagggccattgtcggcagcaaggtcaaggaggtggacgagcggtaccaggtctcagaactcaccaagtccgccttggctgccgccgagcagaaagccagcgtcgcgggctccgctatactgagcaaccagtatgtctcggctggtgcctcgtggctaacaagcgcgttcgatatggtaacgaaggcagcgggcgacatgacctcgatggccaaagataaggtggagagggccgaggaggagaggaaagccatcatgtgggaggagaggagtgggctggtcagcgagtacgcgaagatccatcttgacgagccctcttcgtgggagcccgcggttctgcctctggaatcagtggacgagcagaagctccaagctgtctgacacgcagagaccgagtctctcgcacgaaattcttttttgcagctcgtcctatatatagattgttctttttcgtcggtgcactggatcaaaacaattgcgcttgtcggccagtgccgtgtaaatttctgagagttggtcttgtgttattaccaggttttgttcgtttctttcgttttggagagagtggtgctaccagcactactacactagactactctgtgtgaatggaatactactgtactttgtctcttcttctactactactacagaaacataatataacttccttcgttag

SEQ ID NO: 23062 - protein, 342 aa, Zea mays subsp. mays
  misc_feature (1)..(342): Ceres Seq. ID no. 12411184
QKVALFLHSPTHTAQIPTTPSGRADFHPPSRAATCSARFQPPRSPPASESPPRDLVPRRMEVKTVKVSNLSLNALKREITEFFSFSGDIEYVEMQSESEWSQLAYVTFKDSQGADTAVLLSGATIVDRAVIITPAENYQLPLEAHKQLSGANVSTESAVRKAEDVVSSMLAKGFVLSKDALNLARSFDERHNILSNATATVASLDRQYGLSEKISLGRAIVGSKVKEVDERYQVSELTKSALAAAEQKASVAGSAILSNQYVSAGASWLTSAFDMVTKAAGDMTSMAKDKVERAEEERKAIMWEERSGLVSEYAKIHLDEPSSWEPAVLPLESVDEQKLQAV

SEQ ID NO: 23063 - protein, 283 aa, Zea mays subsp. mays
  misc_feature (1)..(283): Ceres Seq. ID no. 12411185
MEVKTVKVSNLSLNALKREITEFFSFSGDIEYVEMQSESEWSQLAYVTFKDSQGADTAVLLSGATIVDRAVIITPAENYQLPLEAHKQLSGANVSTESAVRKAEDVVSSMLAKGFVLSKDALNLARSFDERHNILSNATATVASLDRQYGLSEKISLGRAIVGSKVKEVDERYQVSELTKSALAAAEQKASVAGSAILSNQYVSAGASWLTSAFDMVTKAAGDMTSMAKDKVERAEEERKAIMWEERSGLVSEYAKIHLDEPSSWEPAVLPLESVDEQKLQAV

SEQ ID NO: 23064 - protein, 249 aa, Zea mays subsp. mays
  misc_feature (1)..(249): Ceres Seq. ID no. 12411186
MQSESEWSQLAYVTFKDSQGADTAVLLSGATIVDRAVIITPAENYQLPLEAHKQLSGANVSTESAVRKAEDVVSSMLAKGFVLSKDALNLARSFDERHNILSNATATVASLDRQYGLSEKISLGRAIVGSKVKEVDERYQVSELTKSALAAAEQKASVAGSAILSNQYVSAGASWLTSAFDMVTKAAGDMTSMAKDKVERAEEERKAIMWEERSGLVSEYAKIHLDEPSSWEPAVLPLESVDEQKLQAV

SEQ ID NO: 23065 - DNA, 1831 bp, Zea mays subsp. mays
  misc_feature (1)..(1831): Ceres Seq. ID no. 12411187
atccggttcggttccgtcgtccactctcgttccccagttcgctggaccatctcaaaatcctatcctcctctccttccctccgtatctcatccggccgattcgaatctccggtcccatcctctacggcttcaccccgcgcccaatccagtctgtacgtgaatcttgacaggggagagaagaatcggataaggagacctgcaccttcctccgagcaaagcaggagaggaaacaagaatagaggaggagatggccatgcccaccttacgccttgctcctgacctgccgcccgtatcccgcctctgcttcgggacaatgacgatgggagagcagagcggggcggcgtgctcgctccgcctcctcgacgccgcctacgacgccggcgtcaacttcttcgactccgcagagatgtaggctcacctgctccctcatctccctgcctcggttcgagagtaatgaaaggaaaggtgtctggaactctggatgcacatctgcaaacatgtttactcgtcaggtacccagtcccacagcgcagtgagacgcgcgggcgtagcgaggagctcctcggccgctggttgcgggcccgccgggccccacgggacagcgtcgtcgtcgcaaccaaagtcgcggggccttcagggcagatgacgtggattcgcggcgggccgacatctctcgattcacagaacatcgcagaggcaatcgatggctgtttgcgcaggctgggtgtggactacatcgacctctaccagatacactggccggatcggtatgttccaatgtttggggagacagagtatgatccgaactgccagtacacgtctgttccaatggaagagcaactggaggctctcggaagagcaatagatgctggcaaggtacattggccttagcaatgagacaccatatggtttgatgaaatttcttcagttgagtaaggattctcagttgcttccaaagctactgacactgcaggtaagtagcgcagtttgatctaatctgtagtactgtaatcgctctccatatttcttcacctgtgtttttgcagaactcgtataatttgttgtgccgaaattttgattctggattggcagaatgctgccatcatgagaggtatgcttgacacggtcagaagccctaactgttgtcttcagtgtctctaatcttctcatgtatggtcctggcatgagttggtaatgcatattggctttttcccctctatgactatgatacaacgatacatagctctcctgcatgttcgaaaaaatattgacatctgtttagtttaaagaagaatggcattgtcatatcgtatttgctcttggttaagatattttccaaattgtattctgttttgactcaatttatacaattgtttttcttctgaacttccattgttgaactatggcatttgcagaattagccttgctggcttatagcccaatggcaatgggtatactttcaggaaagtatcacttatctgataactgtggtccgccagacgcaagaatgaatcttttcaaagggagatactctgaaggtgaatcccggtacaaactgcagagccccaaagtgaaagcagctgtgaaggaatacacacaaatttctgcaaagtatggcatttctccagtgaccttagcgattgcatttgtcttgagacatccacttgtggcatcggctgttttcggtgcgactaaattgtggcagcttgatgaagttcttcaggcaactacagtccatctttgtgaggaaattgttgctgagatcaatgatgtacatgcaagataccctaacccttgcccataaaattttgcaaaaaaatctttatttagcc

SEQ ID NO: 23066 - protein, 145 aa, Zea mays subsp. mays
  misc_feature (1)..(145): Ceres Seq. ID no. 12411188
MKGKVSGTLDAHLQTCLLVRYPVPQRSETRGRSEELLGRWLRARRAPRDSVVVATKVAGPSGQMTWIRGGPTSLDSQNIAEAIDGCLRRLGVDYIDLYQIHWPDRYVPMFGETEYDPNCQYTSVPMEEQLEALGRAIDAGKVHWP

SEQ ID NO: 23067 - protein, 133 aa, Zea mays subsp. mays
  misc_feature (1)..(133): Ceres Seq. ID no. 12411189
MAFAELALLAYSPMAMGILSGKYHLSDNCGPPDARMNLFKGRYSEGESRYKLQSPKVKAAVKEYTQISAKYGISPVTLAIAFVLRHPLVASAVFGATKLWQLDEVLQATTVHLCEEIVAEINDVHARYPNPCP

SEQ ID NO: 23068 - protein, 120 aa, Zea mays subsp. mays
  misc_feature (1)..(120): Ceres Seq. ID no. 12411190
MAMGILSGKYHLSDNCGPPDARMNLFKGRYSEGESRYKLQSPKVKAAVKEYTQISAKYGISPVTLAIAFVLRHPLVASAVFGATKLWQLDEVLQATTVHLCEEIVAEINDVHARYPNPCP

SEQ ID NO: 23069 - DNA, 1681 bp, Zea mays subsp. mays
  misc_feature (1)..(1681): Ceres Seq. ID no. 12411203
aaattccagtccgatttggacattgtcttcgtctccttcatcccctgcccacctgttctgctctgccgccgccgccgctgccgctcccgctgccgcaggaaccctagaccacgctgagcaacccccggcctacacggcgtagctttgcaggaaatggaatacggcgccgtcctcgccgccgcgccgctcgtcgcacggccgaactggctcctcctctcgccgccgccactggcgccgtctattcagattcagaatcgtctttattcgatctcgtcattcccactaaaggctggacctgtaagggcatgcagagctttagcaagcaactacacgcaaacatctgaaacagttgatttggactgggagaacctgggttttgggattgtgcaaactgattatatgtatattgctaagtgcgggacagacgggaatttttctgagggtgaaatggtgccttttggacctatagcgctgagtccatcttctggagtcctaaattatggacagggattgtttgagggcctaaaggcgtataagaaaactgatggatccatcctattatttcgcccagaggaaaatgctgagaggatgcggacaggtgctgagaggatgtgcatgcctgcaccctctgtcgagcagtttattgatgcagtaaaacaaaccgttcttgcaaataagagatggattcctcctactggtaaaggttctctttatattaggcccttacttatgggaagtggggctgttcttggtcttgcacctgctcctgagtatacattcattatatttgtctctcctgttggaaactactttaaggaaggtttagcaccaataaatttgatagttgaagacaagttccatcgtgctactcctggtggtactgggggtgtgaagaccataggaaattatgcttcggtgttgatggcacagaaaattgcaaaggaaaagggttattctgatgtcctctacttggacgctgttcacaagaagtaccttgaagaagtttcttcatgcaatgtttttgttgtcaaggacaatgttatttctaccccagcaataaaaggaacaatattacctggtatcacaaggaaaagtataattgacgttgctttgagtaaaggcttccaggttgaggagcggcttgtttcagtggatgaactgcttgatgctgatgaggtattctgcacaggaactgctgttgtggtgtctcctgttgggagcattacatatcaagggaaaagagtggaatacggccaccaaggtgttggcgttgtgtcccagcagctgtacacttcactgacgagtcttcagatgggtcaaaccgaggattggatgggctggactgtgcaacctgaattagttggccgtggttcgtggatcattcccaacagatgatgggttcgcaagatccaaatctggaggatcacaaccatgtgtacctcttcggttacagttttgtagtgtcttatgcgatggcgtcctgcctgtatatttcttagacggtatttaaaccataaaacagtattcgtctgtacgactgtacccttcagttctgtagcatctgccggagacgagtactagttttgttattttctttcttttacaaaccaagaacagttctatagttttattgtagacactggaccatcatatgatctcaatgggtagctttttccttttt

SEQ ID NO: 23070 - protein, 413 aa, Zea mays subsp. mays
  misc_feature (1)..(413): Ceres Seq. ID no. 12411204
MEYGAVLAAAPLVARPNWLLLSPPPLAPSIQIQNRLYSISSFPLKAGPVRACRALASNYTQTSETVDLDWENLGFGIVQTDYMYIAKCGTDGNFSEGEMVPFGPIALSPSSGVLNYGQGLFEGLKAYKKTDGSILLFRPEENAERMRTGAERMCMPAPSVEQFIDAVKQTVLANKRWIPPTGKGSLYIRPLLMGSGAVLGLAPAPEYTFIIFVSPVGNYFKEGLAPINLIVEDKFHRATPGGTGGVKTIGNYASVLMAQKIAKEKGYSDVLYLDAVHKKYLEEVSSCNVFVVKDNVISTPAIKGTILPGITRKSIIDVALSKGFQVEERLVSVDELLDADEVFCTGTAVVVSPVGSITYQGKRVEYGHQGVGVVSQQLYTSLTSLQMGQTEDWMGWTVQPELVGRGSWIIPNR

SEQ ID NO: 23071 - protein, 331 aa, Zea mays subsp. mays
  misc_feature (1)..(331): Ceres Seq. ID no. 12411205
MYIAKCGTDGNFSEGEMVPFGPIALSPSSGVLNYGQGLFEGLKAYKKTDGSILLFRPEENAERMRTGAERMCMPAPSVEQFIDAVKQTVLANKRWIPPTGKGSLYIRPLLMGSGAVLGLAPAPEYTFIIFVSPVGNYFKEGLAPINLIVEDKFHRATPGGTGGVKTIGNYASVLMAQKIAKEKGYSDVLYLDAVHKKYLEEVSSCNVFVVKDNVISTPAIKGTILPGITRKSIIDVALSKGFQVEERLVSVDELLDADEVFCTGTAVVVSPVGSITYQGKRVEYGHQGVGVVSQQLYTSLTSLQMGQTEDWMGWTVQPELVGRGSWIIPNR

SEQ ID NO: 23072 - protein, 315 aa, Zea mays subsp. mays
  misc_feature (1)..(315): Ceres Seq. ID no. 12411206
MVPFGPIALSPSSGVLNYGQGLFEGLKAYKKTDGSILLFRPEENAERMRTGAERMCMPAPSVEQFIDAVKQTVLANKRWIPPTGKGSLYIRPLLMGSGAVLGLAPAPEYTFIIFVSPVGNYFKEGLAPINLIVEDKFHRATPGGTGGVKTIGNYASVLMAQKIAKEKGYSDVLYLDAVHKKYLEEVSSCNVFVVKDNVISTPAIKGTILPGITRKSIIDVALSKGFQVEERLVSVDELLDADEVFCTGTAVVVSPVGSITYQGKRVEYGHQGVGVVSQQLYTSLTSLQMGQTEDWMGWTVQPELVGRGSWIIPNR

SEQ ID NO: 23073 - DNA, 1561 bp, Zea mays subsp. mays
  misc_feature (1)..(1561): Ceres Seq. ID no. 12411207
aaaattcacgctgagccgccgcctgttccacggttccacctctccaaaccaaaaactcctaggttttctaaacgtgaattccaatcactgcacacgcggtcgtttcggtgtgatttgccaggaagagggggcgaattcgtggtgctaaaagagaccccatctggtgcggttctggggttcgaggagcggcgaggcaggtgggaaatgagggatgtggtcgtggttgacgaagattgcgtccgcgtgcttgggcccggtccggaggtgcgcgcgtacgaggaaggatgaggacgacagcgataatggccgcggcgtcgccgacgacctgctgtggtcgcgggacctcgggcgccacgcggcggggtcagttctcgtttgccgtcgtgcaggccaacgaggcgttggaggaccacagccaagtggagacaggctctgccgcaactttcgtaggcgtctacgacggtcatggcggcgctgaggctgcccgcttcatatctgaccacctcttcgcacacctcattcgacttgctcaggaaaatggaacaatatctgaggatgttgttcggagtgcgttttctgctacggaggaaggcttcttgacactcgtgcggagaacacgttttataaagcctttgattgctgcggttggatcctgctgtctagttggtgtcatatggagaggaacactatatgtggctaatctaggcgattccagggctgttattggcgttctaggtagatcaaacaagatcgtggctgagccactcacaagagatcataatgcaagtagggaggaggtcaggcaggagcttatatcccgtcatccagatgattctcaaattgtggttctcaagcatggtgtttggcgcatcaagggcataattcaggtttcaagaacaattggagatgcttacttgaagaggcgggaatttgctcttgatccatctatcactcgtttccgcctttcggagcctctccgccagcctgttctcacagcagagccatctatctatacaagggtgcttaacccacaagataaatttattatttttgcatctgatggtctttgggagcacttgacaaatcaacaggccgttgaaattgtccacagcaatccacgatcaggaattgcaaagaggctggtaacggcagcgttgaaacaagctgcacggaagagggaaatgaggtatgatgacctcaggaaagttgagaagggaattcgccgcttcttccacgatgacattacagtagttgttgtttacatagatcacggattactgcaagagagggatacttccgtgccagagctctcagtccgtggctttgttgactccgttggcccctcaaatttctcagggataaccgccatatcatgactcactactaatcgagcagcacaattttggtgtacggcattcaagtagcatttgactatctgagtgttatgctttaccaggcttttgcttttagtattgcctttatattgagtactactacaatacttcatgtcgctttgttttcaaaaatactttatgtcaattttgcaagtctgatttgctcc

SEQ ID NO: 23074 - protein, 363 aa, Zea mays subsp. mays
  misc_feature (1)..(363): Ceres Seq. ID no. 12411208
MRTTAIMAAASPTTCCGRGTSGATRRGQFSFAVVQANEALEDHSQVETGSAATFVGVYDGHGGAEAARFISDHLFAHLIRLAQENGTISEDVVRSAFSATEEGFLTLVRRTRFIKPLIAAVGSCCLVGVIWRGTLYVANLGDSRAVIGVLGRSNKIVAEPLTRDHNASREEVRQELISRHPDDSQIVVLKHGVWRIKGIIQVSRTIGDAYLKRREFALDPSITRFRLSEPLRQPVLTAEPSIYTRVLNPQDKFIIFASDGLWEHLTNQQAVEIVHSNPRSGIAKRLVTAALKQAARKREMRYDDLRKVEKGIRRFFHDDITVVVVYIDHGLLQERDTSVPELSVRGFVDSVGPSNFSGITAIS

SEQ ID NO: 23075 - protein, 357 aa, Zea mays subsp. mays
  misc_feature (1)..(357): Ceres Seq. ID no. 12411209
MAAASPTTCCGRGTSGATRRGQFSFAVVQANEALEDHSQVETGSAATFVGVYDGHGGAEAARFISDHLFAHLIRLAQENGTISEDVVRSAFSATEEGFLTLVRRTRFIKPLIAAVGSCCLVGVIWRGTLYVANLGDSRAVIGVLGRSNKIVAEPLTRDHNASREEVRQELISRHPDDSQIVVLKHGVWRIKGIIQVSRTIGDAYLKRREFALDPSITRFRLSEPLRQPVLTAEPSIYTRVLNPQDKFIIFASDGLWEHLTNQQAVEIVHSNPRSGIAKRLVTAALKQAARKREMRYDDLRKVEKGIRRFFHDDITVVVVYIDHGLLQERDTSVPELSVRGFVDSVGPSNFSGITAIS

SEQ ID NO: 23076 - DNA, 1597 bp, Zea mays subsp. mays
  misc_feature (1)..(1597): Ceres Seq. ID no. 12411213
gtcaccgtccgtcgtcgcagacgagcccagtggcgactggcgattcgctttcgaaccgcagtcgtccctgctgtgttcccggttccctcccttcctcctcctatagttggcttctcgccaccctctgccttcgaccaactttctcccttctcccctccccgttcccctctccaactccaatccatggcctccacggatcgctccgcgccggcggaggaccagcaacagccgcagcgcccgtccctcttctcgccgtaccagatgccccacttccgcctcgcgcaccgggtggtgctggcgccgatgaccaggtgccgggcgcccgatgcgctcccgggccccgcgctcgcggagtactacgcgcagcggtccacggaaggcggcttgctcatctccgagggcaccatcatctcgcccgccagccctgggttccctcgtgtccctgggatatacaatcaagagcagactgatgcatggaaaaaggtggttgatgctgttcatgccaagggagccatctttttctgccaactatggcatgtaggtcgagcttctcaccaagtatatcagccgggtggttctgctccaatatcctctactgataaaccaatatcatcaagatggaggatactgatgcccgatggatcctatggcaagtatccaactccgaggcgcctagccacatccgagataccagaaattgtcgagcaataccgacaggctgccataaacgccatcaaagcaggtttcgatggcatcgagatccacggtgcccatggctacctaatcgaccagttcctcaaggacggtatcaacgacagggctgacgagtacggtggctcactctccaaccgctgccggttcctcctggaggtgacgcgcgccgtggtctccgcgataggggcagaccgggtggcggtccgggtgtccccggccatcgaccacctcgacgcgtacgactccaacccgctgcagctcggcctggccgtagtggaccgcctcaacgctctccaggaggagaccgggcggctggcctacctgcacgtgacgcagccacggtacacggcgtacgggcagacggagtccggccagcacgggagcgccgaggaggagagccggctgatgcgcgccctgcggggcgcctaccgcggcacgttcatgtgcagcggtgggtacacgcgcgagctcggcgtggaggccgtcgagtcgtgggacgccgacctggtgtcctacgggcggctgttcatcgctaacccggacctggtggagcggttccggcgcgacgccccgctgaacagatacgtgcgcaagacgttctacaccccggatcccgtcgttggttacacggactacccgttcctcggccagcctaaggcgcgcatgtgattattagttaggttggtaactataagaggcggactattgttcgtgtattgtggcttgagaaaataagcaaacacatggtggtagtgctgtgcaataagccttaggtgcaaacatgagcctcctgggcctttagataatgatctaattatagatgtaattatagttttgtcaagaagttaatgtttatttgcacagcaatcagcagtcatctctc

SEQ ID NO: 23077 - protein, 460 aa, Zea mays subsp. mays
  misc_feature (1)..(460): Ceres Seq. ID no. 12411214
VTVRRRRRAQWRLAIRFRTAVVPAVFPVPSLPPPIVGFSPPSAFDQLSPFSPPRSPLQLQSMASTDRSAPAEDQQQPQRPSLFSPYQMPHFRLAHRVVLAPMTRCRAPDALPGPALAEYYAQRSTEGGLLISEGTIISPASPGFPRVPGIYNQEQTDAWKKVVDAVHAKGAIFFCQLWHVGRASHQVYQPGGSAPISSTDKPISSRWRILMPDGSYGKYPTPRRLATSEIPEIVEQYRQAAINAIKAGFDGIEIHGAHGYLIDQFLKDGINDRADEYGGSLSNRCRFLLEVTRAVVSAIGADRVAVRVSPAIDHLDAYDSNPLQLGLAVVDRLNALQEETGRLAYLHVTQPRYTAYGQTESGQHGSAEEESRLMRALRGAYRGTFMCSGGYTRELGVEAVESWDADLVSYGRLFIANPDLVERFRRDAPLNRYVRKTFYTPDPVVGYTDYPFLGQPKARM

SEQ ID NO: 23078 - protein, 399 aa, Zea mays subsp. mays
  misc_feature (1)..(399): Ceres Seq. ID no. 12411215
MASTDRSAPAEDQQQPQRPSLFSPYQMPHFRLAHRVVLAPMTRCRAPDALPGPALAEYYAQRSTEGGLLISEGTIISPASPGFPRVPGIYNQEQTDAWKKVVDAVHAKGAIFFCQLWHVGRASHQVYQPGGSAPISSTDKPISSRWRILMPDGSYGKYPTPRRLATSEIPEIVEQYRQAAINAIKAGFDGIEIHGAHGYLIDQFLKDGINDRADEYGGSLSNRCRFLLEVTRAVVSAIGADRVAVRVSPAIDHLDAYDSNPLQLGLAVVDRLNALQEETGRLAYLHVTQPRYTAYGQTESGQHGSAEEESRLMRALRGAYRGTFMCSGGYTRELGVEAVESWDADLVSYGRLFIANPDLVERFRRDAPLNRYVRKTFYTPDPVVGYTDYPFLGQPKARM

SEQ ID NO: 23079 - protein, 373 aa, Zea mays subsp. mays
  misc_feature (1)..(373): Ceres Seq. ID no. 12411216
MPHFRLAHRVVLAPMTRCRAPDALPGPALAEYYAQRSTEGGLLISEGTIISPASPGFPRVPGIYNQEQTDAWKKVVDAVHAKGAIFFCQLWHVGRASHQVYQPGGSAPISSTDKPISSRWRILMPDGSYGKYPTPRRLATSEIPEIVEQYRQAAINAIKAGFDGIEIHGAHGYLIDQFLKDGINDRADEYGGSLSNRCRFLLEVTRAVVSAIGADRVAVRVSPAIDHLDAYDSNPLQLGLAVVDRLNALQEETGRLAYLHVTQPRYTAYGQTESGQHGSAEEESRLMRALRGAYRGTFMCSGGYTRELGVEAVESWDADLVSYGRLFIANPDLVERFRRDAPLNRYVRKTFYTPDPVVGYTDYPFLGQPKARM

SEQ ID NO: 23080 - DNA, 1250 bp, Zea mays subsp. mays
  misc_feature (1)..(1250): Ceres Seq. ID no. 12411217
aagtcaaggacaaggagcaaagcaaacgctgcaagcgaactcgccgccccacaaagcagtgccagggtctggctgattggctcccaccatggcatcgacctctccgcaccgctcctccggcggggatccaccttcctcgtccacgcccctcatctcctcgccgacctccccggcatccggctcctccggcggcccgctagggcggctcacgagcctccgcggcgcagcgcggttcatccggcgcacggggagccggcgtttgatgagggagccctccgtggcggtgcgggagacggctgccgagcacctagaggagcgtcagaccgactgggcctactctaagcccgtcatcgtggtcgacatgctctggaacgtcgccttcgtcgcaatcgccgcggccgtcgtcgccgcgtcgctgggcgagattcccgccgtgcctctccgcgtctggatcgcgggctacgtgctccagtgcctcctccacatcctctgcgtcacagtcgaatacaggcgtcgacgcagggacgcggaccaggagggagtgggtgttgacttcaagttcaggaggagggagcatctgaagatgacgtaaacaacctttccaaattcaaatttcggacaatgagtgatgcagacaagctagctgccggcattgcagcacctgtgggtggagtgatgacagagtgcggtaccaatcctcctgtcgaacatattctttcggctgaggatgcagagtgctgtatctgcctatgcccgtatgaagatggcgtggaactacgtgagctcccttgcaaccaccattttcactgcagctgtatagacaagtggcttcacataaatgctacatgcccattgtgcaagttcaacatcgtcaagagcaatctccacagagaagaggtctaggtcaataaggaaaaaaaaataatcatggcaacacatttcggcatgtcccatcccagctgtgctcgtcagtattgccacatttgccaactggagttgtgactacctgtcttgtagtcaagtcataaaagtcactggtgatgcgcaggtggttgcaatgtcggttctcgtgaatattccttgtaacagtttgctgcaggggctgtacattctcgttctgctcgatctgattgcattgcgatttatttgtacatgaacacgtggccatgttggatcatgaaagcggtcagtcgtttgtaaaatgattcatgaattggaggctagtatgcaggctgctatctcttgtctcg

SEQ ID NO: 23081 - protein, 167 aa, Zea mays subsp. mays
  misc_feature (1)..(167): Ceres Seq. ID no. 12411218
MASTSPHRSSGGDPPSSSTPLISSPTSPASGSSGGPLGRLTSLRGAARFIRRTGSRRLMREPSVAVRETAAEHLEERQTDWAYSKPVIVVDMLWNVAFVAIAAAVVAASLGEIPAVPLRVWIAGYVLQCLLHILCVTVEYRRRRRDADQEGVGVDFKFRRREHLKMT

SEQ ID NO: 23082 - protein, 113 aa, Zea mays subsp. mays
  misc_feature (1)..(113): Ceres Seq. ID no. 12411219
KSRTRSKANAASELAAPQSSARVWLIGSHHGIDLSAPLLRRGSTFLVHAPHLLADLPGIRLLRRPARAAHEPPRRSAVHPAHGEPAFDEGALRGGAGDGCRAPRGASDRLGLL

SEQ ID NO: 23083 - protein, 109 aa, Zea mays subsp. mays
  misc_feature (1)..(109): Ceres Seq. ID no. 12411220
MREPSVAVRETAAEHLEERQTDWAYSKPVIVVDMLWNVAFVAIAAAVVAASLGEIPAVPLRVWIAGYVLQCLLHILCVTVEYRRRRRDADQEGVGVDFKFRRREHLKMT

SEQ ID NO: 23084 - DNA, 1526 bp, Zea mays subsp. mays
  misc_feature (1)..(1526): Ceres Seq. ID no. 12411257
aagagaccagggctgaactgctgaagctgagataggattgagaatcgctgccagtggaaagcggcactagcagcagggcagaagcaagaaccagcaagaaaggggagagagaaagcggaaggactttttctcggattggatccttcgcttttgggggaaggagaaggcccctctctgtcctctctccatccttgcggagggcgctagcaggcagcagcggaaggaggaagagatgttcccgcctggcctgatccaccaccgccctgacgcccccgttcccggcgatggggcgacgcgctccggccccggcgggccgagccttgtactgacggcggaccccaagcccaggctgcggtggacggccgacctccacgagcgtttcgtcgacgccgtggcccagctcggcggacccgagaaagcaacaccaaaaactatcttaaggacaatgggcgtcaagggtcttactctttttcacttgaagagccatcttcagaaatacagattagggaaacaatctggtaaggagggatcagagcaatctaaagatgcatcctatcttctagatgctcaaagtggaatgagcgtgtcccctagagttcctgcccaggatatgaaagaaagccaagaagttaaagaagcactgagagcgcagatggaagtccaaagaagactgcatgaacaagtggaggtccaaaagcgcgtgcagatcagaatggaagcgtttcagaagtacatcgacagtatcctggagagcgcgtgcaagatggtcaccgaacagttcgcttcaagtggcttcagcatctctgaccctgatctcccggagatatcccctggaggggtggtcatgtgtggcggccccacggacacgttgagctcgtcggtgttcaaccagctttccgtcagctccatcggctcgcacagtccaggaggcaaaccttccccttccccatcaggcatggaatgtccgccgctgctcctccacaagtcgcatgagctcaagcggaggtcctcttgaactgacaaatcggcgaagcctgagggcgcggtgatggctgtctttgctagtgttgtcggatatggtggtactggtggtgacaagggaaattggtggtccagtcttgtggtagctgactttctccaggtagcaagatattgctgtgtttgtttgatcagtcaaagcatcaaacagacagacctacgttcatgtgaactgcctcatgcatgtgctagattgaaaaaaaaagttatcatattttgtcatgagattatgattctactagctagcatccttagcacacttgagatgttgttgactcgtgtcctagtgtcctctgtgttgatccatgtatgcacagcgattcatgttgggagttgggactgggacatgttaacaccagatgtttcaagcttcgtactttgcctcagttgtccatgcatgcagcaggcatcccagtacttcacctgctgttgaacttgaagactagtgtattcagcttatgaaagattcatgctgagtttgtaccccc

SEQ ID NO: 23085 - protein, 260 aa, Zea mays subsp. mays
  misc_feature (1)..(260): Ceres Seq. ID no. 12411258
MFPPGLIHHRPDAPVPGDGATRSGPGGPSLVLTADPKPRLRWTADLHERFVDAVAQLGGPEKATPKTILRTMGVKGLTLFHLKSHLQKYRLGKQSGKEGSEQSKDASYLLDAQSGMSVSPRVPAQDMKESQEVKEALRAQMEVQRRLHEQVEVQKRVQIRMEAFQKYIDSILESACKMVTEQFASSGFSISDPDLPEISPGGVVMCGGPTDTLSSSVFNQLSVSSIGSHSPGGKPSPSPSGMECPPLLLHKSHELKRRSS

SEQ ID NO: 23086 - protein, 189 aa, Zea mays subsp. mays
  misc_feature (1)..(189): Ceres Seq. ID no. 12411259
MGVKGLTLFHLKSHLQKYRLGKQSGKEGSEQSKDASYLLDAQSGMSVSPRVPAQDMKESQEVKEALRAQMEVQRRLHEQVEVQKRVQIRMEAFQKYIDSILESACKMVTEQFASSGFSISDPDLPEISPGGVVMCGGPTDTLSSSVFNQLSVSSIGSHSPGGKPSPSPSGMECPPLLLHKSHELKRRSS

SEQ ID NO: 23087 - protein, 145 aa, Zea mays subsp. mays
  misc_feature (1)..(145): Ceres Seq. ID no. 12411260
MSVSPRVPAQDMKESQEVKEALRAQMEVQRRLHEQVEVQKRVQIRMEAFQKYIDSILESACKMVTEQFASSGFSISDPDLPEISPGGVVMCGGPTDTLSSSVFNQLSVSSIGSHSPGGKPSPSPSGMECPPLLLHKSHELKRRSS

SEQ ID NO: 23088 - DNA, 905 bp, Zea mays subsp. mays
  misc_feature (1)..(905): Ceres Seq. ID no. 12411261
gcacgagaccattacctagaacatcctaatcaaaaacagcccttctcagaatgactttcctctggaccatacactaaattcttcaggctgcttagatgattctgggtacgtcccgccatgttcagataattctgacaaagtgaaccgaccaccagcgaccttcgtgaaggtttacaaatctggaacctacgggaggtcgcttgatatcactaggtttagcagctatcacgagctccgtagggaactggggcgcctatttggccttgagggccagttggaagacccattgagatcaggctggcagcttgtattcgtcgaccgtgaggaggacgtccttctcgtgggcgacgacccttggcaggaattcgtgagcacggtgtcctgcataaagatcctctccccgcaggaggtgcagcagatggggaagcagggcctggagctcctgagctcggcccccgcgcggaggctcggtagcagctgtgacgactacgtcagcaggcaggagtcgagaagcctgagcaccgggatcgcgtccgtcggttcggtcgagttgggatgagcagcaagatagcgcgcacgcagcagcagcagcagcaggttacgcatcctcagcctcagggtaggtaggggactgaagggttggtctgcgacttgatgacccacgagctcctcgttgcgcgcttcgttcgcctccatgcgatggatagaagttcagcgcagaccaagccttagctctgcgagctatgtaccatctaataattctgtccgtgtcgtaccatgtcaactcctaagtagaagaattgaagaaactaccagcagccgctgtctggtatacacgctgaaacattttttttcttgtatggagaaatactaatcatctggatgtagccaggcctatgctctct

SEQ ID NO: 23089 - protein, 59 aa, Zea mays subsp. mays
  misc_feature (1)..(59): Ceres Seq. ID no. 12411262
MRWIEVQRRPSLSSASYVPSNNSVRVVPCQLLSRRIEETTSSRCLVYTLKHFFSCMEKY

SEQ ID NO: 23090 - protein, 46 aa, Zea mays subsp. mays
  misc_feature (1)..(46): Ceres Seq. ID no. 12411263
MGKQGLELLSSAPARRLGSSCDDYVSRQESRSLSTGIASVGSVELG

SEQ ID NO: 23091 - DNA, 1339 bp, Zea mays subsp. mays
  misc_feature (1)..(1339): Ceres Seq. ID no. 12411272
aatagaagcgagcgagcgagcagcagtaggcagcggcgcgggcgaggagcagaccagcacccagcgccctcgtcggggggcggcacgtgcagcttcaccagccgccgcctttcccccgtctgcctctgcctctgcctctccccctaacccccttccatttctccaccccaccccgctcccgcttccgcttcctcgccacttagttcgttgccaccacgccgcggctgcgttcgcattgggggcacgcaatggagcagtacgagaaggtggagaagatcggggagggcacgtacggggtggtgtacaaggcgctggacaaggccaccaacgagacgatcgcgctcaagaagatccgcctcgagcaggaggacgagggcgtcccgtccaccgccatccgcgagatctctctcctcaaggagatgaaccacggcaacatcgtcagattacatgatgttgtccacagcgagaagcgcatataccttgtcttcgagtacctggatctggacctcaagaagttcatggactcctgcccggagtttgctaagaatcccactttgatcaagtcatacctctaccagatactccacggtgttgcgtactgccattctcatagagttcttcatcgagacttgaaacctcaaaacttattgatagatcggcgcactaatgcactgaagcttgcagactttggtttagccagggcatttggaattcctgtccgtacatttactcatgaggtagtgacattatggtacagagctccagaaattctgcttggagcgcggcagtattccacaccagttgatgtgtggtctgtgggctgtatctttgcggaaatggtgaaccaaaagccactattccctggcgattctgagatcgacgaactttttaagatattcaggatactaggtacaccgaatgagcagagttggccaggagtcagttgtttgcctgacttcaagacagctttccccaggtggcaagctcaggacctggcaacagtagtcccaaatcttgaccctgctgggttggaccttctctctaaaatgcttcgatacgagccaagcaaaagaatcacagcgaggcaagcacttgagcatgagtacttcaaggaccttgaagtggtacagtgacctgctaaatgtgcttgacgttgcattgacatttgtatgagctgagtcgctcattcctttttatgaacgcctgtactcttctcattctctccctgcatttttgtcattcagctggatatttcgaatctggtgtgttttgagatgtattaaagaacgtcaaatagattaccgccttggtctctgtccattgaaagtaaatatccgtc

SEQ ID NO: 23092 - protein, 294 aa, Zea mays subsp. mays
  misc_feature (1)..(294): Ceres Seq. ID no. 12411273
MEQYEKVEKIGEGTYGVVYKALDKATNETIALKKIRLEQEDEGVPSTAIREISLLKEMNHGNIVRLHDVVHSEKRIYLVFEYLDLDLKKFMDSCPEFAKNPTLIKSYLYQILHGVAYCHSHRVLHRDLKPQNLLIDRRTNALKLADFGLARAFGIPVRTFTHEVVTLWYRAPEILLGARQYSTPVDVWSVGCIFAEMVNQKPLFPGDSEIDELFKIFRILGTPNEQSWPGVSCLPDFKTAFPRWQAQDLATVVPNLDPAGLDLLSKMLRYEPSKRITARQALEHEYFKDLEVVQ

SEQ ID NO: 23093 - protein, 237 aa, Zea mays subsp. mays
  misc_feature (1)..(237): Ceres Seq. ID no. 12411274
MNHGNIVRLHDVVHSEKRIYLVFEYLDLDLKKFMDSCPEFAKNPTLIKSYLYQILHGVAYCHSHRVLHRDLKPQNLLIDRRTNALKLADFGLARAFGIPVRTFTHEVVTLWYRAPEILLGARQYSTPVDVWSVGCIFAEMVNQKPLFPGDSEIDELFKIFRILGTPNEQSWPGVSCLPDFKTAFPRWQAQDLATVVPNLDPAGLDLLSKMLRYEPSKRITARQALEHEYFKDLEVVQ

SEQ ID NO: 23094 - protein, 204 aa, Zea mays subsp. mays
  misc_feature (1)..(204): Ceres Seq. ID no. 12411275
MDSCPEFAKNPTLIKSYLYQILHGVAYCHSHRVLHRDLKPQNLLIDRRTNALKLADFGLARAFGIPVRTFTHEVVTLWYRAPEILLGARQYSTPVDVWSVGCIFAEMVNQKPLFPGDSEIDELFKIFRILGTPNEQSWPGVSCLPDFKTAFPRWQAQDLATVVPNLDPAGLDLLSKMLRYEPSKRITARQALEHEYFKDLEVVQ

SEQ ID NO: 23095 - DNA, 1466 bp, Zea mays subsp. mays
  misc_feature (1)..(1466): Ceres Seq. ID no. 12411276
aaggaagacgcctctctagattggatcgaattccttcgtttctctcctcaccgaggacggcggagagagacgaggaggaaaggcccggcgcgacggagaagctgaatatctgatatgggtgaaaccatgggaaggagaacagtcagtggccttcttgtcaccaaaggaggctcaattcttgtcttcagggaggaaagcccacgccacaaggccaccgcatgttgtacccgcctctggtgcagcagtaagcttttcccgaacaaagacacgaatacacgcagggcatccagggaaacatcggctcttcagagatcacaagtgtctaggaaatccaactggatgtcccatcaaggaagtatttcttatgatcgaagcaccagtaggaatacagcaagtacttttggtgagactcacaacaaaccaagagaaaaagaaaatctcgggtgtgatctaccggctcggttgaaagaaaggatcaatacatccaggaaaagctcattgggtggactgggaagtcctaacaaatcatcaacaaacacatcaagcagtagccgatcggtttcaagatcagtatgtcggccagcatcgagaatgagaaaggatggaggaaggggcgcagaatctatgaggatgcatagagccagagatagtggtggtagctcttggggagatgtgttgacaagaaattctgaccaagattcttcacacaggtctctatctcgaaacgtgttgaggcataggagcagatctcagcaagggccaatatcatcattggaggataatttagatgattccagtgaatactggcattttgatacagatgacagtgaagaggttgaggatgactatgcctttaatgatcagcataggggaatgagaatggacattgataacatgtcttatgaggacctacttgcgcttggggagagaataggtactgtaagcactggtctttcagatgatgcgctttctgagtgtctgaagagaaacctctatgtgcccacaacttcaagcagcaatgaagatggtgacatcaaatgcatcatatgtctggaggagtactcttctggtgtggaggtggccaagatggcatgcgagcattactaccataccacttgtatccaacagtggcttcagcaaaagaactggtgcccgatttgtaaatgtgacgcttctgccattagctcatagtgttcttgacagtaacagaagtatcagttcattgtaatcaaataggattacacaagtttttttggttctagaacaaattattcacttcaatcctatactgctcttcaattcacactacacttgtcataggaagcaggaaaataagtcctagaagaaaggattttctcagttttgatgttgaagttgaagagtagatgatagtgttgccattctttacatacaaaagcgtcaaaaattcagcattaatagtgcagtttttgtttgccatcgttttc

SEQ ID NO: 23096 - protein, 358 aa, Zea mays subsp. mays
  misc_feature (1)..(358): Ceres Seq. ID no. 12411277
MGETMGRRTVSGLLVTKGGSILVFREESPRHKATACCTRLWCSSKLFPNKDTNTRRASRETSALQRSQVSRKSNWMSHQGSISYDRSTSRNTASTFGETHNKPREKENLGCDLPARLKERINTSRKSSLGGLGSPNKSSTNTSSSSRSVSRSVCRPASRMRKDGGRGAESMRMHRARDSGGSSWGDVLTRNSDQDSSHRSLSRNVLRHRSRSQQGPISSLEDNLDDSSEYWHFDTDDSEEVEDDYAFNDQHRGMRMDIDNMSYEDLLALGERIGTVSTGLSDDALSECLKRNLYVPTTSSSNEDGDIKCIICLEEYSSGVEVAKMACEHYYHTTCIQQWLQQKNWCPICKCDASAISS

SEQ ID NO: 23097 - protein, 354 aa, Zea mays subsp. mays
  misc_feature (1)..(354): Ceres Seq. ID no. 12411278
MGRRTVSGLLVTKGGSILVFREESPRHKATACCTRLWCSSKLFPNKDTNTRRASRETSALQRSQVSRKSNWMSHQGSISYDRSTSRNTASTFGETHNKPREKENLGCDLPARLKERINTSRKSSLGGLGSPNKSSTNTSSSSRSVSRSVCRPASRMRKDGGRGAESMRMHRARDSGGSSWGDVLTRNSDQDSSHRSLSRNVLRHRSRSQQGPISSLEDNLDDSSEYWHFDTDDSEEVEDDYAFNDQHRGMRMDIDNMSYEDLLALGERIGTVSTGLSDDALSECLKRNLYVPTTSSSNEDGDIKCIICLEEYSSGVEVAKMACEHYYHTTCIQQWLQQKNWCPICKCDASAISS

SEQ ID NO: 23098 - protein, 283 aa, Zea mays subsp. mays
  misc_feature (1)..(283): Ceres Seq. ID no. 12411279
MSHQGSISYDRSTSRNTASTFGETHNKPREKENLGCDLPARLKERINTSRKSSLGGLGSPNKSSTNTSSSSRSVSRSVCRPASRMRKDGGRGAESMRMHRARDSGGSSWGDVLTRNSDQDSSHRSLSRNVLRHRSRSQQGPISSLEDNLDDSSEYWHFDTDDSEEVEDDYAFNDQHRGMRMDIDNMSYEDLLALGERIGTVSTGLSDDALSECLKRNLYVPTTSSSNEDGDIKCIICLEEYSSGVEVAKMACEHYYHTTCIQQWLQQKNWCPICKCDASAISS

SEQ ID NO: 23099 - DNA, 1274 bp, Zea mays subsp. mays
  misc_feature (1)..(1274): Ceres Seq. ID no. 12411280
acgccttaaaaacgagatccctggggtcaccactggtcaactgcgtcactgcgccgaatcactagaaaccccaacaaacggaatttcacacatccagcgagcaataccgcaccgcaggtaagatcaaagaggaggcgatggctggcggcgggcaggcggcgatttcgttcatgacgcggatggcgaaggtggcggcggggttgggcgtggcggcgtccgcagcctccacgtccttctacacggtggacggcggagagcgcgccgtcatcttcgatcgcgtccgcggcgtgctcccgcgtacgatgtcagagggcacccatttgctggtccccatccttcagaagcccttcattttcgacatccgcactcgccctcacagcttctcctccacctccggcaccaaggacctccagatggtcagcctcacgctccgcgttctgtcgcgacccgacgtcgaacacctcccggacatcttcacctccctcggcctcgagtacgacgagaaggtcctcccatccatcggcaacgaggtgctcaaggccgtcgtcgcgcagttcaacgccgaccagctcctcaccgagcgtccccacgtctccgcgctcgtccgcgaatcgctcaccaagcgcgcccgcgagttcaacatcgtcctcgacgacgtcgccatcacccacctagcctacgggcaggagttcgcgcaggccgtcgagaagaagcaggttgcgcagcaggaggccgagcgctccaggttcctcgtcgcgcgcgctgagcaggagaggcgcgctgctatcgtccgcgccgagggggagagcgagtccgcgcgccttatctccgaggccacgaccactgcgggcaacggcctgatcgagctcaggaggatcgaggcggccaaggagatcgcaagcgttctgtcgcgcacgcccaacgtctcctacatccccgccggcgacaatggccagatgctgctcgggcttaacgccgcccggtgaatggatcgtctttttccgcgcttcagaatgtcaggacgagatgaaactgttcttggtggggaggagggaaagtttgtttctgtagagcttctagaagtgttgctaagagtctgttttttattaatgaaatggctgggaagtctgtttgtgctcaatagagtgtttcttctgtgaaataaaactggtctatgagatggtgtggcgagctctttgctttgctttgctctctgcaattcagttgtatcccatacatgctgtctttatctctgaaataaaacttttcgagcg

SEQ ID NO: 23100 - protein, 282 aa, Zea mays subsp. mays
  misc_feature (1)..(282): Ceres Seq. ID no. 12411281
MAGGGQAAISFMTRMAKVAAGLGVAASAASTSFYTVDGGERAVIFDRVRGVLPRTMSEGTHLLVPILQKPFIFDIRTRPHSFSSTSGTKDLQMVSLTLRVLSRPDVEHLPDIFTSLGLEYDEKVLPSIGNEVLKAVVAQFNADQLLTERPHVSALVRESLTKRAREFNIVLDDVAITHLAYGQEFAQAVEKKQVAQQEAERSRFLVARAEQERRAAIVRAEGESESARLISEATTTAGNGLIELRRIEAAKEIASVLSRTPNVSYIPAGDNGQMLLGLNAAR

SEQ ID NO: 23101 - protein, 271 aa, Zea mays subsp. mays
  misc_feature (1)..(271): Ceres Seq. ID no. 12411282
MTRMAKVAAGLGVAASAASTSFYTVDGGERAVIFDRVRGVLPRTMSEGTHLLVPILQKPFIFDIRTRPHSFSSTSGTKDLQMVSLTLRVLSRPDVEHLPDIFTSLGLEYDEKVLPSIGNEVLKAVVAQFNADQLLTERPHVSALVRESLTKRAREFNIVLDDVAITHLAYGQEFAQAVEKKQVAQQEAERSRFLVARAEQERRAAIVRAEGESESARLISEATTTAGNGLIELRRIEAAKEIASVLSRTPNVSYIPAGDNGQMLLGLNAAR

SEQ ID NO: 23102 - protein, 268 aa, Zea mays subsp. mays
  misc_feature (1)..(268): Ceres Seq. ID no. 12411283
MAKVAAGLGVAASAASTSFYTVDGGERAVIFDRVRGVLPRTMSEGTHLLVPILQKPFIFDIRTRPHSFSSTSGTKDLQMVSLTLRVLSRPDVEHLPDIFTSLGLEYDEKVLPSIGNEVLKAVVAQFNADQLLTERPHVSALVRESLTKRAREFNIVLDDVAITHLAYGQEFAQAVEKKQVAQQEAERSRFLVARAEQERRAAIVRAEGESESARLISEATTTAGNGLIELRRIEAAKEIASVLSRTPNVSYIPAGDNGQMLLGLNAAR

SEQ ID NO: 23103 - DNA, 1411 bp, Zea mays subsp. mays
  misc_feature (1)..(1411): Ceres Seq. ID no. 12411284
agacgctccagaatccaaatacctttccatcgattcttggcatcgcccttctctctaaaccccaactcctcgactcgagcaatccctaggtctccgcgcgaggcggtggcggctgtgaggggattttgattgatttggctcgagatggcggaggacaaggtgcggcggatcttcgtcggcgggttgtcctggaagaccacggagcgcacgctcgagcgcaccttcggtcagtacggcaaggtcatcgaggcacaggttgtagtgaaaaaggaaacaggccgctcgaggggatttggatttgtcacattctcagaacctcgggctgtggatgctgccatttgtggaatgcataatgcggaactggatggccgtaatattactgtgaacaaagctaaacctaggattgctgactatggctatggtggtggtggtggtggttactcgtctggtgctagaggtggatatcgtagtggcggtgatgtagttccagcagtgagtgatgaatgtttcaaatgcggcctttctggacattgggctcgtcaatgcccttattcagatggcagtggtagaactggaagatattctcccgcttcaaggtatggtggtggcactgggagacatggtgaccgctttggaggatcagatcgttttgctcgctatgatgatgaccgatatgatggtggccgctatgtagacagcagggatacttattatggtgctgggcgagatcgttatgctaacgatcgccatccgccagcaacagacctctattctggtgacaggtacagtggtgcagatcgttacgcgtccagtggctttgccgggcgagatcgttatgctaacgatcgccatccgccagcaacagaccgctattctggtgacaggtacagtggtgcacgtcgttccgcgtccagtggctttgccagagaaaggagctatgagagagatggaggcaggtccactggaacttactaccgtgatgttccgaggggcactggtggctatggcagaggtggttcacgtggcggtagcggcggcggcggcgggcctgctcgctttggtgggagttaccgagataggcctgctccgtatgaccgtcctagcaggggcggggcagctcgtgcttatgatgatcgttactgaagaatgtttccttgaagtagaacagagatgttggtgtattttagttttgcatcagtatttgcacttgccagcttgatccttcaattctatgctattcagcagcgcagtttgttttagtggtctctgaagacaatggttcagtatgtcagttactatcagtatgttggtaccataatctgtaggcagtgatcctggtccatttgacatgtttgtgtaattgcttggagtctgcactaaataatgaactaatcgcagcatgtgatctttg

SEQ ID NO: 23104 - protein, 332 aa, Zea mays subsp. mays
  misc_feature (1)..(332): Ceres Seq. ID no. 12411285
MAEDKVRRIFVGGLSWKTTERTLERTFGQYGKVIEAQVVVKKETGRSRGFGFVTFSEPRAVDAAICGMHNAELDGRNITVNKAKPRIADYGYGGGGGGYSSGARGGYRSGGDVVPAVSDECFKCGLSGHWARQCPYSDGSGRTGRYSPASRYGGGTGRHGDRFGGSDRFARYDDDRYDGGRYVDSRDTYYGAGRDRYANDRHPPATDLYSGDRYSGADRYASSGFAGRDRYANDRHPPATDRYSGDRYSGARRSASSGFARERSYERDGGRSTGTYYRDVPRGTGGYGRGGSRGGSGGGGGPARFGGSYRDRPAPYDRPSRGGAARAYDDRY

SEQ ID NO: 23105 - protein, 265 aa, Zea mays subsp. mays
  misc_feature (1)..(265): Ceres Seq. ID no. 12411286
MHNAELDGRNITVNKAKPRIADYGYGGGGGGYSSGARGGYRSGGDVVPAVSDECFKCGLSGHWARQCPYSDGSGRTGRYSPASRYGGGTGRHGDRFGGSDRFARYDDDRYDGGRYVDSRDTYYGAGRDRYANDRHPPATDLYSGDRYSGADRYASSGFAGRDRYANDRHPPATDRYSGDRYSGARRSASSGFARERSYERDGGRSTGTYYRDVPRGTGGYGRGGSRGGSGGGGGPARFGGSYRDRPAPYDRPSRGGAARAYDDRY

SEQ ID NO: 23106 - protein, 168 aa, Zea mays subsp. mays
  misc_feature (1)..(168): Ceres Seq. ID no. 12411287
MVLGEIVMLTIAIRQQQTSILVTGTVVQIVTRPVALPGEIVMLTIAIRQQQTAILVTGTVVHVVPRPVALPEKGAMREMEAGPLELTTVMFRGALVAMAEVVHVAVAAAAAGLLALVGVTEIGLLRMTVLAGAGQLVLMMIVTEECFLEVEQRCWCILVLHQYLHLPA

SEQ ID NO: 23107 - DNA, 1277 bp, Zea mays subsp. mays
  misc_feature (1)..(1277): Ceres Seq. ID no. 12411307
ggtttgactattttgcccccgccgcgtgagttgccaaacgattcccgagtcttctgacactccttgccgccgccgccgcctgtcgccgacggcgatagatttggggatggatttgggctcgtgctacctcggtgggaacgccgacgcggtggagttctgcccgcaccgccacgttcctccacgtgctggccgccgccacctacacgctgcaggagcaggagcgcgaccgggcgggcagcatatccctcttctcagttgacgttgcctcggaggacgcgtcccggaggctccagctgctgcatactgtggagaccgccggcatcttcgatatgaagtggagccccaagtcgccgctgctcgcgcaggccgacgcccacggccgcatcgcgctccggcgcttggagcaggaggacggctcggacacaggcatcctcctcacagatgtctctgctgaagatatttcttcttcaatgtgcttatatgtggactggaaccaaactgcggagtctctgtctgttggattatcagatggctcactgtctctggtttcagtgagagaggaccggctggagatatcagaacagtggactgcacatcagttcgaagtctggacatgctattttgatcgtacaagtccacacttgctgtacagtggatcagatgactgttgtttcagttgctgggacttgagagaaagcccaccaaacattgtttttcaaaacaaaaaatctcataagatgggtgtctgttgtattacacagaatccgttggaggggaacatgctacttactgggagttatgatgaatttctcagagtttgggacatgagatttatggcaaaacctgtcaatgaaaagttgataaatctaggaggtggtgtgtggaggatgaagtatcatcctagtattgcagatgttgtattggctgcgtgcatgcacaatgggtttgccattgtaaaagtaggttctggggatgctacggtaatggaaacatattgcaagcatgagtccttagcatacggtgcagattggcagaaaagtgaagaggtggagcaaaatggaaattcttcagttgttgctacttgttcgttttatgatcgcctcctccgcgtgtggcaaccagagaacctagctgagctttaaagacttaaagcttttttgaattgaattcaagcatgactaggccatgaatctatttcctgaatgaaccagtataatttcattcaggtagttctttgaacttatgcttacatattcaagacttcaaagtcatgcatg

SEQ ID NO: 23108 - protein, 270 aa, Zea mays subsp. mays
  misc_feature (1)..(270): Ceres Seq. ID no. 12411308
MKWSPKSPLLAQADAHGRIALRRLEQEDGSDTGILLTDVSAEDISSSMCLYVDWNQTAESLSVGLSDGSLSLVSVREDRLEISEQWTAHQFEVWTCYFDRTSPHLLYSGSDDCCFSCWDLRESPPNIVFQNKKSHKMGVCCITQNPLEGNMLLTGSYDEFLRVWDMRFMAKPVNEKLINLGGGVWRMKYHPSIADVVLAACMHNGFAIVKVGSGDATVMETYCKHESLAYGADWQKSEEVEQNGNSSVVATCSFYDRLLRVWQPENLAEL

SEQ ID NO: 23109 - protein, 223 aa, Zea mays subsp. mays
  misc_feature (1)..(223): Ceres Seq. ID no. 12411309
MCLYVDWNQTAESLSVGLSDGSLSLVSVREDRLEISEQWTAHQFEVWTCYFDRTSPHLLYSGSDDCCFSCWDLRESPPNIVFQNKKSHKMGVCCITQNPLEGNMLLTGSYDEFLRVWDMRFMAKPVNEKLINLGGGVWRMKYHPSIADVVLAACMHNGFAIVKVGSGDATVMETYCKHESLAYGADWQKSEEVEQNGNSSVVATCSFYDRLLRVWQPENLAEL

SEQ ID NO: 23110 - DNA, 1647 bp, Zea mays subsp. mays
  misc_feature (1)..(1647): Ceres Seq. ID no. 12411310
aaaaacacctgtggcagcggccgcgctgcttgcctcgccttgctctcggttcgtggggcatggcggcttcgccggcttgtgctccggggctcatctccggccccaccctccctcccctgcccgttgccttccgctgctactgggcccaaaagccctcctccgcgtcgacctcctccaggcgcccgtgccgcaggcggttcgttcccgttgcagctgcctccacccgcacctcctctgcggctgctcggggcctcgacgccgacgacttccgccacccgctcgacaagcagaacactcttctgctgagagcaattccagggctcaacgacgtgggcaaagctttgctaggacccgtctcggagcaagttatggtactccagaacattggaacatcagttctcgtctccccgaaccagcttccagatctccaccaactgctggttgaggctgcgaagctcttgaacaccgaagctcctgacttgtacataaggcagaatcctgttccaaatgcctacaccttagcaatcaacggcaaaaaaccattcattgtcgttcacacaagccttgtggagctgcttactccaagggaattgcaggctgttttggctcatgagctgggtcacctcaagtgcgatcatggtgtttggctcacttttgccaatatactcacaatgggagcatacactgtccctggttttggcatggttgctggcttcctggaagagcagctatacagatggctacgagctgcagagctgacttgtgacagggcagctcttcttgtggtgcaagatccgaaggtagtcatctctgttctgatgaaattggccggaggatgcccatctcttgccgacaagctaaatgtggatgccttcctggagcaagctcgttcgtacgacaaggctgcatcgaacccagttgggtggtacatccggaatgcacaaaccagagagctttcacaccctttgcctgtgatgcgagccagagagatcgatgagtggtcaagaagccaggagtacaaaaccgtaatgcaaaaaatgcttaagatggggctgaacagagtatagttagtgatgacacatacgaagaggtctgtacacggaatccatcatgtttctttgcaaggatttagctttagatcatgggcctgtttggttcagcttttttctaaccagcttttctgaaaatctggctgtggggagaatctgagtatcattacgattacatatgaaggaagataaagttgttcatagggctcaggatctagaaagtgacagattcctactattacaacgactgaaccgattatgtgtttatgttgattttggatggtttttgtcctcaacgaattttatagaagttggctgaaaagctgagcgtttggcagtctgcagcagcttttggtggtcagaagctaccagaagccgaaacaaacaggccccatgactgtcctttcctgtatatctgatcatgaatttgtgattttctcctgggtggctgggcaccgttttttttcaggactgtagagtctgtatatggagaatgtatgtatatggaagggaatgtctgtatatggagaaggctggtgtttctgaaaaaaaaacagatacaaacatagacatactgtatatatttgcagttgaattt

SEQ ID NO: 23111 - protein, 354 aa, Zea mays subsp. mays
  misc_feature (1)..(354): Ceres Seq. ID no. 12411311
KHLWQRPRCLPRLALGSWGMAASPACAPGLISGPTLPPLPVAFRCYWAQKPSSASTSSRRPCRRRFVPVAAASTRTSSAAARGLDADDFRHPLDKQNTLLLRAIPGLNDVGKALLGPVSEQVMVLQNIGTSVLVSPNQLPDLHQLLVEAAKLLNTEAPDLYIRQNPVPNAYTLAINGKKPFIVVHTSLVELLTPRELQAVLAHELGHLKCDHGVWLTFANILTMGAYTVPGFGMVAGFLEEQLYRWLRAAELTCDRAALLVVQDPKVVISVLMKLAGGCPSLADKLNVDAFLEQARSYDKAASNPVGWYIRNAQTRELSHPLPVMRAREIDEWSRSQEYKTVMQKMLKMGLNRV

SEQ ID NO: 23112 - protein, 335 aa, Zea mays subsp. mays
  misc_feature (1)..(335): Ceres Seq. ID no. 12411312
MAASPACAPGLISGPTLPPLPVAFRCYWAQKPSSASTSSRRPCRRRFVPVAAASTRTSSAAARGLDADDFRHPLDKQNTLLLRAIPGLNDVGKALLGPVSEQVMVLQNIGTSVLVSPNQLPDLHQLLVEAAKLLNTEAPDLYIRQNPVPNAYTLAINGKKPFIVVHTSLVELLTPRELQAVLAHELGHLKCDHGVWLTFANILTMGAYTVPGFGMVAGFLEEQLYRWLRAAELTCDRAALLVVQDPKVVISVLMKLAGGCPSLADKLNVDAFLEQARSYDKAASNPVGWYIRNAQTRELSHPLPVMRAREIDEWSRSQEYKTVMQKMLKMGLNRV

SEQ ID NO: 23113 - protein, 232 aa, Zea mays subsp. mays
  misc_feature (1)..(232): Ceres Seq. ID no. 12411313
MVLQNIGTSVLVSPNQLPDLHQLLVEAAKLLNTEAPDLYIRQNPVPNAYTLAINGKKPFIVVHTSLVELLTPRELQAVLAHELGHLKCDHGVWLTFANILTMGAYTVPGFGMVAGFLEEQLYRWLRAAELTCDRAALLVVQDPKVVISVLMKLAGGCPSLADKLNVDAFLEQARSYDKAASNPVGWYIRNAQTRELSHPLPVMRAREIDEWSRSQEYKTVMQKMLKMGLNRV

SEQ ID NO: 23114 - DNA, 1248 bp, Zea mays subsp. mays
  misc_feature (1)..(1248): Ceres Seq. ID no. 12411333
gagccaattgagtggcagccagaaaaacccagagcgcgagcagcgagcgagcgcgggctcctgtgtgcagtgtgtctgcgctagagggcgaagggcacggaccgccttcgtcaataattgcggtacgaacggggcaaatccgtcgtttaaagaggtcgctgatagcgcctgctggtggcgagagagagaaagcagcagaatcgctgagggatcgtcgatccggagaggcaaaaaagccgagagatcaggcagggcaccatggggcgcgggaaggtggtgctgcagcggatcgagaacaagatcagccggcaggtgaccttcgccaagcgccggaacggcctgctcaagaaggcgtacgagctctccatcctctgcgacgccgaggtcgcgctcgtcctcttctcccacgccggccgcctctaccagttctcatcctcctccaatctgcttaagactctagagcggtaccagaggtacatctatggcttcagccgatgctgcagtgccatctagcgatcagatgcagaataactatcaagaatatgtgaagctgaaggcacgagttgaggttttacagcactcacaaaggaatcttcttggtgaagatctggccctacttagcccaagtgaacttgaccagcttgagaatcaagtagacaagaccttgaagcaaataagatcaagaaagactcaagtgttacttgatgaactttgtgacttaaagagaaaggaacaaatgctgcaagatgcaaacagggttctgaaaaggaagctgggcgagtttgaggcagaggcggcttctcccccgcagttagcgtggcaaggcgaaggcggcatgttgtcccatgaccctccacagccagaacacttcttccaggctctggagagcaacccatgtctgcaacctacataccatacgatggacatgaaccagcagccagtgccagcgccgggcggctgctatcctgcatggatgtcttagccagtgcttcattccattgccttgagaagtgtcctgaccttcacagatccctacgagctttattactgcttttgcctgcccctttgctgcttgcggtgcttactgaactgtccaaatgaccacatggtcatatataggttattgctgtctttatcttatgttgatcacggcctgctcagctgctttagcgccatgcaaaatggcttgggcgatgcacgcttgaatgggtcgaactgcttatgttttgggagtataaatcacttagc

SEQ ID NO: 23115 - protein, 166 aa, Zea mays subsp. mays
  misc_feature (1)..(166): Ceres Seq. ID no. 12411334
MASADAAVPSSDQMQNNYQEYVKLKARVEVLQHSQRNLLGEDLALLSPSELDQLENQVDKTLKQIRSRKTQVLLDELCDLKRKEQMLQDANRVLKRKLGEFEAEAASPPQLAWQGEGGMLSHDPPQPEHFFQALESNPCLQPTYHTMDMNQQPVPAPGGCYPAWMS

SEQ ID NO: 23116 - protein, 153 aa, Zea mays subsp. mays
  misc_feature (1)..(153): Ceres Seq. ID no. 12411335
MQNNYQEYVKLKARVEVLQHSQRNLLGEDLALLSPSELDQLENQVDKTLKQIRSRKTQVLLDELCDLKRKEQMLQDANRVLKRKLGEFEAEAASPPQLAWQGEGGMLSHDPPQPEHFFQALESNPCLQPTYHTMDMNQQPVPAPGGCYPAWMS

SEQ ID NO: 23117 - protein, 104 aa, Zea mays subsp. mays
  misc_feature (1)..(104): Ceres Seq. ID no. 12411336
SQLSGSQKNPEREQRASAGSCVQCVCARGRRARTAFVNNCGTNGANPSFKEVADSACWWRERESSRIAEGSSIRRGKKAERSGRAPWGAGRWCCSGSRTRSAGR

SEQ ID NO: 23118 - DNA, 1988 bp, Zea mays subsp. mays
  misc_feature (1)..(1988): Ceres Seq. ID no. 12411341
aaactagtgtgtgaaatatctcctacaatatatatccggctctctctgtgtgcgtgctctaactgcagcggagcctcacagttgttcgtgtgctgtgtatttgtcactggtggtgctgtgcagaccaagctactgcgggagggagaagggtgtgtgccggcccgccgccaagcactgctacccggccggcggccatggaggtgagctccgtggagttcggtcatcacgcggcggccgcctcaaagtgctttgacgacgacggtcgcctcaagcgcacagggacgatgtggacggcgagcgcgcacattatcacggccgtgatagggtccggggtgctgtcgctcgcgtgggccatcgcgcagctcggctgggtggcaggccccaccgtcatgctgctcttctccttcgtcacctactacacatcggccctactcgccgactgctaccgctccggcgacgcctgcaccggcaagcgcaactacacgtacatggacgcggttaacgccaatctcagtggcgtcaaggtctggttctgcggcttcctgcagtacgccaacatcgtcggagtcgccataggctacaccattgccgcctctattagcatgctggcgatccagagggcgaactgcttccacgtggaggggcacggggacccctgcaacatctccagcacgccctacatgatcatcttcggcgtcgtgcagattttcttctcgcagatcccggacttcgaccagatatcgtggctctccatcctcgccgccgtcatgtccttcacctactccaccatcggcctgggcctgggcatcgcgcaggtggtgtccaacaagggcgtgcagggcagcctgacggggatcagcgtcggcgcggtcaccccggtcgacaagatgtggcgcagcctgcaggcgttcggcgacatcgccttcgcctactcctactccctcatcctcatcgagatccaggacaccatccgcgcgccgccgccgtccgagtccaaggtcatgcggcgcgccaccgtcgtcagcgtggccgtcaccacgttcttctacatgctgtgcgggtgcatggggtacgccgcgttcggggacaacgcccccgggaacctcctcacgggcttcggcttctacgagcccttctggctcctcgacgtcgccaacgccgccatcgccgtgcacctcgtcggcgcctaccaggtctactgccagcccctgttcgccttcgtcgagaagtgggcgcgccagaggtggcccaagtcccgctacatcacgggcgaggtcgacgtcccgctcccgctcgggaccgccggcggccggtgctacaagctcagcctgttccggctgacgtggcggacggcgttcgtggtggccacgacggtggtgtccatgctgctgcccttcttcaacgacgtggtcgggctcctgggcgcgctggggttctggccgctcaccgtctacttccccgtggagatgtacatcgtgcagaagaaggtgcccaggtggagcacgcggtgggtgtgcctgcagctgctcagcgtcgcctgcctcgtcatcaccgtcgcctccgccgcaggctccgttgccgggatcgtctctgacctcaaagtgtacaaaccgttcgtcaccacctcctgatggaccggcctagcttccgtgcagttcaaaacacacatacgcacgaacagatcattaattggcgcctagtatatatgtgcagtctttaattaaattaactaggcattaatcgatcgatcaccactacgcgtcgttctagtgatgcgcgtagcttgcatcaccgctcgctgatttaatttccattgtttttctttgatgatctggttagccgaaatggctagtgaattaagagaaaacaaatagtagcagtactgtgtgagtaatcccaagtcaaatacgttattgaagttgtcggcggtacaaaacgcttgtaaaatgtttgtgtttcaattaatcaagaagaattgtacgtgtttc

SEQ ID NO: 23119 - protein, 478 aa, Zea mays subsp. mays
  misc_feature (1)..(478): Ceres Seq. ID no. 12411342
MEVSSVEFGHHAAAASKCFDDDGRLKRTGTMWTASAHIITAVIGSGVLSLAWAIAQLGWVAGPTVMLLFSFVTYYTSALLADCYRSGDACTGKRNYTYMDAVNANLSGVKVWFCGFLQYANIVGVAIGYTIAASISMLAIQRANCFHVEGHGDPCNISSTPYMIIFGVVQIFFSQIPDFDQISWLSILAAVMSFTYSTIGLGLGIAQVVSNKGVQGSLTGISVGAVTPVDKMWRSLQAFGDIAFAYSYSLILIEIQDTIRAPPPSESKVMRRATVVSVAVTTFFYMLCGCMGYAAFGDNAPGNLLTGFGFYEPFWLLDVANAAIAVHLVGAYQVYCQPLFAFVEKWARQRWPKSRYITGEVDVPLPLGTAGGRCYKLSLFRLTWRTAFVVATTVVSMLLPFFNDVVGLLGALGFWPLTVYFPVEMYIVQKKVPRWSTRWVCLQLLSVACLVITVASAAGSVAGIVSDLKVYKPFVTTS

SEQ ID NO: 23120 - protein, 448 aa, Zea mays subsp. mays
  misc_feature (1)..(448): Ceres Seq. ID no. 12411343
MWTASAHIITAVIGSGVLSLAWAIAQLGWVAGPTVMLLFSFVTYYTSALLADCYRSGDACTGKRNYTYMDAVNANLSGVKVWFCGFLQYANIVGVAIGYTIAASISMLAIQRANCFHVEGHGDPCNISSTPYMIIFGVVQIFFSQIPDFDQISWLSILAAVMSFTYSTIGLGLGIAQVVSNKGVQGSLTGISVGAVTPVDKMWRSLQAFGDIAFAYSYSLILIEIQDTIRAPPPSESKVMRRATVVSVAVTTFFYMLCGCMGYAAFGDNAPGNLLTGFGFYEPFWLLDVANAAIAVHLVGAYQVYCQPLFAFVEKWARQRWPKSRYITGEVDVPLPLGTAGGRCYKLSLFRLTWRTAFVVATTVVSMLLPFFNDVVGLLGALGFWPLTVYFPVEMYIVQKKVPRWSTRWVCLQLLSVACLVITVASAAGSVAGIVSDLKVYKPFVTTS

SEQ ID NO: 23121 - protein, 413 aa, Zea mays subsp. mays
  misc_feature (1)..(413): Ceres Seq. ID no. 12411344
MLLFSFVTYYTSALLADCYRSGDACTGKRNYTYMDAVNANLSGVKVWFCGFLQYANIVGVAIGYTIAASISMLAIQRANCFHVEGHGDPCNISSTPYMIIFGVVQIFFSQIPDFDQISWLSILAAVMSFTYSTIGLGLGIAQVVSNKGVQGSLTGISVGAVTPVDKMWRSLQAFGDIAFAYSYSLILIEIQDTIRAPPPSESKVMRRATVVSVAVTTFFYMLCGCMGYAAFGDNAPGNLLTGFGFYEPFWLLDVANAAIAVHLVGAYQVYCQPLFAFVEKWARQRWPKSRYITGEVDVPLPLGTAGGRCYKLSLFRLTWRTAFVVATTVVSMLLPFFNDVVGLLGALGFWPLTVYFPVEMYIVQKKVPRWSTRWVCLQLLSVACLVITVASAAGSVAGIVSDLKVYKPFVTTS

SEQ ID NO: 23122 - DNA, 1806 bp, Zea mays subsp. mays
  misc_feature (1)..(1806): Ceres Seq. ID no. 12411349
cttcctctctgttctctctctctctctcttcctccagtagtccagtcctcctccttcgaatcccaaggtggcggccagagagtagagatagagagagagtgggactatagagacgttaagaacatcctaatcgaaaaccgttgctgcttgttattattaacgccgccgccgcctcctgcattcgtatggtccgcgtcgtcacggggctcctgcgttcgtaaggcaccgccgcagcgtctcggctggatcaacaggccggccgatccgtcttctccccctcctcctgcgggtcggcgtttggggatcatggcggcgcgggcggctgacgagaacaggagaccggcggcagggaagcccgcgccaggcgtccgagacatggcgagccggcgcgcgctcacggacatcaagaacctcgtcggggctgccccgtacccctgcgccatcgccaagaagcccatgctgcagaagagcagaagggacgaaaagcagccagcgttggcaagcagccggcccatgacaaggaaattcgccgcctccttggcgagcaagggccaacctgaatgtcagccgatcgtagctgatccagaacccgaattttgtcaacagaaggaatcagtaggcgatggcaccgttgatattgacgtggaactctacgagctggtcgacgatagtgatagtgacatcgacatgggtgcgacagagaacaaggacattatgaacgaagatgaattgctcatggatattgacagtgcagactcggggaacccgcttgctgcaacagaatatgttgaagagctttacaccttttacagagaaaatgaggctaagagttgtgtaaggccagattacatgtccagccaacaagacataaactcaaagatgagagcaattctgattgactggctgattgaggttcactacaagtttgaactgatggatgagacgctctttcttatggtaaacataatagatagattcttggaaaaggaagtggttccaaggaagaagctacaactggttggagtcacagctatgctgctcgcttgtaaatatgaggaggtatctgttccagttgttgaggaccttgtgctgatatctgaccgtgcctacacaaaagggcaaattctagaaatggaaaagttgattctgaacacgctgcagttcaacatgtctgttccaacaccttatgtcttcatgaagaggtttctgaaagctgcagatgcagataaacagcttgagctagcgtcatttttcatgctggagctctgcttggtagaataccaaatgctggattatcggccttcgcatctggctgctgctgcggtttatactgcgcagtgtgctatcaatcgttgccagcactggacaaaggtctgcgagtctcatagcagatacactagcgaccaactcctggagtgctcgaggatgatggtagattttcaccagaaggctggaaccagtaagctcactggcgtgcacaggaagtacagtacctacaagttcggttgcgtggccaagattttgcctgcgcagttcctgctggagtcgggagggacaccgcctccttcaggtgcaaactagttgaatcgacctattcaactgggtggattttttaaagtttttagaatactccatgaacaagatgcagaaaacatcgtgttgatgttgcccaaaagtgcatcgaatttctttggagagttatgattaacaactttttttttatctatgttgaatgacgagtgacggtcggtcacgttgtgcttgtgcagttatactgcggctaataacaaactgtccagttattct

SEQ ID NO: 23123 - protein, 526 aa, Zea mays subsp. mays
  misc_feature (1)..(526): Ceres Seq. ID no. 12411350
LPLCSLSLSLPPVVQSSSFESQGGGQRVEIEREWDYRDVKNILIENRCCLLLLTPPPPPAFVWSASSRGSCVRKAPPQRLGWINRPADPSSPPPPAGRRLGIMAARAADENRRPAAGKPAPGVRDMASRRALTDIKNLVGAAPYPCAIAKKPMLQKSRRDEKQPALASSRPMTRKFAASLASKGQPECQPIVADPEPEFCQQKESVGDGTVDIDVELYELVDDSDSDIDMGATENKDIMNEDELLMDIDSADSGNPLAATEYVEELYTFYRENEAKSCVRPDYMSSQQDINSKMRAILIDWLIEVHYKFELMDETLFLMVNIIDRFLEKEVVPRKKLQLVGVTAMLLACKYEEVSVPVVEDLVLISDRAYTKGQILEMEKLILNTLQFNMSVPTPYVFMKRFLKAADADKQLELASFFMLELCLVEYQMLDYRPSHLAAAAVYTAQCAINRCQHWTKVCESHSRYTSDQLLECSRMMVDFHQKAGTSKLTGVHRKYSTYKFGCVAKILPAQFLLESGGTPPPSGAN

SEQ ID NO: 23124 - protein, 424 aa, Zea mays subsp. mays
  misc_feature (1)..(424): Ceres Seq. ID no. 12411351
MAARAADENRRPAAGKPAPGVRDMASRRALTDIKNLVGAAPYPCAIAKKPMLQKSRRDEKQPALASSRPMTRKFAASLASKGQPECQPIVADPEPEFCQQKESVGDGTVDIDVELYELVDDSDSDIDMGATENKDIMNEDELLMDIDSADSGNPLAATEYVEELYTFYRENEAKSCVRPDYMSSQQDINSKMRAILIDWLIEVHYKFELMDETLFLMVNIIDRFLEKEVVPRKKLQLVGVTAMLLACKYEEVSVPVVEDLVLISDRAYTKGQILEMEKLILNTLQFNMSVPTPYVFMKRFLKAADADKQLELASFFMLELCLVEYQMLDYRPSHLAAAAVYTAQCAINRCQHWTKVCESHSRYTSDQLLECSRMMVDFHQKAGTSKLTGVHRKYSTYKFGCVAKILPAQFLLESGGTPPPSGAN

SEQ ID NO: 23125 - protein, 401 aa, Zea mays subsp. mays
  misc_feature (1)..(401): Ceres Seq. ID no. 12411352
MASRRALTDIKNLVGAAPYPCAIAKKPMLQKSRRDEKQPALASSRPMTRKFAASLASKGQPECQPIVADPEPEFCQQKESVGDGTVDIDVELYELVDDSDSDIDMGATENKDIMNEDELLMDIDSADSGNPLAATEYVEELYTFYRENEAKSCVRPDYMSSQQDINSKMRAILIDWLIEVHYKFELMDETLFLMVNIIDRFLEKEVVPRKKLQLVGVTAMLLACKYEEVSVPVVEDLVLISDRAYTKGQILEMEKLILNTLQFNMSVPTPYVFMKRFLKAADADKQLELASFFMLELCLVEYQMLDYRPSHLAAAAVYTAQCAINRCQHWTKVCESHSRYTSDQLLECSRMMVDFHQKAGTSKLTGVHRKYSTYKFGCVAKILPAQFLLESGGTPPPSGAN

SEQ ID NO: 23126 - DNA, 1260 bp, Zea mays subsp. mays
  misc_feature (1)..(1260): Ceres Seq. ID no. 12411385
gtattccttcagggaacggcttccatagcgctgaagcgaggcgtgccgcattgggttgttcgagagctcctagtgttgccctactacatgatggagggcgatctccccacgcccgcgaacgctagggttgttgccgtggtcaccggcggcaacaaggggatcgggctggaggtgtgccgcagctggcctgcagcggcgtcaccgtcgtcttgacagccagggacgacgcgaggggcgcggcggccgtggagaacctcagaggcctggggctctccgatgtcctcttccaccgactggacgttaccgacgctccgagcatcgctcgactcgctggtttcctcgagacccgtttcgggaagctagacatcctggtaaataatgccgcgattggcggggttgagtatgttcatgaccaagattgtggctcagtaacgagcgaggaaaaggcaaagttgagcggcatggacatggatcagaggcttggatggctgtgggagaattgccgggagacctacgacgatgcaaagacaggcctacgaacaaactactacggcacaaagcaagtaatcgagactttactgcctctactgcaagcctcctccgatgggaggatcgttaacgtctcctcccacttcggccagctaaggcttttccgaaacgaggagctgaagcgggagctgaacgacattgacaacctcaccccggagaggctggatggcctgctggacatgttcttaaatgacttggaggccggcgaggtggagtcgtcgaacggctggccgatgtatttctcggcgtacaaggtggccaaggcggccatgaacgcgtactcgaggatcctggcgaggcggcaccccgagctgcgcgtcaactgcgtgcaccccggctatgtcaggaccgacatgaccatacactcggggctgttgacaccggaggaaggtggcagcagggtggccatggtggcgctgctgccgggaggcgggccaaccggcgcgttctttgaagattttcaacagtcgtcgttcgtgtgatgttgaacatgcagctgcatctcatatgtattctatagatattatttatgtgaaagatgctacagtacgctccccctgcgtttacattcagcgcacctctgaactcttaaacttcaagtcttcaacgacaaatctagacatgatgctgcaaaacatttttaatgtctcctctttcaaaacacgagtttcgtgcgtcatgcacgaagcacaaagagttttttttctcttc

SEQ ID NO: 23127 - protein, 189 aa, Zea mays subsp. mays
  misc_feature (1)..(189): Ceres Seq. ID no. 12411386
MDMDQRLGWLWENCRETYDDAKTGLRTNYYGTKQVIETLLPLLQASSDGRIVNVSSHFGQLRLFRNEELKRELNDIDNLTPERLDGLLDMFLNDLEAGEVESSNGWPMYFSAYKVAKAAMNAYSRILARRHPELRVNCVHPGYVRTDMTIHSGLLTPEEGGSRVAMVALLPGGGPTGAFFEDFQQSSFV

SEQ ID NO: 23128 - protein, 187 aa, Zea mays subsp. mays
  misc_feature (1)..(187): Ceres Seq. ID no. 12411387
MDQRLGWLWENCRETYDDAKTGLRTNYYGTKQVIETLLPLLQASSDGRIVNVSSHFGQLRLFRNEELKRELNDIDNLTPERLDGLLDMFLNDLEAGEVESSNGWPMYFSAYKVAKAAMNAYSRILARRHPELRVNCVHPGYVRTDMTIHSGLLTPEEGGSRVAMVALLPGGGPTGAFFEDFQQSSFV

SEQ ID NO: 23129 - protein, 100 aa, Zea mays subsp. mays
  misc_feature (1)..(100): Ceres Seq. ID no. 12411388
MFLNDLEAGEVESSNGWPMYFSAYKVAKAAMNAYSRILARRHPELRVNCVHPGYVRTDMTIHSGLLTPEEGGSRVAMVALLPGGGPTGAFFEDFQQSSFV

SEQ ID NO: 23130 - DNA, 1481 bp, Zea mays subsp. mays
  misc_feature (1)..(1481): Ceres Seq. ID no. 12411397
accaccacccaccagtccaccaccactgctcgcactcactccaccgctgcccacttcttgtttgtattgtatccagactccagaggaagccgagagggccaatgaggcaaggcatgagctccccttccgccgccgcggcgctcgtgctcctcctggccctgctcgccggaggccagtgccgagaggcccagctcgacgccgcggacgccggcaccggcacggagaactacaccgccagcgacgccgccgtgtactggggcccctggcagagggcccgggccacctggtacggccagcccaacggcgccggccccgacgacaacggtggcgcgtgcggattcaagcacaccaaccagtaccccttcatgtccatgggctcctgcggcaaccagccattgttcaaggacggcaagggctgcggctcctgctacaagattcggtgcaggaaggacccgtcctgctccgggcggacggagacggtgatcatcaccgacatgaactactacccggtgtccaagtaccacttcgacctcagcggcactgcgttcggcaggctggccaagcccggcctcaacgacaagctccgccactccggcatcatcgacatcgagttcaccagggtgccgtgcgagttcccgggcctgaagatcgggttccacgtggaggagtactcgaaccccgtctacttcgcggtgctggtggagtacgaggacggcgacggcgacgtggtgcaggtggacctgatggagtccaagacggcgcgcggcccgccgacggggcggtggacgccgatgcgcgagtcctggggctccgtctggcgcatggacaccaaccaccgcatgcagccgcccttctccatccgcatccgcaacgagtccggcaagacgctcgtcgccaacaacgtcatcccggccaactggcgccccaacaccttctaccgctccttcgtccagtacagctaaccgatcgggatccgtgccctgcccgcaattggagctggctggctggggcgctactcggctcggtcaccatcgtctacagtactatactatgctctactaccactagactgctgctgttactactagtctactaccaccaagtacggcggaacggaacagctagtcgtcgtcggcggccttgggaggggaggtgtctccggtcaccgtgccgttgcagttgtatcgtgatcatggtcctgggagttgttgcatccggggcgcgctttttaggtcaggcgtcgtgtgcgatgtttgtggggtcaggctggcatgtcatgccgtgcgtgaccctgattgcgagccggcaagcaagaagacaaaaaaactaaagccgtgtgggaaaatggaggaggcaggcgtacaagctacgctctcccgcccactgttgcttttataatttatcatcatcatcatcttcattccgatcggtgattaatcgaaaagtatattgtaatgtataaacgccattttcctttcgtc

SEQ ID NO: 23131 - protein, 442 aa, Zea mays subsp. mays
  misc_feature (1)..(442): Ceres Seq. ID no. 12411398
PPPTSPPPLLALTPPLPTSCLYCIQTPEEAERANEARHELPFRRRGARAPPGPARRRPVPRGPARRRGRRHRHGELHRQRRRRVLGPLAEGPGHLVRPAQRRRPRRQRWRVRIQAHQPVPLHVHGLLRQPAIVQGRQGLRLLLQDSVQEGPVLLRADGDGDHHRHELLPGVQVPLRPQRHCVRQAGQARPQRQAPPLRHHRHRVHQGAVRVPGPEDRVPRGGVLEPRLLRGAGGVRGRRRRRGAGGPDGVQDGARPADGAVDADARVLGLRLAHGHQPPHAAALLHPHPQRVRQDARRQQRHPGQLAPQHLLPLLRPVQLTDRDPCPARNWSWLAGALLGSVTIVYSTILCSTTTRLLLLLLVYYHQVRRNGTASRRRRPWEGRCLRSPCRCSCIVIMVLGVVASGARFLGQASCAMFVGSGWHVMPCVTLIASRQARRQKN

SEQ ID NO: 23132 - protein, 319 aa, Zea mays subsp. mays
  misc_feature (1)..(319): Ceres Seq. ID no. 12411399
HHPPVHHHCSHSLHRCPLLVCIVSRLQRKPRGPMRQGMSSPSAAAALVLLLALLAGGQCREAQLDAADAGTGTENYTASDAAVYWGPWQRARATWYGQPNGAGPDDNGGACGFKHTNQYPFMSMGSCGNQPLFKDGKGCGSCYKIRCRKDPSCSGRTETVIITDMNYYPVSKYHFDLSGTAFGRLAKPGLNDKLRHSGIIDIEFTRVPCEFPGLKIGFHVEEYSNPVYFAVLVEYEDGDGDVVQVDLMESKTARGPPTGRWTPMRESWGSVWRMDTNHRMQPPFSIRIRNESGKTLVANNVIPANWRPNTFYRSFVQYS

SEQ ID NO: 23133 - protein, 286 aa, Zea mays subsp. mays
  misc_feature (1)..(286): Ceres Seq. ID no. 12411400
MRQGMSSPSAAAALVLLLALLAGGQCREAQLDAADAGTGTENYTASDAAVYWGPWQRARATWYGQPNGAGPDDNGGACGFKHTNQYPFMSMGSCGNQPLFKDGKGCGSCYKIRCRKDPSCSGRTETVIITDMNYYPVSKYHFDLSGTAFGRLAKPGLNDKLRHSGIIDIEFTRVPCEFPGLKIGFHVEEYSNPVYFAVLVEYEDGDGDVVQVDLMESKTARGPPTGRWTPMRESWGSVWRMDTNHRMQPPFSIRIRNESGKTLVANNVIPANWRPNTFYRSFVQYS

SEQ ID NO: 23134 - DNA, 1282 bp, Zea mays subsp. mays
  misc_feature (1)..(1282): Ceres Seq. ID no. 12411405
atctccgcgcattttatatgcaggcttgcgcctgtcacttctcccctgtccttgctccccctcgatcccgcatcagtgcgtcacattcaccgggaatggcaacgctcaaggtcccagccactgttcctcccgtcgccgatgactgcgaccagctgcgcaaagcattccaagggtggggcacgaacgaggcgctcatcatctccatcctcggccaccgcgacgccgcgcagcgccgcgccatccgccgcgcttacgccgaggcctacggcgaggagctcctccgctccatcacggacgagatctccggcgacttcgagagggccgtgatcctgtggacgctggacccagcggagcgcgacgcggtgctggccaacgaggcggcgcggaagtggaagcccgggaaccgtgtgctcgtcgagatcgcctgcacgcgcacctccgcgcagatcttcgcgaccaggcaggcttatcacgagcggttcaagcgctcgcttgaggaagacatcgctgcgcacgtcactggggacttccgcaagctattggtgccacttgtaagtacttaccgctatgatggaccagaggtcaacacaaggttggcacactcagaagccaaactacttcatgagaagatccatcacaaggcttacagtgatgatgagatcatcagaatcctcaccactaggagcaaacctcagctgattgctacattcaatcattacaatgatgcatttggccaccgaatcaacaaggatctgaaggctgacccccaggacgagtacctcagaacgctgcgggcgatcatccggtgcttcagttgccctgacaggtactttgagaaggtggctaggcaggccatagcggggctaggcacagatgagaactccctgaccagggtcatcaccacccgcgctgaggtggacctcaaactgattaaggaggcgtaccagaagaggaacagcgtgccgctggagcgggccgtcgcgggggacacctccggcgactacgagagcatgctcctcgcgctcctggggcaggagtgatgagccgtactggtgcgctggtgcctttctgaccggcgccgtggtgtttgttcgtgatcgtaataaacctgattgcctagctgtacgtgaggctgtttcttcggtcctggtactgtcgctgcagcatgcatagcagtggaccagtggtgataaataagttactgtgctttcgacgaatgaaccctttttttgtgtctaagttgtggaacctcgagaaagtttttgtgtctaaggctgtcttt

SEQ ID NO: 23135 - protein, 345 aa, Zea mays subsp. mays
  misc_feature (1)..(345): Ceres Seq. ID no. 12411406
LRAFYMQACACHFSPVLAPPRSRISASHSPGMATLKVPATVPPVADDCDQLRKAFQGWGTNEALIISILGHRDAAQRRAIRRAYAEAYGEELLRSITDEISGDFERAVILWTLDPAERDAVLANEAARKWKPGNRVLVEIACTRTSAQIFATRQAYHERFKRSLEEDIAAHVTGDFRKLLVPLVSTYRYDGPEVNTRLAHSEAKLLHEKIHHKAYSDDEIIRILTTRSKPQLIATFNHYNDAFGHRINKDLKADPQDEYLRTLRAIIRCFSCPDRYFEKVARQAIAGLGTDENSLTRVITTRAEVDLKLIKEAYQKRNSVPLERAVAGDTSGDYESMLLALLGQE

SEQ ID NO: 23136 - protein, 340 aa, Zea mays subsp. mays
  misc_feature (1)..(340): Ceres Seq. ID no. 12411407
MQACACHFSPVLAPPRSRISASHSPGMATLKVPATVPPVADDCDQLRKAFQGWGTNEALIISILGHRDAAQRRAIRRAYAEAYGEELLRSITDEISGDFERAVILWTLDPAERDAVLANEAARKWKPGNRVLVEIACTRTSAQIFATRQAYHERFKRSLEEDIAAHVTGDFRKLLVPLVSTYRYDGPEVNTRLAHSEAKLLHEKIHHKAYSDDEIIRILTTRSKPQLIATFNHYNDAFGHRINKDLKADPQDEYLRTLRAIIRCFSCPDRYFEKVARQAIAGLGTDENSLTRVITTRAEVDLKLIKEAYQKRNSVPLERAVAGDTSGDYESMLLALLGQE

SEQ ID NO: 23137 - protein, 314 aa, Zea mays subsp. mays
  misc_feature (1)..(314): Ceres Seq. ID no. 12411408
MATLKVPATVPPVADDCDQLRKAFQGWGTNEALIISILGHRDAAQRRAIRRAYAEAYGEELLRSITDEISGDFERAVILWTLDPAERDAVLANEAARKWKPGNRVLVEIACTRTSAQIFATRQAYHERFKRSLEEDIAAHVTGDFRKLLVPLVSTYRYDGPEVNTRLAHSEAKLLHEKIHHKAYSDDEIIRILTTRSKPQLIATFNHYNDAFGHRINKDLKADPQDEYLRTLRAIIRCFSCPDRYFEKVARQAIAGLGTDENSLTRVITTRAEVDLKLIKEAYQKRNSVPLERAVAGDTSGDYESMLLALLGQE

SEQ ID NO: 23138 - DNA, 1565 bp, Zea mays subsp. mays
  misc_feature (1)..(1565): Ceres Seq. ID no. 12411428
aaccatcctccctccacagatctctccggggaggcagcaacagttatgtcatatcattgtcgcgtcctcgtccccgttccatttcattatccccccggagctggtgcgcgagtcggagctggtgcagggtcacccttcccctcggcctcaagagctctgcggttgccgcggccaagggcgtccgtggagaagcgggagcaggtggcggcgatggaagagcaaggcggccaggcggcgctcgggtgggcggccagggacgactccggcgtcctctccccctacagcttctccagaagggttcctaaagacgacgatgtcacgatcaaggtgctctactgcgggatctgccacaccgacctgcacgtcatcaagaacgactggcgaaacgccatgtacccagtcgtcccggggtaaccgatccaatttcgctagcctagacgccccggatgctgttgcaaaactaacagcctctgtctgtctgaccccgtcggctggcgtggcgtggcgagcaggcacgagatcgtgggcgtggtgaccggcgtcggcggcggcgtcacgcggttcaaggccggcgacacggtcggcgtgggctacttcgtggggtcctgccgctcctgcgacagctgcggcaagggggacgacaactactgcgcggggatcgtgctcacctccaacggcgtcgaccacgcgcacggcggcgcgcccaccagggggggattctccgacgtcctggtcgcgagcgagcactacgtggtccgcgtccccgacggcctggcgctggaccgcaccgcgccgctgctctcgccggcgtcaccgtgtacagccccatgatgcgccacggcctcaacgagcccggcaagcacctcggcgtcgtcggcctcggcggcctcggccacgtcgccgtcaagttcggcaaggccttcgggatgaaggtcaccgtcatcagcacgtccgccagcaagcgccaggaggccatcgagaacctcggcgcggacgagttcctcatcagccgggacaaggaccagatgaaggcggcgacggggaccatggacggcatcatcgacacggtgtcggcgtggcacccgatcacgccgctgctggcgctgctgaagccgctggggcagatggtggtcgtgggcgcgccgagcaagccgctcgagctgccggcctacgccatcgtgccgggcgggaagggcgtggctgggaacaatgtcggcagcgtcagggactgccaggccatgctcgagttcgcggggaagcacggcatcggggccgaggtcgaggtcatcaagatggactacgtcaacacggccatggagcggctcgagaagaacgacgtccgctaccgcttcgtcatcgacgtcgccggcagcctcggctctgccgcctaggcatggctgcaaaggtttcaatcagagcccagccgcaataatttgttagctaccgaatgaatgatggtctacgcttgttgatgagttggtgctttgtcgtggttttgtggatgtaataattcgatgtacaaataaaaaaaggggagacaaggtgcttgttcccttggtttggtg

SEQ ID NO: 23139 - protein, 187 aa, Zea mays subsp. mays
  misc_feature (1)..(187): Ceres Seq. ID no. 12411429
MMRHGLNEPGKHLGVVGLGGLGHVAVKFGKAFGMKVTVISTSASKRQEAIENLGADEFLISRDKDQMKAATGTMDGIIDTVSAWHPITPLLALLKPLGQMVVVGAPSKPLELPAYAIVPGGKGVAGNNVGSVRDCQAMLEFAGKHGIGAEVEVIKMDYVNTAMERLEKNDVRYRFVIDVAGSLGSAA

SEQ ID NO: 23140 - protein, 186 aa, Zea mays subsp. mays
  misc_feature (1)..(186): Ceres Seq. ID no. 12411430
MRHGLNEPGKHLGVVGLGGLGHVAVKFGKAFGMKVTVISTSASKRQEAIENLGADEFLISRDKDQMKAATGTMDGIIDTVSAWHPITPLLALLKPLGQMVVVGAPSKPLELPAYAIVPGGKGVAGNNVGSVRDCQAMLEFAGKHGIGAEVEVIKMDYVNTAMERLEKNDVRYRFVIDVAGSLGSAA

SEQ ID NO: 23141 - protein, 177 aa, Zea mays subsp. mays
  misc_feature (1)..(177): Ceres Seq. ID no. 12411431
TILPPQISPGRQQQLCHIIVASSSPFHFIIPPELVRESELVQGHPSPRPQELCGCRGQGRPWRSGSRWRRWKSKAARRRSGGRPGTTPASSPPTASPEGFLKTTMSRSRCSTAGSATPTCTSSRTTGETPCTQSSRGNRSNFASLDAPDAVAKLTASVCLTPSAGVAWRAGTRSWAW

SEQ ID NO: 23142 - DNA, 1385 bp, Zea mays subsp. mays
  misc_feature (1)..(1385): Ceres Seq. ID no. 12411435
agccgaagaaccctcgctcgagaccgaagaagacaaaatcgcatctcctcgcctcctcccctcctcccgagatccgggcaaagcgcgccgcgcgagaaccaggatatcgatttaggtatatggacaaggtgtctgaaggtactaagtgagatggataagaagaaagggaccgatggcaccgaaccaggaccagctccatctcgtgccgtcgacagatttggttttataaagccagaacaaggcaattcacctgatggaattccaaaaggcaagtctatacatgagcgtgaaagggaggaaagaaggataagaaaatggaggaagatgataggtgttggtggtaatgactggaagcattatgttagaaggaaccctcatgtggttaaaaggcgaataaggaaaggaattcctgattgtctcagaggacttgtttggcagttgatttcaggcagtcgggacctcttactaatgaacccaggggtttacgagacactggtgatatatgagacatcggcctctgaattggaaattattcgtgacatatcacgcacatttccatctcatatattctttcaacaaaggcatggtccaggccaaagatcattgtataacattttgaaagcatattctgtctatgacagggatgttggatatgtgcagggaatgggatttttagctgggctgctgcttctttatatgagtgaggaggatgcattctggttattagtcgcgttgctaaagggagctgtccatgcaccaatggaaggcttgtatcaggctggtttgccgcttgtgcagcaatatttgtctcagtttgagaaattagttattgagctcatgccaaaattgggacaacactttgttgaagaaatgataaacccaagcatgtatgcaagtcaatggtttatcacagttttctcatattccttcccatttcatctaactcttagagtttgggatgtgtttctttatgagggtattaaggttgtattccaagttggattggctctattgagactctgtcacgatgatttagtcaaattaccttttgagaaactgctctatgccttgagaaatttccctcaggaagcgacagatccagatgtattattgccgcttgccttttcatttaaggtatcgagtcgtctcgaggagcttcagaaggagtatcagaagcgacaggagggcaccagtgaaacttcaagcggcgagcggctacagcccctcgtatcgaagacgatgagcagggtcggtagccgtgttgtgtcgaacttaacgaccgctgacagaaaatgacagacacgttctcttgtttgtttgtaactcgcatgtacactgtacagaaagaacggccttataatccatccatctaacagtatttgttc

SEQ ID NO: 23143 - protein, 431 aa, Zea mays subsp. mays
  misc_feature (1)..(431): Ceres Seq. ID no. 12411436
SRRTLARDRRRQNRISSPPPLLPRSGQSAPRENQDIDLGIWTRCLKVLSEMDKKKGTDGTEPGPAPSRAVDRFGFIKPEQGNSPDGIPKGKSIHEREREERRIRKWRKMIGVGGNDWKHYVRRNPHVVKRRIRKGIPDCLRGLVWQLISGSRDLLLMNPGVYETLVIYETSASELEIIRDISRTFPSHIFFQQRHGPGQRSLYNILKAYSVYDRDVGYVQGMGFLAGLLLLYMSEEDAFWLLVALLKGAVHAPMEGLYQAGLPLVQQYLSQFEKLVIELMPKLGQHFVEEMINPSMYASQWFITVFSYSFPFHLTLRVWDVFLYEGIKVVFQVGLALLRLCHDDLVKLPFEKLLYALRNFPQEATDPDVLLPLAFSFKVSSRLEELQKEYQKRQEGTSETSSGERLQPLVSKTMSRVGSRVVSNLTTADRK

SEQ ID NO: 23144 - protein, 381 aa, Zea mays subsp. mays
  misc_feature (1)..(381): Ceres Seq. ID no. 12411437
MDKKKGTDGTEPGPAPSRAVDRFGFIKPEQGNSPDGIPKGKSIHEREREERRIRKWRKMIGVGGNDWKHYVRRNPHVVKRRIRKGIPDCLRGLVWQLISGSRDLLLMNPGVYETLVIYETSASELEIIRDISRTFPSHIFFQQRHGPGQRSLYNILKAYSVYDRDVGYVQGMGFLAGLLLLYMSEEDAFWLLVALLKGAVHAPMEGLYQAGLPLVQQYLSQFEKLVIELMPKLGQHFVEEMINPSMYASQWFITVFSYSFPFHLTLRVWDVFLYEGIKVVFQVGLALLRLCHDDLVKLPFEKLLYALRNFPQEATDPDVLLPLAFSFKVSSRLEELQKEYQKRQEGTSETSSGERLQPLVSKTMSRVGSRVVSNLTTADRK

SEQ ID NO: 23145 - protein, 323 aa, Zea mays subsp. mays
  misc_feature (1)..(323): Ceres Seq. ID no. 12411438
MIGVGGNDWKHYVRRNPHVVKRRIRKGIPDCLRGLVWQLISGSRDLLLMNPGVYETLVIYETSASELEIIRDISRTFPSHIFFQQRHGPGQRSLYNILKAYSVYDRDVGYVQGMGFLAGLLLLYMSEEDAFWLLVALLKGAVHAPMEGLYQAGLPLVQQYLSQFEKLVIELMPKLGQHFVEEMINPSMYASQWFITVFSYSFPFHLTLRVWDVFLYEGIKVVFQVGLALLRLCHDDLVKLPFEKLLYALRNFPQEATDPDVLLPLAFSFKVSSRLEELQKEYQKRQEGTSETSSGERLQPLVSKTMSRVGSRVVSNLTTADRK

SEQ ID NO: 23146 - DNA, 1264 bp, Zea mays subsp. mays
  misc_feature (1)..(1264): Ceres Seq. ID no. 12411439
atgccagagcaaacccataggtccagtccaaatccaatccctgttgccatgagaatttcaggggcagccatggccgaaaaggagagcaacggagtgcgggtgtgcgtcaccggaggagccgggttcatcggctcctggctcgtcaggaagctcctcgagaaaggctacaccgtccacgccaccctgcggaacaccggggacgaggcgaaggcggggctgctgcgtcggctggtccccggcgcagcggagcggctgcggttgttccaggccgacctcttcgacgccgccaccttcgcgccggcgatcgctgggtgccagttcgtcttcctcgtcgccacgccattcgggctcgatagcgccggctcccagtataagagcacggcggaagctgtggtggacgcggtgcacgcgatcctccggcaatgcgaggagtccaggacggtgaagcgagtgatccacacggcctccgtagcggccgcctcgccgctgctggaggaggaggtccccgcctccggcgtcgggtacagagacttcatcgacgaatcttgttggacttcgctcaacgttgactatcctctacgaagcgcacacttcgacaagtacatactgtcgaagctgcagtcggagcaagagctcctgagctacaacaacggcgagagtccggcgttcgaggtggtgaccctgccgctggggctcgtggcgggcgacacggtcctcggccgcgccccggagacggtggagagcgccgtggcgcccgtgtcccgcagcgagccctacttcggcctcctgcgcatactgcagcagctcctggggtcgctgccgctggtgcacgtggacgacgtctgcgacgcgctcgtcttctgcatggagcggcgcccctccgtcgccggccgcttcctctgcgccgccgcgtacccgacgatccacgacgtggtcgcccactacgccagcaagttccctcacctcgacatcttgaaagagacgacggaggcggtggcgacggtgcggcctgcccgggacaggttgggcgagctgggcttcaagtacaagtacggcatggaagagattctggatagcagcgttgcctgtgcggcgagattgggttcccttgacggatccaagctcggcctacagaaaggataaaagctcgaagcttactcataagcaccatggggaacttggattgttcgctgtccactatacgcgttcgaaatttggaaactagacatactccaataaaacaagaggtaaagaaacggaattc

SEQ ID NO: 23147 - protein, 380 aa, Zea mays subsp. mays
  misc_feature (1)..(380): Ceres Seq. ID no. 12411440
MPEQTHRSSPNPIPVAMRISGAAMAEKESNGVRVCVTGGAGFIGSWLVRKLLEKGYTVHATLRNTGDEAKAGLLRRLVPGAAERLRLFQADLFDAATFAPAIAGCQFVFLVATPFGLDSAGSQYKSTAEAVVDAVHAILRQCEESRTVKRVIHTASVAAASPLLEEEVPASGVGYRDFIDESCWTSLNVDYPLRSAHFDKYILSKLQSEQELLSYNNGESPAFEVVTLPLGLVAGDTVLGRAPETVESAVAPVSRSEPYFGLLRILQQLLGSLPLVHVDDVCDALVFCMERRPSVAGRFLCAAAYPTIHDVVAHYASKFPHLDILKETTEAVATVRPARDRLGELGFKYKYGMEEILDSSVACAARLGSLDGSKLGLQKG

SEQ ID NO: 23148 - protein, 364 aa, Zea mays subsp. mays
  misc_feature (1)..(364): Ceres Seq. ID no. 12411441
MRISGAAMAEKESNGVRVCVTGGAGFIGSWLVRKLLEKGYTVHATLRNTGDEAKAGLLRRLVPGAAERLRLFQADLFDAATFAPAIAGCQFVFLVATPFGLDSAGSQYKSTAEAVVDAVHAILRQCEESRTVKRVIHTASVAAASPLLEEEVPASGVGYRDFIDESCWTSLNVDYPLRSAHFDKYILSKLQSEQELLSYNNGESPAFEVVTLPLGLVAGDTVLGRAPETVESAVAPVSRSEPYFGLLRILQQLLGSLPLVHVDDVCDALVFCMERRPSVAGRFLCAAAYPTIHDVVAHYASKFPHLDILKETTEAVATVRPARDRLGELGFKYKYGMEEILDSSVACAARLGSLDGSKLGLQKG

SEQ ID NO: 23149 - protein, 357 aa, Zea mays subsp. mays
  misc_feature (1)..(357): Ceres Seq. ID no. 12411442
MAEKESNGVRVCVTGGAGFIGSWLVRKLLEKGYTVHATLRNTGDEAKAGLLRRLVPGAAERLRLFQADLFDAATFAPAIAGCQFVFLVATPFGLDSAGSQYKSTAEAVVDAVHAILRQCEESRTVKRVIHTASVAAASPLLEEEVPASGVGYRDFIDESCWTSLNVDYPLRSAHFDKYILSKLQSEQELLSYNNGESPAFEVVTLPLGLVAGDTVLGRAPETVESAVAPVSRSEPYFGLLRILQQLLGSLPLVHVDDVCDALVFCMERRPSVAGRFLCAAAYPTIHDVVAHYASKFPHLDILKETTEAVATVRPARDRLGELGFKYKYGMEEILDSSVACAARLGSLDGSKLGLQKG

SEQ ID NO: 23150 - DNA, 1221 bp, Zea mays subsp. mays
  misc_feature (1)..(1221): Ceres Seq. ID no. 12411455
ttcttcggctatccgctggcagccgagcaggcccaagtggtgcgtcctgttcacccacggcgcctgcgtcggccctgcccgaactggcgtgcagagcagtgctccacgacgccgccaccacctgccccagcagcggcacgctccgacaacggcgaccatggcggtgcgggcgcgggggctggggagtgttccctgctagatccagtagatggccgactcatcgaggccctccgtgaatatcatctgcgccggtcgtctgctcggctgcagtggattaggtgagcgggattccggtagaggattgtttagtttgggattctaggttcctcgctcccgtgccagagacggcgctggacgttgaggtcagggccccggcggcgcggcgcgtcgcggagaggaaggcgcggaagcggtccgagcggcgcacctacctggtggccgccatgatgtccaacctcggggtcacgtccatggccgtcgccgccgtgtactatcgcttcagctggcaaatggagggcggcgcggtcccggtgagcgagatgttcggcacgtttgcgctctccgtcggcgaggcggtcgggatggagttctgggcgcggtgggcgcaccgggcgctatggcacgcctccctgtggcacatgcacgagtcgcaccaccggccgcgcgagggcccattcgagctcaacgacgtgttcgccatcgtcaacgccgtgtcggccatctccctcctcggtgacgtcgtgagcagatacaccacatggacaagtttgagggcgtcccgtatgggctcttcctgggaccaaaggagctggaggaggtcgatggcctggacgagctggaaaaggagctcgcgtgaatcggccggaccatctgatggattcatccggattccggcgcggcgatctccgctccgctccgtgattccggcgcagcctcatggttggggagccgacgaccagaacctccagaagggatttggtttggatgcgcgagcatagatcttgacctgcatttcggatggtctgtggaggcacagctcgtacctggagatgtctggtgccatggaattacttttcttttcttcttttcctgacattttcacgccgacgtctttatttgtggagacgtcgcacgttctggcccatgtattactgttcttatggctaggattctgtatataacttgtagagacatgttatgaaccaccagctcaatgaagct

SEQ ID NO: 23151 - protein, 184 aa, Zea mays subsp. mays
  misc_feature (1)..(184): Ceres Seq. ID no. 12411456
MMSNLGVTSMAVAAVYYRFSWQMEGGAVPVSEMFGTFALSVGEAVGMEFWARWAHRALWHASLWHMHESHHRPREGPFELNDVFAIVNAVSAISLLGDVVSRYTTWTSLRASRMGSSWDQRSWRRSMAWTSWKRSSRESAGPSDGFIRIPARRSPLRSVIPAQPHGWGADDQNLQKGFGLDARA

SEQ ID NO: 23152 - protein, 183 aa, Zea mays subsp. mays
  misc_feature (1)..(183): Ceres Seq. ID no. 12411457
MSNLGVTSMAVAAVYYRFSWQMEGGAVPVSEMFGTFALSVGEAVGMEFWARWAHRALWHASLWHMHESHHRPREGPFELNDVFAIVNAVSAISLLGDVVSRYTTWTSLRASRMGSSWDQRSWRRSMAWTSWKRSSRESAGPSDGFIRIPARRSPLRSVIPAQPHGWGADDQNLQKGFGLDARA

SEQ ID NO: 23153 - protein, 175 aa, Zea mays subsp. mays
  misc_feature (1)..(175): Ceres Seq. ID no. 12411458
MAVAAVYYRFSWQMEGGAVPVSEMFGTFALSVGEAVGMEFWARWAHRALWHASLWHMHESHHRPREGPFELNDVFAIVNAVSAISLLGDVVSRYTTWTSLRASRMGSSWDQRSWRRSMAWTSWKRSSRESAGPSDGFIRIPARRSPLRSVIPAQPHGWGADDQNLQKGFGLDARA

SEQ ID NO: 23154 - DNA, 1534 bp, Zea mays subsp. mays
  misc_feature (1)..(1534): Ceres Seq. ID no. 12411463
agacagaatgttcccttccaagaaggccactagtagcgcagccgcagccgttgccgccgtgagctcaaatgatagcaggcagcaggcgatgtgcgtgcaggccgactcggggtcgggcctcgtcctcaccaccaccccaagccccgcctccgctggaccgtcgagctccacgagcgcttcgtcgacgccgtcacgcagctcggtggccccgacaaggcgactcccaagaccatcatgagggtcatgggagtcaaggggcttaccctctaccacctcaagagccatcttcagaaattcaggttagggaagcagccgcacaaggagttcaacgagcactcggttaaggacgcggccgcagcaatggagatgcaacggaacgccgcctcttcttcaggcatgatgggaagaagcatgaacgaccgcagcgtgcacatgaacgaggctatcaggatgcaaatggaagtccagagaaggctacatgaacagctagaggtgcaaaggcatctccagatgaggatcgaagcccagggcaagtacatgcagtccatcctggagaaagcctaccagaccatcgccaccggcgacctggctgcgtgcagcccggtggctgcagggtacaaatccctgctaggtaacccgcaggcgatgctggacgtctgctcgctcaaggacatggccccgtccatgggcttcccttcgctgcaagacctgcacatgtacggcggcggcggcggccactgcctggacctgcagcagcagatggagcggccgatggaggccttcttcgccagctgcgacatcgggtcgctggccaagaagaggcccgtcagcccttacgccgacgacgacggcggcaagagcccgatgctgtggggcgaggacgacgagggcaagggcatcgtcgaccatttccagatggcgccgccgatgatggacgccgccggcatcgacgtcatggactccatcgccgacgtgtacggcgacgccaagcacatgaccatgtccagcgactccacggggagcaagggcggcggcttcgacgtcaggctcgagcggccatcgctgcggcggccgcacatgggcggcagcccgtcggtgctcggcggaggccagacgaggaacctgtcctacgggtaactagctcgtcgctctgatgatgattaaccatccgatccggcgtgcttaattaattaactcgcagtgaaactaaaattaattaaagcaggcgattattattaaccggtgcaaaacggctacaaataaataagtaaagctagcgctgtagcaggcatgcataatataatggcggagatacatatatatatttatagcataagtgtcattaattcatgatcacgagattgatgatcttaccgtggcgcatcacttgctggatgatgctccaagataatctattttgagcgagaggagatgtatgttccatgtaattgtagtgctgttgatgggtgtaaatgcatgtgcaacttattaattggtaattttgcatgctgaggaaacaatctttctttggtct

SEQ ID NO: 23155 - protein, 300 aa, Zea mays subsp. mays
  misc_feature (1)..(300): Ceres Seq. ID no. 12411464
MRVMGVKGLTLYHLKSHLQKFRLGKQPHKEFNEHSVKDAAAAMEMQRNAASSSGMMGRSMNDRSVHMNEAIRMQMEVQRRLHEQLEVQRHLQMRIEAQGKYMQSILEKAYQTIATGDLAACSPVAAGYKSLLGNPQAMLDVCSLKDMAPSMGFPSLQDLHMYGGGGGHCLDLQQQMERPMEAFFASCDIGSLAKKRPVSPYADDDGGKSPMLWGEDDEGKGIVDHFQMAPPMMDAAGIDVMDSIADVYGDAKHMTMSSDSTGSKGGGFDVRLERPSLRRPHMGGSPSVLGGGQTRNLSYG

SEQ ID NO: 23156 - protein, 297 aa, Zea mays subsp. mays
  misc_feature (1)..(297): Ceres Seq. ID no. 12411465
MGVKGLTLYHLKSHLQKFRLGKQPHKEFNEHSVKDAAAAMEMQRNAASSSGMMGRSMNDRSVHMNEAIRMQMEVQRRLHEQLEVQRHLQMRIEAQGKYMQSILEKAYQTIATGDLAACSPVAAGYKSLLGNPQAMLDVCSLKDMAPSMGFPSLQDLHMYGGGGGHCLDLQQQMERPMEAFFASCDIGSLAKKRPVSPYADDDGGKSPMLWGEDDEGKGIVDHFQMAPPMMDAAGIDVMDSIADVYGDAKHMTMSSDSTGSKGGGFDVRLERPSLRRPHMGGSPSVLGGGQTRNLSYG

SEQ ID NO: 23157 - protein, 258 aa, Zea mays subsp. mays
  misc_feature (1)..(258): Ceres Seq. ID no. 12411466
MEMQRNAASSSGMMGRSMNDRSVHMNEAIRMQMEVQRRLHEQLEVQRHLQMRIEAQGKYMQSILEKAYQTIATGDLAACSPVAAGYKSLLGNPQAMLDVCSLKDMAPSMGFPSLQDLHMYGGGGGHCLDLQQQMERPMEAFFASCDIGSLAKKRPVSPYADDDGGKSPMLWGEDDEGKGIVDHFQMAPPMMDAAGIDVMDSIADVYGDAKHMTMSSDSTGSKGGGFDVRLERPSLRRPHMGGSPSVLGGGQTRNLSYG

SEQ ID NO: 23158 - DNA, 1415 bp, Zea mays subsp. mays
  misc_feature (1)..(1415): Ceres Seq. ID no. 12411473
tctctctgtctcctcacccgacgcccaaagaagcagagcaggcaacggcacagttagagagagagagagagaggcgcagagccaaggaagcggagcagagcaacagcagcaggtcgaggaagaggagaagagaaggtccaggagacagcacagcagccaggaagagcaagagcaagatgctgcgcgggggcacgggcatgctgggggtggtgaacttcataaccttcctgatctcgatcccgatccttggcggcggcatctggctggcgtcgcgggccaactccaccgactgcatccgcttcctgcagtggcccatcatcgtggtggggctcgtcctcatggtcgtctccctcatgggcttcgccggcgcctgctaccgccagacttggctgctccgcctctacctcttcgccatgttcttcgtcgtcctcgcgctcctcttcttcgtcgtcttcgccttcgccgtcaccgaccgcggcgccggccaggtcgtcatgagccgccgcttccccgagtaccagctctccgactacggcggatggctccgcgaccgcgtcgccgacccgcagtactgggccaccatcagcgcctgcctccgcgacggccacgcctgcgccggcatgaggcgcctcgcgcgggaccccaacacgggcatgctcgtgccggagacgcccgccatgttctacggccgcaacctctccccgattcagtctggatgctgcaagccaccgacgtcatgcgcattcacctacatgaacgagacgtactgggaacaaaaccccggtgtcccgaccgtgcccaatgaccctgactgcagcaggtggagcaacgaccagcagatgctgtgcttccagtgcgactcgtgcaaggccggcgtcctcgcgggcatcaagaagagctggcgcaaggtggccgtcctgaacatcgtggtgttgatcatccttgtgattgtctatgtcgcgggctgcgccgcgttccgcaacgccaagaggatcgacaacgacgagccggtgggcatggcgcggatgaccaagtcccatccaagcaggttccagttctaggcaggcagctgctgccgtcgcgggttcggaagcttctgccttgtacagatgatgaccagaccagtgggtggtgctaaggcctgggctttgctatatcttactgagatgtggattgtactgcatttgggggtgaaaaggggaagttcagtgtggtttgagttcgtgtttgatttagtgtttagggtaggtatgttatgtggtagggggtacaatatgggatctgcaagaaacaagagaagatcaatcatctaggaactgttctgtattggagatttttttttaaaaaaaaatctgggggatatttgtatgatggtgcttggtgccagccatgatggaatattttctgaatttctc

SEQ ID NO: 23159 - protein, 352 aa, Zea mays subsp. mays
  misc_feature (1)..(352): Ceres Seq. ID no. 12411474
SLSPHPTPKEAEQATAQLERERERRRAKEAEQSNSSRSRKRRREGPGDSTAARKSKSKMLRGGTGMLGVVNFITFLISIPILGGGIWLASRANSTDCIRFLQWPIIVVGLVLMVVSLMGFAGACYRQTWLLRLYLFAMFFVVLALLFFVVFAFAVTDRGAGQVVMSRRFPEYQLSDYGGWLRDRVADPQYWATISACLRDGHACAGMRRLARDPNTGMLVPETPAMFYGRNLSPIQSGCCKPPTSCAFTYMNETYWEQNPGVPTVPNDPDCSRWSNDQQMLCFQCDSCKAGVLAGIKKSWRKVAVLNIVVLIILVIVYVAGCAAFRNAKRIDNDEPVGMARMTKSHPSRFQF

SEQ ID NO: 23160 - protein, 294 aa, Zea mays subsp. mays
  misc_feature (1)..(294): Ceres Seq. ID no. 12411475
MLRGGTGMLGVVNFITFLISIPILGGGIWLASRANSTDCIRFLQWPIIVVGLVLMVVSLMGFAGACYRQTWLLRLYLFAMFFVVLALLFFVVFAFAVTDRGAGQVVMSRRFPEYQLSDYGGWLRDRVADPQYWATISACLRDGHACAGMRRLARDPNTGMLVPETPAMFYGRNLSPIQSGCCKPPTSCAFTYMNETYWEQNPGVPTVPNDPDCSRWSNDQQMLCFQCDSCKAGVLAGIKKSWRKVAVLNIVVLIILVIVYVAGCAAFRNAKRIDNDEPVGMARMTKSHPSRFQF

SEQ ID NO: 23161 - protein, 287 aa, Zea mays subsp. mays
  misc_feature (1)..(287): Ceres Seq. ID no. 12411476
MLGVVNFITFLISIPILGGGIWLASRANSTDCIRFLQWPIIVVGLVLMVVSLMGFAGACYRQTWLLRLYLFAMFFVVLALLFFVVFAFAVTDRGAGQVVMSRRFPEYQLSDYGGWLRDRVADPQYWATISACLRDGHACAGMRRLARDPNTGMLVPETPAMFYGRNLSPIQSGCCKPPTSCAFTYMNETYWEQNPGVPTVPNDPDCSRWSNDQQMLCFQCDSCKAGVLAGIKKSWRKVAVLNIVVLIILVIVYVAGCAAFRNAKRIDNDEPVGMARMTKSHPSRFQF

SEQ ID NO: 23162 - DNA, 1407 bp, Zea mays subsp. mays
  misc_feature (1)..(1407): Ceres Seq. ID no. 12411495
gttctcttctctccctcctcctatagttggcttctcgcaaccctctgctttcgatcagctttctccgctccccatttccctctccaactccaatccatggcctccacggatcgctccacgccggcggaggacgagcaacagcagaagcgcccgtctctcttctcgccgtaccagatgccccgcttccgcctcgcccaccgggtggtgctggcgccgatgaccaggtgcagggcgcccgacgcggtcccaggccccgcgctcgcggagtactacgcgcagcggtccacggacggcggcttgctcatctccgagggcaccatcatctcgccgtccggccctgggttccctcgtgtccctgggatatacaatcaagaacagactgatgcatggagaaaggtggttgatgctgttcatgccaagggagctatctttttctgccaactatggcatgtaggccgagcttctcaccaagtatatcagccgggtgctgctgctccgatatcctcaactgataagccaatatcatcaagatggaggatactgatgcccgatggatcctatggcaagtatccaactccgaggcgcctagccacatccgagataccagaaattgttgagcaataccgtcaagcagccgtaaacgccatcaaagcaggtttcgatggcatcgagatccatggcgcccatggctacctcatcgatcagttcctcaagggcggtatcaacgaccggactgacgagtacggtggctcactctccaaccgttgccggttcctcctggaggtgacccgagccgtggtctctgcgataggggcagaccgcgtcgcggtccgagtgtccccggccatcgaccatctcgacgcctacgactccaaccccctgcagctcggcctggccgtggtggagcgtctcaacgctctccagcaggaggccgggcggctggcctacctccacgtgacgcagccacggtacacggcgtacgggcagacagagtctggccagcacgggagtgccgaggaggagagccggctgatgcgtgccgtgcgaggtgcctaccgtggcacgttcatgtgcagcggtgggtacacgcgggagctcggggtcgaggccatcgagtccggggacgctgacctggtgtcctacgggcggctgttcatcgctaatcccgacctggtggagcggtttcggcgcgacgccccgctgaacaaatacgtgcgcaagacgttctacacgccggaccccgtcgtcggttacacggactacacattcctcggccagcctaaggcacgcatgtgatttgattattagtgcgttgccgtaattataagaggcggagtattgtttgtatgttgtgacttgagaaaacaagcaaacatctgggtaatgccgcgattgttacgtattcct

SEQ ID NO: 23163 - protein, 431 aa, Zea mays subsp. mays
  misc_feature (1)..(431): Ceres Seq. ID no. 12411496
VLFSPSSYSWLLATLCFRSAFSAPHFPLQLQSMASTDRSTPAEDEQQQKRPSLFSPYQMPRFRLAHRVVLAPMTRCRAPDAVPGPALAEYYAQRSTDGGLLISEGTIISPSGPGFPRVPGIYNQEQTDAWRKVVDAVHAKGAIFFCQLWHVGRASHQVYQPGAAAPISSTDKPISSRWRILMPDGSYGKYPTPRRLATSEIPEIVEQYRQAAVNAIKAGFDGIEIHGAHGYLIDQFLKGGINDRTDEYGGSLSNRCRFLLEVTRAVVSAIGADRVAVRVSPAIDHLDAYDSNPLQLGLAVVERLNALQQEAGRLAYLHVTQPRYTAYGQTESGQHGSAEEESRLMRAVRGAYRGTFMCSGGYTRELGVEAIESGDADLVSYGRLFIANPDLVERFRRDAPLNKYVRKTFYTPDPVVGYTDYTFLGQPKARM

SEQ ID NO: 23164 - protein, 399 aa, Zea mays subsp. mays
  misc_feature (1)..(399): Ceres Seq. ID no. 12411497
MASTDRSTPAEDEQQQKRPSLFSPYQMPRFRLAHRVVLAPMTRCRAPDAVPGPALAEYYAQRSTDGGLLISEGTIISPSGPGFPRVPGIYNQEQTDAWRKVVDAVHAKGAIFFCQLWHVGRASHQVYQPGAAAPISSTDKPISSRWRILMPDGSYGKYPTPRRLATSEIPEIVEQYRQAAVNAIKAGFDGIEIHGAHGYLIDQFLKGGINDRTDEYGGSLSNRCRFLLEVTRAVVSAIGADRVAVRVSPAIDHLDAYDSNPLQLGLAVVERLNALQQEAGRLAYLHVTQPRYTAYGQTESGQHGSAEEESRLMRAVRGAYRGTFMCSGGYTRELGVEAIESGDADLVSYGRLFIANPDLVERFRRDAPLNKYVRKTFYTPDPVVGYTDYTFLGQPKARM

SEQ ID NO: 23165 - protein, 373 aa, Zea mays subsp. mays
  misc_feature (1)..(373): Ceres Seq. ID no. 12411498
MPRFRLAHRVVLAPMTRCRAPDAVPGPALAEYYAQRSTDGGLLISEGTIISPSGPGFPRVPGIYNQEQTDAWRKVVDAVHAKGAIFFCQLWHVGRASHQVYQPGAAAPISSTDKPISSRWRILMPDGSYGKYPTPRRLATSEIPEIVEQYRQAAVNAIKAGFDGIEIHGAHGYLIDQFLKGGINDRTDEYGGSLSNRCRFLLEVTRAVVSAIGADRVAVRVSPAIDHLDAYDSNPLQLGLAVVERLNALQQEAGRLAYLHVTQPRYTAYGQTESGQHGSAEEESRLMRAVRGAYRGTFMCSGGYTRELGVEAIESGDADLVSYGRLFIANPDLVERFRRDAPLNKYVRKTFYTPDPVVGYTDYTFLGQPKARM

SEQ ID NO: 23166 - DNA, 1825 bp, Zea mays subsp. mays
  misc_feature (1)..(1825): Ceres Seq. ID no. 12411499
gggtatatatatacggcgccggcgccgaggagagaggaccccggccgatcccgcacccctgactgtcagccgcgatccgctcttttttgcgtgcagcggcggagcaggagatatggcgtcggaggccaaggacgtgggcatcctcgccatggacatctacttcccgcccaactgcgtgctccaggaagagttggaaacacatgatggcgtgagcaaagggaagtataccattgggcttgggcaggaaagtatggcattttgcactgaagttgaggatgttatttcgatgagcttgacagcggtgaagtccctcctgaaaaattataacattgacccaaagtgcattggacgtttggaagttggcagtgaaaccgtaatagacaagagcaagtctataaagacatggctgatgcagatatttgaggaatctggcaatactgatattgaaggagttgactcctcgaatgcatgttatggtggaacagctgcattgtttaattgtgttaactgggttgaaagcaagtcatgggatggtcgctatggacttgttgtttgcacagacagtgcggtttacgctgaaggtccggctcgccctactggtggtgcggctgctattgcaatgctgattggaccaaatgctcctatttgttttgaaagtaaatatagaggatctcatatggcccatgtatacgacttttacaagcccgatcttgcgagtgaatatccggtggttgatgggaagctatcacaaacatgctacctcatggcattggactcctgctacaatctattttgcaaaaagtatgaaaaacatgaggggaagcagttttcaatttctgatgcagattatgttgtgttccattctccatacaacaagcttgtacagaaaagcttcgctcgtttgtactacaatgatttcttgagaaactgcagcacggttgatggagagtcaagggaaaaattggcaccctatgcaggcttgtcatctgaagaaagctaccagagtcgcgaccttgaaaaggcatctcagcaagtcgcaaagaatctgtacgagtccaaggttcagccaacaacattgatcccaaaacaagttgggaatatgtatacagcatcactctacgcagctcttgcatcggttgtccacagtagacatgaaactctggcaggccagaggattgttatgttttcgtatggcagtgggttgacatcaacgatgttctctttcatgattaatgaaggccatcaccctttcagtctgctaaacatcgcaaacatactggatatttccaagaaactgaaggcaaggcacgtggttcccccagagaaatttgtggaggcactaaaactgatggagcaccgctatggggcaagagatttcgtgacgagtcaagatacaagtctgctacccgcaggcacatactatctcacgcacgttgactccaagtacagaaggttctacgacgtgaaaggtgacggtgtcgccactgcaatgtccaacggccactgatctttcttctgcccgaagctgcaacaagtcaaataacagaggcaagtgtcctaagcatccttagatgattatatctattaggaggggaagctggagttatagattaatctctgcccagctgtaaggttgtaaagttagttagagctgcgcatgcatgcttgtttagtaaaagctctgctgctcttcagttatttagcgaatcaagcacactgctgggctataagaattgtaaacaataatctgcagaatcactggctacatccaggctatgctgatgaatgcacgatttcatgtttagcacgatcaatgcatctggct

SEQ ID NO: 23167 - protein, 501 aa, Zea mays subsp. mays
  misc_feature (1)..(501): Ceres Seq. ID no. 12411500
GIYIRRRRRGERTPADPAPLTVSRDPLFFACSGGAGDMASEAKDVGILAMDIYFPPNCVLQEELETHDGVSKGKYTIGLGQESMAFCTEVEDVISMSLTAVKSLLKNYNIDPKCIGRLEVGSETVIDKSKSIKTWLMQIFEESGNTDIEGVDSSNACYGGTAALFNCVNWVESKSWDGRYGLVVCTDSAVYAEGPARPTGGAAAIAMLIGPNAPICFESKYRGSHMAHVYDFYKPDLASEYPVVDGKLSQTCYLMALDSCYNLFCKKYEKHEGKQFSISDADYVVFHSPYNKLVQKSFARLYYNDFLRNCSTVDGESREKLAPYAGLSSEESYQSRDLEKASQQVAKNLYESKVQPTTLIPKQVGNMYTASLYAALASVVHSRHETLAGQRIVMFSYGSGLTSTMFSFMINEGHHPFSLLNIANILDISKKLKARHVVPPEKFVEALKLMEHRYGARDFVTSQDTSLLPAGTYYLTHVDSKYRRFYDVKGDGVATAMSNGH

SEQ ID NO: 23168 - protein, 464 aa, Zea mays subsp. mays
  misc_feature (1)..(464): Ceres Seq. ID no. 12411501
MASEAKDVGILAMDIYFPPNCVLQEELETHDGVSKGKYTIGLGQESMAFCTEVEDVISMSLTAVKSLLKNYNIDPKCIGRLEVGSETVIDKSKSIKTWLMQIFEESGNTDIEGVDSSNACYGGTAALFNCVNWVESKSWDGRYGLVVCTDSAVYAEGPARPTGGAAAIAMLIGPNAPICFESKYRGSHMAHVYDFYKPDLASEYPVVDGKLSQTCYLMALDSCYNLFCKKYEKHEGKQFSISDADYVVFHSPYNKLVQKSFARLYYNDFLRNCSTVDGESREKLAPYAGLSSEESYQSRDLEKASQQVAKNLYESKVQPTTLIPKQVGNMYTASLYAALASVVHSRHETLAGQRIVMFSYGSGLTSTMFSFMINEGHHPFSLLNIANILDISKKLKARHVVPPEKFVEALKLMEHRYGARDFVTSQDTSLLPAGTYYLTHVDSKYRRFYDVKGDGVATAMSNGH

SEQ ID NO: 23169 - protein, 452 aa, Zea mays subsp. mays
  misc_feature (1)..(452): Ceres Seq. ID no. 12411502
MDIYFPPNCVLQEELETHDGVSKGKYTIGLGQESMAFCTEVEDVISMSLTAVKSLLKNYNIDPKCIGRLEVGSETVIDKSKSIKTWLMQIFEESGNTDIEGVDSSNACYGGTAALFNCVNWVESKSWDGRYGLVVCTDSAVYAEGPARPTGGAAAIAMLIGPNAPICFESKYRGSHMAHVYDFYKPDLASEYPVVDGKLSQTCYLMALDSCYNLFCKKYEKHEGKQFSISDADYVVFHSPYNKLVQKSFARLYYNDFLRNCSTVDGESREKLAPYAGLSSEESYQSRDLEKASQQVAKNLYESKVQPTTLIPKQVGNMYTASLYAALASVVHSRHETLAGQRIVMFSYGSGLTSTMFSFMINEGHHPFSLLNIANILDISKKLKARHVVPPEKFVEALKLMEHRYGARDFVTSQDTSLLPAGTYYLTHVDSKYRRFYDVKGDGVATAMSNGH

SEQ ID NO: 23170 - DNA, 1289 bp, Zea mays subsp. mays
  misc_feature (1)..(1289): Ceres Seq. ID no. 12411503
gcgcctccgtgcatgcaccgttgccgatcgtcgtcctcctccccactccccagaggccaagccaaaggtccagcaatggcgaggtctccccggcttctcgcgctgctgctggctgtcgtctggatatgcggcgcggccctagtagcgcgtgccgacccgatgctcgagaggttcgagcagtggatgggcaggcacggccggctgtacgctgacgccggagagaagcagaggcggctcgaggtgtaccggaggaacgtcgagctggtcgagaccttcaactccatgggcaacgggtacaggctggccgacaacaagttcgccgacctgacgaacgaggagttcagggccaagatgctgggcttcggacggcctcgcagcggaggcggagccgggcactccacagcgccgagcaccgtggcttgtattggaagtggactgatgggtcgtcagggttattctgatctaccgaaaagcgtggactggcgagagaagggagctgtcgcgccggtgaagagccagggggactgtggctcttgctgggcgttctccgccgttgcggccatcgagggcatcaaccagatcaagaacgggaagctggtgtccctgtcggagcaggagctggtggactgcgacaccaaggccatcggctgcgccggcgggtacatgagctgggccttcgagttcgtcatgaagaaccgcggcctcaccaccgaacggaactacccgtatcaagggctgaacggcgcctgccagacgccgaagctgaaggagagcgcggtgagcatctccgggtacatgaacgtgacgcccagcagcgagccggacctcctgcgggccgccgcggcgcagccggtgtccgtggccgtggacgccggcagcttcgtgtggcagctctacggcggcggcgtcttcacgggaccctgcaccgccgagctgaaccacggcgtcacggtggtcgggtacggcgagacccagggggacacggacggcgacggtagcggcgtgcccgggaagaagtactggatcgtcaagaactcgtgggggcccgagtggggcgacgccggctacatcctcatgcaacgcgaagccagcgtcgcgtctggcctctgcggcatcgctatgctcccgagctacccggtcatgtgatccggcggctgccgccgtcgagacctacagctgcagctctaagaacaatcagtcattatgttggccatcttttgaacaaagggcgttcctctttcccgataagatgatgtcttatcttggcgatcgataaggttacagatagt

SEQ ID NO: 23171 - protein, 381 aa, Zea mays subsp. mays
  misc_feature (1)..(381): Ceres Seq. ID no. 12411504
APPCMHRCRSSSSSPLPRGQAKGPAMARSPRLLALLLAVVWICGAALVARADPMLERFEQWMGRHGRLYADAGEKQRRLEVYRRNVELVETFNSMGNGYRLADNKFADLTNEEFRAKMLGFGRPRSGGGAGHSTAPSTVACIGSGLMGRQGYSDLPKSVDWREKGAVAPVKSQGDCGSCWAFSAVAAIEGINQIKNGKLVSLSEQELVDCDTKAIGCAGGYMSWAFEFVMKNRGLTTERNYPYQGLNGACQTPKLKESAVSISGYMNVTPSSEPDLLRAAAAQPVSVAVDAGSFVWQLYGGGVFTGPCTAELNHGVTVVGYGETQGDTDGDGSGVPGKKYWIVKNSWGPEWGDAGYILMQREASVASGLCGIAMLPSYPVM

SEQ ID NO: 23172 - protein, 377 aa, Zea mays subsp. mays
  misc_feature (1)..(377): Ceres Seq. ID no. 12411505
MHRCRSSSSSPLPRGQAKGPAMARSPRLLALLLAVVWICGAALVARADPMLERFEQWMGRHGRLYADAGEKQRRLEVYRRNVELVETFNSMGNGYRLADNKFADLTNEEFRAKMLGFGRPRSGGGAGHSTAPSTVACIGSGLMGRQGYSDLPKSVDWREKGAVAPVKSQGDCGSCWAFSAVAAIEGINQIKNGKLVSLSEQELVDCDTKAIGCAGGYMSWAFEFVMKNRGLTTERNYPYQGLNGACQTPKLKESAVSISGYMNVTPSSEPDLLRAAAAQPVSVAVDAGSFVWQLYGGGVFTGPCTAELNHGVTVVGYGETQGDTDGDGSGVPGKKYWIVKNSWGPEWGDAGYILMQREASVASGLCGIAMLPSYPVM

SEQ ID NO: 23173 - protein, 356 aa, Zea mays subsp. mays
  misc_feature (1)..(356): Ceres Seq. ID no. 12411506
MARSPRLLALLLAVVWICGAALVARADPMLERFEQWMGRHGRLYADAGEKQRRLEVYRRNVELVETFNSMGNGYRLADNKFADLTNEEFRAKMLGFGRPRSGGGAGHSTAPSTVACIGSGLMGRQGYSDLPKSVDWREKGAVAPVKSQGDCGSCWAFSAVAAIEGINQIKNGKLVSLSEQELVDCDTKAIGCAGGYMSWAFEFVMKNRGLTTERNYPYQGLNGACQTPKLKESAVSISGYMNVTPSSEPDLLRAAAAQPVSVAVDAGSFVWQLYGGGVFTGPCTAELNHGVTVVGYGETQGDTDGDGSGVPGKKYWIVKNSWGPEWGDAGYILMQREASVASGLCGIAMLPSYPVM

SEQ ID NO: 23174 - DNA, 1277 bp, Zea mays subsp. mays
  misc_feature (1)..(1277): Ceres Seq. ID no. 12411507
aatcgaaagggattgatatgttgtgtgaggcttgaaaagataagcatgggatgtcatcttggacttgggatagagataacagagtctgttagagggagaatcacggcgagagcgtgctcgtgggcacccctctccgtcaactggggtgcgcgatcgatcgatcgaaatatcgaactgcagttgccaaaaccccaatccggtcttctatttccgatcgagccgcaaaggaggcaggaagaaggccggcgcaggcgcaggcgcggatggcgatgggagcgacggttcgcgcggcggccgcggacgccgtggtgacgttcctgtgggtgctgtgcgcctccgcgctcggtgcctccacagcagccgtcacgtcgtacctgggggtgcaggagggcgccggccactacgcgctcctcgtcaccacgtccctcctctcggtgctcctcttcaccttcgatctcctctgcggtgcgctcggcggcgccagcttcaaccccaccgacttcgccgcctcctatgccgccggactcgacagcccctccctcttctcggttgcgctccgcttcccggcgcaggccgccggcgctgtgggcggcgccctggccatctcggagctgatgccggcgcagtataagcacacgctcgcgggcccctcactcaaggtggatccccacaccggtgccctagccgaaggggtgctcaccttcgtcatcaccctgaccgtgctctgggtcatcgtcaagggcccccgcaacgtcatcctcaagaccttgctgctctcaacctccatcgtctccgtcatcctcgcaggcgcagagtacacggggccgtctatgaacccagctaatgcatttggctgggcatatgttaacaattggcacaacacatgggagcagctgtatgtgtactggatatgcccctttattggggccatgcttgctggatggatatttagggtggtgttcctaccaccggcacctaagcccaagaccaagaaagcatgattactcgtttatggatgctggtttagaagaaataagaaatagaggaaggtcacataagctcatgtgttgtacttgatttcctcaacttcccacaaactgggtgttgtgctctgttacttatttctcatcaataatttatgtttacttgtaattttgggctagtcaggatgtgtttttgtccttttatttagtttttgtatgttttctttatgagtacagtaaaatcattgatctcaattgagatggaaatgagctgaggtcggctcggcttgctcc

SEQ ID NO: 23175 - protein, 245 aa, Zea mays subsp. mays
  misc_feature (1)..(245): Ceres Seq. ID no. 12411508
MAMGATVRAAAADAVVTFLWVLCASALGASTAAVTSYLGVQEGAGHYALLVTTSLLSVLLFTFDLLCGALGGASFNPTDFAASYAAGLDSPSLFSVALRFPAQAAGAVGGALAISELMPAQYKHTLAGPSLKVDPHTGALAEGVLTFVITLTVLWVIVKGPRNVILKTLLLSTSIVSVILAGAEYTGPSMNPANAFGWAYVNNWHNTWEQLYVYWICPFIGAMLAGWIFRVVFLPPAPKPKTKKA

SEQ ID NO: 23176 - protein, 243 aa, Zea mays subsp. mays
  misc_feature (1)..(243): Ceres Seq. ID no. 12411509
MGATVRAAAADAVVTFLWVLCASALGASTAAVTSYLGVQEGAGHYALLVTTSLLSVLLFTFDLLCGALGGASFNPTDFAASYAAGLDSPSLFSVALRFPAQAAGAVGGALAISELMPAQYKHTLAGPSLKVDPHTGALAEGVLTFVITLTVLWVIVKGPRNVILKTLLLSTSIVSVILAGAEYTGPSMNPANAFGWAYVNNWHNTWEQLYVYWICPFIGAMLAGWIFRVVFLPPAPKPKTKKA

SEQ ID NO: 23177 - protein, 128 aa, Zea mays subsp. mays
  misc_feature (1)..(128): Ceres Seq. ID no. 12411510
MPAQYKHTLAGPSLKVDPHTGALAEGVLTFVITLTVLWVIVKGPRNVILKTLLLSTSIVSVILAGAEYTGPSMNPANAFGWAYVNNWHNTWEQLYVYWICPFIGAMLAGWIFRVVFLPPAPKPKTKKA

SEQ ID NO: 23178 - DNA, 1418 bp, Zea mays subsp. mays
  misc_feature (1)..(1418): Ceres Seq. ID no. 12411535
agtggcactcgcagactcgcttctccccgaaaaacggctgaaccctgaaccctcactacgtcccgccgcctgcttcacagttcaccccggccatggtctccaccgctcgcgccgccctcccgacgccccacctctctctcgcttcctcctcccgccgcaggcccatctgtttttcacgccctcctccgcacctcgcctgcgcggcggcgctgccacctccatcaccgccggcagctccgcctcgccgcagcagcaccaggtcaccacgcgcctgggcgacgtgatagaggcgcagcagttcgatcgggactcgcttaacgagatctttgaggtggcgcgggagatggaggccgtggagcggagctcccacggcgctcccagtcgcgtcctcgaggggtacctcatggccactctcttctacgagccctccacgcgcacgcgcctctccttcgaggccgctatgcggaggctcggcggggaggtgctcaccaccgagaacgcgcgcgagttctcttccgccgccaagggggagacactcaagatacataagaaccgttgagggttattctgatattattgttctgagacattttgaaagtggagctgcaaggagagcagatatactgcgaatattctgttattaatgcaggtgatgggccagggcaacatccaacccaggctttgttggatgtttatacaataaagagagaaattggcacactagatggaataaaacttggtttggttggtgaccttgctaatgggaggacagttcgttctctggcttacttgattgctaagtaccagaacattaagatatactttgtatctccagatgttgttaaaatgaaggatgatatcaaggactacttaaattcccaaggtgttgaatgggaagaatgttcagatttgttggaggtggcatccaagtgtgatgttatttatcaaacacgtattcaaaaagaaagatttggtgagaggattgatctttataaagctgctcgtggtaagtacattgtggataagaaggtcttagatgtgctgccaaagcatgctgtgatcatgcatccccttccaaggcttgatgagatcacggcagaagtcgatagtgatccaagagctgcatattttaggcaggctaagaatggcctctacataaggatggcattgctcaaacttctgcttgttggtcactgacatatctgctagtgtgtgagcttgtgctgcgtcaagggatgaggaaatgtactaataatcagcagctcctgtcaaaattcaacgttcctgcgctgtcagggtaataaaagtctggatccatgctggagtgcagcaaagtttggcatggccatgttaatgtacaaatggtgttcgaaatagagttttgctgttctcatgtgatgtgagaacatggaacgtcg

SEQ ID NO: 23179 - protein, 185 aa, Zea mays subsp. mays
  misc_feature (1)..(185): Ceres Seq. ID no. 12411536
VALADSLLPEKRLNPEPSLRPAACFTVHPGHGLHRSRRPPDAPPLSRFLLPPQAHLFFTPSSAPRLRGGAATSITAGSSASPQQHQVTTRLGDVIEAQQFDRDSLNEIFEVAREMEAVERSSHGAPSRVLEGYLMATLFYEPSTRTRLSFEAAMRRLGGEVLTTENAREFSSAAKGETLKIHKNR

SEQ ID NO: 23180 - protein, 116 aa, Zea mays subsp. mays
  misc_feature (1)..(116): Ceres Seq. ID no. 12411537
MKDDIKDYLNSQGVEWEECSDLLEVASKCDVIYQTRIQKERFGERIDLYKAARGKYIVDKKVLDVLPKHAVIMHPLPRLDEITAEVDSDPRAAYFRQAKNGLYIRMALLKLLLVGH

SEQ ID NO: 23181 - DNA, 1462 bp, Zea mays subsp. mays
  misc_feature (1)..(1462): Ceres Seq. ID no. 12411546
aactgtccaacagtcgcttcaccgtcggcgccgtcggagggacgctccaggtggctgcccccggcagcggaaagtttcctgcggcccctgccctctttcaccaccgcgggttctcaggcagagaaaccttacctgtgcatcatggagattgcagagctcctccaggagcttgtttcatggtcacgtcacctatgttggggccaattagggtatccttagtatgtagcgcgagccccaaccaccataggccaaggatttcggatatatcgcaactacaaaaggaggggtcctccagagggaaaggaaggtcgtaccaggataaagatgactctgagaacatcgatgaatatgatagcgatatcatgttctccaggaatggaccacctatctctttggcaagcacttcccgtcctcaagacacttcagctcctggggaaagagagatggagattgtggagctctttaaaagggttcaagcactgctgcgagctagggtgaaaggcagggaaaagaagcctgaacctgcaaaagtgcatggcgaaaggggcagtgttgattcacttattaagttgcttaggaagcactctgttgaccagagaaggaagagcggtgacgagaaagagcagaattttgatgtaatgaggagaagcaatgattctggaaatagacgaggttcaaccatctttggcacaaaaagtgacatccaggaagagcagaagaagcaacctccggcacccttcaaaaggccagcttcaaatttcaggcgaaggtctcctgttcctggagtgaagttccagcctgttatcaatgtggatgtagacacagatgccgatcgcaagtctatgcgcaataatgtcgccgatgctgtacagatggctaaagacagctcttgatgagaggactgctacagatgagcctgactacatgtctccatatgaacctgattctgtaatcgagccagaaaatattccgttggacgacctcgatgacatttcagacgatgacgaagaatctgatgctgatgaaccagacaacgagtatccagaactgtctttggaaatcgctgatgttacagatacagatgaattgcacgaaagttcatatctaaactctctgaaggttgcagagctgagggagcttgcaaagtcccgaggaatcaaaggctactgaaagatgaagaaaaacgagctgattgaagtcttgagcagcagcatggcatgatgataagtgggtgatgttgtcgacctgtcagcatggtggatgaagactgtcaattattggcctgcgctgcggtctcgacgccgtgcagaggtagctgcagctttgctcattgggtttgttgcttgcttttgtccagagactagggcaggacaggactgtgttaaggcaggcggccgcgttattgcctgtgcttctattgttaccttgtgctatgctatatgctaatcatttggcaggcgtc

SEQ ID NO: 23182 - protein, 296 aa, Zea mays subsp. mays
  misc_feature (1)..(296): Ceres Seq. ID no. 12411547
LSNSRFTVGAVGGTLQVAAPGSGKFPAAPALFHHRGFSGRETLPVHHGDCRAPPGACFMVTSPMLGPIRVSLVCSASPNHHRPRISDISQLQKEGSSRGKGRSYQDKDDSENIDEYDSDIMFSRNGPPISLASTSRPQDTSAPGEREMEIVELFKRVQALLRARVKGREKKPEPAKVHGERGSVDSLIKLLRKHSVDQRRKSGDEKEQNFDVMRRSNDSGNRRGSTIFGTKSDIQEEQKKQPPAPFKRPASNFRRRSPVPGVKFQPVINVDVDTDADRKSMRNNVADAVQMAKDSS

SEQ ID NO: 23183 - protein, 238 aa, Zea mays subsp. mays
  misc_feature (1)..(238): Ceres Seq. ID no. 12411548
MVTSPMLGPIRVSLVCSASPNHHRPRISDISQLQKEGSSRGKGRSYQDKDDSENIDEYDSDIMFSRNGPPISLASTSRPQDTSAPGEREMEIVELFKRVQALLRARVKGREKKPEPAKVHGERGSVDSLIKLLRKHSVDQRRKSGDEKEQNFDVMRRSNDSGNRRGSTIFGTKSDIQEEQKKQPPAPFKRPASNFRRRSPVPGVKFQPVINVDVDTDADRKSMRNNVADAVQMAKDSS

SEQ ID NO: 23184 - protein, 233 aa, Zea mays subsp. mays
  misc_feature (1)..(233): Ceres Seq. ID no. 12411549
MLGPIRVSLVCSASPNHHRPRISDISQLQKEGSSRGKGRSYQDKDDSENIDEYDSDIMFSRNGPPISLASTSRPQDTSAPGEREMEIVELFKRVQALLRARVKGREKKPEPAKVHGERGSVDSLIKLLRKHSVDQRRKSGDEKEQNFDVMRRSNDSGNRRGSTIFGTKSDIQEEQKKQPPAPFKRPASNFRRRSPVPGVKFQPVINVDVDTDADRKSMRNNVADAVQMAKDSS

SEQ ID NO: 23185 - DNA, 1495 bp, Zea mays subsp. mays
  misc_feature (1)..(1495): Ceres Seq. ID no. 12411561
ctggatggctaggcccaaccaaacacgacggcccacgggtgcacctgaggcggcgcacgttgccgactcggctgtctcgtcttccttgtgcttcgcgcactcgccgcccctgcgccctgcgggcagtctcttcttgccctttctcctgtgcgcagccgcggcggacccaatctcgcattctcgcgttccgagatactgttgttctttcagggagatagatagattccgactgctcgccattggggctgccttggccgcgtgccatccgtcgcttcgtcgagctgcgtgcgggggcgctcctcgtcctcctcacgatggggggctggaaccggtcgctgtacgtgacgggccaccgtgaccgctccgccggcgcttcgcgtactcctctgcctccgccttcgcctgattacggagacaagcaccagcaagtcccattatgggagagggaattctgccgccacgttggcgacatcacttgggagcgtttctgtgaaaacaagcagtatgttggacaattccataatcacgagccttgggatgattcagcggcatttgattgtttccagaacgcaaaggcaaggttctgggcgagctaccatggccagccttctgacattcctttgctggacgacccggatctgtacatcgacaaggtcgaccaccaatgcgaagtcgacccggagttggtagctgatctggatagcgtagggctaccgttcgagtcggatgataatcccgcctcagccaaagggtggaccaatgcttgggccaacaacaagtgcacccagaacgggtctggaaactgggacgccttcgtagaaaagccagctgaagtcagtaagtgggactccgaggccaatctcgcatccaacacgacttggggcggccaggccaatgtagcaacacctgaggcggtttggagaggccaatctttcagtaaatggggcaatgatagcaacaccagccggggtgttcctctggagaagccgagctggcgtggctgtagcaagaaccgctacacacccaacagctggagcagcaactttcatagcagaccatccgacaataggtaccagcagctggaggatccgagctacacttctgggactggaaggaaatggaatggcggcgacggcggctggtacgtcaagcagaggaaccaggaccaggggcagcaccagcagccgaggagtggcagctggcagcaggaccaaagaagaaggagcaggcagtggcgtccggtgcacagcagggctccctaaaacggtccggcgtcttgatctcgtggcgagactcgcaggtgtcttcttttgtgcagtcagttttcagctgctgctggcaaagtggtgcctgtaaatagatgttttttgttgttgttttgtttgagttgtatgctgcagctgctccttcgcagctgcgtccttactttgcttatggtgcaatgttaatatgttataatgttagttaatatggggagcatcacagtttttggttc

SEQ ID NO: 23186 - protein, 315 aa, Zea mays subsp. mays
  misc_feature (1)..(315): Ceres Seq. ID no. 12411562
MGGWNRSLYVTGHRDRSAGASRTPLPPPSPDYGDKHQQVPLWEREFCRHVGDITWERFCENKQYVGQFHNHEPWDDSAAFDCFQNAKARFWASYHGQPSDIPLLDDPDLYIDKVDHQCEVDPELVADLDSVGLPFESDDNPASAKGWTNAWANNKCTQNGSGNWDAFVEKPAEVSKWDSEANLASNTTWGGQANVATPEAVWRGQSFSKWGNDSNTSRGVPLEKPSWRGCSKNRYTPNSWSSNFHSRPSDNRYQQLEDPSYTSGTGRKWNGGDGGWYVKQRNQDQGQHQQPRSGSWQQDQRRRSRQWRPVHSRAP

SEQ ID NO: 23187 - DNA, 1417 bp, Zea mays subsp. mays
  misc_feature (1)..(1417): Ceres Seq. ID no. 12411579
gaccgcatcgcgttctacgttctccgccctctccgctccccctactctgcttggtttcccagaagatttgattggtttccccaaatccggtgactccattcctgttgttcttcacgtcgaccccgggaacctcccagaaggctctagcgaccccggccgcccggcgctctgagggctgtgctgccggcggcgagatccaggagctgcctgccatggtgaaggacagcgcctactacgacgtcctaggggtcagcgtcgacgcgtcctccgccgagatcaagaaggcgtattacatcaaggcgaagctggtgcatccggacaagaatcccgggaaccctgacgccgcactcaagttccaggaacttggagaggcctatcaagttcttagtgatcctgggaaaaaggaggcttatgataagtatggaaaggagggtattccccaggataacatggtggatcctgctgctgtctttgggatgatttttggaagtgactattttgaagattacgttggccagcttgctctagcatctatagcctcagtagaggttgatgaaaactcaaacagtcaagaagcaagagcaaaggttcaagaaaagataaaagagttacaaagagagagagaacaaaagcttacccagagcctgaaagaccgacttcaaccatatgtagatgagagaaaggatgaatttgtgagctacgcaagcacagaagctaggcgtttatctgaagcagcatttggtgaggctatgcttcacactattgggtatatttacgtgcggcaagcagcaagagaacttgggaaaagtagaatttatatgggtgtaccgtttatagctgagtgggttagagacaaaggacaccacattaaatcgcaggttaatgctgcttcaggtgctatttctctaatacaacttcaagaagggatgaaaaagatggaaggaagcgagaacagtgaagagcaacttatgaagagttttgaggagaaaaaagatgccatgcttagctcgctatggaaaattaatgtggtcgatattgagtcaacactttcacgtgtctgccaagcagttctgagagataacacggtctccaaagatgtcctgaagctgcgagcgaaagcgttgaaaaagctcggaacgatattccaaggcgcaaaatctatgtaccgtcgtgaaaacagcctgcgcgttgaaaacgagcacaaatcagcaagctaacccgtcacactgaagcccatggaccaccgtgtagcaagggatcggatttggtgatttttttgtggttttggcctttgttaatttgtttgtctgctaacgatagcattcggaaaatgcaaatccggtctacactagtacccctctattaattttctgtagatgtgagcatttaacacgaagctgtgatttgcgcttgatgc

SEQ ID NO: 23188 - protein, 334 aa, Zea mays subsp. mays
  misc_feature (1)..(334): Ceres Seq. ID no. 12411580
MVKDSAYYDVLGVSVDASSAEIKKAYYIKAKLVHPDKNPGNPDAALKFQELGEAYQVLSDPGKKEAYDKYGKEGIPQDNMVDPAAVFGMIFGSDYFEDYVGQLALASIASVEVDENSNSQEARAKVQEKIKELQREREQKLTQSLKDRLQPYVDERKDEFVSYASTEARRLSEAAFGEAMLHTIGYIYVRQAARELGKSRIYMGVPFIAEWVRDKGHHIKSQVNAASGAISLIQLQEGMKKMEGSENSEEQLMKSFEEKKDAMLSSLWKINVVDIESTLSRVCQAVLRDNTVSKDVLKLRAKALKKLGTIFQGAKSMYRRENSLRVENEHKSAS

SEQ ID NO: 23189 - protein, 255 aa, Zea mays subsp. mays
  misc_feature (1)..(255): Ceres Seq. ID no. 12411581
MVDPAAVFGMIFGSDYFEDYVGQLALASIASVEVDENSNSQEARAKVQEKIKELQREREQKLTQSLKDRLQPYVDERKDEFVSYASTEARRLSEAAFGEAMLHTIGYIYVRQAARELGKSRIYMGVPFIAEWVRDKGHHIKSQVNAASGAISLIQLQEGMKKMEGSENSEEQLMKSFEEKKDAMLSSLWKINVVDIESTLSRVCQAVLRDNTVSKDVLKLRAKALKKLGTIFQGAKSMYRRENSLRVENEHKSAS

SEQ ID NO: 23190 - protein, 246 aa, Zea mays subsp. mays
  misc_feature (1)..(246): Ceres Seq. ID no. 12411582
MIFGSDYFEDYVGQLALASIASVEVDENSNSQEARAKVQEKIKELQREREQKLTQSLKDRLQPYVDERKDEFVSYASTEARRLSEAAFGEAMLHTIGYIYVRQAARELGKSRIYMGVPFIAEWVRDKGHHIKSQVNAASGAISLIQLQEGMKKMEGSENSEEQLMKSFEEKKDAMLSSLWKINVVDIESTLSRVCQAVLRDNTVSKDVLKLRAKALKKLGTIFQGAKSMYRRENSLRVENEHKSAS

SEQ ID NO: 23191 - DNA, 1347 bp, Zea mays subsp. mays
  misc_feature (1)..(1347): Ceres Seq. ID no. 12411590
atcatagtgcctgttcctgagccagcagcatctgtctcttgcttcatcagctaggcgcccggccgcgcggaccaggctccaggagaccaaaaatgaagctctcggtggcagtcctctgcgcgcttctggctgtccaggcggcggtgctcctcgccaccgtgccgacgtcgcaggccagcgagctggaggtcgggtactacagcaagaaatgcaagggcgtggagaacgtggtgaagtggcacgtgatcaaggcgctcaaggccagccgccgcaccggcgccgctctcgtccgccttctcttccatgactgcttcgtcaggggatgcgatggttctgtcctcctggacgcttcctacgacaaccctcatccggagaaggaggcgccggtgaacatcggcctcgccgccttcgacctcctggaggagatcaaggccgctgtcgagaagaggtgccccggcgtcgtctcctgctcggacatcctcatctacgcggcccgcgacgcggccagcgtcctcagcaacggccacgtccacttcgccgtccccgccggccgcctggacggcttcgtctccaaggccgaggaggcccaggcggagctcccggactccaaccaagacgtgcagcagctcatcgacaacttcgccaggaagaacttcacggtggaggagctcgtcatcctcaccggggcgcactccatcggccagggccactgctcgtccttcaccggccgcctctccgagccatcgcagcagatcaccccggcgtaccgcgacctgctcaactacaagtgctcccaggggtccaacccgcccgtggacaacaacgtccgcgacgaggactacgacgtggtggcgaggttcatgccggggttcaccagccgggtgcgcaagatccccgacttcctggacaactccttctaccacaacaacctggccaagatcgtcaccttccactccgactggacgctgctcacgcacaaggaggcgttcggccacgtcgtggagtacgccgagaacgccacgctatgggacgaggacttctcggactcgctgctcaagctcagcaagctgcccatgcccaaaggaagcaagggagagatcaggaagaagtgcagcgtcgttaaccaccgcttatactaagcctgccagatgccgtggaaatcgaagaaagaggtcgtgccagcacaacacatatatatcaaccatcggagatcagaaagccataaggttgcgcttttttgtttcatccattcttttgattatcattcgtttgtgctacactcatctttttgtgtatttctcatgcatatctgtcaaactgcaataaaactttgttcctgatatgtgc

SEQ ID NO: 23192 - protein, 348 aa, Zea mays subsp. mays
  misc_feature (1)..(348): Ceres Seq. ID no. 12411591
MKLSVAVLCALLAVQAAVLLATVPTSQASELEVGYYSKKCKGVENVVKWHVIKALKASRRTGAALVRLLFHDCFVRGCDGSVLLDASYDNPHPEKEAPVNIGLAAFDLLEEIKAAVEKRCPGVVSCSDILIYAARDAASVLSNGHVHFAVPAGRLDGFVSKAEEAQAELPDSNQDVQQLIDNFARKNFTVEELVILTGAHSIGQGHCSSFTGRLSEPSQQITPAYRDLLNYKCSQGSNPPVDNNVRDEDYDVVARFMPGFTSRVRKIPDFLDNSFYHNNLAKIVTFHSDWTLLTHKEAFGHVVEYAENATLWDEDFSDSLLKLSKLPMPKGSKGEIRKKCSVVNHRLY

SEQ ID NO: 23193 - protein, 266 aa, Zea mays subsp. mays
  misc_feature (1)..(266): Ceres Seq. ID no. 12411592
MRWFCPPGRFLRQPSSGEGGAGEHRPRRLRPPGGDQGRCREEVPRRRLLLGHPHLRGPRRGQRPQQRPRPLRRPRRPPGRLRLQGRGGPGGAPGLQPRRAAAHRQLRQEELHGGGARHPHRGALHRPGPLLVLHRPPLRAIAADHPGVPRPAQLQVLPGVQPARGQQRPRRGLRRGGEVHAGVHQPGAQDPRLPGQLLLPQQPGQDRHLPLRLDAAHAQGGVRPRRGVRRERHAMGRGLLGLAAQAQQAAHAQRKQGRDQEEVQRR

SEQ ID NO: 23194 - DNA, 1305 bp, Zea mays subsp. mays
  misc_feature (1)..(1305): Ceres Seq. ID no. 12411593
gtcatcgattcagagctcacgagtcacgatccaaatcccttttccactccgccggacgtcgagagaggcggtgggtgcgggacgcgaaggcgaagccctagccccctccctgccgcggacgccgatggacccacctcgcgccgtcgcctttcttctcatactcctgcccgtgctcgccccggtggcctccggtgtacctttcgtcgtcctacacgggattggcgacgagtgcgggaacgatgggctgtcatccttcaccaagatgcttggggagtggtcaggctccaagggttactgcattgaaattggaagaggagcatgggactcttggttaatgccacttcaagagcaggcaaatacggtttgtaagaaggtcaagaaaatgaaagagctcagtgaaggttacaatatagttggcctgtctcaggggaacttaattggcagggctgtaatcgagtactgtgattgtggacctccggtcaagaatttcatatcaattgggggtcctcatgctggtacagcttcagtgccactttgtggttctgggtttctttgtattcttattgatgatctgattaaatcagagatatattcagactatgtgcaggcgcatcttgcccctagtggttacctaaagatacccactgatatggaagattatttgaagggttgcaaatttcttccaaaacttaacaatgagatcccaagtgcaagaaatactacctataaagaaagattcagcagcttggaaaacttggtactgatcatgtttgaggacgatgcagtattaatacctcgggaaacagcgtggtttggttattaccctgatggagcctttagcccagtgctgccccctcaagagacgaagctgtatacagaagattggattggcttgaagaccctggacgaggctgggcgtgttaaattcgtgtctgtgccaggaggtcacctgcgtatcaccagaagcgacatgaagaagtacattgtgccttacttgacgccggaggcgtcatccaagaagaacatacacatacaccggatgctgtcgctttgagcgagtatctaacaaggtttgtatcggtggccattgtgccctgacacgtgggccatgtgttgacgccttgtaaatacgctgaacacgaagggaggaaatgatagctccttggaagagtggatccgaacttgtgaagtgaagcgtgtttggtcctttccgtttcctatctgacaaacaaatatgtccatgccgtggccacaacacgcataaatcattatgcacatttcctattgagtaaaatacaattccgg

SEQ ID NO: 23195 - protein, 350 aa, Zea mays subsp. mays
  misc_feature (1)..(350): Ceres Seq. ID no. 12411594
SSIQSSRVTIQIPFPLRRTSREAVGAGREGEALAPSLPRTPMDPPRAVAFLLILLPVLAPVASGVPFVVLHGIGDECGNDGLSSFTKMLGEWSGSKGYCIEIGRGAWDSWLMPLQEQANTVCKKVKKMKELSEGYNIVGLSQGNLIGRAVIEYCDCGPPVKNFISIGGPHAGTASVPLCGSGFLCILIDDLIKSEIYSDYVQAHLAPSGYLKIPTDMEDYLKGCKFLPKLNNEIPSARNTTYKERFSSLENLVLIMFEDDAVLIPRETAWFGYYPDGAFSPVLPPQETKLYTEDWIGLKTLDEAGRVKFVSVPGGHLRITRSDMKKYIVPYLTPEASSKKNIHIHRMLSL

SEQ ID NO: 23196 - protein, 309 aa, Zea mays subsp. mays
  misc_feature (1)..(309): Ceres Seq. ID no. 12411595
MDPPRAVAFLLILLPVLAPVASGVPFVVLHGIGDECGNDGLSSFTKMLGEWSGSKGYCIEIGRGAWDSWLMPLQEQANTVCKKVKKMKELSEGYNIVGLSQGNLIGRAVIEYCDCGPPVKNFISIGGPHAGTASVPLCGSGFLCILIDDLIKSEIYSDYVQAHLAPSGYLKIPTDMEDYLKGCKFLPKLNNEIPSARNTTYKERFSSLENLVLIMFEDDAVLIPRETAWFGYYPDGAFSPVLPPQETKLYTEDWIGLKTLDEAGRVKFVSVPGGHLRITRSDMKKYIVPYLTPEASSKKNIHIHRMLSL

SEQ ID NO: 23197 - protein, 263 aa, Zea mays subsp. mays
  misc_feature (1)..(263): Ceres Seq. ID no. 12411596
MLGEWSGSKGYCIEIGRGAWDSWLMPLQEQANTVCKKVKKMKELSEGYNIVGLSQGNLIGRAVIEYCDCGPPVKNFISIGGPHAGTASVPLCGSGFLCILIDDLIKSEIYSDYVQAHLAPSGYLKIPTDMEDYLKGCKFLPKLNNEIPSARNTTYKERFSSLENLVLIMFEDDAVLIPRETAWFGYYPDGAFSPVLPPQETKLYTEDWIGLKTLDEAGRVKFVSVPGGHLRITRSDMKKYIVPYLTPEASSKKNIHIHRMLSL

SEQ ID NO: 23198 - DNA, 1256 bp, Zea mays subsp. mays
  misc_feature (1)..(1256): Ceres Seq. ID no. 12411597
atctccggcctcacaccgcaaccgcaagcaagcgaagcgcagagcctgcctgaccagagctagctgagctacagccaacagcagctggtctgactgacatggcgaaggacatcgaggcatcggggcccgaggcgggcgagttctcggccaaggactacaccgaccctccgccggcgccgctgatcgacgcggaggagctcacccagtggtcactgtaccgcgcggtcatcgccgagttcatcgccacgctgctcttcctctacatcaccgtggccaccgtgatcgggtacaagcaccagacggacgcgtcggcgtcgggccccgacgcggcgtgcggcggcgtcggcatcctcggcatcgcttgggccttcggcggcatgatcttcatcctcgtctactgcaccgccggcatctcaggtgggcacatcaacccggccgtgaccttcggcctgttcctggccaggaaggtgtccctcgtccgcgcgctgctctacatcatcgcgcagtgcctgggcgccatctgcggcgtgggcctcgtcaagggcttccagagcgcctactacgtgcgctacggcggcggcgccaacgagctcagcgacggctactccaagggcaccggcctcgccgccgagatcatcggcacgttcgtgctcgtctacaccgtcttctccgccaccgaccccaagcgcagtgcccgtgactcccacgttccggtgctagctcctctcccaattgggttcgccgtgttcatggtgcacctggccaccatccccatcaccggcaccggcatcaacccggcgaggagcctgggagccgcggtcatctacaacaaggacaaggcctgggacgaccaatggatcttctgggtgggcccactgattggcgccgccatcgccgccgcctaccaccagtacgtgctgagggccagcgccaccaagctcgggtcctaccggagcaacgcctaagttccgcccggacgcgccaggagctgggcaccgttccgattctgttcctccacatgacgccctgttctgtttccgtgtggccaggactccgctcgctcgctgctgttttctacttcggaccaaagtgtgacatatctttgctttctgtatatgtatgtaggaatgcatcatgtaaggagaatttggaatacaattgcgtgagtttttatccgatcacaatctattgagtagtggcatataaaaaatgtcctgccctttctttaaacgaatgaaagtaaagaaaagaacctc

SEQ ID NO: 23199 - protein, 288 aa, Zea mays subsp. mays
  misc_feature (1)..(288): Ceres Seq. ID no. 12411598
MAKDIEASGPEAGEFSAKDYTDPPPAPLIDAEELTQWSLYRAVIAEFIATLLFLYITVATVIGYKHQTDASASGPDAACGGVGILGIAWAFGGMIFILVYCTAGISGGHINPAVTFGLFLARKVSLVRALLYIIAQCLGAICGVGLVKGFQSAYYVRYGGGANELSDGYSKGTGLAAEIIGTFVLVYTVFSATDPKRSARDSHVPVLAPLPIGFAVFMVHLATIPITGTGINPARSLGAAVIYNKDKAWDDQWIFWVGPLIGAAIAAAYHQYVLRASATKLGSYRSNA

SEQ ID NO: 23200 - protein, 195 aa, Zea mays subsp. mays
  misc_feature (1)..(195): Ceres Seq. ID no. 12411599
MIFILVYCTAGISGGHINPAVTFGLFLARKVSLVRALLYIIAQCLGAICGVGLVKGFQSAYYVRYGGGANELSDGYSKGTGLAAEIIGTFVLVYTVFSATDPKRSARDSHVPVLAPLPIGFAVFMVHLATIPITGTGINPARSLGAAVIYNKDKAWDDQWIFWVGPLIGAAIAAAYHQYVLRASATKLGSYRSNA

SEQ ID NO: 23201 - DNA, 1191 bp, Zea mays subsp. mays
  misc_feature (1)..(1191): Ceres Seq. ID no. 12411600
gtccaaaaaggaggcgccgcgctcctcttcttctacgccgttcactctctctagtctctcccttcccttctccacgcctccgcccccactcgtgagactctacctagccctagcgccagcaccacccgcccaacctcccggagagagagagagagaggaggaggccttcgccgccgccgttgccgtcggccgagacgccaggatgttcgggtaccagaagggcctcgatgtcgaggcggggacatcgggcgccgccgccacgggcggcgcgcgccagctctacccggggatgcaggagagccccgagctgcgctgggcgctcatccgcaagatctacgtcattctctccctccagctgctcctcaccgccgtcgtcgccgcagtcgtcgtcaaggtccgcgccatcccgcacttcttcaccaccaccagcgccggcctcggcctctacatcttcctcatcatcctcccctttatcgtgctgtgcccgttgtacttctaccacgagaagcacccagtcaacctgatcctgctcggcctcttcaccgttgccatcagctttgctgtgggcatgacatgtgccttcaccagtggcaaggtcattctggagtctgcaattctgacaacagtggtcgtgctcagccttaccgcatacactttctgggccgtgaataggggcaaagacttcagcttcctgggtcctttcctgttcgccgccctcatagtgctgcttgtgttcgcactcatccagatcctgttcccactgggcaagctctcccagatgatctacggcgggctggcgtcgctcatcttcagcgggtacatcgtctacgacacaaacaacatcatcaggcgctacacgtacgaccagtacgtctgggccgcagtctccctgtacctggacgttatcaacctcttcctgtccctgatgaccctcttcagggcagccgactaggcgctctgctctcatcctgtctatctacgagtcggtgcctgaatgctcccgtggttaagctccggtacccagaattccagttccaagaatagagttgtatatagctacctgtgttgcctttctactagtatggttttattcgacttggctcggttcgatcagagtctttatacgtagttggatcgcgaacaaatgaacctgcatgggattatggagagccatctgctttatgatcctcg

SEQ ID NO: 23202 - protein, 316 aa, Zea mays subsp. mays
  misc_feature (1)..(316): Ceres Seq. ID no. 12411601
SKKEAPRSSSSTPFTLSSLSLPFSTPPPPLVRLYLALAPAPPAQPPGEREREEEAFAAAVAVGRDARMFGYQKGLDVEAGTSGAAATGGARQLYPGMQESPELRWALIRKIYVILSLQLLLTAVVAAVVVKVRAIPHFFTTTSAGLGLYIFLIILPFIVLCPLYFYHEKHPVNLILLGLFTVAISFAVGMTCAFTSGKVILESAILTTVVVLSLTAYTFWAVNRGKDFSFLGPFLFAALIVLLVFALIQILFPLGKLSQMIYGGLASLIFSGYIVYDTNNIIRRYTYDQYVWAAVSLYLDVINLFLSLMTLFRAAD

SEQ ID NO: 23203 - protein, 249 aa, Zea mays subsp. mays
  misc_feature (1)..(249): Ceres Seq. ID no. 12411602
MFGYQKGLDVEAGTSGAAATGGARQLYPGMQESPELRWALIRKIYVILSLQLLLTAVVAAVVVKVRAIPHFFTTTSAGLGLYIFLIILPFIVLCPLYFYHEKHPVNLILLGLFTVAISFAVGMTCAFTSGKVILESAILTTVVVLSLTAYTFWAVNRGKDFSFLGPFLFAALIVLLVFALIQILFPLGKLSQMIYGGLASLIFSGYIVYDTNNIIRRYTYDQYVWAAVSLYLDVINLFLSLMTLFRAAD

SEQ ID NO: 23204 - protein, 220 aa, Zea mays subsp. mays
  misc_feature (1)..(220): Ceres Seq. ID no. 12411603
MQESPELRWALIRKIYVILSLQLLLTAVVAAVVVKVRAIPHFFTTTSAGLGLYIFLIILPFIVLCPLYFYHEKHPVNLILLGLFTVAISFAVGMTCAFTSGKVILESAILTTVVVLSLTAYTFWAVNRGKDFSFLGPFLFAALIVLLVFALIQILFPLGKLSQMIYGGLASLIFSGYIVYDTNNIIRRYTYDQYVWAAVSLYLDVINLFLSLMTLFRAAD

SEQ ID NO: 23205 - DNA, 1561 bp, Zea mays subsp. mays
  misc_feature (1)..(1561): Ceres Seq. ID no. 12411608
ctctccccgtctgcctcgccctccacaccaggccacgccacacacaggatagcgagcgggagcgacggcggcggcggaggagctagggttttgatccggcctcgccggctaggctgcgccgccccgacgccgaagccatggacagggagcttctagagacgtttgacgcggccaagaaggcggccgacgaggcggcaggggacggcaactcgccggaggctggccgctgcctcgacgcgctgcggcggctgcgcgacattcgcgtcaacaccgacatcctcgtctcgacgcaggttggcaaacgccttcgaccccttactaagcatcctcactcaggcattcaagcagttgctgcagacctttttgggtactggaaaaaggttgtccttgaagagtcaggaaagaaaaatggcggctcagagaatgaaagatcaagtgactcttcaggaaaggttgagaaggtgaggcccgtgaagattgaaaagaactctgcatcagcaagcatgaagcttgagaaaagagatgtggatgttaggggtcagaagcctaacaatgtcaaagttgagaagactactagtaatggttccaaagctcaatctgtgaaggtggaaagggtatccaaagaagtcataaggactcctgactcgaagaggccagcatccgtccccaatggccacccaaagcttacatctcttgtcaaatgcaatgatcctacccgagataaaatccgggaactacttgctgaagcctttgtaagtgtttccagagagactagtgatgatgacagagacgaagtgaaaaacatcttggatgaagtcgaggcatgcgacccatacagggttgccgtgacagtagagtctgcactattcgagaggcttggaccttccactgggactcacagggcgaaatacaggtcaatcatgttcaacctgagggctgaaaacaataccgatttccggaggagggtcctcatcggtctagtggcgccggagaggcttccagacataccccctgatgagatggctagcgacgcaaggaagcaagagaacatgcagatcaaggagaaggctctgttcgactgcgagcgtggagcggcaccaaaggcgacgacggaccagttcaagtgtgccagatgtgggcagcggaagacgacttactaccagctgcagactcggagtgctgatgaaccgatgacgacgttcgtcacatgcgtgaactgcaacaatcactggaagttctgctgagtgttcagccttgctaaagtgtttacttagttgtgctgagcacactatcctgctgtgatgtgtgtgctctgttagttgtgactggaagttcgacagggcaggctgaacaactcaacttttttccccttttttaccccccgtaaactaggagcagttatcctcttcctctgtcaggcagcctcctgattcattcagattgtactagtcgaacgcgtgaatgttgttgacttgatcgcatcgtcaccagatgtgaatgttcttgggtggagttagaatagaatggtgccaagtcagacgatgctgatggattagtggcg

SEQ ID NO: 23206 - protein, 368 aa, Zea mays subsp. mays
  misc_feature (1)..(368): Ceres Seq. ID no. 12411609
MDRELLETFDAAKKAADEAAGDGNSPEAGRCLDALRRLRDIRVNTDILVSTQVGKRLRPLTKHPHSGIQAVAADLFGYWKKVVLEESGKKNGGSENERSSDSSGKVEKVRPVKIEKNSASASMKLEKRDVDVRGQKPNNVKVEKTTSNGSKAQSVKVERVSKEVIRTPDSKRPASVPNGHPKLTSLVKCNDPTRDKIRELLAEAFVSVSRETSDDDRDEVKNILDEVEACDPYRVAVTVESALFERLGPSTGTHRAKYRSIMFNLRAENNTDFRRRVLIGLVAPERLPDIPPDEMASDARKQENMQIKEKALFDCERGAAPKATTDQFKCARCGQRKTTYYQLQTRSADEPMTTFVTCVNCNNHWKFC

SEQ ID NO: 23207 - protein, 246 aa, Zea mays subsp. mays
  misc_feature (1)..(246): Ceres Seq. ID no. 12411610
MKLEKRDVDVRGQKPNNVKVEKTTSNGSKAQSVKVERVSKEVIRTPDSKRPASVPNGHPKLTSLVKCNDPTRDKIRELLAEAFVSVSRETSDDDRDEVKNILDEVEACDPYRVAVTVESALFERLGPSTGTHRAKYRSIMFNLRAENNTDFRRRVLIGLVAPERLPDIPPDEMASDARKQENMQIKEKALFDCERGAAPKATTDQFKCARCGQRKTTYYQLQTRSADEPMTTFVTCVNCNNHWKFC

SEQ ID NO: 23208 - DNA, 1617 bp, Zea mays subsp. mays
  misc_feature (1)..(1617): Ceres Seq. ID no. 12411615
aaccggacaaatcaccccgtcgtctcgtcccgtagtcactcgcagagtcgcagtcgcagcccctgcgcccaccgggatcgtgatggagagctgggtccgcgcggtgggtggaggccatccactcctctcgctcccagacagtcatctacctcgccgggcggtgcatcccaggcgctcggttggctcctctccgtgcccggcgcttcgggcaccgtcctcgaggtcgtcgtgccatactctagggcctccatggcgcagctccttggcaagatgcccctgcaattcactagcaagcaggctgcagaggacatggcactggccgcatacaatcgagcactcaagctttctggaccaggtctgcaagttatgggtgttggatttactgggtcactggcgagctcacgtccaaaacatggtgaccacaggttttacgtgtcaacatggacacataattgtctcaggacatcacatgttaccttgtcgaagggtttacggagtagggaggaagaagacaaggtttcaagctactttttgcttaaggcaatagcagatacctgcagagtttctgcaaccattcagtcagacattcacaaatctgaaattccagaagaaatcatggaacaatttgatgaagatcaagaactccagcaagttattaatgggcaagtttgcatgaaagtatataattttgctgctccggcggaaagtaacttgaacagaaaaataattctgcctggttcgttcaaccccttgcacgatggtcaccttagattgctagaagctgcagtaagcatgtgtgatgatgggcttccattctttgagatatcagcaattaatgctgataaacctccactatctattgcagaaattaagaggcgtgttgagcaatttagaaaagcagggaagaatgtgattatatctaaccagccatacttctataagaaagcagaacttttcccaggaagcgcttttataattggtgcagacactgcagcaaggcttgttaatcctaagtactatggaggagattacaacagaatgctggagatacttctcgaatgtaagagcatagggactacttttcttgttggtggtcgaaagattgaaggagatttcaaggtccttgagaacttagacattccagaagagctgagagaaatgttcatttctattccggaggaaaagtttcgcatagatatttcatctactgaaataagaaagagccaagggctctgatgtatcaagtggtcgtattctacagcagatttgggatgattctccacgactatagaagattatgataggtccattcatgcatccttgcaaaggaactgttgatgtattctcagggagaatattttatttaacttttgtcttgactgggccccttggtattttgttcagcaaattggaatcaatcctcttgtagaacctcttgatgtcttcactaccccttgcggctaggtggtcaacctctgtctcatatctttggtacaacgctggcaaagtgtgggcgcagagaaatcctgtggatggaatataagaattgttaaatgtatgtcacaactgctttatatattgtcttgccttgttataaaagtcacatttttctgcgct

SEQ ID NO: 23209 - protein, 411 aa, Zea mays subsp. mays
  misc_feature (1)..(411): Ceres Seq. ID no. 12411616
NRTNHPVVSSRSHSQSRSRSPCAHRDRDGELGPRGGWRPSTPLAPRQSSTSPGGASQALGWLLSVPGASGTVLEVVVPYSRASMAQLLGKMPLQFTSKQAAEDMALAAYNRALKLSGPGLQVMGVGFTGSLASSRPKHGDHRFYVSTWTHNCLRTSHVTLSKGLRSREEEDKVSSYFLLKAIADTCRVSATIQSDIHKSEIPEEIMEQFDEDQELQQVINGQVCMKVYNFAAPAESNLNRKIILPGSFNPLHDGHLRLLEAAVSMCDDGLPFFEISAINADKPPLSIAEIKRRVEQFRKAGKNVIISNQPYFYKKAELFPGSAFIIGADTAARLVNPKYYGGDYNRMLEILLECKSIGTTFLVGGRKIEGDFKVLENLDIPEELREMFISIPEEKFRIDISSTEIRKSQGL

SEQ ID NO: 23210 - protein, 328 aa, Zea mays subsp. mays
  misc_feature (1)..(328): Ceres Seq. ID no. 12411617
MAQLLGKMPLQFTSKQAAEDMALAAYNRALKLSGPGLQVMGVGFTGSLASSRPKHGDHRFYVSTWTHNCLRTSHVTLSKGLRSREEEDKVSSYFLLKAIADTCRVSATIQSDIHKSEIPEEIMEQFDEDQELQQVINGQVCMKVYNFAAPAESNLNRKIILPGSFNPLHDGHLRLLEAAVSMCDDGLPFFEISAINADKPPLSIAEIKRRVEQFRKAGKNVIISNQPYFYKKAELFPGSAFIIGADTAARLVNPKYYGGDYNRMLEILLECKSIGTTFLVGGRKIEGDFKVLENLDIPEELREMFISIPEEKFRIDISSTEIRKSQGL

SEQ ID NO: 23211 - protein, 321 aa, Zea mays subsp. mays
  misc_feature (1)..(321): Ceres Seq. ID no. 12411618
MPLQFTSKQAAEDMALAAYNRALKLSGPGLQVMGVGFTGSLASSRPKHGDHRFYVSTWTHNCLRTSHVTLSKGLRSREEEDKVSSYFLLKAIADTCRVSATIQSDIHKSEIPEEIMEQFDEDQELQQVINGQVCMKVYNFAAPAESNLNRKIILPGSFNPLHDGHLRLLEAAVSMCDDGLPFFEISAINADKPPLSIAEIKRRVEQFRKAGKNVIISNQPYFYKKAELFPGSAFIIGADTAARLVNPKYYGGDYNRMLEILLECKSIGTTFLVGGRKIEGDFKVLENLDIPEELREMFISIPEEKFRIDISSTEIRKSQGL

SEQ ID NO: 23212 - DNA, 1254 bp, Zea mays subsp. mays
  misc_feature (1)..(1254): Ceres Seq. ID no. 12411619
atggaaccgtacctccagtggttagggatacagctcatggagctcggcggtaccgcaatgtcgctgctgctgctgctcgtgctcgccgcgtcgccattgcagcaggccagggcggttggcggcggcaggccgcgggtgccggccatcctggtgttcggcgactccatcgtggacacgggcaacaacaacgccgtcctcacgctcaccaagtccaacttcaggccatacggcaaggacctcaacggcggcgtacccaccggacgcttctccaacggccggattccgacggacttcgtagcttcacggctcggcttgaaagatctggttccggcgtatctcggcaccgacctcagcgacgacgacctctgcacgggcgtcagcttcgcgtctgggggcaccggctacgacccgctcacctccactctcgtggaggagctcaacatgttcgcggagtacaaggagaggctcgcaggggtcgtcggagacgaggccgccgccgcaggaatcgtggccgaaagcctgttccttgtctgcgccgggtcggacgacatcgccaacaactactacctcgcccccgtcagacctctgcagtacgacatctcggcgtacgtggatttccttgtggagcaggcctgcgacttcattaggcaactgtaccagcaaggggccaggaggatcgcggtcctggggatgccgccggtcgggtgcgtgccctcgcagcggaccctcgccggcggcctagccagggactgcgaccccgctcgcaaccacgcggcgcagctgtacaactccaggctgaaggaggaggtagtgctgctccagaaggagctggcgtgccagagaatcggctacgtggatatctacgacgtcctgcaggacatgatcacgaacccctgcaaatacggcttcgaggtctccacgagaggatgctgcggcaccggggacttggaggtgtcgctcctgtgcaaccagctgacggcgccgacgtgccctgacgaccggaaatacgtcttctgggacagcttccatcccaccgagaaagcatacgagatcatcgtggactacctgttcccgagatacatagagaacctgctataattacttctgctttaccgtcgcttctttaattcgatcgtttctagttgttgtcaagtttagacatgccgtctttgtttcccaatttaagcttttgctttaaaactcaagacttttcaaggaaatgaaatgacacctgctagcttgttgcaagctgtt

SEQ ID NO: 23213 - protein, 365 aa, Zea mays subsp. mays
  misc_feature (1)..(365): Ceres Seq. ID no. 12411620
MEPYLQWLGIQLMELGGTAMSLLLLLVLAASPLQQARAVGGGRPRVPAILVFGDSIVDTGNNNAVLTLTKSNFRPYGKDLNGGVPTGRFSNGRIPTDFVASRLGLKDLVPAYLGTDLSDDDLCTGVSFASGGTGYDPLTSTLVEELNMFAEYKERLAGVVGDEAAAAGIVAESLFLVCAGSDDIANNYYLAPVRPLQYDISAYVDFLVEQACDFIRQLYQQGARRIAVLGMPPVGCVPSQRTLAGGLARDCDPARNHAAQLYNSRLKEEVVLLQKELACQRIGYVDIYDVLQDMITNPCKYGFEVSTRGCCGTGDLEVSLLCNQLTAPTCPDDRKYVFWDSFHPTEKAYEIIVDYLFPRYIENLL

SEQ ID NO: 23214 - protein, 353 aa, Zea mays subsp. mays
  misc_feature (1)..(353): Ceres Seq. ID no. 12411621
MELGGTAMSLLLLLVLAASPLQQARAVGGGRPRVPAILVFGDSIVDTGNNNAVLTLTKSNFRPYGKDLNGGVPTGRFSNGRIPTDFVASRLGLKDLVPAYLGTDLSDDDLCTGVSFASGGTGYDPLTSTLVEELNMFAEYKERLAGVVGDEAAAAGIVAESLFLVCAGSDDIANNYYLAPVRPLQYDISAYVDFLVEQACDFIRQLYQQGARRIAVLGMPPVGCVPSQRTLAGGLARDCDPARNHAAQLYNSRLKEEVVLLQKELACQRIGYVDIYDVLQDMITNPCKYGFEVSTRGCCGTGDLEVSLLCNQLTAPTCPDDRKYVFWDSFHPTEKAYEIIVDYLFPRYIENLL

SEQ ID NO: 23215 - protein, 346 aa, Zea mays subsp. mays
  misc_feature (1)..(346): Ceres Seq. ID no. 12411622
MSLLLLLVLAASPLQQARAVGGGRPRVPAILVFGDSIVDTGNNNAVLTLTKSNFRPYGKDLNGGVPTGRFSNGRIPTDFVASRLGLKDLVPAYLGTDLSDDDLCTGVSFASGGTGYDPLTSTLVEELNMFAEYKERLAGVVGDEAAAAGIVAESLFLVCAGSDDIANNYYLAPVRPLQYDISAYVDFLVEQACDFIRQLYQQGARRIAVLGMPPVGCVPSQRTLAGGLARDCDPARNHAAQLYNSRLKEEVVLLQKELACQRIGYVDIYDVLQDMITNPCKYGFEVSTRGCCGTGDLEVSLLCNQLTAPTCPDDRKYVFWDSFHPTEKAYEIIVDYLFPRYIENLL

SEQ ID NO: 23216 - DNA, 1467 bp, Zea mays subsp. mays
  misc_feature (1)..(1467): Ceres Seq. ID no. 12411666
acatacctgactctcctccgatctctcagcacgctcctcttctgctaccttgctttccctgctgcgatccgttccttgccctattagtattagctagccggccggccggatcgacgatcgagcaaggagaggcgccccagcagtcctcgtcggatctatccatctcgtcgacagcgtcagcgcctcaggtggatcggagcggaggtggtggaccgggagctagtagctgccacacatttcggtcttcgaaaccacatatcatgatgtcgtcctcgtcctcgtcgtcggccgcctgctgcttcccgctggaccacctcgcgccgtcccccaccgagcagctctgctacgtgcactgcaactgctgcgacaccatcctcgccgtcggcgtgccctgcagcagcctgttcaagacggtgacggtgcgctgcggccactgcgccaacctactctccgtcaacctccgcggcctcctgctcccgcccgccgcgccggcgccgcccaaccatctcaacttcgctcactccttgctgtcacccacatccccgcatggcctcttggacgagttggctctccagcaggcgccgagcttcctgatggagcaggcgagtgccaacctgagcagcaccatgacgggccgcagcagcaacagcagctgcgccagcaacctgccgccgccggcgccgatgccggcagctcagcctgtgcagcaggaagccgaactgcccaagaccgccccgtcggtaaacaggcctccggagaagcggcagagagtcccgtcggcatacaaccggttcatcaaggacgagatccagcgcatcaaggccggcaacccggacatcacccaccgggaggcgttcagcgcagccgcaaagaattgggcccatttcccccacatccacttcggcctcatgccggaccagggcctcaagaagaccttcaagactcaggatggcgctgaagacatgctactcaaagacgatctctacgccgcagcggctgcagctgcagcagccaacatgggcatcactccattctaataactctggttaggcatgtgttctgaatcagctggcacgtcgtagtggctatcgccctttgtgctgcattctagggtttcgtctcagatcttgatctcaacatcgatcgtgtgtcgtttaattagagtactttccagtgtggggatagaaatggagaataatcaagttagagcgcgcacctagtaggccactgatgatccggtaggtacagacttgattgtctcctctaaatatcccttttcatttcatgttctctctgtttttcctattttttttgttcctggaccccttcaactcgccagtagagagctcgttgtgcctctctgatcccatgtttgcgtatgtctgctcaacaacatgtttttaccatggagaacaagttgaacatctgttagatctatcaacagtgtcatatatatgttccatcgtc

SEQ ID NO: 23217 - protein, 344 aa, Zea mays subsp. mays
  misc_feature (1)..(344): Ceres Seq. ID no. 12411667
IPDSPPISQHAPLLLPCFPCCDPFLALLVLASRPAGSTIEQGEAPQQSSSDLSISSTASAPQVDRSGGGGPGASSCHTFRSSKPHIMMSSSSSSSAACCFPLDHLAPSPTEQLCYVHCNCCDTILAVGVPCSSLFKTVTVRCGHCANLLSVNLRGLLLPPAAPAPPNHLNFAHSLLSPTSPHGLLDELALQQAPSFLMEQASANLSSTMTGRSSNSSCASNLPPPAPMPAAQPVQQEAELPKTAPSVNRPPEKRQRVPSAYNRFIKDEIQRIKAGNPDITHREAFSAAAKNWAHFPHIHFGLMPDQGLKKTFKTQDGAEDMLLKDDLYAAAAAAAAANMGITPF

SEQ ID NO: 23218 - protein, 258 aa, Zea mays subsp. mays
  misc_feature (1)..(258): Ceres Seq. ID no. 12411668
MMSSSSSSSAACCFPLDHLAPSPTEQLCYVHCNCCDTILAVGVPCSSLFKTVTVRCGHCANLLSVNLRGLLLPPAAPAPPNHLNFAHSLLSPTSPHGLLDELALQQAPSFLMEQASANLSSTMTGRSSNSSCASNLPPPAPMPAAQPVQQEAELPKTAPSVNRPPEKRQRVPSAYNRFIKDEIQRIKAGNPDITHREAFSAAAKNWAHFPHIHFGLMPDQGLKKTFKTQDGAEDMLLKDDLYAAAAAAAAANMGITPF

SEQ ID NO: 23219 - protein, 257 aa, Zea mays subsp. mays
  misc_feature (1)..(257): Ceres Seq. ID no. 12411669
MSSSSSSSAACCFPLDHLAPSPTEQLCYVHCNCCDTILAVGVPCSSLFKTVTVRCGHCANLLSVNLRGLLLPPAAPAPPNHLNFAHSLLSPTSPHGLLDELALQQAPSFLMEQASANLSSTMTGRSSNSSCASNLPPPAPMPAAQPVQQEAELPKTAPSVNRPPEKRQRVPSAYNRFIKDEIQRIKAGNPDITHREAFSAAAKNWAHFPHIHFGLMPDQGLKKTFKTQDGAEDMLLKDDLYAAAAAAAAANMGITPF

SEQ ID NO: 23220 - DNA, 978 bp, Zea mays subsp. mays
  misc_feature (1)..(978): Ceres Seq. ID no. 12411678
gcacccagtccccgctcctgtttcgatctcccgaatcccgatcccgctaccggaggcggaggcgatggcggcggcgccggcggtaaggttcccggtcttcgggctcgtgcggctgctgggcttggccgccgcggcggcgatcctcttctgggccgtccacttccgaggcggcatggcgctctccaccgaaggaggagagcaagctccccctcttcaacgttcacccagtgttaatgctgattggtttggtggccttgaatggcgaagctcttttggcttataaaactgtgccaggaaccaagaaactgaaaaagctagtgtaccttgccgtgcagttccttgccatgtttctgagtctaattggtctgtgggctgtatggaagttccatgatgaaagaaaaatcgatcatttatatacacttcactcgtggttgggccttacttgcttcatcttcttcagcttgcagtgggctgctgggttttggaccttttggtaccccggtggatcaagaagtggccgtgcatttttgcttccctggcatgtcttctttggtatattcatctatgttcttgctatcgccacaagtgtgactggactcctggagaagtcaatctttatgcagagcgccaaaatgattgagcgcttctccacagaagccatgtttatgaactccctgggaatgctgctggtgttgttgagcagccttgttattcttgcactcgttagtcctggacccagcatgatcgacacatacagaggctcttctgagtgagaggaaatgattacagcctagtttcttaagctacatttttaatcagtagctgagcaatttttgtgtacatgtacccagaattatgcttttcttcttttgacatggagttagtcagtgttgaggataatttcatccctgttagagtggcttcattcaagtcgcagtaataaaattgtggatgaggctgacaatgaaattacagctg

SEQ ID NO: 23221 - protein, 179 aa, Zea mays subsp. mays
  misc_feature (1)..(179): Ceres Seq. ID no. 12411679
MLIGLVALNGEALLAYKTVPGTKKLKKLVYLAVQFLAMFLSLIGLWAVWKFHDERKIDHLYTLHSWLGLTCFIFFSLQWAAGFWTFWYPGGSRSGRAFLLPWHVFFGIFIYVLAIATSVTGLLEKSIFMQSAKMIERFSTEAMFMNSLGMLLVLLSSLVILALVSPGPSMIDTYRGSSE

SEQ ID NO: 23222 - protein, 142 aa, Zea mays subsp. mays
  misc_feature (1)..(142): Ceres Seq. ID no. 12411680
MFLSLIGLWAVWKFHDERKIDHLYTLHSWLGLTCFIFFSLQWAAGFWTFWYPGGSRSGRAFLLPWHVFFGIFIYVLAIATSVTGLLEKSIFMQSAKMIERFSTEAMFMNSLGMLLVLLSSLVILALVSPGPSMIDTYRGSSE

SEQ ID NO: 23223 - protein, 93 aa, Zea mays subsp. mays
  misc_feature (1)..(93): Ceres Seq. ID no. 12411681
HPVPAPVSISRIPIPLPEAEAMAAAPAVRFPVFGLVRLLGLAAAAAILFWAVHFRGGMALSTEGGEQAPPLQRSPSVNADWFGGLEWRSSFGL

SEQ ID NO: 23224 - DNA, 1575 bp, Zea mays subsp. mays
  misc_feature (1)..(1575): Ceres Seq. ID no. 12411686
aacatacttggctgggccttccccagcggcgagggcgtggcccgttgtacaagtataacaacaattggcccagcgtagcatgcccgtggtggtggcgtcatcgtgtctcctcgatcccctctcgttcctccctcgtcgcctcatcaattcaagatccaatctttgctgctgccactcggcgatccgatcgttctcgagcaaggtcggtggccatggcacgctgccgccatcacctcctcctcctttccgtcttacttgccttggctgctgctgctgcgcggcaggcgcagagtcatggaaaagcctccgccgtcttcatcgatgcctcgtcgcaccgctaccttcgggaccagcaagccgaccaccaggacgcttcaatgtcgttaaatgaagtttctgcggttgtttctgtcttgcttggtttcgcaccgtcaacatccctaccagctatttcttcttcgaagttgaacaaagttcttcttcctaatccatttgatagaccgcgtgctgttttcctcgtgcaaattgatgggttcaatgttcctagcttcgtatctgaaggcagcaacattttcaagaccaggattgaaggtgcaaacatcgctgatacagggcttacagataaggatgacttaattgtcattcattcagatgaatctctagatctctctcgatcagattatcttgataatgaactttccagcttggcaaactggttggagggatcttatcagaagtctaccggcaaactagtcattcccttggagaatggaaacagtcttactttgcaacttgataaggaagcagacaaggaattcatgtccagcttggcttcccttcttaagactattgaaagggcgatccaggttcatgaagatttctcaggtgtcgtgaaccctgcagagttattagaatgtcacttcacagggttgaaggctctggagaatgaatatggttctggtgaaattgttaagcagggaacagaaatagttcagagagctgtcaccaaatcattccagtccctacatgaagcatacaaagggaaaattgttgggctggtaatatccacaaatgaggctccatcatccttaggatccataattgacgcaccatcttcactgcacatttcaagacggctagaagaagcaagcaagactacagacatagcctctgtcgtacttgttcgaaagagcttggcatggattacagggatcatcctgcttgtttcaactctcataggggtttgcttgcttatgaacatgccacttaccagggacaccctcctgtactcgaatgtcaagatcgattagtttgaaggggtgttcgcggcagctactcttggggttcaactttggccttgtgtatttatgggatggatttcagatggtagagacgtatgcttgtgctgttcacaaaaccagtgtacaatgtgatactaggtgctacgtgcctttctttttttaatctgtgcttccatcttgcctgtatgggctgttttgttgttgggttcccggtaaataatccagagcagtggcacaaacgattagttgttgcagaatgctactgccttttctg

SEQ ID NO: 23225 - protein, 435 aa, Zea mays subsp. mays
  misc_feature (1)..(435): Ceres Seq. ID no. 12411687
HTWLGLPQRRGRGPLYKYNNNWPSVACPWWWRHRVSSIPSRSSLVASSIQDPIFAAATRRSDRSRARSVAMARCRHHLLLLSVLLALAAAAARQAQSHGKASAVFIDASSHRYLRDQQADHQDASMSLNEVSAVVSVLLGFAPSTSLPAISSSKLNKVLLPNPFDRPRAVFLVQIDGFNVPSFVSEGSNIFKTRIEGANIADTGLTDKDDLIVIHSDESLDLSRSDYLDNELSSLANWLEGSYQKSTGKLVIPLENGNSLTLQLDKEADKEFMSSLASLLKTIERAIQVHEDFSGVVNPAELLECHFTGLKALENEYGSGEIVKQGTEIVQRAVTKSFQSLHEAYKGKIVGLVISTNEAPSSLGSIIDAPSSLHISRRLEEASKTTDIASVVLVRKSLAWITGIILLVSTLIGVCLLMNMPLTRDTLLYSNVKID

SEQ ID NO: 23226 - protein, 365 aa, Zea mays subsp. mays
  misc_feature (1)..(365): Ceres Seq. ID no. 12411688
MARCRHHLLLLSVLLALAAAAARQAQSHGKASAVFIDASSHRYLRDQQADHQDASMSLNEVSAVVSVLLGFAPSTSLPAISSSKLNKVLLPNPFDRPRAVFLVQIDGFNVPSFVSEGSNIFKTRIEGANIADTGLTDKDDLIVIHSDESLDLSRSDYLDNELSSLANWLEGSYQKSTGKLVIPLENGNSLTLQLDKEADKEFMSSLASLLKTIERAIQVHEDFSGVVNPAELLECHFTGLKALENEYGSGEIVKQGTEIVQRAVTKSFQSLHEAYKGKIVGLVISTNEAPSSLGSIIDAPSSLHISRRLEEASKTTDIASVVLVRKSLAWITGIILLVSTLIGVCLLMNMPLTRDTLLYSNVKID

SEQ ID NO: 23227 - protein, 310 aa, Zea mays subsp. mays
  misc_feature (1)..(310): Ceres Seq. ID no. 12411689
MSLNEVSAVVSVLLGFAPSTSLPAISSSKLNKVLLPNPFDRPRAVFLVQIDGFNVPSFVSEGSNIFKTRIEGANIADTGLTDKDDLIVIHSDESLDLSRSDYLDNELSSLANWLEGSYQKSTGKLVIPLENGNSLTLQLDKEADKEFMSSLASLLKTIERAIQVHEDFSGVVNPAELLECHFTGLKALENEYGSGEIVKQGTEIVQRAVTKSFQSLHEAYKGKIVGLVISTNEAPSSLGSIIDAPSSLHISRRLEEASKTTDIASVVLVRKSLAWITGIILLVSTLIGVCLLMNMPLTRDTLLYSNVKID

SEQ ID NO: 23228 - DNA, 1746 bp, Zea mays subsp. mays
  misc_feature (1)..(1746): Ceres Seq. ID no. 12411690
gcagtctcgctcgcctctcgcaaaccctatccccgaccccgattcccctctcgcctctcgatctctggcggcggcgccgtcgttttcccccatcggctcagcgactctcgagtcccgacctcgacgctaccggctcagcggctctggtgctccgtcctccactcctcctcctccttcatccattcctccggtgcaaggtttgttactttctttatctcggcgcctcacgacctcgacaataccggctctggttctccgactttgaaaggtccgtctctggtgtaccgcgccgtcctgttcggcggcctcagcaacgacgtcatctcggccggagccctggggatcacgaccgcacagctggtgcgcatcaacgacctccacagccggacggtgcaccaggagaacgccctgtcgaaccgactcgccaccctgcaggaagacatcgccaaccgcccgctcctgcccatcgtgcggcagcgcgagctcgccaccgcgacacgactgggagctgctgcgagcggaagctgcgacggcgcggcacgacggtggcttagggcggcacggctaggagaaccagagccggtattgtcgaggcggtggacaacctgacgctgcgtcggttcctgcgcgcgcgcgaccacgacgtggacaaggcctccgccatgttcctcaagttcctcaagtggcggagggaggcggcgcccggcggctccgtgccggaggagcaggtgaggagggagctgtcgcaggacaagctgtgcatgggcggcgtcgacagggccggtcgccccatcctcgtcgccttcgcggccaggcacttctccgccggccgtgacatggcagagttcaagagttttgttgtctacttcttcgacaagatctgtgccagaatccccagagggcaggagaaattcctctgcatcgttgatctcaagggctgggggtactcaaactgtgacgtccgggcatacattgccgctatagagatcttgcagtatttctacaggttaacaaggtacatacaaagaaggcggctgctcccaagattgctaaacaagagtccagtgatgatgacactagcgacgagacctttgaatctgatgagttttcagagtttttagatgccaattcatcttctcattaaggaacctacaaagaagcctgctgctaaacccttggctgcagttgcaaaaaatggttcgaagacggtcaagcaagagagcagcagcgatgaggacagttctgaagatgagtcggatgacgacagtgatgatgtgagttgaagtttcctcggcgtccctgcatcgcttccaccagccctccccacacgcggcgacagggtcgtcgtcgtcccggctccgcgtcggccacacccgaacgaccgtctccatgtcgtgccgtctccagttatgcgagcgaggctggataaggtcgtggggttccaacaaggtggtgcagctccattcgtccctccacctcacccgccggccatctctcgatttctttttgtgtgctcagttttttctttgtgtgtcatgagtttcagaacttgattgggatggtttttgtgccatgagaattagggtttgatagggatgatttgggtatcagttcttacggtcactggaatttgcatattgtcatagtctaatgccattaaattttgagggtagcgatattgttttcaacctattgaatagggtatatgatgatgttggcaagcgctggagcaggtaatattttgtc

SEQ ID NO: 23229 - protein, 202 aa, Zea mays subsp. mays
  misc_feature (1)..(202): Ceres Seq. ID no. 12411691
AVSLASRKPYPRPRFPSRLSISGGGAVVFPHRLSDSRVPTSTLPAQRLWCSVLHSSSSFIHSSGARFVTFFISAPHDLDNTGSGSPTLKGPSLVYRAVLFGGLSNDVISAGALGITTAQLVRINDLHSRTVHQENALSNRLATLQEDIANRPLLPIVRQRELATATRLGAAASGSCDGAARRWLRAARLGEPEPVLSRRWTT

SEQ ID NO: 23230 - protein, 183 aa, Zea mays subsp. mays
  misc_feature (1)..(183): Ceres Seq. ID no. 12411692
SLARLSQTLSPTPIPLSPLDLWRRRRRFPPSAQRLSSPDLDATGSAALVLRPPLLLLLHPFLRCKVCYFLYLGASRPRQYRLWFSDFERSVSGVPRRPVRRPQQRRHLGRSPGDHDRTAGAHQRPPQPDGAPGERPVEPTRHPAGRHRQPPAPAHRAAARARHRDTTGSCCERKLRRRGTTVA

SEQ ID NO: 23231 - protein, 152 aa, Zea mays subsp. mays
  misc_feature (1)..(152): Ceres Seq. ID no. 12411693
MFLKFLKWRREAAPGGSVPEEQVRRELSQDKLCMGGVDRAGRPILVAFAARHFSAGRDMAEFKSFVVYFFDKICARIPRGQEKFLCIVDLKGWGYSNCDVRAYIAAIEILQYFYRLTRYIQRRRLLPRLLNKSPVMMTLATRPLNLMSFQSF

SEQ ID NO: 23232 - DNA, 1383 bp, Zea mays subsp. mays
  misc_feature (1)..(1383): Ceres Seq. ID no. 12411698
tctccccgggcacatgcccgtgggcacgcgtgcaggccactggccacccccacgcagaaaaaccagcggccgcgcgcaccgacccggccgacgactccggcgaccgcgcgcacacgacaaaaccccggcggcgacgacagacccacaggatcagacgactcagcgagcggaacaccccctggcgccggccgttaaagtcaagtcaagcaccggagccggtgtataaagctccggcgactggtgcccaccacggctagctgccgtcgtcgcagaagtaggagctcgcgtttctccatccgtacgtcctgcagtagtgattgggcagcatcgtcatcgatcgatcgccatgaggctccgcggcgtgctgcgcctcgtcctcgcgctcctcctcgccgccaccgccatcgtgccggtgctgctccttagcgagaacggcggcggcggcgtcgcacctgcgccgccgttcaactcctcgcgtgtcaaggccgtctcgtggcatccaaggatcttcgtgtacaaggggttcctctccgacgccgagtgtgaccacctcgtgactctggcgaagaaaaagatccagcggtccatggtggcggacaacgagtccggcaagagcgtcaagagcgaggtgcgcaccagctccggcatgttcctcgacaagcgccaggacccggtggtgagtcggatcgaggagaggatcgcggcatggacgtttcttcctcaagagaacgccgagaacatgcaggtgctgcgctacgagccggggcagaagtacgagccgcacttcgactacttccacgacagggtcaaccaggcccgcggcggccaccgctacgccaccgtgctcatgtacctgtccaccgtccgcgagggaggcgagaccgtgttccccaacgccaagggttgggagtcccagcccaaggacgccactttctccgagtgtgcacacaaaggattggcagtgaaaccggtgaaaggcgacgccgtgctcttcttcagcctgcacgccgacggcacgccggacccgctcagcctccacgggagctgcccggtgatccggggcgagaagtggtcggcgcccaagtggatccacgtcaggtcgtacgaggacgaaccccaggcagtactcgtgctccccgaggaaaccgacggcgcgcgggtgcgccgataggagcgagcgctgcgcgaagtgggccgcggcgggtgagtgcgcctggaacccggcgtacatgctcggcgccggcgatgagggggcgcctgggcagtgccgcaggagctgcggagtctgcgattcgtaggcgcgtccttgccttttctttctttcttcctttctttgtttgttttgggatgcagtattcagataactagtggctgtttttctgc

SEQ ID NO: 23233 - protein, 274 aa, Zea mays subsp. mays
  misc_feature (1)..(274): Ceres Seq. ID no. 12411699
MRLRGVLRLVLALLLAATAIVPVLLLSENGGGGVAPAPPFNSSRVKAVSWHPRIFVYKGFLSDAECDHLVTLAKKKIQRSMVADNESGKSVKSEVRTSSGMFLDKRQDPVVSRIEERIAAWTFLPQENAENMQVLRYEPGQKYEPHFDYFHDRVNQARGGHRYATVLMYLSTVREGGETVFPNAKGWESQPKDATFSECAHKGLAVKPVKGDAVLFFSLHADGTPDPLSLHGSCPVIRGEKWSAPKWIHVRSYEDEPQAVLVLPEETDGARVRR

SEQ ID NO: 23234 - protein, 220 aa, Zea mays subsp. mays
  misc_feature (1)..(220): Ceres Seq. ID no. 12411700
MDVSSSRERREHAGAALRAGAEVRAALRLLPRQGQPGPRRPPLRHRAHVPVHRPRGRRDRVPQRQGLGVPAQGRHFLRVCTQRIGSETGERRRRALLQPARRRHAGPAQPPRELPGDPGREVVGAQVDPRQVVRGRTPGSTRAPRGNRRRAGAPIGASAARSGPRRVSAPGTRRTCSAPAMRGRLGSAAGAAESAIRRRVLAFSFFLPFFVCFGMQYSDN

SEQ ID NO: 23235 - protein, 194 aa, Zea mays subsp. mays
  misc_feature (1)..(194): Ceres Seq. ID no. 12411701
MVADNESGKSVKSEVRTSSGMFLDKRQDPVVSRIEERIAAWTFLPQENAENMQVLRYEPGQKYEPHFDYFHDRVNQARGGHRYATVLMYLSTVREGGETVFPNAKGWESQPKDATFSECAHKGLAVKPVKGDAVLFFSLHADGTPDPLSLHGSCPVIRGEKWSAPKWIHVRSYEDEPQAVLVLPEETDGARVRR

SEQ ID NO: 23236 - DNA, 1224 bp, Zea mays subsp. mays
  misc_feature (1)..(1224): Ceres Seq. ID no. 12411717
gccgtgccgtctcctctcctctcctctctcctctctcatccccaggtctcagcccacctagcaatgttctcctcctccccttccacatgaccagcgccgcgccgcgcagcgcagccatccttgttctgtcccgggtacgccgccacacacatcgcttcaagcgcttccctccgtccctcctctttgtggattggaatcgacgcctgaaagtggatgacgatggcgggttcttgcgccgcgccgcccgttgcctgtcttccctcgttgaggacgctgccgccaactcacgtcagacttagcggcttcttgccctgttcctcggccgcgcggagtcgcggcgccgccgtgctgggatgcgctctggggaccaagaggcagacgccgggtgttctgaaccggttgttctgtggatacatgcaaagagatgggcatgaaggagatgtaagctgtcaaggaagggatgacactgttatgtttggaccagatgatgatggtgtaaagattcctactcaggtagagactcttgtaaagggcactgcaatggttgctgaaccagaatacaaggctagcccagatctagattacctacaggagctgctggctattcagcagcaaggacctcgtgcaataggtttctttggaacccgcaacatgggatttatgcatcaacaacttattgagatcctgagctatgctatggtcataacaaaaaatcatatattcacatctggtgcttctggaacaaatgcagctgttatcaggggtgctttaagagctgaaaagccagagctgcttactgtaattttacctcaaagcctaaagaagcagcctcctgaaagccaagaactgttgtctaaagtacaaaacttgatcgagaaaccacagtatgatcatttgccactaattgaggctagcaggttatgcaatatggacatcatctccaaggtccaacaggtgatctgcttcgcgttccatgacagcaagctgctgatggaaacatgccaggaggccaagaaccttcggaagatcgtgacactcttctacttggattagctcctccgacatggatctattctccttttttttttgttcgtggcgtaggctaatgttggggggataaaaagcaagttggacggtttagttagtttcgaaatatactggataggtggtgggatgaccttccattggatgagaaagtcattttgtttcgcccattattactgg

SEQ ID NO: 23237 - protein, 279 aa, Zea mays subsp. mays
  misc_feature (1)..(279): Ceres Seq. ID no. 12411718
MTMAGSCAAPPVACLPSLRTLPPTHVRLSGFLPCSSAARSRGAAVLGCALGTKRQTPGVLNRLFCGYMQRDGHEGDVSCQGRDDTVMFGPDDDGVKIPTQVETLVKGTAMVAEPEYKASPDLDYLQELLAIQQQGPRAIGFFGTRNMGFMHQQLIEILSYAMVITKNHIFTSGASGTNAAVIRGALRAEKPELLTVILPQSLKKQPPESQELLSKVQNLIEKPQYDHLPLIEASRLCNMDIISKVQQVICFAFHDSKLLMETCQEAKNLRKIVTLFYLD

SEQ ID NO: 23238 - protein, 277 aa, Zea mays subsp. mays
  misc_feature (1)..(277): Ceres Seq. ID no. 12411719
MAGSCAAPPVACLPSLRTLPPTHVRLSGFLPCSSAARSRGAAVLGCALGTKRQTPGVLNRLFCGYMQRDGHEGDVSCQGRDDTVMFGPDDDGVKIPTQVETLVKGTAMVAEPEYKASPDLDYLQELLAIQQQGPRAIGFFGTRNMGFMHQQLIEILSYAMVITKNHIFTSGASGTNAAVIRGALRAEKPELLTVILPQSLKKQPPESQELLSKVQNLIEKPQYDHLPLIEASRLCNMDIISKVQQVICFAFHDSKLLMETCQEAKNLRKIVTLFYLD

SEQ ID NO: 23239 - protein, 212 aa, Zea mays subsp. mays
  misc_feature (1)..(212): Ceres Seq. ID no. 12411720
MQRDGHEGDVSCQGRDDTVMFGPDDDGVKIPTQVETLVKGTAMVAEPEYKASPDLDYLQELLAIQQQGPRAIGFFGTRNMGFMHQQLIEILSYAMVITKNHIFTSGASGTNAAVIRGALRAEKPELLTVILPQSLKKQPPESQELLSKVQNLIEKPQYDHLPLIEASRLCNMDIISKVQQVICFAFHDSKLLMETCQEAKNLRKIVTLFYLD

SEQ ID NO: 23240 - DNA, 1485 bp, Zea mays subsp. mays
  misc_feature (1)..(1485): Ceres Seq. ID no. 12411721
gcgctcagccgacacacacaccgcaaaaggcccacgagaagaccccgcgcggcccgccctctccctccccacctctactccacctccaatcctccccgttgctgtcccgccggcgtcgaagctcgagagaagggtgagcaccttgccgcgaggtgtgtccggtgagctagctagggacgcgccagctcgtgctgatctgacctggaagctctggaggcgatgaaagcgctcggacgggcgatgaggtgggcttcctgctgcaagctctcggacggggatgaaccaggtaggaggaagaaggacgcatcgtggcggatcttttcactgaaggagcttcagtcagcaacgaacaatttcaattacgataacaaggtcggcgagggtgggtttggcagtgtctattggggccagctctgggatgggtcacaggttgctgtgaagaggctcaagagttggagcaacaaagctgaaacagaatttgctgtcgaggtggagattctggcacgggtgaggcacaagagccttttaagcttgcgcggatattgtgctgaaggccaggaacgcttgatagtctatgattatatgccaaacctgagcatacacgcccaacttcatggacagcacgcagcagagtgcaatctcagttgggaaagaaggatgaagatcgccgtcgattccgcagaagggatcgcttatctgcatcaccatgcgacgccacacatcattcatagagatgtcaaggcgagcaacgttctcctggattcgaatttccaagctcgggttgctgactttgggttcgccaagctagttccagacggcgcgacgcatgtcaccacaagggtgaaaggcacactcggttatctcgcaccagagtacgcgatgcttgggaaggcctctgaaagctgcgatgtcttcagtctcggagtcatgctcctagagcttgccagcgggaaaaagccagtggagaagcttaaccccaccacgaagcgaaccatagctgagtgggctcttcctctagctcgggacaggaagttcaaggaaattgccgatccaaagctcaatggtagcttcgtcgaggacgagctgaagcgaatggtgctcgttgggctcgcctgttcccaggacaagccagagcagagacccgtaatgtctgaagtcgtcgagctgctcagaggagaatctaccgagaggctttccaggctggagaatggtgatctgttcaagcctgatatctcgttccatggctcatccggacctgatagctcggactgcgtcacggaggagaggagtcccaaggcagatgcgacagaggaggctgttgattcaagtgagacggttccctcagcaaggtagtgtgatgcacggtggtgtactgtcagtaggtgccctgagctccttgcctgggggaaatgtgtttatcagttcatttttgtggttattccttgctatttagcaagttaatctgggagcctccttgcccggttc

SEQ ID NO: 23241 - protein, 377 aa, Zea mays subsp. mays
  misc_feature (1)..(377): Ceres Seq. ID no. 12411722
MKALGRAMRWASCCKLSDGDEPGRRKKDASWRIFSLKELQSATNNFNYDNKVGEGGFGSVYWGQLWDGSQVAVKRLKSWSNKAETEFAVEVEILARVRHKSLLSLRGYCAEGQERLIVYDYMPNLSIHAQLHGQHAAECNLSWERRMKIAVDSAEGIAYLHHHATPHIIHRDVKASNVLLDSNFQARVADFGFAKLVPDGATHVTTRVKGTLGYLAPEYAMLGKASESCDVFSLGVMLLELASGKKPVEKLNPTTKRTIAEWALPLARDRKFKEIADPKLNGSFVEDELKRMVLVGLACSQDKPEQRPVMSEVVELLRGESTERLSRLENGDLFKPDISFHGSSGPDSSDCVTEERSPKADATEEAVDSSETVPSAR

SEQ ID NO: 23242 - protein, 370 aa, Zea mays subsp. mays
  misc_feature (1)..(370): Ceres Seq. ID no. 12411723
MRWASCCKLSDGDEPGRRKKDASWRIFSLKELQSATNNFNYDNKVGEGGFGSVYWGQLWDGSQVAVKRLKSWSNKAETEFAVEVEILARVRHKSLLSLRGYCAEGQERLIVYDYMPNLSIHAQLHGQHAAECNLSWERRMKIAVDSAEGIAYLHHHATPHIIHRDVKASNVLLDSNFQARVADFGFAKLVPDGATHVTTRVKGTLGYLAPEYAMLGKASESCDVFSLGVMLLELASGKKPVEKLNPTTKRTIAEWALPLARDRKFKEIADPKLNGSFVEDELKRMVLVGLACSQDKPEQRPVMSEVVELLRGESTERLSRLENGDLFKPDISFHGSSGPDSSDCVTEERSPKADATEEAVDSSETVPSAR

SEQ ID NO: 23243 - protein, 256 aa, Zea mays subsp. mays
  misc_feature (1)..(256): Ceres Seq. ID no. 12411724
MPNLSIHAQLHGQHAAECNLSWERRMKIAVDSAEGIAYLHHHATPHIIHRDVKASNVLLDSNFQARVADFGFAKLVPDGATHVTTRVKGTLGYLAPEYAMLGKASESCDVFSLGVMLLELASGKKPVEKLNPTTKRTIAEWALPLARDRKFKEIADPKLNGSFVEDELKRMVLVGLACSQDKPEQRPVMSEVVELLRGESTERLSRLENGDLFKPDISFHGSSGPDSSDCVTEERSPKADATEEAVDSSETVPSAR

SEQ ID NO: 23244 - DNA, 1389 bp, Zea mays subsp. mays
  misc_feature (1)..(1389): Ceres Seq. ID no. 12411729
acctcttaattaccctttcggtaccgcgatgccctaactcggtgcttttgcagcagccactcgctccacaagtacgcgccgctggactggtccgcctacttcgacgaggagcgccgcgtacgcatccccgacaccgacaacgttttcaatgcgtacacgaccggatcggaggggcccgtcgtgttctgcctgcacggaggcggttattcggggctttcatttgctctagcagcaagtcaaatgaaggacaaggctcgtgttgttgccatggatctaagggggcatggaaaatcaacaacgaatgatgatctggatttgtccattgaaactcttaccaatgatgtcatagctgttatacgtacaatgtatggagatttgccaccagcaattatacttgttgggcatagcatgggcggttcagtggctatacatgtggctgcaagaaaagaaattagaaatcttcatgggcttgttgtcgttgatgttgtcgagggaacagcaatggcttcattagttcatatgcagaagatcttagcaaaccgggcacagcattttcctagcattgaaaaagcaattgaatggagtgtcaaaggtgggccattaaggaacatcgagtctgctcgtgtgtccattccatctaccctgaaatacgatgaatcacgagaatgctatacatatcgcactcctcttgagcaaacagaaaagtactggaaaggatggtatgaaggtctttcagacaagttcctatcttgcccagtgcaaaagatcctgttgttagctggtaccgacagactggacagttggtttacaatttgcagagctttaacaatcggtcaaatgcaaggaaaatttcaaatggtggtgattcggcacactggacatgctatacaggaagatgtacctgaagaatttgcatcgcacatactgaagttcatatcccgcaacaaaatagggcctaacggtgttgagatacctgggctcattaaaaaatggcagcagtagacataatgtacaagttaccgttctggaaaatgttcaggaaaatgatgagtaggtctgcctatccgagttctcttcatatcgaattaaaaaaaggttcaagatgatcatgcgatcgttaacaatcagtcattggtttcgtcatctgttggcaactctcccatgtcgcttgagttgctttgtttctgacatcactctgcgacctgccggcgtcttttgtacgagggttcttgtatgtttttaggtagagctgagtgcagtgcgttgtaatgctttccgtgaggttattatactgctatcaagcaggatcagctcgttatgacagctctgtttcgaatttctgctggcctcggcaagtttgatgggaataaatcgaagaagccttctttg

SEQ ID NO: 23245 - protein, 253 aa, Zea mays subsp. mays
  misc_feature (1)..(253): Ceres Seq. ID no. 12411730
MKDKARVVAMDLRGHGKSTTNDDLDLSIETLTNDVIAVIRTMYGDLPPAIILVGHSMGGSVAIHVAARKEIRNLHGLVVVDVVEGTAMASLVHMQKILANRAQHFPSIEKAIEWSVKGGPLRNIESARVSIPSTLKYDESRECYTYRTPLEQTEKYWKGWYEGLSDKFLSCPVQKILLLAGTDRLDSWFTICRALTIGQMQGKFQMVVIRHTGHAIQEDVPEEFASHILKFISRNKIGPNGVEIPGLIKKWQQ

SEQ ID NO: 23246 - protein, 244 aa, Zea mays subsp. mays
  misc_feature (1)..(244): Ceres Seq. ID no. 12411731
MDLRGHGKSTTNDDLDLSIETLTNDVIAVIRTMYGDLPPAIILVGHSMGGSVAIHVAARKEIRNLHGLVVVDVVEGTAMASLVHMQKILANRAQHFPSIEKAIEWSVKGGPLRNIESARVSIPSTLKYDESRECYTYRTPLEQTEKYWKGWYEGLSDKFLSCPVQKILLLAGTDRLDSWFTICRALTIGQMQGKFQMVVIRHTGHAIQEDVPEEFASHILKFISRNKIGPNGVEIPGLIKKWQQ

SEQ ID NO: 23247 - protein, 212 aa, Zea mays subsp. mays
  misc_feature (1)..(212): Ceres Seq. ID no. 12411732
MYGDLPPAIILVGHSMGGSVAIHVAARKEIRNLHGLVVVDVVEGTAMASLVHMQKILANRAQHFPSIEKAIEWSVKGGPLRNIESARVSIPSTLKYDESRECYTYRTPLEQTEKYWKGWYEGLSDKFLSCPVQKILLLAGTDRLDSWFTICRALTIGQMQGKFQMVVIRHTGHAIQEDVPEEFASHILKFISRNKIGPNGVEIPGLIKKWQQ

SEQ ID NO: 23248 - DNA, 1669 bp, Zea mays subsp. mays
  misc_feature (1)..(1669): Ceres Seq. ID no. 12411741
agtagtcactgcctattcttggccatacggcttcccccacaccccaacacaaacaagagaaaaaacaaaaactagacgaaagagggaagaaaccaagaaattggcgaatccctggcgctccccactttcaactcccatccgcttgccgttgccgcgtttgtttatcgagccaatttgatcagggcgccacaccgaaccctagttcttgatttaatcacgggttatgtggtcatgccggccgggtcaccccgttcttcttctcttccacgagttcaggaggtagagtgagagagaaaatggaacgacaggggatggaaggcaacaatcttctgcattttcttgataccccgagcgcccattacagaaggacatgcgacggatttgaggcccaacacggcggcgatgaacactctgagacatcagatactgatccggctaatgcaagggaaatgctggaatatttgttgaaccaaccagcaaacaaaatctgtgcagactgtggctctccagatccaaaatgggtggccctgccttttggcacattcatctgcattaagtgctctggaactcatagaagtcttggtgtgcacatatcaaaggtgatttcagtgaatctggatgagtggacagatgatgaagtcaactgtttagctgaatcaggcggaaattctgttgtgaactcaagatatgaagcctttttacccgaaaacaaaaagctaaaacaagattgctcaacggaggagcgtaatgattttatcaggaaaaaataccagtttcaacagtttgtgtgtgatccacaattttcatgccctttaccacttaacagaaagcatgcaccaccagataaaaatcaccagcagcataatagcagcaagtatggttttggccatacttttaggaatagctggagaaaaaaggattcagatagcaaaagcctaaagaaaatgtcggatgtgggaatgatagaatttgttggattagtaaaggtcaatatcgtaaaaggcacagatttagctgttcgtgatgtgatgtcgagcgatccgtatgtcttgattcatctagggcaccagtccatgaaaacaaaggtgataaagaacacactgaatcctatctggaatgaaagactaatgctttcgatccctgacccaattccgcctcttaagctgcaagtatttgacaaggacacattcagctccgatgaccggatgggggaggccgaggtggacatccggccgctgattgcagcaacgaaggagcacgagaactcgaccatcaccgaatcgacagaactctacagatggtcagccagcgaagacagcaacggtgtgctcgccaaggacagcgtcatctctgttgcgagtggaaaggtcaagcaggagatcacactcaggctccagaatgtcgagcgcggtgaggtcgagatcgagatcgagtgtgtgccgctcagccagtagcagtcccatcgtgagcaggactggaagcagaaagagggaaggaatacatcatgctccattgttgtgacaaggacgctgctttgcaatgcagaaagacctcagcttcacttgtttgattgctccatgcctgtaattcgcgtgcatgtgtgagatgtgtaatgtgttgtacggtagataggcaaagggaaattatctacttatattactttgatgtt

SEQ ID NO: 23249 - protein, 385 aa, Zea mays subsp. mays
  misc_feature (1)..(385): Ceres Seq. ID no. 12411742
MERQGMEGNNLLHFLDTPSAHYRRTCDGFEAQHGGDEHSETSDTDPANAREMLEYLLNQPANKICADCGSPDPKWVALPFGTFICIKCSGTHRSLGVHISKVISVNLDEWTDDEVNCLAESGGNSVVNSRYEAFLPENKKLKQDCSTEERNDFIRKKYQFQQFVCDPQFSCPLPLNRKHAPPDKNHQQHNSSKYGFGHTFRNSWRKKDSDSKSLKKMSDVGMIEFVGLVKVNIVKGTDLAVRDVMSSDPYVLIHLGHQSMKTKVIKNTLNPIWNERLMLSIPDPIPPLKLQVFDKDTFSSDDRMGEAEVDIRPLIAATKEHENSTITESTELYRWSASEDSNGVLAKDSVISVASGKVKQEITLRLQNVERGEVEIEIECVPLSQ

SEQ ID NO: 23250 - protein, 380 aa, Zea mays subsp. mays
  misc_feature (1)..(380): Ceres Seq. ID no. 12411743
MEGNNLLHFLDTPSAHYRRTCDGFEAQHGGDEHSETSDTDPANAREMLEYLLNQPANKICADCGSPDPKWVALPFGTFICIKCSGTHRSLGVHISKVISVNLDEWTDDEVNCLAESGGNSVVNSRYEAFLPENKKLKQDCSTEERNDFIRKKYQFQQFVCDPQFSCPLPLNRKHAPPDKNHQQHNSSKYGFGHTFRNSWRKKDSDSKSLKKMSDVGMIEFVGLVKVNIVKGTDLAVRDVMSSDPYVLIHLGHQSMKTKVIKNTLNPIWNERLMLSIPDPIPPLKLQVFDKDTFSSDDRMGEAEVDIRPLIAATKEHENSTITESTELYRWSASEDSNGVLAKDSVISVASGKVKQEITLRLQNVERGEVEIEIECVPLSQ

SEQ ID NO: 23251 - protein, 334 aa, Zea mays subsp. mays
  misc_feature (1)..(334): Ceres Seq. ID no. 12411744
MLEYLLNQPANKICADCGSPDPKWVALPFGTFICIKCSGTHRSLGVHISKVISVNLDEWTDDEVNCLAESGGNSVVNSRYEAFLPENKKLKQDCSTEERNDFIRKKYQFQQFVCDPQFSCPLPLNRKHAPPDKNHQQHNSSKYGFGHTFRNSWRKKDSDSKSLKKMSDVGMIEFVGLVKVNIVKGTDLAVRDVMSSDPYVLIHLGHQSMKTKVIKNTLNPIWNERLMLSIPDPIPPLKLQVFDKDTFSSDDRMGEAEVDIRPLIAATKEHENSTITESTELYRWSASEDSNGVLAKDSVISVASGKVKQEITLRLQNVERGEVEIEIECVPLSQ

SEQ ID NO: 23252 - DNA, 1164 bp, Zea mays subsp. mays
  misc_feature (1)..(1164): Ceres Seq. ID no. 12411745
tcatttcttaaatttaagatttagagagttgtttagagaactattgaagttgctcttagaggcccttgttgtcttgttgaagagttgaagacaccgcagttccggaaacttctgtagcagctgaaatagtacggacgtgtttgaacatgtacaggatctcgaggccacatctgtaaaacgaccacccctcacgcggaagcggagactggaaatcgggagggagaccggtagacgagaccgccggagatggagccgagatctgcaatctacagatccggcgccttccttctcctcgccgccatccttgcggaggtcgtcatccctgcatccgccatcggagacaagtgcgccgcctgcaaggccgttgctgcggagctagagattggaatttcgagtgagaagccgagaaatcacttggacttgcgcaaccgcttaaattctaaaggccagagggaggggaaggtcattgattatagggtcagtgagcttcgggttgtggaacttctggatggcctatgcgataagatgcaagattataccttaaagaagttggaatcaggcgaaaagggatgggttaaagtaacagactggaatagctttcaaactgaaaataaggcagcagcaagagctcactccaaaaaattgtccaccttctgtggaaggctactggaggaaacggaggatgagctctctgagtggatcaaaacaacctccacagaatcagaatatgtaagcaaggccctttgtgaagatattagcaaacactgccgatctacaagtgctaccatccagattgatgatgagctatgacatgccgggggcaggtcgttgtttcgcaaaaagcaaaacaggcgacaggttggaaaatgttaaagaacacagctctagtagtccctgacaccatttagagagacatgcagctgccaattctgattgtttgtgttgcactcatatttcctgtaaacaaaagcttagactgatctgtagagaaagcaactggacatcaatttttgcataccgatgaactacagtttaaaacggccggttgaattatcatgtcaggggctataggaaatttgaatgcttctattctaaggtcttgttgttgagtactgagtatagtttgatgactgcatgttggtcaatgacagcatcaaagattac

SEQ ID NO: 23253 - protein, 187 aa, Zea mays subsp. mays
  misc_feature (1)..(187): Ceres Seq. ID no. 12411746
MEPRSAIYRSGAFLLLAAILAEVVIPASAIGDKCAACKAVAAELEIGISSEKPRNHLDLRNRLNSKGQREGKVIDYRVSELRVVELLDGLCDKMQDYTLKKLESGEKGWVKVTDWNSFQTENKAAARAHSKKLSTFCGRLLEETEDELSEWIKTTSTESEYVSKALCEDISKHCRSTSATIQIDDEL

SEQ ID NO: 23254 - protein, 94 aa, Zea mays subsp. mays
  misc_feature (1)..(94): Ceres Seq. ID no. 12411747
MQDYTLKKLESGEKGWVKVTDWNSFQTENKAAARAHSKKLSTFCGRLLEETEDELSEWIKTTSTESEYVSKALCEDISKHCRSTSATIQIDDEL

SEQ ID NO: 23255 - DNA, 1400 bp, Zea mays subsp. mays
  misc_feature (1)..(1400): Ceres Seq. ID no. 12411748
atcctatgatatgagccaaagctccgaactccatcccagttcttctccacctcgtcctcctcctgctcctgcattctcgcccgtcccccaaattcacctcggccaccctccaccacctcgtcggcgcgggcagcagttcgcctcatcgtcctcccacctgacgacgtcgcggttcgcgctctcgcggcgtgccgcgcacccattcctcgcccacgtctccccgagttccacgccttctgtgccacgcgccacccggagccactgtttgccgcgccctccgcatctctgacctctacatctccatccgcggaagcagaccacctcgaatccttctctttcacgcagtcattgcttgcctccttagcccaactgttggtaccagaggttcatgtttcatcataaggaatgaacagtagtcgacaaatggaactccactacataaacactggatttccatacacaatcaccgagagcttcatggatttctttgagggtctcacttatgctcatgctgactttgctctcacggatggctttcaggatcagggtaatccatactgggcaatgatgcatacaaactcgtacaaatatggatactctggtcctgggaactattacagttatgctgatgtctatgacatagacgattacatgcatagagccaatggtgagcgcagaatatgggataacactacacctgtaaacaatgtcgattctgccaatgttgtcctgcagggtggtgaagctccccgcacaacggcaaatactattaacaaggaatgcatccaacaggtacaccaaagtccaggtagtcctcaggttgtttggcaagataacattgagcctgataatatgacatatgaggaactgttggatttgggtgaggcagttggaacccagagccgtggtctctcccaagaacgcatttcatcgcttcctgtcacgaagtataagtgtggttttttttcaaggaagaaaacatgccgtgagaggtgtgtgatttgccaaatggagtacaggagaggaaatttgcagatgacacttccatgcaagcatgtataccatgccagctgcgtgacaagatggcttggcataaacaaggtatgccctgtttgctttgctgaagttcctggcgaggatcctgaggcaatgagtcaacagttatgaggccactgggaagttgttgcactttgaagctgagtactgcccccaatgaacgcatgatgtttgcttgaaggcagcttattgtccccactttataattgtgtattagcaccgtattaccaaatataggttattgttagatcagatgtatttagtgtttggttcagcgttttgtaacgtaatcaaatcaggaacagagagataccgttacttgcgtttggttgaacgaggcccat

SEQ ID NO: 23256 - protein, 253 aa, Zea mays subsp. mays
  misc_feature (1)..(253): Ceres Seq. ID no. 12411749
MNSSRQMELHYINTGFPYTITESFMDFFEGLTYAHADFALTDGFQDQGNPYWAMMHTNSYKYGYSGPGNYYSYADVYDIDDYMHRANGERRIWDNTTPVNNVDSANVVLQGGEAPRTTANTINKECIQQVHQSPGSPQVVWQDNIEPDNMTYEELLDLGEAVGTQSRGLSQERISSLPVTKYKCGFFSRKKTCRERCVICQMEYRRGNLQMTLPCKHVYHASCVTRWLGINKVCPVCFAEVPGEDPEAMSQQL

SEQ ID NO: 23257 - protein, 247 aa, Zea mays subsp. mays
  misc_feature (1)..(247): Ceres Seq. ID no. 12411750
MELHYINTGFPYTITESFMDFFEGLTYAHADFALTDGFQDQGNPYWAMMHTNSYKYGYSGPGNYYSYADVYDIDDYMHRANGERRIWDNTTPVNNVDSANVVLQGGEAPRTTANTINKECIQQVHQSPGSPQVVWQDNIEPDNMTYEELLDLGEAVGTQSRGLSQERISSLPVTKYKCGFFSRKKTCRERCVICQMEYRRGNLQMTLPCKHVYHASCVTRWLGINKVCPVCFAEVPGEDPEAMSQQL

SEQ ID NO: 23258 - protein, 229 aa, Zea mays subsp. mays
  misc_feature (1)..(229): Ceres Seq. ID no. 12411751
MDFFEGLTYAHADFALTDGFQDQGNPYWAMMHTNSYKYGYSGPGNYYSYADVYDIDDYMHRANGERRIWDNTTPVNNVDSANVVLQGGEAPRTTANTINKECIQQVHQSPGSPQVVWQDNIEPDNMTYEELLDLGEAVGTQSRGLSQERISSLPVTKYKCGFFSRKKTCRERCVICQMEYRRGNLQMTLPCKHVYHASCVTRWLGINKVCPVCFAEVPGEDPEAMSQQL

SEQ ID NO: 23259 - DNA, 1439 bp, Zea mays subsp. mays
  misc_feature (1)..(1439): Ceres Seq. ID no. 12411752
gatcaagaactgctgctcatgtgcgcagcgcgaggctcgagccgccaaagcagggaagcagagagcaagctaataagcaaccgcgtttcccagattccttggcactgcagcagctgcgtccaagcttgctaggtggtggcggcagcagcagcctgcgcctatgtacactgcaatggcagcgcgaccgctgcttcttccccctccggtcctcctcctcctggtggtgctggctgcttcgtcggccgcccatggctatggcgcctacggctacggcgacgctgctgctgagctcagggtcgggttctacaaggactcgtgcccggacgccgaggccgtcgtccgcaggatcgtcgccaaggccgtccgcgaggaccccacggccaacgcgccgctgctcaggctccacttccacgactgcttcgtccggggctgcgacggctccgtgctcgtcaactccaccagggggaacacggcggagaaggacgccaagcccaaccacacgctggacgccttcgacgtcatcgacgacatcaaggaggcgctggagaagcgctgcccggggaccgtctcctgcgccgacatccttgccatcgccgccagggacgccgtctcgctggccaccaaggtggtgaccaagggcggctggagcagggacggcaacctctaccaggtggagaccggcaggcgggacggccgcgtgtccagagccaaggaggcggtcaagaacttgccggactccatggatggcatccgcaagctcatcaggaggttcgcttccaagaacctcagcgtcaaggatctcgctgttctctcaggcgcccacgcgatcggcaaatcgcactgcccgtcgatcgccaagcggctgcgcaacttcacggcgcaccgggacagcgacccgaccctggacgccgcgtacgcggcggagctgaggcggcagtgccggagccgcagggacaacacgacggagctggagatggtgccggggggctccaccgcgttcggcacggcctactacggcctggtcgcggagcggagggcgctcttccactccgacgaggcgctgctcaggaacggggagaccagggcgctcgtctaccgctacagggacgcgccgtcggaggcggcgttccttgcggacttcggagcgtccatgctcaacatgggcagggtgggcgtgctcaccggcgcccagggggagatcaggaagaggtgcgcctttgtcaactagctagcgatgctgtgttgtactttgtaccctctcgccttaattaaaatttaaatgctggagtttcacctagtctcgagagaatcttccatttttactcctacatagatttaggaacgtttctaggtttcatatgattgtgaaacgtttgggctgagctcatctgtaactgtaaactctgatggaatgcgataacgtgttccatattgtgtgc

SEQ ID NO: 23260 - protein, 355 aa, Zea mays subsp. mays
  misc_feature (1)..(355): Ceres Seq. ID no. 12411753
MYTAMAARPLLLPPPVLLLLVVLAASSAAHGYGAYGYGDAAAELRVGFYKDSCPDAEAVVRRIVAKAVREDPTANAPLLRLHFHDCFVRGCDGSVLVNSTRGNTAEKDAKPNHTLDAFDVIDDIKEALEKRCPGTVSCADILAIAARDAVSLATKVVTKGGWSRDGNLYQVETGRRDGRVSRAKEAVKNLPDSMDGIRKLIRRFASKNLSVKDLAVLSGAHAIGKSHCPSIAKRLRNFTAHRDSDPTLDAAYAAELRRQCRSRRDNTTELEMVPGGSTAFGTAYYGLVAERRALFHSDEALLRNGETRALVYRYRDAPSEAAFLADFGASMLNMGRVGVLTGAQGEIRKRCAFVN

SEQ ID NO: 23261 - protein, 351 aa, Zea mays subsp. mays
  misc_feature (1)..(351): Ceres Seq. ID no. 12411754
MAARPLLLPPPVLLLLVVLAASSAAHGYGAYGYGDAAAELRVGFYKDSCPDAEAVVRRIVAKAVREDPTANAPLLRLHFHDCFVRGCDGSVLVNSTRGNTAEKDAKPNHTLDAFDVIDDIKEALEKRCPGTVSCADILAIAARDAVSLATKVVTKGGWSRDGNLYQVETGRRDGRVSRAKEAVKNLPDSMDGIRKLIRRFASKNLSVKDLAVLSGAHAIGKSHCPSIAKRLRNFTAHRDSDPTLDAAYAAELRRQCRSRRDNTTELEMVPGGSTAFGTAYYGLVAERRALFHSDEALLRNGETRALVYRYRDAPSEAAFLADFGASMLNMGRVGVLTGAQGEIRKRCAFVN

SEQ ID NO: 23262 - protein, 209 aa, Zea mays subsp. mays
  misc_feature (1)..(209): Ceres Seq. ID no. 12411755
SRTAAHVRSARLEPPKQGSREQANKQPRFPDSLALQQLRPSLLGGGGSSSLRLCTLQWQRDRCFFPLRSSSSWWCWLLRRPPMAMAPTATATLLLSSGSGSTRTRARTPRPSSAGSSPRPSARTPRPTRRCSGSTSTTASSGAATAPCSSTPPGGTRRRRTPSPTTRWTPSTSSTTSRRRWRSAARGPSPAPTSLPSPPGTPSRWPPRW

SEQ ID NO: 23263 - DNA, 1066 bp, Zea mays subsp. mays
  misc_feature (1)..(1066): Ceres Seq. ID no. 12411760
aaaagaaagcccagaccaaagcagagctgcttgcttctccacgccttgtgcttccacagagcaaccagttctcagaagcaatgtccgcacccctggtggacgccgagtacatggccgagatcgagagggcacggcgggacctccgcgctctcgtcgccagcaagaactgcgcgccgatcatgctccgcctcgcgtggcacgacgccggcacttacgacgccaagaccaacacaggaggccccaacggctccataaggttcccacaggagtacagccactcttcaaacgcagggatcaagatcgccattgacctcttagagcctgtgaagcagaagcaccccaagatcacatacgcagacctgtatcagctcgccggagttgtcgccgtcgaagtcactggtggaccgaccgttgacttcgtccctgggaggaaggattcttcgatttgtccagaggaaggacgcttgccggatgctagaagaggtgcttcgcatctcagacaagtattctaccggatgggtttatcagacagggacattgtggcgctctccggcggccatactctggggagagcgcatcgagagaggacagggtttgatggcccatggactagggatcctctgaaatttgacaactcttatttccttgagcttctgaaaggcgactctgaagggctcttgaaactccctactgacaaggttcttgtggaagatcctgaattccgtcagcatgtccaactatatgccaaggatgaagatgcatttttcagggactacgcggagtcacacaagaagctgtcagagctaggcttcaccccccctcgctcttgtctctcatccagatctgcgaataaacacaagtcgttgctggtgcaagctgcagctgggctcgcagttgctaccgcagttgtcgcatgggcgtacctgtgcgaatccaacaacaagttcatctaacttacgcttaccgttagtacaaatacaaattggagtcgccaaaatatttcagttctgtgcacatgtatttgcatctacatattgatataataccaagcatgttatgtgttgtg

SEQ ID NO: 23264 - protein, 316 aa, Zea mays subsp. mays
  misc_feature (1)..(316): Ceres Seq. ID no. 12411761
KKAQTKAELLASPRLVLPQSNQFSEAMSAPLVDAEYMAEIERARRDLRALVASKNCAPIMLRLAWHDAGTYDAKTNTGGPNGSIRFPQEYSHSSNAGIKIAIDLLEPVKQKHPKITYADLYQLAGVVAVEVTGGPTVDFVPGRKDSSICPEEGRLPDARRGASHLRQVFYRMGLSDRDIVALSGGHTLGRAHRERTGFDGPWTRDPLKFDNSYFLELLKGDSEGLLKLPTDKVLVEDPEFRQHVQLYAKDEDAFFRDYAESHKKLSELGFTPPRSCLSSRSANKHKSLLVQAAAGLAVATAVVAWAYLCESNNKFI

SEQ ID NO: 23265 - protein, 290 aa, Zea mays subsp. mays
  misc_feature (1)..(290): Ceres Seq. ID no. 12411762
MSAPLVDAEYMAEIERARRDLRALVASKNCAPIMLRLAWHDAGTYDAKTNTGGPNGSIRFPQEYSHSSNAGIKIAIDLLEPVKQKHPKITYADLYQLAGVVAVEVTGGPTVDFVPGRKDSSICPEEGRLPDARRGASHLRQVFYRMGLSDRDIVALSGGHTLGRAHRERTGFDGPWTRDPLKFDNSYFLELLKGDSEGLLKLPTDKVLVEDPEFRQHVQLYAKDEDAFFRDYAESHKKLSELGFTPPRSCLSSRSANKHKSLLVQAAAGLAVATAVVAWAYLCESNNKFI

SEQ ID NO: 23266 - protein, 280 aa, Zea mays subsp. mays
  misc_feature (1)..(280): Ceres Seq. ID no. 12411763
MAEIERARRDLRALVASKNCAPIMLRLAWHDAGTYDAKTNTGGPNGSIRFPQEYSHSSNAGIKIAIDLLEPVKQKHPKITYADLYQLAGVVAVEVTGGPTVDFVPGRKDSSICPEEGRLPDARRGASHLRQVFYRMGLSDRDIVALSGGHTLGRAHRERTGFDGPWTRDPLKFDNSYFLELLKGDSEGLLKLPTDKVLVEDPEFRQHVQLYAKDEDAFFRDYAESHKKLSELGFTPPRSCLSSRSANKHKSLLVQAAAGLAVATAVVAWAYLCESNNKFI

SEQ ID NO: 23267 - DNA, 1445 bp, Zea mays subsp. mays
  misc_feature (1)..(1445): Ceres Seq. ID no. 12411772
actatccattttcattcaatgcgtccgcgccgcgcgcctccattcctctcgattcccttcctccttccttgttcgaggacctccgtgaccgtggccgagggattgaggacggaaagcgaaaatgatgctgacgcgggcgtcgatgggggtgatggatgcggcggcggtggacgaggtggtgcgtcgcctcgtcgagggcggccgcgggggccggcaggtgcagatgtccgaggccgagatccgccagctctgcgtcgaggccaaacaggtgctgctgtcgcagcccaacctcctccgcatccacgcgcccgtcaagatctgcggtgatatccatggacaatttgttgatctcttgaggctctttgatttgggtggttatcctccaacttcaacttatattttccttggagactatgtggatagaggcaaacaaagcttagaaaccatatgtctgcttctggcatacaagttgaagtaccctgataatatataccttttaaggggaaaccatgaagatgcaaaaattaacagagtttatggtttctatgatgaatgtaaaaggagattcaatgttcgactatggaagatattctgtgattgcttcaactgcttgcctatggcagcacttattgatgacaaaatattatgcatgcatggtggcctctcacctgaattgactagcttggatcaaataaaagatattgagaggcctaccgaaattccagactatggtcttctgtgcgatctcctttggtctgatcccagtcatgatacagaaggttggggggagagtgatagaggtgtttcttgcacttttggcgcagataagcttgttgaatttttggagaagaatgatcttgaccttgtgtgcagagctcatcaggtggtagaagatggctacgagttctttgcagagagaagactagtgaccatcttttcagctccaaactactgtggcgaatttgataatgcaggtgctctattgagcatagatgaaagcttgatgtgttcttttcagatcttgaaaccaaatgaaacaggtgcaccacattcaaggaaacctcttccaagcaaggcaccaaaaggagagaacgtctaatttgtatccagtgacctaatcacaatcgatgtcagctcgaagggggcgatctcgttgtctcggatccaccagggcatggcattagcgttctacacttgctgaatttgtgtggactcaatcggcagcgcttacattcttctgtacagcagcagtgtttctaacttggcatatcgtccgttctgatagttacattgccacagctgcaatattttagtcgggtggacaaggcattttgttgggtacagtagctgttgttttgttagcctttttttggtaatgtttgtttggttgattgaacgctgtgagttttgtttgccgcgtatcttcgtcaggctcgggtatttac

SEQ ID NO: 23268 - protein, 325 aa, Zea mays subsp. mays
  misc_feature (1)..(325): Ceres Seq. ID no. 12411773
MMLTRASMGVMDAAAVDEVVRRLVEGGRGGRQVQMSEAEIRQLCVEAKQVLLSQPNLLRIHAPVKICGDIHGQFVDLLRLFDLGGYPPTSTYIFLGDYVDRGKQSLETICLLLAYKLKYPDNIYLLRGNHEDAKINRVYGFYDECKRRFNVRLWKIFCDCFNCLPMAALIDDKILCMHGGLSPELTSLDQIKDIERPTEIPDYGLLCDLLWSDPSHDTEGWGESDRGVSCTFGADKLVEFLEKNDLDLVCRAHQVVEDGYEFFAERRLVTIFSAPNYCGEFDNAGALLSIDESLMCSFQILKPNETGAPHSRKPLPSKAPKGENV

SEQ ID NO: 23269 - protein, 324 aa, Zea mays subsp. mays
  misc_feature (1)..(324): Ceres Seq. ID no. 12411774
MLTRASMGVMDAAAVDEVVRRLVEGGRGGRQVQMSEAEIRQLCVEAKQVLLSQPNLLRIHAPVKICGDIHGQFVDLLRLFDLGGYPPTSTYIFLGDYVDRGKQSLETICLLLAYKLKYPDNIYLLRGNHEDAKINRVYGFYDECKRRFNVRLWKIFCDCFNCLPMAALIDDKILCMHGGLSPELTSLDQIKDIERPTEIPDYGLLCDLLWSDPSHDTEGWGESDRGVSCTFGADKLVEFLEKNDLDLVCRAHQVVEDGYEFFAERRLVTIFSAPNYCGEFDNAGALLSIDESLMCSFQILKPNETGAPHSRKPLPSKAPKGENV

SEQ ID NO: 23270 - protein, 318 aa, Zea mays subsp. mays
  misc_feature (1)..(318): Ceres Seq. ID no. 12411775
MGVMDAAAVDEVVRRLVEGGRGGRQVQMSEAEIRQLCVEAKQVLLSQPNLLRIHAPVKICGDIHGQFVDLLRLFDLGGYPPTSTYIFLGDYVDRGKQSLETICLLLAYKLKYPDNIYLLRGNHEDAKINRVYGFYDECKRRFNVRLWKIFCDCFNCLPMAALIDDKILCMHGGLSPELTSLDQIKDIERPTEIPDYGLLCDLLWSDPSHDTEGWGESDRGVSCTFGADKLVEFLEKNDLDLVCRAHQVVEDGYEFFAERRLVTIFSAPNYCGEFDNAGALLSIDESLMCSFQILKPNETGAPHSRKPLPSKAPKGENV

SEQ ID NO: 23271 - DNA, 1814 bp, Zea mays subsp. mays
  misc_feature (1)..(1814): Ceres Seq. ID no. 12411778
acaggaagggaaggggaggaagcagcagcagcacacagctttgctctcgctctcggctccccgtccaccaaaggaggaaacgcgcagcccgcagcgctagccgtcgtctatctcgtctcctagtccaaggaaggaaagaggcgcttggcatgaagcgacctaccaagaatgagacgctgggctacccctggcacaagtagagcaagagccccagcaaccgagccacagtgaggaggactcgagggaagagatgggcaactgcggcacgcgggaggagaatgccgtcgtcgctgcgcacgcacaagttcaacagctccacttgttacaaaatcctgccaagaatgccattggagataggaagcacaaccgcacctcatcagatataagtgatccttccacacctaggaaagctgaagatgccaagaacatttccatatacaacgatgtgattgtcttcacattgtttgagctagagacaatcacaaagagcttccgtgccgattatgttctcggcgaaggaggatttgggaccgtttacaagggctacatagatgaaaatgtcagggtggggctgaagtcactgcctgttgcagtcaaggtgctcaacaaagatggacaccaagggcacagagaatggcttaccgaagttaactgcctggggcagttaaggcatccaaacttggtgaagttgatcggatattgctgcgaagatgaccatcggctgcttgtctacgagttcatgtttcgaggaagcctagaaaaccacctattccgaaagacagctacaccattaccctggggtactaggatgtcaatcgcactgggagctgctaaagggcttgcttgcctccacaatgctcaaaggcctgtcatctacagagatttcaagacatcaaatattctactggactctgattatactgctaagctgtctgactttggcctggcaaaagctggccctgaaggtgatcagacccatgtatcaacacgggtgatgggaacctacggttatgctgcccctgaatatgtgatgactggccacttgactgctagaagtgatgtctacagcttcggtgtggtccttctggagctcttgacagggcgcaagtcaatcgacaagtcgcggcccagcagggagcagagcctggttgactgggccctccccaagctgaacgacaagaggcggcttctccagatcatcgacccgagactggaggggcagtactcggccagagccgcccacaaagcctgcagccttgcgttctactgcctgagccagaaccccaaggccaggccactcatgagcgacgtcgtcgagaccctcgaaccgttgcagggcagcggtggaggcgacggacgcggccagccttctggccttcctgactataggggtcgccgcaggataaccgggaacagcgtccacttcagggccatcccgaaccccaagtgctcccccgccgtcccggccacggcttgccgagtgcggtgatgggtgctgtgtttcggttggagttgccggggtaggttccgttgtgtatattgcggccgtgggcggtggtgtgtgtgtgggtgcatgtgtgtgcttggcggcggcggggtttcggtttcttctcgggttttggccggcgttttgatgtgtaaatttgatctgcgtgctgcattgctgctgctgcttttgtaaggccctctaattttcactgtggtcttatgtatccttcgactgagcgagccctgctgaaactggcgggttcgggattaaccctagaaatgaaatgaaaggctgaaccgagagcgggttggatgattgatatggc

SEQ ID NO: 23272 - protein, 412 aa, Zea mays subsp. mays
  misc_feature (1)..(412): Ceres Seq. ID no. 12411779
MGNCGTREENAVVAAHAQVQQLHLLQNPAKNAIGDRKHNRTSSDISDPSTPRKAEDAKNISIYNDVIVFTLFELETITKSFRADYVLGEGGFGTVYKGYIDENVRVGLKSLPVAVKVLNKDGHQGHREWLTEVNCLGQLRHPNLVKLIGYCCEDDHRLLVYEFMFRGSLENHLFRKTATPLPWGTRMSIALGAAKGLACLHNAQRPVIYRDFKTSNILLDSDYTAKLSDFGLAKAGPEGDQTHVSTRVMGTYGYAAPEYVMTGHLTARSDVYSFGVVLLELLTGRKSIDKSRPSREQSLVDWALPKLNDKRRLLQIIDPRLEGQYSARAAHKACSLAFYCLSQNPKARPLMSDVVETLEPLQGSGGGDGRGQPSGLPDYRGRRRITGNSVHFRAIPNPKCSPAVPATACRVR

SEQ ID NO: 23273 - protein, 249 aa, Zea mays subsp. mays
  misc_feature (1)..(249): Ceres Seq. ID no. 12411780
MFRGSLENHLFRKTATPLPWGTRMSIALGAAKGLACLHNAQRPVIYRDFKTSNILLDSDYTAKLSDFGLAKAGPEGDQTHVSTRVMGTYGYAAPEYVMTGHLTARSDVYSFGVVLLELLTGRKSIDKSRPSREQSLVDWALPKLNDKRRLLQIIDPRLEGQYSARAAHKACSLAFYCLSQNPKARPLMSDVVETLEPLQGSGGGDGRGQPSGLPDYRGRRRITGNSVHFRAIPNPKCSPAVPATACRVR

SEQ ID NO: 23274 - protein, 226 aa, Zea mays subsp. mays
  misc_feature (1)..(226): Ceres Seq. ID no. 12411781
MSIALGAAKGLACLHNAQRPVIYRDFKTSNILLDSDYTAKLSDFGLAKAGPEGDQTHVSTRVMGTYGYAAPEYVMTGHLTARSDVYSFGVVLLELLTGRKSIDKSRPSREQSLVDWALPKLNDKRRLLQIIDPRLEGQYSARAAHKACSLAFYCLSQNPKARPLMSDVVETLEPLQGSGGGDGRGQPSGLPDYRGRRRITGNSVHFRAIPNPKCSPAVPATACRVR

SEQ ID NO: 23275 - DNA, 1309 bp, Zea mays subsp. mays
  misc_feature (1)..(1309): Ceres Seq. ID no. 12411788
tcattggagctagcaaaagctgggtatcagaggccttcacatgtaatcatacatctgaagaattttaggaggtcagagaactttgtaaggcttattaagtgcaacattgacaacgaacgggaacctcaggctctttcactttgctgttcaattcggaaaatgtggagatctcaccaagcagcaatgaaagttataccattgaaggttccatcaggccagcgtcatgtgtattttgtgtcagatgatgataaaaaggaatcccacagtttatctaggcctttgctaagctcgggaggaacctctactgatgttgagcaacagttcataaacaatacagttcactttcagaaaatgtggagcagtgaaccagaaattcagagccgatgcaaactagttgccaagcagattgcggatgacggaagggtgttcagcatatggaggcctctctgccctaatgggtatgtctcaattggtgatattgcgcatgttggcatccatccaccgcattttgctgctgtatacaagaatatcaatgggaactttgcactgcctcttggctatgacctggtttggagaaattgtgctgaggattacaagagccctgtatcaatatggcttccaaggccaccggggggatacgtagctcttgggtgtgttgctgtcccttcattcaaggagcccactcttgactgtgctttctgtgtggatgagagactcgcggaggatgccgcgtatgaggagcaaatcatatgggcctcatcggatgcttacccatggggatgctatatctaccaagttcagagcgcctcaatgcagttcatggcacttcgtgtcccaaaagaacaatctgagctaaggcccaagaagatattggagtcatttctgcagcaagcatcagagactcaaacgtcccgtgcatgaagaagctgcacatgatgcttgtgcgtgcaagagaactcggctgggacaaagggcaagtctcgtgcaagaaagctcgaagaatgccacttctttcggatcactccatttctccgttgtcaaagcatacacagaggacagagccttgcatgccaacactcgggttgacggaagtgttgtatactagaatagtaggttaaaggttgtaaatgtaaagttttgtaacgtttgatatagtttttgtccagctacatttgttaaggcccatgtggacgtgggccatattagttgtggctacatattctactaagaagttctcaggactaatcatactttctctaatttaaggttgttaaggcccatgtggacgtgggccatactagttgtggct

SEQ ID NO: 23276 - protein, 306 aa, Zea mays subsp. mays
  misc_feature (1)..(306): Ceres Seq. ID no. 12411789
SLELAKAGYQRPSHVIIHLKNFRRSENFVRLIKCNIDNEREPQALSLCCSIRKMWRSHQAAMKVIPLKVPSGQRHVYFVSDDDKKESHSLSRPLLSSGGTSTDVEQQFINNTVHFQKMWSSEPEIQSRCKLVAKQIADDGRVFSIWRPLCPNGYVSIGDIAHVGIHPPHFAAVYKNINGNFALPLGYDLVWRNCAEDYKSPVSIWLPRPPGGYVALGCVAVPSFKEPTLDCAFCVDERLAEDAAYEEQIIWASSDAYPWGCYIYQVQSASMQFMALRVPKEQSELRPKKILESFLQQASETQTSRA

SEQ ID NO: 23277 - protein, 253 aa, Zea mays subsp. mays
  misc_feature (1)..(253): Ceres Seq. ID no. 12411790
MWRSHQAAMKVIPLKVPSGQRHVYFVSDDDKKESHSLSRPLLSSGGTSTDVEQQFINNTVHFQKMWSSEPEIQSRCKLVAKQIADDGRVFSIWRPLCPNGYVSIGDIAHVGIHPPHFAAVYKNINGNFALPLGYDLVWRNCAEDYKSPVSIWLPRPPGGYVALGCVAVPSFKEPTLDCAFCVDERLAEDAAYEEQIIWASSDAYPWGCYIYQVQSASMQFMALRVPKEQSELRPKKILESFLQQASETQTSRA

SEQ ID NO: 23278 - protein, 245 aa, Zea mays subsp. mays
  misc_feature (1)..(245): Ceres Seq. ID no. 12411791
MKVIPLKVPSGQRHVYFVSDDDKKESHSLSRPLLSSGGTSTDVEQQFINNTVHFQKMWSSEPEIQSRCKLVAKQIADDGRVFSIWRPLCPNGYVSIGDIAHVGIHPPHFAAVYKNINGNFALPLGYDLVWRNCAEDYKSPVSIWLPRPPGGYVALGCVAVPSFKEPTLDCAFCVDERLAEDAAYEEQIIWASSDAYPWGCYIYQVQSASMQFMALRVPKEQSELRPKKILESFLQQASETQTSRA

SEQ ID NO: 23279 - DNA, 1136 bp, Zea mays subsp. mays
  misc_feature (1)..(1136): Ceres Seq. ID no. 12411807
atcctcgctggctatacgtctcccctccgcgcacaaaaaccctagcacgcaggcgcagccaggcctgcacccaaagcttccggagaattcctcccttgccccgccgtcgcatcctcttcgaagttcgaatcgaatcgcgccgcgatcacccacctcatggcggacaaggagcctgtcgtggagcggccagaggcgggtgaggaggaggaggacgcctcagccgccgccgccgcgggggaggaggaggacacgggcgcccaggtggctcccatcgtgcggcttgaggaggtagccgtcaccaccggcgaggaggacgaggacgtcctgctcgacatgaaggcgaagctgtaccgattcgacaaagacggtaaccaatggaaggaacggggcacgggcgctgtcaagcttctcaagcacaagcagaccggcaaggtccgcctagtcatgcgccaggctaaaacgcttaagatctgcgcgaaccacctcgtggcctccaccacgaagatgcaggagcatgcgggcagcgacaagtcgtgtgtttggcacgctgctgactttgccgatggcgaacttaaggaggagatgtttgccatcaggtttggttcggtagaaaactgcaagaagttcaaggagttggttgaggagatagctgagtcgcttacaaagaacgagggcaaggaaggtgaagatggtggttccacggctggattgctggcgaagctcactgtgagcgagggcaaatctgagggaagtggcaagtctgagtccactgattctggcaaagtgactgaaaccaaagccgacacagccccagctgagtagttggtgtggttgcacttgcacgcagattcgcctggtgctgaactagtttgtctgtccgcgtccagtggaagtttggtgccctttagccatggaatacgattgctatcatttgggcccgggccgagttggaggagtctcaggtgttcggtctggtttggtccgggcttgattttgctaaaaacttgggagtccatgggggttgggaacgtttgatatgtgagtcgctagtatttaactgcatggatcgttgtggattgcggtaaattcataaagtggaccctatatattttttatttcgttcaatacacattcat

SEQ ID NO: 23280 - protein, 221 aa, Zea mays subsp. mays
  misc_feature (1)..(221): Ceres Seq. ID no. 12411808
MADKEPVVERPEAGEEEEDASAAAAAGEEEDTGAQVAPIVRLEEVAVTTGEEDEDVLLDMKAKLYRFDKDGNQWKERGTGAVKLLKHKQTGKVRLVMRQAKTLKICANHLVASTTKMQEHAGSDKSCVWHAADFADGELKEEMFAIRFGSVENCKKFKELVEEIAESLTKNEGKEGEDGGSTAGLLAKLTVSEGKSEGSGKSESTDSGKVTETKADTAPAE

SEQ ID NO: 23281 - protein, 162 aa, Zea mays subsp. mays
  misc_feature (1)..(162): Ceres Seq. ID no. 12411809
MKAKLYRFDKDGNQWKERGTGAVKLLKHKQTGKVRLVMRQAKTLKICANHLVASTTKMQEHAGSDKSCVWHAADFADGELKEEMFAIRFGSVENCKKFKELVEEIAESLTKNEGKEGEDGGSTAGLLAKLTVSEGKSEGSGKSESTDSGKVTETKADTAPAE

SEQ ID NO: 23282 - protein, 125 aa, Zea mays subsp. mays
  misc_feature (1)..(125): Ceres Seq. ID no. 12411810
MRQAKTLKICANHLVASTTKMQEHAGSDKSCVWHAADFADGELKEEMFAIRFGSVENCKKFKELVEEIAESLTKNEGKEGEDGGSTAGLLAKLTVSEGKSEGSGKSESTDSGKVTETKADTAPAE

SEQ ID NO: 23283 - DNA, 1106 bp, Zea mays subsp. mays
  misc_feature (1)..(1106): Ceres Seq. ID no. 12411811
acaaaacatatctatatatctgcaacgtcaaatcaacacaggctgttgtttgcttcttttggtaaaggctttagctgcggcagatccaccggcggcgccccgagaatcgaagatgccggtgaaggtgttcggatcgccgacgtcggcggaggtcgcccgcgtcctggcctgcctgttcgagaaggacgtcgagttccagctcatccgcgtcgactccttccgcggcaccaagcgcctgccccagtacctcaagctccagccgcacggcgaggcgctcaccttcgaggacggcaacgtcaccctcgtcggtacgtacgtacacacgcaagcgacgcgagagagccaactgaccaactgaaaacgtaatggatcatggatggatggatggatgcatgcagagtcgaggaagatcctgcgccacatcgccgacaagtacaagaaccaggggtacagggacctgttcggcccgggcgcgctggagcgggcctccatcgagcagtggctgcagacggaggcgcagagcttcgacgtccccagcgccgacatggtctacagcctcgcctacctgccgcccgacatgcagctcgacggcaggggcgtcggcggcctcccggcggcgacggggacgatgaacccggcgcaccggcagaaggtggaggagatgctgcagctgttcgagaagagccgcaggcagctgggcaagctgctggacatctacgagcagcgccttggcgaggaggccttcctggccggaggcaagttcacgctcgccgacctgtcccacctgcccaacgccgaccgcctcgccggcgacccgcggtccgcacgcctcatggagtcgcgcaggaacgtcagcaagtggtgggacaccgtatcccgccgcgactcttgggtcagggtcaaggagttgcagcgcccgccgtccgcggaggcgcccttctgatgtcgatcgatcgcaaattaaggcggtggcctttgctcaagcctacgtgttcggtttctgcataattttttaataaataaacgccactggcccctctacgtcattggcgattgttcattgtgtaataaatcgttcaagagcatatgatgcttcttgccgtgag

SEQ ID NO: 23284 - protein, 211 aa, Zea mays subsp. mays
  misc_feature (1)..(211): Ceres Seq. ID no. 12411812
MDGWMDACRVEEDPAPHRRQVQEPGVQGPVRPGRAGAGLHRAVAADGGAELRRPQRRHGLQPRLPAARHAARRQGRRRPPGGDGDDEPGAPAEGGGDAAAVREEPQAAGQAAGHLRAAPWRGGLPGRRQVHARRPVPPAQRRPPRRRPAVRTPHGVAQERQQVVGHRIPPRLLGQGQGVAAPAVRGGALLMSIDRKLRRWPLLKPTCSVSA

SEQ ID NO: 23285 - protein, 207 aa, Zea mays subsp. mays
  misc_feature (1)..(207): Ceres Seq. ID no. 12411813
MDACRVEEDPAPHRRQVQEPGVQGPVRPGRAGAGLHRAVAADGGAELRRPQRRHGLQPRLPAARHAARRQGRRRPPGGDGDDEPGAPAEGGGDAAAVREEPQAAGQAAGHLRAAPWRGGLPGRRQVHARRPVPPAQRRPPRRRPAVRTPHGVAQERQQVVGHRIPPRLLGQGQGVAAPAVRGGALLMSIDRKLRRWPLLKPTCSVSA

SEQ ID NO: 23286 - protein, 188 aa, Zea mays subsp. mays
  misc_feature (1)..(188): Ceres Seq. ID no. 12411814
MDGWMHAESRKILRHIADKYKNQGYRDLFGPGALERASIEQWLQTEAQSFDVPSADMVYSLAYLPPDMQLDGRGVGGLPAATGTMNPAHRQKVEEMLQLFEKSRRQLGKLLDIYEQRLGEEAFLAGGKFTLADLSHLPNADRLAGDPRSARLMESRRNVSKWWDTVSRRDSWVRVKELQRPPSAEAPF

SEQ ID NO: 23287 - DNA, 1247 bp, Zea mays subsp. mays
  misc_feature (1)..(1247): Ceres Seq. ID no. 12411831
aaaaggtacccaagctgaaagcatcacactcgcagttgcagagttccgcttcatcagtcccacactctccccttcctccccccagtcctgagcttcgccgaggcatacggacaataccggcaccggcagcgagcagtcgggagccatggctccgcggctcctgctcttcctcctcctcctcctcccgctcctcgccgccggacaccagcacccgtcctcctacggctcctccgcgctttccgagtggcgccccgccaaggcatcctactacgccgccgaccccgaagacgccatcggtggggcgtgcgggttcggggatctgggaaagcacgggtacgggatggcgacggtggggctgagcacggcgctgttcgagcgcggcgcggcgtgcggcggctgctacgaggtcaagtgcgtcgaggatctcaagtactgcctccccggcacctccatagtcgtcacggccaccaacttctgcgccccgaactacggccttcccgccgacgccggcggccactgcaacccgcccaaccatcatttcctcctccccatccagtcgtttgagaagattgcgctctggaaggccggcatcatgccaatccagtaccgccgtgttaagtgcctccgtgaaggtggtgtcaggttctctgtcaacggtcggcacttcttctttacagtcctaatcagcaacgttggtggcgcgggtgatgttagatctgtgaagatcaaaggaacagagttgggatggctcccgatgggccgcaactggggccaggtgtggcacatcaactgtgacatgaggggacaacctctatcgtttgagctcagctcgagcgatggcaaggcgctgaccagtttcaacgtcgtccctaaggattgggagtatggcaagacatacacggggaagcaatttcttctgtagagaatgagcgccacaagatcagcttacagtttctcattttttgttctgatcctacgagttgggctgtggtgtacattctctgcacttctgcagaacaagtaatatcattattaggagaaaattacttagtgcaaggcctcagatagttgctcttggtcataaatggttttccatgtccccttcatagttgtactaaagaggcttgatgtatcattcaaaatagaagcctccgttgtattacaatattttacctagcaagcaatgataatgtatttctgcatttctgtattagtaacaagggcagcaactagaactttgatttcct

SEQ ID NO: 23288 - protein, 258 aa, Zea mays subsp. mays
  misc_feature (1)..(258): Ceres Seq. ID no. 12411832
MAPRLLLFLLLLLPLLAAGHQHPSSYGSSALSEWRPAKASYYAADPEDAIGGACGFGDLGKHGYGMATVGLSTALFERGAACGGCYEVKCVEDLKYCLPGTSIVVTATNFCAPNYGLPADAGGHCNPPNHHFLLPIQSFEKIALWKAGIMPIQYRRVKCLREGGVRFSVNGRHFFFTVLISNVGGAGDVRSVKIKGTELGWLPMGRNWGQVWHINCDMRGQPLSFELSSSDGKALTSFNVVPKDWEYGKTYTGKQFLL

SEQ ID NO: 23289 - protein, 193 aa, Zea mays subsp. mays
  misc_feature (1)..(193): Ceres Seq. ID no. 12411833
MATVGLSTALFERGAACGGCYEVKCVEDLKYCLPGTSIVVTATNFCAPNYGLPADAGGHCNPPNHHFLLPIQSFEKIALWKAGIMPIQYRRVKCLREGGVRFSVNGRHFFFTVLISNVGGAGDVRSVKIKGTELGWLPMGRNWGQVWHINCDMRGQPLSFELSSSDGKALTSFNVVPKDWEYGKTYTGKQFLL

SEQ ID NO: 23290 - DNA, 2072 bp, Zea mays subsp. mays
  misc_feature (1)..(2072): Ceres Seq. ID no. 12411849
gtcgctctcctcctcctcctcctcctcctccgtaggcaaggcaaggggggcaaggctctaacggagatcggatcgaactgcctgtgcagtctccctccctccctccctccctcatgtccatatataccaaaaaatctccgccgcgccgccattagctagctctcgtcgtcttcgttcctccgcaaataatttgttactcaagccgaaggaggacgagggcgacgggattggctaatcaaatcgaccgatctagtggctggtgcccaggagaagggacgcgggcagtgcggctcgtcgtggtcagcagcttgtggcgaccggtcgccagggaatcaatcaattcaatcagaaagttgcaattttgattgagctcgattcgtcatccacaagacattagggaatcgaaccaccacaaagcaagaaggcagtccagtgcagagagagagagagagaccaagaagagaaagagaaagggaaagagaagcaaagcaatggatccaccgcatcaccgtgctgtgctgcggcggcctcgtcctcctcctccctcctgccctttttataggccgcctccgcttcgtcgtcttggcaagacctgcccccgcgcctgcaatcctacgacaacagggcgccgctcctcctgcccgtcaagatcatggacaccgccgccgacgacaagccggaaatctccgacgatacggcccaccagattagcgttgatccttggtatcaagttggcttcgtcctcacaaccggggtcaacagcgcatacgttctaggatactctggatcaatcatggtccctctaggctggatcggcggcacatgcggcctcctcctagctgccgccatatccatgtacgctaatgctcttcttgcacggcttcatgaagtcggtggcaaacgccatatcagatacagagaccttgctggacacatatatggaccgaaaatttacgggcttacatgggctctgcagtacattaaccttttcatgatcaacactggctttatcatcttagctggacaagctctcaaggccacgtatggactgttcagtgatgatggagttctgaaactcccttactgcattgcgatatcaggattcgtctgtgctcttttcgccattggaatcccttatttatctgccctcaggatttggttggggttctccacgcttttcagcctcatgtatattgtgatagcagttgtgctgtcgtcgagagatgggataaccgcacctgcaagggattacagcatccccaaatcatcgcagtcaactcgagtcttcactacgataggttccatagcagaccttgtgtttgcttacaacaccggcatgctgccagaaattcaggcaaccatcaggcctcctgtggtgaagaacatggagaaagctctatggttccagttcaccattggctccttgcctctctatgctgtagtttttgtgggttactgggcttatgggtcctcaacatcaggctacctcctcaacagtgtcacaggcccagtctgggtgaaagcggttgcaaatctgtcggcattttttcagacagtcatagcgctgcacatctttgctagccccatgtatgaattcctggacacaaaatatggaagtgggcgtggccccttttgagatccacaacgtggcgttcagagtagcagtcagaggaggctacctgacggtgaacacgctggtggccgcggtgctcccattcctcggcgacttcatgagcctgacgggcgccctcagcaccttcccgctgacgtttgtgctcgcaaatcacatgtacctgatggtgaaggggcctaagctgggtgccatccagaaatcatggcactggctcaatgttcttgggttcactgcgctggctgttgcagcggcggtctccgcaataaggctcatcatgcgtgattccagcacctaccacttcttcgctgatctttgagatcgatcgttttcttttctttttgttggaatgctgagccagagctagtattttttcattttcagagaattattatccatgtatgtaaggatgacgcatatatatatattgaatagatgattt

SEQ ID NO: 23291 - protein, 327 aa, Zea mays subsp. mays
  misc_feature (1)..(327): Ceres Seq. ID no. 12411850
MDTAADDKPEISDDTAHQISVDPWYQVGFVLTTGVNSAYVLGYSGSIMVPLGWIGGTCGLLLAAAISMYANALLARLHEVGGKRHIRYRDLAGHIYGPKIYGLTWALQYINLFMINTGFIILAGQALKATYGLFSDDGVLKLPYCIAISGFVCALFAIGIPYLSALRIWLGFSTLFSLMYIVIAVVLSSRDGITAPARDYSIPKSSQSTRVFTTIGSIADLVFAYNTGMLPEIQATIRPPVVKNMEKALWFQFTIGSLPLYAVVFVGYWAYGSSTSGYLLNSVTGPVWVKAVANLSAFFQTVIALHIFASPMYEFLDTKYGSGRGPF

SEQ ID NO: 23292 - protein, 280 aa, Zea mays subsp. mays
  misc_feature (1)..(280): Ceres Seq. ID no. 12411851
MVPLGWIGGTCGLLLAAAISMYANALLARLHEVGGKRHIRYRDLAGHIYGPKIYGLTWALQYINLFMINTGFIILAGQALKATYGLFSDDGVLKLPYCIAISGFVCALFAIGIPYLSALRIWLGFSTLFSLMYIVIAVVLSSRDGITAPARDYSIPKSSQSTRVFTTIGSIADLVFAYNTGMLPEIQATIRPPVVKNMEKALWFQFTIGSLPLYAVVFVGYWAYGSSTSGYLLNSVTGPVWVKAVANLSAFFQTVIALHIFASPMYEFLDTKYGSGRGPF

SEQ ID NO: 23293 - protein, 260 aa, Zea mays subsp. mays
  misc_feature (1)..(260): Ceres Seq. ID no. 12411852
MYANALLARLHEVGGKRHIRYRDLAGHIYGPKIYGLTWALQYINLFMINTGFIILAGQALKATYGLFSDDGVLKLPYCIAISGFVCALFAIGIPYLSALRIWLGFSTLFSLMYIVIAVVLSSRDGITAPARDYSIPKSSQSTRVFTTIGSIADLVFAYNTGMLPEIQATIRPPVVKNMEKALWFQFTIGSLPLYAVVFVGYWAYGSSTSGYLLNSVTGPVWVKAVANLSAFFQTVIALHIFASPMYEFLDTKYGSGRGPF

SEQ ID NO: 23294 - DNA, 1336 bp, Zea mays subsp. mays
  misc_feature (1)..(1336): Ceres Seq. ID no. 12411856
agttggccacatgccttgccttgcctttgcctacctgttgatcgagccgagcgagcagggagagacacggcaccgagtgaggccgccgcatcctcctcctctccgatccttagtccagtccgcctgctgcctgcctcaacggatcgacgcgacaggagggagggaggaaggagacggtcgatcagagtctgagacggaggccgatccaccaccgcagcgacgagcgggaggagatgaagatcatcattgacacggatcccggcatcgatgacagcgtggccatcctgatggcattccagatgccgggcgtccaggtcctagggctcaccaccatcttcggaaactgcaccacagagcatgccacacgcaacgccttgatcctgtgcgagaaggcaagccatctagaggtcccagtagctgagggcagccatgagcctctcaagggaggaaagccgcacgttgctgacttcgttcatggacctgatggcctcgggaacgtagatcttcctgatcccactatcaagaaagtggaggaaagtgctaccgacttcttggttgataaggtctcgcgatttcctggagaggtctctgtgctcgccttgggtcctctgacaaacatagcattggccatcaagaaggatccctcattcgtgaaaaacgttaagaagatcgttgtgctgggtggagcgttctttgcggctggaaatgccactccttccgctgaagcaaatatccacagtgatccggaggcagccgacatggttttcacttctggggcggacatctacgtcgttggcctcaacatcacaacgcaagtcagcttcacagataaggatctcctggagctaagaaactcgcaagggaagtacgcacagttcctatgtgatgtatgcaagttctacttggactggcacaccgagtcttatggtgctcctgtgattttcctccacgatccggtcagctttgccgcgctagttcgtccggagctgttcacgttcaagaagggcgtggtgagggtggagacgcagggcatctgcgtcgggcatacttccatggacatgttgctgaagaagtggaactcagagaacccgtggactggctactcaccgatttcggtcgcatggacggtcgatgtgcccaaggtggtcgcgtttgtgaaggagctcgtcaccaagccgtgaaccaagttaactaacgtgttgtggtctcgcgcaccagatgtgcagcaaatttgagatgtcgatatatttactcacattcgaagcactgcaaacactattatctcaatagttggttcctgtggaggattgcaaatcaatttgagatgttttaaatt

SEQ ID NO: 23295 - protein, 315 aa, Zea mays subsp. mays
  misc_feature (1)..(315): Ceres Seq. ID no. 12411857
MKIIIDTDPGIDDSVAILMAFQMPGVQVLGLTTIFGNCTTEHATRNALILCEKASHLEVPVAEGSHEPLKGGKPHVADFVHGPDGLGNVDLPDPTIKKVEESATDFLVDKVSRFPGEVSVLALGPLTNIALAIKKDPSFVKNVKKIVVLGGAFFAAGNATPSAEANIHSDPEAADMVFTSGADIYVVGLNITTQVSFTDKDLLELRNSQGKYAQFLCDVCKFYLDWHTESYGAPVIFLHDPVSFAALVRPELFTFKKGVVRVETQGICVGHTSMDMLLKKWNSENPWTGYSPISVAWTVDVPKVVAFVKELVTKP

SEQ ID NO: 23296 - protein, 297 aa, Zea mays subsp. mays
  misc_feature (1)..(297): Ceres Seq. ID no. 12411858
MAFQMPGVQVLGLTTIFGNCTTEHATRNALILCEKASHLEVPVAEGSHEPLKGGKPHVADFVHGPDGLGNVDLPDPTIKKVEESATDFLVDKVSRFPGEVSVLALGPLTNIALAIKKDPSFVKNVKKIVVLGGAFFAAGNATPSAEANIHSDPEAADMVFTSGADIYVVGLNITTQVSFTDKDLLELRNSQGKYAQFLCDVCKFYLDWHTESYGAPVIFLHDPVSFAALVRPELFTFKKGVVRVETQGICVGHTSMDMLLKKWNSENPWTGYSPISVAWTVDVPKVVAFVKELVTKP

SEQ ID NO: 23297 - protein, 293 aa, Zea mays subsp. mays
  misc_feature (1)..(293): Ceres Seq. ID no. 12411859
MPGVQVLGLTTIFGNCTTEHATRNALILCEKASHLEVPVAEGSHEPLKGGKPHVADFVHGPDGLGNVDLPDPTIKKVEESATDFLVDKVSRFPGEVSVLALGPLTNIALAIKKDPSFVKNVKKIVVLGGAFFAAGNATPSAEANIHSDPEAADMVFTSGADIYVVGLNITTQVSFTDKDLLELRNSQGKYAQFLCDVCKFYLDWHTESYGAPVIFLHDPVSFAALVRPELFTFKKGVVRVETQGICVGHTSMDMLLKKWNSENPWTGYSPISVAWTVDVPKVVAFVKELVTKP

SEQ ID NO: 23298 - DNA, 1101 bp, Zea mays subsp. mays
  misc_feature (1)..(1101): Ceres Seq. ID no. 12411875
aaggagaggcacccacgacggcgacgcattggattgggttgggacagaacgagcgacggcgaggagacggcgataagatttggcacacctcggactgtagctgggagactgcacggacggcggcgtccacgagtcacgaggagcccagaggcttcttcacagcagcagcggcaggtccgctgatgccagactccccccagctccaccaaccgcctccccctcccgcgccgccgccggccagcgcaacaccagccgcgccagcggcagcaaatgcgcaacccaagctgactgccgtgaagctgaggatgatcatcaagggcgtgctcgggcggtaccagcgctggaaccccgtgcacccgacggccggcaccttctggggtgtggggctcggcgtcggctgcggcgttggctggggccccggcttcgggcctgaggtgattgggtacgtaggcgccgggtgcggcgtggggttcagcgttgggttcacgctcgccggcgtcggcatcggcctgccgcagcacagcctcatcaggaaccacgaccacggtggttttgcgagcagcgtccctgttgattcagcgagattctacgccctaaccatcatcagaggtctggtatgggacgccatcagctacgtgggcaatgtagcggctatgaggaaagaatctcgacagaagcttccgagnttccaggacagccntcaggttccagggggagttgatctgccgaagctggggaaggcgtgtcgagcagcatccggtccacggtagaatgcatcagggccttcaccaactgactgatcaactccagcccaggaaccatctctgcctgccatgcctgtccctcactcgatttgtatgtttgtatggcttaggtccttcgattcgtacgttcgtgcgtggtagcaccaataaacatgcgatcgattgagttgtgtgtgcttctccattcattcacttgctctttctgcagctcgtgatcgagttgtgtgtgctccattcccaaattatgtatgatcgattagtagcgttaggggttaaccagtagccgctgtgtacttgtgtcacccttggacaaacaatgagatatttctttgtcgcc

SEQ ID NO: 23299 - protein, 255 aa, Zea mays subsp. mays
  misc_feature (1)..(255): Ceres Seq. ID no. 12411876
  misc_feature (228)..(228): Xaa is any aa, unknown or other
  misc_feature (233)..(233): Xaa is any aa, unknown or other
GEAPTTATHWIGLGQNERRRGDGDKIWHTSDCSWETARTAASTSHEEPRGFFTAAAAGPLMPDSPQLHQPPPPPAPPPASATPAAPAAANAQPKLTAVKLRMIIKGVLGRYQRWNPVHPTAGTFWGVGLGVGCGVGWGPGFGPEVIGYVGAGCGVGFSVGFTLAGVGIGLPQHSLIRNHDHGGFASSVPVDSARFYALTIIRGLVWDAISYVGNVAAMRKESRQKLPXFQDSXQVPGGVDLPKLGKACRAASGPR

SEQ ID NO: 23300 - protein, 195 aa, Zea mays subsp. mays
  misc_feature (1)..(195): Ceres Seq. ID no. 12411877
  misc_feature (168)..(168): Xaa is any aa, unknown or other
  misc_feature (173)..(173): Xaa is any aa, unknown or other
MPDSPQLHQPPPPPAPPPASATPAAPAAANAQPKLTAVKLRMIIKGVLGRYQRWNPVHPTAGTFWGVGLGVGCGVGWGPGFGPEVIGYVGAGCGVGFSVGFTLAGVGIGLPQHSLIRNHDHGGFASSVPVDSARFYALTIIRGLVWDAISYVGNVAAMRKESRQKLPXFQDSXQVPGGVDLPKLGKACRAASGPR

SEQ ID NO: 23301 - protein, 154 aa, Zea mays subsp. mays
  misc_feature (1)..(154): Ceres Seq. ID no. 12411878
  misc_feature (127)..(127): Xaa is any aa, unknown or other
  misc_feature (132)..(132): Xaa is any aa, unknown or other
MIIKGVLGRYQRWNPVHPTAGTFWGVGLGVGCGVGWGPGFGPEVIGYVGAGCGVGFSVGFTLAGVGIGLPQHSLIRNHDHGGFASSVPVDSARFYALTIIRGLVWDAISYVGNVAAMRKESRQKLPXFQDSXQVPGGVDLPKLGKACRAASGPR

SEQ ID NO: 23302 - DNA, 1474 bp, Zea mays subsp. mays
  misc_feature (1)..(1474): Ceres Seq. ID no. 12411879
gctttccacaaaatctgtggagattattcgaaaccatctcgtcgctcacgaacgcgtcagaggttttgcagaaacggagcgcgtgcggcgttcgtcggcaacgttggcgtccatggagagcaccgcggtccgaggaagaggcagaaggccgcctcggcctctggatccgtggccccgtacttgccccaggagctcgtacggaacatcctcctccgcctgccttccaggtccgtcctccgcttccgcgccgtttgcaaggactggctccggatcgtctccgaccgcgagttcgcgccgaccacaaccgccaccagccggcgatgcccctcgtctccttcctccgcagcgccgccggtagcaagagggggcagacggactgctgcgtcgacgcatttgacctcagcgccgacagtttccggtccgtcgtccggttcgccgacaaggggacgcggtgcagcagcttcgacatccacggctcctgcgacggtctcctccttctcagcttcgatgcccgcttctacgtttgcaacccggcaacgcaccagtggacgcgcctcccggcgcccctccgcgcctcgtggctcgccggcttctaccgccacgagcccaccggagagtaccgggccttgttctaccggggccagtggcccgggacggactactacatcatggtggcggactccaggaaagggaggggaattggcctgccgtcggagaaatatgggtacaagttcaggagacaaccgtatagcctgccggtcctgctccgcggccacctccactggatggcagccattgaaggctacgactacgagatgttggcgttcaacacgacgactgaaaagttcacggttatgtgccctcctgtggttcggtggcacatgtcgctagctgaggtgggcaacgagctcgcgttgttgagctgcggccaccaggtcccgatgctcgagctctggattctgaaggattacgagaacaagagctgggtctgcacgcactggattcggctgccggagttgaagatgagcaccttcgcgttcgatgacttctcgcgaatgattttcgtgtcagaaaagggagttctgatagccaccccggagcagaagctgttgcgctatgacctgaatgggactctgctggaaagcttcccttgcaataatggcagccatctcaagattactccgtacaccttcaaggagagcctcgttcggcatgcattctttgagacaccggattgcaatgccgatggtcatgaagatgaagatgaaccagaaccaccacctttcttcctggggctgtagacccggacccggtggtgatggatctcatgggaacccttggttggagttgatcagcggttcatgcttcagatcggtattacagcctcggtagatgaactgagagtaagctacatttttcttttgtctctcttttatacccatcattccatcaataatgtcactatgtttgtccc

SEQ ID NO: 23303 - protein, 432 aa, Zea mays subsp. mays
  misc_feature (1)..(432): Ceres Seq. ID no. 12411880
FPQNLWRLFETISSLTNASEVLQKRSACGVRRQRWRPWRAPRSEEEAEGRLGLWIRGPVLAPGARTEHPPPPAFQVRPPLPRRLQGLAPDRLRPRVRADHNRHQPAMPLVSFLRSAAGSKRGQTDCCVDAFDLSADSFRSVVRFADKGTRCSSFDIHGSCDGLLLLSFDARFYVCNPATHQWTRLPAPLRASWLAGFYRHEPTGEYRALFYRGQWPGTDYYIMVADSRKGRGIGLPSEKYGYKFRRQPYSLPVLLRGHLHWMAAIEGYDYEMLAFNTTTEKFTVMCPPVVRWHMSLAEVGNELALLSCGHQVPMLELWILKDYENKSWVCTHWIRLPELKMSTFAFDDFSRMIFVSEKGVLIATPEQKLLRYDLNGTLLESFPCNNGSHLKITPYTFKESLVRHAFFETPDCNADGHEDEDEPEPPPFFLGL

SEQ ID NO: 23304 - protein, 326 aa, Zea mays subsp. mays
  misc_feature (1)..(326): Ceres Seq. ID no. 12411881
MPLVSFLRSAAGSKRGQTDCCVDAFDLSADSFRSVVRFADKGTRCSSFDIHGSCDGLLLLSFDARFYVCNPATHQWTRLPAPLRASWLAGFYRHEPTGEYRALFYRGQWPGTDYYIMVADSRKGRGIGLPSEKYGYKFRRQPYSLPVLLRGHLHWMAAIEGYDYEMLAFNTTTEKFTVMCPPVVRWHMSLAEVGNELALLSCGHQVPMLELWILKDYENKSWVCTHWIRLPELKMSTFAFDDFSRMIFVSEKGVLIATPEQKLLRYDLNGTLLESFPCNNGSHLKITPYTFKESLVRHAFFETPDCNADGHEDEDEPEPPPFFLGL

SEQ ID NO: 23305 - protein, 296 aa, Zea mays subsp. mays
  misc_feature (1)..(296): Ceres Seq. ID no. 12411882
AFHKICGDYSKPSRRSRTRQRFCRNGARAAFVGNVGVHGEHRGPRKRQKAASASGSVAPYLPQELVRNILLRLPSRSVLRFRAVCKDWLRIVSDREFAPTTTATSRRCPSSPSSAAPPVARGGRRTAASTHLTSAPTVSGPSSGSPTRGRGAAASTSTAPATVSSFSASMPASTFATRQRTSGRASRRPSAPRGSPASTATSPPESTGPCSTGASGPGRTTTSWWRTPGKGGELACRRRNMGTSSGDNRIACRSCSAATSTGWQPLKATTTRCWRSTRRLKSSRLCALLWFGGTCR

SEQ ID NO: 23306 - DNA, 1676 bp, Zea mays subsp. mays
  misc_feature (1)..(1676): Ceres Seq. ID no. 12411898
ctgttcttccacctgctggctgctcctgcctcccctgcgccccaaacccacccgcctcgccgtccccgcaggccgcagcctgctctcggctcccgccgccgtctaccgcgtcctgcggctgcggtgttgcgtcacctcgggttcgccttaacttccacaatcctcgccgtcctggtgctccgccgcccctccctttgtactcgcgctggagctgcagatccaccgcgacctggcgaccaattcctcctcccgctgaagaattggcgaccttggcctccgcccccgcggcgcggaggagtcaactgtggtagcaaccaccgcggaggctgcaagccttcggtaagggaggaaagttgacttgttggaagccggtccagggccgcgatgacgtcgaccgccgccggcgcgtcgtcgtcggcggcgaagagcgagtcctacctgcgggccgacaagatcgacctcgagagcctggacatccagctggagaagcagctggccaagacctgggagaagcacaaggggtcgtacaaccaggggcccagggaggactgggagatcgacctcgccaagctcgagattcgctacgtcatagcgcagggcacctacggcacggtgtatcgcggcacgtatgatgggcaggacgtcgcagtaaaactattggattggggtgaagatggctttgcgtcagaaactgaaactgccacactgcgagcatcatttaagcaggaggttgctgtctggcatgagctcaaccatccgaatgttacaaagtttgttggtgcatcaatgggtactacagaccttaagattccagccaatagttctaacagtggtgggcgcactgagctgccgccaagagcatgttgtgttgtggtcgaatatctcgctggaggatcactgaagcagtatttaataaagaacaggcgaaggaagcttgcatacaaggttgttgttcagatagcactggatcttgccagaggattgaactatctacattcaagaaagatagtacatcgggatgtaaaaactgaaaatatgctgctcgatacacagcgaaaccttaagattgctgattttggtgttgctcgtgttgaggctcagaatccaaaggacatgacaggcgcgactgggacacttggctacatggccccagaggtgcttgaaggcaagccatacaacagaaagtgtgatgtctacagttttggcatatgcttatgggaaatatactgctgtgacatgccatatccagacctcagttttgcagacgtctcgtccgccgtcgttcaccagaacctgcggcctgacatccctcgctgctgcccaagcccaatggcgaacatcatgcggaagtgctgggacgcaaacccggataagcgccctgacatggacgacgtggtgcggttcctggaggccctcgacacgagcaagggcggtggcatgataccagaaggccaggcaggcgggtgcttgtgtttcttcagagcccgtggtccttagaaccaaccaaccctttccagccatcctctacttgtctctgccctactacagtattggagccagatgtaggcctttgttgttcatcggataggggattgcagataacttgatgacaatctttgtgattggttgacacttgttatacgttctatagtgatgtgaataccagtgaggagtcc

SEQ ID NO: 23307 - protein, 370 aa, Zea mays subsp. mays
  misc_feature (1)..(370): Ceres Seq. ID no. 12411899
MTSTAAGASSSAAKSESYLRADKIDLESLDIQLEKQLAKTWEKHKGSYNQGPREDWEIDLAKLEIRYVIAQGTYGTVYRGTYDGQDVAVKLLDWGEDGFASETETATLRASFKQEVAVWHELNHPNVTKFVGASMGTTDLKIPANSSNSGGRTELPPRACCVVVEYLAGGSLKQYLIKNRRRKLAYKVVVQIALDLARGLNYLHSRKIVHRDVKTENMLLDTQRNLKIADFGVARVEAQNPKDMTGATGTLGYMAPEVLEGKPYNRKCDVYSFGICLWEIYCCDMPYPDLSFADVSSAVVHQNLRPDIPRCCPSPMANIMRKCWDANPDKRPDMDDVVRFLEALDTSKGGGMIPEGQAGGCLCFFRARGP

SEQ ID NO: 23308 - protein, 236 aa, Zea mays subsp. mays
  misc_feature (1)..(236): Ceres Seq. ID no. 12411900
MGTTDLKIPANSSNSGGRTELPPRACCVVVEYLAGGSLKQYLIKNRRRKLAYKVVVQIALDLARGLNYLHSRKIVHRDVKTENMLLDTQRNLKIADFGVARVEAQNPKDMTGATGTLGYMAPEVLEGKPYNRKCDVYSFGICLWEIYCCDMPYPDLSFADVSSAVVHQNLRPDIPRCCPSPMANIMRKCWDANPDKRPDMDDVVRFLEALDTSKGGGMIPEGQAGGCLCFFRARGP

SEQ ID NO: 23309 - DNA, 1310 bp, Zea mays subsp. mays
  misc_feature (1)..(1310): Ceres Seq. ID no. 12411905
aaaaacaccacacaacacaacacaataatacagcaaaggaggctagcagaagtgcaggattaataagctaagctagtagaaattaagcaaagcataggcacagccatggctacctcctctggttcttgccttattattagcctgttggtggtggtggtggcggcggcgctgtcggcctcaacggcgtcggcacagctgtcgtcgacgttctacgacacgtcgtgccccagcgcgatgtccaccatcagcagcggcgtgaactccgccgtggcgcagcaggctcgtgtgggggcgtcgctgctccggctccacttccacgactgcttcgtccaaggctgcgacgcgtccattctgctgaacgacacgtccggggagcagacccagccgccgaacctaactctgaacccgagggccttcgacgtcgtcaacagcatcaaggcgcaggtggaggcggcgtgcccgggcgtcgtctcctgcgccgacatcctcgccgtcgccgcccgcgacggagttgtcgcgctcggcgggccttcgtggaccgtgcttctgggcagaagggactcgaccggttcgttccctagccagacaagcgacctcccacctccgacgtcgagcctccaagcactgttagccgcgtacagcaagaagaacctcgacgcgaccgacatggtcgctctctcaggcgctcacacaatcgggcaggcccagtgctcgagcttcaacggccacatctacaacgacacgaacatcaacgcggccttcgcgacgtcgctcaaggccaactgccccatgtccggcggcagcagccctggcgccgctggacaccatgaccccgaccgtgttcgacaacgactactacaagaacctgctgtcgcagaaggggctgctgcactcggaccaggagctgttcaacaacggcagcaccgacagcacggtcagcaactttgcgtccagctcggccgccttcaccagcgccttcacggcggccatggtgaagatggggaacctcggcccgctcaccgggaccagtgggcagatcaggctcacctgctggaagctcaactcgtcctaataattaaggacggacgtccgatagacgatcctgcgcaatcgtatcgtacgtgcatgatacgcatacatctggaaactactataccaatgcaaacagagatctatacgtacgagtatgtataacgacgagtgatgtttgtatggatctacgtatgtaacaaggacctctcgtagcgcaaaggcgcgcgttgggagattaattaggtacacaagctattaccacattatatatcactcgc

SEQ ID NO: 23310 - protein, 362 aa, Zea mays subsp. mays
  misc_feature (1)..(362): Ceres Seq. ID no. 12411906
MATSSGSCLIISLLVVVVAAALSASTASAQLSSTFYDTSCPSAMSTISSGVNSAVAQQARVGASLLRLHFHDCFVQGCDASILLNDTSGEQTQPPNLTLNPRAFDVVNSIKAQVEAACPGVVSCADILAVAARDGVVALGGPSWTVLLGRRDSTGSFPSQTSDLPPPTSSLQALLAAYSKKNLDATDMVALSGAHTIGQAQCSSFNGHIYNDTNINAAFATSLKANCPMSGGSSPGAAGHHDPDRVRQRLLQEPAVAEGAAALGPGAVQQRQHRQHGQQLCVQLGRLHQRLHGGHGEDGEPRPAHRDQWADQAHLLEAQLVLIIKDGRPIDDPAQSYRTCMIRIHLETTIPMQTEIYTYEYV

SEQ ID NO: 23311 - protein, 319 aa, Zea mays subsp. mays
  misc_feature (1)..(319): Ceres Seq. ID no. 12411907
MSTISSGVNSAVAQQARVGASLLRLHFHDCFVQGCDASILLNDTSGEQTQPPNLTLNPRAFDVVNSIKAQVEAACPGVVSCADILAVAARDGVVALGGPSWTVLLGRRDSTGSFPSQTSDLPPPTSSLQALLAAYSKKNLDATDMVALSGAHTIGQAQCSSFNGHIYNDTNINAAFATSLKANCPMSGGSSPGAAGHHDPDRVRQRLLQEPAVAEGAAALGPGAVQQRQHRQHGQQLCVQLGRLHQRLHGGHGEDGEPRPAHRDQWADQAHLLEAQLVLIIKDGRPIDDPAQSYRTCMIRIHLETTIPMQTEIYTYEYV

SEQ ID NO: 23312 - DNA, 1461 bp, Zea mays subsp. mays
  misc_feature (1)..(1461): Ceres Seq. ID no. 12411908
gaaggcgacgcagtggccgtacagtagtgtcacctgcacattgcagaccgcctcagcgcctcaccaagcgaaactcgttggcggctagggttttgctgcctcccgagcccaaaccctagagcacccgcgcccatcccatggcgtgctaggcttcgattgagactggggggattagtaccgcaggctgggattagagcaagcgccgagcggaaatggcatcgagtaaccaattcgatctacttggagacgtcgagaacgacgaccctgcccacctcctcgcagctgccgagaagaaggcggccgcggtgcctaagcccgcgcccgcgccggccaagttgcccaccaagcctccgccgcccgcgcaacctgtgagggaggaaaggaactatggtgctccaccgcgcgatggtccaggacgtggaagaggcggccgcggtggcaggactggcccgaggcgagattttggcgatgctgatgcccacggctttgagggggggtatggtggcggcggcggcggttttggggacggtggagttgctcgcggtgaaaatggtgagggtaggcaggcagagaggggccgtgggccccgccagccttaccgtggaggtgggcgacgtggtgggtacagcgatgggcaggctgggaatgagttcggacgtcctcgccgggcatatgagcgccacagcggcacaggccgtggctacgggatgaagcgtgaaggggctgggcgtggaaattggggaactgcaactgatgaaggccttgaacaggacactgtggatgctgttaatcctgaggagactactgccgtggtggaggatgaaaagaaacctgaagatgcaccacagtctgaggttgagaaggacaaggagggcgcggagaatgaagaagaaaaggaacctgaggataaggagatgactttggaggaatatgaaaaggtactggaggaaaaacgaaaagctttactctcccttaaggctgaggagagaaaagttgaaattgacaaggagctacaggccatgcaacaactgtcagttaaaaaggatggcgatgaagtgtttatcaagctgggctctgacaaggacttgaaaaagaaagaaagtgctgaaagagaagaacggggcaagaagtccctgagcatcaacgagttcttgaagccagctgaaggcgagaggtactataaccctagtggccgtggccgtggtaggggccgtggggggttccgtggtggttacaacggcggttatcggggaccagctgctgctccagcgatcgaagaccaggctcagttccctgccctggcctaagcacagctcgtgttctcgctcaagattgtgtcacttttgcggagtgcgtcagtcagtcctagtgttgttgctcccaagcttgctttccggattatgtgtatccaacattttctgatgttatgtactggtgtgctcgtgattgcatggttttgct

SEQ ID NO: 23313 - protein, 364 aa, Zea mays subsp. mays
  misc_feature (1)..(364): Ceres Seq. ID no. 12411909
MASSNQFDLLGDVENDDPAHLLAAAEKKAAAVPKPAPAPAKLPTKPPPPAQPVREERNYGAPPRDGPGRGRGGRGGRTGPRRDFGDADAHGFEGGYGGGGGGFGDGGVARGENGEGRQAERGRGPRQPYRGGGRRGGYSDGQAGNEFGRPRRAYERHSGTGRGYGMKREGAGRGNWGTATDEGLEQDTVDAVNPEETTAVVEDEKKPEDAPQSEVEKDKEGAENEEEKEPEDKEMTLEEYEKVLEEKRKALLSLKAEERKVEIDKELQAMQQLSVKKDGDEVFIKLGSDKDLKKKESAEREERGKKSLSINEFLKPAEGERYYNPSGRGRGRGRGGFRGGYNGGYRGPAAAPAIEDQAQFPALA

SEQ ID NO: 23314 - protein, 199 aa, Zea mays subsp. mays
  misc_feature (1)..(199): Ceres Seq. ID no. 12411910
MKREGAGRGNWGTATDEGLEQDTVDAVNPEETTAVVEDEKKPEDAPQSEVEKDKEGAENEEEKEPEDKEMTLEEYEKVLEEKRKALLSLKAEERKVEIDKELQAMQQLSVKKDGDEVFIKLGSDKDLKKKESAEREERGKKSLSINEFLKPAEGERYYNPSGRGRGRGRGGFRGGYNGGYRGPAAAPAIEDQAQFPALA

SEQ ID NO: 23315 - DNA, 1554 bp, Zea mays subsp. mays
  misc_feature (1)..(1554): Ceres Seq. ID no. 12411930
atttcgactcgtgtgttcgtgagctctgtgagaaacaaagaccatgacgcaggagaagacggtggtgctgtacccctccctgggcgttggccatctgaaccccatggcgcagctggccaaggccatcctccgccacggcagcgtcgccgtcaccatcgccgtcgtcgacccgcccgagaagcacgccgtgctagctgctgcgctggcccgcctggcagcggtcagtccctccatcacggtccacctcctccccatcccgccctgcgccaccagcaagcagcattcccaccccatcatgcccatcctggatgcgctccgcgccgcgaaccccgcgctccgggcgttccttgccgcgcgagtccctgccgtcgccgccctcgtggtcgacatgttctgcaccgacgcgctcgacgtcgccgcggagctcgcgatccccgcgcacttcttctacccgtccgcggcccggcgacctcgcggtctacctccaggttccagatctctgccgcgccgcgccgtccccgctaagggacatgggcaaggcggcgctgaacttcgccggcgtgccggcggtccgcgctctcgacatgcccgacaccatgcacgactgggagagcgacgtgggcagcgtacggctgcggcagctcgcccggatgccggaggccgcgggcattctggtgaacagcttcgagtggctggagtcgagggcgctggaagcgctacgtggcggccactgcctgcccggccgctcgacgccgaaaatctactgcgtcgggccgctggtcgacggtggcggcagtggcaccgaggggaacggcgagaggcacgcgtgcctcgcgtggatggacgggcagcccaggcagagcgtggtgttcctctgcttcggaagcctgggcgccttctcggcggcgcagctgaaggagacggcgcgcgggctagagcgttcaggacacaggttcttgtgggccgtgcgaagcccaagcgaggatcaggactctggcgagcctgatctggaggcgttgcttccggatgggttcttggagagaaccagaggcagaggactggttctgaagaactgggcgccccagacacaggtgctgcggcacgaggccgtgggtgcctttgtaactcactgcggctggaactcggtgctggaggcggccatgtccggcgtgccgatgatctgctggccgctgtacgcggagcagaggctgaataaggtgcacgtggtggaggagatgaaggttggggtggtgatggaaggctacgacgaggagttggtgacggctgacgaggtggaggccaaggtacgactagtgatggagtcggaggaagggaagaagctcagggagaggacagcgacggcgaaggaaatggctgctgatgccatcaaacaaggcgggtcgtcttacgtcgaacttggtgagtttttgaagggtttaggacgcaagtgatggatagctatgcgtatgaatgataataatctgtctgtatatcagtataagatgaatgcttaacgcagtctggaagataagtattatatggctacttatcatt

SEQ ID NO: 23316 - protein, 380 aa, Zea mays subsp. mays
  misc_feature (1)..(380): Ceres Seq. ID no. 12411931
MRSAPRTPRSGRSLPRESLPSPPSWSTCSAPTRSTSPRSSRSPRTSSTRPRPGDLAVYLQVPDLCRAAPSPLRDMGKAALNFAGVPAVRALDMPDTMHDWESDVGSVRLRQLARMPEAAGILVNSFEWLESRALEALRGGHCLPGRSTPKIYCVGPLVDGGGSGTEGNGERHACLAWMDGQPRQSVVFLCFGSLGAFSAAQLKETARGLERSGHRFLWAVRSPSEDQDSGEPDLEALLPDGFLERTRGRGLVLKNWAPQTQVLRHEAVGAFVTHCGWNSVLEAAMSGVPMICWPLYAEQRLNKVHVVEEMKVGVVMEGYDEELVTADEVEAKVRLVMESEEGKKLRERTATAKEMAADAIKQGGSSYVELGEFLKGLGRK

SEQ ID NO: 23317 - protein, 320 aa, Zea mays subsp. mays
  misc_feature (1)..(320): Ceres Seq. ID no. 12411932
MTQEKTVVLYPSLGVGHLNPMAQLAKAILRHGSVAVTIAVVDPPEKHAVLAAALARLAAVSPSITVHLLPIPPCATSKQHSHPIMPILDALRAANPALRAFLAARVPAVAALVVDMFCTDALDVAAELAIPAHFFYPSAARRPRGLPPGSRSLPRRAVPAKGHGQGGAELRRRAGGPRSRHARHHARLGERRGQRTAAAARPDAGGRGHSGEQLRVAGVEGAGSATWRPLPARPLDAENLLRRAAGRRWRQWHRGERREARVPRVDGRAAQAERGVPLLRKPGRLLGGAAEGDGARARAFRTQVLVGRAKPKRGSGLWRA

SEQ ID NO: 23318 - protein, 306 aa, Zea mays subsp. mays
  misc_feature (1)..(306): Ceres Seq. ID no. 12411933
MGKAALNFAGVPAVRALDMPDTMHDWESDVGSVRLRQLARMPEAAGILVNSFEWLESRALEALRGGHCLPGRSTPKIYCVGPLVDGGGSGTEGNGERHACLAWMDGQPRQSVVFLCFGSLGAFSAAQLKETARGLERSGHRFLWAVRSPSEDQDSGEPDLEALLPDGFLERTRGRGLVLKNWAPQTQVLRHEAVGAFVTHCGWNSVLEAAMSGVPMICWPLYAEQRLNKVHVVEEMKVGVVMEGYDEELVTADEVEAKVRLVMESEEGKKLRERTATAKEMAADAIKQGGSSYVELGEFLKGLGRK

SEQ ID NO: 23319 - DNA, 1140 bp, Zea mays subsp. mays
  misc_feature (1)..(1140): Ceres Seq. ID no. 12411938
gcccgtcctctcggtctccgaccacgactgtgcgccttcctaagtaaccctagctcggcgccctccctccgcgacatccaagcccggcaatctcatcgtcgcgcttgcaccgttacgcagtgcgacctctgcgtcttcgaatccaggtctctgcaggaaggtagagaggaggaggaggtttgtggcaggatttaaccagcccaatggttccatccgagatggggagcgtcgccaccgccgtcagcacgcctgctgcggacaagctgctccatgggcctatctctggcaagaagtgcaagaaaccaggcccgaggaagattcataaggctgagagggagaagcttaaacgagaccacctaaatgatctctttgttgagctgggtaatatgctagaagcagatagacagaacaatgggaaagcatgcatactgactgacactactcggatactaagagacctgcttgttcaagtagactctcttcgaaaggaacatagcgacctacaaaacgaatctcattatgtaacaatggagagggatgagatgcaggatgaaaacggcgtgctccgcaaagaaatttcagagcttcaaaacgagttgacaatgcgggtttcaggcagtccagcaggttggggccatggcaccgccagatcagatccccctcttcctcactcaaccgcagtgttctcgtcggagcaggcgatgcaaccacccaccattgcaagcgttgtattcccgttgcagcagccactggcaccatcagcaatgaccaaaccacctcatgctgcaccaccactcgaactgaagctctttccagaagtggcatttgccgaaggccatgagccgtgtgaagaccacaaagctcccaaccatgtggcacgaccacaggcaaggtacccaacgcaatcagcctcatggcccgtaaacctgttctctggccttccacgaatggaagatgagcaatgcagtagcagcacaagcggcagcagcagagaggataacacagatatagaatgagtggatcagctcctacaatcaaagagtctctgttttgagtctagtggatgtaaatttgaatctcctttttggatttcagaacgatagattatactctgttggaaataggacccctcccattgct

SEQ ID NO: 23320 - protein, 270 aa, Zea mays subsp. mays
  misc_feature (1)..(270): Ceres Seq. ID no. 12411939
MVPSEMGSVATAVSTPAADKLLHGPISGKKCKKPGPRKIHKAEREKLKRDHLNDLFVELGNMLEADRQNNGKACILTDTTRILRDLLVQVDSLRKEHSDLQNESHYVTMERDEMQDENGVLRKEISELQNELTMRVSGSPAGWGHGTARSDPPLPHSTAVFSSEQAMQPPTIASVVFPLQQPLAPSAMTKPPHAAPPLELKLFPEVAFAEGHEPCEDHKAPNHVARPQARYPTQSASWPVNLFSGLPRMEDEQCSSSTSGSSREDNTDIE

SEQ ID NO: 23321 - protein, 265 aa, Zea mays subsp. mays
  misc_feature (1)..(265): Ceres Seq. ID no. 12411940
MGSVATAVSTPAADKLLHGPISGKKCKKPGPRKIHKAEREKLKRDHLNDLFVELGNMLEADRQNNGKACILTDTTRILRDLLVQVDSLRKEHSDLQNESHYVTMERDEMQDENGVLRKEISELQNELTMRVSGSPAGWGHGTARSDPPLPHSTAVFSSEQAMQPPTIASVVFPLQQPLAPSAMTKPPHAAPPLELKLFPEVAFAEGHEPCEDHKAPNHVARPQARYPTQSASWPVNLFSGLPRMEDEQCSSSTSGSSREDNTDIE

SEQ ID NO: 23322 - protein, 209 aa, Zea mays subsp. mays
  misc_feature (1)..(209): Ceres Seq. ID no. 12411941
MLEADRQNNGKACILTDTTRILRDLLVQVDSLRKEHSDLQNESHYVTMERDEMQDENGVLRKEISELQNELTMRVSGSPAGWGHGTARSDPPLPHSTAVFSSEQAMQPPTIASVVFPLQQPLAPSAMTKPPHAAPPLELKLFPEVAFAEGHEPCEDHKAPNHVARPQARYPTQSASWPVNLFSGLPRMEDEQCSSSTSGSSREDNTDIE

SEQ ID NO: 23323 - DNA, 1652 bp, Zea mays subsp. mays
  misc_feature (1)..(1652): Ceres Seq. ID no. 12411954
aggtttgtgtgaccgttgcaacgaaacaaaaaaagccaaagggatcccaaacgaaaacgagccagctgagcaaacacaacactcgcatcggcacccacactgccactcatcacattggcacccctccgacacgggccgggacttctcggactgcaggcagccaggcacgcaccagcaacaccccccacccgccggctcggagcggggccccacccgaatcacacagatcgggacgccggaggaggagcaacgccgtcccgcatcaccggagcaacgcgggcgcggagaggccagccagcgcaggcgcagttcaagctttggattcccggatcccacaccaccggtctctctcggggagtgtaatccagcgagcgttgagttgaaagccgcgcaagtggagatgagtactctgaagaaatccgacaagaaggctgccctcgacttcgcagcatggagtttcaatgtcaccacatcggttggactcatcatggtcaacaaggccttgatggctacgtatgggttcagtttcgccacaacattaaccgggcttcattttgtgactactaccttgatgactatcttatttcgttggttaggcctgagtcagccatcccacttacccctagcagatctagttaaatttgtgatattttcgaacttgtcaattgttgggatgaatgtgagcttgatgtggaactctgttggcttttatcagatagcaaagctgtgcatgatacctgcatcatgtcttctggaggttgtttttgatcatgtacattattcccgggacacaaagctgagcataatggtcgtgcttataggagttgcagtctgcacggttactgatgtcagtgtgaatgcaagaggtctaattgctgctgttatagctgtctggagcacagctttgcaacaatactatgtccattttctccaacgcaagtactccctgaactcattcaacctcctgggccacacagctccagcccaagctgggtcactgctgctagtgggaccatttgcggattacttgttgacaggcaaaagggtggatcagttcagtttgtcatcgcttgctctgtttttcctggcactctcatgcttcatcgccattggtgttaatctgagccaattcatctgcatcgggcggttctccgccgtatccttccaagtcctaggccatatgaagaccgtacttgttctgtcccttgggttccttttctttggcaaggagggcctgaaccttcaggtagtccttgggatggtcctggccgttctcggaatgatatggtacgggaacgcgtctgctaaaccaggtggcaaagagcggcgcagcatcctgccggtgaggtctgcgagtctcaagggaagttccgaagaaaaggccggtgccgagaaatagtcttgctatatctgactgcaaacattttattagatggggaatttttcgttccgaaggttaaatctctggtgaggtgacgcgagtatcacagattggaagctctgcattatgtctgacgcgcacaaaacaaacgcgtcccttgtagagactctggattgttatagttacaggtatactgtaaagcttcattttttttggcgctctgaatcgtttgcagtgagggggaaagacggacatggtttacggagggttc

SEQ ID NO: 23324 - protein, 465 aa, Zea mays subsp. mays
  misc_feature (1)..(465): Ceres Seq. ID no. 12411955
GLCDRCNETKKAKGIPNENEPAEQTQHSHRHPHCHSSHWHPSDTGRDFSDCRQPGTHQQHPPPAGSERGPTRITQIGTPEEEQRRPASPEQRGRGEASQRRRSSSFGFPDPTPPVSLGECNPASVELKAAQVEMSTLKKSDKKAALDFAAWSFNVTTSVGLIMVNKALMATYGFSFATTLTGLHFVTTTLMTILFRWLGLSQPSHLPLADLVKFVIFSNLSIVGMNVSLMWNSVGFYQIAKLCMIPASCLLEVVFDHVHYSRDTKLSIMVVLIGVAVCTVTDVSVNARGLIAAVIAVWSTALQQYYVHFLQRKYSLNSFNLLGHTAPAQAGSLLLVGPFADYLLTGKRVDQFSLSSLALFFLALSCFIAIGVNLSQFICIGRFSAVSFQVLGHMKTVLVLSLGFLFFGKEGLNLQVVLGMVLAVLGMIWYGNASAKPGGKERRSILPVRSASLKGSSEEKAGAEK

SEQ ID NO: 23325 - protein, 332 aa, Zea mays subsp. mays
  misc_feature (1)..(332): Ceres Seq. ID no. 12411956
MSTLKKSDKKAALDFAAWSFNVTTSVGLIMVNKALMATYGFSFATTLTGLHFVTTTLMTILFRWLGLSQPSHLPLADLVKFVIFSNLSIVGMNVSLMWNSVGFYQIAKLCMIPASCLLEVVFDHVHYSRDTKLSIMVVLIGVAVCTVTDVSVNARGLIAAVIAVWSTALQQYYVHFLQRKYSLNSFNLLGHTAPAQAGSLLLVGPFADYLLTGKRVDQFSLSSLALFFLALSCFIAIGVNLSQFICIGRFSAVSFQVLGHMKTVLVLSLGFLFFGKEGLNLQVVLGMVLAVLGMIWYGNASAKPGGKERRSILPVRSASLKGSSEEKAGAEK

SEQ ID NO: 23326 - protein, 303 aa, Zea mays subsp. mays
  misc_feature (1)..(303): Ceres Seq. ID no. 12411957
MVNKALMATYGFSFATTLTGLHFVTTTLMTILFRWLGLSQPSHLPLADLVKFVIFSNLSIVGMNVSLMWNSVGFYQIAKLCMIPASCLLEVVFDHVHYSRDTKLSIMVVLIGVAVCTVTDVSVNARGLIAAVIAVWSTALQQYYVHFLQRKYSLNSFNLLGHTAPAQAGSLLLVGPFADYLLTGKRVDQFSLSSLALFFLALSCFIAIGVNLSQFICIGRFSAVSFQVLGHMKTVLVLSLGFLFFGKEGLNLQVVLGMVLAVLGMIWYGNASAKPGGKERRSILPVRSASLKGSSEEKAGAEK

SEQ ID NO: 23327 - DNA, 1081 bp, Zea mays subsp. mays
  misc_feature (1)..(1081): Ceres Seq. ID no. 12411966
agcagttgggctctctcggcccgcctccttcccgagcacgcacgccgcctcgcttccaattcttccccccctctcctcgtccgctccgctccgctcctgcgttgccgtggagtgccgcccggggctccattccattccacccgtagcccggtccccccgcgccgccggcgcgccggttccttcggttcccgggatcaagatgattggttcattcattaccggaatgctaacgcttgttctcggatacgcgtaccctgcatacgactgctacaagacagtggagctgaacaggcctgaggtcgagcagctgcggttctggtgtcagtactggattttactcgcgtttctcaccgtactggagagagttggggaaagtttcgtatcatggttgccaatgtatagtgaagcaaagctcgcatttatcgtgtacttgtggtatccaaagacacgggggactgcctatgtatacgagtcattcttcaagccatacattgcaaaacatgaaactgagattgatcgaaatctgcttgagttgaggacaagggccggtgacatggcagttctttatttccagagggttacaaactatgctcagacaaggtcttatgaaatcttgcagtatattgcctcacagtcaccgactcaaagacaggcacatcagcagcagcaacgcccaccaccgccacggactcggcaggtcaaccctgcacctccacctattcccgcttggctgggggatctggaccaccgcaaaattagcgtcgatcaagatttccatctcacgcgaattgcaccacactggtctggttcttggtgattgactgagaagagggggaatgctgagttggttgaacagagtttgggtttcctcgcatgcgttctccgttgtacgaactggaaccggtttggtctcgaattgtgaatagtatcccagaaacagaagtggatgatcatttcaattcacagtgtagcgctaggaaatatggttgggaaccatcttctgcaagacgcgaaggcgcgacatgtcatgagcatttagcaacgatgatactactggtcacagtagtgtagtctggaattc

SEQ ID NO: 23328 - protein, 271 aa, Zea mays subsp. mays
  misc_feature (1)..(271): Ceres Seq. ID no. 12411967
AVGLSRPASFPSTHAASLPILPPLSSSAPLRSCVAVECRPGLHSIPPVARSPRAAGAPVPSVPGIKMIGSFITGMLTLVLGYAYPAYDCYKTVELNRPEVEQLRFWCQYWILLAFLTVLERVGESFVSWLPMYSEAKLAFIVYLWYPKTRGTAYVYESFFKPYIAKHETEIDRNLLELRTRAGDMAVLYFQRVTNYAQTRSYEILQYIASQSPTQRQAHQQQQRPPPPRTRQVNPAPPPIPAWLGDLDHRKISVDQDFHLTRIAPHWSGSW

SEQ ID NO: 23329 - protein, 205 aa, Zea mays subsp. mays
  misc_feature (1)..(205): Ceres Seq. ID no. 12411968
MIGSFITGMLTLVLGYAYPAYDCYKTVELNRPEVEQLRFWCQYWILLAFLTVLERVGESFVSWLPMYSEAKLAFIVYLWYPKTRGTAYVYESFFKPYIAKHETEIDRNLLELRTRAGDMAVLYFQRVTNYAQTRSYEILQYIASQSPTQRQAHQQQQRPPPPRTRQVNPAPPPIPAWLGDLDHRKISVDQDFHLTRIAPHWSGSW

SEQ ID NO: 23330 - protein, 197 aa, Zea mays subsp. mays
  misc_feature (1)..(197): Ceres Seq. ID no. 12411969
MLTLVLGYAYPAYDCYKTVELNRPEVEQLRFWCQYWILLAFLTVLERVGESFVSWLPMYSEAKLAFIVYLWYPKTRGTAYVYESFFKPYIAKHETEIDRNLLELRTRAGDMAVLYFQRVTNYAQTRSYEILQYIASQSPTQRQAHQQQQRPPPPRTRQVNPAPPPIPAWLGDLDHRKISVDQDFHLTRIAPHWSGSW

SEQ ID NO: 23331 - DNA, 1546 bp, Zea mays subsp. mays
  misc_feature (1)..(1546): Ceres Seq. ID no. 12412008
atactgcatcataccgcaccggcagtggcggagaaaagagatgagccagccggggccgggagccatcgccgcctcatgcctcccgactccgtgacggcccgcagccacaggccaccggataacgcacacagcggaaccatccaaaaacgcgggagctttcccccgtcaaagcccccaccctaatcccccgtctcgcgcgccaatcaaccagcaccgggagcaggagcaagagcaactcaccctcccctccggcttccgcggaactaggagctgccatgcagcccgacgccaacgctccctcgcaccgcctcgcccgcgtcgccgcgcacctaaacccccagcggccgcagatggaggaaggcgcgtccgcactgaggctcgtggtgtgccgcgccaagggcggcgcgccggggttcaaggtcgcgatcctgggcgccgcgggcgggatcggacagccgctgtcactgctcatgaagatgaatcctctcgtgtccgtgctgcacctctacgatgtcgtcaacacgccccggggtcacggccgatgtcagccacatggacaccagcgctgtggtccgcggcttccttggggcacagcagcttgatgccgcacttacaggaatggaccttgtaatcatacccgctggactccctaggaaaccaggaatgacaagagatgatttattcaacaaaaatgctgggattgttcgtacactatgtgaaggcgttgcaagatgctgtcctaatgcaattgtgaatctgatcagcaacccagtgaactcaactgtccccattgctgctgaggttttcaagaaagctggaacttatgatcccaagcggcttcttggagtgacaacactcgatgttgcgagggctaacacctttgtggccgaagtgcttggagttgatccaagagatgtcagtgttcctgttgttggagggcatgctgggataactatattgcccctcctctcccaggttacacctccgagctcattcactcaggatgaaaccagatatttgacagaccgcatacagaatggtggcacagaagttgtggaggcaaaggctggatcaggctccgcgactctgtcaatggcttttgctgcttctaaattcgctgacgcatgcttgcaagctatgcggggcgaagctggaatcgtggaatgctcatatgttgcatccgaggtgacagaactgccgttctttgcaacgaaagtgaggcttggccgtggtggagccgaggagatcctcccgcttggccctttgaatgatttcgagagagctggtctggaagcggcaaagaaggaactgggcgagagcattcagaagggcatcgctttcatgagcaagtgaagtggtacggagggagatcgtccctgagtcagatccggaccatacgtagtaacgtagatgtagggtgttgtgatatagtgctcctacctatacttgtaaggccacggtaaaaagaaggctaattaccctttagcaactgtgaccatctacttggcataatggcatggaataaatctttcgtcttcggtggcgg

SEQ ID NO: 23332 - protein, 280 aa, Zea mays subsp. mays
  misc_feature (1)..(280): Ceres Seq. ID no. 12412009
MSSTRPGVTADVSHMDTSAVVRGFLGAQQLDAALTGMDLVIIPAGLPRKPGMTRDDLFNKNAGIVRTLCEGVARCCPNAIVNLISNPVNSTVPIAAEVFKKAGTYDPKRLLGVTTLDVARANTFVAEVLGVDPRDVSVPVVGGHAGITILPLLSQVTPPSSFTQDETRYLTDRIQNGGTEVVEAKAGSGSATLSMAFAASKFADACLQAMRGEAGIVECSYVASEVTELPFFATKVRLGRGGAEEILPLGPLNDFERAGLEAAKKELGESIQKGIAFMSK

SEQ ID NO: 23333 - protein, 266 aa, Zea mays subsp. mays
  misc_feature (1)..(266): Ceres Seq. ID no. 12412010
MDTSAVVRGFLGAQQLDAALTGMDLVIIPAGLPRKPGMTRDDLFNKNAGIVRTLCEGVARCCPNAIVNLISNPVNSTVPIAAEVFKKAGTYDPKRLLGVTTLDVARANTFVAEVLGVDPRDVSVPVVGGHAGITILPLLSQVTPPSSFTQDETRYLTDRIQNGGTEVVEAKAGSGSATLSMAFAASKFADACLQAMRGEAGIVECSYVASEVTELPFFATKVRLGRGGAEEILPLGPLNDFERAGLEAAKKELGESIQKGIAFMSK

SEQ ID NO: 23334 - protein, 244 aa, Zea mays subsp. mays
  misc_feature (1)..(244): Ceres Seq. ID no. 12412011
MDLVIIPAGLPRKPGMTRDDLFNKNAGIVRTLCEGVARCCPNAIVNLISNPVNSTVPIAAEVFKKAGTYDPKRLLGVTTLDVARANTFVAEVLGVDPRDVSVPVVGGHAGITILPLLSQVTPPSSFTQDETRYLTDRIQNGGTEVVEAKAGSGSATLSMAFAASKFADACLQAMRGEAGIVECSYVASEVTELPFFATKVRLGRGGAEEILPLGPLNDFERAGLEAAKKELGESIQKGIAFMSK

SEQ ID NO: 23335 - DNA, 1360 bp, Zea mays subsp. mays
  misc_feature (1)..(1360): Ceres Seq. ID no. 12412012
atcagggccggacactacactaccatttttcctttcgcagcgtcccgtctgtctgtctgtctgcctccctccgctcacctcctctgcttcttctcgctttcttccatcttggtccagcctccactcttcctgctgagccatggcggctgccgaagaagggccagagccactcaggtatcagactctggccctgagggtgagcatccactgcgagggttgcaagaagaaggtgaagaaggtgctccacagcatagaaggggtgtacaagacggacatagacacgcagcagcagaaggtggtggtcataggcaacgtctctgcagacgcgctcgtcaagaagctcctcaagtccgggaagcacgcggagccgtggccggagcctgctccagccccaccggccgccgacagcccgcccgggcccgacggatctcccggcagcgcaggcaagaagaagaaaaagaagaagggcaacaagagccccgaggcggcgaacaacaagcccgccgatccggcgccagcgcccgcgcccgcgccggcggagggcaacggcggacccaaccccccggagcagcacgacaaggctgacggcggcgcctcgtgcgatgaggcatcggatggtgagcaggataagcctgaggctggcggtggcggcggcaacggctcccctgacgccggagaagccaacgagggcggcaaggtggccccttccgccatgacgccgcacggcccgcagcccatcgcggctgccaccaacagcaatggtggtggtggtggtggcggcggcggcggcaagaagaaaggcaagaaaggtggccacggcaatgccaacagagacggcgccgggccaatcgtcgaggtccagcccccgccggacgcacccacgaagccggccgccggcaactccggccctctcactgtcatcgacgcgggaccgtacccaccaccggcagcggcggcgatgagctacccagggtactacgccgccggggtccacccgccggcgtacgtcatgagctacagcacggcgcacccgagctctgcgctccggagcagcgcgtactaccacccgatggccggtgcgccgtacacaccagggagcggcggcgggtacttctactcgacggcgccggcgccggcgccggcggcgcccggatcgtactacatgttcagcgaggagaacgccaacgcatgcagcgtcatgtgagaagattagacggttaataatcaactcaactcaattattaactgcaagaagatgttgcagagagtggatgtgctagtcattatgctcttgttgtgcccaagaactggttgtcattgcaacgttattttgctgtatctgcaaaatacatggattttg

SEQ ID NO: 23336 - protein, 354 aa, Zea mays subsp. mays
  misc_feature (1)..(354): Ceres Seq. ID no. 12412013
MAAAEEGPEPLRYQTLALRVSIHCEGCKKKVKKVLHSIEGVYKTDIDTQQQKVVVIGNVSADALVKKLLKSGKHAEPWPEPAPAPPAADSPPGPDGSPGSAGKKKKKKKGNKSPEAANNKPADPAPAPAPAPAEGNGGPNPPEQHDKADGGASCDEASDGEQDKPEAGGGGGNGSPDAGEANEGGKVAPSAMTPHGPQPIAAATNSNGGGGGGGGGGKKKGKKGGHGNANRDGAGPIVEVQPPPDAPTKPAAGNSGPLTVIDAGPYPPPAAAAMSYPGYYAAGVHPPAYVMSYSTAHPSSALRSSAYYHPMAGAPYTPGSGGGYFYSTAPAPAPAAPGSYYMFSEENANACSVM

SEQ ID NO: 23337 - protein, 194 aa, Zea mays subsp. mays
  misc_feature (1)..(194): Ceres Seq. ID no. 12412014
IRAGHYTTIFPFAASRLSVCLPPSAHLLCFFSLSSILVQPPLFLLSHGGCRRRARATQVSDSGPEGEHPLRGLQEEGEEGAPQHRRGVQDGHRHAAAEGGGHRQRLCRRARQEAPQVREARGAVAGACSSPTGRRQPARARRISRQRRQEEEKEEGQQEPRGGEQQARRSGASARARAGGGQRRTQPPGAARQG

SEQ ID NO: 23338 - DNA, 1309 bp, Zea mays subsp. mays
  misc_feature (1)..(1309): Ceres Seq. ID no. 12412015
aggacgccattagcagcggttggccaccagcccaccacccgacgccggaggcccggaggaggaggcggcgatggcggggaagcacgggcgcaacggcttcgacgacgacaacgtcaaccctttcgcgggaggaagtgttccacctgccaccaattctcgtctctcacctctatcacatgaaccggctgatttctacaatgtggacattcctctcgactcatcaaaggatctgaagaaaaaggagaaagaactccaggctatggaggctgagctaaacaaaagagaacgggaattgaaaaggaaggaagaggcggcatcccgagctggcgttgtgatagaagagaaaaactggcctccctttttccccctcatccaccacgacatttccaatgaaatacctatccatctacaaaggatgcagtaccttgcattctcatcattcttgggattgatagcgtgtctcttttggaatgtcatagcaactacaacagcatggattaaaggggaaggtgttatgatctggctgcttgccattatctacttcatatctggtgcgcctggggcttatgtgttatggtatcgacctctttataatgcaatgagaactgagagcgctttgaagtttgggtggtttttcctattttacatgattcatataatattctgtgtgtgggcagctgtggctcctccattccctttcaaaggaaaatctttggctgggattttaccagcaattgatgtcataagcaagaatgctattgtcgggatattttacttcgttggatttggcttgttctgccttgaatcacttctgagcatcggtgtcattcagcaagtctacatgtatttccgtggaagtggaaaagctgcagagatgaaacgtgaggcagcacgtagtgctctaagttcagccttctgatgaacatagggcggtctgattagagcagtagatggataagggaagggaacgagatgtgccaattaagccacgcggtcttgtacatcactgcagtacgtggatttggatcgctgaaagcgtacagctgatcgtctttttgctcttctgtaaaatatgaacaatcatcatatggtccggatgcgtcagggtgttggtttcatttcttgccatggtttagatgtggttgatagggaaaacggtgaagtatttttttggagcagcgaatataatgtatcttcatcgtacttttacatgtgagtgtaatagcttatttcttgtggtaggaatacagctttgctgtgttttcgggaatgacatttgttgtgtaaggttattcacaatggctatttc

SEQ ID NO: 23339 - protein, 282 aa, Zea mays subsp. mays
  misc_feature (1)..(282): Ceres Seq. ID no. 12412016
MAGKHGRNGFDDDNVNPFAGGSVPPATNSRLSPLSHEPADFYNVDIPLDSSKDLKKKEKELQAMEAELNKRERELKRKEEAASRAGVVIEEKNWPPFFPLIHHDISNEIPIHLQRMQYLAFSSFLGLIACLFWNVIATTTAWIKGEGVMIWLLAIIYFISGAPGAYVLWYRPLYNAMRTESALKFGWFFLFYMIHIIFCVWAAVAPPFPFKGKSLAGILPAIDVISKNAIVGIFYFVGFGLFCLESLLSIGVIQQVYMYFRGSGKAAEMKREAARSALSSAF

SEQ ID NO: 23340 - protein, 219 aa, Zea mays subsp. mays
  misc_feature (1)..(219): Ceres Seq. ID no. 12412017
MEAELNKRERELKRKEEAASRAGVVIEEKNWPPFFPLIHHDISNEIPIHLQRMQYLAFSSFLGLIACLFWNVIATTTAWIKGEGVMIWLLAIIYFISGAPGAYVLWYRPLYNAMRTESALKFGWFFLFYMIHIIFCVWAAVAPPFPFKGKSLAGILPAIDVISKNAIVGIFYFVGFGLFCLESLLSIGVIQQVYMYFRGSGKAAEMKREAARSALSSAF

SEQ ID NO: 23341 - protein, 167 aa, Zea mays subsp. mays
  misc_feature (1)..(167): Ceres Seq. ID no. 12412018
MQYLAFSSFLGLIACLFWNVIATTTAWIKGEGVMIWLLAIIYFISGAPGAYVLWYRPLYNAMRTESALKFGWFFLFYMIHIIFCVWAAVAPPFPFKGKSLAGILPAIDVISKNAIVGIFYFVGFGLFCLESLLSIGVIQQVYMYFRGSGKAAEMKREAARSALSSAF

SEQ ID NO: 23342 - DNA, 1316 bp, Zea mays subsp. mays
  misc_feature (1)..(1316): Ceres Seq. ID no. 12412019
ccaagaccaagaccaacaccactccactccctccatttccctcacctcccgcagcagctagccgccagccaacaaccgaaccaaccaaccaacccacaggccacagcgagcgagtaaagcgtccaatggtagcgatggcggccgtgcagcagcagcagcagcagcagcgccgcgacgcggaggcggagctcaacctgcccccgggcttccggttccacccgacggacgaggagctggtggcgcactacctctgcgcgcgcgccgcggggcgccgcccgccggtgtccatcatcgccgaggtcgacctgtaccgcttcgacccctgggacctgccggagcgcgccctcttcgggcgccgcaagtggtacttcttcacgccgcgggaccgcaagtaccccaacggctcccgccccaaccgcgccgccgggtcgggctactggaaggccacgggcgcggacaagcccgtggagcacgagggccggacggcggggatcaagaaggcgctcgtgttctaccacggcaagccgccgcgcggggtcaagacggagtggatcatgcacgagtaccgcctcgccgaagccggcggcgcccgcgccaagaagtccggcgccggcacgctcaggctggatgactgggtgctgtgccgcctgtacaacaagaagaacgagtgggagaagatgcagcagcagaaggagaaggagaagaaggcgatggagtcggaggcgtcgctctcgcactcccactccgacacgcggacgccggaatcggagatcgacgacgaccccgttcccggagctgggctctctaccggcgttcgacgacatgggcgcagcccccagcccctgccggcgtcgtcctgcccaaggaggaggtggaggacttcggcgacctcggcggcgacgactggctcgcgggcatcaacctcgacgacctgcagatgccgggggacgccgccgatttctacggctccatgctcgtctcgccgatggccgccaagatggagccggacggcggcttccccttcttctgagatccttcggcgactccggggacgaccggatgcagcgcaacgcaaactgtgtatagttcagattttcttcatggaaccaacaacaacaaaaaaagttcttgctaatatcttgttctagtggtgtagtgcagaagtagcagcaacatgattgaagttccattgtagtactgatgttcatcgccacttgagctgtgacaagtgacgacattctttcgtttcttggctgcaaattcttcgttgtccagaatataatttcagatgggtaatgccaattcgggacgtgttg

SEQ ID NO: 23343 - protein, 381 aa, Zea mays subsp. mays
  misc_feature (1)..(381): Ceres Seq. ID no. 12412020
KTKTNTTPLPPFPSPPAAASRQPTTEPTNQPTGHSERVKRPMVAMAAVQQQQQQQRRDAEAELNLPPGFRFHPTDEELVAHYLCARAAGRRPPVSIIAEVDLYRFDPWDLPERALFGRRKWYFFTPRDRKYPNGSRPNRAAGSGYWKATGADKPVEHEGRTAGIKKALVFYHGKPPRGVKTEWIMHEYRLAEAGGARAKKSGAGTLRLDDWVLCRLYNKKNEWEKMQQQKEKEKKAMESEASLSHSHSDTRTPESEIDDDPVPGAGLSTGVRRHGRSPQPLPASSCPRRRWRTSATSAATTGSRASTSTTCRCRGTPPISTAPCSSRRWPPRWSRTAASPSSEILRRLRGRPDAAQRKLCIVQIFFMEPTTTKKVLANILF

SEQ ID NO: 23344 - protein, 340 aa, Zea mays subsp. mays
  misc_feature (1)..(340): Ceres Seq. ID no. 12412021
MVAMAAVQQQQQQQRRDAEAELNLPPGFRFHPTDEELVAHYLCARAAGRRPPVSIIAEVDLYRFDPWDLPERALFGRRKWYFFTPRDRKYPNGSRPNRAAGSGYWKATGADKPVEHEGRTAGIKKALVFYHGKPPRGVKTEWIMHEYRLAEAGGARAKKSGAGTLRLDDWVLCRLYNKKNEWEKMQQQKEKEKKAMESEASLSHSHSDTRTPESEIDDDPVPGAGLSTGVRRHGRSPQPLPASSCPRRRWRTSATSAATTGSRASTSTTCRCRGTPPISTAPCSSRRWPPRWSRTAASPSSEILRRLRGRPDAAQRKLCIVQIFFMEPTTTKKVLANILF

SEQ ID NO: 23345 - protein, 337 aa, Zea mays subsp. mays
  misc_feature (1)..(337): Ceres Seq. ID no. 12412022
MAAVQQQQQQQRRDAEAELNLPPGFRFHPTDEELVAHYLCARAAGRRPPVSIIAEVDLYRFDPWDLPERALFGRRKWYFFTPRDRKYPNGSRPNRAAGSGYWKATGADKPVEHEGRTAGIKKALVFYHGKPPRGVKTEWIMHEYRLAEAGGARAKKSGAGTLRLDDWVLCRLYNKKNEWEKMQQQKEKEKKAMESEASLSHSHSDTRTPESEIDDDPVPGAGLSTGVRRHGRSPQPLPASSCPRRRWRTSATSAATTGSRASTSTTCRCRGTPPISTAPCSSRRWPPRWSRTAASPSSEILRRLRGRPDAAQRKLCIVQIFFMEPTTTKKVLANILF

SEQ ID NO: 23346 - DNA, 1030 bp, Zea mays subsp. mays
  misc_feature (1)..(1030): Ceres Seq. ID no. 12412023
ataaatatagcttggagcaaatctttcagccacccgatccccaaccgcccggcccgacattccctccaaccgccgctgcggctgcgccgcccaccgccgacaggcgcagcagtcaacaggaaccgagccatggcgagcgcggatctgctgcggagggaggaggagttctactcctccctgtttgattccgccaaaggcgatggcgccaggtcgcgctcacagctgatcgagaggaagatcgaggccctggaggacatggccaccagggtcagtaaccggagatcgcggaagtggtttaacgaccgtttgctgattgaactcgtcccgcgtctttacgttgaagagatcaaaggcctattcgctcctccgccgtggggtgagcaagtgcccttgtcagcattctacagggcaaatgttggtgaatgggattccttcaggagcattgacatggatgctgaggcaagattgatgcagcatatgaaaaaatcattggaaaaacccaggaatcatgtcgatgaaggggaatcgattgcgctgaatgcttggcatcgaatagatcgacacactagagaagcaataaagagaaatttccttcctgatctgcttggaatatatgaagaacgcgttagggccttcattgaagacgctagtgacaaagatgctcttgtgctgaatgttcaggacccatttcagagactactgctccacggtgtttgtgagttctacaacgtgagctcgacaaccaccagcagtgtgagagaagatgggaggccttggaaggcaaccaccatcaagaagaggcagggcaccggcgttccctctagaatcacactagttagctttctgagaatgaagaagaatggatcgcagtaacgttagttagcgttcaagaatacaacaaaattgctttagattccgtttaggctgttgcaagacaagtgagtggtcactggcaatgtgttcttatatcgcatcagcctgctggctacggtttggaacttcctgacagaaagtagaaacttccggttct

SEQ ID NO: 23347 - protein, 290 aa, Zea mays subsp. mays
  misc_feature (1)..(290): Ceres Seq. ID no. 12412024
INIAWSKSFSHPIPNRPARHSLQPPLRLRRPPPTGAAVNRNRAMASADLLRREEEFYSSLFDSAKGDGARSRSQLIERKIEALEDMATRVSNRRSRKWFNDRLLIELVPRLYVEEIKGLFAPPPWGEQVPLSAFYRANVGEWDSFRSIDMDAEARLMQHMKKSLEKPRNHVDEGESIALNAWHRIDRHTREAIKRNFLPDLLGIYEERVRAFIEDASDKDALVLNVQDPFQRLLLHGVCEFYNVSSTTTSSVREDGRPWKATTIKKRQGTGVPSRITLVSFLRMKKNGSQ

SEQ ID NO: 23348 - protein, 247 aa, Zea mays subsp. mays
  misc_feature (1)..(247): Ceres Seq. ID no. 12412025
MASADLLRREEEFYSSLFDSAKGDGARSRSQLIERKIEALEDMATRVSNRRSRKWFNDRLLIELVPRLYVEEIKGLFAPPPWGEQVPLSAFYRANVGEWDSFRSIDMDAEARLMQHMKKSLEKPRNHVDEGESIALNAWHRIDRHTREAIKRNFLPDLLGIYEERVRAFIEDASDKDALVLNVQDPFQRLLLHGVCEFYNVSSTTTSSVREDGRPWKATTIKKRQGTGVPSRITLVSFLRMKKNGSQ

SEQ ID NO: 23349 - protein, 205 aa, Zea mays subsp. mays
  misc_feature (1)..(205): Ceres Seq. ID no. 12412026
MATRVSNRRSRKWFNDRLLIELVPRLYVEEIKGLFAPPPWGEQVPLSAFYRANVGEWDSFRSIDMDAEARLMQHMKKSLEKPRNHVDEGESIALNAWHRIDRHTREAIKRNFLPDLLGIYEERVRAFIEDASDKDALVLNVQDPFQRLLLHGVCEFYNVSSTTTSSVREDGRPWKATTIKKRQGTGVPSRITLVSFLRMKKNGSQ

SEQ ID NO: 23350 - DNA, 1466 bp, Zea mays subsp. mays
  misc_feature (1)..(1466): Ceres Seq. ID no. 12412035
gatccagcaatacccgacgcgcaagccagtgccgcgcccagatctccgcgacagatcagtcgttcgtccagctaactgcactgcacgcaatggccaccacggcgaccaagacgactgcaccggcgcaggagcagcaggccaacggcaacggcaacggcgagcagaagacgcgccactccgaggtcggccacaagagcctgctcaagagcgacgacctctaccagtacatcctggacacgagcgtgtacccgcgggagccggagagcatgaaggagctgcgcgagatcaccgccaagcacccatggaacctgatgaccacctccgccgacgagggccagttcctcaacatgctcatcaagctcatcggcgccaagaagaccatggagatcggcgtctacaccggctactcgctcctcgccaccgcgctcgcactcccggaggacggcacgatcttggccatggacatcaaccgcgagaactacgagctaggcctgccctgcatcaacaaggccggcgtgggccacaagatcgacttccgcgagggccccgcgctccccgtcctggacgacctcgtggcggacaaggagcagcacgggtcgttcgacttcgccttcgtggacgccgacaaggacaactacctcagctaccacgagcggctcctgaagctggtgaggcccggcggcctcatcggctacgacaacacgctgtggaacggctccgtcgtgctccccgacgacgcgcccatgcgcaagtacatccgcttctaccgcgacttcgtgctcgccctcaacagcgcgctcgccgccgacgaccgcgtcgagatctgccagctccccgtcggcgacggcgtcacgctctgccgccgcgtcaagtgaaaaaaaaaacacacatactccctccggtgcagtaaaagaagtcatcctgcgcgtgagcgagagtgcacaaaagaagtcgtagcgcacgtgggtctgggatttttgacgtcgctgcccctgagtaattgcatcgggaaaaaaaaaagctgcgctcaagggaaatcgagcttgagacctccaatctagaatgcctcgggaggtactgcaacaaccaatcgaacttgattgttttggtgatgttaatgcactcatatccctatttaataagggcaaacatagaaaactccatgataattaatcactccttggtatgcacaatcatgtcctaaacgactacctttactgcaccggagggagtaccctgcgttcctgccccggctgtctggcccccactgccaccgacggcgccgcaccccccgttccaatcatatcgtagacgacgcgcagcattaaattatcaatcaccggctctggctctttcttggccctgtactgtactgatgttccttcttgtttttttttcttgggaattgtcgccgtttcagtatacgtaaaatctcgaggtcgataatacagtaatactaccaattt

SEQ ID NO: 23351 - protein, 302 aa, Zea mays subsp. mays
  misc_feature (1)..(302): Ceres Seq. ID no. 12412036
IQQYPTRKPVPRPDLRDRSVVRPANCTARNGHHGDQDDCTGAGAAGQRQRQRRAEDAPLRGRPQEPAQERRPLPVHPGHERVPAGAGEHEGAARDHRQAPMEPDDHLRRRGPVPQHAHQAHRRQEDHGDRRLHRLLAPRHRARTPGGRHDLGHGHQPRELRARPALHQQGRRGPQDRLPRGPRAPRPGRPRGGQGAARVVRLRLRGRRQGQLPQLPRAAPEAGEARRPHRLRQHAVERLRRAPRRRAHAQVHPLLPRLRARPQQRARRRRPRRDLPAPRRRRRHALPPRQVKKKTHILPPVQ

SEQ ID NO: 23352 - protein, 290 aa, Zea mays subsp. mays
  misc_feature (1)..(290): Ceres Seq. ID no. 12412037
SSNTRRASQCRAQISATDQSFVQLTALHAMATTATKTTAPAQEQQANGNGNGEQKTRHSEVGHKSLLKSDDLYQYILDTSVYPREPESMKELREITAKHPWNLMTTSADEGQFLNMLIKLIGAKKTMEIGVYTGYSLLATALALPEDGTILAMDINRENYELGLPCINKAGVGHKIDFREGPALPVLDDLVADKEQHGSFDFAFVDADKDNYLSYHERLLKLVRPGGLIGYDNTLWNGSVVLPDDAPMRKYIRFYRDFVLALNSALAADDRVEICQLPVGDGVTLCRRVK

SEQ ID NO: 23353 - protein, 261 aa, Zea mays subsp. mays
  misc_feature (1)..(261): Ceres Seq. ID no. 12412038
MATTATKTTAPAQEQQANGNGNGEQKTRHSEVGHKSLLKSDDLYQYILDTSVYPREPESMKELREITAKHPWNLMTTSADEGQFLNMLIKLIGAKKTMEIGVYTGYSLLATALALPEDGTILAMDINRENYELGLPCINKAGVGHKIDFREGPALPVLDDLVADKEQHGSFDFAFVDADKDNYLSYHERLLKLVRPGGLIGYDNTLWNGSVVLPDDAPMRKYIRFYRDFVLALNSALAADDRVEICQLPVGDGVTLCRRVK

SEQ ID NO: 23354 - DNA, 1639 bp, Zea mays subsp. mays
  misc_feature (1)..(1639): Ceres Seq. ID no. 12412046
agctttgcgtctgtggccaaccaggcgcctccctggctccctcccaccacccggctctccacgccgccgccgccgccgccgccacaagcgaccgcgcatccgctcttctccctcccttcgctctcggcggccggcgatgggggagaccgtacgggcgggcgacgttgcaatcacgactcacgagatggagagccacaacccatcgcactctcagatcgccgaagtgacgatggacatcgcagcgtcagcttctggagcggcagggagcaagttctgcaagggcgcagcctgcgacttctccgacgccagcaactcctcgaaggacgccagggagaggtcggcgtcgatgaggaagctgatagtcgcggtggtcctctgcgtcgtattcatggcggtggaggtggtggggggcatcaaggcgaacagcctggccatcctgaccgacgcggcgcacctcctgtcggacgtggcggcgttcgccatctcgctgttctcgctctgggccgccgggtgggaggcgacgccgcggcagtcgtacgggttcttccgggtggagatcctcggcgccctcgtctccatccagctcatctggctgctcgccggcatactggtgtacgaggccgtcgtgaggctcgtcggcgagagcggcgacgtgcgggggtcgctcatgttcgccgtgtcggcgttcgggctggccgtcaacgttctcatggccgtgttgctgggccatgaccacgggcacggccacggccatggacatggacattcgcatgaccatggccacggccatggggattcggacgatggccattcccaccacgacgacgaggagcaagaacagggccgtgtccatcaccacgagcacggccatggaggcgctatcactgtcacaacccaccaccaccaccatcatcacgatcacgatgttgaggaggcgctgatcaagcatgagggtacccagtctgctggcagagctggtaagaagcctcggcggaacatcaacgtgcacagcgcatacctccacgtgctcggggactccgtccagagcgtcggggtcatggtgggcggggcgatcatctggtacaagccggagtggaaggtcatcgacctcatctgcacgctcgtcttctcggtggtggtgctgttcaccacgatccggatgctgcgcagcatcctcgaagtgttgatggagagcacgccccgcgaggtcgacgccaccaggctggagagcgggctctgcgggatggagggcgtggtggccgtccacgagctgcacatctgggccatcacggtgggcaaggtgctgctggcgtgccatgtgaccatcgccagggatgcggacgctgatgagatccttgacaaggtgatcgggtacatcaagacggagtacaacatcagccatgtgaccatccaggtcgagcgcgagtagggagctctgtctttggctgctgtcttgggcataaatggctggcgccattcgagctctggtgtgctcggtggtgttgtctattgctagtctattaggcaggcgggggaattgtttgcgtcgaggtggtggtggtggtcgtcagtaagtcagtcggtgcataaacaaggatgtaattttcggtaatgctattgacagcatcgtggttcattg

SEQ ID NO: 23355 - protein, 475 aa, Zea mays subsp. mays
  misc_feature (1)..(475): Ceres Seq. ID no. 12412047
ALRLWPTRRLPGSLPPPGSPRRRRRRRHKRPRIRSSPSLRSRRPAMGETVRAGDVAITTHEMESHNPSHSQIAEVTMDIAASASGAAGSKFCKGAACDFSDASNSSKDARERSASMRKLIVAVVLCVVFMAVEVVGGIKANSLAILTDAAHLLSDVAAFAISLFSLWAAGWEATPRQSYGFFRVEILGALVSIQLIWLLAGILVYEAVVRLVGESGDVRGSLMFAVSAFGLAVNVLMAVLLGHDHGHGHGHGHGHSHDHGHGHGDSDDGHSHHDDEEQEQGRVHHHEHGHGGAITVTTHHHHHHHDHDVEEALIKHEGTQSAGRAGKKPRRNINVHSAYLHVLGDSVQSVGVMVGGAIIWYKPEWKVIDLICTLVFSVVVLFTTIRMLRSILEVLMESTPREVDATRLESGLCGMEGVVAVHELHIWAITVGKVLLACHVTIARDADADEILDKVIGYIKTEYNISHVTIQVERE

SEQ ID NO: 23356 - protein, 430 aa, Zea mays subsp. mays
  misc_feature (1)..(430): Ceres Seq. ID no. 12412048
MGETVRAGDVAITTHEMESHNPSHSQIAEVTMDIAASASGAAGSKFCKGAACDFSDASNSSKDARERSASMRKLIVAVVLCVVFMAVEVVGGIKANSLAILTDAAHLLSDVAAFAISLFSLWAAGWEATPRQSYGFFRVEILGALVSIQLIWLLAGILVYEAVVRLVGESGDVRGSLMFAVSAFGLAVNVLMAVLLGHDHGHGHGHGHGHSHDHGHGHGDSDDGHSHHDDEEQEQGRVHHHEHGHGGAITVTTHHHHHHHDHDVEEALIKHEGTQSAGRAGKKPRRNINVHSAYLHVLGDSVQSVGVMVGGAIIWYKPEWKVIDLICTLVFSVVVLFTTIRMLRSILEVLMESTPREVDATRLESGLCGMEGVVAVHELHIWAITVGKVLLACHVTIARDADADEILDKVIGYIKTEYNISHVTIQVERE

SEQ ID NO: 23357 - protein, 414 aa, Zea mays subsp. mays
  misc_feature (1)..(414): Ceres Seq. ID no. 12412049
MESHNPSHSQIAEVTMDIAASASGAAGSKFCKGAACDFSDASNSSKDARERSASMRKLIVAVVLCVVFMAVEVVGGIKANSLAILTDAAHLLSDVAAFAISLFSLWAAGWEATPRQSYGFFRVEILGALVSIQLIWLLAGILVYEAVVRLVGESGDVRGSLMFAVSAFGLAVNVLMAVLLGHDHGHGHGHGHGHSHDHGHGHGDSDDGHSHHDDEEQEQGRVHHHEHGHGGAITVTTHHHHHHHDHDVEEALIKHEGTQSAGRAGKKPRRNINVHSAYLHVLGDSVQSVGVMVGGAIIWYKPEWKVIDLICTLVFSVVVLFTTIRMLRSILEVLMESTPREVDATRLESGLCGMEGVVAVHELHIWAITVGKVLLACHVTIARDADADEILDKVIGYIKTEYNISHVTIQVERE

SEQ ID NO: 23358 - DNA, 1495 bp, Zea mays subsp. mays
  misc_feature (1)..(1495): Ceres Seq. ID no. 12412050
ggaaaaggaaaaacaaacaaaatagtaaggggaatttggtacctgggtgtttgctgttccttgagttggtgaatctttggagtgcctggctccgacgagatcgaaaggagggacctttccttggttcctctgctggagctgtgattgcagaggtgaaccatgtcagcgatggcggcggcgggtgaagcggagtatggtgaatgcgtgcagaaggggtccctgcagcagcaccaggcgcctcaacccagccccggcgctctattctacacccatgatggcgtcgccgtctacaggaatccggtcatgccggcgttctaccaacagcccgcgggcagcaatgtcgtcgtgccggcggctccagggccagctcattcccctgccagctctgagcccttcaagcgcaagcgcgggcgcccccgcaagtacgcccccgcagacggcgccgtgccgctggctatcgtgcccccatcgcagccacccactgctcgtgccccagctacctctgaggcctcacccacggttcctcctggcttctctccaagtccgcagagtggtggcgtggtgagtcggcaggcctcgccggcgccggcgccggcgtcaggtgctcccgatgtcaagaagcggggccggccgtcgggcccctccagcaagaagcagcagccgcaggcggcagcgcctggaccaggctggactggattgaagcctcatattttcacagttcaagctggagaggatgtagcatcaagagccatgtcattttctgggaatggatgggctgtttgtatcctgacagccaatggcactgtatctaatgtgaccctgcgtcaaggagagtcttctggtggaacagtaacttatgagggccgttttgagattctctctttggctgggtcatatcttctgtctgaaagtactggcatgagcagtcgaacgggtggacttagtgtttctcttgctagtcctgatgggcatgttttaggtggtgctgtcgcaggacctctaaccgcagcttcgccagttcaggtggtcattgggagctttctggctgatacaaaaatggagcttgaccctggatcagcacctgagaaacatgttttcagcaggtttcaaactaccagcagtccatctaggggtaccgaatcctcgggtgggcatgcaagcccaccaaacaccacaggctccttcagcaccagcacacagccaggcttcccaagctttcccacatggaaatgagtttacctgctatggtggagtgggaccgtggcctctggggatgaggagggaggaatttggaactgacagtcctcgagcgtcgtcgctgtagtttcatgagatgttatgagagtcaatcctatttaggtacttctaactggttacaatgaagttccggtttgctgcttgtcttgacattttgcatcattgaggcacttcaaactccaaagtggtggtaacatacagtatattagatgattccccctatcaaatgccttttgtc

SEQ ID NO: 23359 - protein, 357 aa, Zea mays subsp. mays
  misc_feature (1)..(357): Ceres Seq. ID no. 12412051
MSAMAAAGEAEYGECVQKGSLQQHQAPQPSPGALFYTHDGVAVYRNPVMPAFYQQPAGSNVVVPAAPGPAHSPASSEPFKRKRGRPRKYAPADGAVPLAIVPPSQPPTARAPATSEASPTVPPGFSPSPQSGGVVSRQASPAPAPASGAPDVKKRGRPSGPSSKKQQPQAAAPGPGWTGLKPHIFTVQAGEDVASRAMSFSGNGWAVCILTANGTVSNVTLRQGESSGGTVTYEGRFEILSLAGSYLLSESTGMSSRTGGLSVSLASPDGHVLGGAVAGPLTAASPVQVVIGSFLADTKMELDPGSAPEKHVFSRFQTTSSPSRGTESSGGHASPPNTTGSFSTSTQPGFPSFPTWK

SEQ ID NO: 23360 - protein, 354 aa, Zea mays subsp. mays
  misc_feature (1)..(354): Ceres Seq. ID no. 12412052
MAAAGEAEYGECVQKGSLQQHQAPQPSPGALFYTHDGVAVYRNPVMPAFYQQPAGSNVVVPAAPGPAHSPASSEPFKRKRGRPRKYAPADGAVPLAIVPPSQPPTARAPATSEASPTVPPGFSPSPQSGGVVSRQASPAPAPASGAPDVKKRGRPSGPSSKKQQPQAAAPGPGWTGLKPHIFTVQAGEDVASRAMSFSGNGWAVCILTANGTVSNVTLRQGESSGGTVTYEGRFEILSLAGSYLLSESTGMSSRTGGLSVSLASPDGHVLGGAVAGPLTAASPVQVVIGSFLADTKMELDPGSAPEKHVFSRFQTTSSPSRGTESSGGHASPPNTTGSFSTSTQPGFPSFPTWK

SEQ ID NO: 23361 - protein, 309 aa, Zea mays subsp. mays
  misc_feature (1)..(309): Ceres Seq. ID no. 12412053
MPAFYQQPAGSNVVVPAAPGPAHSPASSEPFKRKRGRPRKYAPADGAVPLAIVPPSQPPTARAPATSEASPTVPPGFSPSPQSGGVVSRQASPAPAPASGAPDVKKRGRPSGPSSKKQQPQAAAPGPGWTGLKPHIFTVQAGEDVASRAMSFSGNGWAVCILTANGTVSNVTLRQGESSGGTVTYEGRFEILSLAGSYLLSESTGMSSRTGGLSVSLASPDGHVLGGAVAGPLTAASPVQVVIGSFLADTKMELDPGSAPEKHVFSRFQTTSSPSRGTESSGGHASPPNTTGSFSTSTQPGFPSFPTWK

SEQ ID NO: 23362 - DNA, 1236 bp, Zea mays subsp. mays
  misc_feature (1)..(1236): Ceres Seq. ID no. 12412058
aataaagctcgcgccacgggagccacgcacgcggacgccggcatattcgccaaacgcatcgcatcggcctcggccaccggcgcggctgccctcctcctcttctccgtcgatccggagaggactttctctcgcctgctcgtcccttccgcccccgccggccggccggtcctcttcccggcccactccgttccgatcgaccatggcggctaccgcccccaacggcaatcccactgtcagctccctcgcggcaaccgttccggtccaggcggttctgttcgacatcgacgggaccctgtgcgactcggatcccctccaccacgtcgctttccaagagatgcttctcgagatcgggtacaacaatggcgtgccgatagacgaggagttcttcatcaagaacatcgctgggaggagtgacgtcgaagctgcccagaacctgttcccggactgggagcttgagaaggggctcaaattcctagaggacaaggaagcaaaatacaggagtctggcaaaagagcgcttggtgcctgtgaaaggcctcgcgaaggtggtccagtgggtgaaagaccacgggtacaagcgcgcggcggtgaccaacgcccccaggatcaacgcggagctgatgatctcgctcctgggcctctcggacttcttccaggccgtcatcgtcggaggcgagtgcgagcagccaaagcccgcgccgtacccttacctcagggccctcaaggagctccaggtgtccgcagagcacagcttcgtcttcgaggattctcctgctggtatccgggctggcgtcgcggcggggatgcctgtcgtcggtgtggcgacgaggaacccggagaagtccttggtggaagcaggagccgcgttgctcgtcaaggactacgaagatcctaagctctgggcagcgcttgaggaggtcgacggagaggaagctaagctgaagaaggccggcgaatgatctgatatgacgatgagccattgattagatttattgcagattaattctgcctccagcatgattctgttcctagttatgcgctgcggagagagctcacctcatcagggtatttatgagattctagcttcgtatattgtttttcttcttcttgattgaactgagatcaaataagacaaagctgctgtgccttgttgtgtgccatctgtgtatgaacttttcggttcagcctccagcagtctttaatctgaaagaaagacgaggtaggaattctctccccc

SEQ ID NO: 23363 - protein, 318 aa, Zea mays subsp. mays
  misc_feature (1)..(318): Ceres Seq. ID no. 12412059
IKLAPREPRTRTPAYSPNASHRPRPPARLPSSSSPSIRRGLSLACSSLPPPPAGRSSSRPTPFRSTMAATAPNGNPTVSSLAATVPVQAVLFDIDGTLCDSDPLHHVAFQEMLLEIGYNNGVPIDEEFFIKNIAGRSDVEAAQNLFPDWELEKGLKFLEDKEAKYRSLAKERLVPVKGLAKVVQWVKDHGYKRAAVTNAPRINAELMISLLGLSDFFQAVIVGGECEQPKPAPYPYLRALKELQVSAEHSFVFEDSPAGIRAGVAAGMPVVGVATRNPEKSLVEAGAALLVKDYEDPKLWAALEEVDGEEAKLKKAGE

SEQ ID NO: 23364 - protein, 252 aa, Zea mays subsp. mays
  misc_feature (1)..(252): Ceres Seq. ID no. 12412060
MAATAPNGNPTVSSLAATVPVQAVLFDIDGTLCDSDPLHHVAFQEMLLEIGYNNGVPIDEEFFIKNIAGRSDVEAAQNLFPDWELEKGLKFLEDKEAKYRSLAKERLVPVKGLAKVVQWVKDHGYKRAAVTNAPRINAELMISLLGLSDFFQAVIVGGECEQPKPAPYPYLRALKELQVSAEHSFVFEDSPAGIRAGVAAGMPVVGVATRNPEKSLVEAGAALLVKDYEDPKLWAALEEVDGEEAKLKKAGE

SEQ ID NO: 23365 - protein, 207 aa, Zea mays subsp. mays
  misc_feature (1)..(207): Ceres Seq. ID no. 12412061
MLLEIGYNNGVPIDEEFFIKNIAGRSDVEAAQNLFPDWELEKGLKFLEDKEAKYRSLAKERLVPVKGLAKVVQWVKDHGYKRAAVTNAPRINAELMISLLGLSDFFQAVIVGGECEQPKPAPYPYLRALKELQVSAEHSFVFEDSPAGIRAGVAAGMPVVGVATRNPEKSLVEAGAALLVKDYEDPKLWAALEEVDGEEAKLKKAGE

SEQ ID NO: 23366 - DNA, 1257 bp, Zea mays subsp. mays
  misc_feature (1)..(1257): Ceres Seq. ID no. 12412062
attgaaattttccgtttgcaccctaccgagaggtgacgacgagtgaggagtctgtgtgaccagtgctcggcgtcgtcccctgcctctgctagccgctaggcgacgggcccttcgccgggcgacgagcacaccggccctgttaccatggcagcgatgaatactggtatgggaggtttaggtggcaggccgatacatccacaagcaaatccttttggacctgctttgcagggtgctggaccaggattgatccgtactgggctagaaacatatggcggaaggattttagattcaagttctgagtttatgcagagcaatataacacaatatttgtccgaccctcagtactactttcaagtcaacagccagtatgtgaggaacaaactgaaggtcatcttgttccctttcttgcacaggggccactggacaagaataactgaaccagtaggaggaaggctatcctacaaacctccagtccaggatatcaatgcaccggacttgtacatccctttgatggcatttggcacctacattgtagctgctgggtatgccttgggtgttcttggaaggtttacccctgaggcactgaccctacagttttctaaagggatacttgggtggtttctgcaagtcgtcctcatcaaaggtctgctgtactccctgggaagcggtgaagctcccttgctggacatcgtggcgtatgctggatatggcttcgctggcacttcccttgcaatggtggcccgcatcttctggagctacctgtattacttcatcatgccatggttctgcctctgcacgggagtcttccctgtgaagaccatgaagagggttcttctgggcgggccaaggagctacgagagacaccccggccggaaccactacttcctgatcttcttggcggtcgtgcaattccccatgctgttctggctcggcaacatatgtggctgacctttgatcctattggtcgggccacagacctgtttcttcttcttcttcagaataggcatgtgctacttctggcttgctgatgaaacttaggtttatcgtggagatggtacagaactattagctatagatatctgggcaatcgaataaactgtttttgtttctgttagctatagaggcgaaagtaaaaacaatcgtttgggataggataaagatgaactgcttcgtgtgtacccttttgtgtcacgagcggctagccacgaccctgcaatctgatttgttttttaatgatcactgctacttgatctttcc

SEQ ID NO: 23367 - protein, 267 aa, Zea mays subsp. mays
  misc_feature (1)..(267): Ceres Seq. ID no. 12412063
MAAMNTGMGGLGGRPIHPQANPFGPALQGAGPGLIRTGLETYGGRILDSSSEFMQSNITQYLSDPQYYFQVNSQYVRNKLKVILFPFLHRGHWTRITEPVGGRLSYKPPVQDINAPDLYIPLMAFGTYIVAAGYALGVLGRFTPEALTLQFSKGILGWFLQVVLIKGLLYSLGSGEAPLLDIVAYAGYGFAGTSLAMVARIFWSYLYYFIMPWFCLCTGVFPVKTMKRVLLGGPRSYERHPGRNHYFLIFLAVVQFPMLFWLGNICG

SEQ ID NO: 23368 - protein, 264 aa, Zea mays subsp. mays
  misc_feature (1)..(264): Ceres Seq. ID no. 12412064
MNTGMGGLGGRPIHPQANPFGPALQGAGPGLIRTGLETYGGRILDSSSEFMQSNITQYLSDPQYYFQVNSQYVRNKLKVILFPFLHRGHWTRITEPVGGRLSYKPPVQDINAPDLYIPLMAFGTYIVAAGYALGVLGRFTPEALTLQFSKGILGWFLQVVLIKGLLYSLGSGEAPLLDIVAYAGYGFAGTSLAMVARIFWSYLYYFIMPWFCLCTGVFPVKTMKRVLLGGPRSYERHPGRNHYFLIFLAVVQFPMLFWLGNICG

SEQ ID NO: 23369 - protein, 260 aa, Zea mays subsp. mays
  misc_feature (1)..(260): Ceres Seq. ID no. 12412065
MGGLGGRPIHPQANPFGPALQGAGPGLIRTGLETYGGRILDSSSEFMQSNITQYLSDPQYYFQVNSQYVRNKLKVILFPFLHRGHWTRITEPVGGRLSYKPPVQDINAPDLYIPLMAFGTYIVAAGYALGVLGRFTPEALTLQFSKGILGWFLQVVLIKGLLYSLGSGEAPLLDIVAYAGYGFAGTSLAMVARIFWSYLYYFIMPWFCLCTGVFPVKTMKRVLLGGPRSYERHPGRNHYFLIFLAVVQFPMLFWLGNICG

SEQ ID NO: 23370 - DNA, 1573 bp, Zea mays subsp. mays
  misc_feature (1)..(1573): Ceres Seq. ID no. 12412066
aacacactaggagaggtaaaaacgaacgaagttgcatctgggtagacggtagaggcaaccacacaattgccccaaaagtaaatgtcataataggagaaaacaactgtcttgcatcaccacgagcgtgggctctctccttctcgacgacgactgggccaccgtcgctgccgcctgccgccctacgccaggtgccaagcagccaggtgttcttggggcccttcgccggcgacgagcaccaccagctgaaagatggcgaggataccgtctctgaagagcctcaatgcgtttccacatgcggaagagcacttgttgaagaagacttactctggcgctgttgtgacaatttttgggctacttataatgattacactgtttgtgcatgagctgcagttttatcttaccacctacacggtgcatcagatgtctgtagatctgaaacgaggagaaactctgccaatccatatcaatatgtcatttccttctttgccatgtgaagtattgagtgtggatgcaattgacatgtctgggaaacatgaagttgatttgcatacaaatatttggaagcttcgcttggataagtatggccatatcatcggtacagagtacttgtctgacctagttgaaaaggggcatggggcacatcatgatcatgaccatgatcatgaccatcacgatgaacaaaagaagcatgaacaaaccttcaacgaagaagcagaaaaaatgatcaagagtgtgaaacaagcactcggaaatggtgaaggctgccgggtctatgggatgttggatgtgcagagggtggctggtaacttccatatctcagtgcatggtttgaacatttttgttgctgaaaagatttttgaagggtcaaaccatgtgaacgtcagtcatgttatccacgagctgtcatttggcccaaagtatccaggaattcataacccactggatgaaacttcaaggatacttcatgacacaagtggaaccttcaaatactatattaaggttgttccgactgagtataaatatctatcaaagaaagtattgccaacaaatcagttttctgtcactgagtattttcttcccatccgtccaactgacagggcctggccagcggtttacttcctgtatgatctgtcaccaattacagtcaccatcaaagaggaaagaaggaacttccttcattttgtaactcgtctatgtgcagttcttggtggcacatttgccatgacaggaatgcttgaccggtggatgtaccagcttatcaagacagtcaccaactcaaagaccagaagtgtactgcggtaattgcacaagtcacgatggatggaaaaccgttggaagtgtggtaccgtggctaatgaagcccatagatctttgcccgaagctaactgatcaagccatgttgatttttgcatgttttattttcttcgtacatggttaacttataatacgtcgttgtttttttttcatcaactatgttagattaacacagtccacggactacattgttaactatgttggtagtggaactgaaatgccaagccgatcttgatcaaccctatagtcccatcgtgcc

SEQ ID NO: 23371 - protein, 350 aa, Zea mays subsp. mays
  misc_feature (1)..(350): Ceres Seq. ID no. 12412067
MARIPSLKSLNAFPHAEEHLLKKTYSGAVVTIFGLLIMITLFVHELQFYLTTYTVHQMSVDLKRGETLPIHINMSFPSLPCEVLSVDAIDMSGKHEVDLHTNIWKLRLDKYGHIIGTEYLSDLVEKGHGAHHDHDHDHDHHDEQKKHEQTFNEEAEKMIKSVKQALGNGEGCRVYGMLDVQRVAGNFHISVHGLNIFVAEKIFEGSNHVNVSHVIHELSFGPKYPGIHNPLDETSRILHDTSGTFKYYIKVVPTEYKYLSKKVLPTNQFSVTEYFLPIRPTDRAWPAVYFLYDLSPITVTIKEERRNFLHFVTRLCAVLGGTFAMTGMLDRWMYQLIKTVTNSKTRSVLR

SEQ ID NO: 23372 - protein, 313 aa, Zea mays subsp. mays
  misc_feature (1)..(313): Ceres Seq. ID no. 12412068
MITLFVHELQFYLTTYTVHQMSVDLKRGETLPIHINMSFPSLPCEVLSVDAIDMSGKHEVDLHTNIWKLRLDKYGHIIGTEYLSDLVEKGHGAHHDHDHDHDHHDEQKKHEQTFNEEAEKMIKSVKQALGNGEGCRVYGMLDVQRVAGNFHISVHGLNIFVAEKIFEGSNHVNVSHVIHELSFGPKYPGIHNPLDETSRILHDTSGTFKYYIKVVPTEYKYLSKKVLPTNQFSVTEYFLPIRPTDRAWPAVYFLYDLSPITVTIKEERRNFLHFVTRLCAVLGGTFAMTGMLDRWMYQLIKTVTNSKTRSVLR

SEQ ID NO: 23373 - protein, 293 aa, Zea mays subsp. mays
  misc_feature (1)..(293): Ceres Seq. ID no. 12412069
MSVDLKRGETLPIHINMSFPSLPCEVLSVDAIDMSGKHEVDLHTNIWKLRLDKYGHIIGTEYLSDLVEKGHGAHHDHDHDHDHHDEQKKHEQTFNEEAEKMIKSVKQALGNGEGCRVYGMLDVQRVAGNFHISVHGLNIFVAEKIFEGSNHVNVSHVIHELSFGPKYPGIHNPLDETSRILHDTSGTFKYYIKVVPTEYKYLSKKVLPTNQFSVTEYFLPIRPTDRAWPAVYFLYDLSPITVTIKEERRNFLHFVTRLCAVLGGTFAMTGMLDRWMYQLIKTVTNSKTRSVLR

SEQ ID NO: 23374 - DNA, 1185 bp, Zea mays subsp. mays
  misc_feature (1)..(1185): Ceres Seq. ID no. 12412074
aattaggcccgcaaacaacaccgctagccatgtggcgccgcgcctcccacctcctcatccgcaccgccgccgccgccgccgccccgacccgccgcctcccacttcctcacccgccgctacccatcgccccaagagtggcctccgcatcctcatcctatgccacagcggtcgcggcgagggcaccgcggacggtagggaccctgctgcggctcaacgacctgtgtgacaacccgggcgcgcggaagcagaagacgcgcaagggacgcgggatcggctccggcaaggggaagacggcgggacgcgggccacaaggggcagaaagcgcgaggcaccgctaggttcggcttcgagggtggccagaccctgctccgccgccgcctgccccgccgtggattcaagaaccccttctcactcacatttcagccctgtggactggggaaaattgcaaaactcataaatgctgggaaaattgattcctctgaattgattaccatgaagacactaaaggaaacaggtgccattgggaagcaaataaaagattgaattcgtttaatgggccgtggagcagaagaaatcaaatggcctattcaccttgaggtgtcaagggcaactgcaagggccaaagctgccgtggaagctgctggtgggacagtaaggctggtgtactacaacaaacttggattccgggcactcctgaaacctgagtggtttgagaagaagggccgcctgttaccaaaagcagcaaggcctccacccaagcagcgagataaggtcgatagcattggccgcctgcccgcgccgacaaagccactccccttcacggtagaggagctggagtttgcagcccagcgtgaggctgcccgcgtgactgcataagatgggagcacgttggcagcacctttttttctgaaagcatgcgccactggatgtgtatcacattagctttagcaggacatgcataagaatggaccgttttgtcttttttttttcttttccctcaaggaatggactgttataaattaaatatccattcattggaatcagatgttgctgtaatttctgaacttaccttggggttttgattgataaatgccattttttctgaataggctcatgtatgatgtcattttacctgccaccttttgatcctgtaatgacaattgagaaatgccgtttatttctgtg

SEQ ID NO: 23375 - protein, 111 aa, Zea mays subsp. mays
  misc_feature (1)..(111): Ceres Seq. ID no. 12412075
LGPQTTPLAMWRRASHLLIRTAAAAAAPTRRLPLPHPPLPIAPRVASASSSYATAVAARAPRTVGTLLRLNDLCDNPGARKQKTRKGRGIGSGKGKTAGRGPQGAESARHR

SEQ ID NO: 23376 - protein, 107 aa, Zea mays subsp. mays
  misc_feature (1)..(107): Ceres Seq. ID no. 12412076
MGRGAEEIKWPIHLEVSRATARAKAAVEAAGGTVRLVYYNKLGFRALLKPEWFEKKGRLLPKAARPPPKQRDKVDSIGRLPAPTKPLPFTVEELEFAAQREAARVTA

SEQ ID NO: 23377 - protein, 102 aa, Zea mays subsp. mays
  misc_feature (1)..(102): Ceres Seq. ID no. 12412077
MWRRASHLLIRTAAAAAAPTRRLPLPHPPLPIAPRVASASSSYATAVAARAPRTVGTLLRLNDLCDNPGARKQKTRKGRGIGSGKGKTAGRGPQGAESARHR

SEQ ID NO: 23378 - DNA, 1342 bp, Zea mays subsp. mays
  misc_feature (1)..(1342): Ceres Seq. ID no. 12412086
atcgattaatctcctcccccctcaacaaccgcgagatcttcagctaccgctctctccggtcgcgtttgcatccgcattcctcagatccagattcgagccccagccccgcttcgagatccagctagctctctatcaagcatccggcggagcgagcagcggggggctcggcgagagagaagatgaagcggaagacgcggaacaagatcatcgtatggacactggccctggctgcagtggcgattctggtgggcggcacgattgcgctggtgctcacggcggggacgtggaaggccaagataaagaagtcgcaggagaagatctgtaacaaggggtgggagtgctcggggagcaagtactgctgcaacgacaccatcaccgacttcttcaaggtgtaccagttcgagaacctcttcgccaagcgcaacacccccgtcgcgcacgccgtcgggttctgggactaccaggccttcatcaccgccgcggccctcttcgagccccaggggttctgcaccaccggcggcaagcagatgcagatgatggagctctgcgccttcctcgggcacgtcggcgccaagacttcatgtgggtacggcgtggcgaccggcgggccgacggcatgggggctgtgctacaaccacgagatgagccccgaccagacctactgcgacaagacctacacccagtacccctgcgtcgagggcgccgagtactacggccgaggcgcgattcctgtctactggaactacaactacggcgctgccggtgacgggatcaaggcggatctgctccaccacccagagtacctggagcagaacgcgacgctggcattcatggcggcgatgtggcggtggatgacgccgatcaagaagagccagccgtcggcgcacgacgccttcgtgggcaactggaagccgaccaagaacgacacgctcagcaaacgcctgcctgggttcggcgccaccatgaacatactctacggcgagtcgatctgcggcaagggatacgtcgacgccatgaacgttataatctcgcactaccagtattaccttgacctcatgggcgtcggccgtgagcactctggcgacaaccgtgattgcgccgagcaggcaccgttcaacccctccagcccgacggatgaccagaagcagcagcaatcaggaagctaagacggacggactcattgcgccattgccactgatcaagcttccacagcgctagattgagctacagattcttcaggatgcgtgaagctgcatgcatcgtgttgatgttgttttgaatagactgtatgtactgtctatgtgaattgcgagatttgtggttatttactaccatgttgtcc

SEQ ID NO: 23379 - protein, 328 aa, Zea mays subsp. mays
  misc_feature (1)..(328): Ceres Seq. ID no. 12412087
MKRKTRNKIIVWTLALAAVAILVGGTIALVLTAGTWKAKIKKSQEKICNKGWECSGSKYCCNDTITDFFKVYQFENLFAKRNTPVAHAVGFWDYQAFITAAALFEPQGFCTTGGKQMQMMELCAFLGHVGAKTSCGYGVATGGPTAWGLCYNHEMSPDQTYCDKTYTQYPCVEGAEYYGRGAIPVYWNYNYGAAGDGIKADLLHHPEYLEQNATLAFMAAMWRWMTPIKKSQPSAHDAFVGNWKPTKNDTLSKRLPGFGATMNILYGESICGKGYVDAMNVIISHYQYYLDLMGVGREHSGDNRDCAEQAPFNPSSPTDDQKQQQSGS

SEQ ID NO: 23380 - protein, 212 aa, Zea mays subsp. mays
  misc_feature (1)..(212): Ceres Seq. ID no. 12412088
MQMMELCAFLGHVGAKTSCGYGVATGGPTAWGLCYNHEMSPDQTYCDKTYTQYPCVEGAEYYGRGAIPVYWNYNYGAAGDGIKADLLHHPEYLEQNATLAFMAAMWRWMTPIKKSQPSAHDAFVGNWKPTKNDTLSKRLPGFGATMNILYGESICGKGYVDAMNVIISHYQYYLDLMGVGREHSGDNRDCAEQAPFNPSSPTDDQKQQQSGS

SEQ ID NO: 23381 - protein, 210 aa, Zea mays subsp. mays
  misc_feature (1)..(210): Ceres Seq. ID no. 12412089
MMELCAFLGHVGAKTSCGYGVATGGPTAWGLCYNHEMSPDQTYCDKTYTQYPCVEGAEYYGRGAIPVYWNYNYGAAGDGIKADLLHHPEYLEQNATLAFMAAMWRWMTPIKKSQPSAHDAFVGNWKPTKNDTLSKRLPGFGATMNILYGESICGKGYVDAMNVIISHYQYYLDLMGVGREHSGDNRDCAEQAPFNPSSPTDDQKQQQSGS

SEQ ID NO: 23382 - DNA, 1273 bp, Zea mays subsp. mays
  misc_feature (1)..(1273): Ceres Seq. ID no. 12412098
aacatagtttcgtcgtggaacaagaggcggagaagcaggtcactcgaccagctaaatccctgggtgtacaagccggctgagctatggcaggcgaaggagcaggagcaccaccacccgccgcccaagaagcgcagctgcaccatggtgttcacgctcaaggagatggaggaggcgaccaacctgttcagcgaccgcaacctcatcggcaagggcggcttcggccgggtttacagaggcgtgctcaaggatggccagatcgtcgccgtcaagaagatggagctgccgacttgcaagcaggccgacggcgagcgcgagttccgggtggagatcgacatcctgagcaggctagaccaccccaacctggtcacgctcatcggctactgcgccgacggcaagcaccggttcgtggtgtacgagtacatgcccaggggcaacctccaggacatcctcaacggcattggggaggtgaggatggactggccgctgcgcctgcggatcgcgctgggagcggcgcgggcgctggcctacctgcactccagcacggccgtcggcgtccccgtcgtccacagggacttcaagtccagcaacatcctcctcaccgaccactacgaggcaaagatctcggacttcgggctcgccaagctgctgcagcaggaccaggacctgcacaccaccaccagggtgctgggcacgttcggctacttcgaccccgaatacgcgctgacagggaagctgacgctgcagagcgacgtgtacgcgttcggcgtggtgctgctgggagctgctgacggggcggcgggccatcgacctgagccaggggccgcaggagcagaacctcatcgtcggcatccaccaggtggtgggcgaccgcaagaagctgcgcaaggtggtggaccgggacatgcccaggggctcctacacgctggagtcggtgtccatgttcgccgcgctcgccgcgcgctgcgtctgcttcgacagcgccgcccgcccgcccatgcaggactgcgtcaaggagctccagttcatcatgtacgctaacatgaagatatgatcactctcgcgggtgcaaaccgcgcgtgggttttctttacttttgagacgggggcggggcatgcggacgatgctgctggattgcaagcaattgcaggtccgcagcttttgtttggttgatgaaacgaattgtctaaaaaggctttatacagttacttgctagtggtgctcgtttggtagagcttgtagctctagtcaaaccagttctactggtgatttctcc

SEQ ID NO: 23383 - protein, 345 aa, Zea mays subsp. mays
  misc_feature (1)..(345): Ceres Seq. ID no. 12412099
NIVSSWNKRRRSRSLDQLNPWVYKPAELWQAKEQEHHHPPPKKRSCTMVFTLKEMEEATNLFSDRNLIGKGGFGRVYRGVLKDGQIVAVKKMELPTCKQADGEREFRVEIDILSRLDHPNLVTLIGYCADGKHRFVVYEYMPRGNLQDILNGIGEVRMDWPLRLRIALGAARALAYLHSSTAVGVPVVHRDFKSSNILLTDHYEAKISDFGLAKLLQQDQDLHTTTRVLGTFGYFDPEYALTGKLTLQSDVYAFGVVLLGAADGAAGHRPEPGAAGAEPHRRHPPGGGRPQEAAQGGGPGHAQGLLHAGVGVHVRRARRALRLLRQRRPPAHAGLRQGAPVHHVR

SEQ ID NO: 23384 - protein, 298 aa, Zea mays subsp. mays
  misc_feature (1)..(298): Ceres Seq. ID no. 12412100
MVFTLKEMEEATNLFSDRNLIGKGGFGRVYRGVLKDGQIVAVKKMELPTCKQADGEREFRVEIDILSRLDHPNLVTLIGYCADGKHRFVVYEYMPRGNLQDILNGIGEVRMDWPLRLRIALGAARALAYLHSSTAVGVPVVHRDFKSSNILLTDHYEAKISDFGLAKLLQQDQDLHTTTRVLGTFGYFDPEYALTGKLTLQSDVYAFGVVLLGAADGAAGHRPEPGAAGAEPHRRHPPGGGRPQEAAQGGGPGHAQGLLHAGVGVHVRRARRALRLLRQRRPPAHAGLRQGAPVHHVR

SEQ ID NO: 23385 - protein, 291 aa, Zea mays subsp. mays
  misc_feature (1)..(291): Ceres Seq. ID no. 12412101
MEEATNLFSDRNLIGKGGFGRVYRGVLKDGQIVAVKKMELPTCKQADGEREFRVEIDILSRLDHPNLVTLIGYCADGKHRFVVYEYMPRGNLQDILNGIGEVRMDWPLRLRIALGAARALAYLHSSTAVGVPVVHRDFKSSNILLTDHYEAKISDFGLAKLLQQDQDLHTTTRVLGTFGYFDPEYALTGKLTLQSDVYAFGVVLLGAADGAAGHRPEPGAAGAEPHRRHPPGGGRPQEAAQGGGPGHAQGLLHAGVGVHVRRARRALRLLRQRRPPAHAGLRQGAPVHHVR

SEQ ID NO: 23386 - DNA, 1836 bp, Zea mays subsp. mays
  misc_feature (1)..(1836): Ceres Seq. ID no. 12412106
aacacaactgcacaaaagcacaagcctccctcccggctccccacctcgcagcgtccgccggcacaccacctctgactcctctccctccgcggcctccgtttcttccctcattctccgcaaaccctaatcccaatggctgcctccgccaggactaccagctcgttgccctacctagtcgccgtctcctcccccgcggctcaccgccacggggccagccacccgatccgcgcctcggtgggggaggcgacaatggacgtggtgtcggaggcggagctgcgggagaaagggttcttggggatgcggaaaacgaaactggtgtgcacggtggggcccgcctgcgtcgaggcgctgccggcgctggcgcgcggcgggatgggcgtggcgcggatcaacctctgccacggtggccgggagtggcatcgtgccgccatgcgctctgtgcggaggctcaacgaggagggaggattctgcgtgacgcttatggtcgacaccgagggttcccagctcctcgtcgcggaccacggaggcgccacctcagtcaaggccgaggatgggtcagagtggatatttacaaacaaaaaagctgatgaagcccatcagttcacaatgcatgtgaattttgataagttttctgaaggcattttggttggtgatgagcttgtaatagatggtggaatggcaacatttgaagttactgagaaaataggaaatgatttgcgctgtaagtgcacggacccaggattgggctgacatcgaatttgggatagctgaaggagttgattgcattgctctatcatttgtaaatgatgctaatgatataaagcagttgaaagcttacctctctagaagatcgttagagcacatcaaagtatttgcaaagattgagagtctagaatctctcaagaacctgaaagacatcatagaggcatctgatggagttatggtagcacgaggggatcttggagttcagattcctcttgaacagatcccagccattcaagaatcaattgttaaactatgtagacacctgaacaagcctgtgatagttgcttctcagcttctcgaatcaatggttgaatacccaacaccaactcgagcagaggtggccgatgtttcggaagcagtgcggcaatatgcagacgctgtgatgctatcagcagagtcagctataggtgcatatccccaaaaagcgctatctgtacttcgtgcagccagtgaaaggatggaatcatggagccgtgaggaaaacatgcagaaacttcttccacggcatcagcttgcaattgcattgcctgaccggatctcagagcagatttgcagctgtgctgtagaaatggcaaacaaccttgctgtggatgccatatttgtctacacaaagcatggtcacatggcatcacttctatcgcgcaaccgacccaaccctcccatattcgcgttcactgataatgccaattcaagaaagagcatgaacctctactcgggagtgattccacttcatctaccattgtcaaatagcatggaggataacttcaacaaaaccatcagcctgatgaggtcgaagggttcagtgaaacccggagacacggtcttggtggtatcagattctgatctaaaccaaccttgtgctgccacctcggtgttccaatccattcaggtccggctagtggagtaggttccatgagatgagatcctactagccgtttggttggctaaaatgtaacgtaaccaactactactatgcgttaccattgcaaaccattcccaccgtctataattagatcctatttccatctccaaataaagattgaaccactgcgattacagtggtgtctgatt

SEQ ID NO: 23387 - protein, 320 aa, Zea mays subsp. mays
  misc_feature (1)..(320): Ceres Seq. ID no. 12412107
MICAVSARTQDWADIEFGIAEGVDCIALSFVNDANDIKQLKAYLSRRSLEHIKVFAKIESLESLKNLKDIIEASDGVMVARGDLGVQIPLEQIPAIQESIVKLCRHLNKPVIVASQLLESMVEYPTPTRAEVADVSEAVRQYADAVMLSAESAIGAYPQKALSVLRAASERMESWSREENMQKLLPRHQLAIALPDRISEQICSCAVEMANNLAVDAIFVYTKHGHMASLLSRNRPNPPIFAFTDNANSRKSMNLYSGVIPLHLPLSNSMEDNFNKTISLMRSKGSVKPGDTVLVVSDSDLNQPCAATSVFQSIQVRLVE

SEQ ID NO: 23388 - protein, 243 aa, Zea mays subsp. mays
  misc_feature (1)..(243): Ceres Seq. ID no. 12412108
MVARGDLGVQIPLEQIPAIQESIVKLCRHLNKPVIVASQLLESMVEYPTPTRAEVADVSEAVRQYADAVMLSAESAIGAYPQKALSVLRAASERMESWSREENMQKLLPRHQLAIALPDRISEQICSCAVEMANNLAVDAIFVYTKHGHMASLLSRNRPNPPIFAFTDNANSRKSMNLYSGVIPLHLPLSNSMEDNFNKTISLMRSKGSVKPGDTVLVVSDSDLNQPCAATSVFQSIQVRLVE

SEQ ID NO: 23389 - protein, 205 aa, Zea mays subsp. mays
  misc_feature (1)..(205): Ceres Seq. ID no. 12412109
MAASARTTSSLPYLVAVSSPAAHRHGASHPIRASVGEATMDVVSEAELREKGFLGMRKTKLVCTVGPACVEALPALARGGMGVARINLCHGGREWHRAAMRSVRRLNEEGGFCVTLMVDTEGSQLLVADHGGATSVKAEDGSEWIFTNKKADEAHQFTMHVNFDKFSEGILVGDELVIDGGMATFEVTEKIGNDLRCKCTDPGLG

SEQ ID NO: 23390 - DNA, 1792 bp, Zea mays subsp. mays
  misc_feature (1)..(1792): Ceres Seq. ID no. 12412110
aaatcctcctcctcctcctgccgcagcccgcagggaggtggagttgtcaacgtgccgaggactggagcgcccgcgtccggcgtctctataaacgagaccgcccggccatttggtctgctcctctctgttctcccctgcctgcctgcttccagctgcatctctctccgccgagaccgagaggaggaggaggcaagggaggcatccctgacgtacggacggcggccatggggacgcaggcgccggagaactaccccgccgagaaggtacaggacgcgaggagcgcgcgggagaaggccatcgacgactggctcccgatcacctcgtcgcggaacgccaagtggtggtactccgccttccacaatgtcaccgccatggtcggcgccggcgtgctcagcctgccctacgccatgtccgagcttggctggggccctggcatcgcggtgctggtggtgtcgtgggtgatcacgctgtacacgctgtggcagatggtggagatgcacgagatggtccccgggaagcggttcgaccgttaccacgagctggggcagcacgcgttcggggaccggctgggcctgtggatcgtggtgccgcagcagctggtcgtcgaggtgggcgtgaacatcgtgtacatggtgaccggcggcaagtccctgaagaagttccacgacgtggctggtgtgcggcgacacgggggtgtgcgaggggaaggacaacatcaagaccacctacttcatcatgatcttcgcgtccgtccacttcgtcctctcgcagctccccaacttcaactccatctccggcgtctccctcgccgccgccgtcatgtcgctcagctactccaccatcgcgtggggcgcgtcggtgcacaaggggaggatgtcgggcgtcgactaccacctgcgcgcgaccaccacgccggggaaggtgttcggcttcttcggcgcgctgggggacgtggcgttcgcctacgccggccacaacgtggtgctggagatccaggccaccatcccgtccacccccgacaagccgtccaagaagcccatgtggaagggcgtggtggtcgcctacgtcgtggtggcgctctgctacttccccgtcgcgctcatcggctactgggcgttcggaaacacggtcgaggacaacatcctcatcacgctcagcaagcccaagtggctcatcgcgctcgccaacatgatggtcgtcgtccatgtcatcggcagctaccagatctatgccatgccggtgtttgacatgatagagaccgtgctggtgaagaagctgcgcttccctcccggcctcacgctgcgtctgatcgctcggaccctctatgttgcgttcacgatgttcatagccatcaccttccccttcttcggtgggctgctcggtttcttcggcgggttcgccttcgcgccgaccacctatttccttccctgcgtcatgtggctcgcaatctacaagcccaagaggttcagcctctcctggttgaccaactggatgtgcatcattcttggggtgctcctgatgattctgtcgcccatcggagggctccggcaaataataatggacgcgaaaacctaccagttctactcgtgagctaccaccagccatgacttgtaagcacgattggagaaatctgtcaaagcctcaaccacgagtttttgtttttgttttttgtcatgccaaacacatacatatacgtactgtttttttaatattcaaaggtgttcttcgtggcttgcgtgtgtacagtattatgtgtatgagggagacataagtttaatgatgctggctgtct

SEQ ID NO: 23391 - protein, 414 aa, Zea mays subsp. mays
  misc_feature (1)..(414): Ceres Seq. ID no. 12412111
ILLLLLPQPAGRWSCQRAEDWSARVRRLYKRDRPAIWSAPLCSPLPACFQLHLSPPRPRGGGGKGGIPDVRTAAMGTQAPENYPAEKVQDARSAREKAIDDWLPITSSRNAKWWYSAFHNVTAMVGAGVLSLPYAMSELGWGPGIAVLVVSWVITLYTLWQMVEMHEMVPGKRFDRYHELGQHAFGDRLGLWIVVPQQLVVEVGVNIVYMVTGGKSLKKFHDVAGVRRHGGVRGEGQHQDHLLHHDLRVRPLRPLAAPQLQLHLRRLPRRRRHVAQLLHHRVGRVGAQGEDVGRRLPPARDHHAGEGVRLLRRAGGRGVRLRRPQRGAGDPGHHPVHPRQAVQEAHVEGRGGRLRRGGALLLPRRAHRLLGVRKHGRGQHPHHAQQAQVAHRARQHDGRRPCHRQLPDLCHAGV

SEQ ID NO: 23392 - protein, 340 aa, Zea mays subsp. mays
  misc_feature (1)..(340): Ceres Seq. ID no. 12412112
MGTQAPENYPAEKVQDARSAREKAIDDWLPITSSRNAKWWYSAFHNVTAMVGAGVLSLPYAMSELGWGPGIAVLVVSWVITLYTLWQMVEMHEMVPGKRFDRYHELGQHAFGDRLGLWIVVPQQLVVEVGVNIVYMVTGGKSLKKFHDVAGVRRHGGVRGEGQHQDHLLHHDLRVRPLRPLAAPQLQLHLRRLPRRRRHVAQLLHHRVGRVGAQGEDVGRRLPPARDHHAGEGVRLLRRAGGRGVRLRRPQRGAGDPGHHPVHPRQAVQEAHVEGRGGRLRRGGALLLPRRAHRLLGVRKHGRGQHPHHAQQAQVAHRARQHDGRRPCHRQLPDLCHAGV

SEQ ID NO: 23393 - protein, 291 aa, Zea mays subsp. mays
  misc_feature (1)..(291): Ceres Seq. ID no. 12412113
MVGAGVLSLPYAMSELGWGPGIAVLVVSWVITLYTLWQMVEMHEMVPGKRFDRYHELGQHAFGDRLGLWIVVPQQLVVEVGVNIVYMVTGGKSLKKFHDVAGVRRHGGVRGEGQHQDHLLHHDLRVRPLRPLAAPQLQLHLRRLPRRRRHVAQLLHHRVGRVGAQGEDVGRRLPPARDHHAGEGVRLLRRAGGRGVRLRRPQRGAGDPGHHPVHPRQAVQEAHVEGRGGRLRRGGALLLPRRAHRLLGVRKHGRGQHPHHAQQAQVAHRARQHDGRRPCHRQLPDLCHAGV

SEQ ID NO: 23394 - DNA, 1144 bp, Zea mays subsp. mays
  misc_feature (1)..(1144): Ceres Seq. ID no. 12412127
ctcggaaggatggcggcggcggtttccagggccatctgcgtccagaaaccgggctccaaatgcagcagggacagggaagcgacctccttcgcccgccgaacggtcgcggcgccgaggcccccgcgcgccaaagccgccggcgtcatccgctccgactccggcgcgggacggggccagcagtgctcgccgctgagggccgtcgttgacgccgcgtcgatacagacgaccaaaaagagcaaatggcgcctcagtctcccgcgcgcaagctacaacggttcagggtccggtgctgcggcggctgagccgtctaccgtgggagacaccttggaacgggaggagggcggcggcacagaggcaggcgcttcggctgatgagtcatccaaccggaagcagccgccccctgttgaccccaagattgagaaggacctcaagaaggtagttcaaaagactgcggcaacctttgcaccaagggcgtccacgaaaacaaagaaccctgctgtccctggaagtaccctgtacaccgtctttgaagtccagggctatgtttccatgctgttgggcggagcactttccttcaatctcatattcccatcgaatgagccagacatctggaggttaatgggaatgtggtccatttggatgttcactataccttcgcttcgggctcgtgactgctccaataaagagaaagaagctctcaactacttatttctcctgattcctctgatcaacgttatgattccattcttcgtgaagtcctttgctgttgtttggtcagcagatacagttgctttcttcgtgatgtatgcatggaagcttggatggctgcaaaggttgaaatgaagatttttggtgtgctctcttggtgatgtgtgtatgaaagcttggatatttggtttgaaaaggtggagtcggtagcttttttgctgagagaaacatttgtcctcaaaattttcacatcttttggagggagctgcatgattagtttattccaagatttagttcatatagccttttatatcttgtgtatatgcagggagtatgaaaaaacagcctttcacatttaagtgataaatatatgtacctgaagtctgaacatttttgttgactacgaactgaacagctctaaatggttcttgatttc

SEQ ID NO: 23395 - protein, 280 aa, Zea mays subsp. mays
  misc_feature (1)..(280): Ceres Seq. ID no. 12412128
LGRMAAAVSRAICVQKPGSKCSRDREATSFARRTVAAPRPPRAKAAGVIRSDSGAGRGQQCSPLRAVVDAASIQTTKKSKWRLSLPRASYNGSGSGAAAAEPSTVGDTLEREEGGGTEAGASADESSNRKQPPPVDPKIEKDLKKVVQKTAATFAPRASTKTKNPAVPGSTLYTVFEVQGYVSMLLGGALSFNLIFPSNEPDIWRLMGMWSIWMFTIPSLRARDCSNKEKEALNYLFLLIPLINVMIPFFVKSFAVVWSADTVAFFVMYAWKLGWLQRLK

SEQ ID NO: 23396 - protein, 277 aa, Zea mays subsp. mays
  misc_feature (1)..(277): Ceres Seq. ID no. 12412129
MAAAVSRAICVQKPGSKCSRDREATSFARRTVAAPRPPRAKAAGVIRSDSGAGRGQQCSPLRAVVDAASIQTTKKSKWRLSLPRASYNGSGSGAAAAEPSTVGDTLEREEGGGTEAGASADESSNRKQPPPVDPKIEKDLKKVVQKTAATFAPRASTKTKNPAVPGSTLYTVFEVQGYVSMLLGGALSFNLIFPSNEPDIWRLMGMWSIWMFTIPSLRARDCSNKEKEALNYLFLLIPLINVMIPFFVKSFAVVWSADTVAFFVMYAWKLGWLQRLK

SEQ ID NO: 23397 - DNA, 1721 bp, Zea mays subsp. mays
  misc_feature (1)..(1721): Ceres Seq. ID no. 12412138
acattctcttgtctcttgcacatcccccgcttccttcttggtcgtttctccccttctgatccgtgctagccagcttgcgttgtggctgcttgtcgccagatctacctatccaccgtaccacagtcgtccacagcgcgcgcttacgatggcggtcgccgccgctcgccttcttcttcgcgtcgtcgtcctcgcgctcctcgcagccgcgcanaggtccgtcgggaagagcgccgtgctgtctctgcgggagttggatggacgacgacggagtgccgcgacgacggatacccggagcagccgctactacgtcgacgcaatgcttgctgaaacgctaggggagcacaagaaagctggggcagcaacaagcgtgctagagctcaagcgccactccctcactgccattcctgaagaccccgtcgcccgcgaccggtaccttcgccgtctcctcgcanccgacgagtcgcgcgccaactcattccagccccgccgtaacaaggacagggcatcagcgtccacgcagtccgcctcggcagaggtcccgctgacctcgggcatccggctccagacgctcaactacgtcaccaccatctctctcggcggcagctccggctcgcccgccgcgaacctcaccgtcatcgtggacacggggagcgacctcacctgggtgcagtgcaagccgtgcagcgcgtgctacgcgcagcgcgacccgctcttcgacccagcgggctccgccacctacgctgcggtccggngcaacgcctncgcgtgcgcggactccctcagggccgccaccggcacgccgggatcctgtggttcgacgggggcaggcaacgagaagtgctactacgcgctagcctacggcgacgggtcgttcagccgcggcgtgctggccacggacacggtcgcgctcggcggcgccagcctgggcgggttcgtgttcgggtgcgggctcagcaaccgcggcctgttcggcggcacggcggggctcatggggctcggccgcaccgagctctcgctggtgtcccagaccgcgtcccggttacggcggcgtgttctcctactgccatgccggcggccacctncggcgacgcctcaggctcgctctccctcggcggcggggacgacgcggcgtcatcctaccgcaacacgacgcccgtggcgtacacccgcatgatcgccgacccggcgcagccgcccttctacttcctcaacgtcaccggcgcggccgtcggcggcaccgccctcgcggcgcaggggctgggcgcccgcaacgtgctcatcgactccggcacggtgatcacgcgcctggcgccgtccgtgtanccgctgtgcgcgccgagttcacgcgccagttcggcgccgcgggctacccggccgccccggggttctcgatcctggacacgtgctacgacctgacggggcacgacgaggtgaaggtgccgctntgacgctgcggctggagggcggggcggacgtgaccgtggacgcggctgggatgctgttcgtcgtgaggaaggacggctcgcaggtgtgcctggccatggcgagtctgtcgtacgaggacgagacgcctatcattggcaactaccagcagaagaacaagagggtggtgtatgacacgctggggtccaggctaggcttcgctgacgaggactgcaactatgtatagagacttgacagggaggaggatgtggaatatcggatttctagttatatgttgc

SEQ ID NO: 23398 - protein, 390 aa, Zea mays subsp. mays
  misc_feature (1)..(390): Ceres Seq. ID no. 12412139
  misc_feature (70)..(70): Xaa is any aa, unknown or other
  misc_feature (151)..(151): Xaa is any aa, unknown or other
  misc_feature (251)..(251): Xaa is any aa, unknown or other
  misc_feature (254)..(254): Xaa is any aa, unknown or other
  misc_feature (361)..(361): Xaa is any aa, unknown or other
HSLVSCTSPASFLVVSPLLIRASQLALWLLVARSTYPPYHSRPQRALTMAVAAARLLLRVVVLALLAAAXRSVGKSAVLSLRELDGRRRSAATTDTRSSRYYVDAMLAETLGEHKKAGAATSVLELKRHSLTAIPEDPVARDRYLRRLLAXDESRANSFQPRRNKDRASASTQSASAEVPLTSGIRLQTLNYVTTISLGGSSGSPAANLTVIVDTGSDLTWVQCKPCSACYAQRDPLFDPAGSATYAAVRXNAXACADSLRAATGTPGSCGSTGAGNEKCYYALAYGDGSFSRGVLATDTVALGGASLGGFVFGCGLSNRGLFGGTAGLMGLGRTELSLVSQTASRLRRRVLLLPCRRPPXATPQARSPSAAGTTRRHPTATRRPWRTPA

SEQ ID NO: 23399 - protein, 342 aa, Zea mays subsp. mays
  misc_feature (1)..(342): Ceres Seq. ID no. 12412140
  misc_feature (22)..(22): Xaa is any aa, unknown or other
  misc_feature (103)..(103): Xaa is any aa, unknown or other
  misc_feature (203)..(203): Xaa is any aa, unknown or other
  misc_feature (206)..(206): Xaa is any aa, unknown or other
  misc_feature (313)..(313): Xaa is any aa, unknown or other
MAVAAARLLLRVVVLALLAAAXRSVGKSAVLSLRELDGRRRSAATTDTRSSRYYVDAMLAETLGEHKKAGAATSVLELKRHSLTAIPEDPVARDRYLRRLLAXDESRANSFQPRRNKDRASASTQSASAEVPLTSGIRLQTLNYVTTISLGGSSGSPAANLTVIVDTGSDLTWVQCKPCSACYAQRDPLFDPAGSATYAAVRXNAXACADSLRAATGTPGSCGSTGAGNEKCYYALAYGDGSFSRGVLATDTVALGGASLGGFVFGCGLSNRGLFGGTAGLMGLGRTELSLVSQTASRLRRRVLLLPCRRPPXATPQARSPSAAGTTRRHPTATRRPWRTPA

SEQ ID NO: 23400 - protein, 285 aa, Zea mays subsp. mays
  misc_feature (1)..(285): Ceres Seq. ID no. 12412141
  misc_feature (46)..(46): Xaa is any aa, unknown or other
  misc_feature (146)..(146): Xaa is any aa, unknown or other
  misc_feature (149)..(149): Xaa is any aa, unknown or other
  misc_feature (256)..(256): Xaa is any aa, unknown or other
MLAETLGEHKKAGAATSVLELKRHSLTAIPEDPVARDRYLRRLLAXDESRANSFQPRRNKDRASASTQSASAEVPLTSGIRLQTLNYVTTISLGGSSGSPAANLTVIVDTGSDLTWVQCKPCSACYAQRDPLFDPAGSATYAAVRXNAXACADSLRAATGTPGSCGSTGAGNEKCYYALAYGDGSFSRGVLATDTVALGGASLGGFVFGCGLSNRGLFGGTAGLMGLGRTELSLVSQTASRLRRRVLLLPCRRPPXATPQARSPSAAGTTRRHPTATRRPWRTPA

SEQ ID NO: 23401 - DNA, 1639 bp, Zea mays subsp. mays
  misc_feature (1)..(1639): Ceres Seq. ID no. 12412148
gtctttggactcggtaatcccggtcctgtcctcccccgaccaaacacagtccctggatccatgggtgtcgaggaggagcgcgacggcgaggagcaacgccgccccgctcctctcctccaccccgccagccgcggcggacccgcagcagcagcagtaccagttcctgggccggagcacctcttcagtgctgcgcggcggtggcgggggctgggaagggcctgaggtgagcgccgacgaggtcaggtcggccgctggcttccacacgttccagggcccacctcccaacggcgacaacgcctatgcttacccgccgtccattcatagcgccatgctctccccgtccccatctcatgccccaccgtctccccatccaaatgaagggttggcgattgttcctcaagggccatatccgtatggtggcagttaccagccttctgagagcgtcgggagggatgtactggatgaggtggagatccgacagctactcattgaccatattggacatcgatgctgttggggaagtcaccctgcccgcacatggaaaattacctccattgaggactgcaatgtctatgttggcaccttggaaaccttcatcgaggaaagatacattattacaaaaaaggagccctttgaaagtgggaatatagatggaagagaaaaaggtcctttgcctggattgtgggaacttgatttgaggtctaagtttcctgtactttttgtaccagagaaagaagtgaccgtcaagattccacattcagatattattgaaaagtgctcagattgtgagggtcgtggagagaaaccatgccctacatgcaatgctggtcaggctcacgggttttataaagcaaatcagatgacccagtgtggtgcatgtcatggcagaggtttacttgctcaccaagatggatctgatacagtatgtggaatgtgcaatggtaaaggaatgttaccttgtatagcatgtggatcacgtggattagtgacatgcaacacatgtactggatatggttccctacttgcacaaagcatggctcatgttcaatggaagacgctgtcagctagaaaagttagtgcagctagaggggctgcttcggtccctgaagaagttttccacagagccaaaggagtgcagctatgcaacatacaggcataccagtgcactcctgcattttttgctgattcatacccactcaaccagttttcatcagaagtcatcgctagccggctgccagttccaccatctgcaagggttatttccgagagacacatcatttcagttgtgcctgtaacccgtgtcacaatggcgcgtcgcaagcagtcatttagcttctatgtcgttggctacagcagggatgtgttcataagagactatccttcgaagttttgctggggcctctgctgctgcttcgagtggctggggaaatagttatttcctgggcacgaatgaatgccttctttcagtgtgcagtgtttcattgtacagaaggctgcgtgattcttgtattttctattaaagaagatatctgtgcgtattgcagtattagattctgcatatttggatttcctgtgtataagtacatcactgtatatattgttcagtgaaaataaaaaatggcgacgtctggccatttcc

SEQ ID NO: 23402 - protein, 476 aa, Zea mays subsp. mays
  misc_feature (1)..(476): Ceres Seq. ID no. 12412149
SLDSVIPVLSSPDQTQSLDPWVSRRSATARSNAAPLLSSTPPAAADPQQQQYQFLGRSTSSVLRGGGGGWEGPEVSADEVRSAAGFHTFQGPPPNGDNAYAYPPSIHSAMLSPSPSHAPPSPHPNEGLAIVPQGPYPYGGSYQPSESVGRDVLDEVEIRQLLIDHIGHRCCWGSHPARTWKITSIEDCNVYVGTLETFIEERYIITKKEPFESGNIDGREKGPLPGLWELDLRSKFPVLFVPEKEVTVKIPHSDIIEKCSDCEGRGEKPCPTCNAGQAHGFYKANQMTQCGACHGRGLLAHQDGSDTVCGMCNGKGMLPCIACGSRGLVTCNTCTGYGSLLAQSMAHVQWKTLSARKVSAARGAASVPEEVFHRAKGVQLCNIQAYQCTPAFFADSYPLNQFSSEVIASRLPVPPSARVISERHIISVVPVTRVTMARRKQSFSFYVVGYSRDVFIRDYPSKFCWGLCCCFEWLGK

SEQ ID NO: 23403 - protein, 367 aa, Zea mays subsp. mays
  misc_feature (1)..(367): Ceres Seq. ID no. 12412150
MLSPSPSHAPPSPHPNEGLAIVPQGPYPYGGSYQPSESVGRDVLDEVEIRQLLIDHIGHRCCWGSHPARTWKITSIEDCNVYVGTLETFIEERYIITKKEPFESGNIDGREKGPLPGLWELDLRSKFPVLFVPEKEVTVKIPHSDIIEKCSDCEGRGEKPCPTCNAGQAHGFYKANQMTQCGACHGRGLLAHQDGSDTVCGMCNGKGMLPCIACGSRGLVTCNTCTGYGSLLAQSMAHVQWKTLSARKVSAARGAASVPEEVFHRAKGVQLCNIQAYQCTPAFFADSYPLNQFSSEVIASRLPVPPSARVISERHIISVVPVTRVTMARRKQSFSFYVVGYSRDVFIRDYPSKFCWGLCCCFEWLGK

SEQ ID NO: 23404 - DNA, 1252 bp, Zea mays subsp. mays
  misc_feature (1)..(1252): Ceres Seq. ID no. 12412175
atgcagcagcgaacaacacaaattaagtagtggagtgtcagaacttgggaggcacaaattaagtacaaagcagtctaattaatgacgggcccgatggagattccggtgatcgatctcggcggcctcaacggcggcggcgaggagaggtcgcggaccttggcggagctccacgacgcctgcaaggactggggcttcttctgggtggagaaccacggcgtggacgcgccgctgatggacgaggtcaagcgcttcgtctacggccactacgaggagcacctggaggccaagttctacgcctccgccctcgccatggacctcgaggccgccaccagaggtgacactgatgagaagccctccgacgaggtggactgggagtccacctacttcatccagcaccaccccaagaccaacgtcgccgacttcccagagatcacgccgccgacacgagagacgctggacgcgtacgtcgcccagatggtgtccctcgcggagcgtctggcggagtgcatgagcctcaacctgggcctccccggcgcccacgtggccgccaccttcgcgccgccgttcgtgggcaccaagttcgccatgtacccgtcctgcccgcgcccggagctggtgtggggcctgcgcgcgcacaccgacgccggcggcatcatcctgctcctccaggacgacgtcgtgggcggcctcgagttcctcagggccggcgcccactgggtccccgtcggccccaccaaggggggcaggctcttcgtcaacatcggggaccagatcgaggtcctcagcgccggcgcctaccggagcgtcctgcaccgcgtcgcggccggggaccagggccgccgcctgtccgtggccacgttctacaaccctggcaccgacgccgtggtcgcgccagcgcccggcagggacgatcagggcgccggcgccgccgcgtaccccggtccctacaggttcggggactacctcgactactaccagggcaccaagttcggcgacaaggacgccaggttccaggccgtcaagaagctgctcggctaagcgaacagctgcaagtaggcagaggcagcttagctcgtggactatgcatagtttcaagcttgctgcttgcttcttgttcgatccattgtctgcatgcgtactgttgcgtgtttaaatttagcaaatcttatacgtagtcgttactggtactacgtattctgtggttgacaatacattgttgcggtttaagggcgcatccgtttggtggacttgc

SEQ ID NO: 23405 - protein, 318 aa, Zea mays subsp. mays
  misc_feature (1)..(318): Ceres Seq. ID no. 12412176
MTGPMEIPVIDLGGLNGGGEERSRTLAELHDACKDWGFFWVENHGVDAPLMDEVKRFVYGHYEEHLEAKFYASALAMDLEAATRGDTDEKPSDEVDWESTYFIQHHPKTNVADFPEITPPTRETLDAYVAQMVSLAERLAECMSLNLGLPGAHVAATFAPPFVGTKFAMYPSCPRPELVWGLRAHTDAGGIILLLQDDVVGGLEFLRAGAHWVPVGPTKGGRLFVNIGDQIEVLSAGAYRSVLHRVAAGDQGRRLSVATFYNPGTDAVVAPAPGRDDQGAGAAAYPGPYRFGDYLDYYQGTKFGDKDARFQAVKKLLG

SEQ ID NO: 23406 - protein, 314 aa, Zea mays subsp. mays
  misc_feature (1)..(314): Ceres Seq. ID no. 12412177
MEIPVIDLGGLNGGGEERSRTLAELHDACKDWGFFWVENHGVDAPLMDEVKRFVYGHYEEHLEAKFYASALAMDLEAATRGDTDEKPSDEVDWESTYFIQHHPKTNVADFPEITPPTRETLDAYVAQMVSLAERLAECMSLNLGLPGAHVAATFAPPFVGTKFAMYPSCPRPELVWGLRAHTDAGGIILLLQDDVVGGLEFLRAGAHWVPVGPTKGGRLFVNIGDQIEVLSAGAYRSVLHRVAAGDQGRRLSVATFYNPGTDAVVAPAPGRDDQGAGAAAYPGPYRFGDYLDYYQGTKFGDKDARFQAVKKLLG

SEQ ID NO: 23407 - protein, 268 aa, Zea mays subsp. mays
  misc_feature (1)..(268): Ceres Seq. ID no. 12412178
MDEVKRFVYGHYEEHLEAKFYASALAMDLEAATRGDTDEKPSDEVDWESTYFIQHHPKTNVADFPEITPPTRETLDAYVAQMVSLAERLAECMSLNLGLPGAHVAATFAPPFVGTKFAMYPSCPRPELVWGLRAHTDAGGIILLLQDDVVGGLEFLRAGAHWVPVGPTKGGRLFVNIGDQIEVLSAGAYRSVLHRVAAGDQGRRLSVATFYNPGTDAVVAPAPGRDDQGAGAAAYPGPYRFGDYLDYYQGTKFGDKDARFQAVKKLLG

SEQ ID NO: 23408 - DNA, 1597 bp, Zea mays subsp. mays
  misc_feature (1)..(1597): Ceres Seq. ID no. 12412195
gatgcaaacagcaccattcggtcgctccagcttttgtgcacgtccactgtgtccctcctcgctacccccgctttttgtgcgcggtggcaacgtgcgacagccgagaggcagaatgacgaagcaagtggtggtggtggacacagctctggtggcgccgagcgaggagacgccgcggcagccgctgtggctgtccaaccttgacctggccgtgccgaggacgcacacgccgctggtctactactacccggcgccgggcacgggctccttcgcgccggaccggctgagggccgcattgggcgccgctctggtgccattctacccacttgccgggcgcctcggcgttggcccggacggccggctgcagatcgagtgcaacagcaagggcgcgctcttcgtcgtcgccaacgcagacctcaccggcgcggacgtcttcgacgactacgagccgtcgtcggagatcaggaacacttttgtgccgttaggggagtccggcgaggcgaacaacagccccatatccatgttccaggtgacttttctcaagtgcggcggcgtggtgctaggaaccgccatccaccacgcggccatggacggcgtgggcgcgttccagtttatgcagacgtggtccggggtggcacgcggcctggacgtggcggaggcgtgcgggccgcagccgttccacgaccggacgctcctgcacgcgcggcgcccgccgtgcccgacatccgaccacttcgtctactccccggcgttcctcagcggccgcccccggccctacgtcacccgcatctactccgtctcgccgaagctcctcgccgacgtcaagtcgcgctgcgcgccaggcgtgtccacctactgcgccgtcaccgcgcacctctggcgctgcgtgtgcgtcgcgcgcgggctagcgccgggcgcggacacccgcctcagcctgccggccaacgtccgccaccgcctgcgccccccgctcccgcgcaccttcttcggcaacgccgtcgtgcgcgaccacgtcaccgcccccgtcagcaccgtcctcggcgcccctctcgggtccgtggcggagaccatcaagaaggcggtggaccgcgtggacgacgccttcgcgcggtcggtgctggactacctggagctgcagaatgcaggcggcaagcagctgagcggccaggctcaggcccaggcgcccagggagcagctcgtaccggcgacggacctgtgggcggtgagctggctggggatggccatgtacgacgccgacttcggctcaggcgcgccgcggttcgtcgcgccggcgcagatgttcggcatcggcacggcgtatatgacgccgcgcggtccggacagggacgacggcatcgccgtgctcatctctctggagcccgagtacctgtcgtgctttgagaaggtcttcttctataacgagtgatgtctcaggtctggagttcaaggatgtgaacgtgtgaatctccgttcgagtagtaagctatttttcctttccctttttttttgtacgtctgagcggtcccaccgagtattctaggtattccttgaaatacttattgttttggtcaaataaataaatatctgccttgcgttattg

SEQ ID NO: 23409 - protein, 473 aa, Zea mays subsp. mays
  misc_feature (1)..(473): Ceres Seq. ID no. 12412196
MQTAPFGRSSFCARPLCPSSLPPLFVRGGNVRQPRGRMTKQVVVVDTALVAPSEETPRQPLWLSNLDLAVPRTHTPLVYYYPAPGTGSFAPDRLRAALGAALVPFYPLAGRLGVGPDGRLQIECNSKGALFVVANADLTGADVFDDYEPSSEIRNTFVPLGESGEANNSPISMFQVTFLKCGGVVLGTAIHHAAMDGVGAFQFMQTWSGVARGLDVAEACGPQPFHDRTLLHARRPPCPTSDHFVYSPAFLSGRPRPYVTRIYSVSPKLLADVKSRCAPGVSTYCAVTAHLWRCVCVARGLAPGADTRLSLPANVRHRLRPPLPRTFFGNAVVRDHVTAPVSTVLGAPLGSVAETIKKAVDRVDDAFARSVLDYLELQNAGGKQLSGQAQAQAPREQLVPATDLWAVSWLGMAMYDADFGSGAPRFVAPAQMFGIGTAYMTPRGPDRDDGIAVLISLEPEYLSCFEKVFFYNE

SEQ ID NO: 23410 - protein, 436 aa, Zea mays subsp. mays
  misc_feature (1)..(436): Ceres Seq. ID no. 12412197
MTKQVVVVDTALVAPSEETPRQPLWLSNLDLAVPRTHTPLVYYYPAPGTGSFAPDRLRAALGAALVPFYPLAGRLGVGPDGRLQIECNSKGALFVVANADLTGADVFDDYEPSSEIRNTFVPLGESGEANNSPISMFQVTFLKCGGVVLGTAIHHAAMDGVGAFQFMQTWSGVARGLDVAEACGPQPFHDRTLLHARRPPCPTSDHFVYSPAFLSGRPRPYVTRIYSVSPKLLADVKSRCAPGVSTYCAVTAHLWRCVCVARGLAPGADTRLSLPANVRHRLRPPLPRTFFGNAVVRDHVTAPVSTVLGAPLGSVAETIKKAVDRVDDAFARSVLDYLELQNAGGKQLSGQAQAQAPREQLVPATDLWAVSWLGMAMYDADFGSGAPRFVAPAQMFGIGTAYMTPRGPDRDDGIAVLISLEPEYLSCFEKVFFYNE

SEQ ID NO: 23411 - protein, 301 aa, Zea mays subsp. mays
  misc_feature (1)..(301): Ceres Seq. ID no. 12412198
MFQVTFLKCGGVVLGTAIHHAAMDGVGAFQFMQTWSGVARGLDVAEACGPQPFHDRTLLHARRPPCPTSDHFVYSPAFLSGRPRPYVTRIYSVSPKLLADVKSRCAPGVSTYCAVTAHLWRCVCVARGLAPGADTRLSLPANVRHRLRPPLPRTFFGNAVVRDHVTAPVSTVLGAPLGSVAETIKKAVDRVDDAFARSVLDYLELQNAGGKQLSGQAQAQAPREQLVPATDLWAVSWLGMAMYDADFGSGAPRFVAPAQMFGIGTAYMTPRGPDRDDGIAVLISLEPEYLSCFEKVFFYNE

SEQ ID NO: 23412 - DNA, 1380 bp, Zea mays subsp. mays
  misc_feature (1)..(1380): Ceres Seq. ID no. 12412233
atcaaaggcgtaaactcggcgtagacggagactgcagacgcccggaccacaggaacaccgaagtaccgaacactaccggccacacgctcgagaataggcggcggtgcaggtcctcctccatctctgtcgtgggttcaacttcactgtgaatacgctgacgctacgagaagtcatcacggaaggggtctcgaagcaaggtgcaaagactcacctgccgtctctgatgggctttgctggctgggtatccatgctgctcttcctcctggtcgccggtgctgtagcaaatgaccagatcttcaccacttcaggtgtgccatttgggcggagttcgcgtgagccaagttaccgcgtcgaattccatcctgttgattcaccattccatccagagaatggtcaagaatcggtaccaatggctagtcatgatgggaaacgttataaatgctttctaccagttgaagaaactaaaaccatgaagtcaatgcttccgcaaaatgcaactaatgttataatagaaagtgaaaggagaattaagccaaaggagccagatgagttacttgaggttctcaaggaccagtgcttctacaggcatgaaggttggtggtcgtatgaattctgttatcatgggaaaatcagacaggtccatgtagacgacgataaggttatccaagaatttgttctaggcgaattcgatgacgacgcgactgctgcataccatgaaaatatcacttctgagttagttgacgatgaccatcatgtgaaagatatatctcagaggtatcatgttcacttgtatacaaatgggactgtatgcgatctcacagatattccgcgggagacagaggttagatttgtctgctcggagcctactgtactgattagttcagtcaaggagatctcttcctgcagatatgttgtaacgattcaaagtcccatgctttgcaaaaacccgttattccaggaagaaaaacgaaccctctccatccactgcaatgagttgcctgctagagcggaatccagcgcggaggatgactcgcttccaaaagaagctcagatttccatcatccccgatcaggatgagctacatgatttcccagcctatgctacttgatttgcctccaataattatgtttgatgtagaaaaaaaaacaccattttggaggcgcaggggcaacttagcaacactatgtattaactatctcgtagatactacagcagaggctccttgtaaagcaggttgagacgatcattctgcagttcttattatataggatgattacgaaggtaacatgtttgggacagtaacatttgcttgaaatgtatatagtctacaacaagaataatgccagcattcttgaaatgtaggtgtgcgagcacttttac

SEQ ID NO: 23413 - protein, 294 aa, Zea mays subsp. mays
  misc_feature (1)..(294): Ceres Seq. ID no. 12412234
MGFAGWVSMLLFLLVAGAVANDQIFTTSGVPFGRSSREPSYRVEFHPVDSPFHPENGQESVPMASHDGKRYKCFLPVEETKTMKSMLPQNATNVIIESERRIKPKEPDELLEVLKDQCFYRHEGWWSYEFCYHGKIRQVHVDDDKVIQEFVLGEFDDDATAAYHENITSELVDDDHHVKDISQRYHVHLYTNGTVCDLTDIPRETEVRFVCSEPTVLISSVKEISSCRYVVTIQSPMLCKNPLFQEEKRTLSIHCNELPARAESSAEDDSLPKEAQISIIPDQDELHDFPAYAT

SEQ ID NO: 23414 - protein, 286 aa, Zea mays subsp. mays
  misc_feature (1)..(286): Ceres Seq. ID no. 12412235
MLLFLLVAGAVANDQIFTTSGVPFGRSSREPSYRVEFHPVDSPFHPENGQESVPMASHDGKRYKCFLPVEETKTMKSMLPQNATNVIIESERRIKPKEPDELLEVLKDQCFYRHEGWWSYEFCYHGKIRQVHVDDDKVIQEFVLGEFDDDATAAYHENITSELVDDDHHVKDISQRYHVHLYTNGTVCDLTDIPRETEVRFVCSEPTVLISSVKEISSCRYVVTIQSPMLCKNPLFQEEKRTLSIHCNELPARAESSAEDDSLPKEAQISIIPDQDELHDFPAYAT

SEQ ID NO: 23415 - protein, 232 aa, Zea mays subsp. mays
  misc_feature (1)..(232): Ceres Seq. ID no. 12412236
MASHDGKRYKCFLPVEETKTMKSMLPQNATNVIIESERRIKPKEPDELLEVLKDQCFYRHEGWWSYEFCYHGKIRQVHVDDDKVIQEFVLGEFDDDATAAYHENITSELVDDDHHVKDISQRYHVHLYTNGTVCDLTDIPRETEVRFVCSEPTVLISSVKEISSCRYVVTIQSPMLCKNPLFQEEKRTLSIHCNELPARAESSAEDDSLPKEAQISIIPDQDELHDFPAYAT

SEQ ID NO: 23416 - DNA, 1659 bp, Zea mays subsp. mays
  misc_feature (1)..(1659): Ceres Seq. ID no. 12412308
atttccgttggttcttgacctcagctcgctcctctcactcacctctatatatgccccgccctcttgcccgtgttggtggtaccccgcgtcgccctccgtcgtctcagcgtatgttgtgcatgtgaagagagagaggaagagggtgacgagcgagaaaaaagctagtagagtgatagcttgacaagacgcattgaagcgaaggccacgcataccaaagcaacctcaccatcgctcgcaagctactcgatcaaggacattattgtcgcaacgagctagcaagaataatccgcgttagtttcgcgaaggtggtacatatggctcgcatcctcgtgctggctctgctcaccatcgcgagcctcctcctgccgccggtcgtcgcgagccagcaggcggcggccaagtgcgagtacagaaagcactccggccaccggtacaggcacccggtgggcgtgcggaagatcgtggtggacgcgggcggcgccggcgacttcgtctccatccagcgcgccgtcgactccgtgccggagggcaacaccgtgcgcgtcatcgtgcagatcaacgccggcacgtacatagagaaggtggtagtgccggcgtcgaagccgtacgtcacgttccagggcgccgggcgcgacgtgacggtggtggagtggcacgaccgggccagcgaccgcggccccgacgggcagccgctccgcacctacaacaccgcctcagtaaccatcctagctaactatttcaacgctaagaacatcagcttcaagaacacagctccggcgccgatgcccggcacgcaaggagggcaggcggtggcgttccgcatctccggcgacaaggccttcttcttcggctgcgggttctacggcgcgcaggacacgctgtgcgacgacgccggccggcactacttccgcgactgctacatcgagggctccatcgacttcgtcttcggcaacgcccgctccctctacaaggactgcgagctgcactcgacggcgcagcggttcggctcggtggcggcgcacgggctgcgcgacccgtgcgagcgcaccggcttcgccttcgtcaactgccgggtgaccggcacggggcggctctacgtggggcgggccatggggcagtactcgcgcaatcgtctacgcctacacctacttcgacagcgtcatcgcgccaggcggctgggatgactgggaccacaccagcaacaagagcatgacggcgttcttcgggatgtacaggaactggggccccggcgtcgacgccgtgcacggcgtctcctgggcgcgagagctcgactacttcgccgcccgccctttcctcggcaagagcttcgtcaacggataccactggctcacacctgatgtctgaaaaacacacaaacacacgcgcgagagtcaggagacacatcgattacagcaaaccagattaatttattcgtacagcataaagacagaataagacaccatttacaagccactgaatatgtatagtgatccactggcgcagaagtcagattcaagattcatttcgtctataaaaaatagtttccaaaacttcgtcatgtgcagtgtaaactagacagtgagcagtgagtctgttatgtctctgcataggagaccttggatgtgcaattcaagttgttccattatgtttgaatctgcg

SEQ ID NO: 23417 - protein, 289 aa, Zea mays subsp. mays
  misc_feature (1)..(289): Ceres Seq. ID no. 12412309
MARILVLALLTIASLLLPPVVASQQAAAKCEYRKHSGHRYRHPVGVRKIVVDAGGAGDFVSIQRAVDSVPEGNTVRVIVQINAGTYIEKVVVPASKPYVTFQGAGRDVTVVEWHDRASDRGPDGQPLRTYNTASVTILANYFNAKNISFKNTAPAPMPGTQGGQAVAFRISGDKAFFFGCGFYGAQDTLCDDAGRHYFRDCYIEGSIDFVFGNARSLYKDCELHSTAQRFGSVAAHGLRDPCERTGFAFVNCRVTGTGRLYVGRAMGQYSRNRLRLHLLRQRHRARRLG

SEQ ID NO: 23418 - DNA, 1248 bp, Zea mays subsp. mays
  misc_feature (1)..(1248): Ceres Seq. ID no. 12412314
ctccatccccaatctcgggccttgactccttgagcacagcacaccgagtccaagccccgaagcctcctgaccttggttactgggtagcttctgcttggtactccatgcgaggacgacaatggcgatcgccgccgtccccgcctccctccccttcgtcctcctccctccgaggctgttccgcgggagggcggtgaggtggccgcgcccgattagggcttcggcgtcgaccaacgccgggtgacgttgcaggcggagagcggaagtttggggctctggtgagcagggtgggagatctgagggcgctcgtagcctccgtgcctcctgctgttgcttcgatgcagaaaaacattggcccaaattttgttgctggtttctgtgttagcatggcatttgtggctgctgctgcaagacagatctccttaagaagtcgagagcatgttagtaaaggttctgttgctgatcttgtaaggcgtggccagttaaaatcagggcaacgagggattgcaaagctccgtacatacgatgatcctttcaataacccgttagtaaagattgatgagggtacatctactgcacaaatgtttggcaaggagtaccgtttggctcctgttaggcttacgaaagagcagcaagaaatgcaccagaacaggagatcgcgtgcatatcagtggaaaaggccaaccgtgtttctcagggaaggtgattccttacctccagatgttgatccggatacagttagatggattccagcaaaccatcccttttctgctgcttcaagtgaagtggatgaggagaccgccaaacaaaatgtctaccaaaaggatggcatcccatcccgtgtcaaggctgagcatgaagctttgcgggcaaggctagaggcctcaaacgatgttgccagactcccttcggatccaaggagtattcagcgtaatgagagaccaatgagattgtcaggcgagccatctgaacatcttcagagctccaagtttgagaaccaagatagacaactggctactgagtctggtaaacatagctctgatggatgtttacaatcaaacgagccggaagggcaataaaaacgtgtgtatttcagctcttcgaagatatttgctttgttacgtagtgttatcagcttttaggttgtagctgtagatagagaagttttggaacagtgagcttatacggcttactggtttacatagtgagcagttaatatgcgagttgcttgacgtgttgggatcgaatggt

SEQ ID NO: 23419 - protein, 246 aa, Zea mays subsp. mays
  misc_feature (1)..(246): Ceres Seq. ID no. 12412315
MQKNIGPNFVAGFCVSMAFVAAAARQISLRSREHVSKGSVADLVRRGQLKSGQRGIAKLRTYDDPFNNPLVKIDEGTSTAQMFGKEYRLAPVRLTKEQQEMHQNRRSRAYQWKRPTVFLREGDSLPPDVDPDTVRWIPANHPFSAASSEVDEETAKQNVYQKDGIPSRVKAEHEALRARLEASNDVARLPSDPRSIQRNERPMRLSGEPSEHLQSSKFENQDRQLATESGKHSSDGCLQSNEPEGQ

SEQ ID NO: 23420 - protein, 230 aa, Zea mays subsp. mays
  misc_feature (1)..(230): Ceres Seq. ID no. 12412316
MAFVAAAARQISLRSREHVSKGSVADLVRRGQLKSGQRGIAKLRTYDDPFNNPLVKIDEGTSTAQMFGKEYRLAPVRLTKEQQEMHQNRRSRAYQWKRPTVFLREGDSLPPDVDPDTVRWIPANHPFSAASSEVDEETAKQNVYQKDGIPSRVKAEHEALRARLEASNDVARLPSDPRSIQRNERPMRLSGEPSEHLQSSKFENQDRQLATESGKHSSDGCLQSNEPEGQ

SEQ ID NO: 23421 - protein, 165 aa, Zea mays subsp. mays
  misc_feature (1)..(165): Ceres Seq. ID no. 12412317
MFGKEYRLAPVRLTKEQQEMHQNRRSRAYQWKRPTVFLREGDSLPPDVDPDTVRWIPANHPFSAASSEVDEETAKQNVYQKDGIPSRVKAEHEALRARLEASNDVARLPSDPRSIQRNERPMRLSGEPSEHLQSSKFENQDRQLATESGKHSSDGCLQSNEPEGQ

SEQ ID NO: 23422 - DNA, 1107 bp, Zea mays subsp. mays
  misc_feature (1)..(1107): Ceres Seq. ID no. 12412322
accagaaagatagacacgcacgtccgccgtctctgctccggttttcgctgtctcgctgccgtcctaggtttggagccaggtcaccggcgctaggagggcgtgaaatcgagtcgacggtcggcacccggcactcacgcgttctccacctactgctggcgctcctgtgaggcgacgccggaccggccaccccgcatgcgaacagcgcacggaccggccaccggtgtgactcctccatccaaggcttcagctccagaccgagccgccccgccaatcgccgtccgccgaaccaggcctaggaatttgttttcctcatcgaaagttactgcattgtattccatagaaatggctatggggttgattaatgctaatcctataatccatgagaaaaaagaaagacgcatccgacaggcaccagagaccacagatgaaaatgcggcagagtccatagaccagctggaaatatttgatcacattagagatataaaggatccagagcacccatactcactggaacagctgaatgtggtaactgaagactcaattgaactcaatgatgaaagcaatcatgtcagggttattttcaccccaacagtggagcactgcagtatggcaactattattggcctttgcatacgggtgaaacttgtacggagtctccctccttattacaaggtggacataagggttgcccctggatcacacgcaactgaagctgctgtgaataagcaactgaatgacaaagaacgtgttgcggctgcattggaaaacccaaacctactggacatggttgaagagtgcttatcaccaacattcgattgaggtctcagttgttgcacatctgggagccatggtgtttcatgttcagaagccacacaagcttattgccataggaattcactcctgaatattatatctgagggccatggtgtttcatgtgcatgatttttttttttgtcctccgtccctttgagttaatacaattgttatctttttggacatttgttggtgcttgtgacctccctgggcaaagggacctgtaatcagatcttgtgtagtagctttcagagcgtttccagtgccacgccattttgtggctgttgtaccccc

SEQ ID NO: 23423 - protein, 208 aa, Zea mays subsp. mays
  misc_feature (1)..(208): Ceres Seq. ID no. 12412323
MRTAHGPATGVTPPSKASAPDRAAPPIAVRRTRPRNLFSSSKVTALYSIEMAMGLINANPIIHEKKERRIRQAPETTDENAAESIDQLEIFDHIRDIKDPEHPYSLEQLNVVTEDSIELNDESNHVRVIFTPTVEHCSMATIIGLCIRVKLVRSLPPYYKVDIRVAPGSHATEAAVNKQLNDKERVAAALENPNLLDMVEECLSPTFD

SEQ ID NO: 23424 - protein, 158 aa, Zea mays subsp. mays
  misc_feature (1)..(158): Ceres Seq. ID no. 12412324
MAMGLINANPIIHEKKERRIRQAPETTDENAAESIDQLEIFDHIRDIKDPEHPYSLEQLNVVTEDSIELNDESNHVRVIFTPTVEHCSMATIIGLCIRVKLVRSLPPYYKVDIRVAPGSHATEAAVNKQLNDKERVAAALENPNLLDMVEECLSPTFD

SEQ ID NO: 23425 - protein, 156 aa, Zea mays subsp. mays
  misc_feature (1)..(156): Ceres Seq. ID no. 12412325
MGLINANPIIHEKKERRIRQAPETTDENAAESIDQLEIFDHIRDIKDPEHPYSLEQLNVVTEDSIELNDESNHVRVIFTPTVEHCSMATIIGLCIRVKLVRSLPPYYKVDIRVAPGSHATEAAVNKQLNDKERVAAALENPNLLDMVEECLSPTFD

SEQ ID NO: 23426 - DNA, 768 bp, Zea mays subsp. mays
  misc_feature (1)..(768): Ceres Seq. ID no. 12412369
agtaccaccaacaaacttctttctcgccttgcatcggccgccggccctccatccaccgcaccagctagcaacgacgacacgctagccaggtagcgtagccgaccagcctccgcgcgcgcgggcactcagttcgccatggcgcgcctgctccgcgccgccgccggcctcgcgctcctcctggccgtccttgccccggcggcgtcggcgggcggcgacctggcccagctgggcgccgccgtcgtgacgcggcgcggcggcgagcggacgacgtgccgcggaggcacggtgggcgagtgcatggagtacctggacgtggacgcggagggcgaggccgacgtggcgggcatggccaccggcggcggcaagcgccgggtgctgcagggcggctccggctacatcggctacgacgcgctgcgcagggacaacgtgccgtgctcgcagcgcggcgcgtcctactacaactgccagcccggcgccgaggccaacccctactcgcgcggctgcagcgccatcacccagtgcaggggctgatgcctgcctgatgatttccgttccgtttcgtccccagctattagtcgggtcttcaatttaaagaagaagacatgcatggagcgatgtcgtcgtctttgctgtgcgcgctatagcctttctcgtccgcctgaggcacgcatgactcgtccgtcgattattgtgctgcagtggacatgtgtatgtgctcctgtttctagcatatccccttgctttcaggaagaaagtgaaagtaattat

SEQ ID NO: 23427 - protein, 131 aa, Zea mays subsp. mays
  misc_feature (1)..(131): Ceres Seq. ID no. 12412370
MARLLRAAAGLALLLAVLAPAASAGGDLAQLGAAVVTRRGGERTTCRGGTVGECMEYLDVDAEGEADVAGMATGGGKRRVLQGGSGYIGYDALRRDNVPCSQRGASYYNCQPGAEANPYSRGCSAITQCRG

SEQ ID NO: 23428 - protein, 77 aa, Zea mays subsp. mays
  misc_feature (1)..(77): Ceres Seq. ID no. 12412371
MEYLDVDAEGEADVAGMATGGGKRRVLQGGSGYIGYDALRRDNVPCSQRGASYYNCQPGAEANPYSRGCSAITQCRG

SEQ ID NO: 23429 - DNA, 1102 bp, Zea mays subsp. mays
  misc_feature (1)..(1102): Ceres Seq. ID no. 12412419
actgtgtgttccttctccggggaaaccacgaatccaagtactgcacgtcagtatatggtttcgagaaggaggtaatgactaaatacaaagatcagggccctcaaatttaccggaagtttttaagatgttttgaggaccttcctctggcgacaataatagcaggatgtgtgtacactgcacacggcggtatcttccgtggaacaattgtagtgccatcaaagaaatcaaaaaagggaaagaagggtcacaaatacaaggcgaattttactgttgatctgacttccatgaaacttggatccttggatgagttattgaaagcaaggagaactgttctcgaccctccttgggaaggctcaaatttgatccctggggatgtgctgtggtctgacccttccttgcagatgggtctttctccgaataaagaacgaggcataggtttgctttggggtcctgatatcactcagcagtttctgaggacaaatcatttgaagctaatcatcaggtcacatgaaaggtccagacgcgagagacaaagcgacacgatctcttaggaatggataaaggatatacgattgatcatgaagtagaatgtgggaaactaattactctcttcagtgctccggactacccacagtttcaggcttcagaggagcgatacaacaatcgtggagcatatattgtccttagtccacctgattttgctacccctgttttccatagcttcggagctgtaaagcctcgacctgcggcccatccgttctatgattttgaacaagtgatcgactcagatgaagaattggatttaatcgccatggacagcggcacgtcgagcctgtcatgacgactcgccatgtaccttttgcacttagggttgtatttattattatcgctccaattgttgccatggaagcgtggcatcaaggttttttgctgtcgttgttgtaagctaatgccaacgtagtaacgttgcaggtttctggatggcctgagtcctgacatgcacacgccaaatctgatctgttggtttggttgaggttgatttgtatctaaaactaagtgagcgtgagatgtcatctaaaggctgaaggaagtcagcggttgc

SEQ ID NO: 23430 - protein, 182 aa, Zea mays subsp. mays
  misc_feature (1)..(182): Ceres Seq. ID no. 12412420
CVFLLRGNHESKYCTSVYGFEKEVMTKYKDQGPQIYRKFLRCFEDLPLATIIAGCVYTAHGGIFRGTIVVPSKKSKKGKKGHKYKANFTVDLTSMKLGSLDELLKARRTVLDPPWEGSNLIPGDVLWSDPSLQMGLSPNKERGIGLLWGPDITQQFLRTNHLKLIIRSHERSRRERQSDTIS

SEQ ID NO: 23431 - protein, 158 aa, Zea mays subsp. mays
  misc_feature (1)..(158): Ceres Seq. ID no. 12412421
MTKYKDQGPQIYRKFLRCFEDLPLATIIAGCVYTAHGGIFRGTIVVPSKKSKKGKKGHKYKANFTVDLTSMKLGSLDELLKARRTVLDPPWEGSNLIPGDVLWSDPSLQMGLSPNKERGIGLLWGPDITQQFLRTNHLKLIIRSHERSRRERQSDTIS

SEQ ID NO: 23432 - protein, 95 aa, Zea mays subsp. mays
  misc_feature (1)..(95): Ceres Seq. ID no. 12412422
MDKGYTIDHEVECGKLITLFSAPDYPQFQASEERYNNRGAYIVLSPPDFATPVFHSFGAVKPRPAAHPFYDFEQVIDSDEELDLIAMDSGTSSLS

SEQ ID NO: 23433 - DNA, 1738 bp, Zea mays subsp. mays
  misc_feature (1)..(1738): Ceres Seq. ID no. 12412461
taatcgaaaaaggcagcctctcgctgtgtcagttccgctttgtaactgtagaaggagagtgagctcatcatcaagtcgagacgatgggccgcaccgaggcggcggacggcgccgagtccggcgggctgggggtgggggagacggtgcgcgagctgcgggaggcgtacgagggcggcaggacgcggagcctagcgtggcggcaggcgcagctgcggggcctcctccggctcctcgaggagaaggaggtggaggcgttccaggcgctccacaaggacctcggcaagcaccacgccgaggcgtacagggacgaggtcggggtgctcatcaagtccgccaacggcgcgctgcagcagctcggcaaatggatggccccggagaaggtgcgggtcccgctgatcgcttggccggcgaccgcgcaggtggtgccggagccgctcggggtcgtcctcgtcttctcctgctggaacgtccccttgggcctgtcgctggagccgctgatcggggcgatagcggccgggaacgcggtggctctgaagccgtccgagctctcgccgtgcaccgccaggttcctgggcgacaacatcgggaggtacatggactcctcggcggtgaaggtcgtccagggcggccccgacgtcggagtgcagctcatggagcaccgctgggacaaggtcctcttcaccgggagcccccgcatcgcgcgcgccgtgatggccgcggcgtccaggcacctgacgcccgtcgcgctggagctgggcggcaagtgcccctgcatcttcgacgccatgggcagcgcccgggacctgcagatctcggttaaccgcatgatcgcgggcaagtggtcgtcctgcgccggacaggcctgcatcgccatcgactacgtgctcgtcgaggagcgcttcgcgcccatcctgatcaaggtgctcaagtcgacgctgaagaggttcttcccggaagcggaccacatggcacggatcgtgaacgagcgccacttcgagaggctgagtaaccttctcaaagacaggtccgtggcgccgtccgtcctgcacggcggctccatggacagcaagaacttgtacattgagcccacgatactgctgaacccgccgctggactccgcgatcatgaccgaggagatattcgggcccctgctcccgatcatcacggtcaagaacatcgaggacagcatcgccttcgtgaaggccatgccgaagcctctcgccatctacgcgttcacccgggacgccgccctgcggcggcgaatcgtggacgagacgtcgtccgggagcgtcaccttcaacgacgcggtagtgcagtacgcgatagacgggctcccgttcggcggcgtcggccagagcgggttcgggcagtaccatgggaagtactcgttcgagatgttcagccacaagaaggcggtcatgaagcggggctacctcgtggagctgacactcaggtacccgccgtgggacgagagcaaagtcaccctcatgcgctacctctaccgcttcaactacttcgccttcgtcctctctttcctcggggctcaggcgatgaacttcactccagcatcaacgcaaggatcgcacagggattgggcccaatataggcgatgaactggcattgacagtggatggaggaacaagccaatatagacaatatgcagtagatgtcttgtttgtgaggaacatgtgtcatgccgcacttcaaaaccagtaatatgctaacctgcatcctatct

SEQ ID NO: 23434 - protein, 509 aa, Zea mays subsp. mays
  misc_feature (1)..(509): Ceres Seq. ID no. 12412462
MGRTEAADGAESGGLGVGETVRELREAYEGGRTRSLAWRQAQLRGLLRLLEEKEVEAFQALHKDLGKHHAEAYRDEVGVLIKSANGALQQLGKWMAPEKVRVPLIAWPATAQVVPEPLGVVLVFSCWNVPLGLSLEPLIGAIAAGNAVALKPSELSPCTARFLGDNIGRYMDSSAVKVVQGGPDVGVQLMEHRWDKVLFTGSPRIARAVMAAASRHLTPVALELGGKCPCIFDAMGSARDLQISVNRMIAGKWSSCAGQACIAIDYVLVEERFAPILIKVLKSTLKRFFPEADHMARIVNERHFERLSNLLKDRSVAPSVLHGGSMDSKNLYIEPTILLNPPLDSAIMTEEIFGPLLPIITVKNIEDSIAFVKAMPKPLAIYAFTRDAALRRRIVDETSSGSVTFNDAVVQYAIDGLPFGGVGQSGFGQYHGKYSFEMFSHKKAVMKRGYLVELTLRYPPWDESKVTLMRYLYRFNYFAFVLSFLGAQAMNFTPASTQGSHRDWAQYRR

SEQ ID NO: 23435 - protein, 415 aa, Zea mays subsp. mays
  misc_feature (1)..(415): Ceres Seq. ID no. 12412463
MAPEKVRVPLIAWPATAQVVPEPLGVVLVFSCWNVPLGLSLEPLIGAIAAGNAVALKPSELSPCTARFLGDNIGRYMDSSAVKVVQGGPDVGVQLMEHRWDKVLFTGSPRIARAVMAAASRHLTPVALELGGKCPCIFDAMGSARDLQISVNRMIAGKWSSCAGQACIAIDYVLVEERFAPILIKVLKSTLKRFFPEADHMARIVNERHFERLSNLLKDRSVAPSVLHGGSMDSKNLYIEPTILLNPPLDSAIMTEEIFGPLLPIITVKNIEDSIAFVKAMPKPLAIYAFTRDAALRRRIVDETSSGSVTFNDAVVQYAIDGLPFGGVGQSGFGQYHGKYSFEMFSHKKAVMKRGYLVELTLRYPPWDESKVTLMRYLYRFNYFAFVLSFLGAQAMNFTPASTQGSHRDWAQYRR

SEQ ID NO: 23436 - protein, 339 aa, Zea mays subsp. mays
  misc_feature (1)..(339): Ceres Seq. ID no. 12412464
MDSSAVKVVQGGPDVGVQLMEHRWDKVLFTGSPRIARAVMAAASRHLTPVALELGGKCPCIFDAMGSARDLQISVNRMIAGKWSSCAGQACIAIDYVLVEERFAPILIKVLKSTLKRFFPEADHMARIVNERHFERLSNLLKDRSVAPSVLHGGSMDSKNLYIEPTILLNPPLDSAIMTEEIFGPLLPIITVKNIEDSIAFVKAMPKPLAIYAFTRDAALRRRIVDETSSGSVTFNDAVVQYAIDGLPFGGVGQSGFGQYHGKYSFEMFSHKKAVMKRGYLVELTLRYPPWDESKVTLMRYLYRFNYFAFVLSFLGAQAMNFTPASTQGSHRDWAQYRR

SEQ ID NO: 23437 - DNA, 1306 bp, Zea mays subsp. mays
  misc_feature (1)..(1306): Ceres Seq. ID no. 12412486
gcacgagaccattacctagaacatcctaatcgaaaacttcttttcgtttttgtttgtttttggaagaacagacagacttgaaagttgagatatctcactaatctccaaaatgtccctataaaactgatgatctgctgataagacatcccactcgccggccgtccttgaagagcgagcagcaatggcgcaggagatcgagcacacccacatccccatccgcggcctcaacctccacgtcgcacaagtaggcacaggtgaactgggcacggtggtgttcctgcacggcttcccggagatatggtactcgtggcgccaccagatgcgggccgtggccgcggcggggtaccgcgccatcgcgccggactgccgcgggtacggcctgtcggagcagccgccggagcacgaggaggtgtcccttgacgacctcatcgccgacgtgctcggcatcctcgacgccctcagcgtcccgaaggcgttcttggtgggcaaggacttcggcgccatgccgggcgtacgagttcgcgctgcagcacccgggccgcaccctcggcgtggtgtgcctgggcatccccttcaacccggcccccatgtccttcgacgccatcatgcccgaaggattctacatcctgcgctggcgcgagccgggcagggcggaggccgacttcggccggttcgacgtgaggcgtggtgcgcaccatctacgtgctcttcgccggcgccgagatcccgattgccaaggaagggcaggagatcatggacctggccgacctgtccacgcccctcccggagtggttcaccgaggaggacctggacgcctacgccaagctctacgagaagtccggcttcgggtacccgctcaagatgccgtacagatctatgcacaagctcccgaaccggctggacgccaagttccaggtgccggtgttcatggtgatgggggagaaggactacgcgttcaagttcccggggttcgagaccgccatgcgcggcggggtcatggacaacttcatgccggacctcaagatcacctacatccctgaggggagccacttcgtgcaggagcagctcccagagcaggtcaacgacctgctcctcggcttcctcagggaccatccctccgccgcataagcagtgggtgagaccgtcagaataatggaatgcttcctgagcaacggtttctctactctattgccgttgcctggatccatgaccgtgttaattaattaattagtgcatatacttcctactcaaatcagatgtacgttttttttatctgcaataaaaatcatcgtcgctgcattactcg

SEQ ID NO: 23438 - protein, 250 aa, Zea mays subsp. mays
  misc_feature (1)..(250): Ceres Seq. ID no. 12412487
MAQEIEHTHIPIRGLNLHVAQVGTGELGTVVFLHGFPEIWYSWRHQMRAVAAAGYRAIAPDCRGYGLSEQPPEHEEVSLDDLIADVLGILDALSVPKAFLVGKDFGAMPGVRVRAAAPGPHPRRGVPGHPLQPGPHVLRRHHARRILHPALARAGQGGGRLRPVRREAWCAPSTCSSPAPRSRLPRKGRRSWTWPTCPRPSRSGSPRRTWTPTPSSTRSPASGTRSRCRTDLCTSSRTGWTPSSRCRCSW

SEQ ID NO: 23439 - protein, 204 aa, Zea mays subsp. mays
  misc_feature (1)..(204): Ceres Seq. ID no. 12412488
MRAVAAAGYRAIAPDCRGYGLSEQPPEHEEVSLDDLIADVLGILDALSVPKAFLVGKDFGAMPGVRVRAAAPGPHPRRGVPGHPLQPGPHVLRRHHARRILHPALARAGQGGGRLRPVRREAWCAPSTCSSPAPRSRLPRKGRRSWTWPTCPRPSRSGSPRRTWTPTPSSTRSPASGTRSRCRTDLCTSSRTGWTPSSRCRCSW

SEQ ID NO: 23440 - protein, 150 aa, Zea mays subsp. mays
  misc_feature (1)..(150): Ceres Seq. ID no. 12412489
MSFDAIMPEGFYILRWREPGRAEADFGRFDVRRGAHHLRALRRRRDPDCQGRAGDHGPGRPVHAPPGVVHRGGPGRLRQALREVRLRVPAQDAVQIYAQAPEPAGRQVPGAGVHGDGGEGLRVQVPGVRDRHARRGHGQLHAGPQDHLHP

SEQ ID NO: 23441 - DNA, 1315 bp, Zea mays subsp. mays
  misc_feature (1)..(1315): Ceres Seq. ID no. 12412494
actttataccgcccgcccaccactcccctccccgtttctctctgcttcatccttcgctttcccctgcgccaggcccgccccgcccttccagaacgacatcctccttccccgccccctccgatggggaacccgccggagctgtaccacaagatcctcaacatccccaaggacacctcgccgcacgaaatccgcgccgcgtacaagaacctcgtcaagaagtggcaccccgacaagcacccgccgtcgtccaggccggaggccgaggcgcgcttcaaggccatcagcgaggcctacgaggcgctcctggatcagcaggagaacaggggtgtgttcgagctgtgcaacgacggccgggcgggtgagaggacgcgcggcgccttcggcgacggcggcggtggcggcggcggcggaggaggaggcctcggcgccggcgtcggggcccgcatggaggacgcgcagcgacgggttctgcacgaggagcgcgcccggcacgccggcgagggagttcaagaaggtgtacagctccggcgaccccggcgggcgccgcgccttcgccgagttctccagctccatcgtgcgcaaggcgccaccgctggagcgcaagctcgagtgcaccctcgaggagctctgccgcggctgcaagaaggaggtcagcttcacccgcgacgtcgtcaccaagaacgggtcaaccgtgaagaaggaggtgacacagacggtggtggtgaagccagggtggaggaaagggaagcaggtggtgctggaaggcatgggggacgagcgggcggggtgcctgcccggcgacgccatcctcacggtgtccgagaagaggcacccggcgttcaagcgggtgggcgacgacctggtgctcaaggcggaggtgccgctggtgggcgcgctcacgggctggtccttctcgttccgcctcctcggcggcaggaaggtgagctgctcgttccaggacgaggtcgtccgccccggctacgagaaggtgatcgccggcgagggcatgccggtccccgggcagaagggcgcgcgcggcgacctgagggtcaagttggacgtcgtcttccccaaggagctcaccgcagagcagcgcgccggcctcgccgagatcctcagagggtcctgctgatccatcggccccagttccaagcgtatcaggttttcttggccgtgtccgtgtgttaagttttaatatgtatactcatagcgcgtgtgatgagtatataagtacataaagagagagggggcgtcgttgtacatacaggtcgtttatattatatatatataaggataaaaagaaatatgaaacgtg

SEQ ID NO: 23442 - protein, 395 aa, Zea mays subsp. mays
  misc_feature (1)..(395): Ceres Seq. ID no. 12412495
TLYRPPTTPLPVSLCFILRFPLRQARPALPERHPPSPPPPMGNPPELYHKILNIPKDTSPHEIRAAYKNLVKKWHPDKHPPSSRPEAEARFKAISEAYEALLDQQENRGVFELCNDGRAGERTRGAFGDGGGGGGGGGGGLGAGVGARMEDAQRRVLHEERARHAGEGVQEGVQLRRPRRAPRLRRVLQLHRAQGATAGAQARVHPRGALPRLQEGGQLHPRRRHQERVNREEGGDTDGGGEARVEEREAGGAGRHGGRAGGVPARRRHPHGVREEAPGVQAGGRRPGAQGGGAAGGRAHGLVLLVPPPRRQEGELLVPGRGRPPRLREGDRRRGHAGPRAEGRARRPEGQVGRRLPQGAHRRAARRPRRDPQRVLLIHRPQFQAYQVFLAVSVC

SEQ ID NO: 23443 - protein, 376 aa, Zea mays subsp. mays
  misc_feature (1)..(376): Ceres Seq. ID no. 12412496
LYTARPPLPSPFLSASSFAFPCARPAPPFQNDILLPRPLRWGTRRSCTTRSSTSPRTPRRTKSAPRTRTSSRSGTPTSTRRRPGRRPRRASRPSARPTRRSWISRRTGVCSSCATTAGRVRGRAAPSATAAVAAAAEEEASAPASGPAWRTRSDGFCTRSAPGTPAREFKKVYSSGDPGGRRAFAEFSSSIVRKAPPLERKLECTLEELCRGCKKEVSFTRDVVTKNGSTVKKEVTQTVVVKPGWRKGKQVVLEGMGDERAGCLPGDAILTVSEKRHPAFKRVGDDLVLKAEVPLVGALTGWSFSFRLLGGRKVSCSFQDEVVRPGYEKVIAGEGMPVPGQKGARGDLRVKLDVVFPKELTAEQRAGLAEILRGSC

SEQ ID NO: 23444 - protein, 355 aa, Zea mays subsp. mays
  misc_feature (1)..(355): Ceres Seq. ID no. 12412497
MGNPPELYHKILNIPKDTSPHEIRAAYKNLVKKWHPDKHPPSSRPEAEARFKAISEAYEALLDQQENRGVFELCNDGRAGERTRGAFGDGGGGGGGGGGGLGAGVGARMEDAQRRVLHEERARHAGEGVQEGVQLRRPRRAPRLRRVLQLHRAQGATAGAQARVHPRGALPRLQEGGQLHPRRRHQERVNREEGGDTDGGGEARVEEREAGGAGRHGGRAGGVPARRRHPHGVREEAPGVQAGGRRPGAQGGGAAGGRAHGLVLLVPPPRRQEGELLVPGRGRPPRLREGDRRRGHAGPRAEGRARRPEGQVGRRLPQGAHRRAARRPRRDPQRVLLIHRPQFQAYQVFLAVSVC

SEQ ID NO: 23445 - DNA, 1202 bp, Zea mays subsp. mays
  misc_feature (1)..(1202): Ceres Seq. ID no. 12412510
agaagaaagctccaatctttctcgccctctcgcggttcggaggagggacccgggcgcaaagactaaagcgcaggtgagctccgggcggggaagatgttccccagcctgatccaccacgctagccacggccgacccgacgtcgccgtcgccgaggacgcaccacgcagtggctgcgggttagggctgcccgggcacggcggcgggcccagcgtggtgctcacggccgatcccaagcctaggctccgctggacggccgacctccacgaccgtttcgtcgatgccgtcgcccagctcggcgggcctgataaagcaacaccgaaagctatcatgaggacaatgggagtgaagggcctcaccctttttcacttgaaaagccatcttcagaaatacagattgggaagacagtctggaaaagagttaacggagcaatcaaaagatgcttcttaccttatggaagctcaaagtggaacaactttgtctcctagaggttctactccagatgtgaaagagagtcaagaagttaaagaagcactcagagcacaaatggaagtgcaacgaagattgcacgaacaagtggaggtccagaagcatatgcagatccgaatggaggcgaaccagaagtacatcgacacgatactagataaggcgttcaagatagtatctgagcaactgagtggcttcagcatatctgaccaagacctaccgattctcacctctgctagggccatgcttagccctgcagatcacttgagttcgtctgtcttcccccagctctccgtcagctccgttagccttcacaatcctggtcctggaggagggaaaggccttccgcatgttgccgacagccacgtgttctcccagaggccacctgaacaattcaagcgcaaatcacgttgagaagcattgctagctcgacgcagatgcatgacctgatcaagggcacactggaaaatcagaggaatttcgtctgacatgtgcacggtgcaatcgttcgcccatcctcccgtagcacatctgtgaaaatcaaggttatcttggtctatttcggtacatctagactgacctttattaatatctaatgtaatgcctaagtggactagataagtaattcgcttgttgtataaactgcccagctgtaggatccagttttaaagtcctgttccacgcacttaaaacttgggggccgtctcttgggcggcttc

SEQ ID NO: 23446 - protein, 267 aa, Zea mays subsp. mays
  misc_feature (1)..(267): Ceres Seq. ID no. 12412511
MFPSLIHHASHGRPDVAVAEDAPRSGCGLGLPGHGGGPSVVLTADPKPRLRWTADLHDRFVDAVAQLGGPDKATPKAIMRTMGVKGLTLFHLKSHLQKYRLGRQSGKELTEQSKDASYLMEAQSGTTLSPRGSTPDVKESQEVKEALRAQMEVQRRLHEQVEVQKHMQIRMEANQKYIDTILDKAFKIVSEQLSGFSISDQDLPILTSARAMLSPADHLSSSVFPQLSVSSVSLHNPGPGGGKGLPHVADSHVFSQRPPEQFKRKSR

SEQ ID NO: 23447 - protein, 189 aa, Zea mays subsp. mays
  misc_feature (1)..(189): Ceres Seq. ID no. 12412512
MRTMGVKGLTLFHLKSHLQKYRLGRQSGKELTEQSKDASYLMEAQSGTTLSPRGSTPDVKESQEVKEALRAQMEVQRRLHEQVEVQKHMQIRMEANQKYIDTILDKAFKIVSEQLSGFSISDQDLPILTSARAMLSPADHLSSSVFPQLSVSSVSLHNPGPGGGKGLPHVADSHVFSQRPPEQFKRKSR

SEQ ID NO: 23448 - protein, 186 aa, Zea mays subsp. mays
  misc_feature (1)..(186): Ceres Seq. ID no. 12412513
MGVKGLTLFHLKSHLQKYRLGRQSGKELTEQSKDASYLMEAQSGTTLSPRGSTPDVKESQEVKEALRAQMEVQRRLHEQVEVQKHMQIRMEANQKYIDTILDKAFKIVSEQLSGFSISDQDLPILTSARAMLSPADHLSSSVFPQLSVSSVSLHNPGPGGGKGLPHVADSHVFSQRPPEQFKRKSR

SEQ ID NO: 23449 - DNA, 1038 bp, Zea mays subsp. mays
  misc_feature (1)..(1038): Ceres Seq. ID no. 12412533
agttgcctttaagctcgcacgcgaaccgtcccacactctgcgcaagccactgccgctgccgctgccgccgccgccgccgccttcagtctccgtctccaccggtgccctcgtctcccagccgctgccgccgccgccgccgccccgtgagagccggcgcagcaatccggttgcttggggacgcagcgaggatgggcagcaccagcgcgttcgtcatcaggtggatcaacttcttcaccatgatactggcgctactggtggtgggcttcgggttctggatgagcacccacgacgacgagtgcaggcggaccttgaccgtccccgtcatcgccctcggtggagtgatcttcctcatatcgctcgtcggattccttggtgcctggaagaacatctcctgcttgctctggacatatctgatcatgctgttcgtggtcttggtggcaatcatggtgttcacggtgctcgcgtttatcataacaaactccggaagtggccatactgttcctggggctaggtataaagagtaccgtctccaggactacagctcctggtttgtcaaacagctcgatgacacggagaaatgggctcgcctgaaaagctgcctggtgaagatagatgactgcaatagcctgtcgagaagatacaagaccgcgagagaatacaagctcgcggacctcactcccatggagtcgggttgctgccgcccgccagcagagtgcgggttcccagctctgaacgcgtcctatttcgatctgagctatcacccggcgagcgccaacgccgactgcaaactgtacaggaacgcgcgctctgtccggtgctacgactgcggcggcggcggctggagggactgatgtgtgggcccatcctggcttcggccgagttatcttatctatctatagtatcgtgttaccgttcgcttctgtcaccgtgttagtgtccgttctacctttggattaggtgttggtacccctgttgttccctttggttgctcccgctatgaaacgagacgagagaagaatgagcaaggtttttgttcgc

SEQ ID NO: 23450 - protein, 282 aa, Zea mays subsp. mays
  misc_feature (1)..(282): Ceres Seq. ID no. 12412534
LPLSSHANRPTLCASHCRCRCRRRRRLQSPSPPVPSSPSRCRRRRRPVRAGAAIRLLGDAARMGSTSAFVIRWINFFTMILALLVVGFGFWMSTHDDECRRTLTVPVIALGGVIFLISLVGFLGAWKNISCLLWTYLIMLFVVLVAIMVFTVLAFIITNSGSGHTVPGARYKEYRLQDYSSWFVKQLDDTEKWARLKSCLVKIDDCNSLSRRYKTAREYKLADLTPMESGCCRPPAECGFPALNASYFDLSYHPASANADCKLYRNARSVRCYDCGGGGWRD

SEQ ID NO: 23451 - protein, 220 aa, Zea mays subsp. mays
  misc_feature (1)..(220): Ceres Seq. ID no. 12412535
MGSTSAFVIRWINFFTMILALLVVGFGFWMSTHDDECRRTLTVPVIALGGVIFLISLVGFLGAWKNISCLLWTYLIMLFVVLVAIMVFTVLAFIITNSGSGHTVPGARYKEYRLQDYSSWFVKQLDDTEKWARLKSCLVKIDDCNSLSRRYKTAREYKLADLTPMESGCCRPPAECGFPALNASYFDLSYHPASANADCKLYRNARSVRCYDCGGGGWRD

SEQ ID NO: 23452 - protein, 204 aa, Zea mays subsp. mays
  misc_feature (1)..(204): Ceres Seq. ID no. 12412536
MILALLVVGFGFWMSTHDDECRRTLTVPVIALGGVIFLISLVGFLGAWKNISCLLWTYLIMLFVVLVAIMVFTVLAFIITNSGSGHTVPGARYKEYRLQDYSSWFVKQLDDTEKWARLKSCLVKIDDCNSLSRRYKTAREYKLADLTPMESGCCRPPAECGFPALNASYFDLSYHPASANADCKLYRNARSVRCYDCGGGGWRD

SEQ ID NO: 23453 - DNA, 1309 bp, Zea mays subsp. mays
  misc_feature (1)..(1309): Ceres Seq. ID no. 12412564
accgtctcgtacatgcccttatccctctcgccccgcatcccatcacccgcaggccggaacagcagccgtcagccatgcccgcggcggccttcttctccgccgcgctgccccctccctcgcgtacgctgtcccgccgcctcgtcgtgtcccgcgcggctgcggccgcggcctcagcatcagcatcctcgtcctccgggtggcaaggtggcgggggagtggagttccagggcaaggtggggttcctggggctcgggatcatgggcgcgcccatggcatccaacctcatcaaggcaggctgcgacgtcacggtttggaacaggaccaagagcaagtgcgatcccctcctcagtctcgatgccaagtacgagcctacaccggcccaagtcgcttcatcttgtgacgtgacattcgcgattctcgctgatccacaaagcgcggctgaggttgcatgtgggtccagtggagctgctgaagggttggcccctgggaaaggctatgtcgatgtgtcgacggttgatggtgctacatccaagctgattggtgaacgcattacaagtactggagcatctttccttgaggctccagtttcaggctcgaaaaaaccagcagaagatgggctgctcatctttcttactgcaggtgatgagtccttgtacaagagagtggcgcccctccttgatgtcatggggaagtcaaggttttatcttggcgatgtaggcaatggtgctgcaatgaagctcgtggttaacatggtcatggggagcatgatggtttccttctcagaagggttgctcctgagtgaaaaagtcggtttagacccgaatactctcgtcgaggttatttcccagggtgctatcagtgcccccatgttctctctcaagggcccatccatggttaaagctgcatatcctcctgcatttcctctgaagcatcaacagaaggacttgaggctcgcattggcccctggcggaatcggtgtcccagtccattcctacagttgcagctgcgaacgagctgtacaaggctgcaaaatcgctcggccttagtgaccacgacttctcggcggttattgaagcgctgaaagccaaagtgcagagccagagctcacaatagtagttgcctgttcagcagagctcacagtagttgttgcctcttcagcagctaccattgaggcagcattttgtctcgatggatgaagttgacacttaggaaaatttctcaagatcgctacagaaaagtctcagaacaatacaatttctgtattcgtaaatattttctcaaacatcacaacgacgacatttccttaagg

SEQ ID NO: 23454 - protein, 347 aa, Zea mays subsp. mays
  misc_feature (1)..(347): Ceres Seq. ID no. 12412565
RLVHALIPLAPHPITRRPEQQPSAMPAAAFFSAALPPPSRTLSRRLVVSRAAAAAASASASSSSGWQGGGGVEFQGKVGFLGLGIMGAPMASNLIKAGCDVTVWNRTKSKCDPLLSLDAKYEPTPAQVASSCDVTFAILADPQSAAEVACGSSGAAEGLAPGKGYVDVSTVDGATSKLIGERITSTGASFLEAPVSGSKKPAEDGLLIFLTAGDESLYKRVAPLLDVMGKSRFYLGDVGNGAAMKLVVNMVMGSMMVSFSEGLLLSEKVGLDPNTLVEVISQGAISAPMFSLKGPSMVKAAYPPAFPLKHQQKDLRLALAPGGIGVPVHSYSCSCERAVQGCKIARP

SEQ ID NO: 23455 - protein, 323 aa, Zea mays subsp. mays
  misc_feature (1)..(323): Ceres Seq. ID no. 12412566
MPAAAFFSAALPPPSRTLSRRLVVSRAAAAAASASASSSSGWQGGGGVEFQGKVGFLGLGIMGAPMASNLIKAGCDVTVWNRTKSKCDPLLSLDAKYEPTPAQVASSCDVTFAILADPQSAAEVACGSSGAAEGLAPGKGYVDVSTVDGATSKLIGERITSTGASFLEAPVSGSKKPAEDGLLIFLTAGDESLYKRVAPLLDVMGKSRFYLGDVGNGAAMKLVVNMVMGSMMVSFSEGLLLSEKVGLDPNTLVEVISQGAISAPMFSLKGPSMVKAAYPPAFPLKHQQKDLRLALAPGGIGVPVHSYSCSCERAVQGCKIARP

SEQ ID NO: 23456 - protein, 262 aa, Zea mays subsp. mays
  misc_feature (1)..(262): Ceres Seq. ID no. 12412567
MGAPMASNLIKAGCDVTVWNRTKSKCDPLLSLDAKYEPTPAQVASSCDVTFAILADPQSAAEVACGSSGAAEGLAPGKGYVDVSTVDGATSKLIGERITSTGASFLEAPVSGSKKPAEDGLLIFLTAGDESLYKRVAPLLDVMGKSRFYLGDVGNGAAMKLVVNMVMGSMMVSFSEGLLLSEKVGLDPNTLVEVISQGAISAPMFSLKGPSMVKAAYPPAFPLKHQQKDLRLALAPGGIGVPVHSYSCSCERAVQGCKIARP

SEQ ID NO: 23457 - DNA, 1390 bp, Zea mays subsp. mays
  misc_feature (1)..(1390): Ceres Seq. ID no. 12412584
aaaagcccacttctgtagctgtagactgtagttctgttcctccccactcactcctgcgcttcctcgccgcgcggttccttctccctgatcctcctttggcttcgcggttcatggcgatgtggagggccgccgctaggcagctggtcgaccgggcgctcggctcaagggccgcgcacacgtctacaggcagcaaaaagatagtcggggtgttctacaaggccggggagtatgccgacaagaaccccaacttcgtcggctgcgtcgagggtgcactcggcatccgcggctggctcgagtcgcagggccatcagtacattgtcaccgatgacaaggaaggccccaactgtgaactggagaagcacattgaagacatgcatgtcctgattaccaccccattccacccagcttatgtcactgcagagaggataaagaacgcgaagaatcttgagcttcttctcacggcaggaattggctcagatcatattgatcttccagcagctgctgctgcgggcttaactgtggctgaggtcactggaagcaacactgtctctgtggcagaagatgagctcttgcgcattctgattctgctcaggaacttcttgcctgggtaccaacaggtagttcaaggcgaatggaacgtagcaggcattgcccatagagcttatgatcttgaaggaaaaactgttgggactgttggggctggtcgtattggcaggctcttgcttcagcgtcttaagccctttaactgcaacctgctttaccatgacagacttcagattgacccagagcttgagaaagaaattggggccaaatttgaggaggacctggatgctatgcttccagagtgtgatgtgattgtgatcaacacacctcttacggagaaaacaagaggcatgtttaacaaagagaggattgcaaagatgaagaaaggtgtaattgttgtgaataatgctcgaggagcaatcatggatgctcaagcagtcgcagatgcatgttctagcggtcacattgctggatacggtggtgatgtgtggttcccccaaccagcacccaaggatcacccctggcgctacatgccaaaccatgccatgacccctcacatctctgggactacaattgatgcgcagctgcggtatgcggatggtgtgagggacatgctgaataggtatttcaagggcgaggacttccccgtgcagaactacatcgtcaaggaaggccagcttgccagtcagtaccagtgaccgcgcgagatgttgctgtgccgtgtaggcttttctggtgagaagctgcgaggaagaaactcctgttgcgtacttgcgttactgtatgagtagctctgagaaacctgtcagcggccacctgtaataaaagaatgccttgctggtatcgc

SEQ ID NO: 23458 - protein, 412 aa, Zea mays subsp. mays
  misc_feature (1)..(412): Ceres Seq. ID no. 12412585
KPTSVAVDCSSVPPHSLLRFLAARFLLPDPPLASRFMAMWRAAARQLVDRALGSRAAHTSTGSKKIVGVFYKAGEYADKNPNFVGCVEGALGIRGWLESQGHQYIVTDDKEGPNCELEKHIEDMHVLITTPFHPAYVTAERIKNAKNLELLLTAGIGSDHIDLPAAAAAGLTVAEVTGSNTVSVAEDELLRILILLRNFLPGYQQVVQGEWNVAGIAHRAYDLEGKTVGTVGAGRIGRLLLQRLKPFNCNLLYHDRLQIDPELEKEIGAKFEEDLDAMLPECDVIVINTPLTEKTRGMFNKERIAKMKKGVIVVNNARGAIMDAQAVADACSSGHIAGYGGDVWFPQPAPKDHPWRYMPNHAMTPHISGTTIDAQLRYADGVRDMLNRYFKGEDFPVQNYIVKEGQLASQYQ

SEQ ID NO: 23459 - protein, 376 aa, Zea mays subsp. mays
  misc_feature (1)..(376): Ceres Seq. ID no. 12412586
MAMWRAAARQLVDRALGSRAAHTSTGSKKIVGVFYKAGEYADKNPNFVGCVEGALGIRGWLESQGHQYIVTDDKEGPNCELEKHIEDMHVLITTPFHPAYVTAERIKNAKNLELLLTAGIGSDHIDLPAAAAAGLTVAEVTGSNTVSVAEDELLRILILLRNFLPGYQQVVQGEWNVAGIAHRAYDLEGKTVGTVGAGRIGRLLLQRLKPFNCNLLYHDRLQIDPELEKEIGAKFEEDLDAMLPECDVIVINTPLTEKTRGMFNKERIAKMKKGVIVVNNARGAIMDAQAVADACSSGHIAGYGGDVWFPQPAPKDHPWRYMPNHAMTPHISGTTIDAQLRYADGVRDMLNRYFKGEDFPVQNYIVKEGQLASQYQ

SEQ ID NO: 23460 - protein, 374 aa, Zea mays subsp. mays
  misc_feature (1)..(374): Ceres Seq. ID no. 12412587
MWRAAARQLVDRALGSRAAHTSTGSKKIVGVFYKAGEYADKNPNFVGCVEGALGIRGWLESQGHQYIVTDDKEGPNCELEKHIEDMHVLITTPFHPAYVTAERIKNAKNLELLLTAGIGSDHIDLPAAAAAGLTVAEVTGSNTVSVAEDELLRILILLRNFLPGYQQVVQGEWNVAGIAHRAYDLEGKTVGTVGAGRIGRLLLQRLKPFNCNLLYHDRLQIDPELEKEIGAKFEEDLDAMLPECDVIVINTPLTEKTRGMFNKERIAKMKKGVIVVNNARGAIMDAQAVADACSSGHIAGYGGDVWFPQPAPKDHPWRYMPNHAMTPHISGTTIDAQLRYADGVRDMLNRYFKGEDFPVQNYIVKEGQLASQYQ

SEQ ID NO: 23461 - DNA, 1174 bp, Zea mays subsp. mays
  misc_feature (1)..(1174): Ceres Seq. ID no. 12412610
gcccttccgcggctgtgctgtgctctgctctgctctgctccccgtctttcctcctctcccggtctttcctcctctccccttcccgcccagcgcgtccccacgaggaaccaaccccgcggcatggggatcgtggaggaggcgcacaacctgcgagtggtgggcgaggggaagcgcggggtcatcgtgctggcgcacggcttcggcaccgaccagtccgtgtggaagcacctggtgccgcacctcgtcgccgactaccgcgtcgtgctcttcgacaccatgggcgccggccccaccaacccggactacttcgacttctcccgctacgccacgctcgagggctacgcgctcgacctcctcgccatcctccaggagctcggcgtccgctcctgcatctacgtcggccactccgtctccgcggtcatcggcgcgctcgcctccatctccaggcctgacctcttcaccaagctcgtgctcctctccgcgtccccaaggtacctcaatgatgtggactactatggcgggtttgagcaagatgagcttgatgagctgtttgaggcgatgcgatcaaactacaaggcctggtgctcaggttttgcgcccctgtgtgttggcggagacatggaatcagtggcagttcaggagtttagcaggacgctcttcaatatacgtccggacattgcgcttagtgttgcccagacgatcttccagagcgacgtgcgcagcctcctcccgcacgtcactgtcccatgccacattgttcagagcaccaaggatctcgcggtgccggtcgtggtgtctgagtacctgcacaggcaccttggtggcgactccatcgtggaggtgatgccctctgaaggccatcttccccagcttagctctccggacattgtaatccctgtcttactccgacacatccagcacgatatcgcagtctaggttggtcaatcgttcctccaagacgatgagcatccgaagctgtctacttgtctgtttgtatcttgcttaattgttcaacgtaggatcgcatctatttgatgttctaataaggtttcaaaggtgttatgtagtgttggcggtggaaagtgtagcatatatgtatgtgttatccattggtcgtctaatgtaggctaccatgttggatgctctgacatctgaagtccttcagaagctcttc

SEQ ID NO: 23462 - protein, 311 aa, Zea mays subsp. mays
  misc_feature (1)..(311): Ceres Seq. ID no. 12412611
ALPRLCCALLCSAPRLSSSPGLSSSPLPAQRVPTRNQPRGMGIVEEAHNLRVVGEGKRGVIVLAHGFGTDQSVWKHLVPHLVADYRVVLFDTMGAGPTNPDYFDFSRYATLEGYALDLLAILQELGVRSCIYVGHSVSAVIGALASISRPDLFTKLVLLSASPRYLNDVDYYGGFEQDELDELFEAMRSNYKAWCSGFAPLCVGGDMESVAVQEFSRTLFNIRPDIALSVAQTIFQSDVRSLLPHVTVPCHIVQSTKDLAVPVVVSEYLHRHLGGDSIVEVMPSEGHLPQLSSPDIVIPVLLRHIQHDIAV

SEQ ID NO: 23463 - protein, 280 aa, Zea mays subsp. mays
  misc_feature (1)..(280): Ceres Seq. ID no. 12412612
PFRGCAVLCSALLPVFPPLPVFPPLPFPPSASPRGTNPAAWGSWRRRTTCEWWARGSAGSSCWRTASAPTSPCGSTWCRTSSPTTASCSSTPWAPAPPTRTTSTSPATPRSRATRSTSSPSSRSSASAPASTSATPSPRSSARSPPSPGLTSSPSSCSSPRPQGTSMMWTTMAGLSKMSLMSCLRRCDQTTRPGAQVLRPCVLAETWNQWQFRSLAGRSSIYVRTLRLVLPRRSSRATCAASSRTSLSHATLFRAPRISRCRSWCLSTCTGTLVATPSWR

SEQ ID NO: 23464 - protein, 271 aa, Zea mays subsp. mays
  misc_feature (1)..(271): Ceres Seq. ID no. 12412613
MGIVEEAHNLRVVGEGKRGVIVLAHGFGTDQSVWKHLVPHLVADYRVVLFDTMGAGPTNPDYFDFSRYATLEGYALDLLAILQELGVRSCIYVGHSVSAVIGALASISRPDLFTKLVLLSASPRYLNDVDYYGGFEQDELDELFEAMRSNYKAWCSGFAPLCVGGDMESVAVQEFSRTLFNIRPDIALSVAQTIFQSDVRSLLPHVTVPCHIVQSTKDLAVPVVVSEYLHRHLGGDSIVEVMPSEGHLPQLSSPDIVIPVLLRHIQHDIAV

SEQ ID NO: 23465 - DNA, 1014 bp, Zea mays subsp. mays
  misc_feature (1)..(1014): Ceres Seq. ID no. 12412614
actcccaagttcaccttcctctgcctgtagatcttctagagtcccgtatacggtttcgtctttcgtgtcccacttccatggcggcggcggcgcagctgcacggatcggctgcggccacggtggcatatcgcgggactcgagcctactcagttccatcctcatgccggtggccgcagtctggttccccgaagctttcgatttctacaagtggagtcagtatgaagccatttggctttgctgctaaactttcaacaaaatgtgcaaatgagaatgctcgagttgaagaattagatttgaggtcagaccagatgaaggaattacaggtggaggagcaggttattccccagaagaggagtgctaaaatccatgacttctgccttgggatcccttttggtggtcttttattctctatggggcttctaggatacatcttctccagaagcaccataagtcttgtcttgggcattgcaccagggctagccactctgctacttggcactctcagtctgaagttctggaggagcggcagatccagcttcctgcttatcttggctcaggcagcaatttctgctttcctggcatggaaatactctcatgcttacttcttgacaaatagactccttccttggggcttctacgcgtcactgagcactgcaatgggttgtttctacgcctatgtgctacttgcgggaggaaatcccccgcctaagaagttggcagccattccaccgcagtaggaagagccgaagagggattcggtttaggatcagcgtgcgttgacccttcgctccatagtaaaattttgattgtcttcctaagtatattctgcagcctttgtacactgctggctgggcctttgttttttcgatcctggtagcctgaaattttgagcaaataaagatccagaggacaatagccctgcctccagtaacatgctgttttcttgctcatgaatgaacgtgataaatataagcctgctcggcaaactggctgtcacagaaagttgtggcaagc

SEQ ID NO: 23466 - protein, 244 aa, Zea mays subsp. mays
  misc_feature (1)..(244): Ceres Seq. ID no. 12412615
SQVHLPLPVDLLESRIRFRLSCPTSMAAAAQLHGSAAATVAYRGTRAYSVPSSCRWPQSGSPKLSISTSGVSMKPFGFAAKLSTKCANENARVEELDLRSDQMKELQVEEQVIPQKRSAKIHDFCLGIPFGGLLFSMGLLGYIFSRSTISLVLGIAPGLATLLLGTLSLKFWRSGRSSFLLILAQAAISAFLAWKYSHAYFLTNRLLPWGFYASLSTAMGCFYAYVLLAGGNPPPKKLAAIPPQ

SEQ ID NO: 23467 - protein, 219 aa, Zea mays subsp. mays
  misc_feature (1)..(219): Ceres Seq. ID no. 12412616
MAAAAQLHGSAAATVAYRGTRAYSVPSSCRWPQSGSPKLSISTSGVSMKPFGFAAKLSTKCANENARVEELDLRSDQMKELQVEEQVIPQKRSAKIHDFCLGIPFGGLLFSMGLLGYIFSRSTISLVLGIAPGLATLLLGTLSLKFWRSGRSSFLLILAQAAISAFLAWKYSHAYFLTNRLLPWGFYASLSTAMGCFYAYVLLAGGNPPPKKLAAIPPQ

SEQ ID NO: 23468 - protein, 172 aa, Zea mays subsp. mays
  misc_feature (1)..(172): Ceres Seq. ID no. 12412617
MKPFGFAAKLSTKCANENARVEELDLRSDQMKELQVEEQVIPQKRSAKIHDFCLGIPFGGLLFSMGLLGYIFSRSTISLVLGIAPGLATLLLGTLSLKFWRSGRSSFLLILAQAAISAFLAWKYSHAYFLTNRLLPWGFYASLSTAMGCFYAYVLLAGGNPPPKKLAAIPPQ

SEQ ID NO: 23469 - DNA, 1041 bp, Zea mays subsp. mays
  misc_feature (1)..(1041): Ceres Seq. ID no. 12412692
gaaaatacatcgccatttccccaatttaccgctgacaccctccacaaaccgcgaatttcctccccggctcctctccctcctccccagtcaatccccacacagtctcggccgggccctcgcgaggccgccgtggaaggacccccagcgatgggctccggcgaggaggacacaggaggcggaggaggggcggtgcggggcgcggtgctgaaggcgctcgtggttgtcggcggcgtcctgctgctccgccgcctgcgccgctccactacccgatgggaccacgcgcgagccgtcgccgacgcgctctccggagaaaagttctcgagggagcaggcgaggaaggatcctgacaacttcttcaatttgagaatgctcacatgtcctgcaaccgagatggtggatggttcaagggtgctttactttgagcaggcattttggagatctccagaaaagccttttagacaaagattctacatggtaaagccctgtccgaaggagatgaaatgcgatgttgagttgagttcatatgcaattagggatgctgaagagtacaagaatttctgtgaccgtcaaaaggatcagaggccacaggcagaagaagtaattgcagatatcgcagagcatctgaccaccatacacttgtcacgatgcggacgaggaaagcgttgcttatacgaaggatctaccccacctgaaggttttcccaacaactggagcggcgcgtcgtactgtacgtcggatctgtccatccacaaaaacggcgaagtacatatctgggacaaaggttttgacgacgaagggaaccaggtttgggggaccaaggctggcccctacgagttcaagcctgctcccaaatccaaatatgacgacatgttctcgccgttaaatttctcggctcctttgtcgctagagaagaagctggataaagcatatgtaattgatgaccagtagggcctgccctaaatttttgttcataggaatggaataagtgaatagaatgtatatgtatatactgtactgagttataatgcattctttgttttg

SEQ ID NO: 23470 - protein, 315 aa, Zea mays subsp. mays
  misc_feature (1)..(315): Ceres Seq. ID no. 12412693
ENTSPFPQFTADTLHKPRISSPAPLPPPQSIPTQSRPGPREAAVEGPPAMGSGEEDTGGGGGAVRGAVLKALVVVGGVLLLRRLRRSTTRWDHARAVADALSGEKFSREQARKDPDNFFNLRMLTCPATEMVDGSRVLYFEQAFWRSPEKPFRQRFYMVKPCPKEMKCDVELSSYAIRDAEEYKNFCDRQKDQRPQAEEVIADIAEHLTTIHLSRCGRGKRCLYEGSTPPEGFPNNWSGASYCTSDLSIHKNGEVHIWDKGFDDEGNQVWGTKAGPYEFKPAPKSKYDDMFSPLNFSAPLSLEKKLDKAYVIDDQ

SEQ ID NO: 23471 - protein, 266 aa, Zea mays subsp. mays
  misc_feature (1)..(266): Ceres Seq. ID no. 12412694
MGSGEEDTGGGGGAVRGAVLKALVVVGGVLLLRRLRRSTTRWDHARAVADALSGEKFSREQARKDPDNFFNLRMLTCPATEMVDGSRVLYFEQAFWRSPEKPFRQRFYMVKPCPKEMKCDVELSSYAIRDAEEYKNFCDRQKDQRPQAEEVIADIAEHLTTIHLSRCGRGKRCLYEGSTPPEGFPNNWSGASYCTSDLSIHKNGEVHIWDKGFDDEGNQVWGTKAGPYEFKPAPKSKYDDMFSPLNFSAPLSLEKKLDKAYVIDDQ

SEQ ID NO: 23472 - protein, 193 aa, Zea mays subsp. mays
  misc_feature (1)..(193): Ceres Seq. ID no. 12412695
MLTCPATEMVDGSRVLYFEQAFWRSPEKPFRQRFYMVKPCPKEMKCDVELSSYAIRDAEEYKNFCDRQKDQRPQAEEVIADIAEHLTTIHLSRCGRGKRCLYEGSTPPEGFPNNWSGASYCTSDLSIHKNGEVHIWDKGFDDEGNQVWGTKAGPYEFKPAPKSKYDDMFSPLNFSAPLSLEKKLDKAYVIDDQ

SEQ ID NO: 23473 - DNA, 1054 bp, Zea mays subsp. mays
  misc_feature (1)..(1054): Ceres Seq. ID no. 12412719
agaggcgttggctcgtgtatttttgcaaatatctcctatcccttttctccctcccgcgatctcctccgctcgacgcctgtaccccgccgtcccgcgtccccggtccagctcgaaaccctagacctgtgcggctgtccctattctccccaacggaaagatgtactcggaccagatctccaccgggcgcaagcgctccatccacgaccgccttgacggcgacctccccgccggcacgggcgccggcggccgtgttcgtcacacggtgtccaagaggcaacggcagatagatgaaaaatggaagcatgatctgtatcgggaagacgatgaaccagcttcaaaatcaatagatccaaaggatttgcgattgaagcttcagaggcgaagttctcaacaaagctttaccagcacaaggagatctggtgtgcgtgatttacgtgagaagctatctggtataatgcacccacagccatcaaatgctgatccaaagcccaagccaaagccagtatcagaggttgttaacatctcaaggcgtcaaactgctgatgaaatgcctgcacgtcaaagcaagagagcaccaaaacagacttcattgaagaagacttcacagccaaaggctgaaagtccactcggcagtttcctgagttcccttgggcttgagaagtattcgattaccttccaggcagaggaggttgacatggcagccctaaggcatatgacggagagtgatctgaaagctttgggcattccaatgggtcctcggaagaagattatccttgccttggagccaagagcataagggaatggcaagtgtaggaaggtgggagggatttgctaggcatgctcatgtgcaagttcgataaaactctgtaaccacatcttggaaagggacaaagggtaacaacgacaatggtttgtgggcttcttgtaacacatatcctgccctgttgagcatgttcaacgaagtttaggatgttagaaggcaggccacggcgtgtattgatgcaacttctatttctgtgttgattaaatggtgcggtatacatgttggggctcc

SEQ ID NO: 23474 - protein, 212 aa, Zea mays subsp. mays
  misc_feature (1)..(212): Ceres Seq. ID no. 12412720
MYSDQISTGRKRSIHDRLDGDLPAGTGAGGRVRHTVSKRQRQIDEKWKHDLYREDDEPASKSIDPKDLRLKLQRRSSQQSFTSTRRSGVRDLREKLSGIMHPQPSNADPKPKPKPVSEVVNISRRQTADEMPARQSKRAPKQTSLKKTSQPKAESPLGSFLSSLGLEKYSITFQAEEVDMAALRHMTESDLKALGIPMGPRKKIILALEPRA

SEQ ID NO: 23475 - protein, 113 aa, Zea mays subsp. mays
  misc_feature (1)..(113): Ceres Seq. ID no. 12412721
MHPQPSNADPKPKPKPVSEVVNISRRQTADEMPARQSKRAPKQTSLKKTSQPKAESPLGSFLSSLGLEKYSITFQAEEVDMAALRHMTESDLKALGIPMGPRKKIILALEPRA

SEQ ID NO: 23476 - DNA, 851 bp, Zea mays subsp. mays
  misc_feature (1)..(851): Ceres Seq. ID no. 12412763
atcatccctgcagttgtggatcagttcgtcctccgtctctctccacaagtctcctctaggcgccaagcaatgacaaggtcagcaccgccggcctctcctccggcgccgaagcccgtgctgcgcgggagccagctggagcagctccgcgagatcttccggcgcttcgacatggacggcgacggcagcctgacgcagctggagctgggggcgctgctgcggtcgctgggcctgcgccccacgggggaggaggcccgcgcgctgctggcggccatggactccaacggcaacggcgcggtggagttcggcgagctggcggccgccatcgcgccgctgctcaccacgcagacgcacctcgtcgaccaggcccagctcctggaggtgttccgcgccttcgaccgcgacggcaacggctacatctccgccgccgagctggcgcgatccatggcgcgcatcggccagccgctcaccttcgaggagctcacgcgcatgatgcgcgacgccgacgccgacggcgacggcgtcatcagcttcaacgagttcgccgccgtcatggccaagtccgcgctcgacttcctcggcgtcgcctgatgccctctgatggaccgatcgatcgatcggtctcgctcaccgcccgccgccgtaaccccgtgtccctgtgaccctgtccctcgcccgccattgattacctgttctctctctctctctctctctcttttgttaggaagatgctcatccggttaatgtaggataactgacacaagataatgtaactcaaaaactcatcgctggtttgtaacatggatgaactcggaaaatgtgtacatattttggatggatttgttcaatcttcc

SEQ ID NO: 23477 - protein, 195 aa, Zea mays subsp. mays
  misc_feature (1)..(195): Ceres Seq. ID no. 12412764
IIPAVVDQFVLRLSPQVSSRRQAMTRSAPPASPPAPKPVLRGSQLEQLREIFRRFDMDGDGSLTQLELGALLRSLGLRPTGEEARALLAAMDSNGNGAVEFGELAAAIAPLLTTQTHLVDQAQLLEVFRAFDRDGNGYISAAELARSMARIGQPLTFEELTRMMRDADADGDGVISFNEFAAVMAKSALDFLGVA

SEQ ID NO: 23478 - protein, 172 aa, Zea mays subsp. mays
  misc_feature (1)..(172): Ceres Seq. ID no. 12412765
MTRSAPPASPPAPKPVLRGSQLEQLREIFRRFDMDGDGSLTQLELGALLRSLGLRPTGEEARALLAAMDSNGNGAVEFGELAAAIAPLLTTQTHLVDQAQLLEVFRAFDRDGNGYISAAELARSMARIGQPLTFEELTRMMRDADADGDGVISFNEFAAVMAKSALDFLGVA

SEQ ID NO: 23479 - protein, 139 aa, Zea mays subsp. mays
  misc_feature (1)..(139): Ceres Seq. ID no. 12412766
MDGDGSLTQLELGALLRSLGLRPTGEEARALLAAMDSNGNGAVEFGELAAAIAPLLTTQTHLVDQAQLLEVFRAFDRDGNGYISAAELARSMARIGQPLTFEELTRMMRDADADGDGVISFNEFAAVMAKSALDFLGVA

SEQ ID NO: 23480 - DNA, 1754 bp, Zea mays subsp. mays
  misc_feature (1)..(1754): Ceres Seq. ID no. 12412767
gttggtaatactgtacaaattttcgtctagttgcgtgctctcgctagggttccgccccgccggcatacccgaccataaaccccgcgccgcccgccagcaaccttcagtctcatttctcacgcgtagctcggacaggcagcttgaagctcgcgaaccagccatggcgaatggggacgcggccgtggaggtcggcgggaacggggagcaggaagccgcggcgcgccaggcgtcgacgttcgcggagctgggtatctgcgcggagctggtggaggcgtgcgacgccatggggtggaaggagcccaccaggatccaggccgaggccatcccccacgcgctccaagggaaggacctgatcgctctggcgcagacggggtccgggaagacgggcgcgttcgcgctgcccatcctgcaggagctgctcagcaaccgccaggctgaacagtctttcttcgcttgcgtgctctcgccaacaagagagctggcgattcagatcgcagagcagtttgaggcccttggatcagctattggtttgcgttgctcagtgcttgttggaggagtggatcgggtgcagcaagtgttatccatcggaaaacgtccacatattgtagttggaactcctggccgtcttttggaccatttgacagagactaaaggttttagccttaagaaaatcaagtatttggtattggatgaagctgataaattacttaatgtggagtttgagaaatcccttgatgacattctaagcgagatgcctaaagacaggaggactttccttttttcagcgactatgaccaaaaaggtaaataaactgcaacgtgcttgtctcaggaatcctgctaaggttgaagtgtcctccaaatattctacagtagattcacttaaacaagagttctattttgttcctgcagatgacaaggattgctatcttcttcatgttctgaacgagaggctggagagcatgatcatgatctttgtgcgcacctgtgaatctactagactccttgctcttatgttgaggaatcttggtttgaaagctatgtctatcagtggccagatgagtcaggacaagagattaggtgctttgaacagattcaaagcgaaagattgcaatatccttatttgcactgatgtagcaagtcgcggcctcgacattcaaggagttgatatggtcatcaactatgatattccaatcaattctaaggattatgttcatcgggtgggcaggactgcacgtgcagggcgatcaggatacgctgtatctttggtgaaccaatatgaagcccagtggttcgtgctgatcgagcagctccttggcaagaaaattgaccagtgtaaggtggacagagatgaagtccttatacttaaagggcccatatccgatgcaaagagaattgcgctgacgaaattgaaggattccggtggccacaagaagcggagaaatgtgggagatgacgatgaagaggttgaagatcattcttctcattctagaagaccgaaatccttgaagagatcaaacagacgatgaaggctctggagcatgtctggactgcctcgtttcgtgcaagtcctttgtggttcagcgcagatccaccctgtggtggtttggagtgatgctttgcctatttatactagggccagttaagacgttcacttgacaccattccttgggttgaaagcaagtctcccccaattttgtcatcccgacccaaaccatgcttacataaggaatcattttttgctgatggctgccg

SEQ ID NO: 23481 - protein, 508 aa, Zea mays subsp. mays
  misc_feature (1)..(508): Ceres Seq. ID no. 12412768
LVILYKFSSSCVLSLGFRPAGIPDHKPRAARQQPSVSFLTRSSDRQLEAREPAMANGDAAVEVGGNGEQEAAARQASTFAELGICAELVEACDAMGWKEPTRIQAEAIPHALQGKDLIALAQTGSGKTGAFALPILQELLSNRQAEQSFFACVLSPTRELAIQIAEQFEALGSAIGLRCSVLVGGVDRVQQVLSIGKRPHIVVGTPGRLLDHLTETKGFSLKKIKYLVLDEADKLLNVEFEKSLDDILSEMPKDRRTFLFSATMTKKVNKLQRACLRNPAKVEVSSKYSTVDSLKQEFYFVPADDKDCYLLHVLNERLESMIMIFVRTCESTRLLALMLRNLGLKAMSISGQMSQDKRLGALNRFKAKDCNILICTDVASRGLDIQGVDMVINYDIPINSKDYVHRVGRTARAGRSGYAVSLVNQYEAQWFVLIEQLLGKKIDQCKVDRDEVLILKGPISDAKRIALTKLKDSGGHKKRRNVGDDDEEVEDHSSHSRRPKSLKRSNRR

SEQ ID NO: 23482 - protein, 455 aa, Zea mays subsp. mays
  misc_feature (1)..(455): Ceres Seq. ID no. 12412769
MANGDAAVEVGGNGEQEAAARQASTFAELGICAELVEACDAMGWKEPTRIQAEAIPHALQGKDLIALAQTGSGKTGAFALPILQELLSNRQAEQSFFACVLSPTRELAIQIAEQFEALGSAIGLRCSVLVGGVDRVQQVLSIGKRPHIVVGTPGRLLDHLTETKGFSLKKIKYLVLDEADKLLNVEFEKSLDDILSEMPKDRRTFLFSATMTKKVNKLQRACLRNPAKVEVSSKYSTVDSLKQEFYFVPADDKDCYLLHVLNERLESMIMIFVRTCESTRLLALMLRNLGLKAMSISGQMSQDKRLGALNRFKAKDCNILICTDVASRGLDIQGVDMVINYDIPINSKDYVHRVGRTARAGRSGYAVSLVNQYEAQWFVLIEQLLGKKIDQCKVDRDEVLILKGPISDAKRIALTKLKDSGGHKKRRNVGDDDEEVEDHSSHSRRPKSLKRSNRR

SEQ ID NO: 23483 - protein, 414 aa, Zea mays subsp. mays
  misc_feature (1)..(414): Ceres Seq. ID no. 12412770
MGWKEPTRIQAEAIPHALQGKDLIALAQTGSGKTGAFALPILQELLSNRQAEQSFFACVLSPTRELAIQIAEQFEALGSAIGLRCSVLVGGVDRVQQVLSIGKRPHIVVGTPGRLLDHLTETKGFSLKKIKYLVLDEADKLLNVEFEKSLDDILSEMPKDRRTFLFSATMTKKVNKLQRACLRNPAKVEVSSKYSTVDSLKQEFYFVPADDKDCYLLHVLNERLESMIMIFVRTCESTRLLALMLRNLGLKAMSISGQMSQDKRLGALNRFKAKDCNILICTDVASRGLDIQGVDMVINYDIPINSKDYVHRVGRTARAGRSGYAVSLVNQYEAQWFVLIEQLLGKKIDQCKVDRDEVLILKGPISDAKRIALTKLKDSGGHKKRRNVGDDDEEVEDHSSHSRRPKSLKRSNRR

SEQ ID NO: 23484 - DNA, 919 bp, Zea mays subsp. mays
  misc_feature (1)..(919): Ceres Seq. ID no. 12412873
ttttctccagcaagtaccgctcggtgaaaggagctaaagttattattgatgcaaacacaggccgttccaggggctatggatttgtcaggtttggagacgacaacgacaaatctcatgccatgtctgaaatgaatggtgtatattgctctacgaggccaattcgtataggacctgcgactcccagaagatcttcaggtgattctggctcctcgactcctggtcattcagatggtgattcttctaacagaacggtatatgttggtgggcttgaccccaatgtcagtgaagatgaactgagaaaagcctttgccaaatatgatcttgcctctgtgaaaattcctctaggaaagcaatgtggctttgttcaatttgttagcagaactgatgctgaagaagcactacaaggattaaatggatcactcattggaaaccaggcagttcgcctttcatgggtccgcagcccatcgcataagcagtctaggggtgactccgtcaacaggaggaacaacatgtactatggcacaccattctacggcggatatggctatgcctccccggtgccacacccaaacatgtacgctgcagcgtatggcacgtacccgctatatggcaaccagcagctagtgagctagagagctcccctccgacgtgtcccctctgacgggaaacaaaggttttggtccggtgagcatagtagcgtcaggtgagaaggtgcctttataaggctgtcctaagaagtgggcgagatatgttgttgcatcgttatcgttatggtgcctgtaactgttgtgtgtgccgtgtgcgtccggaagaattggatggaatggaactcgtggcttgttgtagtacatcagagagtcatgttattctttcaagaaattttgacttggtaataaattaaactattgtttgtgcgtcc

SEQ ID NO: 23485 - protein, 209 aa, Zea mays subsp. mays
  misc_feature (1)..(209): Ceres Seq. ID no. 12412874
FSSKYRSVKGAKVIIDANTGRSRGYGFVRFGDDNDKSHAMSEMNGVYCSTRPIRIGPATPRRSSGDSGSSTPGHSDGDSSNRTVYVGGLDPNVSEDELRKAFAKYDLASVKIPLGKQCGFVQFVSRTDAEEALQGLNGSLIGNQAVRLSWVRSPSHKQSRGDSVNRRNNMYYGTPFYGGYGYASPVPHPNMYAAAYGTYPLYGNQQLVS

SEQ ID NO: 23486 - protein, 170 aa, Zea mays subsp. mays
  misc_feature (1)..(170): Ceres Seq. ID no. 12412875
MSEMNGVYCSTRPIRIGPATPRRSSGDSGSSTPGHSDGDSSNRTVYVGGLDPNVSEDELRKAFAKYDLASVKIPLGKQCGFVQFVSRTDAEEALQGLNGSLIGNQAVRLSWVRSPSHKQSRGDSVNRRNNMYYGTPFYGGYGYASPVPHPNMYAAAYGTYPLYGNQQLVS

SEQ ID NO: 23487 - protein, 167 aa, Zea mays subsp. mays
  misc_feature (1)..(167): Ceres Seq. ID no. 12412876
MNGVYCSTRPIRIGPATPRRSSGDSGSSTPGHSDGDSSNRTVYVGGLDPNVSEDELRKAFAKYDLASVKIPLGKQCGFVQFVSRTDAEEALQGLNGSLIGNQAVRLSWVRSPSHKQSRGDSVNRRNNMYYGTPFYGGYGYASPVPHPNMYAAAYGTYPLYGNQQLVS

SEQ ID NO: 23488 - DNA, 857 bp, Zea mays subsp. mays
  misc_feature (1)..(857): Ceres Seq. ID no. 12412972
atcgccgcaactgcccgtctgctcctgcttttcatccagtcgcaaaacaaagagaagagatctccgcgtccgcaaccgcatcgcttccctcccggcagaagaagaagattcggttgggttgtttgtctcttgcaaaccgcaatggctgctgctgccactgctactccggccgtggcgccggaggccggcgaccggaaggcggtggcaccgccggtcgacgcggtggatctggagctggagctggaggagaagcacgtgctggcggtggacgacagctccgtggaccgcgcggtgatcgccaagatcctacgcagctccaaatacagagtgacgaccgtggactcggcgacgcgcgcgctggagctgctggcgctggggctggtccccgacgtgaacatgatcatcacggactactggatgcccgggatgaccgggtacgagctgctgaagcacgtgaaggagtcgtcggcgctgcgggccatcccgggtggtgatcatgtcgtcggagaacgtgcccacccgcatcagccggtgcctggaggagggcgccgaggacttcctcctcaagcccgtccgccccgccgacgtctcccgcctctgcagccggatccggtgaccgcccgcgcaaggatggaggatctggttgcgcgctctgacttaattagaggagttgttaggatccaattttttgtgtgttcgttcgttcgttcgttcttttctttctttcttcttggacatagatctgctgccgccgctgctgccgtcgactgaaacaagaagctaacttagttttagggtccaggttgttgttgttgttgttaggaaggcgagtcgttgggggcagcagatctatgtcc

SEQ ID NO: 23489 - protein, 256 aa, Zea mays subsp. mays
  misc_feature (1)..(256): Ceres Seq. ID no. 12412973
IAATARLLLLFIQSQNKEKRSPRPQPHRFPPGRRRRFGWVVCLLQTAMAAAATATPAVAPEAGDRKAVAPPVDAVDLELELEEKHVLAVDDSSVDRAVIAKILRSSKYRVTTVDSATRALELLALGLVPDVNMIITDYWMPGMTGYELLKHVKESSALRAIPGGDHVVGERAHPHQPVPGGGRRGLPPQARPPRRRLPPLQPDPVTARARMEDLVARSDLIRGVVRIQFFVCSFVRSFFSFFLLGHRSAAAAAAVD

SEQ ID NO: 23490 - protein, 209 aa, Zea mays subsp. mays
  misc_feature (1)..(209): Ceres Seq. ID no. 12412974
MAAAATATPAVAPEAGDRKAVAPPVDAVDLELELEEKHVLAVDDSSVDRAVIAKILRSSKYRVTTVDSATRALELLALGLVPDVNMIITDYWMPGMTGYELLKHVKESSALRAIPGGDHVVGERAHPHQPVPGGGRRGLPPQARPPRRRLPPLQPDPVTARARMEDLVARSDLIRGVVRIQFFVCSFVRSFFSFFLLGHRSAAAAAAVD

SEQ ID NO: 23491 - protein, 163 aa, Zea mays subsp. mays
  misc_feature (1)..(163): Ceres Seq. ID no. 12412975
RRNCPSAPAFHPVAKQREEISASATASLPSRQKKKIRLGCLSLANRNGCCCHCYSGRGAGGRRPEGGGTAGRRGGSGAGAGGEARAGGGRQLRGPRGDRQDPTQLQIQSDDRGLGDARAGAAGAGAGPRREHDHHGLLDARDDRVRAAEAREGVVGAAGHPGW

SEQ ID NO: 23492 - DNA, 1577 bp, Zea mays subsp. mays
  misc_feature (1)..(1577): Ceres Seq. ID no. 12413088
attgggggtgttaaaccgcatcgcatcgtcttctagggtttcctcctcccgccgccacttgctgccccacgagcccattcccctcagcccttcaccatctccggcggtcgcagtggcatcagcagctccggctcacgcgcagcaaaggaacgacaatatggcgaccatcgtaaacacgacggaggaggagccgatgctggccgtggtccgcttcaccgctgagctcgcctgggccgacgcgggcccggaagtcgccgaccccgaggtcgcccgcctatgtctcgaggcgcaggagcatatcctcgcggggcggtggctcgacatggcctcccttatgctcgcctccgccgacctcctcctcacctccccgtcgcgcgtctcggacaaagacctggagtgcgttctctccgtcatctgcagcctcgtcaccaaggccggatccgaggaccaggcgctgcagatcaccgaactcatctgcgctaagctcacccagcaacacggtgacaagccagcgctgcgcctcaaagttcttttcagcttgtacaatctgctcccgagcccgtacggcaaggcatttgtttacaagaaggctcttgagctcgccacggctggaaaggctgctgagtacatcatcccatctttcaagaacattgacagttttgtcagtgagtggggaattgacaatttggagaagagggagctataccttgctatcactaccatcctcaaagaccacaagggcatggctaaggagtactttaactttctcaataagtaccttgccacattcaaagggtcagatgatgaatcaggtataattggtgatgcgaaggaagaggctgttgcggcaatcatcgagtttgttaaatcgcctaatctctttcagtgtgatttgctcaacatgccagctgtttcacagcttgagaaggacggaaagtatcagttggtgtatgaactactaaagatattccttactaagaagcttgattcctacttggagtttcaaagtgcaaactctgacttgctgaaagattatggtctcgttcatgaggaatgtgtaaccaaaatgcgcctcatgtctttgctcgatctgagcagccgatgctctggtgaaatcccttattctgcaatcactgttgaactcaggatcaatgatgacgaggtggagcaatggattgtgaaggcaattgcatccaagatattggattgcaaggttgaccagcttaaccagactgtcattgtcagtcggcacacagagaggatctttgggatggaacattggcatgctctgcgcacaaagctcggagcttggaggggaaacattgccagagctatcaacacaatacaagctaacaaagtcaccgaagagggggcacaagggatgcaaggcttggcgatccactgattcggggcgggtcagcgggttcgtgaattgagattatagcgtgggagattagaagggcaaccttttttgtatgagacaagttgtaatggtttatttacttagatcccgtaaccatgcctggttattccttgtatttggtcagacacgccgcgcagtgcaaggcagttgttac

SEQ ID NO: 23493 - protein, 467 aa, Zea mays subsp. mays
  misc_feature (1)..(467): Ceres Seq. ID no. 12413089
LGVLNRIASSSRVSSSRRHLLPHEPIPLSPSPSPAVAVASAAPAHAQQRNDNMATIVNTTEEEPMLAVVRFTAELAWADAGPEVADPEVARLCLEAQEHILAGRWLDMASLMLASADLLLTSPSRVSDKDLECVLSVICSLVTKAGSEDQALQITELICAKLTQQHGDKPALRLKVLFSLYNLLPSPYGKAFVYKKALELATAGKAAEYIIPSFKNIDSFVSEWGIDNLEKRELYLAITTILKDHKGMAKEYFNFLNKYLATFKGSDDESGIIGDAKEEAVAAIIEFVKSPNLFQCDLLNMPAVSQLEKDGKYQLVYELLKIFLTKKLDSYLEFQSANSDLLKDYGLVHEECVTKMRLMSLLDLSSRCSGEIPYSAITVELRINDDEVEQWIVKAIASKILDCKVDQLNQTVIVSRHTERIFGMEHWHALRTKLGAWRGNIARAINTIQANKVTEEGAQGMQGLAIH

SEQ ID NO: 23494 - protein, 415 aa, Zea mays subsp. mays
  misc_feature (1)..(415): Ceres Seq. ID no. 12413090
MATIVNTTEEEPMLAVVRFTAELAWADAGPEVADPEVARLCLEAQEHILAGRWLDMASLMLASADLLLTSPSRVSDKDLECVLSVICSLVTKAGSEDQALQITELICAKLTQQHGDKPALRLKVLFSLYNLLPSPYGKAFVYKKALELATAGKAAEYIIPSFKNIDSFVSEWGIDNLEKRELYLAITTILKDHKGMAKEYFNFLNKYLATFKGSDDESGIIGDAKEEAVAAIIEFVKSPNLFQCDLLNMPAVSQLEKDGKYQLVYELLKIFLTKKLDSYLEFQSANSDLLKDYGLVHEECVTKMRLMSLLDLSSRCSGEIPYSAITVELRINDDEVEQWIVKAIASKILDCKVDQLNQTVIVSRHTERIFGMEHWHALRTKLGAWRGNIARAINTIQANKVTEEGAQGMQGLAIH

SEQ ID NO: 23495 - protein, 403 aa, Zea mays subsp. mays
  misc_feature (1)..(403): Ceres Seq. ID no. 12413091
MLAVVRFTAELAWADAGPEVADPEVARLCLEAQEHILAGRWLDMASLMLASADLLLTSPSRVSDKDLECVLSVICSLVTKAGSEDQALQITELICAKLTQQHGDKPALRLKVLFSLYNLLPSPYGKAFVYKKALELATAGKAAEYIIPSFKNIDSFVSEWGIDNLEKRELYLAITTILKDHKGMAKEYFNFLNKYLATFKGSDDESGIIGDAKEEAVAAIIEFVKSPNLFQCDLLNMPAVSQLEKDGKYQLVYELLKIFLTKKLDSYLEFQSANSDLLKDYGLVHEECVTKMRLMSLLDLSSRCSGEIPYSAITVELRINDDEVEQWIVKAIASKILDCKVDQLNQTVIVSRHTERIFGMEHWHALRTKLGAWRGNIARAINTIQANKVTEEGAQGMQGLAIH

SEQ ID NO: 23496 - DNA, 620 bp, Zea mays subsp. mays
  misc_feature (1)..(620): Ceres Seq. ID no. 12413148
aaaatagcaaatttctcggcttccgccacacccgctccaggtcccctcccccaaactgaaacgaagttgcggcggtcgcgactgagtgcagagatgctgcagttcccggcgctgatgcggcagtggccatcgccgccgctgatcccggcgtccacgctgctccccgtgccggccacctcccaggaggacgagcttctcctctccatggccgagtccgacctcgaggataagctgaacgagatccggaagaccaacagccacctggttatcatcgggaagcccacgggcgacaccaaggaggagtacgacgctgaggtggaggacgacgatgcagacaacgtcgaggagtctgacggcgacgacttcgaccaggagaccggttgacccaggtggctcccccgtgcttcgtcggcgtccttgagcgtcgtcatccccgctgtcccgtctgtatttcgcaatccctgagttgctccttctatctagatacgctgttaccctattttgctgctgtctgttctcaggatctgagcatgtccttgtcgtgtggaccttgtgtatgaaacaagtacatgattaatcggtccaatttaaatgctatattagtttcctctatttgtgcc

SEQ ID NO: 23497 - protein, 127 aa, Zea mays subsp. mays
  misc_feature (1)..(127): Ceres Seq. ID no. 12413149
KIANFSASATPAPGPLPQTETKLRRSRLSAEMLQFPALMRQWPSPPLIPASTLLPVPATSQEDELLLSMAESDLEDKLNEIRKTNSHLVIIGKPTGDTKEEYDAEVEDDDADNVEESDGDDFDQETG

SEQ ID NO: 23498 - protein, 96 aa, Zea mays subsp. mays
  misc_feature (1)..(96): Ceres Seq. ID no. 12413150
MLQFPALMRQWPSPPLIPASTLLPVPATSQEDELLLSMAESDLEDKLNEIRKTNSHLVIIGKPTGDTKEEYDAEVEDDDADNVEESDGDDFDQETG

SEQ ID NO: 23499 - protein, 89 aa, Zea mays subsp. mays
  misc_feature (1)..(89): Ceres Seq. ID no. 12413151
MRQWPSPPLIPASTLLPVPATSQEDELLLSMAESDLEDKLNEIRKTNSHLVIIGKPTGDTKEEYDAEVEDDDADNVEESDGDDFDQETG

SEQ ID NO: 23500 - DNA, 1340 bp, Zea mays subsp. mays
  misc_feature (1)..(1340): Ceres Seq. ID no. 12413195
aaccactgctcgcactcactcacagtcgccgccgctgcccagtgcccactgctcgccgctagaggaatctgagagagagaggggaaagggcgaaggaggcgcaggcaggcatgggctccccttcctccctccccgccgcggcggcgctcgtgctcctggccctgctcgccggagcccagtgccgcgaggcccagttcgacgccgcggacgccggcgcggagaacttcaacaccagcgaggccgccgtgtactggggcccctggcagaaggcccgggccacctggtacggccagcccaacggcgccggcccggacgacaacggtggtgcgtgcggcttcaagcacaccaaccagtaccccttcatgtccatgggctcctgcggaaaccagccattgttcaaggacggcaagggatgcggctcctgctacaagattcggtgcaggaaggacccgtcctgctccgggcggacggagacggtgatcatcaccgacatgaactactacccggtgtccaagtaccacttcgacctcagcggcacggcgttcggcaggctggccaagcccggcctcaacgacaagctccgccactcgggcatcatcgacatcgagttcaccagggtgccgtgcgagttccctggcctcaagatcgggttccacgtggaggagtactcgagccccgtctacttcgcggtgctggtggagtacgaggacggcgacggcgacgtggtgcaggtggacctgatggagtccaagacggcgcgcgggccgccgacggggcggtgggcgccgatgcgcgagtcctggggctccatctggcgcatggacaccaaccaccgcatgcagccgcccttctccatccgcatccgcaacgagtccggcaagacgctcgtcgccaggaacgtcatcccggccaactggaggcccaacaccttctaccgctccttcgtccagtacagctagctagctggtttgcgccctcgggccgctcggtcaccaccacccaccactactaccaccaccacccactagactactgcttctgctaccaaatactacggcggaacggaacggctggttgccgccgccgccgtcgtccttggaaaggttgaggcgtctcttggtcatccgtatcgttaccgttgtcatggtcctttgagtcgttgcaaccctgattgcaagccggcaagggggaaaaaaccaacaaagccgtgtgggaaaatggaggaggcaggcgtacaatgtacgctctcccgcccactgttgctttataatctctatatcatcatcatcttcttcttctccattccgatcggtgattaatcgaaaagtatattgtaatgt

SEQ ID NO: 23501 - protein, 368 aa, Zea mays subsp. mays
  misc_feature (1)..(368): Ceres Seq. ID no. 12413196
TTARTHSQSPPLPSAHCSPLEESERERGKGEGGAGRHGLPFLPPRRGGARAPGPARRSPVPRGPVRRRGRRRGELQHQRGRRVLGPLAEGPGHLVRPAQRRRPGRQRWCVRLQAHQPVPLHVHGLLRKPAIVQGRQGMRLLLQDSVQEGPVLLRADGDGDHHRHELLPGVQVPLRPQRHGVRQAGQARPQRQAPPLGHHRHRVHQGAVRVPWPQDRVPRGGVLEPRLLRGAGGVRGRRRRRGAGGPDGVQDGARAADGAVGADARVLGLHLAHGHQPPHAAALLHPHPQRVRQDARRQERHPGQLEAQHLLPLLRPVQLASWFAPSGRSVTTTHHYYHHHPLDYCFCYQILRRNGTAGCRRRRRPWKG

SEQ ID NO: 23502 - protein, 282 aa, Zea mays subsp. mays
  misc_feature (1)..(282): Ceres Seq. ID no. 12413197
MGSPSSLPAAAALVLLALLAGAQCREAQFDAADAGAENFNTSEAAVYWGPWQKARATWYGQPNGAGPDDNGGACGFKHTNQYPFMSMGSCGNQPLFKDGKGCGSCYKIRCRKDPSCSGRTETVIITDMNYYPVSKYHFDLSGTAFGRLAKPGLNDKLRHSGIIDIEFTRVPCEFPGLKIGFHVEEYSSPVYFAVLVEYEDGDGDVVQVDLMESKTARGPPTGRWAPMRESWGSIWRMDTNHRMQPPFSIRIRNESGKTLVARNVIPANWRPNTFYRSFVQYS

SEQ ID NO: 23503 - protein, 231 aa, Zea mays subsp. mays
  misc_feature (1)..(231): Ceres Seq. ID no. 12413198
MRLLLQDSVQEGPVLLRADGDGDHHRHELLPGVQVPLRPQRHGVRQAGQARPQRQAPPLGHHRHRVHQGAVRVPWPQDRVPRGGVLEPRLLRGAGGVRGRRRRRGAGGPDGVQDGARAADGAVGADARVLGLHLAHGHQPPHAAALLHPHPQRVRQDARRQERHPGQLEAQHLLPLLRPVQLASWFAPSGRSVTTTHHYYHHHPLDYCFCYQILRRNGTAGCRRRRRPWKG

SEQ ID NO: 23504 - DNA, 1102 bp, Zea mays subsp. mays
  misc_feature (1)..(1102): Ceres Seq. ID no. 12413211
ataaaactaacccacctaaaaccacggtccacgaccctcgcttcacttgtcacggactcgcgtccacaaaccacaaccagctcactcaagaacaaagaacccaacccatggcttctcccaagccgctcctcctgctcgccacctcgttcctgagctgcggcctcctggtggccgccgacttacgccccaatgaccctgaccgtggtgaacaactgcccctacccggtgtggccgggcatccaggccaactccgggcacgacgtcctggagggcggcggcttcttcctcccgccgctctcccacaagtccttcccggcgccggcccacccctggtccggccgcatctgggcgcgcacgggctgcgcgggcgccggcgcgcagctccactgcgccacgggcgactgcggcgggcggctccagtgcggcgggctcggcggcgcggcgcccgcgacgctggcgcaggtgaacctccaccacggcaacgaccagacctcgtacggcgtgagcgtggtggacggcttcaacgtgggcctgtccgtgaccccgcacgagggccgcggcaactgccccgtcctcgcctgccgcaagaacctcaccgagacctgccccggcgagctgcagctgcgctccccggccggcagcgtcctcgcgtgcaagagcggctgcgaggccttccgcaccgacgagctgtgctgccgcaacatgtacaacagcccgcacacctgccgcgcctccaagtactcggagttcttcaagcgagagtgcccgcaggccttcacctacgcgcacgacagcccctngctcacccacgagtgcgccgcgccgcgcgagctcaaggtcatcttctgccactagagctcggagctcggagggcgccgccgccgtcaacaagtgtcgctagtagaggtagtaggatttgcggtgcgtgtgttgtctagtgtgtgctggaatagctgtggctgtgttcccgtcgtgtctgtggcctgtgtaggctgtctgtagtatactgggttgttggatgtatgcgttctggccgcaagactgatgtcatgctgttgctgcttactacagtttgcagtctgaaataaaaacttgtttgatg

SEQ ID NO: 23505 - protein, 311 aa, Zea mays subsp. mays
  misc_feature (1)..(311): Ceres Seq. ID no. 12413212
  misc_feature (266)..(266): Xaa is any aa, unknown or other
KTNPPKTTVHDPRFTCHGLASTNHNQLTQEQRTQPMASPKPLLLLATSFLSCGLLVAADLRPNDPDRGEQLPLPGVAGHPGQLRARRPGGRRLLPPAALPQVLPGAGPPLVRPHLGAHGLRGRRRAAPLRHGRLRRAAPVRRARRRGARDAGAGEPPPRQRPDLVRRERGGRLQRGPVRDPARGPRQLPRPRLPQEPHRDLPRRAAAALPGRQRPRVQERLRGLPHRRAVLPQHVQQPAHLPRLQVLGVLQARVPAGLHLRARQPXAHPRVRRAARAQGHLLPLELGARRAPPPSTSVASRGSRICGACVV

SEQ ID NO: 23506 - protein, 276 aa, Zea mays subsp. mays
  misc_feature (1)..(276): Ceres Seq. ID no. 12413213
  misc_feature (231)..(231): Xaa is any aa, unknown or other
MASPKPLLLLATSFLSCGLLVAADLRPNDPDRGEQLPLPGVAGHPGQLRARRPGGRRLLPPAALPQVLPGAGPPLVRPHLGAHGLRGRRRAAPLRHGRLRRAAPVRRARRRGARDAGAGEPPPRQRPDLVRRERGGRLQRGPVRDPARGPRQLPRPRLPQEPHRDLPRRAAAALPGRQRPRVQERLRGLPHRRAVLPQHVQQPAHLPRLQVLGVLQARVPAGLHLRARQPXAHPRVRRAARAQGHLLPLELGARRAPPPSTSVASRGSRICGACVV

SEQ ID NO: 23507 - protein, 221 aa, Zea mays subsp. mays
  misc_feature (1)..(221): Ceres Seq. ID no. 12413214
  misc_feature (204)..(204): Xaa is any aa, unknown or other
MTLTVVNNCPYPVWPGIQANSGHDVLEGGGFFLPPLSHKSFPAPAHPWSGRIWARTGCAGAGAQLHCATGDCGGRLQCGGLGGAAPATLAQVNLHHGNDQTSYGVSVVDGFNVGLSVTPHEGRGNCPVLACRKNLTETCPGELQLRSPAGSVLACKSGCEAFRTDELCCRNMYNSPHTCRASKYSEFFKRECPQAFTYAHDSPXLTHECAAPRELKVIFCH

SEQ ID NO: 23508 - DNA, 1278 bp, Zea mays subsp. mays
  misc_feature (1)..(1278): Ceres Seq. ID no. 12413223
agttcgtggagtggagtcaccacagaatcaaagaaaagctttcccccgatcctctcgcggacaccagcgatgggttcccgctacgaggtggaggtcaccgtcggctccgcccgggacctcaagaacgtcaactggcgcaacggcgacctcaagccctacgccgtggtgtggatcgactccggcagcaagtgctcgacccgcgtcgacctcgacaacggcgagagcccggcgtgggacgagaagctgctcgtcccgctcccgcccacctcccgcctcgacgacgccgtcctctacgtcgacgtcgtccacgccaacgccgcccagggcgtcaagccgctcgtcggctccgcgcgcctcccgctccgcgacgtcctcgacgacgccggggtcgggggcaaggcctcgcgcagcctccgcctcaagcgcccctcgggccgcccccacggccgcctcgacgtccgcgtcgccgtcaaggagccgtccaggtactacgaccccaacccctacccggcccccgcggcctacgccaacacgggcggcggcacccgtgacccctacggctcgtccgctgctgctgccggcggctactacggctccggaggcggatacggttccggtggtggcgcctacggtggcggcggctacggcgccgcgcagccctacaccgcagcgcccccggcggggtacccttccacctacggcgccgcgccgccgcctcagccagcggcagcgtacggcgctcctcctgccgctgcatacggcgctcctcctgtcgccgccaccgccgcgtacggaaccggcgccgttgcttccgacgggaagaagaagaacaagatggggatggggacggggctggcagtgggcgcggcggcgggcgtgctcggagggctggcgctggccggcggggcgagctacctggaggacaagttcgaggagcgcgtgtcggagcgggtggaggacaacctggagagggaggagtcgtacggaggcggcggctacgggggtggctacgacgactatggcggcaacgacgactatggcggcgacgacgactactgatgggtcctgatcctccgatcgtttgcccggctgctacgcttgccatccaccttcaccttcgtcttgctgtcctagatgtttgctgtatcaatcgcatgttctctattcctgccttcagtttcttttctcagttgtggtttatcgaggcggggttgatgttgagatttgagatcctcacctgaggaatggaaaaatgctaaattgattaattcggttgcg

SEQ ID NO: 23509 - protein, 355 aa, Zea mays subsp. mays
  misc_feature (1)..(355): Ceres Seq. ID no. 12413224
VRGVESPQNQRKAFPRSSRGHQRWVPATRWRSPSAPPGTSRTSTGATATSSPTPWCGSTPAASARPASTSTTARARRGTRSCSSRSRPPPASTTPSSTSTSSTPTPPRASSRSSAPRASRSATSSTTPGSGARPRAASASSAPRAAPTAASTSASPSRSRPGTTTPTPTRPPRPTPTRAAAPVTPTARPLLLPAATTAPEADTVPVVAPTVAAATAPRSPTPQRPRRGTLPPTAPRRRLSQRQRTALLLPLHTALLLSPPPPRTEPAPLLPTGRRRTRWGWGRGWQWARRRACSEGWRWPAGRATWRTSSRSACRSGWRTTWRGRSRTEAAATGVATTTMAATTTMAATTTTDGS

SEQ ID NO: 23510 - protein, 352 aa, Zea mays subsp. mays
  misc_feature (1)..(352): Ceres Seq. ID no. 12413225
SSWSGVTTESKKSFPPILSRTPAMGSRYEVEVTVGSARDLKNVNWRNGDLKPYAVVWIDSGSKCSTRVDLDNGESPAWDEKLLVPLPPTSRLDDAVLYVDVVHANAAQGVKPLVGSARLPLRDVLDDAGVGGKASRSLRLKRPSGRPHGRLDVRVAVKEPSRYYDPNPYPAPAAYANTGGGTRDPYGSSAAAAGGYYGSGGGYGSGGGAYGGGGYGAAQPYTAAPPAGYPSTYGAAPPPQPAAAYGAPPAAAYGAPPVAATAAYGTGAVASDGKKKNKMGMGTGLAVGAAAGVLGGLALAGGASYLEDKFEERVSERVEDNLEREESYGGGGYGGGYDDYGGNDDYGGDDDY

SEQ ID NO: 23511 - protein, 329 aa, Zea mays subsp. mays
  misc_feature (1)..(329): Ceres Seq. ID no. 12413226
MGSRYEVEVTVGSARDLKNVNWRNGDLKPYAVVWIDSGSKCSTRVDLDNGESPAWDEKLLVPLPPTSRLDDAVLYVDVVHANAAQGVKPLVGSARLPLRDVLDDAGVGGKASRSLRLKRPSGRPHGRLDVRVAVKEPSRYYDPNPYPAPAAYANTGGGTRDPYGSSAAAAGGYYGSGGGYGSGGGAYGGGGYGAAQPYTAAPPAGYPSTYGAAPPPQPAAAYGAPPAAAYGAPPVAATAAYGTGAVASDGKKKNKMGMGTGLAVGAAAGVLGGLALAGGASYLEDKFEERVSERVEDNLEREESYGGGGYGGGYDDYGGNDDYGGDDDY

SEQ ID NO: 23512 - DNA, 1221 bp, Zea mays subsp. mays
  misc_feature (1)..(1221): Ceres Seq. ID no. 12413244
gtcctctcttcttccaccaccacctcctactccgctgcaaccccaaatctctccttcctcgcatacgcgcgcagcggaggagctgagaccaacgaagaagaagaagaacaaccgagcaagcacaagcttagctagcgtgtaggtgtccaaggcgacgacggccgccgcgccaggctagccaaccagctgctcatcgctcctagctgcggagccgatatggctggcgccgacgtcgacgtcgggacggagctccgtctcggcctgccgggaggaggcgccgatgcggccaaggctgccaagaggggcttcgaggacaccatcgacctcaagctgaagctgcccaccgccggcatggaggaagctgccgccgccgccgccgccgccgccaagcccgagccggcagccgagaaggccaagaggcccgccgaggcgccggccgctgatgccgagaagccacccgcacccaaggcacaagctgtgggttggccaccagtccggtcataccgcaggaacgtcatgaccgtccagtctgtgaagagcaagaaggaagaggagcctgagaagcagcagtccgctgccaacgccggcggcaacggctccgccttcgtgaaggtcagcatggacggcgcgccctacctgcgcaaggtggacctgaagatgtacaacagcntacacggagctctccgttgctctgaagaagatgttcagcaccttcaccacatccgggaacaacatgaatgagggaaaactggttgatccggtcagcggtgctgatgtggtcactacttacgaagacaaggatggcgactggatgctcgttggcgacgtcccgtgggagatgtttgtcgagtcatgcaggcgtctgaggatcatgaagagttctgaagccataggtcttgcaccaagaacgaaggacaagtgcaagaacaggagctgaagaagatacagcgttaaagacgctgcccattgtgtcaaaagaatggtgcccttgcagtgtgctgcggtttttctagaaatataatgcgttttaattactagttggagggagacctgtcttgttcaatttgttcatggaccagaagcaataatctatctgtgtgtagctggattggtgttatgcgatgtcccctaccgtgtcccagaatctacttggtgattttatcccagtgttgttaatcaagcttgtgtgattgttaagtaaagggcatcaatgagactatt

SEQ ID NO: 23513 - protein, 174 aa, Zea mays subsp. mays
  misc_feature (1)..(174): Ceres Seq. ID no. 12413245
  misc_feature (152)..(152): Xaa is any aa, unknown or other
MAGADVDVGTELRLGLPGGGADAAKAAKRGFEDTIDLKLKLPTAGMEEAAAAAAAAAKPEPAAEKAKRPAEAPAADAEKPPAPKAQAVGWPPVRSYRRNVMTVQSVKSKKEEEPEKQQSAANAGGNGSAFVKVSMDGAPYLRKVDLKMYNSXHGALRCSEEDVQHLHHIREQHE

SEQ ID NO: 23514 - protein, 129 aa, Zea mays subsp. mays
  misc_feature (1)..(129): Ceres Seq. ID no. 12413246
  misc_feature (107)..(107): Xaa is any aa, unknown or other
MEEAAAAAAAAAKPEPAAEKAKRPAEAPAADAEKPPAPKAQAVGWPPVRSYRRNVMTVQSVKSKKEEEPEKQQSAANAGGNGSAFVKVSMDGAPYLRKVDLKMYNSXHGALRCSEEDVQHLHHIREQHE

SEQ ID NO: 23515 - DNA, 871 bp, Zea mays subsp. mays
  misc_feature (1)..(871): Ceres Seq. ID no. 12413307
ataattattatcgtttttgggacaggccggcaaggaagcgtaaagggtagggcggtggttggtgacagcagcaggcctccttcctcctcgctcgcggcgcctccgcctatacctgttgcggcaggcaacaaggcaggcaggcagcagcggagtgccttggtgatctacgaagaggatggattccaggatctcgctcctctgcgccctcgtcctcgcctcctccctcctgcactgcgccagatccgacggcaatgacgcgcagctcctcaagggcatcaacagctacaggtcctcgctcaaggtccccggcgctggccgagaacaagaacgcggcgtgcctggccgagcagctcgcgagacagttcaaggggcaggagtgcaccaacacgacgggcgccaacaccgtcatcggcaccgagcagcagttcccggactaccccaggtacctggaccgctgccacctcaacgcgtcggtgaccgaggacggccaggtgatgccggcgtgcgtgccgggcctcgtccccgccgtcgtcctcgccaactacaccaagtcgcagtacaaccggttcctcaacgacagccagttctccggcgccgggatcgcgagcgagggcgactgggtcgtggtcgtgctcagcaccagcacgggatccggcgactactcgccggctccgccgggctccaactgggcggtctcggcagctcggccgttcggcttcggccagctggtccttttgttggtggggtttgtagttttgctggtgaaatgatgagtgtttagtacgcatgcaccaacatcttcgtggcttatgttgtcacgttcaggtctcgttggctttattaagctttttttcacttgaaaagattgatt

SEQ ID NO: 23516 - protein, 201 aa, Zea mays subsp. mays
  misc_feature (1)..(201): Ceres Seq. ID no. 12413308
MDSRISLLCALVLASSLLHCARSDGNDAQLLKGINSYRSSLKVPGAGREQERGVPGRAARETVQGAGVHQHDGRQHRHRHRAAVPGLPQVPGPLPPQRVGDRGRPGDAGVRAGPRPRRRPRQLHQVAVQPVPQRQPVLRRRDRERGRLGRGRAQHQHGIRRLLAGSAGLQLGGLGSSAVRLRPAGPFVGGVCSFAGEMMSV

SEQ ID NO: 23517 - protein, 172 aa, Zea mays subsp. mays
  misc_feature (1)..(172): Ceres Seq. ID no. 12413309
MTRSSSRASTATGPRSRSPALAENKNAACLAEQLARQFKGQECTNTTGANTVIGTEQQFPDYPRYLDRCHLNASVTEDGQVMPACVPGLVPAVVLANYTKSQYNRFLNDSQFSGAGIASEGDWVVVVLSTSTGSGDYSPAPPGSNWAVSAARPFGFGQLVLLLVGFVVLLVK

SEQ ID NO: 23518 - DNA, 1610 bp, Zea mays subsp. mays
  misc_feature (1)..(1610): Ceres Seq. ID no. 12413404
atcagacaagagacacacacacaccacacgcagtcacgcacagcctcggcctccgcagctgcaggcgcctgctgctcttcgacaagaccccaagaactcgccaacctaacctaggtcagccacccttccttctaccttctgcgacaatgcaggccgccgccgcctccgtcaagtcctccaccaccgcggccgcggccgcggccacctgcaaggcgggcttcaagcccctgcacctccctcccctccccgccgccggctccaggccgctgtccctctccgtctccgcgcgtccgctgtaccgccaagaccatgtcctcgcgacaaccgtggcgatggcggcggcgggccgcagcgaccgcgccgcgtcccccgcgcctccgtccgccacagcggacggcgcccggccggtggtggaggtcgccgcgccggcggagaccgcgcgccgcgccaagatcggggtgtacttcgccacgtggtgggcgctgaacgtgatcttcaacatctacaacaagaaggtgctgaacgcgttcccgtacccgtggctcacgtcgacgctgtccctcgccgccggctccgccatcatgctcgcgtcctgggccaccaggatcgccgaggcgccccagacggacctcgacttctggaaggcgctcactcccgttgcgatcgcgcacacgatcgggcacgtcgcggcgacggtgagcatggccaaggtggccgtgtcgttcacgcacatcatcaagagcggggagccggcattcagcgtgctcgtctccaggttcttcctcggcgagcacttcccggcgccggtctacttctccctcctcccgatcatcggtgggtgcgcgctcgccgccgtcaccgagctcaacttcaacatggttgggttcatgggggcaatgatctcgaacctggcgttcgtcgtccggaccatcttctccaagaaggggatgaagggcaagtccgtgagcgggatgaactactacgcctgcctctccatcatgtcgctggtgatcctcctccccttcgccgtcgccatggagggacccaagctctgggcggcgggctggcagcaagcagtcgccgagatcggccccaacttcgtctggtgggtggctgcgcagagcgtgttctaccacctgtacaaccaggtgtcgtacatgtcgctggacgagatctcgccgctcacgttctccatcggcaacaccatgaagaggatctccgtcatcgtcgcctccatcatcatcttccagacgcccgtccagcccatcaacgcgctcggagccgccatcgccatcctcggaaccttcatctactcccaggcaaagcagtaacgccttgcattaattggcgtctagatggcctgccctcatcagttcaccgcggatcagctcggtgctcgaagatgacagcttatgacctttgagaatgtctactaagaatcgccctttgtataatactactagatcctctcttttttgtattttctttcctaggactagcttccagtgttactgggctcatttcgtggtgtttctattatgactaagattagagagagaatgagagatggatccatctaaataaaggttccagattttttttcccctccc

SEQ ID NO: 23519 - protein, 442 aa, Zea mays subsp. mays
  misc_feature (1)..(442): Ceres Seq. ID no. 12413405
QTRDTHTPHAVTHSLGLRSCRRLLLFDKTPRTRQPNLGQPPFLLPSATMQAAAASVKSSTTAAAAAATCKAGFKPLHLPPLPAAGSRPLSLSVSARPLYRQDHVLATTVAMAAAGRSDRAASPAPPSATADGARPVVEVAAPAETARRAKIGVYFATWWALNVIFNIYNKKVLNAFPYPWLTSTLSLAAGSAIMLASWATRIAEAPQTDLDFWKALTPVAIAHTIGHVAATVSMAKVAVSFTHIIKSGEPAFSVLVSRFFLGEHFPAPVYFSLLPIIGGCALAAVTELNFNMVGFMGAMISNLAFVVRTIFSKKGMKGKSVSGMNYYACLSIMSLVILLPFAVAMEGPKLWAAGWQQAVAEIGPNFVWWVAAQSVFYHLYNQVSYMSLDEISPLTFSIGNTMKRISVIVASIIIFQTPVQPINALGAAIAILGTFIYSQAKQ

SEQ ID NO: 23520 - protein, 394 aa, Zea mays subsp. mays
  misc_feature (1)..(394): Ceres Seq. ID no. 12413406
MQAAAASVKSSTTAAAAAATCKAGFKPLHLPPLPAAGSRPLSLSVSARPLYRQDHVLATTVAMAAAGRSDRAASPAPPSATADGARPVVEVAAPAETARRAKIGVYFATWWALNVIFNIYNKKVLNAFPYPWLTSTLSLAAGSAIMLASWATRIAEAPQTDLDFWKALTPVAIAHTIGHVAATVSMAKVAVSFTHIIKSGEPAFSVLVSRFFLGEHFPAPVYFSLLPIIGGCALAAVTELNFNMVGFMGAMISNLAFVVRTIFSKKGMKGKSVSGMNYYACLSIMSLVILLPFAVAMEGPKLWAAGWQQAVAEIGPNFVWWVAAQSVFYHLYNQVSYMSLDEISPLTFSIGNTMKRISVIVASIIIFQTPVQPINALGAAIAILGTFIYSQAKQ

SEQ ID NO: 23521 - protein, 332 aa, Zea mays subsp. mays
  misc_feature (1)..(332): Ceres Seq. ID no. 12413407
MAAAGRSDRAASPAPPSATADGARPVVEVAAPAETARRAKIGVYFATWWALNVIFNIYNKKVLNAFPYPWLTSTLSLAAGSAIMLASWATRIAEAPQTDLDFWKALTPVAIAHTIGHVAATVSMAKVAVSFTHIIKSGEPAFSVLVSRFFLGEHFPAPVYFSLLPIIGGCALAAVTELNFNMVGFMGAMISNLAFVVRTIFSKKGMKGKSVSGMNYYACLSIMSLVILLPFAVAMEGPKLWAAGWQQAVAEIGPNFVWWVAAQSVFYHLYNQVSYMSLDEISPLTFSIGNTMKRISVIVASIIIFQTPVQPINALGAAIAILGTFIYSQAKQ

SEQ ID NO: 23522 - DNA, 1005 bp, Zea mays subsp. mays
  misc_feature (1)..(1005): Ceres Seq. ID no. 12413435
ctcgcatcgcatcgatcctcccatctgcgcacccgcaagcctattctccgcacctcctcaggtgaccgggaagatgatgccgttgagccaaaccgacttctcgccgtcgcagttcacctcctcccagaatgccgccgccgactccaccacgccttccaagatgcgcggcgcgtccagcaccatgccgctcaccgtgaagcaggtcgtcgacgcgcagcagtctggcacgggcgagaagggcgctccgttcatcgtcaatggcgtcgagatggctaacattcgacttgtggggatggtcaatgccaaggtggagcggacgaccgatgtgaccttcacgctcgacgatggcaccggccgcctcgatttcatcagatgggtgaatgatgcttcagattcttttgaaactgctgctattcagaatggtatgtacattgcggtcattggaagcctcaagggactgcaagagaggaagcgtgctactgctttctcaatcaggcctataaccgatttcaatgaggttacgctgcatttcattcagtgtgttcggatgcatatagagaacattgaattaaaggctggcagtcctgcacgaatcagttcttctatgggagtgtcattctcaaatggattcagtgaatcaagcacaccgacatctttgaaatccagtcccgcaccggtgaccagcgggtcatccgatactgatctgcacacgcaggtcctgaatttttttaatgaaccagcgaacctcgagagtgagcatggggtgcacgttgatgaagtactcaagcggttcaaacttttgccgaagaagcagatcacggatgctattgattacaatatggactcggggcgtctttactcaacaattgatgaattccactacaaggcaacttaaccgatttgaaggccagcctgctggaaatggcagaggactaagtatcacttgtactaaaccaaagtctggaaatgtcatgttgtgtcatgaaatgcatggttggtttatgg

SEQ ID NO: 23523 - protein, 297 aa, Zea mays subsp. mays
  misc_feature (1)..(297): Ceres Seq. ID no. 12413436
SHRIDPPICAPASLFSAPPQVTGKMMPLSQTDFSPSQFTSSQNAAADSTTPSKMRGASSTMPLTVKQVVDAQQSGTGEKGAPFIVNGVEMANIRLVGMVNAKVERTTDVTFTLDDGTGRLDFIRWVNDASDSFETAAIQNGMYIAVIGSLKGLQERKRATAFSIRPITDFNEVTLHFIQCVRMHIENIELKAGSPARISSSMGVSFSNGFSESSTPTSLKSSPAPVTSGSSDTDLHTQVLNFFNEPANLESEHGVHVDEVLKRFKLLPKKQITDAIDYNMDSGRLYSTIDEFHYKAT

SEQ ID NO: 23524 - protein, 273 aa, Zea mays subsp. mays
  misc_feature (1)..(273): Ceres Seq. ID no. 12413437
MMPLSQTDFSPSQFTSSQNAAADSTTPSKMRGASSTMPLTVKQVVDAQQSGTGEKGAPFIVNGVEMANIRLVGMVNAKVERTTDVTFTLDDGTGRLDFIRWVNDASDSFETAAIQNGMYIAVIGSLKGLQERKRATAFSIRPITDFNEVTLHFIQCVRMHIENIELKAGSPARISSSMGVSFSNGFSESSTPTSLKSSPAPVTSGSSDTDLHTQVLNFFNEPANLESEHGVHVDEVLKRFKLLPKKQITDAIDYNMDSGRLYSTIDEFHYKAT

SEQ ID NO: 23525 - protein, 272 aa, Zea mays subsp. mays
  misc_feature (1)..(272): Ceres Seq. ID no. 12413438
MPLSQTDFSPSQFTSSQNAAADSTTPSKMRGASSTMPLTVKQVVDAQQSGTGEKGAPFIVNGVEMANIRLVGMVNAKVERTTDVTFTLDDGTGRLDFIRWVNDASDSFETAAIQNGMYIAVIGSLKGLQERKRATAFSIRPITDFNEVTLHFIQCVRMHIENIELKAGSPARISSSMGVSFSNGFSESSTPTSLKSSPAPVTSGSSDTDLHTQVLNFFNEPANLESEHGVHVDEVLKRFKLLPKKQITDAIDYNMDSGRLYSTIDEFHYKAT

SEQ ID NO: 23526 - DNA, 1412 bp, Zea mays subsp. mays
  misc_feature (1)..(1412): Ceres Seq. ID no. 12413439
tctcttttccgcccatggtggccgcgccaccaccgccgccgcagtttgccaagcacttcgctgctgggccgcccccgccgccccaagctggtgctgggcgccgcacgccgaccccgccctcgtctggatccggcgggaacgggtgcgaagaaaataaaaccatttgggtcggtgacctccagtactggatggatgaaaactacctacataactgcttcgggcccagcggcgaggtggttacaataaaagttatccgcaataggcaaacaggacagtcagaggggtatggatttgttgagttcttttctcatgcatcaggcagagaaagctcttcagaattttactggtcatgtgatgccaaacactgaccggccatttaaattgaactgggcatcgtatagcatgggtgaaaagcgatctgaagtggcttctgatcactcgatatttgttggcgatctagctgctgatgtcactgatgaaatgctgctggagcttttctccagcaagtaccgctcggtgaaaggagctaaagttattattgatgcaaacacaggccgttccaggggctatggatttgtcaggtttggagacgacaacgacaaatctcatgccatgtctgaaatgaatggtgtatattgctctacgaggccaattcgtataggacctgcgactcccagaagatcttcaggtgattctggctcctcgactcctggtcattcagatggtgattcttctaacagaacggtatatgttggtgggcttgaccccaatgtcagtgaagatgaactgagaaaagcctttgccaaatatgatcttgcctctgtgaaaattcctctaggaaagcaatgtggctttgttcaatttgttagcagaactgatgctgaagaagcactacaaggattaaatggatcactcattggaaagcaggcagttcgcctttcatgggtccgcagcccatcgcataagcagtctaggggtgactccgtcaacaggaggaacaacatgtactatggcacaccattctacggcggatatggctatgcctccccggtgccacacccaaacatgtacgctgcagcgtatggcacgtacccgctatatggcaaccagcagctagtgagctagagagctcccctccgacgtgtcccctctgacgggaaacaaaggttttggtccggtgagcatagtagcgtcaggtgagaaggtgcctttataaggctgtcctaagaagtgggcgagatatgttgttgcatcgttatcgttatggtgcctgtaactgttgtgtgtgccgtgtgcgtccggaagaattggatggaatggaactcgtggcttgttgtagtacatcagagagtcatgttattctttcaagaaattttgacttggtaataaattaaactattgtttgtgcgtcc

SEQ ID NO: 23527 - protein, 279 aa, Zea mays subsp. mays
  misc_feature (1)..(279): Ceres Seq. ID no. 12413440
MDLLSSFLMHQAEKALQNFTGHVMPNTDRPFKLNWASYSMGEKRSEVASDHSIFVGDLAADVTDEMLLELFSSKYRSVKGAKVIIDANTGRSRGYGFVRFGDDNDKSHAMSEMNGVYCSTRPIRIGPATPRRSSGDSGSSTPGHSDGDSSNRTVYVGGLDPNVSEDELRKAFAKYDLASVKIPLGKQCGFVQFVSRTDAEEALQGLNGSLIGKQAVRLSWVRSPSHKQSRGDSVNRRNNMYYGTPFYGGYGYASPVPHPNMYAAAYGTYPLYGNQQLVS

SEQ ID NO: 23528 - protein, 271 aa, Zea mays subsp. mays
  misc_feature (1)..(271): Ceres Seq. ID no. 12413441
MHQAEKALQNFTGHVMPNTDRPFKLNWASYSMGEKRSEVASDHSIFVGDLAADVTDEMLLELFSSKYRSVKGAKVIIDANTGRSRGYGFVRFGDDNDKSHAMSEMNGVYCSTRPIRIGPATPRRSSGDSGSSTPGHSDGDSSNRTVYVGGLDPNVSEDELRKAFAKYDLASVKIPLGKQCGFVQFVSRTDAEEALQGLNGSLIGKQAVRLSWVRSPSHKQSRGDSVNRRNNMYYGTPFYGGYGYASPVPHPNMYAAAYGTYPLYGNQQLVS

SEQ ID NO: 23529 - protein, 256 aa, Zea mays subsp. mays
  misc_feature (1)..(256): Ceres Seq. ID no. 12413442
MPNTDRPFKLNWASYSMGEKRSEVASDHSIFVGDLAADVTDEMLLELFSSKYRSVKGAKVIIDANTGRSRGYGFVRFGDDNDKSHAMSEMNGVYCSTRPIRIGPATPRRSSGDSGSSTPGHSDGDSSNRTVYVGGLDPNVSEDELRKAFAKYDLASVKIPLGKQCGFVQFVSRTDAEEALQGLNGSLIGKQAVRLSWVRSPSHKQSRGDSVNRRNNMYYGTPFYGGYGYASPVPHPNMYAAAYGTYPLYGNQQLVS

SEQ ID NO: 23530 - DNA, 1343 bp, Zea mays subsp. mays
  misc_feature (1)..(1343): Ceres Seq. ID no. 12413475
aaacccaaacctgattaatgcctcgcctccattccgtactctcctgctgaagcttttttctctgaaactagtatatcccccatctgtttggtcccgacgattttccgctttgggagcaccaccaagctcttccagcttgcagggctggagtctttgccagggacagcaatggtgccgacgcatggcgatacagccggaccgagctccagccaggatgacccggcagccagcgtgaagaagcgcaacagcaacaggcctcagtatcatccgtttactcagcaacagcttccagcttgcaagcctatacttgcgcctcagacggtcatccctgtactcctgtttgtgggcgtagtttttatcgtgattggccttggctgcattgcagcctcaaacagggtggttgaagtggtctatgagtatgagacttcatgcataccaagacacatgcttggcaacaaagtcgcctatatccaaaacccatctatagataagacatgcacatggattctcaaggttcctagggatatgaagcacccaatctacgtatattaccagcttgacaagttctaccagaaccacaggaggtacgtgaagagccgcagcgacaagcagctgagagatcccaaggaggccaacagcacgcagcagtactgcaagcccgaagctaccaccgagcacgggagcgccgtcgtcccctgcgggctcgtggcctggagcctgttcaacgacacctacagcttcgcccggggcaacaacagggcgctgagggtccacaagcgaggcatctcgtggaggagcgagagggaacacatcttcgggaagcaggtgttcccgaggaatttccagaaaggagctctgatcggaggaggcacgcttgatccaagaatacctctgagtgagcaagaagacctgatcgtgtggatgcggaccgcggctctgccgacgttccggaagctgtacggcaggatcgaggcggacctccgcgccggcgagctggtcacggtgacgacgcagaataactacaacacctacagcttcggcgggaagaaggcgctggtgctgtccacggccggcgtgctgggaggcaggaacggcttcctcggccgcgggtacgccgtcgtcggcctggcctgcctgctgctggcgctgctcctcaccatgctctgcctcgtcttcccactgaaagaggaacaccttgcgctgcagtaccctttgctccggcctgccacggtgaccatgcatgcctagctagatcagtagacggtgtacagattgaaacagtttcttctttttcatttttgatgtatactcagattgaaacagtttgttctttttcttcttgg

SEQ ID NO: 23531 - protein, 359 aa, Zea mays subsp. mays
  misc_feature (1)..(359): Ceres Seq. ID no. 12413476
MVPTHGDTAGPSSSQDDPAASVKKRNSNRPQYHPFTQQQLPACKPILAPQTVIPVLLFVGVVFIVIGLGCIAASNRVVEVVYEYETSCIPRHMLGNKVAYIQNPSIDKTCTWILKVPRDMKHPIYVYYQLDKFYQNHRRYVKSRSDKQLRDPKEANSTQQYCKPEATTEHGSAVVPCGLVAWSLFNDTYSFARGNNRALRVHKRGISWRSEREHIFGKQVFPRNFQKGALIGGGTLDPRIPLSEQEDLIVWMRTAALPTFRKLYGRIEADLRAGELVTVTTQNNYNTYSFGGKKALVLSTAGVLGGRNGFLGRGYAVVGLACLLLALLLTMLCLVFPLKEEHLALQYPLLRPATVTMHA

SEQ ID NO: 23532 - protein, 267 aa, Zea mays subsp. mays
  misc_feature (1)..(267): Ceres Seq. ID no. 12413477
MLGNKVAYIQNPSIDKTCTWILKVPRDMKHPIYVYYQLDKFYQNHRRYVKSRSDKQLRDPKEANSTQQYCKPEATTEHGSAVVPCGLVAWSLFNDTYSFARGNNRALRVHKRGISWRSEREHIFGKQVFPRNFQKGALIGGGTLDPRIPLSEQEDLIVWMRTAALPTFRKLYGRIEADLRAGELVTVTTQNNYNTYSFGGKKALVLSTAGVLGGRNGFLGRGYAVVGLACLLLALLLTMLCLVFPLKEEHLALQYPLLRPATVTMHA

SEQ ID NO: 23533 - protein, 240 aa, Zea mays subsp. mays
  misc_feature (1)..(240): Ceres Seq. ID no. 12413478
MKHPIYVYYQLDKFYQNHRRYVKSRSDKQLRDPKEANSTQQYCKPEATTEHGSAVVPCGLVAWSLFNDTYSFARGNNRALRVHKRGISWRSEREHIFGKQVFPRNFQKGALIGGGTLDPRIPLSEQEDLIVWMRTAALPTFRKLYGRIEADLRAGELVTVTTQNNYNTYSFGGKKALVLSTAGVLGGRNGFLGRGYAVVGLACLLLALLLTMLCLVFPLKEEHLALQYPLLRPATVTMHA

SEQ ID NO: 23534 - DNA, 1262 bp, Zea mays subsp. mays
  misc_feature (1)..(1262): Ceres Seq. ID no. 12413536
gcagactgcagtgcacagggaccgtaccggggagggccggcggcagccatggcgcgcaaggacacagtgccgcttgtcactgcttccggcttcgtggtggcgtcgctgctgctcctgctctgcgccactcgctgcgaagcgagggtcatggcggcgagcaggagcaggagcaggagcaccagcccgctgctcaacgtgctgttcaagctcaacttcatccgcacggtggagccaccgcgccgacttcccactccgaccgccgacgccaccgtcagcctcgccgcgggcgacaccaactcgccgttctgcgtcaacccaccagacgcgccgtcgtccacgacgcctccgtccacgtcatccacgtcatccacgacgcctccgtccacgtcgtccacgccttcgttgccgggccaggcccaggcgccgccgctgccgccgatcacccccgtgccgccgtccttcgagcccagcccgccggagaacggcgccccgggtggaggccagggaggaggagatcaaggccagggaggaggaggtcaaggccagggaggcccaccggcatccacgacaccgaactcgccgccgcaggcaggtccgggagcgccgtttgggtcggtgccgccgagcccccatcgtcatggtgccgagcccgccaggattcggccctggtcccggctccggctcaggcggtggctcgggatccggcgacggcggcggcccgttccagccgccgatcgtgtacccacctccgctggcgccgccgatgctgccgggcgccgggcagacgctgtggtgcgtggccaagcccacggtgccggaccccatcatccaggaggccatggactacgcgtgcggctccggcgccgagtgcgactccatcctgcccagcggcgcgtgctaccaccccaacaccgtgctcgcgcacgcctccttcgcgttcaacagctactggcagcagaacaaggcgaccggcggcaccgccaccattatcaccagagacccgagctacgagaagtgcaaatttgaccttctgtgacgagggagggtacgtagatatgcaggagaacagactgcagataccaaattttttccccaagcttcagttggagttaacattcattttgcttctaggccacaccgatgcacattttgtaactagctcttcttcactagtatggttttgaattttgtaagcctgatactgcgcaaaaggggaaactaaaggtgattccttgacatatttgatatacaagctcttgctc

SEQ ID NO: 23535 - protein, 393 aa, Zea mays subsp. mays
  misc_feature (1)..(393): Ceres Seq. ID no. 12413537
RLQCTGTVPGRAGGSHGAQGHSAACHCFRLRGGVAAAPALRHSLRSEGHGGEQEQEQEHQPAAQRAVQAQLHPHGGATAPTSHSDRRRHRQPRRGRHQLAVLRQPTRRAVVHDASVHVIHVIHDASVHVVHAFVAGPGPGAAAAADHPRAAVLRAQPAGERRPGWRPGRRRSRPGRRRSRPGRPTGIHDTELAAAGRSGSAVWVGAAEPPSSWCRARQDSALVPAPAQAVARDPATAAARSSRRSCTHLRWRRRCCRAPGRRCGAWPSPRCRTPSSRRPWTTRAAPAPSATPSCPAARATTPTPCSRTPPSRSTATGSRTRRPAAPPPLSPETRATRSANLTFCDEGGYVDMQENRLQIPNFFPKLQLELTFILLLGHTDAHFVTSSSSLVWF

SEQ ID NO: 23536 - protein, 344 aa, Zea mays subsp. mays
  misc_feature (1)..(344): Ceres Seq. ID no. 12413538
QTAVHRDRTGEGRRQPWRARTQCRLSLLPASWWRRCCSCSAPLAAKRGSWRRAGAGAGAPARCSTCCSSSTSSARWSHRADFPLRPPTPPSASPRATPTRRSASTHQTRRRPRRLRPRHPRHPRRLRPRRPRLRCRARPRRRRCRRSPPCRRPSSPARRRTAPRVEAREEEIKAREEEVKAREAHRHPRHRTRRRRQVRERRLGRCRRAPIVMVPSPPGFGPGPGSGSGGGSGSGDGGGPFQPPIVYPPPLAPPMLPGAGQTLWCVAKPTVPDPIIQEAMDYACGSGAECDSILPSGACYHPNTVLAHASFAFNSYWQQNKATGGTATIITRDPSYEKCKFDLL

SEQ ID NO: 23537 - protein, 341 aa, Zea mays subsp. mays
  misc_feature (1)..(341): Ceres Seq. ID no. 12413539
ADCSAQGPYRGGPAAAMARKDTVPLVTASGFVVASLLLLLCATRCEARVMAASRSRSRSTSPLLNVLFKLNFIRTVEPPRRLPTPTADATVSLAAGDTNSPFCVNPPDAPSSTTPPSTSSTSSTTPPSTSSTPSLPGQAQAPPLPPITPVPPSFEPSPPENGAPGGGQGGGDQGQGGGGQGQGGPPASTTPNSPPQAGPGAPFGSVPPSPHRHGAEPARIRPWSRLRLRRWLGIRRRRRPVPAADRVPTSAGAADAAGRRADAVVRGQAHGAGPHHPGGHGLRVRLRRRVRLHPAQRRVLPPQHRARARLLRVQQLLAAEQGDRRHRHHYHQRPELREVQI

SEQ ID NO: 23538 - protein, 325 aa, Zea mays subsp. mays
  misc_feature (1)..(325): Ceres Seq. ID no. 12413540
MARKDTVPLVTASGFVVASLLLLLCATRCEARVMAASRSRSRSTSPLLNVLFKLNFIRTVEPPRRLPTPTADATVSLAAGDTNSPFCVNPPDAPSSTTPPSTSSTSSTTPPSTSSTPSLPGQAQAPPLPPITPVPPSFEPSPPENGAPGGGQGGGDQGQGGGGQGQGGPPASTTPNSPPQAGPGAPFGSVPPSPHRHGAEPARIRPWSRLRLRRWLGIRRRRRPVPAADRVPTSAGAADAAGRRADAVVRGQAHGAGPHHPGGHGLRVRLRRRVRLHPAQRRVLPPQHRARARLLRVQQLLAAEQGDRRHRHHYHQRPELREVQI

SEQ ID NO: 23539 - DNA, 1710 bp, Zea mays subsp. mays
  misc_feature (1)..(1710): Ceres Seq. ID no. 12413551
tgaataccagtatccgcagtgtaaaagcttcattttattacaaaaaaaaaatcttcgtcctccccgcgaagacgcttcccgagcttctccttcgttcctcctcttccccgcggctctcctctgccccgcaccggcaccgctagggttttgccgccgacctctcgctcgcttccgggctccgcgaggcaaccgtccggaccggccggtcgaaatggtggatgtggaggaggtcgggaacaagatgcaatcgcagatgcgcctgcacgcggaccggatgacgccgccgccgacctccccctcccggcgctcttcgacagggcgtcgcggcttcacgccctggcctccagctccgccctcgaccaggatgggatccgcaccggggttgagctgctgcggacgctgcgacgagatggtcggcaggctcggtcttttctcccccaacgagaccaaggacgacgtctccaccgcaaacctcaagtacctactcgtcccatattaccttgcggaaatgaccgagaagatggcgcaggaggatcggatcccggttcttaaggcgtcgcaggaccatttgaaggagttcattgctctatgcgaagtactagagcttattccagaggatgagctagaattgtctaggcagaagcagtctgatactatggcaaacagaagagcacagaaggttgcccggttcaaacgtcaaaaggctgcagaaacaaagctccaagagatcagagagagaaaagaaaggcgtggacgctcattgagagcaactgctttgtctgccccagttgaagctggagaggaagatgacctggaggatgacggggaggaagaaagggaggcttggttagctaccatctcattggctatctgcaaggcttttgatcttctcgacatgttaaagaaggaagaagaaatgcttctagctgtaaaggaaaggaaggcaaaggacgggaatgcatttgctcgtgaaatgctcgacgaacggacaaagaaggctgaagcatggcaccacaaagctgccagtcgtgtggcgtattccaaaccagccgatccgatcacctgtgcaacatttgctcaggatgtcattgaagggagagcgagcgtttcacaggcccacgagcacaaacaccagcccctgatatttggacctgcaagccttgttggcggcggtctgaccagtgaaagggaaagaatggcagcgcaagtttttcagcccagttacaggatgccaacaatgagcatagaagaggctggcttgcgcgagatgaagatgatggagagntggcaagagaggaccnccgagatgatgagagaagcaaactccgcntggcacaagggcggcgacagcagcagcagctcgatnccgcaaggggaggncggggacgaggatgccgaggaggccaaggcacgagcgtgggacgactggaaggacgacaaccctcgcggcgctggcaacaagaagctcacgccctgtggctagactgcaaatcgaagcacgctcgctgtgtgatcgtacggtgtttgactcgaccagtatttagtttgtatctgacgatcagtgtatttattatataggctgcttctgtaacagtgtgtttatacaccatccactgcagcttcttcacacaggtgtttccgaagttaactgggttagacaaactgtgttgtccaagcaagagtatctaacaaatagctacgtaactactt

SEQ ID NO: 23540 - protein, 493 aa, Zea mays subsp. mays
  misc_feature (1)..(493): Ceres Seq. ID no. 12413552
  misc_feature (428)..(428): Xaa is any aa, unknown or other
  misc_feature (434)..(434): Xaa is any aa, unknown or other
  misc_feature (443)..(443): Xaa is any aa, unknown or other
  misc_feature (455)..(455): Xaa is any aa, unknown or other
  misc_feature (460)..(460): Xaa is any aa, unknown or other
EYQYPQCKSFILLQKKNLRPPREDASRASPSFLLFPAALLCPAPAPLGFCRRPLARFRAPRGNRPDRPVEMVDVEEVGNKMQSQMRLHADRMTPPPTSPSRRSSTGRRGFTPWPPAPPSTRMGSAPGLSCCGRCDEMVGRLGLFSPNETKDDVSTANLKYLLVPYYLAEMTEKMAQEDRIPVLKASQDHLKEFIALCEVLELIPEDELELSRQKQSDTMANRRAQKVARFKRQKAAETKLQEIRERKERRGRSLRATALSAPVEAGEEDDLEDDGEEEREAWLATISLAICKAFDLLDMLKKEEEMLLAVKERKAKDGNAFAREMLDERTKKAEAWHHKAASRVAYSKPADPITCATFAQDVIEGRASVSQAHEHKHQPLIFGPASLVGGGLTSERERMAAQVFQPSYRMPTMSIEEAGLREMKMMEXWQERTXEMMREANSXWHKGGDSSSSSXPQGEXGDEDAEEAKARAWDDWKDDNPRGAGNKKLTPCG

SEQ ID NO: 23541 - protein, 423 aa, Zea mays subsp. mays
  misc_feature (1)..(423): Ceres Seq. ID no. 12413553
  misc_feature (358)..(358): Xaa is any aa, unknown or other
  misc_feature (364)..(364): Xaa is any aa, unknown or other
  misc_feature (373)..(373): Xaa is any aa, unknown or other
  misc_feature (385)..(385): Xaa is any aa, unknown or other
  misc_feature (390)..(390): Xaa is any aa, unknown or other
MVDVEEVGNKMQSQMRLHADRMTPPPTSPSRRSSTGRRGFTPWPPAPPSTRMGSAPGLSCCGRCDEMVGRLGLFSPNETKDDVSTANLKYLLVPYYLAEMTEKMAQEDRIPVLKASQDHLKEFIALCEVLELIPEDELELSRQKQSDTMANRRAQKVARFKRQKAAETKLQEIRERKERRGRSLRATALSAPVEAGEEDDLEDDGEEEREAWLATISLAICKAFDLLDMLKKEEEMLLAVKERKAKDGNAFAREMLDERTKKAEAWHHKAASRVAYSKPADPITCATFAQDVIEGRASVSQAHEHKHQPLIFGPASLVGGGLTSERERMAAQVFQPSYRMPTMSIEEAGLREMKMMEXWQERTXEMMREANSXWHKGGDSSSSSXPQGEXGDEDAEEAKARAWDDWKDDNPRGAGNKKLTPCG

SEQ ID NO: 23542 - protein, 413 aa, Zea mays subsp. mays
  misc_feature (1)..(413): Ceres Seq. ID no. 12413554
  misc_feature (348)..(348): Xaa is any aa, unknown or other
  misc_feature (354)..(354): Xaa is any aa, unknown or other
  misc_feature (363)..(363): Xaa is any aa, unknown or other
  misc_feature (375)..(375): Xaa is any aa, unknown or other
  misc_feature (380)..(380): Xaa is any aa, unknown or other
MQSQMRLHADRMTPPPTSPSRRSSTGRRGFTPWPPAPPSTRMGSAPGLSCCGRCDEMVGRLGLFSPNETKDDVSTANLKYLLVPYYLAEMTEKMAQEDRIPVLKASQDHLKEFIALCEVLELIPEDELELSRQKQSDTMANRRAQKVARFKRQKAAETKLQEIRERKERRGRSLRATALSAPVEAGEEDDLEDDGEEEREAWLATISLAICKAFDLLDMLKKEEEMLLAVKERKAKDGNAFAREMLDERTKKAEAWHHKAASRVAYSKPADPITCATFAQDVIEGRASVSQAHEHKHQPLIFGPASLVGGGLTSERERMAAQVFQPSYRMPTMSIEEAGLREMKMMEXWQERTXEMMREANSXWHKGGDSSSSSXPQGEXGDEDAEEAKARAWDDWKDDNPRGAGNKKLTPCG

SEQ ID NO: 23543 - DNA, 1181 bp, Zea mays subsp. mays
  misc_feature (1)..(1181): Ceres Seq. ID no. 12413563
aaatttccccacacgcgcccacctcctccgggtcctcccctctagtcctctctcccgaccccacctctgccgtccgtgcgtccgtccggcaaccgcgacgcaacaatggcggccgggcgagagctggtggtgagtttcggcgagatgctgatagacttcgtgccgaccgtggcgggggtctcgctggccgaggcgccggccttcctcaaggcggccgggggcgcgcccgccaacgtcgccatcgcggtctcgcgcctcggtggcggggccgccttcgttggcaagctcggcgacgacgagttcggccgcatgctcgccgccatcctccgcgacaacggcgtcgacggcggcggcgtcgtcttcgacgcgggcgcgcgcaccggnntnttnccttcgtcaccctgcgcgccgacggcgagcgcgagttcatgttctaccgcaaccccagcgccgacatgctcctcactgccgacgagctcaacgtcgggctcatccggagggctgcggtctttcactacggatcaataagcttgattgctgagccttgccggacagcacatctccgtgccatggaaattgccaaagaggctggtgcactgctctcttacgacccaaacctgagggaggcactttggccatcccgtgaggaggcccgcacccagatcttgagcatctgggaccaggcagatatcgtcaaggtcagcgaagtcgagcttgagttcttgacaggcatcaactcagtggaggacgatgttgtcatgaagctgtggcgacctaccatgaagctgctcctggtgactcttggagatcaaggatgcaagtactataccagggatttccatggagctgtcccttccttcaaagtacaacaagtcgatacgactggcgcaggcgatgcgtttgttggtgcgctgctccgaaggatcgttaaagatccatcctcgctacaagacgagaagaagcttgtagagtctattaaattcgctaatgcgtgtggagcaatcaccgccacgaagaagggtgcgatcccgtctttgcccactgaaactgaggtcttgcagctaatagagaaggcatagatagatcactgtaattgctttggttttcactagcttccacttctgcaaattgcaaaatgtattgtattctgatctggaacagaagaagtgggtgctccatcc

SEQ ID NO: 23544 - protein, 358 aa, Zea mays subsp. mays
  misc_feature (1)..(358): Ceres Seq. ID no. 12413564
  misc_feature (128)..(128): Xaa is any aa, unknown or other
  misc_feature (129)..(129): Xaa is any aa, unknown or other
  misc_feature (130)..(130): Xaa is any aa, unknown or other
ISPHAPTSSGSSPLVLSPDPTSAVRASVRQPRRNNGGRARAGGEFRRDADRLRADRGGGLAGRGAGLPQGGRGRARQRRHRGLAPRWRGRLRWQARRRRVRPHARRHPPRQRRRRRRRRLRRGRAHRXXXFVTLRADGEREFMFYRNPSADMLLTADELNVGLIRRAAVFHYGSISLIAEPCRTAHLRAMEIAKEAGALLSYDPNLREALWPSREEARTQILSIWDQADIVKVSEVELEFLTGINSVEDDVVMKLWRPTMKLLLVTLGDQGCKYYTRDFHGAVPSFKVQQVDTTGAGDAFVGALLRRIVKDPSSLQDEKKLVESIKFANACGAITATKKGAIPSLPTETEVLQLIEKA

SEQ ID NO: 23545 - protein, 216 aa, Zea mays subsp. mays
  misc_feature (1)..(216): Ceres Seq. ID no. 12413565
MFYRNPSADMLLTADELNVGLIRRAAVFHYGSISLIAEPCRTAHLRAMEIAKEAGALLSYDPNLREALWPSREEARTQILSIWDQADIVKVSEVELEFLTGINSVEDDVVMKLWRPTMKLLLVTLGDQGCKYYTRDFHGAVPSFKVQQVDTTGAGDAFVGALLRRIVKDPSSLQDEKKLVESIKFANACGAITATKKGAIPSLPTETEVLQLIEKA

SEQ ID NO: 23546 - protein, 207 aa, Zea mays subsp. mays
  misc_feature (1)..(207): Ceres Seq. ID no. 12413566
MLLTADELNVGLIRRAAVFHYGSISLIAEPCRTAHLRAMEIAKEAGALLSYDPNLREALWPSREEARTQILSIWDQADIVKVSEVELEFLTGINSVEDDVVMKLWRPTMKLLLVTLGDQGCKYYTRDFHGAVPSFKVQQVDTTGAGDAFVGALLRRIVKDPSSLQDEKKLVESIKFANACGAITATKKGAIPSLPTETEVLQLIEKA

SEQ ID NO: 23547 - DNA, 924 bp, Zea mays subsp. mays
  misc_feature (1)..(924): Ceres Seq. ID no. 12413613
aaaaaactgccactccactcctaccccacacagaagcggcggcggcggagcaaacgcaggcgaaggcgagggtgtgagggaaggagcaccagccatggtgcacgtcaacttctaccgcaactatggtaagacgttcaagaaaccaaggcgtccttatgagaaggagcgtcttgatgctgaactgaagctggtcggtgagtatgggctgaggtgcaagcgtgagctttggagggtccagtatgcactgagcaggatccgtaatgctgcaaggcacttgctcacccttgacgagaagaacccccgtcgtatctttgagggtgaggcgcttcttcgccgcatgaaccgctatgggctgcttgctgagggtcagaacaagcttgattatgttcttgccctcaccgctgagaacttcctcgcaaggcggcttcaaacacttgtcttcaaggctggcatggccaagtccattcaccatgctcgtgtcttgatcaagcagcgtcacatcagggttggcaggcaaattgtcaacgtcccatcattcatggtgagggtggagtctgagaagcacattgacttttcactgtcaagcccattcggtggaggccccgcaggaagggtgaagagaaagaatcagaagaaggcaagcggtggcggcgatgctggcgatgaggatgaggagtgaggatggacaagtagcgttacccaatataataatattatctagttttcttgaacttgttcgaatgatgagtgcttagctgtgtgatctgacgcagagttccctgtgctgactctgtgtcatggatggtccattttatcttatggtattatcagcctttacataactgctatgtttggatatgttcaattctgttgcaattttatgtggttgttttttgcgttttgttgctattaagctgttctttc

SEQ ID NO: 23548 - protein, 225 aa, Zea mays subsp. mays
  misc_feature (1)..(225): Ceres Seq. ID no. 12413614
KNCHSTPTPHRSGGGGANAGEGEGVREGAPAMVHVNFYRNYGKTFKKPRRPYEKERLDAELKLVGEYGLRCKRELWRVQYALSRIRNAARHLLTLDEKNPRRIFEGEALLRRMNRYGLLAEGQNKLDYVLALTAENFLARRLQTLVFKAGMAKSIHHARVLIKQRHIRVGRQIVNVPSFMVRVESEKHIDFSLSSPFGGGPAGRVKRKNQKKASGGGDAGDEDEE

SEQ ID NO: 23549 - protein, 194 aa, Zea mays subsp. mays
  misc_feature (1)..(194): Ceres Seq. ID no. 12413615
MVHVNFYRNYGKTFKKPRRPYEKERLDAELKLVGEYGLRCKRELWRVQYALSRIRNAARHLLTLDEKNPRRIFEGEALLRRMNRYGLLAEGQNKLDYVLALTAENFLARRLQTLVFKAGMAKSIHHARVLIKQRHIRVGRQIVNVPSFMVRVESEKHIDFSLSSPFGGGPAGRVKRKNQKKASGGGDAGDEDEE

SEQ ID NO: 23550 - protein, 113 aa, Zea mays subsp. mays
  misc_feature (1)..(113): Ceres Seq. ID no. 12413616
MNRYGLLAEGQNKLDYVLALTAENFLARRLQTLVFKAGMAKSIHHARVLIKQRHIRVGRQIVNVPSFMVRVESEKHIDFSLSSPFGGGPAGRVKRKNQKKASGGGDAGDEDEE

SEQ ID NO: 23551 - DNA, 1283 bp, Zea mays subsp. mays
  misc_feature (1)..(1283): Ceres Seq. ID no. 12413628
aagcactcatccattccatcatcccctttgcaagtatagtctctctgctaagcgaagcgaagcttcaagctagtctcggcggctctagaagacgatgggcaaggacgacgtgatcgagagcggcgctggcggcggcgagttcgctgccaaggactacacggaccctcccccggcgccgctgatcgacgcggcggagctggggtcctggtcgctgtaccgcgccgtgatcgccgagttcatcgccacgctgctgttcctgtacatcacggtggccaccgtgatcgggtacaagcaccagacggacgcgtcggcgtcgggcgccgacgcggcgtgcggcggcgtgggcgtgctgggcatcgcctgggccttcggcggcatgatcttcgtcctcgtctactgcaccgccggcatctcggggggccacatcaaccccgccgtcaccttcggcctcttcctggcgcgcaaggtctccctggtgcgcgcgctgctctacatcgtggcgcagtgcctcggcgccatctgcggcgtcggcctcgtcaaggcgttccagagcgcctacttcgacaggtacggcggcggcgccaactcgctcgcctccggctactcccgcggcaccggcctcggcgccgagatcatcggcaccttcgtgctcgtctacaccgtcttctccgccaccgaccccaagcgcaacgcccgcgactcccacgtcccggttctggctcccctccccatcggcttcgccgtgttcatggtgcacctggccaccatccccgtcaccggcaccggcatcaacccggccaggagcctgggcgccgccgtcatctacaacaaggacaagccctgggacgaccactggatcttctgggtgggccctctcgtgggcgctgccatcgcggccttctaccaccagtacatcctccgggctggcgccatcaaggcccctcggctccttcaggagcaacgcgtgatgagcggggcttggctgtggagcaatggcgggcgacctacgggcggggggccgtgagcgaggagaatgccatcattcatcgatcgacttgggtgccggtggttggttcgggtcgcctttttttttgtttcagcagctgctgcgttgcgcgcgtgcgtgagatttggtttggtttcgttcccctgcaatgtaatcatgtcgtgactctcaagggattattccgctctgctcttatggtctctgttttctatttaatgattgttattaccatgtagcagtaaccatcgtcatcagtgagaaccttgttgcttctgtc

SEQ ID NO: 23552 - protein, 309 aa, Zea mays subsp. mays
  misc_feature (1)..(309): Ceres Seq. ID no. 12413629
MGKDDVIESGAGGGEFAAKDYTDPPPAPLIDAAELGSWSLYRAVIAEFIATLLFLYITVATVIGYKHQTDASASGADAACGGVGVLGIAWAFGGMIFVLVYCTAGISGGHINPAVTFGLFLARKVSLVRALLYIVAQCLGAICGVGLVKAFQSAYFDRYGGGANSLASGYSRGTGLGAEIIGTFVLVYTVFSATDPKRNARDSHVPVLAPLPIGFAVFMVHLATIPVTGTGINPARSLGAAVIYNKDKPWDDHWIFWVGPLVGAAIAAFYHQYILRAGAIKAPRLLQEQRVMSGAWLWSNGGRPTGGGP

SEQ ID NO: 23553 - protein, 215 aa, Zea mays subsp. mays
  misc_feature (1)..(215): Ceres Seq. ID no. 12413630
MIFVLVYCTAGISGGHINPAVTFGLFLARKVSLVRALLYIVAQCLGAICGVGLVKAFQSAYFDRYGGGANSLASGYSRGTGLGAEIIGTFVLVYTVFSATDPKRNARDSHVPVLAPLPIGFAVFMVHLATIPVTGTGINPARSLGAAVIYNKDKPWDDHWIFWVGPLVGAAIAAFYHQYILRAGAIKAPRLLQEQRVMSGAWLWSNGGRPTGGGP

SEQ ID NO: 23554 - DNA, 1689 bp, Zea mays subsp. mays
  misc_feature (1)..(1689): Ceres Seq. ID no. 12413652
atcactgattctgattctgattccagccaccctgaccggcgaagcgcggctgacatttcccccccaccataccgccaccacctgagaagagatcgatccaatcagattaaccaattagcagggagggaggagaggggcaaaggcaatggccgggacggaggtggaggacccgccggcggcggcgttggaggtgcccgcgaaacgcggccttctgcggtacaactcgccgctggcgcaggtgtccctgctgggcctcatctgcttctgctgccccggcatgttcaacgcgctgtcgggcctcggcggcggaggccaggtcgaccccaccatcgccgacaacgccaacaccgcgctctacgcctgcttcgcggtgttcggcgtgctgggcggcgccgcgcacaacctgctgggcccgcgcgcgacgctgctggccggcgcgctcacgtacccgctctacgccggctccttcctctactacaaccaccgcccgggctcgcaggtgttccccgtcacggcgggcgccctgctcggcgccggcgcgggcttcctctgggcggcgcagggcgccgtcatgacgtcgtacccgccgcccaaccgccggggcacctacatctccctcttctggtgcctcttcaacctgggcggcgtcctcggcggcctcctccctttcgccctcaactacaaccgcggggacaagaaagggagcgtcagcgacggcacgtacatcgccttcatggcattcatgctcgtcggcgccgcgctcaccgtgctcgtgctgccgcccgccaggatcgtccgcgacgacggcaccagggccaccagggtcaccttctcctccccggccaccgagggcgccgagatcctcaagctcttcgccaactggaagatgctgctcgcgctgccggccgcctgggccagcaacttcttctacacctaccagttcaacaacgtcaacagcggcctcttcacgctccgcaccaggggcctcaacaacgtcttctactggggcgcgcagatgatcggctccgccggcatcggctacttcctcgacttcggcttcgccagccgccgaaagagggggctgttcggggtcgccgccgtcgccgccgtcggaacggccatctggggaggcggtctggccaaccagctcagctacaaagccgtgccggtggccgaccccatcgatttcaaggacggccaccgctacgccgggcccttcctgctctacttcagctacggactgctggatgccatgttccagagccttatctactggatcatcggcgcactcgccaacgactcccaaatcctcagcaggtacgtcgggttctacaagggagtgcagagtgcaggagcggcggtggcatggcaggtggacaggcgccacacgcccctcatgtcccagctgatcgtcaactgggggctcatgaccatcagctaccccttgcttgcgctgctggtgttcctggccgtgaaggacgagagctactcggtttcgtcggtggaggacggccgggagaaggacagcaagctgtccgcgccgaccagcttccactgatgaagaagaagaaggaggaaggatagaccaagatgcatgtcattgtaacacggtgtttccatccaagtaagttttagtagtagaaatcaagaaacaactggagtacctatacgaagaatatatatataccc

SEQ ID NO: 23555 - protein, 527 aa, Zea mays subsp. mays
  misc_feature (1)..(527): Ceres Seq. ID no. 12413653
ITDSDSDSSHPDRRSAADISPPPYRHHLRRDRSNQINQLAGREERGKGNGRDGGGGPAGGGVGGARETRPSAVQLAAGAGVPAGPHLLLLPRHVQRAVGPRRRRPGRPHHRRQRQHRALRLLRGVRRAGRRRAQPAGPARDAAGRRAHVPALRRLLPLLQPPPGLAGVPRHGGRPARRRRGLPLGGAGRRHDVVPAAQPPGHLHLPLLVPLQPGRRPRRPPPFRPQLQPRGQERERQRRHVHRLHGIHARRRRAHRARAAARQDRPRRRHQGHQGHLLLPGHRGRRDPQALRQLEDAARAAGRLGQQLLLHLPVQQRQQRPLHAPHQGPQQRLLLGRADDRLRRHRLLPRLRLRQPPKEGAVRGRRRRRRRNGHLGRRSGQPAQLQSRAGGRPHRFQGRPPLRRALPALLQLRTAGCHVPEPYLLDHRRTRQRLPNPQQVRRVLQGSAECRSGGGMAGGQAPHAPHVPADRQLGAHDHQLPLACAAGVPGREGRELLGFVGGGRPGEGQQAVRADQLPLMKKKKEEG

SEQ ID NO: 23556 - protein, 470 aa, Zea mays subsp. mays
  misc_feature (1)..(470): Ceres Seq. ID no. 12413654
MAGTEVEDPPAAALEVPAKRGLLRYNSPLAQVSLLGLICFCCPGMFNALSGLGGGGQVDPTIADNANTALYACFAVFGVLGGAAHNLLGPRATLLAGALTYPLYAGSFLYYNHRPGSQVFPVTAGALLGAGAGFLWAAQGAVMTSYPPPNRRGTYISLFWCLFNLGGVLGGLLPFALNYNRGDKKGSVSDGTYIAFMAFMLVGAALTVLVLPPARIVRDDGTRATRVTFSSPATEGAEILKLFANWKMLLALPAAWASNFFYTYQFNNVNSGLFTLRTRGLNNVFYWGAQMIGSAGIGYFLDFGFASRRKRGLFGVAAVAAVGTAIWGGGLANQLSYKAVPVADPIDFKDGHRYAGPFLLYFSYGLLDAMFQSLIYWIIGALANDSQILSRYVGFYKGVQSAGAAVAWQVDRRHTPLMSQLIVNWGLMTISYPLLALLVFLAVKDESYSVSSVEDGREKDSKLSAPTSFH

SEQ ID NO: 23557 - protein, 426 aa, Zea mays subsp. mays
  misc_feature (1)..(426): Ceres Seq. ID no. 12413655
MFNALSGLGGGGQVDPTIADNANTALYACFAVFGVLGGAAHNLLGPRATLLAGALTYPLYAGSFLYYNHRPGSQVFPVTAGALLGAGAGFLWAAQGAVMTSYPPPNRRGTYISLFWCLFNLGGVLGGLLPFALNYNRGDKKGSVSDGTYIAFMAFMLVGAALTVLVLPPARIVRDDGTRATRVTFSSPATEGAEILKLFANWKMLLALPAAWASNFFYTYQFNNVNSGLFTLRTRGLNNVFYWGAQMIGSAGIGYFLDFGFASRRKRGLFGVAAVAAVGTAIWGGGLANQLSYKAVPVADPIDFKDGHRYAGPFLLYFSYGLLDAMFQSLIYWIIGALANDSQILSRYVGFYKGVQSAGAAVAWQVDRRHTPLMSQLIVNWGLMTISYPLLALLVFLAVKDESYSVSSVEDGREKDSKLSAPTSFH

SEQ ID NO: 23558 - DNA, 1090 bp, Zea mays subsp. mays
  misc_feature (1)..(1090): Ceres Seq. ID no. 12413685
aattttacctccaaggtttgggtcttcttcctcccgcattagccgcaggtttggttgcttagcatcagggggaaacatcgcaggttgttgttttgtttgaacactatcgagaggaagaggaagaagaggaggaggcggagttttgggttgagagcggcagaatagataatcggacttccggctggataagtgatccttttttttgaatcgccagacgcggagagcaggagggattatagctagcaacaggtgaaatggcaattggacagggcgacgagaagaagggctcccttgccaggagcttgagctgctcaaactgcgggagcggcgcaataatttttgggcggaagagagtcgccgtctcgccgactccgggctcccggagcccgcactcgccgacgcgcaccctgcgcaagcagcgcagcgtccggttccacatggaggacgacggcgtcaacctcttcaaccagctgtcgctagatgtactggttatgatcttttacaaggtgaaccacagtgatctgaggaacctcctcctgatatcgaaatcggtcaaagatgcgaccatccttgctagggagcagcatttcaagttctcgacgccgccggcgaagtccggttttagagacgaggaaaccgccggcggcgacgacgacgacgagggccccggcgcgcccaagcaacacagggttgcgaggtcgcacctgggggacacgaacctgtcgagcatcgccgtcaacctgtcggcgtcgttcgatcagatgtaaagtatatatatatatggcgccacaggttttcagttcgcgcttctgttggcgcgcgtgtatctagtagcttcaggttagaaggttttaagtgcctctcgtagcgcacgccatagagattaggtagtgagaaacagtatactcgtatgcgtcattactagtcctaagttaagtataatgtataaagtttttcaatgctgtggttgaagaacacacgccatgtcgtcttctccgatctgtaagttatttggcatagaagagatgtcttctctcttatgtgtatgctctaagtctatgatgctggatgcttcttctgttttgaagtc

SEQ ID NO: 23559 - protein, 170 aa, Zea mays subsp. mays
  misc_feature (1)..(170): Ceres Seq. ID no. 12413686
MAIGQGDEKKGSLARSLSCSNCGSGAIIFGRKRVAVSPTPGSRSPHSPTRTLRKQRSVRFHMEDDGVNLFNQLSLDVLVMIFYKVNHSDLRNLLLISKSVKDATILAREQHFKFSTPPAKSGFRDEETAGGDDDDEGPGAPKQHRVARSHLGDTNLSSIAVNLSASFDQM

SEQ ID NO: 23560 - protein, 109 aa, Zea mays subsp. mays
  misc_feature (1)..(109): Ceres Seq. ID no. 12413687
MEDDGVNLFNQLSLDVLVMIFYKVNHSDLRNLLLISKSVKDATILAREQHFKFSTPPAKSGFRDEETAGGDDDDEGPGAPKQHRVARSHLGDTNLSSIAVNLSASFDQM

SEQ ID NO: 23561 - protein, 91 aa, Zea mays subsp. mays
  misc_feature (1)..(91): Ceres Seq. ID no. 12413688
MIFYKVNHSDLRNLLLISKSVKDATILAREQHFKFSTPPAKSGFRDEETAGGDDDDEGPGAPKQHRVARSHLGDTNLSSIAVNLSASFDQM

SEQ ID NO: 23562 - DNA, 760 bp, Zea mays subsp. mays
  misc_feature (1)..(760): Ceres Seq. ID no. 12413713
gcacgagaccattacctagaacatcctaatcgaaaagccactgcaaccccggaacagagcgaggcgacgccgaggcacctcatctccgttgatattttcgactatttaggcgaagggaaatggcgaccgttccaggggatctgatctggcagattgtgaggaagaacaactccttcctggtgaagcagtttggcaacggcaatgccaaggtgcagttcaccaaggagcccaacaacctctacaatttacactcctacaagtactctggcttagcaaacaagaaaactgtaacgatccagccagctgctggaaaggactcggctgtggtcctctctactaccaagaccaagaagcagaacacacccgcgaagctcagccacaagtctgtgatgcgcaaggagttccgcaagatggccaaggctgtgaaaaaccaggttggcgacaactattacaggcctgatctgaccaagtcggcccttggtaggctgagctctgtgtaccgcagcctccaggttgccaagtctggtgtcaagaagaagaacaggcagcctacgcactaagcctgtgttctgtcgttggtgcccatagtctcagcttatatttatccaatgtctccaacagttttgagacttgttagaactagagcaaatcgtgttaagatgttgccgtttgtcattctatagcaagaattccatgacaaagattgcttggcacttgattgctgctttgtttgcaagctggctggccgggattacccctg

SEQ ID NO: 23563 - protein, 146 aa, Zea mays subsp. mays
  misc_feature (1)..(146): Ceres Seq. ID no. 12413714
MATVPGDLIWQIVRKNNSFLVKQFGNGNAKVQFTKEPNNLYNLHSYKYSGLANKKTVTIQPAAGKDSAVVLSTTKTKKQNTPAKLSHKSVMRKEFRKMAKAVKNQVGDNYYRPDLTKSALGRLSSVYRSLQVAKSGVKKKNRQPTH

SEQ ID NO: 23564 - DNA, 754 bp, Zea mays subsp. mays
  misc_feature (1)..(754): Ceres Seq. ID no. 12413763
aaaaaaccaaaagcagaggggaaagtgccgtcagctctgactctcgggcacttggctgacgacccgttctctctttgcaactgcaactgcaacgcaccaagaaactgccggcgatcgatcggggcaaggagataaacatggtgcacgggaagctggaggtcctcctcgtctccgccaagggactcgaggacaccgatttcctcaataacatggaccccttcgtgatccttacctgccgcacccaagagcagaaaagcagcgtcgcaaatggagcaggaagcgagcccgaatggaacgagaccttcgtcttcaccgtctccgacgacaccccgcagctgcacctcaagatcatggacagcgacctcaccaacgacgatttcgtcggcgaacgaaccatccccctggaggccgtgtttcaggaaggcagccttcccccggcggttcacccggtcgtcaaggaggagaagtactgcggagaggtcaagctcgcgctcaccttcactccagcagcggaaactcgccgccctgatgacaacgaggaggggccgccttacagcagctggagttgatctatctgccatgggatgcatgcatcatatatatccaccaagagaagagaggataattaattaatctactcaagagaagaatcagtgttgctgttatgcgaccctctatctatctatatatatgtgcttaatttgtcatgaacgactgccaatataaaataaactattcagagttgtttgcacgt

SEQ ID NO: 23565 - protein, 143 aa, Zea mays subsp. mays
  misc_feature (1)..(143): Ceres Seq. ID no. 12413764
MVHGKLEVLLVSAKGLEDTDFLNNMDPFVILTCRTQEQKSSVANGAGSEPEWNETFVFTVSDDTPQLHLKIMDSDLTNDDFVGERTIPLEAVFQEGSLPPAVHPVVKEEKYCGEVKLALTFTPAAETRRPDDNEEGPPYSSWS

SEQ ID NO: 23566 - protein, 121 aa, Zea mays subsp. mays
  misc_feature (1)..(121): Ceres Seq. ID no. 12413765
MEQEASPNGTRPSSSPSPTTPRSCTSRSWTATSPTTISSANEPSPWRPCFRKAAFPRRFTRSSRRRSTAERSSSRSPSLQQRKLAALMTTRRGRLTAAGVDLSAMGCMHHIYPPREERIIN

SEQ ID NO: 23567 - protein, 119 aa, Zea mays subsp. mays
  misc_feature (1)..(119): Ceres Seq. ID no. 12413766
MDPFVILTCRTQEQKSSVANGAGSEPEWNETFVFTVSDDTPQLHLKIMDSDLTNDDFVGERTIPLEAVFQEGSLPPAVHPVVKEEKYCGEVKLALTFTPAAETRRPDDNEEGPPYSSWS

SEQ ID NO: 23568 - DNA, 2021 bp, Zea mays subsp. mays
  misc_feature (1)..(2021): Ceres Seq. ID no. 12413767
atcgcaaactcggaaaccttgagaggaaagccaccagcagcaagcgaagaccaccagcagcagcgcagcggcgacgtgtttcgctctcgccatggcgtcgtcgtcctcgtcccggctgctgctcctcctcctcccgtgcctcgcgctcacgctgctcggcgcggcagacgccgaagtgcaccaccacgagttcgttatccaagagacgccggtgaagaggctgtgcaagacgcacaacatcatcacggtgaacgggcagtacccggggccgacgctggaggtcagggagggtgacacgctcgtcatcaacgtcgtcaaccgggcgcagtacaacgccaccatccactggcacggcatccggcagataaggactgggtgggcggacgggccggagttcgtgacgcagtgccccatcaggcccggcggcagctacaagtaccggttcaccatccaggggcaggagggcacgctgtggtggcacgcgcacagctcctggctcagggccaccgtctacggcgcgctcatcatccgccccagggagaacaagacctacccattcgccaagccctcgcgagaagtccccgtcatcctcggtgagtggtgggatgcgaacccgatcgacgtcatccgggaggcgcagaggaccggcggcggtcccaacgtctccgacgcgttcaccatcaacggccagcccggcgacctgtacaaatgctccaacaaagagactacggccatcccggtggaggccggcgagacggcgctgctgcggttcatcaacgccgcgctcaaccacgagctgttcgtcaccatcgcgcagcacaagatgacggtcgtcgccaccgacgcgtcctacaccaagcccttcaccacctcggtgctcatgctcgcgccgggccagaccaccgacgtcctcgtcaccatggaccagccgcccacccgctactacgtcgccgcgcgcgcctacgtctccggccagaacgtggccttcgacaacaccaccaccacggccgtcctcgagtacgactgcggctgcgcctccgacttcggccccaagatacagccggcgttcccggcggcgctaccggccttcaacgacacgtccgccgccaccgccttcgccgccgggatcaggagccccgaccgggtcaaggtccacgagaacgtcgacgagtacctcttcttcaccgtcggcctcggcctcttcaactgcaagccgggccagctctgcgccgggcccaacaacaacacccgcttcgcggccagcatgaacaacgtctccttcgtcttcccgcagaccgactccctcctccacgcgcactactacaagatccccggcgtcttcaccaccgacttcccggcatacccgccggtgcagttcgactacacggggcagaacgtcagccaggccctgtggcagccggtccccgccaccaagctgtacccgctcaggttcggctccgtggtgcagctcgtcctgcaggacaccagcatcgtcacgcccgagaaccaccccatccacatccacggctacgatttcttcatcctcgccgagggcttcggcaacttcgaccccaagaaggacgtcgagaagttcaactacgtcgacccgccccagaggaacaccgtggcggtgcctgtcaacggttgggcggtcatccagttcgtcgccgacaacccaggtgtgtggctcatgcattgccatctggacgtgcacatcacctggggcctggcaatggctttcctagtggaggacggctatggcgaactgcagtcgctggagccgcccccagttgatcttcccatgtgctagtggaggacggatatttgtgttgaggaagaaagcctgttcacgttgtatgttaattgttactcttttttggtggaggggggcgtgttcgtgatcttaaattcttaggggacttgattttccagcttgatttgaagtttcttctgtaaatctatgtaattttcaattaatgacattcagcatattatttgagaataaattatttctttgtacg

SEQ ID NO: 23569 - protein, 572 aa, Zea mays subsp. mays
  misc_feature (1)..(572): Ceres Seq. ID no. 12413768
MASSSSSRLLLLLLPCLALTLLGAADAEVHHHEFVIQETPVKRLCKTHNIITVNGQYPGPTLEVREGDTLVINVVNRAQYNATIHWHGIRQIRTGWADGPEFVTQCPIRPGGSYKYRFTIQGQEGTLWWHAHSSWLRATVYGALIIRPRENKTYPFAKPSREVPVILGEWWDANPIDVIREAQRTGGGPNVSDAFTINGQPGDLYKCSNKETTAIPVEAGETALLRFINAALNHELFVTIAQHKMTVVATDASYTKPFTTSVLMLAPGQTTDVLVTMDQPPTRYYVAARAYVSGQNVAFDNTTTTAVLEYDCGCASDFGPKIQPAFPAALPAFNDTSAATAFAAGIRSPDRVKVHENVDEYLFFTVGLGLFNCKPGQLCAGPNNNTRFAASMNNVSFVFPQTDSLLHAHYYKIPGVFTTDFPAYPPVQFDYTGQNVSQALWQPVPATKLYPLRFGSVVQLVLQDTSIVTPENHPIHIHGYDFFILAEGFGNFDPKKDVEKFNYVDPPQRNTVAVPVNGWAVIQFVADNPGVWLMHCHLDVHITWGLAMAFLVEDGYGELQSLEPPPVDLPMC

SEQ ID NO: 23570 - protein, 361 aa, Zea mays subsp. mays
  misc_feature (1)..(361): Ceres Seq. ID no. 12413769
MLQQRDYGHPGGGRRDGAAAVHQRRAQPRAVRHHRAAQDDGRRHRRVLHQALHHLGAHARAGPDHRRPRHHGPAAHPLLRRRARLRLRPERGLRQHHHHGRPRVRLRLRLRLRPQDTAGVPGGATGLQRHVRRHRLRRRDQEPRPGQGPRERRRVPLLHRRPRPLQLQAGPALRRAQQQHPLRGQHEQRLLRLPADRLPPPRALLQDPRRLHHRLPGIPAGAVRLHGAERQPGPVAAGPRHQAVPAQVRLRGAARPAGHQHRHAREPPHPHPRLRFLHPRRGLRQLRPQEGRREVQLRRPAPEEHRGGACQRLGGHPVRRRQPRCVAHALPSGRAHHLGPGNGFPSGGRLWRTAVAGAAPS

SEQ ID NO: 23571 - protein, 328 aa, Zea mays subsp. mays
  misc_feature (1)..(328): Ceres Seq. ID no. 12413770
MTVVATDASYTKPFTTSVLMLAPGQTTDVLVTMDQPPTRYYVAARAYVSGQNVAFDNTTTTAVLEYDCGCASDFGPKIQPAFPAALPAFNDTSAATAFAAGIRSPDRVKVHENVDEYLFFTVGLGLFNCKPGQLCAGPNNNTRFAASMNNVSFVFPQTDSLLHAHYYKIPGVFTTDFPAYPPVQFDYTGQNVSQALWQPVPATKLYPLRFGSVVQLVLQDTSIVTPENHPIHIHGYDFFILAEGFGNFDPKKDVEKFNYVDPPQRNTVAVPVNGWAVIQFVADNPGVWLMHCHLDVHITWGLAMAFLVEDGYGELQSLEPPPVDLPMC

SEQ ID NO: 23572 - DNA, 1433 bp, Zea mays subsp. mays
  misc_feature (1)..(1433): Ceres Seq. ID no. 12413803
atgcctctcatcttcttctccgccgcagcccccctcgtcgccgtctccctgctgcccctccccacccactgctgcctccgcctcaccgccacccgcgcggccgccacgagcacaaccgccaccccgggtcccgctcccgcgagcaccttcgccgtcgaggactacctcatcgccagctgccacctcaccccaccgcaggcgctcaaggcgtccaagagcctggcgcacctcaagtccgcatccaacgcggacgcggtgctcgccttccttgcggacctcgggctctccccaaaggaggtggccgccgttgtggcgtccaatccgcgtgtcctctgcgctcgcatcgaccgttccctggctcctatctccacggagctccgcgcgctcggcctctccccgtcccagatcgcgcgcctcgcgcagatcgccggccgctacttcctctgccgcagcttcgtctccaaggtacggttctggctcccgctcttcggctcccccgagcggctcctccaggccagcgactggaactactggctcctcagctccgacctcgagaaggtggtggagcccaacgtggccttcctcaggaagtgcggcctcagcgcagtcgacatcgccaagctgctcgtggccgcgccgcggctcgtcaccatgcctccggagtatgtccaggacgcggtgcggcgtgccacgcagctcggcgtggcgccgggctcccagatgtttcgccacgcgctctccaccgcgggatgtatcgggcaggagaaggtcgactccaaggtcgccgtcctcaaggagacgctcgggtggtcgcaggaggaggtgagcctggccatcagtaaggcgccgcggatcctggttgcgtccgaggagaggctgcgccggaacgcggagttcctgctcaatgaggtcgggctgccgccgcagtacatcgcccgccgttcggtgcttctcatgtacagcctggagaggcggatagtgccccggcacctcgtgctggtggttctcaaagagaaggggttggttgagcaggaccggtgcttcttcaacgtggtggcaccaacagaagagaaattcttggagaaattcgttgctccctacgaggaatccatccctggtcttgccgatgcttacgagtctgcttgtatggggaaagtgacccggggtctatgactggaatgtcgaggagaatttcgaaggtgtgtgttccctccattgtgcatttgtgtaacctcattctactgatctcgcttcaacagaaaaattattccactgatgaactatcgaagacaaaggcagtttcgtggacattagcttaggtccacactagtaacagcataaattcatgttatagccatgaaaatgttcatttctaacttaaggatcgtttcatatgaaagtgcaagcaataaaattttttcccatgagatttt

SEQ ID NO: 23573 - protein, 390 aa, Zea mays subsp. mays
  misc_feature (1)..(390): Ceres Seq. ID no. 12413804
MPLIFFSAAAPLVAVSLLPLPTHCCLRLTATRAAATSTTATPGPAPASTFAVEDYLIASCHLTPPQALKASKSLAHLKSASNADAVLAFLADLGLSPKEVAAVVASNPRVLCARIDRSLAPISTELRALGLSPSQIARLAQIAGRYFLCRSFVSKVRFWLPLFGSPERLLQASDWNYWLLSSDLEKVVEPNVAFLRKCGLSAVDIAKLLVAAPRLVTMPPEYVQDAVRRATQLGVAPGSQMFRHALSTAGCIGQEKVDSKVAVLKETLGWSQEEVSLAISKAPRILVASEERLRRNAEFLLNEVGLPPQYIARRSVLLMYSLERRIVPRHLVLVVLKEKGLVEQDRCFFNVVAPTEEKFLEKFVAPYEESIPGLADAYESACMGKVTRGL

SEQ ID NO: 23574 - protein, 279 aa, Zea mays subsp. mays
  misc_feature (1)..(279): Ceres Seq. ID no. 12413805
ASHLLLRRSPPRRRLPAAPPHPLLPPPHRHPRGRHEHNRHPGSRSREHLRRRGLPHRQLPPHPTAGAQGVQEPGAPQVRIQRGRGARLPCGPRALPKGGGRRCGVQSACPLRSHRPFPGSYLHGAPRARPLPVPDRAPRADRRPLLPLPQLRLQGTVLAPALRLPRAAPPGQRLELLAPQLRPREGGGAQRGLPQEVRPQRSRHRQAARGRAAARHHASGVCPGRGAACHAARRGAGLPDVSPRALHRGMYRAGEGRLQGRRPQGDARVVAGGGEPGHQ

SEQ ID NO: 23575 - protein, 274 aa, Zea mays subsp. mays
  misc_feature (1)..(274): Ceres Seq. ID no. 12413806
CLSSSSPPQPPSSPSPCCPSPPTAASASPPPARPPRAQPPPRVPLPRAPSPSRTTSSPAATSPHRRRSRRPRAWRTSSPHPTRTRCSPSLRTSGSPQRRWPPLWRPIRVSSALASTVPWLLSPRSSARSASPRPRSRASRRSPAATSSAAASSPRYGSGSRSSAPPSGSSRPATGTTGSSAPTSRRWWSPTWPSSGSAASAQSTSPSCSWPRRGSSPCLRSMSRTRCGVPRSSAWRRAPRCFATRSPPRDVSGRRRSTPRSPSSRRRSGGRRRR

SEQ ID NO: 23576 - DNA, 1545 bp, Zea mays subsp. mays
  misc_feature (1)..(1545): Ceres Seq. ID no. 12413819
gcaatcttccggaacatccatcgatctccccccagcggcgaggagagccggcggccacaggaaggagaaatggcttccgcacacaacgctctccgggtgtttttcatcctagccgtggtatgtgccgtatgcacagcgaaaaggacaggagccaagaaggaagaatcggcggcagcccctggtggtgctgctggaggcagcggcgggacgttcgacatctccaagctcggcgcgaccagcgacgggcaagacggactgcacaaaggcagtccaggacgcgtggacgtcagcgtgcgaagcgaccggaagcgccacggtggtgatccccaagggcgactacctggtcggccctctcaacttcactgggccatgcaagggcagcagcatcgccatccagctggatggcaacctgctgggatcaaacgacctgaacaagtacacggcgagctggatcgaattgtctcacgttaacaacatcgggatcaccggctcgggcacgctggacggccaggggaccgccgtttatagcaagagcaagaccgacaacgtgaaggcgatgcccaacacactggtgctgtttcacgtgatcaacgccactgtcgccggaatcaaactactcaactccaagttcttccacatcaacatcgacaactcagagagcatcaccgtgaaggacgtgaacgtcaccgcgcccgccgacgttgagaacacggacggcgtccacgtcggaggctcctccaagatcagcatcctcaactcgaccatcggcaccggcgacgactgcgtctcgattgggcccgggtgcaacggcgtcttggtggacagcatcacctgcggccccgggcagggcatcagcgtcggctgcctaggccgctacaaggacgagaaggacgtgagcgacatcacggtgcggaacctgctcaagaacaccaccaacggcgtgcgcatcaagtcgtacgtggacgccgagtccgtgctgacggcctcccatctcaccttcgagaacatcaggatggaggaggtggccaaccccatcgtcatcgaccagtacttctgcccgcagaaggtatgccctggcaagcggagcaactcctcgcatgtctccgtcaaggacgtcacgttccgcaacatcaccggcacgtcgtccacgcccgaggccatcagcctgctctgctcggagacgcagccatgcagcggcgtctccctcatcgatgtcaacgtggagtacgccggcaagaacaacaaaaccatggccgtctgcagcaacgccaagggcaccgccaagggaagcatcgaggcactggcttgcctggtctgatgatgaccttccttttgcatgcatgcatggtatctcatccttgatgatgatctagctcactagttctttttaatttccgcttcattcgcttttccaaattcgattgtgtttcagccaagttgtttagcgggacatctcttgtctgatcttcctgctaaatagagttggactcctatatatagaggccttccggcacatataatatacgtcggaccaatattattgtg

SEQ ID NO: 23577 - protein, 253 aa, Zea mays subsp. mays
  misc_feature (1)..(253): Ceres Seq. ID no. 12413820
MPNTLVLFHVINATVAGIKLLNSKFFHINIDNSESITVKDVNVTAPADVENTDGVHVGGSSKISILNSTIGTGDDCVSIGPGCNGVLVDSITCGPGQGISVGCLGRYKDEKDVSDITVRNLLKNTTNGVRIKSYVDAESVLTASHLTFENIRMEEVANPIVIDQYFCPQKVCPGKRSNSSHVSVKDVTFRNITGTSSTPEAISLLCSETQPCSGVSLIDVNVEYAGKNNKTMAVCSNAKGTAKGSIEALACLV

SEQ ID NO: 23578 - protein, 156 aa, Zea mays subsp. mays
  misc_feature (1)..(156): Ceres Seq. ID no. 12413821
AIFRNIHRSPPSGEESRRPQEGEMASAHNALRVFFILAVVCAVCTAKRTGAKKEESAAAPGGAAGGSGGTFDISKLGATSDGQDGLHKGSPGRVDVSVRSDRKRHGGDPQGRLPGRPSQLHWAMQGQQHRHPAGWQPAGIKRPEQVHGELDRIVSR

SEQ ID NO: 23579 - protein, 133 aa, Zea mays subsp. mays
  misc_feature (1)..(133): Ceres Seq. ID no. 12413822
MASAHNALRVFFILAVVCAVCTAKRTGAKKEESAAAPGGAAGGSGGTFDISKLGATSDGQDGLHKGSPGRVDVSVRSDRKRHGGDPQGRLPGRPSQLHWAMQGQQHRHPAGWQPAGIKRPEQVHGELDRIVSR

SEQ ID NO: 23580 - DNA, 1778 bp, Zea mays subsp. mays
  misc_feature (1)..(1778): Ceres Seq. ID no. 12413850
aacttctttcttgttcggatcgggtcaggtcagtgctccgtgttgcgttttcttaagaacacgaaaaaaaaagaggggagagtttctttcgggtcctctttttctttgattgtcgaaaggccgctcctttaggagatttgcgcgcttctcgtcgagattagccgccggtgctcggatcgatctgtttgcggtggaggaattttgaggccaagaagagagttggaatcggatcgggagttcttgtggtcacagggtgcgaaaaaagcgagtgatttttgggaggatttcttgttgggaaaaaatcggttgttcagcggattagaggcggagatgggagccggggctgaggtcatgcatcaggtcgtgccgctgctggagccgccgctccaccggtgcgtcgttaagagcgtcgatgtcatggaggaggtggttgccgtggcgcctgggcaggtgcagccagcgacgtcgccgaaggcgctgttggaggttgccgtagaggtgcccgatctggagttgaagagatcttctaatgctgggagtagtgtatctgcagaacaactgcagtttgtccctatcattcgatctggtagctttgctgatattggacctaggcggttcatggaagatgagcatattagaattgatgatctttctggtcatcttggctcactgttgatggtctctgcgcctagcgcgttctacggggtgtttgacggtcatgggggttcagatgcagcagcctacatgaaaacacatgcaatgaggttgttctttgaagatgctgacttccctcaagcatcacaagaggataaaatatttgctgaatctgttgaggattcggtccgcagagctttcttgcgggctgaccttgcacttgctgatgattcagtcatcaaccgttcttctggcaccacagcgctgacagcattggtccttgggaggcaactgttggtagcaaacgctggggactgccgcgccgtcctgtgtaggaaagggacagcggtggaggtgtcaaaggatcacaggccgacatacgacgcagagcgtcaaagggttatcgagtgcggtggatacatcgaagatgggtacctcaacggcgtactctctgtgacccgggctttaggggactgggacatgaagctgccccaaggctctccgtcgccccttatcgcagagccagagatccactggaccaccctgacggaagacgacgagttcctcatcatcggctgcgatgggatatgggatgtgatgagcagccagcacgcggtgagcacggtccgcaagggcctccggaggcacgatgaccccgggcggagtgcccaggagctcgccatggaggcgaagaggctcgagaccttcgacaacctcaccgtgatcgttgtctgctttgtccccgacctcgccgggggcgtcggctacgccctcggagcaggtgccggctggaaggatcaggtgccgcaagagcttgtcgccagaggcactctgcaagctgaggagatggctcgagtctgaccagtagacgcttctatctgtagaggccagcgccagcctgtgtttctgtgctgtggctgtgtaaatattggcgctgatggtgttccgtctagtacggctgtgcttacacggccagcaattttgtagctgagagagagttccccccaccgccgctgccgcttttgttttcacaccgttttgtacttttgtgggatgtacataccattaccattgttgctcggttcggctcagtttggcagagagaataactactctagttcgct

SEQ ID NO: 23581 - protein, 394 aa, Zea mays subsp. mays
  misc_feature (1)..(394): Ceres Seq. ID no. 12413851
MGAGAEVMHQVVPLLEPPLHRCVVKSVDVMEEVVAVAPGQVQPATSPKALLEVAVEVPDLELKRSSNAGSSVSAEQLQFVPIIRSGSFADIGPRRFMEDEHIRIDDLSGHLGSLLMVSAPSAFYGVFDGHGGSDAAAYMKTHAMRLFFEDADFPQASQEDKIFAESVEDSVRRAFLRADLALADDSVINRSSGTTALTALVLGRQLLVANAGDCRAVLCRKGTAVEVSKDHRPTYDAERQRVIECGGYIEDGYLNGVLSVTRALGDWDMKLPQGSPSPLIAEPEIHWTTLTEDDEFLIIGCDGIWDVMSSQHAVSTVRKGLRRHDDPGRSAQELAMEAKRLETFDNLTVIVVCFVPDLAGGVGYALGAGAGWKDQVPQELVARGTLQAEEMARV

SEQ ID NO: 23582 - protein, 387 aa, Zea mays subsp. mays
  misc_feature (1)..(387): Ceres Seq. ID no. 12413852
MHQVVPLLEPPLHRCVVKSVDVMEEVVAVAPGQVQPATSPKALLEVAVEVPDLELKRSSNAGSSVSAEQLQFVPIIRSGSFADIGPRRFMEDEHIRIDDLSGHLGSLLMVSAPSAFYGVFDGHGGSDAAAYMKTHAMRLFFEDADFPQASQEDKIFAESVEDSVRRAFLRADLALADDSVINRSSGTTALTALVLGRQLLVANAGDCRAVLCRKGTAVEVSKDHRPTYDAERQRVIECGGYIEDGYLNGVLSVTRALGDWDMKLPQGSPSPLIAEPEIHWTTLTEDDEFLIIGCDGIWDVMSSQHAVSTVRKGLRRHDDPGRSAQELAMEAKRLETFDNLTVIVVCFVPDLAGGVGYALGAGAGWKDQVPQELVARGTLQAEEMARV

SEQ ID NO: 23583 - protein, 365 aa, Zea mays subsp. mays
  misc_feature (1)..(365): Ceres Seq. ID no. 12413853
MEEVVAVAPGQVQPATSPKALLEVAVEVPDLELKRSSNAGSSVSAEQLQFVPIIRSGSFADIGPRRFMEDEHIRIDDLSGHLGSLLMVSAPSAFYGVFDGHGGSDAAAYMKTHAMRLFFEDADFPQASQEDKIFAESVEDSVRRAFLRADLALADDSVINRSSGTTALTALVLGRQLLVANAGDCRAVLCRKGTAVEVSKDHRPTYDAERQRVIECGGYIEDGYLNGVLSVTRALGDWDMKLPQGSPSPLIAEPEIHWTTLTEDDEFLIIGCDGIWDVMSSQHAVSTVRKGLRRHDDPGRSAQELAMEAKRLETFDNLTVIVVCFVPDLAGGVGYALGAGAGWKDQVPQELVARGTLQAEEMARV

SEQ ID NO: 23584 - DNA, 1662 bp, Zea mays subsp. mays
  misc_feature (1)..(1662): Ceres Seq. ID no. 12413861
acagtcaactgtgttctagacagttgagttcaaaaaggtgaggcggcgagatcgaatcaagcggagcggagcctacacatggcgatggcgctgcgtcggctgctgcttcctctcctcctcctcgtactcttaggtctgcggccgcagagctgcgtcgccagtggcggaggtggaggggagccggcggagttcgagatacctcgggacgggagcgtgctggagcttgacgagagcaacttcgaggcggcggtgcgcgcagccgaattcctcttcgtcgacttctacgctccctggtgcggccactgcaagcgcctcgccccgcagttagatgaggctgctgcagtgctagctggactgagcacgcccgtccttgtggctaaagtaaatgctgacaaatacaagaagctcggctctaaatatggagtagatgggttccctactttgatgttttttgaccatggagtgccctcggagtacacgggttcaaggaaggctgatgtgctagttgagaaccttaagaagcttgttgcacctgatgtttctgtccttgagtcggactcgtcaattaacggctttgttcaagcagctggcatcaattttccattgtttattgggtttggaatggatgagtcattgattgttgaatatggagcgaagtacaagaagaaggcatggttttcaacagcaaaggatttctctgaggatgtgatggttgtgtatgattttgacaaggttccagcgttggtttctgttaacccaaaatataatgagcagagtgtattctatggcccgtttgaaggaacttttctggaagattttataaggcaatccctactgcctgcaactgtgcccatcaatagagagacagtaaagctattgaaagatgatgggaggaaagttgttcttacaatcttggaggatgaatcagatgaaagctctctgcagctaataaaagtgttgaggtctgccgccaatgcaaaccatgatttagtgttcggatatgtgggagtcaaacagtgggaggagttcaccgagacttttgatgtgaaggtttcgcagctgccaaagattgttgtctgggacacaaaagaggagtacgaagtggttgagggttcagagagtttcatagaaggtgactatggatcccaagtcagtcgatttctagagggatatagggaaggaagaacaacaaagaagaaagtgggccgtggttccccaacactgctcggccttaacgcggtatacatcctcgtcctgttggtcgccgttctcgttgttttgatgtatttttccgcgcaaggcgaggaggatcatcagccaagaagagcccatgaggactgacagcaatctgagatggcttagattcaaggcgttgatccggaggctgccgagttatttttgaaggggggtaacatataacatctgatggacaaattttcctgatcttcatttcacgtgccctagggtcgagttttagatatttgttgcagagctatgcatgagctcccctgtgtttctcttgaacccttgaagtttttggacttgttacttgaggaccgggtttcctcaggtttatgtcattgtaattattcggcactttgtaacatagcattcatgtgttatatttgagacccttggagaaacgacttctatagattgaac

SEQ ID NO: 23585 - protein, 420 aa, Zea mays subsp. mays
  misc_feature (1)..(420): Ceres Seq. ID no. 12413862
MAMALRRLLLPLLLLVLLGLRPQSCVASGGGGGEPAEFEIPRDGSVLELDESNFEAAVRAAEFLFVDFYAPWCGHCKRLAPQLDEAAAVLAGLSTPVLVAKVNADKYKKLGSKYGVDGFPTLMFFDHGVPSEYTGSRKADVLVENLKKLVAPDVSVLESDSSINGFVQAAGINFPLFIGFGMDESLIVEYGAKYKKKAWFSTAKDFSEDVMVVYDFDKVPALVSVNPKYNEQSVFYGPFEGTFLEDFIRQSLLPATVPINRETVKLLKDDGRKVVLTILEDESDESSLQLIKVLRSAANANHDLVFGYVGVKQWEEFTETFDVKVSQLPKIVVWDTKEEYEVVEGSESFIEGDYGSQVSRFLEGYREGRTTKKKVGRGSPTLLGLNAVYILVLLVAVLVVLMYFSAQGEEDHQPRRAHED

SEQ ID NO: 23586 - protein, 418 aa, Zea mays subsp. mays
  misc_feature (1)..(418): Ceres Seq. ID no. 12413863
MALRRLLLPLLLLVLLGLRPQSCVASGGGGGEPAEFEIPRDGSVLELDESNFEAAVRAAEFLFVDFYAPWCGHCKRLAPQLDEAAAVLAGLSTPVLVAKVNADKYKKLGSKYGVDGFPTLMFFDHGVPSEYTGSRKADVLVENLKKLVAPDVSVLESDSSINGFVQAAGINFPLFIGFGMDESLIVEYGAKYKKKAWFSTAKDFSEDVMVVYDFDKVPALVSVNPKYNEQSVFYGPFEGTFLEDFIRQSLLPATVPINRETVKLLKDDGRKVVLTILEDESDESSLQLIKVLRSAANANHDLVFGYVGVKQWEEFTETFDVKVSQLPKIVVWDTKEEYEVVEGSESFIEGDYGSQVSRFLEGYREGRTTKKKVGRGSPTLLGLNAVYILVLLVAVLVVLMYFSAQGEEDHQPRRAHED

SEQ ID NO: 23587 - protein, 298 aa, Zea mays subsp. mays
  misc_feature (1)..(298): Ceres Seq. ID no. 12413864
MFFDHGVPSEYTGSRKADVLVENLKKLVAPDVSVLESDSSINGFVQAAGINFPLFIGFGMDESLIVEYGAKYKKKAWFSTAKDFSEDVMVVYDFDKVPALVSVNPKYNEQSVFYGPFEGTFLEDFIRQSLLPATVPINRETVKLLKDDGRKVVLTILEDESDESSLQLIKVLRSAANANHDLVFGYVGVKQWEEFTETFDVKVSQLPKIVVWDTKEEYEVVEGSESFIEGDYGSQVSRFLEGYREGRTTKKKVGRGSPTLLGLNAVYILVLLVAVLVVLMYFSAQGEEDHQPRRAHED

SEQ ID NO: 23588 - DNA, 1086 bp, Zea mays subsp. mays
  misc_feature (1)..(1086): Ceres Seq. ID no. 12413899
agtcacggtactccaccgctaaaaccttcggaaagaatccccaaatctcgcacacctcgaagccttcgaggcccgaaaccctagctcctcggcctccccgccgcttccacccatggctccaggactgcagcgcttcactgacattgcggacgacggcacgccccagctcgacgccgcgtccggcgaggagctggtccgtgtggaccgcaccgtggctgtcgcccttggcccccgctcgccggagtccccggggactctgttcgtcaccaccaggagggtgatttggctcagcgaagcggagaagggcaagggctacgcggtggacttcctcgccatctcgcttcacgctgtgtcgcgcgacctcgaggcgtacccctcgccctgtatctacactcagattgaggcacagttggtacagaagaggaggctggggaatcaaatcctgaagcaaatgaactagagctatctagagtatctgaaatgaggctcatactagcggaccccggtcaactggatgcactttttgatgtcttctgtcattgtgctgaactgaatcctgaccctaatgctgagtgcaatggggagaatggctggatccgtggtgaagatatgtctaatggtgactggattcgtgatgatgtggacatggttgatgaaaatgtcccgcagtttttcaatgccaatccgataggtcaaaatggtggatatgaccttagtcgttcagtatttgagcttcaaatcaacgaccaacgttttgaggatgcagaggaggaacaggagagccatgaaaataatggacattagaaacagagacatgttcctcgagagcatcatgtgatttattttgttgtaaatcactaccgatgcagctcggtttgcctactgtttcatctacactttctcttcctttttccttgatgttataggattaacatcactgggtgactttctggaattgcatcgatggttccttttggtgagaaaaggtcttgctgctggtcaagaatgtaacttgtagagcatgatgttgaatcgtgtgaaattagttcagtacttttgatctaacaaatagaaggtcgaattggg

SEQ ID NO: 23589 - protein, 115 aa, Zea mays subsp. mays
  misc_feature (1)..(115): Ceres Seq. ID no. 12413900
MAPGLQRFTDIADDGTPQLDAASGEELVRVDRTVAVALGPRSPESPGTLFVTTRRVIWLSEAEKGKGYAVDFLAISLHAVSRDLEAYPSPCIYTQIEAQLVQKRRLGNQILKQMN

SEQ ID NO: 23590 - protein, 107 aa, Zea mays subsp. mays
  misc_feature (1)..(107): Ceres Seq. ID no. 12413901
MRLILADPGQLDALFDVFCHCAELNPDPNAECNGENGWIRGEDMSNGDWIRDDVDMVDENVPQFFNANPIGQNGGYDLSRSVFELQINDQRFEDAEEEQESHENNGH

SEQ ID NO: 23591 - protein, 92 aa, Zea mays subsp. mays
  misc_feature (1)..(92): Ceres Seq. ID no. 12413902
SRYSTAKTFGKNPQISHTSKPSRPETLAPRPPRRFHPWLQDCSASLTLRTTARPSSTPRPARSWSVWTAPWLSPLAPARRSPRGLCSSPPGG

SEQ ID NO: 23592 - DNA, 1296 bp, Zea mays subsp. mays
  misc_feature (1)..(1296): Ceres Seq. ID no. 12413938
atacgcgctctcatctctggctggctcagaaaacagccgccaagcgcacacaccactctctcatcatgacctccatataggccccctacattctttgatcagtgatcactctcgctgggtctcaccccctcccgcagacggccaaacagaacccacgcgtgcgcgcgcgcccacgagcgagcgatgcctcccctccgccgcgcgcgctccatcctgctcctcctccactacgtggccgcctcccacctcctgctgcgcgccgccgcggccacattgccggaccccgcgccgctcgacccggcactggtcgcgaccccggtgcagcccgccgccnccgttccggggggcacgatcccggcgttccccgcgcagtcggactcgctggcgggttcctcgtccacgtgcccgctcgccccttccccggcgctcctcccggccgtgcgggcctcctgcgccgccgccgcggcgctgccgccgaggctgcgctgctgccccgcgctggccgcgtggctgttcgcggcctacgcgcccgccgcgctcgcggagcggccgcccgcgaggcctccggccgcggcggcggccgccgtggacatgccgctgccgcccgacgactccgaggcgtgcgcgggcgccgcggaccgcgcgcttcgtgcggcgggggcgacgctgccccgccccaccggcggcaataacgggacgtgcgacgtggcgttctgctactgcggggtcaggctgaggcggctgacgtgcggacccccgccggcagccgagggcgggctgtgggcgccggctgacgacgcggcggcgaggaggctggagagggactgcgcgcagccgggcntccccggctgctccaaatgccttcttgctctgaccatgataaagaacactagtcccggcgntggcgccgccgcggaggcagcgagcaaggagaagcaggccgccgtccggtcgggcgagagtgaccgggactgcgagctcatggggctcatgtggctgctgcagcgcaacgccacgcgctacggagcgacggccacggccgtcatccaggcgctgatggccgtggacgaggcgtccgccgcgggtgtcgcggtggcggcagacgcggggccggccgcggcgtgctcgctgcccgtggacgacatgcccctcccggccgaatacgcgcaggtcggcggggccagcgancgcctcgcggcgtctgctgcttcttctgcctgctcgtgctgttctccgttctaagcttccgctccgtgtactcgctgtagcaattttgtggttcaattgaagttcgtg

SEQ ID NO: 23593 - protein, 352 aa, Zea mays subsp. mays
  misc_feature (1)..(352): Ceres Seq. ID no. 12413939
  misc_feature (51)..(51): Xaa is any aa, unknown or other
  misc_feature (220)..(220): Xaa is any aa, unknown or other
  misc_feature (240)..(240): Xaa is any aa, unknown or other
  misc_feature (335)..(335): Xaa is any aa, unknown or other
MPPLRRARSILLLLHYVAASHLLLRAAAATLPDPAPLDPALVATPVQPAAXVPGGTIPAFPAQSDSLAGSSSTCPLAPSPALLPAVRASCAAAAALPPRLRCCPALAAWLFAAYAPAALAERPPARPPAAAAAAVDMPLPPDDSEACAGAADRALRAAGATLPRPTGGNNGTCDVAFCYCGVRLRRLTCGPPPAAEGGLWAPADDAAARRLERDCAQPGXPGCSKCLLALTMIKNTSPGXGAAAEAASKEKQAAVRSGESDRDCELMGLMWLLQRNATRYGATATAVIQALMAVDEASAAGVAVAADAGPAAACSLPVDDMPLPAEYAQVGGASXRLAASAASSACSCCSPF

SEQ ID NO: 23594 - protein, 244 aa, Zea mays subsp. mays
  misc_feature (1)..(244): Ceres Seq. ID no. 12413940
  misc_feature (111)..(111): Xaa is any aa, unknown or other
YALSSLAGSENSRQAHTPLSHHDLHIGPLHSLISDHSRWVSPPPADGQTEPTRARAPTSERCLPSAARAPSCSSSTTWPPPTSCCAPPRPHCRTPRRSTRHWSRPRCSPPXPFRGARSRRSPRSRTRWRVPRPRARSPLPRRSSRPCGPPAPPPRRCRRGCAAAPRWPRGCSRPTRPPRSRSGRPRGLRPRRRPPWTCRCRPTTPRRARAPRTARFVRRGRRCPAPPAAITGRATWRSATAGSG

SEQ ID NO: 23595 - protein, 216 aa, Zea mays subsp. mays
  misc_feature (1)..(216): Ceres Seq. ID no. 12413941
  misc_feature (84)..(84): Xaa is any aa, unknown or other
  misc_feature (104)..(104): Xaa is any aa, unknown or other
  misc_feature (199)..(199): Xaa is any aa, unknown or other
MPLPPDDSEACAGAADRALRAAGATLPRPTGGNNGTCDVAFCYCGVRLRRLTCGPPPAAEGGLWAPADDAAARRLERDCAQPGXPGCSKCLLALTMIKNTSPGXGAAAEAASKEKQAAVRSGESDRDCELMGLMWLLQRNATRYGATATAVIQALMAVDEASAAGVAVAADAGPAAACSLPVDDMPLPAEYAQVGGASXRLAASAASSACSCCSPF

SEQ ID NO: 23596 - DNA, 1738 bp, Zea mays subsp. mays
  misc_feature (1)..(1738): Ceres Seq. ID no. 12413950
gcacgagaccattacctagaacatcctaatcgaaaaaaacccctcacactcccatccagccgccaccaggtgcagagtctttcgtcatctcttctccggcgaagaacccccagtcgcccaccagatcacttgttaaactttgttgaggggtgatggcggtttctttcgcaaacctcaactccgaggcagggcttaaaaagcttgatgagtaccttctcactcgcagctacatcactggctaccaagcttccaaggatgaggaggaaatgggtgacaaggaggaagaagcggagctggatgggagaggagggaatggtgtggaggatgaattcctgaaaatagatgaattgacggagttcctggagaagggtgaagaagaggagtatggtgatggagccaaacggagagagaagtcagtgaaaaactggatggttgagagtgacaatgaggatgaagatgaggatcaattggatttagaagattttgaggatgatgacgaggatggtgaagcaggcggtggagatattctgtataaagatttttttgagagtggacacaacaagcaagctaagaagagagatggttccacaaagaaagttcaattcaaggatgaagcacatgaagttgaactccatgacagtgagaatgatgatggaaatgatgaacaagaacatggtctctcaactcacgaaaaggagcgtctgaagatgcgtactaaaatagagcaaatggagaaagctaatcttgaacccagcacgtggaccatgcagggagaggttactgcttctaggaggcccaaaaacagtgccctagaagtggaccttgattttgagcacaatgtaagacctgcccctgtaataaccgaggaagtgacagcttcccttgaagaaatgataaagaaaagaatcgcagagagtcattttgatgatgttgagaagccgtctctcttgccatctaaagctccaaaggagcacaaggaactggatgaaactaagagcaagaagggtcttgctgaactgtatgaggatgactatgcacaaaaagcaggcattgcacctgccccactttctatttcagatgaactaaaggaagaggcaaatactttatttaagaggatatgtttgaaattggatgcgctatcgcatttccactttgctccaaagccagtcattgaggatatgtctgtgcaagcaaatgtgcctgctttagccatggaagagattgcacctgtagctgtttcggatgctgcaatgcttgcccctgaagagatctttgaaggaaaaggtgatgttaaggaagagggggaacttacacaggctgagcgcaagagaagaagagctaacaagaaaaggagatatgcagcatcccataaggagaggacagcgccagccaagttgcagaaagattaaactcaatgtttttttctcactagtttctaaatggtacaagagcgataaactggcaatacatattttccaaattttgtattgtaccctctgctagtagcttttacatgaacagtaaaatgtggccatttatatttctacagaagcacacaagttcgagagttttgatttgctgaagtgcaattttgagagtgcaaaaaaagacttgtctgttgaaccctaggtatcggtagaaacatcatcctacgacctaaccgacctaaccgatggttatggttatgagtataattttctttccagctattgcaattgaagtcggtcatattcaatct

SEQ ID NO: 23597 - protein, 418 aa, Zea mays subsp. mays
  misc_feature (1)..(418): Ceres Seq. ID no. 12413951
MAVSFANLNSEAGLKKLDEYLLTRSYITGYQASKDEEEMGDKEEEAELDGRGGNGVEDEFLKIDELTEFLEKGEEEEYGDGAKRREKSVKNWMVESDNEDEDEDQLDLEDFEDDDEDGEAGGGDILYKDFFESGHNKQAKKRDGSTKKVQFKDEAHEVELHDSENDDGNDEQEHGLSTHEKERLKMRTKIEQMEKANLEPSTWTMQGEVTASRRPKNSALEVDLDFEHNVRPAPVITEEVTASLEEMIKKRIAESHFDDVEKPSLLPSKAPKEHKELDETKSKKGLAELYEDDYAQKAGIAPAPLSISDELKEEANTLFKRICLKLDALSHFHFAPKPVIEDMSVQANVPALAMEEIAPVAVSDAAMLAPEEIFEGKGDVKEEGELTQAERKRRRANKKRRYAASHKERTAPAKLQKD

SEQ ID NO: 23598 - protein, 380 aa, Zea mays subsp. mays
  misc_feature (1)..(380): Ceres Seq. ID no. 12413952
MGDKEEEAELDGRGGNGVEDEFLKIDELTEFLEKGEEEEYGDGAKRREKSVKNWMVESDNEDEDEDQLDLEDFEDDDEDGEAGGGDILYKDFFESGHNKQAKKRDGSTKKVQFKDEAHEVELHDSENDDGNDEQEHGLSTHEKERLKMRTKIEQMEKANLEPSTWTMQGEVTASRRPKNSALEVDLDFEHNVRPAPVITEEVTASLEEMIKKRIAESHFDDVEKPSLLPSKAPKEHKELDETKSKKGLAELYEDDYAQKAGIAPAPLSISDELKEEANTLFKRICLKLDALSHFHFAPKPVIEDMSVQANVPALAMEEIAPVAVSDAAMLAPEEIFEGKGDVKEEGELTQAERKRRRANKKRRYAASHKERTAPAKLQKD

SEQ ID NO: 23599 - protein, 326 aa, Zea mays subsp. mays
  misc_feature (1)..(326): Ceres Seq. ID no. 12413953
MVESDNEDEDEDQLDLEDFEDDDEDGEAGGGDILYKDFFESGHNKQAKKRDGSTKKVQFKDEAHEVELHDSENDDGNDEQEHGLSTHEKERLKMRTKIEQMEKANLEPSTWTMQGEVTASRRPKNSALEVDLDFEHNVRPAPVITEEVTASLEEMIKKRIAESHFDDVEKPSLLPSKAPKEHKELDETKSKKGLAELYEDDYAQKAGIAPAPLSISDELKEEANTLFKRICLKLDALSHFHFAPKPVIEDMSVQANVPALAMEEIAPVAVSDAAMLAPEEIFEGKGDVKEEGELTQAERKRRRANKKRRYAASHKERTAPAKLQKD

SEQ ID NO: 23600 - DNA, 775 bp, Zea mays subsp. mays
  misc_feature (1)..(775): Ceres Seq. ID no. 12413965
gagctgaaggcgacggccaaccgctcgaaaagagcaggtcaggaagccgaggctaacggcaagctcgcgcacgacgactccagacttgaagggcgttccggtgaaatctcgtcgtttcagtcgctgtgcgcgcacatctggagggcggtgacgcgcgcgcgccggctgctggctgccgacaagacgacgacgttccgcatggccgtgaactgccggcaccgtctgcgcccggcgatctccccgctctacttcggcaacgcgatccagagcgtggcgacgacggccaccgtagccgagctggcgtccaacgacctgggctgggcggccgcccggctgaacgccaccgtggcgtcgcacaaggacggcgcgatccggcgcgccgcggcggagtgggaggccgcgccccgttgcttcccgctaggcaaccccgacggggcggccctcacgatggggagctcgcctcggttcccgatgtacgacgggaacgacttcgggtggggccgcgcgctcgccgtgcggagcggccgcgcgaacaaattcgacggcaagatgtcttcgttccccggacaggctggggacggtagcatcgacgtggaggtgtgcctcgcgccagacaccatggcgcatctcctcctcgacaaggagttcttgcagtacgtgtcctcccctgcaccgtgaggcggtgacagagtgaatgtgtggcttgttgctgcgcagctacatatagtaactggatttgtaccctttcagcagatatcaagtgcttgccaacttg

SEQ ID NO: 23601 - protein, 225 aa, Zea mays subsp. mays
  misc_feature (1)..(225): Ceres Seq. ID no. 12413966
ELKATANRSKRAGQEAEANGKLAHDDSRLEGRSGEISSFQSLCAHIWRAVTRARRLLAADKTTTFRMAVNCRHRLRPAISPLYFGNAIQSVATTATVAELASNDLGWAAARLNATVASHKDGAIRRAAAEWEAAPRCFPLGNPDGAALTMGSSPRFPMYDGNDFGWGRALAVRSGRANKFDGKMSSFPGQAGDGSIDVEVCLAPDTMAHLLLDKEFLQYVSSPAP

SEQ ID NO: 23602 - protein, 159 aa, Zea mays subsp. mays
  misc_feature (1)..(159): Ceres Seq. ID no. 12413967
MAVNCRHRLRPAISPLYFGNAIQSVATTATVAELASNDLGWAAARLNATVASHKDGAIRRAAAEWEAAPRCFPLGNPDGAALTMGSSPRFPMYDGNDFGWGRALAVRSGRANKFDGKMSSFPGQAGDGSIDVEVCLAPDTMAHLLLDKEFLQYVSSPAP

SEQ ID NO: 23603 - DNA, 1389 bp, Zea mays subsp. mays
  misc_feature (1)..(1389): Ceres Seq. ID no. 12413988
gttcaattcgatcacttcttccattccaatttccacacacacacgtctcagctcactccctcctccagtttcgtcagctcgtcatcataaaccgaacacagagctctcgattccattccaggatgctgctgaacccggcgtcagagacgtcggtgctagacaccatccggcagcacctcctcgaggagccagcggcgncggaggcgcggccggccgacgagagcttcgggagcctggtggcggaccagtggagcggctcgctcccgttccgcaccgacgacgccgacgacatggtggtgttcggggtgctgcaggacgccttcgcctacggctggctgcccgacggctcattcgtgcacgtgaagcccgagccagtgcggtcccccgactcgtcctcctaccacccctgctcctacgacggctcaccctgcttcggcctcctggacccggagccgccgctgacgcccggcaccaccacgcccgggagggggcaggaggaggccgcggcggccatggcccggggcaagcactacaggggggtgaggcagcgcccgtggggcaagttcgcggcggagatcagggaccccgccaggaacggcgcgcgcgtctggctcggcacgtacgacaccgccgaggacgccgcgctcgcctacgaccgcgccgcctaccgcatgcgcggctcgcgcgcgctcctcaacttcccgctccgcatcggctccggggacaagcgcccgtcgccggcgccgcccgagcccaccacctcctcggactcctcctcgtcttcggccagcggctcgcacaagaggcggaagcgaggcgaggccgcggctgccaacatggccatggcgctggtgccctcgccctcccagcttaaccggccggcccagccgtggttccctgccgcgccggtcgagcaggcggcgatggctccgcgcgtggagcagatcgtcgtctagtctagccatgcgccggcgaaagcgggggcaaggccctgcgctgcacttgcgtgacagctccaccggatggaatgcgaatatgcgataaagctcgggagcaactggggtccgtccggatgccgctgttgctccgtgcaactggcgcaagtggaagaagctgtctattggaagtcaaattgagccgcgcggacagtccggcgctgaggccggacggtccgcggtccggacagtctgcggtggtggcgcggacggtccgcgcgcgcgcagagtcagttagggttcctagtttctcgcgggatttgttacctaaaaccgcgggattaactcgggaaacagttggaaacggatccagacctccccctttatatagatgaaggtctacggccgattgaaccccaacaatcgaacaaatcaagtctatttctcgtttttt

SEQ ID NO: 23604 - protein, 317 aa, Zea mays subsp. mays
  misc_feature (1)..(317): Ceres Seq. ID no. 12413989
  misc_feature (66)..(66): Xaa is any aa, unknown or other
SIRSLLPFQFPHTHVSAHSLLQFRQLVIINRTQSSRFHSRMLLNPASETSVLDTIRQHLLEEPAAXEARPADESFGSLVADQWSGSLPFRTDDADDMVVFGVLQDAFAYGWLPDGSFVHVKPEPVRSPDSSSYHPCSYDGSPCFGLLDPEPPLTPGTTTPGRGQEEAAAAMARGKHYRGVRQRPWGKFAAEIRDPARNGARVWLGTYDTAEDAALAYDRAAYRMRGSRALLNFPLRIGSGDKRPSPAPPEPTTSSDSSSSSASGSHKRRKRGEAAAANMAMALVPSPSQLNRPAQPWFPAAPVEQAAMAPRVEQIVV

SEQ ID NO: 23605 - protein, 290 aa, Zea mays subsp. mays
  misc_feature (1)..(290): Ceres Seq. ID no. 12413990
  misc_feature (66)..(66): Xaa is any aa, unknown or other
FNSITSSIPISTHTRLSSLPPPVSSARHHKPNTELSIPFQDAAEPGVRDVGARHHPAAPPRGASGXGGAAGRRELREPGGGPVERLAPVPHRRRRRHGGVRGAAGRLRLRLAARRLIRAREARASAVPRLVLLPPLLLRRLTLLRPPGPGAAADARHHHAREGAGGGRGGHGPGQALQGGEAAPVGQVRGGDQGPRQERRARLARHVRHRRGRRARLRPRRLPHARLARAPQLPAPHRLRGQAPVAGAARAHHLLGLLLVFGQRLAQEAEARRGRGCQHGHGAGALALPA

SEQ ID NO: 23606 - protein, 277 aa, Zea mays subsp. mays
  misc_feature (1)..(277): Ceres Seq. ID no. 12413991
  misc_feature (26)..(26): Xaa is any aa, unknown or other
MLLNPASETSVLDTIRQHLLEEPAAXEARPADESFGSLVADQWSGSLPFRTDDADDMVVFGVLQDAFAYGWLPDGSFVHVKPEPVRSPDSSSYHPCSYDGSPCFGLLDPEPPLTPGTTTPGRGQEEAAAAMARGKHYRGVRQRPWGKFAAEIRDPARNGARVWLGTYDTAEDAALAYDRAAYRMRGSRALLNFPLRIGSGDKRPSPAPPEPTTSSDSSSSSASGSHKRRKRGEAAAANMAMALVPSPSQLNRPAQPWFPAAPVEQAAMAPRVEQIVV

SEQ ID NO: 23607 - DNA, 650 bp, Zea mays subsp. mays
  misc_feature (1)..(650): Ceres Seq. ID no. 12414093
aattcttcctgctgctcgcctgctccagaatgttcccctccagctccgccaccggcccccgcttccttcgccccttcaccgccaccgcaccccgccgtgccatggcggcatgcacgggcgccccaagcgacccgccgatgcagcagtcttctcccaccaaggcggtgcgcgtggtggtgaagggacgcgtgcagggcgtcttcttccgggactggaccgtggagatggcgcgctccctggggctcgccgggtgggtccgcaaccgccgcgacggcaccgtggaggcgctactctccggggacccggacaaggtggacgagatggtgtcccggcggatccccgtcggcccgcccgccgccgtcgtcaccgctgttgtaccctcccccgctgaaccggtctcccccgacgatggcttccaccgcaagcccaccgcctgatttatggctggttcatcggccatccgtggggcgtggtcattggcgagcggcgccactcgcctgtggtaatcaatctactgaagaactgtgagaacctctactactacttagtatagcaattatcttttgatatgacaggccggtattgggccatgtaatcttggagtattaagcccagattgtaatagctataagtactcatacttgtgaaag

SEQ ID NO: 23608 - protein, 144 aa, Zea mays subsp. mays
  misc_feature (1)..(144): Ceres Seq. ID no. 12414094
FFLLLACSRMFPSSSATGPRFLRPFTATAPRRAMAACTGAPSDPPMQQSSPTKAVRVVVKGRVQGVFFRDWTVEMARSLGLAGWVRNRRDGTVEALLSGDPDKVDEMVSRRIPVGPPAAVVTAVVPSPAEPVSPDDGFHRKPTA

SEQ ID NO: 23609 - protein, 135 aa, Zea mays subsp. mays
  misc_feature (1)..(135): Ceres Seq. ID no. 12414095
MFPSSSATGPRFLRPFTATAPRRAMAACTGAPSDPPMQQSSPTKAVRVVVKGRVQGVFFRDWTVEMARSLGLAGWVRNRRDGTVEALLSGDPDKVDEMVSRRIPVGPPAAVVTAVVPSPAEPVSPDDGFHRKPTA

SEQ ID NO: 23610 - protein, 129 aa, Zea mays subsp. mays
  misc_feature (1)..(129): Ceres Seq. ID no. 12414096
ILPAARLLQNVPLQLRHRPPLPSPLHRHRTPPCHGGMHGRPKRPADAAVFSHQGGARGGEGTRAGRLLPGLDRGDGALPGARRVGPQPPRRHRGGATLRGPGQGGRDGVPADPRRPARRRRHRCCTLPR

SEQ ID NO: 23611 - DNA, 1517 bp, Zea mays subsp. mays
  misc_feature (1)..(1517): Ceres Seq. ID no. 12414097
aacacacaaacccacaccaattgatgtgaaacccacacaatcccatcgtcacgacgccaagatcgtgtgcgagtgcgactgtgcgcacgtctccgtctcgcttgttttaagcacggcaagggaagaggacgacgacgggtggacgcttggacaaacagccttgtcgtgtactctctctttctctcctcccacagttccgctcgattcgaagagtccagcgccacacgacatcctccgcgcggccggccatgggggaagctgcggatccagcgacggggagggtgtcaccgccgatgtcgtggcgtacgcggctctccgtgctcgccgcggggtacctcaccgacgccacgcgccgcgccgacggcacagtcaaccgccgcctgctcggcatgctcgacaagggcgtggcggcgtccgcggtcccgcgcaacggcgtcgcctcgcgggacgtgaccatcgacccggccgtgcccctccgcgcgcgcctcttctacccctgcgctcccgccgccgccgaggacgacgacgcgggggcggagcgtccggcggtgcccgtcgtcgtgttcttccacggcggcggcttcgcgtacctctccgcggcatcccccgcctacgacgctgcgtgccgccgcatcgccaggtacgccggcgcggcggtgctgtccgtcgactaccgccgctcgcccgagcaccggttccccgccgcctacgacgacggcttcgcggccctccgcttcctcgacggcgggcccgaccccgaccccggcgcgatcgcgggcgccccgccgatcgacgccgcgcgctgcttcctcgcgggggacagcgctggcggtaacatcgcgcaccacgtcgcccgccgctacgcgctggacccttccgccttcgcgaacctccgcctcgccggcctcatcgccatccagcccttcttcggcggccaggagcgcacgcccgccgagctgcggctcgtcggcgcgcccatcgtctccgttccgcgcaccgactggatgtggcgcgcgttccttccccacggcgcggaccgcacccacgaggcgtcatcccccgacgtcgccaccgcgggcatcgacggcgcccctgatttcccgcctgccacggtcgtcatcggcgggtacgacccgctgcaggactggcagcgccggtactgcgacgcgttgcgcggtaaggggaaggaggtgcgggtgctcgagtaccccgacgccatccacgccttctacgtgttcccggagttcgcggagtccaaggacctcatgctacggatcaaggagatcgtcgccagcagcgagtgatgggggacggacggcgtgggcgcgcgcagctgtcgctcagatgcgtggtggatgtatctgcgactgtgctaagtggctagggtcagtgttgtggttgtggactggacggtgctgtctagtgtgtgacgtggttcgtcgtgtgggacgcgccacaattaaactagtgttaaataatgatgcgatcggcaatgataattctaattttcgtgtttg

SEQ ID NO: 23612 - protein, 351 aa, Zea mays subsp. mays
  misc_feature (1)..(351): Ceres Seq. ID no. 12414098
MGEAADPATGRVSPPMSWRTRLSVLAAGYLTDATRRADGTVNRRLLGMLDKGVAASAVPRNGVASRDVTIDPAVPLRARLFYPCAPAAAEDDDAGAERPAVPVVVFFHGGGFAYLSAASPAYDAACRRIARYAGAAVLSVDYRRSPEHRFPAAYDDGFAALRFLDGGPDPDPGAIAGAPPIDAARCFLAGDSAGGNIAHHVARRYALDPSAFANLRLAGLIAIQPFFGGQERTPAELRLVGAPIVSVPRTDWMWRAFLPHGADRTHEASSPDVATAGIDGAPDFPPATVVIGGYDPLQDWQRRYCDALRGKGKEVRVLEYPDAIHAFYVFPEFAESKDLMLRIKEIVASSE

SEQ ID NO: 23613 - protein, 336 aa, Zea mays subsp. mays
  misc_feature (1)..(336): Ceres Seq. ID no. 12414099
MSWRTRLSVLAAGYLTDATRRADGTVNRRLLGMLDKGVAASAVPRNGVASRDVTIDPAVPLRARLFYPCAPAAAEDDDAGAERPAVPVVVFFHGGGFAYLSAASPAYDAACRRIARYAGAAVLSVDYRRSPEHRFPAAYDDGFAALRFLDGGPDPDPGAIAGAPPIDAARCFLAGDSAGGNIAHHVARRYALDPSAFANLRLAGLIAIQPFFGGQERTPAELRLVGAPIVSVPRTDWMWRAFLPHGADRTHEASSPDVATAGIDGAPDFPPATVVIGGYDPLQDWQRRYCDALRGKGKEVRVLEYPDAIHAFYVFPEFAESKDLMLRIKEIVASSE

SEQ ID NO: 23614 - protein, 304 aa, Zea mays subsp. mays
  misc_feature (1)..(304): Ceres Seq. ID no. 12414100
MLDKGVAASAVPRNGVASRDVTIDPAVPLRARLFYPCAPAAAEDDDAGAERPAVPVVVFFHGGGFAYLSAASPAYDAACRRIARYAGAAVLSVDYRRSPEHRFPAAYDDGFAALRFLDGGPDPDPGAIAGAPPIDAARCFLAGDSAGGNIAHHVARRYALDPSAFANLRLAGLIAIQPFFGGQERTPAELRLVGAPIVSVPRTDWMWRAFLPHGADRTHEASSPDVATAGIDGAPDFPPATVVIGGYDPLQDWQRRYCDALRGKGKEVRVLEYPDAIHAFYVFPEFAESKDLMLRIKEIVASSE

SEQ ID NO: 23615 - DNA, 1250 bp, Zea mays subsp. mays
  misc_feature (1)..(1250): Ceres Seq. ID no. 12414165
tccactccactccagccaggcgccagcactcacccacccatggcgtccgaagccgcgccgcgggtcgtcgtggacgagtgccggggcgtgctgtccgtgtacagcgacggcacggtggtgcggcgcgcgcagccggggttcgcgacgccggtgcgggacgacggcacggtcgactggaaggacgtgacgttcgacgaggccccgcgggctggcgctccgcctctacctcccccgggaccgcggggccgcggccgggcggcgcctgccggtcttcttctactaccacggcggcggcttctgcatcgggtcccgcgcctggcccaactgccagaactactgcctgcgcctggcctccgacctgggcgcgctcgtggtggcgccggactaccgcctcgcgcccgagcaccgcctccccgccgccatcgacgacggcgcggcggcggtcctgtggctggcgaggcagggcggcggggacccctgggtcgccgaggccgccgacctcggccgcgtcttcgtgtcgggcgactcggccggcggcaccatcgcgcaccacctcgccgtgcgcttcggtggctcgcccgcggacctggcccccgtcgccgtgcggggatacgtccagctcatgccattcttcggcggcgtggcgcgcacgcggtcggaggccgagtgccccgccgacgctttcctcgaccggcccctcaacgaccgctactggcgcctgtcgctgccggagggcgccacgcccgaccaccccgtggccaacccgttcggccccggcgcgccgccgctggacgccgtcgagttcgcgcccaccctggtcgtcgtcggcggccgcgacctcctccacgaccgcgccgtcgactacgccgccaggctcagggccgccgggaagcccgtcgtggtcagggacttccacggccagcagcacggcttcttcaccatcgacccctggtccgacgcctccgccgagctcatgcgcgtcatcaagcgcttcgtcgacgccgacggccgcttcgacttcgactgacacgtcggtgtcgaactctagtattaaatccgagggagcgagcagaatggtctgcgtcgagccgtcgagtagttcccgggttgaaatcaatgtggtttggtgattgtgatatttttcttgctcgtttgtttttattatggacggttctcctgttaaaaagtagtagcccggtgtgtttagtaggaatcttgtatctagattcgctcgaggaacattctagatg

SEQ ID NO: 23616 - protein, 416 aa, Zea mays subsp. mays
  misc_feature (1)..(416): Ceres Seq. ID no. 12414166
STPLQPGASTHPPMASEAAPRVVVDECRGVLSVYSDGTVVRRAQPGFATPVRDDGTVDWKDVTFDEAPRAGAPPLPPPGPRGRGRAAPAGLLLLPRRRLLHRVPRLAQLPELLPAPGLRPGRARGGAGLPPRARAPPPRRHRRRRGGGPVAGEAGRRGPLGRRGRRPRPRLRVGRLGRRHHRAPPRRALRWLARGPGPRRRAGIRPAHAILRRRGAHAVGGRVPRRRFPRPAPQRPLLAPVAAGGRHARPPRGQPVRPRRAAAGRRRVRAHPGRRRRPRPPPRPRRRLRRQAQGRREARRGQGLPRPAARLLHHRPLVRRLRRAHARHQALRRRRRPLRLRLTRRCRTLVLNPRERAEWSASSRRVVPGLKSMWFGDCDIFLARLFLLWTVLLLKSSSPVCLVGILYLDSLEEHSR

SEQ ID NO: 23617 - protein, 403 aa, Zea mays subsp. mays
  misc_feature (1)..(403): Ceres Seq. ID no. 12414167
MASEAAPRVVVDECRGVLSVYSDGTVVRRAQPGFATPVRDDGTVDWKDVTFDEAPRAGAPPLPPPGPRGRGRAAPAGLLLLPRRRLLHRVPRLAQLPELLPAPGLRPGRARGGAGLPPRARAPPPRRHRRRRGGGPVAGEAGRRGPLGRRGRRPRPRLRVGRLGRRHHRAPPRRALRWLARGPGPRRRAGIRPAHAILRRRGAHAVGGRVPRRRFPRPAPQRPLLAPVAAGGRHARPPRGQPVRPRRAAAGRRRVRAHPGRRRRPRPPPRPRRRLRRQAQGRREARRGQGLPRPAARLLHHRPLVRRLRRAHARHQALRRRRRPLRLRLTRRCRTLVLNPRERAEWSASSRRVVPGLKSMWFGDCDIFLARLFLLWTVLLLKSSSPVCLVGILYLDSLEEHSR

SEQ ID NO: 23618 - protein, 375 aa, Zea mays subsp. mays
  misc_feature (1)..(375): Ceres Seq. ID no. 12414168
HSTPARRQHSPTHGVRSRAAGRRGRVPGRAVRVQRRHGGAARAAGVRDAGAGRRHGRLEGRDVRRGPAGWRSASTSPGTAGPRPGGACRSSSTTTAAASASGPAPGPTARTTACAWPPTWARSWWRRTTASRPSTASPPPSTTARRRSCGWRGRAAGTPGSPRPPTSAASSCRATRPAAPSRTTSPCASVARPRTWPPSPCGDTSSSCHSSAAWRARGRRPSAPPTLSSTGPSTTATGACRCRRAPRPTTPWPTRSAPARRRWTPSSSRPPWSSSAAATSSTTAPSTTPPGSGPPGSPSWSGTSTASSTASSPSTPGPTPPPSSCASSSASSTPTAASTSTDTSVSNSSIKSEGASRMVCVEPSSSSRVEINVVW

SEQ ID NO: 23619 - DNA, 1334 bp, Zea mays subsp. mays
  misc_feature (1)..(1334): Ceres Seq. ID no. 12414173
aaacaacttgggcgcggccggattcgtataggttagcagcacacagtagcaagctcgcgatctgtgcgcccaccatcaccaccaccgccgggaggagaggaccgaccgaccgaccgaagatgcggatgagctgcaacggctgccgcgtcctgcgcaagggctgcagcgacgcctgcaccatccgcccctgcctgcagtggatcgacagccccgaggcgcaggcaaacgccaccgtcttcctcgccaagttctacggccgcgcggggctgctcaacctgctggccgccgcgcccgacgacgccgcccgcccggccgtcttccgctccctgctctacgaggcgtgcggccgcatcgtcaaccccgtctacggctccgtcggcctgctctggtcgcgccggtggcagagctgcgtcgacgccgtcgaggccgtgctcaagggggaccccgtcgtgcaggtcgacgccggctccgaggccgccgccgccccggcgccgctgctcggcgccagcaggccagccgcgccgccggccgcctacgacatccgccacgtcgccagggatcccgacgccgccgccgccgccgacctcctccgcgtcgcgcgcggcggcggccgcaggaggttcaagcgcgccggctcgccttccaacgcctgcaaggcgaaacccctcaagggaaaggctagcagcaacgagcgcgcgtcgcccagccctactcagaggcagcatcagcaggagacggaggagctggagctggaaccggtgccgatggtcgtcgagcttgagcacggcgaggagtccgccggcagccacgaccaccaccaccaccacttgcagccgcagggatcgtcggaggacaccgacgtggaggccgcctcccacgtgagcccaggcccgaggccgagccgccggtcagcagccagagccaggcgctggtggcggacccaggagggagaggaggtcaggctggagctcacgctcggcttcgagccagtcgtcaggcagcagccgaggctgtcgtgctgcgactcgagcggcttgagcgccgcgtcgagcctcatcggcttgcggctgcagctgccagccgcctgagcagaggaggtcatctcatttcacaaggcacagtggcacaccaagtgcagttttgcaaccaatgcggtgtttgcttaaagaaaaggttttggacgccgagcagccgactatttcctaggttttgttttttcattttcttttcttggctgtaattgtaaaggctgatgaactgcacagttttagcgtcgtcataataggagttttgcaattccatatgagattataagctattaaaaagtttgattg

SEQ ID NO: 23620 - protein, 361 aa, Zea mays subsp. mays
  misc_feature (1)..(361): Ceres Seq. ID no. 12414174
TTWARPDSYRLAAHSSKLAICAPTITTTAGRRGPTDRPKMRMSCNGCRVLRKGCSDACTIRPCLQWIDSPEAQANATVFLAKFYGRAGLLNLLAAAPDDAARPAVFRSLLYEACGRIVNPVYGSVGLLWSRRWQSCVDAVEAVLKGDPVVQVDAGSEAAAAPAPLLGASRPAAPPAAYDIRHVARDPDAAAAADLLRVARGGGRRRFKRAGSPSNACKAKPLKGKASSNERASPSPTQRQHQQETEELELEPVPMVVELEHGEESAGSHDHHHHHLQPQGSSEDTDVEAASHVSPGPRPSRRSAARARRWWRTQEGEEVRLELTLGFEPVVRQQPRLSCCDSSGLSAASSLIGLRLQLPAA

SEQ ID NO: 23621 - protein, 322 aa, Zea mays subsp. mays
  misc_feature (1)..(322): Ceres Seq. ID no. 12414175
MRMSCNGCRVLRKGCSDACTIRPCLQWIDSPEAQANATVFLAKFYGRAGLLNLLAAAPDDAARPAVFRSLLYEACGRIVNPVYGSVGLLWSRRWQSCVDAVEAVLKGDPVVQVDAGSEAAAAPAPLLGASRPAAPPAAYDIRHVARDPDAAAAADLLRVARGGGRRRFKRAGSPSNACKAKPLKGKASSNERASPSPTQRQHQQETEELELEPVPMVVELEHGEESAGSHDHHHHHLQPQGSSEDTDVEAASHVSPGPRPSRRSAARARRWWRTQEGEEVRLELTLGFEPVVRQQPRLSCCDSSGLSAASSLIGLRLQLPAA

SEQ ID NO: 23622 - protein, 320 aa, Zea mays subsp. mays
  misc_feature (1)..(320): Ceres Seq. ID no. 12414176
MSCNGCRVLRKGCSDACTIRPCLQWIDSPEAQANATVFLAKFYGRAGLLNLLAAAPDDAARPAVFRSLLYEACGRIVNPVYGSVGLLWSRRWQSCVDAVEAVLKGDPVVQVDAGSEAAAAPAPLLGASRPAAPPAAYDIRHVARDPDAAAAADLLRVARGGGRRRFKRAGSPSNACKAKPLKGKASSNERASPSPTQRQHQQETEELELEPVPMVVELEHGEESAGSHDHHHHHLQPQGSSEDTDVEAASHVSPGPRPSRRSAARARRWWRTQEGEEVRLELTLGFEPVVRQQPRLSCCDSSGLSAASSLIGLRLQLPAA

SEQ ID NO: 23623 - DNA, 750 bp, Zea mays subsp. mays
  misc_feature (1)..(750): Ceres Seq. ID no. 12414205
agccgactgggactgagaagaaacctccaaacacctacctctctacgaactacctgccgccggaaaaccctagagcgctcgaccatggatccgcagcagccggagcctgtcagttacctctgcggagattgcggacgtgagaacaccctgaagcccggagatgtcatccagtgccgtgaatgtggctaccgcatcctctacaagaagcggtagccacattcacggcactggaagacctctgagggtgaactgcgggccaccgccacctagagatggatccgcaccaagagcaccaaggggtggtggtggtggcggcggcggcagcagctttgtcgattcagggaacaaggtatacgtggggaaccttgcatggggcgttgacaactcgactctggagaacctattcagtgagcaaggacaggtgctggatgctaaggtcatctacgacagggatagcggcaggtcaagggggtttggtttcgtcacctatggctctgccgaggaggtcaacaatgccatatcaaaccttgatggcatagacttggatggtagacagatccgagtcacggttgcagaatcaaagcccaggcgtgaattttgagattttgttaaggtggtttagaggtcaatagcgtgtgttcacaagttctagtttgtagcgtctattctttcttccgtatgagtaacaagaagatgctgataatgagagactggaagtgaaactgctgtccacaggaagatatttttccc

SEQ ID NO: 23624 - protein, 146 aa, Zea mays subsp. mays
  misc_feature (1)..(146): Ceres Seq. ID no. 12414206
MSSSAVNVATASSTRSGSHIHGTGRPLRVNCGPPPPRDGSAPRAPRGGGGGGGGSSFVDSGNKVYVGNLAWGVDNSTLENLFSEQGQVLDAKVIYDRDSGRSRGFGFVTYGSAEEVNNAISNLDGIDLDGRQIRVTVAESKPRREF

SEQ ID NO: 23625 - protein, 88 aa, Zea mays subsp. mays
  misc_feature (1)..(88): Ceres Seq. ID no. 12414207
MDPHQEHQGVVVVAAAAAALSIQGTRYTWGTLHGALTTRLWRTYSVSKDRCWMLRSSTTGIAAGQGGLVSSPMALPRRSTMPYQTLMA

SEQ ID NO: 23626 - DNA, 1377 bp, Zea mays subsp. mays
  misc_feature (1)..(1377): Ceres Seq. ID no. 12414234
gcacgagaccattacctagaacatcctaatcgaaaaatcacacatcacaaggaacgcagaacagcacagcacagcacagcactgccgtcaagcaagaggttgaggatgtgtacgctgcaactgcggtagcacgctaccgctacggttccaaggacaagaggcaagaacgtgccatggcgatggaagcagaggaagacggaggtgggatagaaggggagctcatcccggggctgcccgacgacgtggccatggagtgcctggcgcgagtgccgagccggtcgcaccggcgcatgcgccgcgtgtgccgcagatggcgcgggaccgtcgggtcggcggaattccggcggcgccggatggccgccggggcgtcggaggacatggtgttcctcgtccagaccgcgcccgcgcgcggcgacgggaagggatcgacgtcggaatgcgcgcttgtggcggcgaacctgaccaccggcgagtggcggcgcgtggaggggccggccgagacctggagacccgtcccgctcttcgcgcagtgcgcggccgcgggcgacgggcggcatgtcgcagtggtggggggctgggacccggacacgctccgcccgaccagcgacgtccggttgctggacgtccccgccggcacgtggaggcgcggcccgaagatgccggacagccggagcttcttcggatgcgctgggggcggcggcaacgtctacgtcgccggcggacacgacgagtgcaagaacgctctccgctccgccttcgcgtacagcgtcgcggccgacgcctggcgcgcactcccggacatgttggaggagcgtgacgagccgcagctcgtcgtggcgaccccgggccgcgtcctcgccgccagcggctacccgaccgaagcccagggcgcgttcaaggataccgccgagtggtacaacgccggcggcggcgcgtggaccagcgagtgcgacgtggtacccgacggcgacacggctgggacgtgcctggcgtcggtgcgcgggacggtgtgggccgtcggggccgggaacggcggcgtgcgggaatgggacggcgccgcgcgcgcgtggaaggacgtggccgacgggccgccgggcatgaaggcctgcttgaaggcggttggcgttggcaacggcggggccgtgctcgtgttcggcacagtggcagacgcggcggcggagggcgtcaactactctgcgtgggtcatggaagcgagcagcggtgcatggaagcgagtgcccgtgccgtcaggattcggcgggttcgtttactcagccgcagccgtgcctgtttagatcctagcctatgtactgctacaataaggacttgttcggttattcccaatacatatggattagatgggattggaaaaaattg

SEQ ID NO: 23627 - protein, 373 aa, Zea mays subsp. mays
  misc_feature (1)..(373): Ceres Seq. ID no. 12414235
MAMEAEEDGGGIEGELIPGLPDDVAMECLARVPSRSHRRMRRVCRRWRGTVGSAEFRRRRMAAGASEDMVFLVQTAPARGDGKGSTSECALVAANLTTGEWRRVEGPAETWRPVPLFAQCAAAGDGRHVAVVGGWDPDTLRPTSDVRLLDVPAGTWRRGPKMPDSRSFFGCAGGGGNVYVAGGHDECKNALRSAFAYSVAADAWRALPDMLEERDEPQLVVATPGRVLAASGYPTEAQGAFKDTAEWYNAGGGAWTSECDVVPDGDTAGTCLASVRGTVWAVGAGNGGVREWDGAARAWKDVADGPPGMKACLKAVGVGNGGAVLVFGTVADAAAEGVNYSAWVMEASSGAWKRVPVPSGFGGFVYSAAAVPV

SEQ ID NO: 23628 - protein, 371 aa, Zea mays subsp. mays
  misc_feature (1)..(371): Ceres Seq. ID no. 12414236
MEAEEDGGGIEGELIPGLPDDVAMECLARVPSRSHRRMRRVCRRWRGTVGSAEFRRRRMAAGASEDMVFLVQTAPARGDGKGSTSECALVAANLTTGEWRRVEGPAETWRPVPLFAQCAAAGDGRHVAVVGGWDPDTLRPTSDVRLLDVPAGTWRRGPKMPDSRSFFGCAGGGGNVYVAGGHDECKNALRSAFAYSVAADAWRALPDMLEERDEPQLVVATPGRVLAASGYPTEAQGAFKDTAEWYNAGGGAWTSECDVVPDGDTAGTCLASVRGTVWAVGAGNGGVREWDGAARAWKDVADGPPGMKACLKAVGVGNGGAVLVFGTVADAAAEGVNYSAWVMEASSGAWKRVPVPSGFGGFVYSAAAVPV

SEQ ID NO: 23629 - protein, 348 aa, Zea mays subsp. mays
  misc_feature (1)..(348): Ceres Seq. ID no. 12414237
MECLARVPSRSHRRMRRVCRRWRGTVGSAEFRRRRMAAGASEDMVFLVQTAPARGDGKGSTSECALVAANLTTGEWRRVEGPAETWRPVPLFAQCAAAGDGRHVAVVGGWDPDTLRPTSDVRLLDVPAGTWRRGPKMPDSRSFFGCAGGGGNVYVAGGHDECKNALRSAFAYSVAADAWRALPDMLEERDEPQLVVATPGRVLAASGYPTEAQGAFKDTAEWYNAGGGAWTSECDVVPDGDTAGTCLASVRGTVWAVGAGNGGVREWDGAARAWKDVADGPPGMKACLKAVGVGNGGAVLVFGTVADAAAEGVNYSAWVMEASSGAWKRVPVPSGFGGFVYSAAAVPV

SEQ ID NO: 23630 - DNA, 1461 bp, Zea mays subsp. mays
  misc_feature (1)..(1461): Ceres Seq. ID no. 12414242
aaaaggggatctcagggtcagagcgcatcagcacacagacagcgcggtgctctccagtccccaccaattaagctcagggtctagtgagcagccagagagcctcgtcccgttcccacccccattgcttgctctgactgctccgccgtgcgtgcgtcacccgcgctcgggaggtgagtggtttggttgcgcagccaactgccggcccggcaccgtaccgcttgttcgcttctgaggttgtgcggagtggttgctggcctggccgtggccggcataccgataaaggcgagagacaaggcgttgtctcactctcatccgtcgtccgtctcgtctcggctttctcgcctcctcgggcggcagcggtgttccactcccatcgcgtcgggacatagaaagggggagcgcgggcgacacgcgagcgttagttgccatggacgcgcccttcttccacgagctcaggcggcaggcctcctcctacctcaccggcaagatccgctccgcgcggctggcgctcaccgacgtcaccccgacgcagctcatgacggaggaggcgacgaacggggacgcgtcgccgccgaacgtcaagacgatgggcctcatagcccggcaggcgttcgaggtcgacgagtacgtcaggatcacggacatcctgcacaggcgcttcgcgagcttcgaccccaggcaggggcaggggcagtggcagtggcgggaggcgtacaaggcgctgctcctcctggaccacctcctcacgcacgggccccgcagcgtcgcggtcgagttccagaaggacagggaggccatcgagcggatggccaccttccaacacatcgacgagagaggcttcaactggggacggacggtgacgagcaagtcggagcgcgtgctcaagctgctggagcgcggcccgttcctggaggaggagcgcgagcgggcacgcaagatcgcgcgcgagatcaagggcttcggcagcttcaacctcagcagcgcctcccacgccgcgccacagccaccaccaggtgacgagggaagccgcggctacggccggagcaactcgcagttcgagcagcggtggaggcacaaggacggcgacgacagcgacaaggagaatctgatccagagcccggagccagcacgggtcgcgcgggaagtcgaggccgagccggaggagccgcaccaccacccgttccacgggctcgggcaaaaacagcggccggaggcgatgctgctcctgagccagtgacgggatcagtcggttcgtgtcatggtgatatgaaaaagaaccgtgtgctctgctcgactcaactagcttttctccattcctcaaggctgcaggggtcggaggcagtgatgggatcagtcagtactttactgacactgcttggtgcaccatgcatgagaactttgatgtctcatgtagtagtcatgtctgcttcgccttgtaaataattctatgcttcagttcgc

SEQ ID NO: 23631 - protein, 269 aa, Zea mays subsp. mays
  misc_feature (1)..(269): Ceres Seq. ID no. 12414243
MDAPFFHELRRQASSYLTGKIRSARLALTDVTPTQLMTEEATNGDASPPNVKTMGLIARQAFEVDEYVRITDILHRRFASFDPRQGQGQWQWREAYKALLLLDHLLTHGPRSVAVEFQKDREAIERMATFQHIDERGFNWGRTVTSKSERVLKLLERGPFLEEERERARKIAREIKGFGSFNLSSASHAAPQPPPGDEGSRGYGRSNSQFEQRWRHKDGDDSDKENLIQSPEPARVAREVEAEPEEPHHHPFHGLGQKQRPEAMLLLSQ

SEQ ID NO: 23632 - protein, 233 aa, Zea mays subsp. mays
  misc_feature (1)..(233): Ceres Seq. ID no. 12414244
MTEEATNGDASPPNVKTMGLIARQAFEVDEYVRITDILHRRFASFDPRQGQGQWQWREAYKALLLLDHLLTHGPRSVAVEFQKDREAIERMATFQHIDERGFNWGRTVTSKSERVLKLLERGPFLEEERERARKIAREIKGFGSFNLSSASHAAPQPPPGDEGSRGYGRSNSQFEQRWRHKDGDDSDKENLIQSPEPARVAREVEAEPEEPHHHPFHGLGQKQRPEAMLLLSQ

SEQ ID NO: 23633 - protein, 216 aa, Zea mays subsp. mays
  misc_feature (1)..(216): Ceres Seq. ID no. 12414245
MGLIARQAFEVDEYVRITDILHRRFASFDPRQGQGQWQWREAYKALLLLDHLLTHGPRSVAVEFQKDREAIERMATFQHIDERGFNWGRTVTSKSERVLKLLERGPFLEEERERARKIAREIKGFGSFNLSSASHAAPQPPPGDEGSRGYGRSNSQFEQRWRHKDGDDSDKENLIQSPEPARVAREVEAEPEEPHHHPFHGLGQKQRPEAMLLLSQ

SEQ ID NO: 23634 - DNA, 1421 bp, Zea mays subsp. mays
  misc_feature (1)..(1421): Ceres Seq. ID no. 12414261
agaaaaggctgagaggctgtaaagagtgttgaaggacgctcggttccttcaggtgcggcggcgaccttgtctaggattttacccgtggaacgtggcgaccacttccgacgggccactcgccgccgctcgcccgccctgctcttcaccccttctcccgggaccgggacaagcgatctcccgtccccgtagtccgcaggagagagatttttttctcggttgcaatgaagagttatccgtgggcgggggcccgccctcttgccgtcgtgcagctcctcctcttcctcgcccacctcgtcgaccgcggcggtgctgccggtggaggcagcaagggcagctcggtgtacccggcggctgtcgtctacccgcatcactcccgccagatctcctgcaaacccagggtgttcctgtatcagcacttcctcagcgacgacgaggctaaccacctgatctccctcgcgagagcggagctcaagaggtcagcggtcgccgataatatgtctggcaagagcacgctcagtgaggtccgcaccagctccggcaccttcctcaggaagggccaggatcctattgttgagggtatagaggacaaaattgctgcatggacattccttccaaaagagaatggtgaagatatccaagtcctaagatataagcatggggagaagtatgaaccacactatgattacttcactgacaatgttaacactgtccgtggtggtcatcgctacgctactgttcttttgtacttaactgatgtaccagaaggaggggaaacggttttccccttggctgaggagcccgatgatgctaaagatgcaaccttgtcagaatgtgctcagaaaggcattgcagtgagaccacggaaaggtgacgccctccttttcttcaaccttaacccagacggcaccaccgactcggtgagcctccatggtggttgcccggtcataaaaggcgagaaatggtcggctacgaagtggatccgtgtggcctcgttcgataaggtccatcacccacagggcaactgcaccgacgagaacgagagctgcgcgaaatgggcggccctaggggagtgcataaagaacccagagtacatggtgggaaccacagcgttgcctggttactgtcggaggagctgcaatgtgtgctagggtcaggacgtgagagtactagtatttgttagtgcataccacttgtatccatagtctgttgttggtctcctacatctcgcataaaagaaatactcctatgctataggttatgccgatggaggtgcatttagaataagcctagtatttgatctattgatttattagattgcttggttctgctagctcataatttgtaccggaaccttagaagatctttgattcgttgtcatctgtaacattttctcgatatatatatggtgtgcatttctgggc

SEQ ID NO: 23635 - protein, 308 aa, Zea mays subsp. mays
  misc_feature (1)..(308): Ceres Seq. ID no. 12414262
MKSYPWAGARPLAVVQLLLFLAHLVDRGGAAGGGSKGSSVYPAAVVYPHHSRQISCKPRVFLYQHFLSDDEANHLISLARAELKRSAVADNMSGKSTLSEVRTSSGTFLRKGQDPIVEGIEDKIAAWTFLPKENGEDIQVLRYKHGEKYEPHYDYFTDNVNTVRGGHRYATVLLYLTDVPEGGETVFPLAEEPDDAKDATLSECAQKGIAVRPRKGDALLFFNLNPDGTTDSVSLHGGCPVIKGEKWSATKWIRVASFDKVHHPQGNCTDENESCAKWAALGECIKNPEYMVGTTALPGYCRRSCNVC

SEQ ID NO: 23636 - protein, 217 aa, Zea mays subsp. mays
  misc_feature (1)..(217): Ceres Seq. ID no. 12414263
MSGKSTLSEVRTSSGTFLRKGQDPIVEGIEDKIAAWTFLPKENGEDIQVLRYKHGEKYEPHYDYFTDNVNTVRGGHRYATVLLYLTDVPEGGETVFPLAEEPDDAKDATLSECAQKGIAVRPRKGDALLFFNLNPDGTTDSVSLHGGCPVIKGEKWSATKWIRVASFDKVHHPQGNCTDENESCAKWAALGECIKNPEYMVGTTALPGYCRRSCNVC

SEQ ID NO: 23637 - DNA, 811 bp, Zea mays subsp. mays
  misc_feature (1)..(811): Ceres Seq. ID no. 12414277
acaggcaagcatctggccacatgtgcactcacacgactcagggcgagaggacagcagggcacaataaccgttccactttggtccataggagcgcatagcacagcacaaggagaggccgagaagcgctttagccgtagccgtagcgataagagtgagctagctggtgcacaccggcatggcggccacggcgtactccgtggcgctcctcggcggcgcgcgcctccccgccgctccgcgctccgccctcctccctcggcgcagcgtctgccagcttcgcttccaagatgcaccgaggctctccctgctccgtgcgaaggccgcttccgaggacacatcggcctccggcgacgagttgatcgaggacctcaaagcgaagtgggacgccgttgaggacaagcccaccgtcctcttgtacggcggcggcgccgtcgtcgccctatggctgacgtccgtggtcgtgggcgccatcaacgccgtgccgctgctccccaagatcctggagctcgttgggctcggctacaccggctggttcgtgtaccgctaccttctctttaaggaaagcaggaaagagttggccgccgacattgagaccttgaagaaaaaaatagctggaacagaataaacgctcatggaaagttttagagcgtcctttcttctttggaaagagatctattcgatcggagaaccaatatgcaactacttgagtactattattgcccatgtattgtgtgctgtatatcttctgtatacaaaggaaggttcgtttgttatgtacgtagtagcattgtagtttaaatgtatcgtattacct

SEQ ID NO: 23638 - protein, 148 aa, Zea mays subsp. mays
  misc_feature (1)..(148): Ceres Seq. ID no. 12414278
MAATAYSVALLGGARLPAAPRSALLPRRSVCQLRFQDAPRLSLLRAKAASEDTSASGDELIEDLKAKWDAVEDKPTVLLYGGGAVVALWLTSVVVGAINAVPLLPKILELVGLGYTGWFVYRYLLFKESRKELAADIETLKKKIAGTE

SEQ ID NO: 23639 - protein, 129 aa, Zea mays subsp. mays
  misc_feature (1)..(129): Ceres Seq. ID no. 12414279
TGKHLATCALTRLRARGQQGTITVPLWSIGAHSTAQGEAEKRFSRSRSDKSELAGAHRHGGHGVLRGAPRRRAPPRRSALRPPPSAQRLPASLPRCTEALPAPCEGRFRGHIGLRRRVDRGPQSEVGRR

SEQ ID NO: 23640 - DNA, 1026 bp, Zea mays subsp. mays
  misc_feature (1)..(1026): Ceres Seq. ID no. 12414280
gactcagactcactcccgtcccccctgcctgcctgcgcgcgctctctgcctcgtggcggcgacgacgccctcctccaggtggccaggccatcgtcggatcgtattcctcggccccttctccggtgatgagcacccagaataaaaggctcaaggatgtggaggtcagtttcccaatcgtctacggaaccatttccttctggctcggcaaaaaggccagcgagtataactctcacaagtggactgtatatgtccgctcggcaaacaatgaggatctgagtgtcatagtcaagcgcgcggtgtttcagcttcacccgagtttccagaacccgacgagagtcgtcggagcagccgcctttcgagctgtccgagtcggggtggggagagtttgagatagccataaccctttatttccacagcgatgtctgtgacaagcgcttggatctgttccatcagcttaagctgtatccagaagaggaagctggacctcaatcgaccaaaaagcctgttgtcgtggaaacgtacgatgagattgtcttccccgagcctacagaggcctttttcctacgcgtgcaaaatcatccagcagctaacgtgcccaggcttcctcctggtataaccttgcctcctccaggccctatggaaattgttccgtatgaaaagaagcgaggtgacactaaggatcatcctttgagtcagtggttctcgaatttctctgaggctgacgagcttttgaaactagctgcagctcggcaacaggttcaggttcacatagccaagctgagaaggcagttaaccatgatagaaggaatgccccagcaatcgaaagccttttctgtccctggacagcagtttaggcacatctaatgtagtgcacctggtttgtaaggaagatgttggaatggaacctttcagcaactgcttgacagattgggttctgtgtattcgcattgaagtcgctgccttgggcttgcaaatgacctgtatattctatgaagtgtagtaccgttaggctcataagagaacact

SEQ ID NO: 23641 - protein, 128 aa, Zea mays subsp. mays
  misc_feature (1)..(128): Ceres Seq. ID no. 12414281
LRLTPVPPACLRALSASWRRRRPPPGGQAIVGSYSSAPSPVMSTQNKRLKDVEVSFPIVYGTISFWLGKKASEYNSHKWTVYVRSANNEDLSVIVKRAVFQLHPSFQNPTRVVGAAAFRAVRVGVGRV

SEQ ID NO: 23642 - protein, 87 aa, Zea mays subsp. mays
  misc_feature (1)..(87): Ceres Seq. ID no. 12414282
MSTQNKRLKDVEVSFPIVYGTISFWLGKKASEYNSHKWTVYVRSANNEDLSVIVKRAVFQLHPSFQNPTRVVGAAAFRAVRVGVGRV

SEQ ID NO: 23643 - protein, 75 aa, Zea mays subsp. mays
  misc_feature (1)..(75): Ceres Seq. ID no. 12414283
MEIVPYEKKRGDTKDHPLSQWFSNFSEADELLKLAAARQQVQVHIAKLRRQLTMIEGMPQQSKAFSVPGQQFRHI

SEQ ID NO: 23644 - DNA, 1396 bp, Zea mays subsp. mays
  misc_feature (1)..(1396): Ceres Seq. ID no. 12414291
ctccgtccccatctcgcgaagctagcgggaataacaagcaacgatacctacgacgacctacccccctttccctgctctctccttccaactcttgtttctgcaacgccagggcgcaaccatgggtcagcagcagcaagggccggcggccaggcggatggccacgctcgcctcccacctgcgccatccctccgtctctcaccctcagatggaagatgttcccctcttgaggggatccaattgccgtgcaaaaggtgcggcgccaggcttcaaagtcgcgatcttgggtgcagcaggtgggattgggcagccacttgcgctattgatgaagatgaaccctcttgtttcggtgctccatctatacgatgtcgtcaacgcacctggtgtcacagccgacatcagccacatgaacactggtgctgtggtacgtggcttcttgggccagccacagttggaaaatgccctggctggaatggatcttgtaataattcctgctggtgtccctcggaaacctgggatgacaagggatgatttgttcaacataaatgctggaatagtccgtaccctgtgtgaaggaattgcaaaatgctgccctaatgcaattgtgaatgtgatcagtaatcctgtcaactctaccgtcccaattgctgctgaagttttcaagaaagctggaacttatgaccctaagcggcttttaggtgtgaccacacttgacgtagtgagagcaaatacgtttgtgggagaggttcttggacttgaccccagagaggtaaatgttccagtcattggtgggcatgcaggaattacgatactaccactcctttcacaggtgaatccttcctgctcattcacctcggaagaggttaaatacctcacttctcgcatacagaatggtgggacagaagtagtcgaggctaaagctggagcaggatcagcaactctttcaatggcctatgcagctgccaaatttgcagatgcttgcctgagaggattgcgtggtgatgctgggataatagagtgctcttatgtggcttctcaggtcacagagttgcctttctttgcatccaaagtgcggctagggcgatgtggcattgaggagatcctaccacttggaccattaaatgagttcgagagatctggtctggagaaggcaaagaaagagctggcggagagtatccagaagggcgtctctttcatcaagtgaggccggcgacggccagcccaacatagaaatagatgtggcgtgtttctgcttcttgagaactcatcttgttatctctctgtaagactgagtgcatgacacgaataatccacgtacacggctgtactaaaaagatgatgaatctgtggtggctaaaaaaagggaaatagaaaagtctggtaataaaagttgtttctg

SEQ ID NO: 23645 - protein, 360 aa, Zea mays subsp. mays
  misc_feature (1)..(360): Ceres Seq. ID no. 12414292
MGQQQQGPAARRMATLASHLRHPSVSHPQMEDVPLLRGSNCRAKGAAPGFKVAILGAAGGIGQPLALLMKMNPLVSVLHLYDVVNAPGVTADISHMNTGAVVRGFLGQPQLENALAGMDLVIIPAGVPRKPGMTRDDLFNINAGIVRTLCEGIAKCCPNAIVNVISNPVNSTVPIAAEVFKKAGTYDPKRLLGVTTLDVVRANTFVGEVLGLDPREVNVPVIGGHAGITILPLLSQVNPSCSFTSEEVKYLTSRIQNGGTEVVEAKAGAGSATLSMAYAAAKFADACLRGLRGDAGIIECSYVASQVTELPFFASKVRLGRCGIEEILPLGPLNEFERSGLEKAKKELAESIQKGVSFIK

SEQ ID NO: 23646 - protein, 348 aa, Zea mays subsp. mays
  misc_feature (1)..(348): Ceres Seq. ID no. 12414293
MATLASHLRHPSVSHPQMEDVPLLRGSNCRAKGAAPGFKVAILGAAGGIGQPLALLMKMNPLVSVLHLYDVVNAPGVTADISHMNTGAVVRGFLGQPQLENALAGMDLVIIPAGVPRKPGMTRDDLFNINAGIVRTLCEGIAKCCPNAIVNVISNPVNSTVPIAAEVFKKAGTYDPKRLLGVTTLDVVRANTFVGEVLGLDPREVNVPVIGGHAGITILPLLSQVNPSCSFTSEEVKYLTSRIQNGGTEVVEAKAGAGSATLSMAYAAAKFADACLRGLRGDAGIIECSYVASQVTELPFFASKVRLGRCGIEEILPLGPLNEFERSGLEKAKKELAESIQKGVSFIK

SEQ ID NO: 23647 - protein, 331 aa, Zea mays subsp. mays
  misc_feature (1)..(331): Ceres Seq. ID no. 12414294
MEDVPLLRGSNCRAKGAAPGFKVAILGAAGGIGQPLALLMKMNPLVSVLHLYDVVNAPGVTADISHMNTGAVVRGFLGQPQLENALAGMDLVIIPAGVPRKPGMTRDDLFNINAGIVRTLCEGIAKCCPNAIVNVISNPVNSTVPIAAEVFKKAGTYDPKRLLGVTTLDVVRANTFVGEVLGLDPREVNVPVIGGHAGITILPLLSQVNPSCSFTSEEVKYLTSRIQNGGTEVVEAKAGAGSATLSMAYAAAKFADACLRGLRGDAGIIECSYVASQVTELPFFASKVRLGRCGIEEILPLGPLNEFERSGLEKAKKELAESIQKGVSFIK

SEQ ID NO: 23648 - DNA, 1291 bp, Zea mays subsp. mays
  misc_feature (1)..(1291): Ceres Seq. ID no. 12414321
gccaagcaggtctcagcgaggttttctgctataaataaggcatcgtccaggcaaacaattaatagggcaaagcaaatcaaggacgctctgcacgtactattcatcttccattgttgctttgctttgctttgcttaccggcaaccatggccagcactcgtgcagcagcaactctccttttgctcctcgcgctcgccggcacctcgtcggcgcagctgttccacgggcttctactcctactcgtgccccggcgtgtacggcgccgtcaagtcggtgatgcagtccgccatcgccagggagaagcgcatgggggccctccatcctccgcctcttcttccacgactgcttcgtccagggctgcgacgcgtcgctgctgctggacgacacgcccagcttccagggcgagaagatggccaaccctaacaacggctccgtcaggggattcgaggtcatcgacgccgtcaagtccgccgtcgaaaagctgtgccccggcgtcgtctcctgcgccgacatcctcgccatcgccgccagggacagcgtcgtcatcctgggtggtccgacctgggacgtgaaggtcgggcggcgggactccacgacggcgagcttcagcggcgccaacaacaacatcccgccgccgacgtcgggcctcgccaacctcacgtcgctcttcgccgcgcagggactttctcagaaggacatggtcgcgctctctggtgctcacaccatcgggcaggcacgctgcaccaacttcagagcccacatctacaacgacaccgacatcgacgctgccttcgcgagaacgaggcagtcaggctgcccaagcacctcaggcgccggcggcgacaacaacctggcgccattggacctccagacccctaccgtcttcgagaacaactactacaggaacctcctcgccaagaaggggctcctgcactccgaccaggagctcttcaatggcggagccaccgacgcgctggtccagtcctacgtcgggagccagagcgcgttcttcgcggatttcgtggcgggcatgatcaagatgggcgacatcacaccgctgaccggctccaacaacggacagataaggaagaactgcagaagagtcaattagcagatagctagctagggtcactaattaagacccatgcatggctgttgaactgcaagctaagtaaacactatgtgagatcgtcgcgttgatgtgctcacatgtcgtctttttatttgggtgaaggatggatgcatgtatcagatcacttgttgtttaattaatgccatttcagtctttgtccg

SEQ ID NO: 23649 - protein, 233 aa, Zea mays subsp. mays
  misc_feature (1)..(233): Ceres Seq. ID no. 12414322
MANPNNGSVRGFEVIDAVKSAVEKLCPGVVSCADILAIAARDSVVILGGPTWDVKVGRRDSTTASFSGANNNIPPPTSGLANLTSLFAAQGLSQKDMVALSGAHTIGQARCTNFRAHIYNDTDIDAAFARTRQSGCPSTSGAGGDNNLAPLDLQTPTVFENNYYRNLLAKKGLLHSDQELFNGGATDALVQSYVGSQSAFFADFVAGMIKMGDITPLTGSNNGQIRKNCRRVN

SEQ ID NO: 23650 - protein, 189 aa, Zea mays subsp. mays
  misc_feature (1)..(189): Ceres Seq. ID no. 12414323
AKQVSARFSAINKASSRQTINRAKQIKDALHVLFIFHCCFALLCLPATMASTRAAATLLLLLALAGTSSAQLFHGLLLLLVPRRVRRRQVGDAVRHRQGEAHGGPPSSASSSTTASSRAATRRCCWTTRPASRARRWPTLTTAPSGDSRSSTPSSPPSKSCAPASSPAPTSSPSPPGTASSSWVVRPGT

SEQ ID NO: 23651 - protein, 141 aa, Zea mays subsp. mays
  misc_feature (1)..(141): Ceres Seq. ID no. 12414324
MASTRAAATLLLLLALAGTSSAQLFHGLLLLLVPRRVRRRQVGDAVRHRQGEAHGGPPSSASSSTTASSRAATRRCCWTTRPASRARRWPTLTTAPSGDSRSSTPSSPPSKSCAPASSPAPTSSPSPPGTASSSWVVRPGT

SEQ ID NO: 23652 - DNA, 981 bp, Zea mays subsp. mays
  misc_feature (1)..(981): Ceres Seq. ID no. 12414361
gttccctcgccatccgccgccgccgccatgccgggcttcgctcagcgtctcgcggggcatcccgtggcggagcatcgcgaggcaaggcctctcccgcgtgttcctggtggcgaaggcctactgcttgatccacgtcgtcaacgaccacctctgctcggtgaccttagtgcggggcgccagcatgctgccgtccctgaacctggcgggcgacgcggtggcggtggacagggtcagcgtgaggctcggccgggtcgcgccgggggacatcgtgctgatgatctcccccgaggacccgcgcaagtcggtcgtcaagcgcgtcgtcgggatgcagggggactccgtcacctaccttgtcgaccccggcaaaagcgactcctccagaaccgtcgtggtaccgcaagatcatgtctgggtgcagggtgacaatatctttgcttctaacgattcgaggcaatttggagctgtgccttatgggctgattacagggaagatcttttgccgggtttggccgccagagagttttggcgcaattgatgacgcaacgaagcagtcttaacgctgaggaggagccgaggagcacatggacccatattgtttgctcgcgcccagagattctatctataacatactgcaggggggcccttccttgagctcgagagctttcgacgacctaccgcagcgcatttctacagcgaagcaaagagcgttgtgtgtcttgattgatgtcccgtgtttttttatagttttggtgtgtgacaagttctgaaacccgtgtttttatagttttggtgtgtgacaggttccgagatagttttttttgttttgttttttggtgatagtgcaagcctgggtttgcaactacactacaacttcacatgcttattcgaaacatttgaactgatttgtcagtcctcgttttgcagaagggcgtgtttgtttgtttatccatgtccatgtcaaaacacacgacgattattgtcc

SEQ ID NO: 23653 - protein, 184 aa, Zea mays subsp. mays
  misc_feature (1)..(184): Ceres Seq. ID no. 12414362
FPRHPPPPPCRASLSVSRGIPWRSIARQGLSRVFLVAKAYCLIHVVNDHLCSVTLVRGASMLPSLNLAGDAVAVDRVSVRLGRVAPGDIVLMISPEDPRKSVVKRVVGMQGDSVTYLVDPGKSDSSRTVVVPQDHVWVQGDNIFASNDSRQFGAVPYGLITGKIFCRVWPPESFGAIDDATKQS

SEQ ID NO: 23654 - protein, 140 aa, Zea mays subsp. mays
  misc_feature (1)..(140): Ceres Seq. ID no. 12414363
VPSPSAAAAMPGFAQRLAGHPVAEHREARPLPRVPGGEGLLLDPRRQRPPLLGDLSAGRQHAAVPEPGGRRGGGGQGQREARPGRAGGHRADDLPRGPAQVGRQARRRDAGGLRHLPCRPRQKRLLQNRRGTARSCLGAG

SEQ ID NO: 23655 - protein, 131 aa, Zea mays subsp. mays
  misc_feature (1)..(131): Ceres Seq. ID no. 12414364
MPGFAQRLAGHPVAEHREARPLPRVPGGEGLLLDPRRQRPPLLGDLSAGRQHAAVPEPGGRRGGGGQGQREARPGRAGGHRADDLPRGPAQVGRQARRRDAGGLRHLPCRPRQKRLLQNRRGTARSCLGAG

SEQ ID NO: 23656 - DNA, 1619 bp, Zea mays subsp. mays
  misc_feature (1)..(1619): Ceres Seq. ID no. 12414375
gggtcgacaacaatttgccgggcacacccaagacccgcggaagcccacgacgacaagcctccatcgcctcttgttgtttgcgggccccatacgtcagagaccacaagcccgaggcttaactctccctgccgctaatccctcgcgccgccggagggaagcaagagatagatctgtccgcggccatggcggcggcggcggcggcggcggagcaaggcgtggacgccgcgaggaaagaggaggaggaggagcaggtagtgaatccgtgggaggtgtcggcggggaagggcggcatcgactacgacaagctcgtggaccagttcggctgccagcgcatcgacgacgcgctcgtggaccgcatcgcacgcctcaccgcccgaccaccgcactgcttcctccgccgaggcctcttcttcgcccaccgtgatttgaacgagatactggatttgtatgagaacgggcagaagttctacctctacacggggagggggccctcgtcggaggccctgcacctcggccacctcatccccttcatgttcacaaaatacttgcaggaggcttttaaggtgcccctagttatacaactgactgacgatgagaagtacttgtggaaaaacttgactattcaggaaagtaaaaggcttgcccgtgaaaatgctaaagatattatagcatgtggttttgacattgaaagaacattcattttctctgatttttcttttgttggaggtgctttttatgaaaacatgatgcaagttgccagatgtgtaactatgaataaggctattggaatatttgggttcaatcttgaggatcacataagaaaggttagctttcctccagtgcaggcagtcccatcattcccttcttcatttccccatctcttcgctggcaaggaccaactgcggtgtcttatcccatgtgcaatagatcaggatccatattttaggatgactcgtgatgttgctcctagaattggttatcagaaaccatcactgattgaatctagattttttcctgctcttcagggggagaacacaaaaatgtcagctagtgacgcaaattcggcgatatacgtgacagatagtgctaaagaaataaagacaaaggtgaataaatatgccttctcaggtggccaggactcaatagagttccatagaaaacttggcgctaaccttgatgtggatgtcccaatcaaatacctgaacttcttccttgaagatgatgacgagcttgcgcacataaaaaaggagtacaaggagggaaggatgttgactggtgaagtgaagcaacggcttattgcagttctatctgagattgttgctagacaccagagagctagagctcaagtgaccgaagagatggtcgatgcattcatggcagtgaggcctcttcccaatatgtttggctgagcatcacggcgacaacttgaacaaacatttttgttatcagggagaattttaagagtctttagaattgtcgtgccaccataagtatcccctgtgttttacttcttcgggatttaggcaaacctggccaaacatcccatgtggtggctgtggttgattttgtaaactcatacttgatatggtatcaatgattcaattcagacattttttttc

SEQ ID NO: 23657 - protein, 408 aa, Zea mays subsp. mays
  misc_feature (1)..(408): Ceres Seq. ID no. 12414376
MAAAAAAAEQGVDAARKEEEEEQVVNPWEVSAGKGGIDYDKLVDQFGCQRIDDALVDRIARLTARPPHCFLRRGLFFAHRDLNEILDLYENGQKFYLYTGRGPSSEALHLGHLIPFMFTKYLQEAFKVPLVIQLTDDEKYLWKNLTIQESKRLARENAKDIIACGFDIERTFIFSDFSFVGGAFYENMMQVARCVTMNKAIGIFGFNLEDHIRKVSFPPVQAVPSFPSSFPHLFAGKDQLRCLIPCAIDQDPYFRMTRDVAPRIGYQKPSLIESRFFPALQGENTKMSASDANSAIYVTDSAKEIKTKVNKYAFSGGQDSIEFHRKLGANLDVDVPIKYLNFFLEDDDELAHIKKEYKEGRMLTGEVKQRLIAVLSEIVARHQRARAQVTEEMVDAFMAVRPLPNMFG

SEQ ID NO: 23658 - protein, 292 aa, Zea mays subsp. mays
  misc_feature (1)..(292): Ceres Seq. ID no. 12414377
MFTKYLQEAFKVPLVIQLTDDEKYLWKNLTIQESKRLARENAKDIIACGFDIERTFIFSDFSFVGGAFYENMMQVARCVTMNKAIGIFGFNLEDHIRKVSFPPVQAVPSFPSSFPHLFAGKDQLRCLIPCAIDQDPYFRMTRDVAPRIGYQKPSLIESRFFPALQGENTKMSASDANSAIYVTDSAKEIKTKVNKYAFSGGQDSIEFHRKLGANLDVDVPIKYLNFFLEDDDELAHIKKEYKEGRMLTGEVKQRLIAVLSEIVARHQRARAQVTEEMVDAFMAVRPLPNMFG

SEQ ID NO: 23659 - protein, 221 aa, Zea mays subsp. mays
  misc_feature (1)..(221): Ceres Seq. ID no. 12414378
MMQVARCVTMNKAIGIFGFNLEDHIRKVSFPPVQAVPSFPSSFPHLFAGKDQLRCLIPCAIDQDPYFRMTRDVAPRIGYQKPSLIESRFFPALQGENTKMSASDANSAIYVTDSAKEIKTKVNKYAFSGGQDSIEFHRKLGANLDVDVPIKYLNFFLEDDDELAHIKKEYKEGRMLTGEVKQRLIAVLSEIVARHQRARAQVTEEMVDAFMAVRPLPNMFG

SEQ ID NO: 23660 - DNA, 1784 bp, Zea mays subsp. mays
  misc_feature (1)..(1784): Ceres Seq. ID no. 12414416
gcacgagaccattacctagaacatcctaatcaaaaaaccacactctcgtctccctcctccccgttccttattcgccagaccggagggaggggtacgagcttcaccgctttcatcccgcccgcgctcctccccagatctcgtctccattaaagccgaccttgcccagattcgcgccctcctcgctcatatctgaaagcggctctgattttccaatccgaccgcaggagcggtgcaccgggccgcgtgattccggcggcttgatttggaatttgtgatctttcggggcattcgtcggtttgtctgtcggtgccggtggtgctgcgttttcgagggcagcgaagatgggtgtcggcggagagaagttccagctggggacggtgggggcgctgagcctatccgtggtctcctccgtctccattgtcatctgcaacaaggccctcatgagctccctcggctttaacttcgccactaccttgacaagctggcatctgctggttacattctgctcccttcatgtggcattatggatgaaattctttgagcataagccttttgattcaagaactgtcatgggatttggagtacttaatggaatctccattgggctcctcaacttgagtcttggcttcaactctgttgggttttaccagatgactaagctggcgatcatcccgtgcactgtcatcttagagacacttttcttcaggaagaagttcagtcggagtatccagatgtccctttctgtgctccttcttggtgttggtgttgcaactgtcactgatctgcaactcaatgctgtgggatccatactctccttgctggcaattatcacgacttgcattgctcaaattatgacaaacactatccagaagaagttcaaggtctcatcgacccaactgctctaccagtcttgcccttatcaatcactgaccctgtttctcattggccccttccttgatggctttttgactaaccaaaacgtctttgcttttaattatacatcacaagttgtgtttttcattgtgttgtcatgcctgatatcggtctcagtgaacttcagcacttttcttgtgattggaaagacgtctcctgttacttaccaagtcctgggccatcttaaaacatgccttgttcttacctttggttatgttttgcttcatgacccatttagctggagaaacatacttgggatcctaattgcagtagttggaatggtcttatattcatacttctgcacagtggagacccagcataagaacactgaagtctccccacagcaggtgaaagaaagtgaggcagcccctttgatctcagactctttgagcaaagttgaaaatgggggcggtgttgttgatgacgagcctttgaaggtacccatgtggagctcaaagtattcgcgggagtgaaattttctcccgctagacggtggcatcatacaggattcagtttagtaggcagatagtagggttggaagccaacccagagtgtaatgaacatttgagttacattttttggccttttttagcgtcacgatctactactggtaaaagggtctgtttcttgggaggatcttaccttcaggattgccagatatacattgaaactagacggcagatattgtatgatttgtatctggacatgttccacatcgtctaactgtaacttccaactggtacatggcatgcctatatccaaagatagatttcatttttttttgtatcagaaagatccggacaagacttgtgcaaaatttgtagtactattggttcgagtttgttgctttc

SEQ ID NO: 23661 - protein, 354 aa, Zea mays subsp. mays
  misc_feature (1)..(354): Ceres Seq. ID no. 12414417
MGVGGEKFQLGTVGALSLSVVSSVSIVICNKALMSSLGFNFATTLTSWHLLVTFCSLHVALWMKFFEHKPFDSRTVMGFGVLNGISIGLLNLSLGFNSVGFYQMTKLAIIPCTVILETLFFRKKFSRSIQMSLSVLLLGVGVATVTDLQLNAVGSILSLLAIITTCIAQIMTNTIQKKFKVSSTQLLYQSCPYQSLTLFLIGPFLDGFLTNQNVFAFNYTSQVVFFIVLSCLISVSVNFSTFLVIGKTSPVTYQVLGHLKTCLVLTFGYVLLHDPFSWRNILGILIAVVGMVLYSYFCTVETQHKNTEVSPQQVKESEAAPLISDSLSKVENGGGVVDDEPLKVPMWSSKYSRE

SEQ ID NO: 23662 - protein, 321 aa, Zea mays subsp. mays
  misc_feature (1)..(321): Ceres Seq. ID no. 12414418
MSSLGFNFATTLTSWHLLVTFCSLHVALWMKFFEHKPFDSRTVMGFGVLNGISIGLLNLSLGFNSVGFYQMTKLAIIPCTVILETLFFRKKFSRSIQMSLSVLLLGVGVATVTDLQLNAVGSILSLLAIITTCIAQIMTNTIQKKFKVSSTQLLYQSCPYQSLTLFLIGPFLDGFLTNQNVFAFNYTSQVVFFIVLSCLISVSVNFSTFLVIGKTSPVTYQVLGHLKTCLVLTFGYVLLHDPFSWRNILGILIAVVGMVLYSYFCTVETQHKNTEVSPQQVKESEAAPLISDSLSKVENGGGVVDDEPLKVPMWSSKYSRE

SEQ ID NO: 23663 - protein, 292 aa, Zea mays subsp. mays
  misc_feature (1)..(292): Ceres Seq. ID no. 12414419
MKFFEHKPFDSRTVMGFGVLNGISIGLLNLSLGFNSVGFYQMTKLAIIPCTVILETLFFRKKFSRSIQMSLSVLLLGVGVATVTDLQLNAVGSILSLLAIITTCIAQIMTNTIQKKFKVSSTQLLYQSCPYQSLTLFLIGPFLDGFLTNQNVFAFNYTSQVVFFIVLSCLISVSVNFSTFLVIGKTSPVTYQVLGHLKTCLVLTFGYVLLHDPFSWRNILGILIAVVGMVLYSYFCTVETQHKNTEVSPQQVKESEAAPLISDSLSKVENGGGVVDDEPLKVPMWSSKYSRE

SEQ ID NO: 23664 - DNA, 981 bp, Zea mays subsp. mays
  misc_feature (1)..(981): Ceres Seq. ID no. 12414420
cttacactctccttttgtcaccttctcttcgttcccctcctcggctcctcgcgatccttctttactgcccgagagttctgactagccacatccagtcaagcagtaaaggcgcaccatggaggcggcggcggagaataaggaggccgagcaggaggagcagcagctaccgcacgcgcagaaggataacgcgcccgccgccgccgaggaagacgaagcggattcggaggagaccgagcgccgcaaccgcgacctcaagtccggccttcacccccttaggcacaaactcgtgctctggtacactcgccggacgcctggagcgaggtcgcagtcgtacgaggacaacatcaagaagatcatcgatttcagcacagtcgaatcgttctgggtttgctactgccaccttgcgcgcccttcttccctgccgagccccactgaccttcatctcttcaaggatggcatccgtcccctctgggaggatcctgcaaaccagaatggtggcaagtggataattagattcaaaaaggcagtttcaggtcgattttgggaggatttggtgctagtggtagtaggcgaccagcttgagtatagcgatgatgtctgtggtgttgtgcttagtgtccgtttcaatgaagacattctgagcgtctggaaccggaacgcatcagaccatcaggctgtgatggcattgagggattctatcaagaggcacctcaagctgccgcacagctatctgatggagtacaaaccccatgatgcttcgcggcgtgacaactcgtcctacaggaacacatggctgagaggatagataaacctcatgatactcggcagcttcactgcgacggttctgaagcaaagagactcttttatgtaccaagaacgcagactattatgcaatgtagtactactactactactactcaaaagcccctacaatgtgacgcgcaacaattttactatctaatgtgttttttttgcaaaagc

SEQ ID NO: 23665 - protein, 229 aa, Zea mays subsp. mays
  misc_feature (1)..(229): Ceres Seq. ID no. 12414421
MEAAAENKEAEQEEQQLPHAQKDNAPAAAEEDEADSEETERRNRDLKSGLHPLRHKLVLWYTRRTPGARSQSYEDNIKKIIDFSTVESFWVCYCHLARPSSLPSPTDLHLFKDGIRPLWEDPANQNGGKWIIRFKKAVSGRFWEDLVLVVVGDQLEYSDDVCGVVLSVRFNEDILSVWNRNASDHQAVMALRDSIKRHLKLPHSYLMEYKPHDASRRDNSSYRNTWLRG

SEQ ID NO: 23666 - protein, 168 aa, Zea mays subsp. mays
  misc_feature (1)..(168): Ceres Seq. ID no. 12414422
YTLLLSPSLRSPPRLLAILLYCPRVLTSHIQSSSKGAPWRRRRRIRRPSRRSSSYRTRRRITRPPPPRKTKRIRRRPSAATATSSPAFTPLGTNSCSGTLAGRLERGRSRTRTTSRRSSISAQSNRSGFATATLRALLPCRAPLTFISSRMASVPSGRILQTRMVASG

SEQ ID NO: 23667 - DNA, 1921 bp, Zea mays subsp. mays
  misc_feature (1)..(1921): Ceres Seq. ID no. 12414468
gcacgagaccattacctagaacatcctaatcgaaaaattgtcatctctacattgttgccggtgtcggcctcggccgtcgccgacgccgcgcatccagcgtccatgtctacgttaccgactcctcacgctggccggaccacgtgcccccacgtctcgccgtccccggttctcatccaccccgagctcccccaacgcgttttaccacagaccaataagtggccaatccctcgctgccccccacactccagaagtccagaccaaagctccaaagtccaatccctcgctagccacttgccatctgatcaaccagccagccgatctcagcgatccgccatggccaccgcgtattacgagaggccccgtggcggcgccgtcgaggaggcggacgacttcgatgagttcgaccccacgccgtacggcggtgggtacgacctcgccgtcaccttcggtcgcccgctgccaccgaccgaggaaacctgctacccgtgctcggcgccctcgacctcctacgacgcaccgcactacgccgcctccgagccgtccccctacggtcaccacgccaagccaaagcccaactacgggttccgcccccagcaggagcaacagccgtcttacggcagcggctacggatccaggcccgagcccgctgcggaggagggcggtggctatggatctggcttcggatccgggtatgggaggaagaagcaagaggaggagagctacggctctggatatgggaggaaaccgcaggcggaggagagctacgggtccggcgggtacggctctggctacggcggtcagacccggccggaggagagctatgggtcagcagggtatggatctgccaatccgcaggctgagacatacggctctggctacgggaggaagccacaggtagaggagagctacggatcggagtatgggtctgggttcgggaggaagccgcaggttgaggagagctatggatcggggtacgggaggacgccgcaggttgaggagagctatggatctggttacgggaggaagcctcaggttgaggagagctatggatctgggtacggcagcaggccgcagggtggggaggagtatggcagtggtgggtatgggaggaaggctcaggaggagacctatggctcctcggggtatggctatggcaggaagaacgaggagcagagctatggtggttctggctatggttatgagaagaaggcatctgaggaggatgaaggtgcctttggctctagtggttaccggaagccaaaaccctatggcgaggagacacagggttcatacggttatggagaggagcagcccaagtatcagagtggcgggtatgagagaccgagctatggtgggggagaggggtactatggccgcaagaaagatgatgacgactcggatgatgagaagaagcggcgtcattctaagcaccaccaccatggccaccactcaaaaaaaaaaaaaaaaaacggcacgagaagcgcttctcgtgccgttttttttttttttttttgagtnngagtcgggaggaggacgagaagggggagaggggatttttgccgcaagaaagatgatgacgactcggatgatgagaagaagcggcgtcattctaagcaccaccaccatggccaccactacgatgactaagcaccagtgccttctgctgggcgttgccctggttcaccgctactgctactatatccattcgcttgcataaataaagacggctgtgtaccttctggacactggaccaccgttgcgacgttgcctctgcattgttacaggccgagccgtgagtgtgctgtttattatctaatgttcaaatcgttgtgatgaaccaccgtccacgcctgttgatgccgaaccgaatgtctggatttactttgcgcctgttcttgtggtgtttgtcgccttccctgtc

SEQ ID NO: 23668 - protein, 504 aa, Zea mays subsp. mays
  misc_feature (1)..(504): Ceres Seq. ID no. 12414469
ARDHYLEHPNRKIVISTLLPVSASAVADAAHPASMSTLPTPHAGRTTCPHVSPSPVLIHPELPQRVLPQTNKWPIPRCPPHSRSPDQSSKVQSLASHLPSDQPASRSQRSAMATAYYERPRGGAVEEADDFDEFDPTPYGGGYDLAVTFGRPLPPTEETCYPCSAPSTSYDAPHYAASEPSPYGHHAKPKPNYGFRPQQEQQPSYGSGYGSRPEPAAEEGGGYGSGFGSGYGRKKQEEESYGSGYGRKPQAEESYGSGGYGSGYGGQTRPEESYGSAGYGSANPQAETYGSGYGRKPQVEESYGSEYGSGFGRKPQVEESYGSGYGRTPQVEESYGSGYGRKPQVEESYGSGYGSRPQGGEEYGSGGYGRKAQEETYGSSGYGYGRKNEEQSYGGSGYGYEKKASEEDEGAFGSSGYRKPKPYGEETQGSYGYGEEQPKYQSGGYERPSYGGGEGYYGRKKDDDDSDDEKKRRHSKHHHHGHHSKKKKKNGTRSASRAVFFFFF

SEQ ID NO: 23669 - protein, 470 aa, Zea mays subsp. mays
  misc_feature (1)..(470): Ceres Seq. ID no. 12414470
MSTLPTPHAGRTTCPHVSPSPVLIHPELPQRVLPQTNKWPIPRCPPHSRSPDQSSKVQSLASHLPSDQPASRSQRSAMATAYYERPRGGAVEEADDFDEFDPTPYGGGYDLAVTFGRPLPPTEETCYPCSAPSTSYDAPHYAASEPSPYGHHAKPKPNYGFRPQQEQQPSYGSGYGSRPEPAAEEGGGYGSGFGSGYGRKKQEEESYGSGYGRKPQAEESYGSGGYGSGYGGQTRPEESYGSAGYGSANPQAETYGSGYGRKPQVEESYGSEYGSGFGRKPQVEESYGSGYGRTPQVEESYGSGYGRKPQVEESYGSGYGSRPQGGEEYGSGGYGRKAQEETYGSSGYGYGRKNEEQSYGGSGYGYEKKASEEDEGAFGSSGYRKPKPYGEETQGSYGYGEEQPKYQSGGYERPSYGGGEGYYGRKKDDDDSDDEKKRRHSKHHHHGHHSKKKKKNGTRSASRAVFFFFF

SEQ ID NO: 23670 - protein, 393 aa, Zea mays subsp. mays
  misc_feature (1)..(393): Ceres Seq. ID no. 12414471
MATAYYERPRGGAVEEADDFDEFDPTPYGGGYDLAVTFGRPLPPTEETCYPCSAPSTSYDAPHYAASEPSPYGHHAKPKPNYGFRPQQEQQPSYGSGYGSRPEPAAEEGGGYGSGFGSGYGRKKQEEESYGSGYGRKPQAEESYGSGGYGSGYGGQTRPEESYGSAGYGSANPQAETYGSGYGRKPQVEESYGSEYGSGFGRKPQVEESYGSGYGRTPQVEESYGSGYGRKPQVEESYGSGYGSRPQGGEEYGSGGYGRKAQEETYGSSGYGYGRKNEEQSYGGSGYGYEKKASEEDEGAFGSSGYRKPKPYGEETQGSYGYGEEQPKYQSGGYERPSYGGGEGYYGRKKDDDDSDDEKKRRHSKHHHHGHHSKKKKKNGTRSASRAVFFFFF

SEQ ID NO: 23671 - DNA, 2560 bp, Zea mays subsp. mays
  misc_feature (1)..(2560): Ceres Seq. ID no. 12414504
  misc_feature (2078)..(2078): n is a, c, t, g, unknown, or other
  misc_feature (2091)..(2091): n is a, c, t, g, unknown, or other
  misc_feature (2164)..(2164): n is a, c, t, g, unknown, or other
  misc_feature (2256)..(2256): n is a, c, t, g, unknown, or other
  misc_feature (2261)..(2261): n is a, c, t, g, unknown, or other
  misc_feature (2327)..(2327): n is a, c, t, g, unknown, or other
  misc_feature (2344)..(2344): n is a, c, t, g, unknown, or other
  misc_feature (2352)..(2352): n is a, c, t, g, unknown, or other
  misc_feature (2353)..(2353): n is a, c, t, g, unknown, or other
  misc_feature (2354)..(2354): n is a, c, t, g, unknown, or other
  misc_feature (2357)..(2357): n is a, c, t, g, unknown, or other
  misc_feature (2358)..(2358): n is a, c, t, g, unknown, or other
  misc_feature (2359)..(2359): n is a, c, t, g, unknown, or other
  misc_feature (2361)..(2361): n is a, c, t, g, unknown, or other
  misc_feature (2362)..(2362): n is a, c, t, g, unknown, or other
gttcggcattactccacttcactccctccctccctcacctctggctcatcagtgcctgcctcactaacctcaccattactgaaatgcagagctcgcataaataggcaggacccgtggtgctactctcctgtccccttccggccttttccccccttctggagcttggggggaggcactctgcaccttcgtcttcgtcttggcgtcctccagcgctctgccttcctgagctggcttcttgtccgcagatccatggcgaaggactacccagcttctccgaaagctcagcagctccaggaatccaagaagcagcgcctgacatacatcctcgtcgtaagcgcgctctgcatcgccttctacgtccttggcgcatggcagaacaccacgcttccaaagcccataggcaactcggcgatcacccgggttggctgcgatcccactgccgccacggcacagtcctctggctctgtgccgtcgtttgggccaggctccggcgaggtgcttgacttcgacgcacaccaccggctcaccatcaacaacacggacggcgatggggaactgcagcagttcccggcgtgccctctcaacttcagtgagtacacgccgtgtgaggaccgtaggcgcgggcgccggttcgaccgaaacatgctagtgtatcgggagcgccactgtcctggcaaggacgagcaggtccgatgcctcatcccagcaccgcctgggtacaggacccccttcaagtggcctcgtagcagggactacgcctatttcaacaacatcccccacaaggagctcagcattgagaaggcggtgcagaactggatccaggttgagggcgacaagttcaagttccccggtggtggcactatgttcccgcgtggtgctgatgcctacatagatgacatcaataagctcatctcgttatcagatgggaagatcaggacggctgttgacacaggttgcggggttgctagttggggagcttacttgctgaagagaaacatcatcgccatgtcatttgcgccgagagacacgcaccaagctcaggtgcaattcgcgctggaaagaggtgtccctgccatcattggcgtcatggcgaagcagcggttgccttacccatctagggcgttcgatatggcacattgctcgcgctgtctgattccttgggatgaacacgatggactgtaccttgctgaagtcgataggattctgaggccaggaggatactggatcctctcgggacctccgatcaattggaagacacaccacagggggtgggagaggacgaaggacgacctcaagcgggagcaggacaagatcgaggatgttgcgaggagcctttgctggaacaaggtggttgagaagggggatctgtccatctggcagaagcccaagaatcaccttgagtgtgccaacattaagaagacatataagacaccccatatctgcaagagtgacaatcctgatgctgcctggtacacacagatggaagcctgtgttactccactgcctgaagtgagcaaccagggagaagtggctgggggagcggtggagaaatggccagagagggcgttcttggttccccccaggatcaaaaggggcatgattccaggactggacgccaagaagtttgacgaggacaagaagctttgggagaagagggtggcctactacaagcgcaccataccaattgcagagaacaggtacagaaatgtgatggacatgaacgccaacatgggtgggttcgctgcttctctagtgaagtaccccgtgtgggtgatgaatgtcgtccctgttaactccgaccgggacaccctcggggcaatatacgagcgagggttcatcggcacgtaccaggactggtgcgaagctttctcgacgtatccaagaacatatgacctcctgcatgctgacaatctgtttagcatctaccaagacaggtgcgatataactggcatcctcttggagatggacagaatattaaggcccgagggcacagctatcatccgcgacacagtcgacgtgctcacgaaggtccaggcaataaccaagcggatgcggtgggagagccgcatcatggaccncgaggacggcccnttcaacccggagaaggtcctcatggcggtcaagacgtactggaccgccgaagccgaggaggagcactagcacncgagtgacaccgagctcacttgaaagcgtgaaccaagcctgttctacacttctactaccggtcgagagggatggcgtcagcgttttgcgtcncagtntagtatgtatgtcccttttcaccttttctctagttctttgtagctagctacaatcagatgggaagntaagggagagttttganacgggggnnnggnnngnntggttggtcctctagttgagatacaggaagcggttttgtagcaggggaaggtttcgctggtcttgcgtaggttcctggccctgtttcacgaggggttgaactaggttttagtttgtaatgcgatggcaccgggcaggcattgttaatcgtatattggggtgaccataatagtaacaggtatttatttagttttcatct

SEQ ID NO: 23672 - protein, 719 aa, Zea mays subsp. mays
  misc_feature (1)..(719): Ceres Seq. ID no. 12414505
  misc_feature (693)..(693): Xaa is any aa, unknown or other
  misc_feature (697)..(697): Xaa is any aa, unknown or other
VRHYSTSLPPSLTSGSSVPASLTSPLLKCRARINRQDPWCYSPVPFRPFPPFWSLGGGTLHLRLRLGVLQRSAFLSWLLVRRSMAKDYPASPKAQQLQESKKQRLTYILVVSALCIAFYVLGAWQNTTLPKPIGNSAITRVGCDPTAATAQSSGSVPSFGPGSGEVLDFDAHHRLTINNTDGDGELQQFPACPLNFSEYTPCEDRRRGRRFDRNMLVYRERHCPGKDEQVRCLIPAPPGYRTPFKWPRSRDYAYFNNIPHKELSIEKAVQNWIQVEGDKFKFPGGGTMFPRGADAYIDDINKLISLSDGKIRTAVDTGCGVASWGAYLLKRNIIAMSFAPRDTHQAQVQFALERGVPAIIGVMAKQRLPYPSRAFDMAHCSRCLIPWDEHDGLYLAEVDRILRPGGYWILSGPPINWKTHHRGWERTKDDLKREQDKIEDVARSLCWNKVVEKGDLSIWQKPKNHLECANIKKTYKTPHICKSDNPDAAWYTQMEACVTPLPEVSNQGEVAGGAVEKWPERAFLVPPRIKRGMIPGLDAKKFDEDKKLWEKRVAYYKRTIPIAENRYRNVMDMNANMGGFAASLVKYPVWVMNVVPVNSDRDTLGAIYERGFIGTYQDWCEAFSTYPRTYDLLHADNLFSIYQDRCDITGILLEMDRILRPEGTAIIRDTVDVLTKVQAITKRMRWESRIMDXEDGXFNPEKVLMAVKTYWTAEAEEEH

SEQ ID NO: 23673 - protein, 636 aa, Zea mays subsp. mays
  misc_feature (1)..(636): Ceres Seq. ID no. 12414506
  misc_feature (610)..(610): Xaa is any aa, unknown or other
  misc_feature (614)..(614): Xaa is any aa, unknown or other
MAKDYPASPKAQQLQESKKQRLTYILVVSALCIAFYVLGAWQNTTLPKPIGNSAITRVGCDPTAATAQSSGSVPSFGPGSGEVLDFDAHHRLTINNTDGDGELQQFPACPLNFSEYTPCEDRRRGRRFDRNMLVYRERHCPGKDEQVRCLIPAPPGYRTPFKWPRSRDYAYFNNIPHKELSIEKAVQNWIQVEGDKFKFPGGGTMFPRGADAYIDDINKLISLSDGKIRTAVDTGCGVASWGAYLLKRNIIAMSFAPRDTHQAQVQFALERGVPAIIGVMAKQRLPYPSRAFDMAHCSRCLIPWDEHDGLYLAEVDRILRPGGYWILSGPPINWKTHHRGWERTKDDLKREQDKIEDVARSLCWNKVVEKGDLSIWQKPKNHLECANIKKTYKTPHICKSDNPDAAWYTQMEACVTPLPEVSNQGEVAGGAVEKWPERAFLVPPRIKRGMIPGLDAKKFDEDKKLWEKRVAYYKRTIPIAENRYRNVMDMNANMGGFAASLVKYPVWVMNVVPVNSDRDTLGAIYERGFIGTYQDWCEAFSTYPRTYDLLHADNLFSIYQDRCDITGILLEMDRILRPEGTAIIRDTVDVLTKVQAITKRMRWESRIMDXEDGXFNPEKVLMAVKTYWTAEAEEEH

SEQ ID NO: 23674 - protein, 505 aa, Zea mays subsp. mays
  misc_feature (1)..(505): Ceres Seq. ID no. 12414507
  misc_feature (479)..(479): Xaa is any aa, unknown or other
  misc_feature (483)..(483): Xaa is any aa, unknown or other
MLVYRERHCPGKDEQVRCLIPAPPGYRTPFKWPRSRDYAYFNNIPHKELSIEKAVQNWIQVEGDKFKFPGGGTMFPRGADAYIDDINKLISLSDGKIRTAVDTGCGVASWGAYLLKRNIIAMSFAPRDTHQAQVQFALERGVPAIIGVMAKQRLPYPSRAFDMAHCSRCLIPWDEHDGLYLAEVDRILRPGGYWILSGPPINWKTHHRGWERTKDDLKREQDKIEDVARSLCWNKVVEKGDLSIWQKPKNHLECANIKKTYKTPHICKSDNPDAAWYTQMEACVTPLPEVSNQGEVAGGAVEKWPERAFLVPPRIKRGMIPGLDAKKFDEDKKLWEKRVAYYKRTIPIAENRYRNVMDMNANMGGFAASLVKYPVWVMNVVPVNSDRDTLGAIYERGFIGTYQDWCEAFSTYPRTYDLLHADNLFSIYQDRCDITGILLEMDRILRPEGTAIIRDTVDVLTKVQAITKRMRWESRIMDXEDGXFNPEKVLMAVKTYWTAEAEEEH

SEQ ID NO: 23675 - DNA, 1549 bp, Zea mays subsp. mays
  misc_feature (1)..(1549): Ceres Seq. ID no. 12414516
atggacacttggacacctgccttctctccttccttccatccattcctccctgtctccgccctcttctcactcccgtaggccgtggtgccgccgccgactgctgggaccgccctacaccaagtgcccaggtcatcttcgggccattcgccggcgacgagcaccaccaggtgtgccaggttgaccgagctatggacagcctgtggcatcttggggacgagctccgcggngcagcccaaggtggtggaggaccgccagtggtctctcatgacgtccaagctggcggagatcaccaggtccaagggcgagaggatgaacactgtccctgacgccaagcagtgggacaagacgtcctaccagcttcacgacgacagcaggatgggccacatcaacctcggcctcatgaaccttgatctcaagatgaacgaggctgccgccatgaagctccccttccgtggcatgccctataacatgaaccagatgtacctcaaggggagcaatgccaattccaatgtcaatgcgttcaagatgaatgttggggtcaacaagtactccaatagtccaaacgggaaagacgccaatgggaaaaacaatggcggcaacaacaacaatgggagcgccaacggcacttctgtggctgacaagcgcttcaagacattgccgacgagtgagatgctaccgaggaatgaagtccttggtggatacatctttgtctgcaacaacgataccatgcaggaggatctcaagaggcagctttttggtttgccagcaagatatcgtgattcagtccgagcaatcactcctggcttgcctcttttcctctataactacacaacccaccagcttcatggggtatttgaggctgccagttttggtgggtccaatatcgatcctactgcatgggaggataagaagtgtaaaggtgaatctagattcccagcgcaggtgaggatctgcattaggaagctgtgcaagccgttggaagaggattccttcaggccagttttgcaccattatgatgggccaaagttccgccttgagctctccatcgcggagacattgtcactgctagacctatgcgggaaggaaggcatctgagctgtcgaggaggtggtggtggttgccttgtgagcttctagtaaataccaatcatctttgtatgttttgtggatggtggttggcaacgttgtttatttatgcacaagctgctgctggtttcgggatggaaggaaggacctggtccctgaaacaagctgcggagagtgatcctgtcagtgtattgtgtctggcgtggtcaagaaccaaatcaatgttggaccgaccgactgagagtttggagtgtgtatgttttgctattactcttatctctagtagagtgtgggtatacctgggcagaatgtgtccccaaaagttgggggcctgtctgtgtactgtgtgcgatggacgccctaagtaaaaaaagggcaggtgatggtcgtgctccaggtttgtgttttgtactctgttgtaccttgaacctcctttgcgttttgcctaatcagagaatgagtgc

SEQ ID NO: 23676 - protein, 276 aa, Zea mays subsp. mays
  misc_feature (1)..(276): Ceres Seq. ID no. 12414517
MTSKLAEITRSKGERMNTVPDAKQWDKTSYQLHDDSRMGHINLGLMNLDLKMNEAAAMKLPFRGMPYNMNQMYLKGSNANSNVNAFKMNVGVNKYSNSPNGKDANGKNNGGNNNNGSANGTSVADKRFKTLPTSEMLPRNEVLGGYIFVCNNDTMQEDLKRQLFGLPARYRDSVRAITPGLPLFLYNYTTHQLHGVFEAASFGGSNIDPTAWEDKKCKGESRFPAQVRICIRKLCKPLEEDSFRPVLHHYDGPKFRLELSIAETLSLLDLCGKEGI

SEQ ID NO: 23677 - protein, 261 aa, Zea mays subsp. mays
  misc_feature (1)..(261): Ceres Seq. ID no. 12414518
MNTVPDAKQWDKTSYQLHDDSRMGHINLGLMNLDLKMNEAAAMKLPFRGMPYNMNQMYLKGSNANSNVNAFKMNVGVNKYSNSPNGKDANGKNNGGNNNNGSANGTSVADKRFKTLPTSEMLPRNEVLGGYIFVCNNDTMQEDLKRQLFGLPARYRDSVRAITPGLPLFLYNYTTHQLHGVFEAASFGGSNIDPTAWEDKKCKGESRFPAQVRICIRKLCKPLEEDSFRPVLHHYDGPKFRLELSIAETLSLLDLCGKEGI

SEQ ID NO: 23678 - protein, 239 aa, Zea mays subsp. mays
  misc_feature (1)..(239): Ceres Seq. ID no. 12414519
MGHINLGLMNLDLKMNEAAAMKLPFRGMPYNMNQMYLKGSNANSNVNAFKMNVGVNKYSNSPNGKDANGKNNGGNNNNGSANGTSVADKRFKTLPTSEMLPRNEVLGGYIFVCNNDTMQEDLKRQLFGLPARYRDSVRAITPGLPLFLYNYTTHQLHGVFEAASFGGSNIDPTAWEDKKCKGESRFPAQVRICIRKLCKPLEEDSFRPVLHHYDGPKFRLELSIAETLSLLDLCGKEGI

SEQ ID NO: 23679 - DNA, 1164 bp, Zea mays subsp. mays
  misc_feature (1)..(1164): Ceres Seq. ID no. 12414536
gaccccgcacaccgacgacgaagagaggagaggaggcggagccgagagctcgagcccaaccgcgcaactcacttccccgtcgcgatttgcattgccctcctcttggcccccgatctcgccgtgccctacccccagacccgctccgccgccaccggagagatcgcgccccccattcccacaatctaatgcttccgtccctcgaggagccgagccctccgcgcggccgtgggatggggcggtgacaacaccggtgagtggcgtggggcagggagccggtggcgaggggcatatcatggtgcagtgcctggacggggtgaggcagctgctcgcggtcctgctcaagtgctgcgacgtcgagctcaagcagccgcccgggctcgaggaccctcaggttctcgcgagggagaccgtcttcagcgtgagcgaagtcgaggctctctacgagctgttcaagaagataagcagtgctgtcatcgatgatgggctgattaacaaggaggagtttcagttggcactatttaagaccagcaagaaggagagcctgttcgcagaccgcgtatttgatttgtttgacacaaagcacaatggaattttaggatttgaagaatttgctcgtgctctctcagtatttcatcctaatgctccccttgatgagaaaattgacttttcattccggctgtatgatctcaagcagcaaggctacattgagagacaagaggttaagcagatggttgttgctacacttgctgagtcaggaatgaatctttcagatgaaattgtagagagtataattgacaagacatttgaggaggcagacacaaaacatgatggaaggattgacaaggaagagtggcgcagtctagtcagtcggcatccatctttgctgaagaacatgactcttcagtacctcaaggacatcaccacaacatttccaagctttgtctttcactcccaagttgatgataactgattttcatgggattattttggcaagaagcattagaagatattctcgtggggttctgatatggttttctttttcaattattgggttgttggattgactgagatcgtagtgctcataagtatgttggatgttggattcgagaactcaaatcttttgtcaaccatgtttctttcatttgcatgtctggatgcgcttgg

SEQ ID NO: 23680 - protein, 322 aa, Zea mays subsp. mays
  misc_feature (1)..(322): Ceres Seq. ID no. 12414537
TPHTDDEERRGGGAESSSPTAQLTSPSRFALPSSWPPISPCPTPRPAPPPPERSRPPFPQSNASVPRGAEPSARPWDGAVTTPVSGVGQGAGGEGHIMVQCLDGVRQLLAVLLKCCDVELKQPPGLEDPQVLARETVFSVSEVEALYELFKKISSAVIDDGLINKEEFQLALFKTSKKESLFADRVFDLFDTKHNGILGFEEFARALSVFHPNAPLDEKIDFSFRLYDLKQQGYIERQEVKQMVVATLAESGMNLSDEIVESIIDKTFEEADTKHDGRIDKEEWRSLVSRHPSLLKNMTLQYLKDITTTFPSFVFHSQVDDN

SEQ ID NO: 23681 - protein, 225 aa, Zea mays subsp. mays
  misc_feature (1)..(225): Ceres Seq. ID no. 12414538
MVQCLDGVRQLLAVLLKCCDVELKQPPGLEDPQVLARETVFSVSEVEALYELFKKISSAVIDDGLINKEEFQLALFKTSKKESLFADRVFDLFDTKHNGILGFEEFARALSVFHPNAPLDEKIDFSFRLYDLKQQGYIERQEVKQMVVATLAESGMNLSDEIVESIIDKTFEEADTKHDGRIDKEEWRSLVSRHPSLLKNMTLQYLKDITTTFPSFVFHSQVDDN

SEQ ID NO: 23682 - DNA, 900 bp, Zea mays subsp. mays
  misc_feature (1)..(900): Ceres Seq. ID no. 12414562
tcttccttatccagatggcggcgccggccaactccaccaccttctccggcgacgtgtgggcggagctccgcctggccgacgcccgcgacgtgccgcacatccaccgcctcatacaccatatggccgagttcgagctgctcaccgacctcttcgccgccaccgaagagctcctcacgtccacgctcttcccatcgccgacgccgcctcccttcacctccttcacagccctcgtccttgacctatcccccacccccatcctcccggactcctcttccaccatcgcctcccgccgcctcgacctctccgcgtccccgctcgcagacccggaggccgccaccttcgcctccccgcgcggcggcgggcgcgtcactgccgggttcgtgatctgcttccccaactactccaccttcctctccaagcccgggctgtacgttgaggacatcttcgtgcgcgcaccctggcgccgccgcggccttggccggatgatgctgtctgccgtcgccggcagggccnccgagctcgggatgggccgggtggagtggtgcgtgctcgactggancaagaacgccatcgacttntacgaggggatgggcnccgatgtgctcccgcagtggcgcatntgccggctcgccggcgcagcccttgacaaatacaaggtcagccagaaggaggccgccggtgggaaggctgcagagtaggagggcctggaaattcgcttattgagagtgcctgccaataataaaggtggtggatttgcttgcgctgcttagctctggcatggtttagaactagatgattagtgattcagtgcatttgatcagctcattagggcgagatgggcaatcgggacttgttgtggtataaaccttgctgcattatgctagactgtcttctgatttg

SEQ ID NO: 23683 - protein, 231 aa, Zea mays subsp. mays
  misc_feature (1)..(231): Ceres Seq. ID no. 12414563
  misc_feature (171)..(171): Xaa is any aa, unknown or other
  misc_feature (186)..(186): Xaa is any aa, unknown or other
  misc_feature (192)..(192): Xaa is any aa, unknown or other
  misc_feature (198)..(198): Xaa is any aa, unknown or other
  misc_feature (206)..(206): Xaa is any aa, unknown or other
FLIQMAAPANSTTFSGDVWAELRLADARDVPHIHRLIHHMAEFELLTDLFAATEELLTSTLFPSPTPPPFTSFTALVLDLSPTPILPDSSSTIASRRLDLSASPLADPEAATFASPRGGGRVTAGFVICFPNYSTFLSKPGLYVEDIFVRAPWRRRGLGRMMLSAVAGRAXELGMGRVEWCVLDWXKNAIDXYEGMGXDVLPQWRXCRLAGAALDKYKVSQKEAAGGKAAE

SEQ ID NO: 23684 - protein, 227 aa, Zea mays subsp. mays
  misc_feature (1)..(227): Ceres Seq. ID no. 12414564
  misc_feature (167)..(167): Xaa is any aa, unknown or other
  misc_feature (182)..(182): Xaa is any aa, unknown or other
  misc_feature (188)..(188): Xaa is any aa, unknown or other
  misc_feature (194)..(194): Xaa is any aa, unknown or other
  misc_feature (202)..(202): Xaa is any aa, unknown or other
MAAPANSTTFSGDVWAELRLADARDVPHIHRLIHHMAEFELLTDLFAATEELLTSTLFPSPTPPPFTSFTALVLDLSPTPILPDSSSTIASRRLDLSASPLADPEAATFASPRGGGRVTAGFVICFPNYSTFLSKPGLYVEDIFVRAPWRRRGLGRMMLSAVAGRAXELGMGRVEWCVLDWXKNAIDXYEGMGXDVLPQWRXCRLAGAALDKYKVSQKEAAGGKAAE

SEQ ID NO: 23685 - protein, 192 aa, Zea mays subsp. mays
  misc_feature (1)..(192): Ceres Seq. ID no. 12414565
  misc_feature (132)..(132): Xaa is any aa, unknown or other
  misc_feature (147)..(147): Xaa is any aa, unknown or other
  misc_feature (153)..(153): Xaa is any aa, unknown or other
  misc_feature (159)..(159): Xaa is any aa, unknown or other
  misc_feature (167)..(167): Xaa is any aa, unknown or other
MAEFELLTDLFAATEELLTSTLFPSPTPPPFTSFTALVLDLSPTPILPDSSSTIASRRLDLSASPLADPEAATFASPRGGGRVTAGFVICFPNYSTFLSKPGLYVEDIFVRAPWRRRGLGRMMLSAVAGRAXELGMGRVEWCVLDWXKNAIDXYEGMGXDVLPQWRXCRLAGAALDKYKVSQKEAAGGKAAE

SEQ ID NO: 23686 - DNA, 1079 bp, Zea mays subsp. mays
  misc_feature (1)..(1079): Ceres Seq. ID no. 12414566
atccgccaccgttctctccgtccaccaggttttttctcttccctcctccgtaggcgcgcaaccctaggctggaaccggcggcggcctaagctaagctccgggtgtccacaggaggagggcggccgggtagcggtggtgctggacgccacggtcttccacccgcagggcggcggccaaccggcggacacgggcgtcatctccgccggcggagccaggttcttcgttgaggatgtgcgggcgaaagacggagtggttttccactacggaagatatgagggcacggagcaaggatgtgggactgtatttaaggagggggaaaccgttagcttgcaggtcgacgcagaacgacgcagctttaattcaaggcttcattctgctggccatttgttggacatctgtgttcacaatgtaggcctctttcatctggagcctgggaaaggctatcattttcctgatggaccgtttgttgagtataagggaataattcctccagatcaaataccggttaagaaaaatgaactggaaagagaggccaatagactaatttcagaaggagcgaaggtcttagcttctgtttttccttatgaggaggcagccatattatgcggaggttctttgcctagctacatttcaaaggatagcaatcctcgcattgttaagtttggggataaccctggtggtccttgcggtggcactcatgttgccgacatttcaatcatcaacagcctaaaggtgacaaacataagagtcaagaaaggcctcactaaagtctcatacagcatcagcccatgatccttttccagcagccgcagcagacaacacctggaatttattggagcgagaattattaattgaatcagaaggctgtactttagtttcgtggcatcacatgtatacgtagggtggcaaataaacaatttctatgtagtaaagtctgccagttcctcatgtacttcaatagatgatttgtttctgtactgagtcgtagcagagccgttaaggttctgatgtagatgatgacacatgtaaaactgccacggcaccatcatacaacaacatgaaggagatttaaatttgct

SEQ ID NO: 23687 - protein, 263 aa, Zea mays subsp. mays
  misc_feature (1)..(263): Ceres Seq. ID no. 12414567
IRHRSLRPPGFFSSLLRRRATLGWNRRRPKLSSGCPQEEGGRVAVVLDATVFHPQGGGQPADTGVISAGGARFFVEDVRAKDGVVFHYGRYEGTEQGCGTVFKEGETVSLQVDAERRSFNSRLHSAGHLLDICVHNVGLFHLEPGKGYHFPDGPFVEYKGIIPPDQIPVKKNELEREANRLISEGAKVLASVFPYEEAAILCGGSLPSYISKDSNPRIVKFGDNPGGPCGGTHVADISIINSLKVTNIRVKKGLTKVSYSISP

SEQ ID NO: 23688 - DNA, 1431 bp, Zea mays subsp. mays
  misc_feature (1)..(1431): Ceres Seq. ID no. 12414588
agcgagaggatgacaccacgaggcaaataaacccagacgtagttcagctagccgcttctacctccctctcccccccccgcctgcgcgctgccgcgagagctcgttcctgatggggaactgcgccggcgtggaggggaacgccgagatcaacccttccttcagtgcccccaattcctcagggaccgccggttctaagagcgtcagcaagaacgcggccgacaccggcaccttcggcaccaagacgtccggctcgtcgtcgtcggtgccgccaacccctcgtacggaggcggagatcctggagtcgtcgaatgtccgcaagttcagcttcggcgagctcaaaggctccacgaggaacttcaggccggacagcctgctcggggaggggggcttcgggtccgtgttcaaggggtggatggatgagcgcacgctcgcgcccgtgaggccgggcgccgggatcatcgtcgccgtcaagaagctcaagctcgacagcttccaagggcaccgggaatggctggcggaggtcaattacctggggcagttatcccaccctaatctcgtgaaactcatcggctactgcttggaggacgaacagcggcttcttgtgtacgagtacatgccgagagggagcctggagcatcatcttttcaggaggggctcgaacttccagccgctcccatggaacttacgcatgaaggttgctctcgaggctgccagaggtcttgctttcctgcacggcgaccaggccaaagttatctaccgcgatttcaagacctccaatatccttctcgactcggagtacaacgcaaaactgtctgatttcggtttggcaaaggacggtccaagcggtgataagagccatgtttctactagggtcatggggacacaaggatacgctgcccctgaatatcttgcgacaggccatttgacagcgaagagcgatgtgtacagctacggtgtggttcttctggagctgctgtctgggcagcgcgctctggacaagaaccgcccgcccggtcagcacaatctggtggagtgggctagaccttacatcaccaacaagaggagggtcattcatgtcctggactcacggctgggttcccagtattcccttcccgcggctcagaaggtggcaaccctggcgctgcaatgcttatcgatggacgcacgatgcaggcctgccatggatcaggttgtgactgcattagaacaacttcaaaggccaagggctcactgaaaaagatgtccatctacctctgtggagtctggagcatcctcctgtaatactttaggggagtaaaaaacagagaacgggtgagggtttgaagggctacgtggcttgtgaagagaatataatattcccttgctttgtgtacagctagttgcttcgtcgttgtaacttgggtctctacttatatattttattagtcttcg

SEQ ID NO: 23689 - protein, 374 aa, Zea mays subsp. mays
  misc_feature (1)..(374): Ceres Seq. ID no. 12414589
MGNCAGVEGNAEINPSFSAPNSSGTAGSKSVSKNAADTGTFGTKTSGSSSSVPPTPRTEAEILESSNVRKFSFGELKGSTRNFRPDSLLGEGGFGSVFKGWMDERTLAPVRPGAGIIVAVKKLKLDSFQGHREWLAEVNYLGQLSHPNLVKLIGYCLEDEQRLLVYEYMPRGSLEHHLFRRGSNFQPLPWNLRMKVALEAARGLAFLHGDQAKVIYRDFKTSNILLDSEYNAKLSDFGLAKDGPSGDKSHVSTRVMGTQGYAAPEYLATGHLTAKSDVYSYGVVLLELLSGQRALDKNRPPGQHNLVEWARPYITNKRRVIHVLDSRLGSQYSLPAAQKVATLALQCLSMDARCRPAMDQVVTALEQLQRPRAH

SEQ ID NO: 23690 - protein, 273 aa, Zea mays subsp. mays
  misc_feature (1)..(273): Ceres Seq. ID no. 12414590
MDERTLAPVRPGAGIIVAVKKLKLDSFQGHREWLAEVNYLGQLSHPNLVKLIGYCLEDEQRLLVYEYMPRGSLEHHLFRRGSNFQPLPWNLRMKVALEAARGLAFLHGDQAKVIYRDFKTSNILLDSEYNAKLSDFGLAKDGPSGDKSHVSTRVMGTQGYAAPEYLATGHLTAKSDVYSYGVVLLELLSGQRALDKNRPPGQHNLVEWARPYITNKRRVIHVLDSRLGSQYSLPAAQKVATLALQCLSMDARCRPAMDQVVTALEQLQRPRAH

SEQ ID NO: 23691 - protein, 206 aa, Zea mays subsp. mays
  misc_feature (1)..(206): Ceres Seq. ID no. 12414591
MPRGSLEHHLFRRGSNFQPLPWNLRMKVALEAARGLAFLHGDQAKVIYRDFKTSNILLDSEYNAKLSDFGLAKDGPSGDKSHVSTRVMGTQGYAAPEYLATGHLTAKSDVYSYGVVLLELLSGQRALDKNRPPGQHNLVEWARPYITNKRRVIHVLDSRLGSQYSLPAAQKVATLALQCLSMDARCRPAMDQVVTALEQLQRPRAH

SEQ ID NO: 23692 - DNA, 1307 bp, Zea mays subsp. mays
  misc_feature (1)..(1307): Ceres Seq. ID no. 12414595
atagagtagattagtgggggaactggacgtaaccgtaatattcactctgcgccccaccctcttgttctccggttccccgcgacatactctttcctgctctctctctcggttctgccgtgtccctcgcgtgcgctctgtctccggtggcgccgcctccgccgcctccgtcgccctgcgccagatcagattcgtggatatggctgataatgagaaagaagcgggggagggaaccaccccccgaggggcggactgggaagttgtgactctcacagcatctgcctatgaagcggcgccaggacctgtcggaacagaagtaaagcctgttaatgaaaatcaagagcatagttcatccaatgcactgctcatgtctgaccactttgtgtttccgccgagtgagcacgagaacctgccaatacaaaccagtttcgatgagatacagcctgagaaggatgtgcagaaacctagtaccactgtggaggattatagtaataagaatgttgttgggtctgagagagttcagtttgatgatgaagggaaagacctcttagatgatgatgtggagatgagagatgacacacctgggtacggttcatcccacgctgaagatgatgcacatggttttgttgttcacgatgatggtgttgagtccggtgaagattttgatgaaaaatcaggccacccttcagatcctgcagacagcaggagctgtgatactggcgcctcatgcaaatgttggttgaagaagcatatgacatgcttgtataaccaagcaaaggaaacaaatgctatctggtctgtggtggttgcagctgcactagttggtattgtgattttgggacgttggcacaaagataaattgcaccttaaccagcttaagtggcgctctggctcagcagtgagaggatgatcaacaagtcgtttgtgctgctctgatgaatcaattcaattcaagccataaccaagacggtttccgcaatgttattgtgatgatgacgaaaaggggtatgttcaatgcaataatatgatgttcgactggaatttcacttaccgccctacaatgagtgcctcgtgggcttctaagatgtcaaatccacttctgccatacacattatcttacagctttacttgcgacctggcacatgatttttggttcctgctacttttgctgtggtatatcatatatgttgactaaatggctgtagaacgtagcattgtatactgcgaagtctgctaaaaatcttggtggttctgcgagagcaactcacatgcaattgtgaaaatggagaacaaggaaaatttgtttggct

SEQ ID NO: 23693 - protein, 236 aa, Zea mays subsp. mays
  misc_feature (1)..(236): Ceres Seq. ID no. 12414596
MADNEKEAGEGTTPRGADWEVVTLTASAYEAAPGPVGTEVKPVNENQEHSSSNALLMSDHFVFPPSEHENLPIQTSFDEIQPEKDVQKPSTTVEDYSNKNVVGSERVQFDDEGKDLLDDDVEMRDDTPGYGSSHAEDDAHGFVVHDDGVESGEDFDEKSGHPSDPADSRSCDTGASCKCWLKKHMTCLYNQAKETNAIWSVVVAAALVGIVILGRWHKDKLHLNQLKWRSGSAVRG

SEQ ID NO: 23694 - protein, 180 aa, Zea mays subsp. mays
  misc_feature (1)..(180): Ceres Seq. ID no. 12414597
MSDHFVFPPSEHENLPIQTSFDEIQPEKDVQKPSTTVEDYSNKNVVGSERVQFDDEGKDLLDDDVEMRDDTPGYGSSHAEDDAHGFVVHDDGVESGEDFDEKSGHPSDPADSRSCDTGASCKCWLKKHMTCLYNQAKETNAIWSVVVAAALVGIVILGRWHKDKLHLNQLKWRSGSAVRG

SEQ ID NO: 23695 - DNA, 1115 bp, Zea mays subsp. mays
  misc_feature (1)..(1115): Ceres Seq. ID no. 12414625
aaatccttatcggcgactcggcgtcggaggctcggagcccacgaccacgaccgcttccacgccctcgaccccgaacccccaatcccggacgcgaccgctgaaccctagcatactccggccatctgccgccggccccggcgatcccccgccatggcctcccccgagggcacaacgtgggtcttcgactgtccccttatggacgacctcgcggtcgccgccgacttcgcggcagcccccgcgggaggatttttctgggcagcgccgccgtcgctgcagccgcaggcgccagtgcagtctgtcgttgccgcgtcggctcccaacccatgtatggaaatcagtagctctgtggactgtggtcaggaaaaagaacagccaacaaataaacgtccaaggtcagaaagtactacagaatcaagcacaaaagcatccagggagaaaattagaagggacaagctgaacgagagattcttggaattgggtgccattttggagccagggaaaactcctaaaatggacaaaacagctatattgagtgatgctattcgtgtagtaggtgaattgcgtagtgaagcaaaaagctcaaggattcaaatgagaatctccaagagaagattaaagagctgaaggccgagaagaatgagctgcgagacgagaagcaaaggctgaaggccgagaaggagagcctggagcagcagatcaagttcctgaatgcccggccaagcctcgtaccacaccacccagtgatcccagcctctgcgttccctgctccccaggggccagcagccgccgccaggcacaagctgatgatgcctgtgattggctaccctggattcccgatgtggcagttcatgccgccttcagatgttgacacctctgatgaccctaggtcttgtcctcctgtggcgtagaagccgtgcgaaatcctgttggaaagaggcgatgctgccttccattgattcaaatcttgatcggtccgcagtgttgctggtgtagttgattccagaactgaaggggatgttacatgtgtcggacggtgacatggggtgatctgatgacccctttgtatattatatatggtatggtataaataaattccgtgaccagaagctaatgtc

SEQ ID NO: 23696 - protein, 157 aa, Zea mays subsp. mays
  misc_feature (1)..(157): Ceres Seq. ID no. 12414626
MASPEGTTWVFDCPLMDDLAVAADFAAAPAGGFFWAAPPSLQPQAPVQSVVAASAPNPCMEISSSVDCGQEKEQPTNKRPRSESTTESSTKASREKIRRDKLNERFLELGAILEPGKTPKMDKTAILSDAIRVVGELRSEAKSSRIQMRISKRRLKS

SEQ ID NO: 23697 - protein, 151 aa, Zea mays subsp. mays
  misc_feature (1)..(151): Ceres Seq. ID no. 12414627
NPYRRLGVGGSEPTTTTASTPSTPNPQSRTRPLNPSILRPSAAGPGDPPPWPPPRAQRGSSTVPLWTTSRSPPTSRQPPREDFSGQRRRRCSRRRQCSLSLPRRLPTHVWKSVALWTVVRKKNSQQINVQGQKVLQNQAQKHPGRKLEGTS

SEQ ID NO: 23698 - protein, 142 aa, Zea mays subsp. mays
  misc_feature (1)..(142): Ceres Seq. ID no. 12414628
MDDLAVAADFAAAPAGGFFWAAPPSLQPQAPVQSVVAASAPNPCMEISSSVDCGQEKEQPTNKRPRSESTTESSTKASREKIRRDKLNERFLELGAILEPGKTPKMDKTAILSDAIRVVGELRSEAKSSRIQMRISKRRLKS

SEQ ID NO: 23699 - DNA, 2286 bp, Zea mays subsp. mays
  misc_feature (1)..(2286): Ceres Seq. ID no. 12414637
atctgcctctctcttcccctccctctctggaaccagggtggttgtcaagcggtgttggagttgggagtccttgccattggtacaagagcaagaagcaaggacagggaggggcgagaggaggaagaaagcgagggacactagaaaggtgcttgctttgtttccagttgcttcttctctctccctgggcgggagagaaagaagcaggagagatatgggcgagatggtcgtggccgggtatggcatggacaaggctctgcgggccagcgtcagcttcgacacgccatgcggcgcgctgctgcgcgagcttgagcaaatatggacagagattggggagcgtgaacaagataaagatcgcatgttccttgaactggaaacaggagtgcatgcgtgtgtaccgtagaaaggttgatagtgccaatgctgagagagcccagctccgtcagtcactgatggccaaagaagcagagcttaaagctctagttgcttctatcggggaaaatggcccacgatttacggtggatgaaaagcacacatcgttgaaagatcaaacttgctgcagtggcacctcttttggaagatcttagagtaaagaaacaagacagagtcaaacaaatctcaaatgtgcaatgtcaaatcgagaagataaaagcacaaatttctgatcacaattatcaggacagtgatggttccatcaaacaacttaacgatgaccatgacttatcgaccagaagaatttctgatcttcaaatgcaactgcgtaatctacagaaggagaagtccgatcgtcttcagaaggtttttatatatgtggatgaagtgcacagcctatgtgcagtgcttgggatggattttccaaagactgtaaaagaggtccacccgagtttgcatggatccaactctgaaaattcaacaaatattagtgatagcactcttgaaggtcttactcagactatcctgaagctcaaagcagaaaagaagacaagagttttaaagttgcaagagactgtagaaaaacttcacaagttatggaatctgatggagtcaactgagaaagagaggatacacttctctgaagtagctgctattcttggatctactgaggaagagatcaattctccaggcattctgtcattagagacaattcagaagactgaagaggaagtcgaaaagctaactgtacaaaaaactagtagaatgaaggagcttgttctcaagaaaaggttagaactagaaggcatctgtagaaatgcacacatggagcctgatatgagcacagcaccagagaagatcaccgcgctgattgattccggtttagtggatccttgcgaactcctttccagcattgaagtgcaaataacaaaagcaaatgaagagtccttaacgaggaaagatatcatggagagagtggataaatggctatcagcttgtgatgaagagacttggcttgaggaatataaccaagatgataataggtatagtgctggcaggggtgcccacttgaatcttaagcgtgcagagaaggcaaggataactgtccaaaagattccaactatgattgacagcttgatagccaaaacttttgcatgggaggatgaaagaaatgtgccatttttatatgatgggattcgtttggttgccattttggaagagcaaaaactcagaagggcacaaagggaggaagagaagagacgcagccgggatcagaggaagctgcacagtttattgcttaaggagaaggagttgattttcgggtccaaacctagtcctagaaagacaagcagcttcaataggaggaccagcaaccaccatccaaacgcaaatggcgctggattcatgactccggtgccacgccgagtttcagctggcagtgccaccccagagcttctgaccccacgctcgtattctggccggtacaacaactacttcaaggagaacaggcgcctgacagctgcaccactgaacttctcagttggttccaaggaggatagcatgtcatccttcgcatccatcagtggctcggaacctgattcgccattgtttttgcactaagtgttggttagggaggagacttcttggtgagaagggtggatagcctcaagatcggaccattgtgtgtgtgtgtgtgtggcagctgttaacattgctgattggtaacaacaggttgtgacaagtttagatgcgattgcttgtagatataatatctaacattcatggttctgctgtacttccaaatttaagttgtaagtcgtttggttaggaaggatgcaatgcccaagtgtgcaatgt

SEQ ID NO: 23700 - protein, 433 aa, Zea mays subsp. mays
  misc_feature (1)..(433): Ceres Seq. ID no. 12414638
MQLRNLQKEKSDRLQKVFIYVDEVHSLCAVLGMDFPKTVKEVHPSLHGSNSENSTNISDSTLEGLTQTILKLKAEKKTRVLKLQETVEKLHKLWNLMESTEKERIHFSEVAAILGSTEEEINSPGILSLETIQKTEEEVEKLTVQKTSRMKELVLKKRLELEGICRNAHMEPDMSTAPEKITALIDSGLVDPCELLSSIEVQITKANEESLTRKDIMERVDKWLSACDEETWLEEYNQDDNRYSAGRGAHLNLKRAEKARITVQKIPTMIDSLIAKTFAWEDERNVPFLYDGIRLVAILEEQKLRRAQREEEKRRSRDQRKLHSLLLKEKELIFGSKPSPRKTSSFNRRTSNHHPNANGAGFMTPVPRRVSAGSATPELLTPRSYSGRYNNYFKENRRLTAAPLNFSVGSKEDSMSSFASISGSEPDSPLFLH

SEQ ID NO: 23701 - protein, 401 aa, Zea mays subsp. mays
  misc_feature (1)..(401): Ceres Seq. ID no. 12414639
MDFPKTVKEVHPSLHGSNSENSTNISDSTLEGLTQTILKLKAEKKTRVLKLQETVEKLHKLWNLMESTEKERIHFSEVAAILGSTEEEINSPGILSLETIQKTEEEVEKLTVQKTSRMKELVLKKRLELEGICRNAHMEPDMSTAPEKITALIDSGLVDPCELLSSIEVQITKANEESLTRKDIMERVDKWLSACDEETWLEEYNQDDNRYSAGRGAHLNLKRAEKARITVQKIPTMIDSLIAKTFAWEDERNVPFLYDGIRLVAILEEQKLRRAQREEEKRRSRDQRKLHSLLLKEKELIFGSKPSPRKTSSFNRRTSNHHPNANGAGFMTPVPRRVSAGSATPELLTPRSYSGRYNNYFKENRRLTAAPLNFSVGSKEDSMSSFASISGSEPDSPLFLH

SEQ ID NO: 23702 - protein, 337 aa, Zea mays subsp. mays
  misc_feature (1)..(337): Ceres Seq. ID no. 12414640
MESTEKERIHFSEVAAILGSTEEEINSPGILSLETIQKTEEEVEKLTVQKTSRMKELVLKKRLELEGICRNAHMEPDMSTAPEKITALIDSGLVDPCELLSSIEVQITKANEESLTRKDIMERVDKWLSACDEETWLEEYNQDDNRYSAGRGAHLNLKRAEKARITVQKIPTMIDSLIAKTFAWEDERNVPFLYDGIRLVAILEEQKLRRAQREEEKRRSRDQRKLHSLLLKEKELIFGSKPSPRKTSSFNRRTSNHHPNANGAGFMTPVPRRVSAGSATPELLTPRSYSGRYNNYFKENRRLTAAPLNFSVGSKEDSMSSFASISGSEPDSPLFLH

SEQ ID NO: 23703 - DNA, 674 bp, Zea mays subsp. mays
  misc_feature (1)..(674): Ceres Seq. ID no. 12414641
agatggacgcaacacctgataatcatttctgggatcatttctcaggtcgcgcagcaaagtagcaaactcctgcgaccctacccaccgcacctaccattctggagaggagaggaacagagccaagaaacaagcccggaagatggcaggcggcggggtggtgaagcacatcctgctggcaagcttcaaggaggaggtgacgcaggagcgcctggacgagctcatccgcggatacgccgcgctcgtcggcgtggtcccctccatgaaggccttccactggggaactgatgtgagcatagaaaacatgcatcaagggttcacgcacgtcttcgagtccacgtttgaaagcacggaaggaatcaaggagtacattgagcaccctgcacacgtcgaattcgcaagtgtgttcttgcctgtgctggagaaggtcctcataatcgactacaaaccgacgtcggccaattagtggtagaacatgctctgtacttgttcctcggaggatccagtttggttctactctttattttgctaaataaactcggtctgctttgtcccttgttaagaatgagctttgagttttctgtagtgcaattgttgtagcttcgcatgttttcatatgggaattacgttcctaaagaccgtatttgccacttggaagcagcagactgcttgaactc

SEQ ID NO: 23704 - protein, 107 aa, Zea mays subsp. mays
  misc_feature (1)..(107): Ceres Seq. ID no. 12414642
MAGGGVVKHILLASFKEEVTQERLDELIRGYAALVGVVPSMKAFHWGTDVSIENMHQGFTHVFESTFESTEGIKEYIEHPAHVEFASVFLPVLEKVLIIDYKPTSAN

SEQ ID NO: 23705 - protein, 94 aa, Zea mays subsp. mays
  misc_feature (1)..(94): Ceres Seq. ID no. 12414643
RWTQHLIIISGIISQVAQQSSKLLRPYPPHLPFWRGEEQSQETSPEDGRRRGGEAHPAGKLQGGGDAGAPGRAHPRIRRARRRGPLHEGLPLGN

SEQ ID NO: 23706 - protein, 67 aa, Zea mays subsp. mays
  misc_feature (1)..(67): Ceres Seq. ID no. 12414644
MKAFHWGTDVSIENMHQGFTHVFESTFESTEGIKEYIEHPAHVEFASVFLPVLEKVLIIDYKPTSAN

SEQ ID NO: 23707 - DNA, 1229 bp, Zea mays subsp. mays
  misc_feature (1)..(1229): Ceres Seq. ID no. 12414660
aaattccacccctcgccgccatctccgtctctctctctcccgcaaccaagcagttcaactcacacccgaagcggcgccgctagggtttgctccgacagccgcgaaacctagtccttactgcgccctcccacagaggccgtcattcactaatctagctgctacgcttcgcttcccactccgattgggagctagggtttagcttatctctgagctcagcttcgggtcgcggcacgcggcatggcggggtacggggaagagaaccagaacgccatgaacgggtacgaggaggaagaggaggaagaagaggttgaagaagtcgaggaggtgtacgaagaggaggaggagggggacggggagggggaaggagacgagggggcagccgccgaggcagcagcgatggcggccgagacgagaagtgtcgatggaggccggggcctagcggaggccgttgggaatgttgatgccggaggcgaggatgagagggatgcagattctagcggcggtgacgcttcggggaaggttttcgtagggggtgtagcctgggagacaactgaagaaacattcacaaagcattttcagaagtatggagctataactgattctgtgatcatgaaggacaagcatactaggatgcctcgtggatttggatttgttacattttccgatccgtctgtgcttgacagggttctagaggatgaacatgtcatagatggaaggacggttgaagtcaaaaggactgttccaaaagagctgtcgtcaaaagatggccctaagacaaaaaagatctttgtgggtggtatcccaccatctcttaccgaagataaattaaaggagcacttctcatcgtacgggaaggtggttgagcatcagattatgcttgatcatagcactggacgttcacggggctttggatttgtcacatttgaaagcgaggatgctgttgaaagggttatgtcagaggggagaatgcatgatcttggagggaagcaggtcacttctttatctctcattgtgttctgtgttggtaaatatcattggcatgtaagcagttctgcagttgtcaggttcaattagcaaatggtctaacctggcatgttgtctataattttgttgttgttaacttagttttggttagtaatcatgaagatgcgattctgtctgtacaatataactgatgtgtctgggagtttttgaacattgatcattgtttgtttagtactttctcttcc

SEQ ID NO: 23708 - protein, 278 aa, Zea mays subsp. mays
  misc_feature (1)..(278): Ceres Seq. ID no. 12414661
MAGYGEENQNAMNGYEEEEEEEEVEEVEEVYEEEEEGDGEGEGDEGAAAEAAAMAAETRSVDGGRGLAEAVGNVDAGGEDERDADSSGGDASGKVFVGGVAWETTEETFTKHFQKYGAITDSVIMKDKHTRMPRGFGFVTFSDPSVLDRVLEDEHVIDGRTVEVKRTVPKELSSKDGPKTKKIFVGGIPPSLTEDKLKEHFSSYGKVVEHQIMLDHSTGRSRGFGFVTFESEDAVERVMSEGRMHDLGGKQVTSLSLIVFCVGKYHWHVSSSAVVRFN

SEQ ID NO: 23709 - protein, 267 aa, Zea mays subsp. mays
  misc_feature (1)..(267): Ceres Seq. ID no. 12414662
MNGYEEEEEEEEVEEVEEVYEEEEEGDGEGEGDEGAAAEAAAMAAETRSVDGGRGLAEAVGNVDAGGEDERDADSSGGDASGKVFVGGVAWETTEETFTKHFQKYGAITDSVIMKDKHTRMPRGFGFVTFSDPSVLDRVLEDEHVIDGRTVEVKRTVPKELSSKDGPKTKKIFVGGIPPSLTEDKLKEHFSSYGKVVEHQIMLDHSTGRSRGFGFVTFESEDAVERVMSEGRMHDLGGKQVTSLSLIVFCVGKYHWHVSSSAVVRFN

SEQ ID NO: 23710 - protein, 225 aa, Zea mays subsp. mays
  misc_feature (1)..(225): Ceres Seq. ID no. 12414663
MAAETRSVDGGRGLAEAVGNVDAGGEDERDADSSGGDASGKVFVGGVAWETTEETFTKHFQKYGAITDSVIMKDKHTRMPRGFGFVTFSDPSVLDRVLEDEHVIDGRTVEVKRTVPKELSSKDGPKTKKIFVGGIPPSLTEDKLKEHFSSYGKVVEHQIMLDHSTGRSRGFGFVTFESEDAVERVMSEGRMHDLGGKQVTSLSLIVFCVGKYHWHVSSSAVVRFN

SEQ ID NO: 23711 - DNA, 2671 bp, Zea mays subsp. mays
  misc_feature (1)..(2671): Ceres Seq. ID no. 12414664
gcatctcgcattctcgccggtgctgctgcaattcacgccacccccggccaaccgcctgaaaactacctctgccgccggcgccgccatccccaacatggcgagccaaggggagccctcggcctctgcttccgatccgaaggagaagaaggactactcgacggcgatactagagaggaaaaagtcaccgaaccgccttgtcgtcgacgaggccaccaacgacgataactccgtcgtcgcactgcaccctgacaccatggagaggctgcagctcttccgcggcgatactgtgctcctcaagggtaagaagaggaaagacactatttgcattgtccttgcggatgagacctgtgaggagccaaaggttcggatgaacaaggttgtccgccagaacctgagggtgaggcttggtgatgtggtttctgtccaccagtgccaggatgtgaaatatgggaagcgtgtgcacattcttccaattgatgatacagttgaaggcattacagggaacctgtttgatgccttcttgaaaccatacttcctagaagcatacaggcccgtgaggaaaggagaccttttccttgtcaggggtggaatgagaagcgtggaattcaaagtgatagagactgacccttctgaatattgtatcgttgccccagatactgaaatattttgtgatggggagcctattaagagagaggatgaggagcgtcttgatgaagttggttatgatgatgttggtggagttagaaagcaaatggcccaaatcagagagcttgttgagcttccactacgccatcctcagcttttcaaatctattggtgtgaagccaccaaagggcatattgctgtatgggccacctggttctggaaagactcttattgctcgtgctgttgcaaatgagactggagcctttttctttctgatcaatggcccagagattatgtcgaagttagcaggagagagtgagagcaatctcagaaaggcatttgaagaagcagagaagaatgctccatctatcattttcattgatgaaattgattccattgcacccaagagagaaaagaccaatggagaagtagaacgtcgtattgtttcacagctactgactcttatggatggactcaaatctcgttcccatgttattgttatgggtgctacaaaccggccaaacagcattgatcctgctcttagaagatttggaaggtttgaccgggaaattgacattggagttcctgatgaagttggccggcttgaggttctccgtattcacactaagaacatgaagctagctgaagatgttaatttggaactcatttcaaaggatacccatggatacgttggtgctgatcttgctgccctttgcactgaggctgctcttcagtgcattcgtgagaagatggacatcatagatcttgaggatgagacaatagatgcagagatattgaactcgatggctgttacaaatgaccatttcaagactgcgcttggaacaagcaacccatctgctctccgtgaaactgttgttgaagtcccaaatgtcttgggaggatattggtgggctggagaatgtcaagagagagctccaggagactgttcaatatcctgtggagcatccagagaagttcgagaagtttggcatgtctccatccaaaggagttctgttttatggtcctcctggttgtggtaaaaccttgttggcaaaggcaattgccaatgagtgccaagctaacttcatcagtgtcaagggtcctgaattgcttaccatgtggtttggtgagagtgaagccaacgtccgcgaaatttttgataaggctcgccaatctgctccttgtgtcctcttctttgatgagcttgactcaattgcaactcagagaggaagtagtgtgggtgatgctgggggcgcggctgatagagtgcttaatcagctactgaccgagatggatggcatgaacgccaagaaaactgtgttcattattggtgctacaaacaggcctgacatcattgatcctgctcttctgaggccagggcgtcttaaccagctgatctacattccactgcctgatgagcagtctaggctccagatcttcaaggcctgcctaaggaagtcccctgtggcaaaggatgtggacctgaatgctcttgctaagtacacacaagggttcagtggagcagatatcacagaaatttgccagcgtgcgtgcaaatatgcaatcagagagaacattgagaaggacattgagagggaaaggcggatgaaggacaaccctgaggcgatggaggaagatgaagtggacgagattgccgagatcaaggcagctcatttcgaggagtctatgaagtattctcggcgcagtgtcagtgatgctgatatccgcaagtaccaggcgttcgcccagacgttgcagcagtcccgtgggttcggcagtgagttccgcttctcagagcaatcggcgacagctagtgctgctgcagccgatccgtttgcttctgccggtgccgcggctgacgatgacgatctatacagctaggtgtccttttgggttggttctgggttgtgcaatatcagtctcatcagtcatctgtttaaaactctgagtatacttagacacgggatgtcatgcaatgatatttgttttccgtacatttggacgttgagataatgcctgtttatttt

SEQ ID NO: 23712 - protein, 560 aa, Zea mays subsp. mays
  misc_feature (1)..(560): Ceres Seq. ID no. 12414665
HLAFSPVLLQFTPPPANRLKTTSAAGAAIPNMASQGEPSASASDPKEKKDYSTAILERKKSPNRLVVDEATNDDNSVVALHPDTMERLQLFRGDTVLLKGKKRKDTICIVLADETCEEPKVRMNKVVRQNLRVRLGDVVSVHQCQDVKYGKRVHILPIDDTVEGITGNLFDAFLKPYFLEAYRPVRKGDLFLVRGGMRSVEFKVIETDPSEYCIVAPDTEIFCDGEPIKREDEERLDEVGYDDVGGVRKQMAQIRELVELPLRHPQLFKSIGVKPPKGILLYGPPGSGKTLIARAVANETGAFFFLINGPEIMSKLAGESESNLRKAFEEAEKNAPSIIFIDEIDSIAPKREKTNGEVERRIVSQLLTLMDGLKSRSHVIVMGATNRPNSIDPALRRFGRFDREIDIGVPDEVGRLEVLRIHTKNMKLAEDVNLELISKDTHGYVGADLAALCTEAALQCIREKMDIIDLEDETIDAEILNSMAVTNDHFKTALGTSNPSALRETVVEVPNVLGGYWWAGECQERAPGDCSISCGASREVREVWHVSIQRSSVLWSSWLW

SEQ ID NO: 23713 - protein, 529 aa, Zea mays subsp. mays
  misc_feature (1)..(529): Ceres Seq. ID no. 12414666
MASQGEPSASASDPKEKKDYSTAILERKKSPNRLVVDEATNDDNSVVALHPDTMERLQLFRGDTVLLKGKKRKDTICIVLADETCEEPKVRMNKVVRQNLRVRLGDVVSVHQCQDVKYGKRVHILPIDDTVEGITGNLFDAFLKPYFLEAYRPVRKGDLFLVRGGMRSVEFKVIETDPSEYCIVAPDTEIFCDGEPIKREDEERLDEVGYDDVGGVRKQMAQIRELVELPLRHPQLFKSIGVKPPKGILLYGPPGSGKTLIARAVANETGAFFFLINGPEIMSKLAGESESNLRKAFEEAEKNAPSIIFIDEIDSIAPKREKTNGEVERRIVSQLLTLMDGLKSRSHVIVMGATNRPNSIDPALRRFGRFDREIDIGVPDEVGRLEVLRIHTKNMKLAEDVNLELISKDTHGYVGADLAALCTEAALQCIREKMDIIDLEDETIDAEILNSMAVTNDHFKTALGTSNPSALRETVVEVPNVLGGYWWAGECQERAPGDCSISCGASREVREVWHVSIQRSSVLWSSWLW

SEQ ID NO: 23714 - protein, 476 aa, Zea mays subsp. mays
  misc_feature (1)..(476): Ceres Seq. ID no. 12414667
MERLQLFRGDTVLLKGKKRKDTICIVLADETCEEPKVRMNKVVRQNLRVRLGDVVSVHQCQDVKYGKRVHILPIDDTVEGITGNLFDAFLKPYFLEAYRPVRKGDLFLVRGGMRSVEFKVIETDPSEYCIVAPDTEIFCDGEPIKREDEERLDEVGYDDVGGVRKQMAQIRELVELPLRHPQLFKSIGVKPPKGILLYGPPGSGKTLIARAVANETGAFFFLINGPEIMSKLAGESESNLRKAFEEAEKNAPSIIFIDEIDSIAPKREKTNGEVERRIVSQLLTLMDGLKSRSHVIVMGATNRPNSIDPALRRFGRFDREIDIGVPDEVGRLEVLRIHTKNMKLAEDVNLELISKDTHGYVGADLAALCTEAALQCIREKMDIIDLEDETIDAEILNSMAVTNDHFKTALGTSNPSALRETVVEVPNVLGGYWWAGECQERAPGDCSISCGASREVREVWHVSIQRSSVLWSSWLW

SEQ ID NO: 23715 - DNA, 1161 bp, Zea mays subsp. mays
  misc_feature (1)..(1161): Ceres Seq. ID no. 12414676
atcggacggccgcgtggctcccaggagccctatatcaccatccttgcccaccacctcctgaccctcatcacccgcgtccgccaccgccgccgcctttcgtaccgcggcccctaaacccctttcctcgttcccctccgtctctcagttaggcacaatgatgctagctaataagcttggtggtttgctcaagaatgctacgagttcaaagagttcaaatatgtctgtctaccaagcaatcagatgcatgttcatcatccaagctttttgttggagggctttcttatggaaccgatgatcaccagtctcagagacgagtttgccaaatatggacaagttattgaagctaagattatccttgatcgtgagtctgggaggtccagaggttttggctttataacttacacgtcttctgaggaggcttcggctgccatcactgccatggatggaaagactctggatggacggaacatacgggttaatcatgctaacgagaggacaggtggcttccgcagcagccgtggttatggtggtggcggctatggtggtggtggtggtggctatggtggcggtggctatggtggcggctatggtggtggtagcggtggctatggcggcggcggcagcggtgactatggtggcggcagcggtggatatggtggcaactacggcaacagggctggtggtggctatggtggtggtggtgattatggagttgcaggtggggctgaaggcagttttgctgctggaggtagcgacagctttggcagcagtaactttgctgacagtggttttggtgaaaaccctgctggtagctttggcgcaacgggtggttccagtggcgctgatgggttctctgctggcacacctggtgacggtaacaagaatgatgaaatcatggatgatctcttcaaggacgatgagcctgacagctacgccaacaagaggagctaatttgtgtccaccaccaccatgcgaggccgtgtggattctaggccatatgtattcggtagtgttttctgttaacatgataggtgtctgatgtctaaataatggaacgagtccttttgttgagtttgagttgtggaactttcaaagcgtgcgttgcatgtggcgcttgtgccggcaaacatggcatactttcatgttatattgntatttgct

SEQ ID NO: 23716 - protein, 236 aa, Zea mays subsp. mays
  misc_feature (1)..(236): Ceres Seq. ID no. 12414677
MHVHHPSFLLEGFLMEPMITSLRDEFAKYGQVIEAKIILDRESGRSRGFGFITYTSSEEASAAITAMDGKTLDGRNIRVNHANERTGGFRSSRGYGGGGYGGGGGGYGGGGYGGGYGGGSGGYGGGGSGDYGGGSGGYGGNYGNRAGGGYGGGGDYGVAGGAEGSFAAGGSDSFGSSNFADSGFGENPAGSFGATGGSSGADGFSAGTPGDGNKNDEIMDDLFKDDEPDSYANKRS

SEQ ID NO: 23717 - protein, 222 aa, Zea mays subsp. mays
  misc_feature (1)..(222): Ceres Seq. ID no. 12414678
MEPMITSLRDEFAKYGQVIEAKIILDRESGRSRGFGFITYTSSEEASAAITAMDGKTLDGRNIRVNHANERTGGFRSSRGYGGGGYGGGGGGYGGGGYGGGYGGGSGGYGGGGSGDYGGGSGGYGGNYGNRAGGGYGGGGDYGVAGGAEGSFAAGGSDSFGSSNFADSGFGENPAGSFGATGGSSGADGFSAGTPGDGNKNDEIMDDLFKDDEPDSYANKRS

SEQ ID NO: 23718 - protein, 219 aa, Zea mays subsp. mays
  misc_feature (1)..(219): Ceres Seq. ID no. 12414679
MITSLRDEFAKYGQVIEAKIILDRESGRSRGFGFITYTSSEEASAAITAMDGKTLDGRNIRVNHANERTGGFRSSRGYGGGGYGGGGGGYGGGGYGGGYGGGSGGYGGGGSGDYGGGSGGYGGNYGNRAGGGYGGGGDYGVAGGAEGSFAAGGSDSFGSSNFADSGFGENPAGSFGATGGSSGADGFSAGTPGDGNKNDEIMDDLFKDDEPDSYANKRS

SEQ ID NO: 23719 - DNA, 1324 bp, Zea mays subsp. mays
  misc_feature (1)..(1324): Ceres Seq. ID no. 12414692
atctcctccacttccttcctgggctctgggctacgtattatccatccgtctcagtcacctcgcctcctcctcctcctcccccagtccccctccctcatcctcgattgcgcccctcactcgccatgtcggggctctacagccaggggttctcccctgcgcgaaacctctcccctcagattagaagcaatccggacgctgatagtcagtacctggccgagctgctcgccgaacaccacaaactggggcccttcatgcaggtgctgcccgtatgcaacaagctgctgagccaagagattatgcgggtatcaagcattgtgcacaaccatggatttggcgatttcgacaggcatcggtttagaagtcctagtccaatgtcttctccaaaccctagagctaatctccctggcaatgggttcagtccttggagcggactacaagagagattaggttttcctcaaggaaccagcatggactggcaaggagcacccccaagtcctagctcccatgttgtaaagaagattcttcgtctggaggttccagttgattcttatccgaatttcaattttgtggggcgcattttaggacctagaggtaattctctaaagcgagtagaagcatccactgggtgtcgtgttttcattagaggaaagggttccatcaaagattcagggaaggaggacaaactacggggaaaaccgggctatgagcacctgagtgatccgctgcatatcttgatagaggccgagttccctgccagtatcatcgatgcaaggctgagacaagcacaggagattatagaagaattgcttaaaccagtggacgagtcccaagatctctacaaaaggcagcagctcagggagctggcaatgctgaactcaaccctgagagaggacagccctcatccggggagtgtctctccattcagcaacggtggcatgaagcgtgcgaaaacaggacagtagagaaaacaactatgctcccatatctggccccgtcgtcatgggaacgccatgggcatgcgtgaaggaaggccatgcgccttcgctggcggagtccggtatcttctgctagctttcacctccggacaggggaaagatgagatgagatgagatgagatagtcgcggacccttggttggatccggcgttggttgttgtatggtctagaacattcgttctatttgttattgacggttaaccctagtatgttggtgagctgcaacctgcaaactgcatggtaaactagctagagaggcctgctgagtatgtgagctttaggtcttttcttgacattgtattataacctttttaacattatggagttgc

SEQ ID NO: 23720 - protein, 319 aa, Zea mays subsp. mays
  misc_feature (1)..(319): Ceres Seq. ID no. 12414693
LLHFLPGLWATYYPSVSVTSPPPPPPPVPLPHPRLRPSLAMSGLYSQGFSPARNLSPQIRSNPDADSQYLAELLAEHHKLGPFMQVLPVCNKLLSQEIMRVSSIVHNHGFGDFDRHRFRSPSPMSSPNPRANLPGNGFSPWSGLQERLGFPQGTSMDWQGAPPSPSSHVVKKILRLEVPVDSYPNFNFVGRILGPRGNSLKRVEASTGCRVFIRGKGSIKDSGKEDKLRGKPGYEHLSDPLHILIEAEFPASIIDARLRQAQEIIEELLKPVDESQDLYKRQQLRELAMLNSTLREDSPHPGSVSPFSNGGMKRAKTGQ

SEQ ID NO: 23721 - protein, 279 aa, Zea mays subsp. mays
  misc_feature (1)..(279): Ceres Seq. ID no. 12414694
MSGLYSQGFSPARNLSPQIRSNPDADSQYLAELLAEHHKLGPFMQVLPVCNKLLSQEIMRVSSIVHNHGFGDFDRHRFRSPSPMSSPNPRANLPGNGFSPWSGLQERLGFPQGTSMDWQGAPPSPSSHVVKKILRLEVPVDSYPNFNFVGRILGPRGNSLKRVEASTGCRVFIRGKGSIKDSGKEDKLRGKPGYEHLSDPLHILIEAEFPASIIDARLRQAQEIIEELLKPVDESQDLYKRQQLRELAMLNSTLREDSPHPGSVSPFSNGGMKRAKTGQ

SEQ ID NO: 23722 - protein, 236 aa, Zea mays subsp. mays
  misc_feature (1)..(236): Ceres Seq. ID no. 12414695
MQVLPVCNKLLSQEIMRVSSIVHNHGFGDFDRHRFRSPSPMSSPNPRANLPGNGFSPWSGLQERLGFPQGTSMDWQGAPPSPSSHVVKKILRLEVPVDSYPNFNFVGRILGPRGNSLKRVEASTGCRVFIRGKGSIKDSGKEDKLRGKPGYEHLSDPLHILIEAEFPASIIDARLRQAQEIIEELLKPVDESQDLYKRQQLRELAMLNSTLREDSPHPGSVSPFSNGGMKRAKTGQ

SEQ ID NO: 23723 - DNA, 1284 bp, Zea mays subsp. mays
  misc_feature (1)..(1284): Ceres Seq. ID no. 12414696
atgcagattcccaagtggagttgcggcggctggttatcatttatcatcaccttcgcctcacaccttccggccgcccattccgatccgatccccggccggccacctaccaccggtcagccccatcaatctctgaggcagcgtcagccatcaggcctccctcgtcgatctccccgccgccgccgctgctaataccagataatggaggccggcgccgccgctgctgccactgccatctaccctctgcaccatgcaaaaccatacacctggtgaggcatgcccaaggtgtccacaacgtggaaggcgacacggatcacagcgcctacatgaaacccgacttcttcgacgcgagcatcactcccttgggctggaaccaggttgacctcctgcgagagcatgtgaaggaatctgggcttgcagaaaagattgagctggttatttgttctcctttgtcgaggaccatgcagactgcagtgggagtttttgttggcgaaagctgcagtaatggtgtgagtgtgcctccactgatggtggagaatgctggacgtccggcagtttcaagtttgaactgcccaccatttcttgctgttgaggcctgcagggagcgcttgggtgtccatccttgtgacaagaggaggagcatcacagagtaccgtgctctcttccctgccattgatttttcgctgatagagagtgacgaagatgttctctgggtaccagatgtcagagaaacctttgagtcgctcgcagaaaggggtatgaagttcattgactggctatggacaagagaagagagagagatagccatcgtcacccatagcggtttattaagccataccttgcgcaggtacagcaaagagtgccatccaacagtaacacaagaagtgagcaagtactttgcaaactgcgagctccggtccttggtactggttgacaggagtatgcttggttcagatggccccagttacaacaactaccctggcaaaatgaaaatcccagccgcacttgatctgcccagcgatgacaagaagcagcctcttcagaaccagagcggctgagcaggcctgtcttggggcttgtttggtgttcaccaccactgattccttttcttttgtcatcctattttgaaacttccctagctgcattcagtccattttttgtgaactattttgaacttcccatctgtggttgttgagcaccatttgtggtactggacatggccggacggtccaacctgtggacggtccgtgattagatcagatcatacgtaattaacccttttcggcg

SEQ ID NO: 23724 - protein, 350 aa, Zea mays subsp. mays
  misc_feature (1)..(350): Ceres Seq. ID no. 12414697
ADSQVELRRLVIIYHHLRLTPSGRPFRSDPRPATYHRSAPSISEAASAIRPPSSISPPPPLLIPDNGGRRRRCCHCHLPSAPCKTIHLVRHAQGVHNVEGDTDHSAYMKPDFFDASITPLGWNQVDLLREHVKESGLAEKIELVICSPLSRTMQTAVGVFVGESCSNGVSVPPLMVENAGRPAVSSLNCPPFLAVEACRERLGVHPCDKRRSITEYRALFPAIDFSLIESDEDVLWVPDVRETFESLAERGMKFIDWLWTREEREIAIVTHSGLLSHTLRRYSKECHPTVTQEVSKYFANCELRSLVLVDRSMLGSDGPSYNNYPGKMKIPAALDLPSDDKKQPLQNQSG

SEQ ID NO: 23725 - protein, 243 aa, Zea mays subsp. mays
  misc_feature (1)..(243): Ceres Seq. ID no. 12414698
MKPDFFDASITPLGWNQVDLLREHVKESGLAEKIELVICSPLSRTMQTAVGVFVGESCSNGVSVPPLMVENAGRPAVSSLNCPPFLAVEACRERLGVHPCDKRRSITEYRALFPAIDFSLIESDEDVLWVPDVRETFESLAERGMKFIDWLWTREEREIAIVTHSGLLSHTLRRYSKECHPTVTQEVSKYFANCELRSLVLVDRSMLGSDGPSYNNYPGKMKIPAALDLPSDDKKQPLQNQSG

SEQ ID NO: 23726 - protein, 198 aa, Zea mays subsp. mays
  misc_feature (1)..(198): Ceres Seq. ID no. 12414699
MQTAVGVFVGESCSNGVSVPPLMVENAGRPAVSSLNCPPFLAVEACRERLGVHPCDKRRSITEYRALFPAIDFSLIESDEDVLWVPDVRETFESLAERGMKFIDWLWTREEREIAIVTHSGLLSHTLRRYSKECHPTVTQEVSKYFANCELRSLVLVDRSMLGSDGPSYNNYPGKMKIPAALDLPSDDKKQPLQNQSG

SEQ ID NO: 23727 - DNA, 1913 bp, Zea mays subsp. mays
  misc_feature (1)..(1913): Ceres Seq. ID no. 12414708
aaagagagaagggagaggcgagggagctcaccaggagagaggggcctgtgcgtgagcattgagcaaagcaaaggaagcagtacatacatacatatttctctcgctcgctcgcagagaggcccggccggccggctccatgcaacaagggaggacgacgagcggtggcggtgggcgatgatgatgatgatgatggcgggggagcacgtgctggccgctctgggcaccctactgctggcctcgctcctgaccctggtgctgaaccacttcctgcccttgcttctgaaccccaaggcccccaggggaagcttcgggtggccgctcctcggcgagacgctcaggttcctcacgccgcacgcctccaacacgctgggcggcttcctcgaggatcactgctccaggtatgggcgggtgttcaagtcccacctgttctgcaccccgacggtggtgtcctgcgaccaggacctcaaccacttcatcctgcagaacgaggagcggctgttccagtgcagctacccgaggccgatccatggcatcctgggcaagtcctccatgctcgtcgtcctgggcgaggaccacaagcgcctcaggaacctggccctcgccctcgtcacctccaccaagctcaagcccagctacctaggcgacatcgagaagatcgcgctgcacgtcgtcggcgcatggcgacggcacggcagcagcggcggcgtcagggtcgtcgcattctgcgaggaggcaagaaagttcgcattcagtgtgatagtgaagcaggtgctggggctgtcgccagaggagccggtcactgcaaggatactggaggacttcctggccttcatgaagggactcatctccttccccctctacatcccagggaccccatatgccaaggctgtccgggcgagagagaggatatccagcactgtgaagggcatcatcaaggagcggaggagcgctgggtcatggaacaagcagggcgacttccttgacgtgctgctgtcaagcaacgagctatctgacgaggagaaagtgagctttgtgctggactccctgctgggagggtatgagaccacctcgctcctcatctccatggtcgtttatttccttggccagtctgctcaagatctggacctggttaagagggagcacgacagcataagatccaacaaaggcaaggaggagtgcttgacttcagaagactacaagaagatggaatatacccaacaagtcatcaacgaggcgctgagatgcggcaacatcgtcaagttcgtccaccggaaggcgctgaaagacgtcaaatacaaagagtatctgattccatctggctggaaggtcctaccggtcttcactgccgttcatctgaacccctcacttcatggagacgcgcagcagtttcagccctgtaggtgggagggcacaagccaagggacaagcaagaggtttacaccgttcggtggtggcccccggctctgcccaggatcagagctcgctaaagtggagactgctttcttcctccatcaccttgtcctcaattatagatggagaattgatggcgatgacattccaatggcatacccgtatgtggagtttcagagaggtctgccaatagaaatcgagccaacgtcccctgaatcttgactgtcctggagctacagccatcagttatcacaccagagagaaaaggggaaggtgcatggagtatacatgaatggtcagtgacagatctcacaagtgaaggaacactgagggcgcgtgctagtagctagcatatgaggcagctgagactgtaatttaatgtacatggtgtagatatattttgtccatggcaattgcttgaagtggctgattcacttcaccctgtaaaacattctccagtggtttcaactgctatcctataaaaaagaagggcccctgtgttt

SEQ ID NO: 23728 - protein, 543 aa, Zea mays subsp. mays
  misc_feature (1)..(543): Ceres Seq. ID no. 12414709
KERRERRGSSPGERGLCVSIEQSKGSSTYIHISLARSQRGPAGRLHATREDDERWRWAMMMMMMAGEHVLAALGTLLLASLLTLVLNHFLPLLLNPKAPRGSFGWPLLGETLRFLTPHASNTLGGFLEDHCSRYGRVFKSHLFCTPTVVSCDQDLNHFILQNEERLFQCSYPRPIHGILGKSSMLVVLGEDHKRLRNLALALVTSTKLKPSYLGDIEKIALHVVGAWRRHGSSGGVRVVAFCEEARKFAFSVIVKQVLGLSPEEPVTARILEDFLAFMKGLISFPLYIPGTPYAKAVRARERISSTVKGIIKERRSAGSWNKQGDFLDVLLSSNELSDEEKVSFVLDSLLGGYETTSLLISMVVYFLGQSAQDLDLVKREHDSIRSNKGKEECLTSEDYKKMEYTQQVINEALRCGNIVKFVHRKALKDVKYKEYLIPSGWKVLPVFTAVHLNPSLHGDAQQFQPCRWEGTSQGTSKRFTPFGGGPRLCPGSELAKVETAFFLHHLVLNYRWRIDGDDIPMAYPYVEFQRGLPIEIEPTSPES

SEQ ID NO: 23729 - protein, 485 aa, Zea mays subsp. mays
  misc_feature (1)..(485): Ceres Seq. ID no. 12414710
MMMMMMAGEHVLAALGTLLLASLLTLVLNHFLPLLLNPKAPRGSFGWPLLGETLRFLTPHASNTLGGFLEDHCSRYGRVFKSHLFCTPTVVSCDQDLNHFILQNEERLFQCSYPRPIHGILGKSSMLVVLGEDHKRLRNLALALVTSTKLKPSYLGDIEKIALHVVGAWRRHGSSGGVRVVAFCEEARKFAFSVIVKQVLGLSPEEPVTARILEDFLAFMKGLISFPLYIPGTPYAKAVRARERISSTVKGIIKERRSAGSWNKQGDFLDVLLSSNELSDEEKVSFVLDSLLGGYETTSLLISMVVYFLGQSAQDLDLVKREHDSIRSNKGKEECLTSEDYKKMEYTQQVINEALRCGNIVKFVHRKALKDVKYKEYLIPSGWKVLPVFTAVHLNPSLHGDAQQFQPCRWEGTSQGTSKRFTPFGGGPRLCPGSELAKVETAFFLHHLVLNYRWRIDGDDIPMAYPYVEFQRGLPIEIEPTSPES

SEQ ID NO: 23730 - protein, 484 aa, Zea mays subsp. mays
  misc_feature (1)..(484): Ceres Seq. ID no. 12414711
MMMMMAGEHVLAALGTLLLASLLTLVLNHFLPLLLNPKAPRGSFGWPLLGETLRFLTPHASNTLGGFLEDHCSRYGRVFKSHLFCTPTVVSCDQDLNHFILQNEERLFQCSYPRPIHGILGKSSMLVVLGEDHKRLRNLALALVTSTKLKPSYLGDIEKIALHVVGAWRRHGSSGGVRVVAFCEEARKFAFSVIVKQVLGLSPEEPVTARILEDFLAFMKGLISFPLYIPGTPYAKAVRARERISSTVKGIIKERRSAGSWNKQGDFLDVLLSSNELSDEEKVSFVLDSLLGGYETTSLLISMVVYFLGQSAQDLDLVKREHDSIRSNKGKEECLTSEDYKKMEYTQQVINEALRCGNIVKFVHRKALKDVKYKEYLIPSGWKVLPVFTAVHLNPSLHGDAQQFQPCRWEGTSQGTSKRFTPFGGGPRLCPGSELAKVETAFFLHHLVLNYRWRIDGDDIPMAYPYVEFQRGLPIEIEPTSPES

SEQ ID NO: 23731 - DNA, 1436 bp, Zea mays subsp. mays
  misc_feature (1)..(1436): Ceres Seq. ID no. 12414721
aaaccgttggataaagacgctgcaaactgaatagggagcaagacggttccggagtccggactcaagtcccccaaaaatcccaatcgaacccgtccgcctatcgccccaaaccctcgcccagctcgaggtcctcgccgccggccgccggccgccgtctccgtccgaccgccgccatggctcgcaacgaggagaaggcgcagtcaatgctgaaccgcttcatcacgatgaagcaggaggagaagcgcaagccccgagagcgccggccctacctcgcctccgagtgccgggacctcgccgacgccgagcgctggcgctctgagatcctccgcgagatcggcgccaaggtcgccgagatccagaacgagggtctcggcgagcaccgcctccgcgacctcaacgacgagatcaacaaactcctccgcgagcgcggccactgggagcgccgcatcgtcgagctcggcggccgcgactactcccgcagctccaacgcgccgctcatgaccgacctcgacggcaacatagtcgccgtccccaacccctcgggtcgcggaccggggtaccgctactttggcgcggccaggaagctccctggcgtgcgggagctcttcgacaagccgcctgagatgcggaagcgacgcacccgctacgagatccacaagcgcatcaacgccgggtactacggatactatgacgatgaggacggcgtgctagagcgccttgagggccctgccgagaagcgcatgcgggaggagattgtttcagagtggcaccgtgtggaacgggtgcggcgggaggccatgaagggggtgatgagcggtgaggtggctgcggctggagggcgcagcggggaggctgctagagaggttctgtttgagggggtggaggaggaggtcgaagaggagaggaagcgcgaggaagagaagagagagagggagaaaggcgaggaagttgggagggaattcgttgcacatgtgccgctacctgatgaaaaggagattgagcgcatggtattagagaggaagaagaaggagctgcttagcaagtatgccagcgattccctgctggttgagcaggaggaggccaaggagatgctcaatgtccgacgctagaagacgactggccaattgaagctttcattgtgagctcaagacgagcactgaggtacaagaaggaacatcttttgaagtgctggcaccggggggaccaaagacattgttatgtaaaagaaaacaggtttgcctgaaatcacattttatgtgtttaatcagacttgagcgagtgatactggtgcctgtgtgccctgaacgaaggctagacttgtggtattgatgtgcctgtgtgcactgtaacttaactcgtatcatgtacagccattggctgcaatgcactgatcattgatcccttaaaatttcagtgatatagcaaaatctgatcgt

SEQ ID NO: 23732 - protein, 311 aa, Zea mays subsp. mays
  misc_feature (1)..(311): Ceres Seq. ID no. 12414722
MARNEEKAQSMLNRFITMKQEEKRKPRERRPYLASECRDLADAERWRSEILREIGAKVAEIQNEGLGEHRLRDLNDEINKLLRERGHWERRIVELGGRDYSRSSNAPLMTDLDGNIVAVPNPSGRGPGYRYFGAARKLPGVRELFDKPPEMRKRRTRYEIHKRINAGYYGYYDDEDGVLERLEGPAEKRMREEIVSEWHRVERVRREAMKGVMSGEVAAAGGRSGEAAREVLFEGVEEEVEEERKREEEKREREKGEEVGREFVAHVPLPDEKEIERMVLERKKKELLSKYASDSLLVEQEEAKEMLNVRR

SEQ ID NO: 23733 - protein, 301 aa, Zea mays subsp. mays
  misc_feature (1)..(301): Ceres Seq. ID no. 12414723
MLNRFITMKQEEKRKPRERRPYLASECRDLADAERWRSEILREIGAKVAEIQNEGLGEHRLRDLNDEINKLLRERGHWERRIVELGGRDYSRSSNAPLMTDLDGNIVAVPNPSGRGPGYRYFGAARKLPGVRELFDKPPEMRKRRTRYEIHKRINAGYYGYYDDEDGVLERLEGPAEKRMREEIVSEWHRVERVRREAMKGVMSGEVAAAGGRSGEAAREVLFEGVEEEVEEERKREEEKREREKGEEVGREFVAHVPLPDEKEIERMVLERKKKELLSKYASDSLLVEQEEAKEMLNVRR

SEQ ID NO: 23734 - protein, 294 aa, Zea mays subsp. mays
  misc_feature (1)..(294): Ceres Seq. ID no. 12414724
MKQEEKRKPRERRPYLASECRDLADAERWRSEILREIGAKVAEIQNEGLGEHRLRDLNDEINKLLRERGHWERRIVELGGRDYSRSSNAPLMTDLDGNIVAVPNPSGRGPGYRYFGAARKLPGVRELFDKPPEMRKRRTRYEIHKRINAGYYGYYDDEDGVLERLEGPAEKRMREEIVSEWHRVERVRREAMKGVMSGEVAAAGGRSGEAAREVLFEGVEEEVEEERKREEEKREREKGEEVGREFVAHVPLPDEKEIERMVLERKKKELLSKYASDSLLVEQEEAKEMLNVRR

SEQ ID NO: 23735 - DNA, 1408 bp, Zea mays subsp. mays
  misc_feature (1)..(1408): Ceres Seq. ID no. 12414737
aacgacctgcctgccttgctcttgccctgtgagcagcggcgtgcgatcgatcgaggcagtcgtagtaataagccaacaaacaaaccggccggaacgccatgctggaggagtacaaaccgtgtgcggccatggtggtgacgcagtgcatctacgccgctctagcgctcttgtccaaggcggcgttcaccggcggcatgagccccctggtgttcgtcgtctacaggcaggccgtcgccaccattgtactcgtccccgtcgtcatcgcggccaacaggaagaagatgaaggagatgacgacgggccttggactgacgggcttctcgctggtcttcgtcgcctcccttgtcgggggcaacggtgaaccagtgcatgtactaccaaggggtgaatctgggctcgtcgtcgatggcaacggccatgaccaacttgatccccgccatcaccttcgtcatggcggcatcagtcggcctagagagggtggaggccaggaggccgaggagcctggccaagatcttcggcacggccgtctgcgtgagcggcgccatggccatggctttcttcaagggcccgaagctgctcggcgacggcccgaacgctctccagctcctcctccacgcgggcggcggcggcaggtgggtggccggcgcgctcttcctcgtgggcagcagctcctgctggtcgctctggctcatcctgcaggtgcccatctgcaagtcgtacgtggagccgctggctctgtcggcgtggatgtgcgtcctgtccacgctccagtccgcgctgctcgtctccttcctcctgccggaccccagcgcctggaggatccactcgctcttcgagctctcctgctgcgtcttctcgggcgtgttcgggtccggcgtcacgttctacctgcagtcgtggtgcatctccgtgaggggcccgctctactccgccatgttcaacccgctctgcaccgtgatcaccaccgtgttcgccgccgccgtcctccgcgaagagctgcacgtcggcagcttgctgggcgcgatcgccgtcatcgcggggctgtacgtggtgctgtggggcaaagcgggcgacgccaacaagggcggggtggagccagagcaccactcggacgatctggagaagacgtcatcagcgcggtcggatcccaattcgacggccggcgtcggcagtggcatcgccgagcccctcctggcgggcggcgatccaacggagaagtagatgggattttgctgctcttcaagtgttctgtgcgtgcgcgcgcggtgttttcagggtcggtatgctagtgctactgtaacagtgccgtcccagttttgtcatgtacactagtggcagcttcaaatgactccgtgctgccgatgtgtattatccgcacaattttgttaagcaacgcggcgtccccgtc

SEQ ID NO: 23736 - protein, 396 aa, Zea mays subsp. mays
  misc_feature (1)..(396): Ceres Seq. ID no. 12414738
MLEEYKPCAAMVVTQCIYAALALLSKAAFTGGMSPLVFVVYRQAVATIVLVPVVIAANRKKMKEMTTGLGLTGFSLVFVASLVGGNGEPVHVLPRGESGLVVDGNGHDQLDPRHHLRHGGISRPREGGGQEAEEPGQDLRHGRLRERRHGHGFLQGPEAARRRPERSPAPPPRGRRRQVGGRRALPRGQQLLLVALAHPAGAHLQVVRGAAGSVGVDVRPVHAPVRAARLLPPAGPQRLEDPLALRALLLRLLGRVRVRRHVLPAVVVHLREGPALLRHVQPALHRDHHRVRRRRPPRRAARRQLAGRDRRHRGAVRGAVGQSGRRQQGRGGARAPLGRSGEDVISAVGSQFDGRRRQWHRRAPPGGRRSNGEVDGILLLFKCSVRARAVFSGSVC

SEQ ID NO: 23737 - protein, 386 aa, Zea mays subsp. mays
  misc_feature (1)..(386): Ceres Seq. ID no. 12414739
MVVTQCIYAALALLSKAAFTGGMSPLVFVVYRQAVATIVLVPVVIAANRKKMKEMTTGLGLTGFSLVFVASLVGGNGEPVHVLPRGESGLVVDGNGHDQLDPRHHLRHGGISRPREGGGQEAEEPGQDLRHGRLRERRHGHGFLQGPEAARRRPERSPAPPPRGRRRQVGGRRALPRGQQLLLVALAHPAGAHLQVVRGAAGSVGVDVRPVHAPVRAARLLPPAGPQRLEDPLALRALLLRLLGRVRVRRHVLPAVVVHLREGPALLRHVQPALHRDHHRVRRRRPPRRAARRQLAGRDRRHRGAVRGAVGQSGRRQQGRGGARAPLGRSGEDVISAVGSQFDGRRRQWHRRAPPGGRRSNGEVDGILLLFKCSVRARAVFSGSVC

SEQ ID NO: 23738 - protein, 364 aa, Zea mays subsp. mays
  misc_feature (1)..(364): Ceres Seq. ID no. 12414740
MSPLVFVVYRQAVATIVLVPVVIAANRKKMKEMTTGLGLTGFSLVFVASLVGGNGEPVHVLPRGESGLVVDGNGHDQLDPRHHLRHGGISRPREGGGQEAEEPGQDLRHGRLRERRHGHGFLQGPEAARRRPERSPAPPPRGRRRQVGGRRALPRGQQLLLVALAHPAGAHLQVVRGAAGSVGVDVRPVHAPVRAARLLPPAGPQRLEDPLALRALLLRLLGRVRVRRHVLPAVVVHLREGPALLRHVQPALHRDHHRVRRRRPPRRAARRQLAGRDRRHRGAVRGAVGQSGRRQQGRGGARAPLGRSGEDVISAVGSQFDGRRRQWHRRAPPGGRRSNGEVDGILLLFKCSVRARAVFSGSVC

SEQ ID NO: 23739 - protein, 283 aa, Zea mays subsp. mays
  misc_feature (1)..(283): Ceres Seq. ID no. 12414741
MYYQGVNLGSSSMATAMTNLIPAITFVMAASVGLERVEARRPRSLAKIFGTAVCVSGAMAMAFFKGPKLLGDGPNALQLLLHAGGGGRWVAGALFLVGSSSCWSLWLILQVPICKSYVEPLALSAWMCVLSTLQSALLVSFLLPDPSAWRIHSLFELSCCVFSGVFGSGVTFYLQSWCISVRGPLYSAMFNPLCTVITTVFAAAVLREELHVGSLLGAIAVIAGLYVVLWGKAGDANKGGVEPEHHSDDLEKTSSARSDPNSTAGVGSGIAEPLLAGGDPTEK

SEQ ID NO: 23740 - DNA, 1426 bp, Zea mays subsp. mays
  misc_feature (1)..(1426): Ceres Seq. ID no. 12414746
atgacctatgcgtgtcactgcaggcggacctacaagctctttggaggagtagagacttccagccatcccttctacgctctccccgttcccgtgtcgtcctcccgacaaagagggagccgctagggtttagcggcttccgcttctgggcgagggcttacccgcgagggacggcgcgacgcggcggcacttgagctagggtttccctccgatcccgttcctttcccggcgaggcgatggacgaggcggcgattgacgacttgatccggcggctcctcgaggcccgcggcgggcgcaccccgcgcaacgcgcaggtgactgacgccgagatccggcgcctctgcgccaccgccaaggacgttttcctgctcccagcccaacctcctggagctcgaggcccccattaagatatgcggggatgtccatggccagtattcagacctccttcgattatttgagtatggtggctatccaccagatgcaaattatctgttcctgggtgactatgttgatcgggggaaacagagcatagaaacaatatgccttctcttggcgtacaagataaagtacccagaaaacttctttcttctcaggggaaaccatgaatgtgcctcgatcaaccggatatatgggttttttgatgagtgtaagaggagattcaatgtgcgtatctggaagatattcactgagtgttttaactgcctcccagtggctgcacttattgacgataagatcttttgcatgcatggggggttgtctcctgagctaaagaacatggatcaaatacgtaacatttctcctcctgtggatgttcctgacgttggtcttctatgtgatctgttatggtcggaccctgataaagagattgttgggtggggtgataatgacaggggtgtttcctacacctttggagctgacatagttgctgagtttcttcagaaacatgacctagatttgatctgcagggctcaccaggtcgtagaggatggctatgagtttttcgcaaatcgccagcttgtaacaatattctcagcaccgaactactgtggagagtttgacaatgctggtgcactgatgagcatcgatgactccctagtatgctcgttccagatactcaagccttctgaaaagaaaagaaaagcaggagctgagaacatgccaaagcccggtacacctcccaggaagataaaaataagtgttacccgcatttagccagattctcgttatcaaactggatttgagaagttgtgattaaatgctccccaaacttgttatggtaggttttttggtgagcttaacacggtgttaaactgtggagtgtggaccaccgtgcttatgtcttgctgatctgaagtcatgcaaatgtatcctggcgttttgccaaacaaaaaagatcatgctaacagaaacttctggattttttttattg

SEQ ID NO: 23741 - protein, 156 aa, Zea mays subsp. mays
  misc_feature (1)..(156): Ceres Seq. ID no. 12414747
MHGGLSPELKNMDQIRNISPPVDVPDVGLLCDLLWSDPDKEIVGWGDNDRGVSYTFGADIVAEFLQKHDLDLICRAHQVVEDGYEFFANRQLVTIFSAPNYCGEFDNAGALMSIDDSLVCSFQILKPSEKKRKAGAENMPKPGTPPRKIKISVTRI

SEQ ID NO: 23742 - protein, 145 aa, Zea mays subsp. mays
  misc_feature (1)..(145): Ceres Seq. ID no. 12414748
MDQIRNISPPVDVPDVGLLCDLLWSDPDKEIVGWGDNDRGVSYTFGADIVAEFLQKHDLDLICRAHQVVEDGYEFFANRQLVTIFSAPNYCGEFDNAGALMSIDDSLVCSFQILKPSEKKRKAGAENMPKPGTPPRKIKISVTRI

SEQ ID NO: 23743 - DNA, 1002 bp, Zea mays subsp. mays
  misc_feature (1)..(1002): Ceres Seq. ID no. 12414761
cgcacgggtgacagactgacaggtccgtccgcaaatctgcaacgttgcctcgtcacctctatcctccggtctctcaccgcctaacacggccgccatggccgccgcctccacctcccttccccttggcttctcctctcaccaccgcccaactcccagaatccggccgcagccccagtcccagtcgcaaccactgaaggcaaaaccccttaacccccttcgcttcagcctagccctcaccccggcgaccgcgaagccccgcctcgctgcgatgcccgacgatgtcgctgtcgccaacttcgtggagaaggactggtcgttcctcgagtccgcgggcgcaaacctccagcgcgctctcgcgtcgggggcgctctcgccggcgtcgcgggtgttggcattgacgcccacggcgtccttcgtgaggtcgctcctcgcgtcctcgccctgcgagctactggtggccgcgcatgagtcgatgtacgtgctggcaggggtcaaggaggcgcacgacgaggtgaggtgcttccacctcgagggtgggggcggcggcagaggcggcggcgtggtggaggccgtgccagagaggttcgacgacttcgatgttgtgttcgtgtgctacttccctggaatgggagtctccgcgggggcgctcctcaaatcgctggccaagaggtgctcaaaaggtgcaagagttgtcatgttcttagatcaaggcagacagaattttgagcaacaacggagagagcatcctgatgttgtaacttcggatttgcccagtatagccttcctggagaaggctgcatctgggaacaagtatgaaataacagagttcgttgacgagcctagcttttaccttgctgttttgcagtttcaaggatgatttgttccttttttgcaatatttgtgaagcaaattgtgactgtctgtaaatttgcaatatttgtgaagcaaattgtgactgtctgtaaattctgatggacgtagtttgtgggtggcttatgtcgt

SEQ ID NO: 23744 - protein, 260 aa, Zea mays subsp. mays
  misc_feature (1)..(260): Ceres Seq. ID no. 12414762
MAAASTSLPLGFSSHHRPTPRIRPQPQSQSQPLKAKPLNPLRFSLALTPATAKPRLAAMPDDVAVANFVEKDWSFLESAGANLQRALASGALSPASRVLALTPTASFVRSLLASSPCELLVAAHESMYVLAGVKEAHDEVRCFHLEGGGGGRGGGVVEAVPERFDDFDVVFVCYFPGMGVSAGALLKSLAKRCSKGARVVMFLDQGRQNFEQQRREHPDVVTSDLPSIAFLEKAASGNKYEITEFVDEPSFYLAVLQFQG

SEQ ID NO: 23745 - protein, 202 aa, Zea mays subsp. mays
  misc_feature (1)..(202): Ceres Seq. ID no. 12414763
MPDDVAVANFVEKDWSFLESAGANLQRALASGALSPASRVLALTPTASFVRSLLASSPCELLVAAHESMYVLAGVKEAHDEVRCFHLEGGGGGRGGGVVEAVPERFDDFDVVFVCYFPGMGVSAGALLKSLAKRCSKGARVVMFLDQGRQNFEQQRREHPDVVTSDLPSIAFLEKAASGNKYEITEFVDEPSFYLAVLQFQG

SEQ ID NO: 23746 - protein, 134 aa, Zea mays subsp. mays
  misc_feature (1)..(134): Ceres Seq. ID no. 12414764
MYVLAGVKEAHDEVRCFHLEGGGGGRGGGVVEAVPERFDDFDVVFVCYFPGMGVSAGALLKSLAKRCSKGARVVMFLDQGRQNFEQQRREHPDVVTSDLPSIAFLEKAASGNKYEITEFVDEPSFYLAVLQFQG

SEQ ID NO: 23747 - DNA, 861 bp, Zea mays subsp. mays
  misc_feature (1)..(861): Ceres Seq. ID no. 12414781
gcacgagaccattacctagaacatcctaatcgaaaaagctctgacttgtgtgttgtggctccttgcttgacactctactcttccagggattgaggccaggggcttcatatttggcccggcagtcgcattggctattggcgccaagttcatacctttgcgcaagcctaggaagctccccggcgaggtgatctccgagaaatacgttctcgagtacgggaccgattgcttagagatgcatgtcggagccatcgaacggcctggtgagcgcgtgctgatcaccgacgacttggtcgcgaccggagggacgctctgtgctgcaatcaggcttcttgaacgtgctgaagctgatgtggtcgagtgcgcatgcctcattggcctcccaaaattcaaggatttctacaagttgaatggaaagcccgtctacgtgctggttgagtcccgtgaatcagataaataagaacttatgggtcagaggaaagctgacggttcattccttgctgctgtgcttgagcagtggagggacatcgacaagccaaccatggggggtgcgtcagcgttactaaggctagctgctaagatcgacttggtgagaggagagattagaagtgatggggggggcgttagtcttgtaggctgagtagattttcagagtactgaagagcttgtagttctgccaggaacatgcttattagttgaagcaagagtgttgatggtccattgcttgttggattttgtggttttgatttgaagggcgcaaacatggctggatcagcttgacggaagaacttggacatcaataccttagcatcaaatactagggaagtaggaacctgctacttgtagcgtgttattcctatctcc

SEQ ID NO: 23748 - protein, 74 aa, Zea mays subsp. mays
  misc_feature (1)..(74): Ceres Seq. ID no. 12414782
MHVGAIERPGERVLITDDLVATGGTLCAAIRLLERAEADVVECACLIGLPKFKDFYKLNGKPVYVLVESRESDK

SEQ ID NO: 23749 - protein, 57 aa, Zea mays subsp. mays
  misc_feature (1)..(57): Ceres Seq. ID no. 12414783
MGQRKADGSFLAAVLEQWRDIDKPTMGGASALLRLAAKIDLVRGEIRSDGGGVSLVG

SEQ ID NO: 23750 - protein, 51 aa, Zea mays subsp. mays
  misc_feature (1)..(51): Ceres Seq. ID no. 12414784
MESPSTCWLSPVNQINKNLWVRGKLTVHSLLLCLSSGGTSTSQPWGVRQRY

SEQ ID NO: 23751 - DNA, 1174 bp, Zea mays subsp. mays
  misc_feature (1)..(1174): Ceres Seq. ID no. 12414814
gactctatcccgttcccttccgtccctcgtcacgctcacgaagcacgctgtcgtcttgcgggntctcgcccgtcgccccccgagccccgaaaccaaagccgagccgagagcccgagccccgccccggacctcatcttctcctcgtcggtttcacccctccaccacctccatggggtcgtcggaggccgacgaggaccagctcctcaagagcttcctcgcggaggtcagcgaggccgagcgggacaacgaagtgctgaggatacttggttgcttcaagttaaaccccttcgagcatcttaagttgtcttttgattcatcaccagatgaggtgaaaaagcaatataggaagttgtcattgctggtccatcctgataaatgcaagcatcctcaggcacaagaagcttttgcagctctggcgaaagcacaacagctcctgcttgatccacaggaaagaggctacattcttgaccaagttactgctgcaaaagaagaattgagggcaaaacggaaaaaggagctgaagaaagacagtgcgtccaagataaaatctcttgtagatgagggaaaatatgaagagcagtttgaacgatcggatggatttcagcagcaattaataattaaagtacgtgaaattttgaccgacaaagaatggcgtaggagaaaaatgcaaatgaggatatcagaggaagaaggaagacttaagaaggatgaggaggaaacaaaagagatgtggaagaggaagagagagcatgaagagaagtgggaggagaccagagacaagcgggtctccagctggagggatttcatgaagacaggaaagaagggacggaaaggtgaaatcaagcccccaaaactgaagactgaagatccgaacaaatcttatgtgcaaaggccagtaaagcgaaactgagtggaatgtcagcaatcaaagaacatccggtagcggcctttcatctcaccagattagagctgcaacccttcaatgttgtacttgtcctgaatgtggtaaggttcaattacgcccgctggggaaacagaacggaacagagcagattttacccgtattgctagctagagtgatttggtttgatgtactcatcatccgtctgaagattttactgggaaaaaaagtacaaacttttccgttggaaaagaacctaatgaagtgaatgtt

SEQ ID NO: 23752 - protein, 302 aa, Zea mays subsp. mays
  misc_feature (1)..(302): Ceres Seq. ID no. 12414815
  misc_feature (21)..(21): Xaa is any aa, unknown or other
TLSRSLPSLVTLTKHAVVLRXLARRPPSPETKAEPRARAPPRTSSSPRRFHPSTTSMGSSEADEDQLLKSFLAEVSEAERDNEVLRILGCFKLNPFEHLKLSFDSSPDEVKKQYRKLSLLVHPDKCKHPQAQEAFAALAKAQQLLLDPQERGYILDQVTAAKEELRAKRKKELKKDSASKIKSLVDEGKYEEQFERSDGFQQQLIIKVREILTDKEWRRRKMQMRISEEEGRLKKDEEETKEMWKRKREHEEKWEETRDKRVSSWRDFMKTGKKGRKGEIKPPKLKTEDPNKSYVQRPVKRN

SEQ ID NO: 23753 - protein, 246 aa, Zea mays subsp. mays
  misc_feature (1)..(246): Ceres Seq. ID no. 12414816
MGSSEADEDQLLKSFLAEVSEAERDNEVLRILGCFKLNPFEHLKLSFDSSPDEVKKQYRKLSLLVHPDKCKHPQAQEAFAALAKAQQLLLDPQERGYILDQVTAAKEELRAKRKKELKKDSASKIKSLVDEGKYEEQFERSDGFQQQLIIKVREILTDKEWRRRKMQMRISEEEGRLKKDEEETKEMWKRKREHEEKWEETRDKRVSSWRDFMKTGKKGRKGEIKPPKLKTEDPNKSYVQRPVKRN

SEQ ID NO: 23754 - DNA, 618 bp, Zea mays subsp. mays
  misc_feature (1)..(618): Ceres Seq. ID no. 12414840
cttcttattgtttgggagttatctccgttttgtctaccggtggggaagtatcagtgcaaaccatgtgggatttagcaattctgactcatcggagaatcatatgggtccaggccatcagcgaaatatgtctgactgcgacatggatgcaacattttactggatagggatggcatctatagctactattactgtactgttaccgactatcttgggcataactgcattgttcacaaagctaggattaatggtcgctggtggtattgtgctggcatcttttatgacatacgcagcggagcatcttgcaatctcagtcttcaacaagggtcaaaaatacaggaatgcgtcaagaactcgaagcttttgtttttaacgtttaagtaaaaaatccttgttgcattgtaggtagttttgtacacaaaaagaatgatgattcatttttaacacgtggccttcctgcccatggcccctttttttgtagcgctgatgtcacgccaacttgtggtaaataggtttccgacattgtttctgtagcacagttggcatgaagattacagacatgttttgggatcgtgacccgcttttactcgcttatattgatgtttatggtgagattgtcgt

SEQ ID NO: 23755 - protein, 122 aa, Zea mays subsp. mays
  misc_feature (1)..(122): Ceres Seq. ID no. 12414841
FLLFGSYLRFVYRWGSISANHVGFSNSDSSENHMGPGHQRNMSDCDMDATFYWIGMASIATITVLLPTILGITALFTKLGLMVAGGIVLASFMTYAAEHLAISVFNKGQKYRNASRTRSFCF

SEQ ID NO: 23756 - protein, 89 aa, Zea mays subsp. mays
  misc_feature (1)..(89): Ceres Seq. ID no. 12414842
MGPGHQRNMSDCDMDATFYWIGMASIATITVLLPTILGITALFTKLGLMVAGGIVLASFMTYAAEHLAISVFNKGQKYRNASRTRSFCF

SEQ ID NO: 23757 - protein, 81 aa, Zea mays subsp. mays
  misc_feature (1)..(81): Ceres Seq. ID no. 12414843
MSDCDMDATFYWIGMASIATITVLLPTILGITALFTKLGLMVAGGIVLASFMTYAAEHLAISVFNKGQKYRNASRTRSFCF

SEQ ID NO: 23758 - DNA, 921 bp, Zea mays subsp. mays
  misc_feature (1)..(921): Ceres Seq. ID no. 12414856
atttttagacgacacccctacccgacccgatcggcgggagagcacgagacgccagcgccatccatcgcggcaaaagccgagacgacccaggaatctcggcaccgtcgcccccctttctctctcgctcaaaagttgctgctggagccctctcccctctctccgaccaccaaccatggatgaggcgcaagttgtggagtcaaaggatggaaccatctcggttgcttctgcatttgctggttatcaggaagctgtgcaagacagggatcacaaattcttgacaaaagcagtggaagaagcatatcgaggagtcgattgcggtgacggaggtccattcggagcagttgtcgtctgtaatgacgaagtagtagtcagctgccataacatggttctgaagcacactgaccctactgcgcatgctgaagtaactgcaattagagaggcttgcaaaaagcttgggaaaattgagctctcagactgcgaaatttacgcgtcctgcgagccatgcccaatgtgctttagtgcagttcatctctcccgaatcaagaggctggtttatggggccaaggcagaggctgccatcgccattggatttgatgacttcattgcagatgctctgagaggcactgggttctaccagaaggccaacttggagatcaagaaagctgacggcaatggtgcattgatcgctgagcaagtctttgaaaagactaaagagaagttccagatgtactgatgctgagcagaagagagatctcagatttgtacaatgcttactcataaggacaagaaataatacagtgcccaaatgtccattgtttcgggaaaaaaatctcaattccactgttcaacattttgatgatgcctgaatttcttgttaacagacacaagattgttatttgctgtaaaatgtgcagttgatgg

SEQ ID NO: 23759 - protein, 243 aa, Zea mays subsp. mays
  misc_feature (1)..(243): Ceres Seq. ID no. 12414857
FLDDTPTRPDRRESTRRQRHPSRQKPRRPRNLGTVAPLSLSLKSCCWSPLPSLRPPTMDEAQVVESKDGTISVASAFAGYQEAVQDRDHKFLTKAVEEAYRGVDCGDGGPFGAVVVCNDEVVVSCHNMVLKHTDPTAHAEVTAIREACKKLGKIELSDCEIYASCEPCPMCFSAVHLSRIKRLVYGAKAEAAIAIGFDDFIADALRGTGFYQKANLEIKKADGNGALIAEQVFEKTKEKFQMY

SEQ ID NO: 23760 - protein, 186 aa, Zea mays subsp. mays
  misc_feature (1)..(186): Ceres Seq. ID no. 12414858
MDEAQVVESKDGTISVASAFAGYQEAVQDRDHKFLTKAVEEAYRGVDCGDGGPFGAVVVCNDEVVVSCHNMVLKHTDPTAHAEVTAIREACKKLGKIELSDCEIYASCEPCPMCFSAVHLSRIKRLVYGAKAEAAIAIGFDDFIADALRGTGFYQKANLEIKKADGNGALIAEQVFEKTKEKFQMY

SEQ ID NO: 23761 - DNA, 554 bp, Zea mays subsp. mays
  misc_feature (1)..(554): Ceres Seq. ID no. 12414961
gttgctttcgttgagatcttaattaccagcccccaacttcgcgtgcagaccgcgagagaatacaagctcgcggacctcactcccatggagtcgggttgctgccgcccgccagcagagtgcgggttcccagctctgaacgcgtcctatttcgatctgagctatcacccggcgagcgccaacgccgactgcaaactgtacaggaacgcgcgctctgtccggtgctacgactgcagctcttgcaaagctggtgtcgcgcagtacatgaagacggagtggcgagtggtggctatcttcaacgtgatattgttcgtcatcctgtcgttcgtgtacttcgttggctgctgcgcgcggcgaaacgctggaggaggcgacgcgaaaggccgtggcaggtgacgggatcacttcttcgaggtgaagtgaagcgcttggccatcctatgtggagttagttaagcttagtatcaacaccccccctgtaaaattgttccatcaaaatattcaaagttcctttgatgaagtaccaggacctgtcgctgcctagtaatactctgttgc

SEQ ID NO: 23762 - protein, 130 aa, Zea mays subsp. mays
  misc_feature (1)..(130): Ceres Seq. ID no. 12414962
VAFVEILITSPQLRVQTAREYKLADLTPMESGCCRPPAECGFPALNASYFDLSYHPASANADCKLYRNARSVRCYDCSSCKAGVAQYMKTEWRVVAIFNVILFVILSFVYFVGCCARRNAGGGDAKGRGR

SEQ ID NO: 23763 - protein, 102 aa, Zea mays subsp. mays
  misc_feature (1)..(102): Ceres Seq. ID no. 12414963
MESGCCRPPAECGFPALNASYFDLSYHPASANADCKLYRNARSVRCYDCSSCKAGVAQYMKTEWRVVAIFNVILFVILSFVYFVGCCARRNAGGGDAKGRGR

SEQ ID NO: 23764 - DNA, 1865 bp, Zea mays subsp. mays
  misc_feature (1)..(1865): Ceres Seq. ID no. 12415026
acgaaagctactagcaacatctggttccactctcgccggcatctcccccacccatccccaagtccagcacacacccgaagcgccgccgctagggtttggtccgacagccgcgaaacctagactttactgctccgacaggctgccattcactaatctagctagctccggttgggagctagggtttagctgagcttcgggtcgcggcggtgcggcatggcggggtacggggaagagaaccagaacaccatgagcgggtacgaggaagaggaggaagaagaggttgaagaagtcgaggaggtgtacgaggaggaggaggaggaggaggaggaggaggaggaggaggacggggagggggaagcggacgagggggctgtagcctccgagccagcggcgatggcggccgagacgagaagcgttgttggaggccggggcttagcgaaggccgttgggaatgttgataccggtggcgaggatgggagggatgcagattccagtggcggtgacgcctcggggaagattttcgtagggggtgtagcttgggagacaactgaagaaacattcacaaagcattttcagaagtatggagctataactgattctgtgatcatgaatgacaagcatactaggatgcctcgcggatttggatttgttacattttccgatccatctgtgcttgacagggttctagaggatgaacatgtcatagatggaagaacagttgaagtcaaaaggactgttccaaaagaggaaatgtcatcgaaagacggtcctaagacaaaaaagatctttgtgggtggtattccaccatctcttaccgaagataaattaaaggagcacttctcatcgtatgggaaggtggttgagcatcagattatgcttgaccatagcactggacgctcacgtggctttggatttgtcacatttgaaagcgaggatgctgttgaaagggttatgtcagaggggagaatcatgatcttggagggaaacaggttgaaattaagaaagctgaaccaaaaaaacctggtgtgggtgattcaagctcaaatggaagacacagtcgtggtggtggtcatcgtgattcataccgtggtagtggtggcaatggcttttctgggaacagcagtggtggtggctatggatacagtggtggctaccgatcaactgctgcagcacattatggcagcacagcatatggtgcctatggcagagggtatggatacggtggtactgctggctatggcttaggtatggctctgcatatggtggctccatgtatggaggtccatatggtgcctacgcggcatatggtggtgcctatggaggtgtgcatatggtgctccaggagggtatggcgcgggaggatatggcagctacggtggggctggaggcatgggtggtggtggcagcgctggtggtcggggctccagcagataccacccttatggaaaatgataatccattcactgcctttgccttcctctaggatctgataataaagctatacattcccaccgagaaaatggaacattccattcaccttgttgaatcagcggcatctgaacatttttttcctggaacaaagattctagtctgtagtcgctgaaccctgaactgcctcatcccacccccaccccctgagctttctgtagaaggtgcagctcaaattctcgtaggcatgagccttagaagacccttgaaactacaagctttgtggtaacaatatggtgtcatggaacatatgtattttgatgtaaaacattcgctcactgaccagtgacttcgccatctctgcttatgtatgtagagaagcttagcaaaggattggactgatactattgaattgtgtgggtttctatttgtctcct

SEQ ID NO: 23765 - protein, 343 aa, Zea mays subsp. mays
  misc_feature (1)..(343): Ceres Seq. ID no. 12415027
MAGYGEENQNTMSGYEEEEEEEVEEVEEVYEEEEEEEEEEEEEDGEGEADEGAVASEPAAMAAETRSVVGGRGLAKAVGNVDTGGEDGRDADSSGGDASGKIFVGGVAWETTEETFTKHFQKYGAITDSVIMNDKHTRMPRGFGFVTFSDPSVLDRVLEDEHVIDGRTVEVKRTVPKEEMSSKDGPKTKKIFVGGIPPSLTEDKLKEHFSSYGKVVEHQIMLDHSTGRSRGFGFVTFESEDAVERVMSEGRIMILEGNRLKLRKLNQKNLVWVIQAQMEDTVVVVVIVIHTVVVVAMAFLGTAVVVAMDTVVATDQLLQHIMAAQHMVPMAEGMDTVVLLAMA

SEQ ID NO: 23766 - protein, 332 aa, Zea mays subsp. mays
  misc_feature (1)..(332): Ceres Seq. ID no. 12415028
MSGYEEEEEEEVEEVEEVYEEEEEEEEEEEEEDGEGEADEGAVASEPAAMAAETRSVVGGRGLAKAVGNVDTGGEDGRDADSSGGDASGKIFVGGVAWETTEETFTKHFQKYGAITDSVIMNDKHTRMPRGFGFVTFSDPSVLDRVLEDEHVIDGRTVEVKRTVPKEEMSSKDGPKTKKIFVGGIPPSLTEDKLKEHFSSYGKVVEHQIMLDHSTGRSRGFGFVTFESEDAVERVMSEGRIMILEGNRLKLRKLNQKNLVWVIQAQMEDTVVVVVIVIHTVVVVAMAFLGTAVVVAMDTVVATDQLLQHIMAAQHMVPMAEGMDTVVLLAMA

SEQ ID NO: 23767 - protein, 283 aa, Zea mays subsp. mays
  misc_feature (1)..(283): Ceres Seq. ID no. 12415029
MAAETRSVVGGRGLAKAVGNVDTGGEDGRDADSSGGDASGKIFVGGVAWETTEETFTKHFQKYGAITDSVIMNDKHTRMPRGFGFVTFSDPSVLDRVLEDEHVIDGRTVEVKRTVPKEEMSSKDGPKTKKIFVGGIPPSLTEDKLKEHFSSYGKVVEHQIMLDHSTGRSRGFGFVTFESEDAVERVMSEGRIMILEGNRLKLRKLNQKNLVWVIQAQMEDTVVVVVIVIHTVVVVAMAFLGTAVVVAMDTVVATDQLLQHIMAAQHMVPMAEGMDTVVLLAMA

SEQ ID NO: 23768 - DNA, 1081 bp, Zea mays subsp. mays
  misc_feature (1)..(1081): Ceres Seq. ID no. 12415038
ccaattcaaacagtgaggcggaggcagaggcagacaacgccgccatgaacgccttcttcacgtccctggcgcgcgggctggacgacctgggccgtgcaggcgggctgtcgtcgctgccggctctgctgcgggcggcggcgcttctcagggggctgcactcgcagctcacgctcatggtcggccagctccacctgccgccgggcggccgctggctcgacgagtacatggacgagaccgcccgcctctgggacgcctgcctcgccgtcaaactcggccctcgcctccgtcgagcggtattgcgccgcggccctcctgcgccgccgcggcgctggatgactggctccaggatccctcccctctctccagtcgccaggtgatgcgggcgatctccgtgtcgaggagggaggccatggccgcggaggaggagaaccgcgcgctggcggacgcgaggatcgcgccgctctcgctgcagctggacgagcggcttctgctgcgcgcgacggacgcgaggcttacggttacgggcttcaacggcttccgggggctgctgcacgcgctccacaacgcgagctcgctcctcctgctcatcctcgccagcggcgccgtctcgtgcgccgccgcggccggcggcccgtgcggcgcggacgacgccggggccggcttcgtggcgtccatcgtgatgctgcagcagcggatggcggaggaggccgctgacgctgagtccgacgggcctggcgcgcccgggatcgggatgtgcgagttccggtgcgcgcgcgccgccgtggaggcggcgcgggaggaggtggagcgcgccgccgcggcggcggggcgcaagtgcgagggcggcggtgtcgtgaaggacaaggtggaggagctcaaggcgtggctgcatgtgctccggaccggcaccgatagcctggtgtgccagctggacgacttcntggacgacattgtagagggaaggaaggagctctccgacctgtgcagccattgatgtatcgatcacgcctcctgccctgcgcccctgcccccgatcgagcctcggagctccagtgccaggataaagattaccatcgtcatc

SEQ ID NO: 23769 - protein, 205 aa, Zea mays subsp. mays
  misc_feature (1)..(205): Ceres Seq. ID no. 12415039
  misc_feature (189)..(189): Xaa is any aa, unknown or other
MRAISVSRREAMAAEEENRALADARIAPLSLQLDERLLLRATDARLTVTGFNGFRGLLHALHNASSLLLLILASGAVSCAAAAGGPCGADDAGAGFVASIVMLQQRMAEEAADAESDGPGAPGIGMCEFRCARAAVEAAREEVERAAAAAGRKCEGGGVVKDKVEELKAWLHVLRTGTDSLVCQLDDFXDDIVEGRKELSDLCSH

SEQ ID NO: 23770 - protein, 194 aa, Zea mays subsp. mays
  misc_feature (1)..(194): Ceres Seq. ID no. 12415040
  misc_feature (178)..(178): Xaa is any aa, unknown or other
MAAEEENRALADARIAPLSLQLDERLLLRATDARLTVTGFNGFRGLLHALHNASSLLLLILASGAVSCAAAAGGPCGADDAGAGFVASIVMLQQRMAEEAADAESDGPGAPGIGMCEFRCARAAVEAAREEVERAAAAAGRKCEGGGVVKDKVEELKAWLHVLRTGTDSLVCQLDDFXDDIVEGRKELSDLCSH

SEQ ID NO: 23771 - protein, 124 aa, Zea mays subsp. mays
  misc_feature (1)..(124): Ceres Seq. ID no. 12415041
NSNSEAEAEADNAAMNAFFTSLARGLDDLGRAGGLSSLPALLRAAALLRGLHSQLTLMVGQLHLPPGGRWLDEYMDETARLWDACLAVKLGPRLRRAVLRRGPPAPPRRWMTGSRIPPLSPVAR

SEQ ID NO: 23772 - DNA, 1650 bp, Zea mays subsp. mays
  misc_feature (1)..(1650): Ceres Seq. ID no. 12415075
catcctaatcgaaaagttttaggtagtagctagacgtacgtacgtactcacacgacgatgacgaaggcgtggaggccgatgctggcgtcggccaccaagtgctgcgcggcggaggacgcggcggtggcccccgacggcctggcgcggtgccggccgcagcagtcggagctctcgcggcggctggcgtccttcaggcgcctgtcgtcgctggccaacagcccggcgtcggcggcgggcacggacaaggacggcggcagcgtcaagcaggccggggagatggcgggcccgctgcagctgcactccttcggcctaggcgagctccgcggcgtcacgcacgacttcgccagcagcttcctgctcggggagggcggcttcggcgccgtgtacaagggcttcgtggacgccggcatgcgcccgggcctcgccgcccagcccgtcgccgtcaagcagctcaacgccgcgggcttccagggccaccgggagtggctcgccgaggtcatcttcctgggccagttccgccactcgcacctcgtccgcctgctggggtactgctgcgaggacgaggagcgcctgctcgtctacgagttcatgccgcgcgggagcctcgagaaccacctcttcaggaggatctcggcgacgctaccgtggggcacccggctcaaggtggccatcggcgccgccaagggtctggccttcctccacgccgcgagcacgcccgtcatctacagggacttcaaggcctccaacatcctactcgactcggacttcaccgccaagctgtcggacttcgggctggccaagatggggcccgagggcgaggacacgcacgtgacgacgcgcgtgatgggcacccacggctacgcggcgccggagtacgtgcagacgggccacctgaacgtgaagagcgacgtgtacagcttcggcgtcgtgctcctggagctcctnacggggcggcgcgccatggagcacgtncgcgggcgcagcgcgcacgccgaccagcagctgaaggctcgtggactggacccgnccctacctcagcggcggcagccgccgnctgcgctgcatcatggaccagaggctggcgggccactactccgtcaagggcgcgcgcnccgtggcgcagctggccgtgcagtgcaccgcgcagcagccgcgggacaggccgcgcatggtggctgtcgtcgacgcgctcgacaagctgcaggggctcaaggacatggccgtcaccgtcggcctntggcccgccaccgcgcccgtcgccgggcggaacgccatctccgccaagatccgcgcggaggtcaagggcgccgccggcgcagggtcgcgccggaggagcgcgtcctccaagctgccttagtaatcttgacggctggaccacctgcgtgccacgtcgtacatgtctcctagctagctcgtgtgtaccccgggtgtaggaatcctcttgtgtgttttgtgccacgtcgtcggtgtgtgtatatagtacatactactgtaccgtctagtttaggcgcgttgagattggtgaggcagagagatgttcctccatgcactcactagtacgtacgatccatacctattgctcctggattcatgagatcgttaatagaggtgatgtaaaactttgcaaagtacacatgaatttgaattttg

SEQ ID NO: 23773 - protein, 449 aa, Zea mays subsp. mays
  misc_feature (1)..(449): Ceres Seq. ID no. 12415076
  misc_feature (296)..(296): Xaa is any aa, unknown or other
  misc_feature (305)..(305): Xaa is any aa, unknown or other
  misc_feature (324)..(324): Xaa is any aa, unknown or other
  misc_feature (333)..(333): Xaa is any aa, unknown or other
  misc_feature (352)..(352): Xaa is any aa, unknown or other
  misc_feature (394)..(394): Xaa is any aa, unknown or other
MTKAWRPMLASATKCCAAEDAAVAPDGLARCRPQQSELSRRLASFRRLSSLANSPASAAGTDKDGGSVKQAGEMAGPLQLHSFGLGELRGVTHDFASSFLLGEGGFGAVYKGFVDAGMRPGLAAQPVAVKQLNAAGFQGHREWLAEVIFLGQFRHSHLVRLLGYCCEDEERLLVYEFMPRGSLENHLFRRISATLPWGTRLKVAIGAAKGLAFLHAASTPVIYRDFKASNILLDSDFTAKLSDFGLAKMGPEGEDTHVTTRVMGTHGYAAPEYVQTGHLNVKSDVYSFGVVLLELXTGRRAMEHXRGRSAHADQQLKARGLDPXLPQRRQPPXALHHGPEAGGPLLRQGRAXRGAAGRAVHRAAAAGQAAHGGCRRRARQAAGAQGHGRHRRPXARHRARRRAERHLRQDPRGGQGRRRRRVAPEERVLQAALVILTAGPPACHVVHVS

SEQ ID NO: 23774 - protein, 442 aa, Zea mays subsp. mays
  misc_feature (1)..(442): Ceres Seq. ID no. 12415077
  misc_feature (289)..(289): Xaa is any aa, unknown or other
  misc_feature (298)..(298): Xaa is any aa, unknown or other
  misc_feature (317)..(317): Xaa is any aa, unknown or other
  misc_feature (326)..(326): Xaa is any aa, unknown or other
  misc_feature (345)..(345): Xaa is any aa, unknown or other
  misc_feature (387)..(387): Xaa is any aa, unknown or other
MLASATKCCAAEDAAVAPDGLARCRPQQSELSRRLASFRRLSSLANSPASAAGTDKDGGSVKQAGEMAGPLQLHSFGLGELRGVTHDFASSFLLGEGGFGAVYKGFVDAGMRPGLAAQPVAVKQLNAAGFQGHREWLAEVIFLGQFRHSHLVRLLGYCCEDEERLLVYEFMPRGSLENHLFRRISATLPWGTRLKVAIGAAKGLAFLHAASTPVIYRDFKASNILLDSDFTAKLSDFGLAKMGPEGEDTHVTTRVMGTHGYAAPEYVQTGHLNVKSDVYSFGVVLLELXTGRRAMEHXRGRSAHADQQLKARGLDPXLPQRRQPPXALHHGPEAGGPLLRQGRAXRGAAGRAVHRAAAAGQAAHGGCRRRARQAAGAQGHGRHRRPXARHRARRRAERHLRQDPRGGQGRRRRRVAPEERVLQAALVILTAGPPACHVVHVS

SEQ ID NO: 23775 - protein, 376 aa, Zea mays subsp. mays
  misc_feature (1)..(376): Ceres Seq. ID no. 12415078
  misc_feature (223)..(223): Xaa is any aa, unknown or other
  misc_feature (232)..(232): Xaa is any aa, unknown or other
  misc_feature (251)..(251): Xaa is any aa, unknown or other
  misc_feature (260)..(260): Xaa is any aa, unknown or other
  misc_feature (279)..(279): Xaa is any aa, unknown or other
  misc_feature (321)..(321): Xaa is any aa, unknown or other
MAGPLQLHSFGLGELRGVTHDFASSFLLGEGGFGAVYKGFVDAGMRPGLAAQPVAVKQLNAAGFQGHREWLAEVIFLGQFRHSHLVRLLGYCCEDEERLLVYEFMPRGSLENHLFRRISATLPWGTRLKVAIGAAKGLAFLHAASTPVIYRDFKASNILLDSDFTAKLSDFGLAKMGPEGEDTHVTTRVMGTHGYAAPEYVQTGHLNVKSDVYSFGVVLLELXTGRRAMEHXRGRSAHADQQLKARGLDPXLPQRRQPPXALHHGPEAGGPLLRQGRAXRGAAGRAVHRAAAAGQAAHGGCRRRARQAAGAQGHGRHRRPXARHRARRRAERHLRQDPRGGQGRRRRRVAPEERVLQAALVILTAGPPACHVVHVS

SEQ ID NO: 23776 - DNA, 1032 bp, Zea mays subsp. mays
  misc_feature (1)..(1032): Ceres Seq. ID no. 12415130
agctagctcgctgtggcaggctggcagcatgttccgatctgccgtggcagcgtctcgtcagggccagcgggaagagtacggccgacccagccgccgccgcgtccgctttcttcctcagtcgcttctccgcggcgggccgggccgccatcgccacagaggctggctggaaaggtagcgctgatcatcggcagggcaactggggcgccacgtcgccgcggagctgagcctgctgggggggcccggcccggcggcggccgtccactacacccgctgcgacgtgaccgacgaggcgcaggtcgcggcggcggtggacctggccgtggagctgcacggccgcctcgacgtgatgctcagcaacgccggcatcagcggcagcctggcgccggcccccgtggcggcgctggacctggccgacttcgaccgcgtcatggccgtgaacgcccgcgccgcggtggcgggcgtcaagcacgcggcgcgcgtcatggtgccccgccgcgccggcagcatcgtgtgcacggccagcgtggccggcgtgctgggcggcgtcgcgctgccgccctacagcgtgtccaaggccgccgtgctgggcctggtgcgcgccgtggccgggcagntcgcgcgntcgggcgtccgcgtcaacgccatntcgcccacctacatccccacgccgctcgtcatgggcgccatggccgagtggttccccggcgccaccgccgaggagcgcaggcggatcgtggagaaggacatgaacgagatggacggccccgtgctccaggtggaggacgtggccagcgccgccctgtacctggcgtccgatgagtccaagtgtgtcaatggccacaacctcgtcgtcgacggcggcttcacggtggggaaggcgcccaatatgccgccgcctggaaactactgagcagctaccacttgccaatctaaaggcacggtggatgactttctattgagcatttctttttcttttgcgattggaaaacttaggtaatatagttaaaagaactcgatcacgcgttttctttc

SEQ ID NO: 23777 - protein, 187 aa, Zea mays subsp. mays
  misc_feature (1)..(187): Ceres Seq. ID no. 12415131
  misc_feature (90)..(90): Xaa is any aa, unknown or other
  misc_feature (92)..(92): Xaa is any aa, unknown or other
  misc_feature (100)..(100): Xaa is any aa, unknown or other
MLSNAGISGSLAPAPVAALDLADFDRVMAVNARAAVAGVKHAARVMVPRRAGSIVCTASVAGVLGGVALPPYSVSKAAVLGLVRAVAGQXAXSGVRVNAXSPTYIPTPLVMGAMAEWFPGATAEERRRIVEKDMNEMDGPVLQVEDVASAALYLASDESKCVNGHNLVVDGGFTVGKAPNMPPPGNY

SEQ ID NO: 23778 - protein, 160 aa, Zea mays subsp. mays
  misc_feature (1)..(160): Ceres Seq. ID no. 12415132
  misc_feature (63)..(63): Xaa is any aa, unknown or other
  misc_feature (65)..(65): Xaa is any aa, unknown or other
  misc_feature (73)..(73): Xaa is any aa, unknown or other
MAVNARAAVAGVKHAARVMVPRRAGSIVCTASVAGVLGGVALPPYSVSKAAVLGLVRAVAGQXAXSGVRVNAXSPTYIPTPLVMGAMAEWFPGATAEERRRIVEKDMNEMDGPVLQVEDVASAALYLASDESKCVNGHNLVVDGGFTVGKAPNMPPPGNY

SEQ ID NO: 23779 - protein, 142 aa, Zea mays subsp. mays
  misc_feature (1)..(142): Ceres Seq. ID no. 12415133
  misc_feature (45)..(45): Xaa is any aa, unknown or other
  misc_feature (47)..(47): Xaa is any aa, unknown or other
  misc_feature (55)..(55): Xaa is any aa, unknown or other
MVPRRAGSIVCTASVAGVLGGVALPPYSVSKAAVLGLVRAVAGQXAXSGVRVNAXSPTYIPTPLVMGAMAEWFPGATAEERRRIVEKDMNEMDGPVLQVEDVASAALYLASDESKCVNGHNLVVDGGFTVGKAPNMPPPGNY

SEQ ID NO: 23780 - DNA, 1826 bp, Zea mays subsp. mays
  misc_feature (1)..(1826): Ceres Seq. ID no. 12415154
gactcagtcaatctcgccttgctctcctcttcgacccatcgtcggttcctgggatcagcatcgacgagcaggatttttccggctgtggaggattactgctgcttgacaaatccgagcgcaaaggttgcttcctgacgcgttcccccatggcacgagcaggagcacgagcacgagcacgagcaggagaaggcggctagaaggttcctgctcccgggcgtgacctctcacacggcatggtcgttgcttcgccggggaggcgcagcggggatggtcgataggagcagggccgtgctcatcggggtcaccgccggcgtcgcggccgcgctggtcgcggcggcgggcgtgcttctggccgtctggctctaccgccggcgggccagcgtcgccgcacggacgcgctccccggagtcgccctcggcgacgctgcgggccggcggcgccggtcgcgccagcctcgactccagcgtctccgtctcggtggtctccgagagcgccgccgactggggccacccgccaccgcacaaacgcgccgcgttctgggcctggagaggcggcgccggccacaacggcagggaggcgccaccgctgtccgtctccgggatcccaaaataccattacaaggatctgcagaaggctaccagcaactttaccacaattcttgggcaaggatcgttcggccctgtgtacaaagctgtaatggccactggtgaagtggtagctgtaaaggtgctcgcgagtgattcaaggcaaggggaaagaaagttccagactgaggtagcattgcttagcaggttgcatcataggaatcttgttaatttggttgggtattgtgtagaaaaaggtcagcgcattctgatttatgagtacatgagcaatgggagtttggcaagacttttatatggcgacaataaacgaagtttgagctggcaagaaaggctgcaaattgctcacgatgtttctcatgggattgagtacctgcatgaaggggctgttccttctgttattcacagggacctaaagtctgataatatacttttggaccattcaatgagagccaaggttgcagactttggtctatcaaaggaggaagtgtatgatggaaggaagtctggccttaagggcacctatggctatatggatcctgattacatgtccacaaataagctaacaaagaagagcgacgtgtatagctttggcataatactttttgaactgataactgccataaatccacaacaaggtctgatggagtacattaatctggcagcgattggaggggaggggagggttgattgggacgagatactggacaaggacctcctagtagggaacatccctgaagaggttcggatgcttgctgatgttgcctaccgatgcgttaacaagaatccgaggaagcgcccctggatatcagaggtcacacaggccatctcaagactcagacagcaccagctgataaagcatgatgcgataactctgccgaggagtgagaccaggaccgtccttaggaggatagactaccagcacgtggagcttagtgacctcactagcatcaaagaacttacgccgataagggcatcatgaactcgtgagcttgttctagtatgtaggttgctttatagagttagatttggacttggttcggcgatgttgtagctgtttgatgaaagcatcaggtagctagatcgttgaaagatgtcttggctgcaatgagagctctccttaattggagttctgtactgacctgaggtttgaaatcgttgtaaaaaaatcaacagtagtagctgtagcatttgataaaaaaagactttataaactgcattttt

SEQ ID NO: 23781 - protein, 438 aa, Zea mays subsp. mays
  misc_feature (1)..(438): Ceres Seq. ID no. 12415155
MVDRSRAVLIGVTAGVAAALVAAAGVLLAVWLYRRRASVAARTRSPESPSATLRAGGAGRASLDSSVSVSVVSESAADWGHPPPHKRAAFWAWRGGAGHNGREAPPLSVSGIPKYHYKDLQKATSNFTTILGQGSFGPVYKAVMATGEVVAVKVLASDSRQGERKFQTEVALLSRLHHRNLVNLVGYCVEKGQRILIYEYMSNGSLARLLYGDNKRSLSWQERLQIAHDVSHGIEYLHEGAVPSVIHRDLKSDNILLDHSMRAKVADFGLSKEEVYDGRKSGLKGTYGYMDPDYMSTNKLTKKSDVYSFGIILFELITAINPQQGLMEYINLAAIGGEGRVDWDEILDKDLLVGNIPEEVRMLADVAYRCVNKNPRKRPWISEVTQAISRLRQHQLIKHDAITLPRSETRTVLRRIDYQHVELSDLTSIKELTPIRAS

SEQ ID NO: 23782 - protein, 295 aa, Zea mays subsp. mays
  misc_feature (1)..(295): Ceres Seq. ID no. 12415156
MATGEVVAVKVLASDSRQGERKFQTEVALLSRLHHRNLVNLVGYCVEKGQRILIYEYMSNGSLARLLYGDNKRSLSWQERLQIAHDVSHGIEYLHEGAVPSVIHRDLKSDNILLDHSMRAKVADFGLSKEEVYDGRKSGLKGTYGYMDPDYMSTNKLTKKSDVYSFGIILFELITAINPQQGLMEYINLAAIGGEGRVDWDEILDKDLLVGNIPEEVRMLADVAYRCVNKNPRKRPWISEVTQAISRLRQHQLIKHDAITLPRSETRTVLRRIDYQHVELSDLTSIKELTPIRAS

SEQ ID NO: 23783 - protein, 238 aa, Zea mays subsp. mays
  misc_feature (1)..(238): Ceres Seq. ID no. 12415157
MSNGSLARLLYGDNKRSLSWQERLQIAHDVSHGIEYLHEGAVPSVIHRDLKSDNILLDHSMRAKVADFGLSKEEVYDGRKSGLKGTYGYMDPDYMSTNKLTKKSDVYSFGIILFELITAINPQQGLMEYINLAAIGGEGRVDWDEILDKDLLVGNIPEEVRMLADVAYRCVNKNPRKRPWISEVTQAISRLRQHQLIKHDAITLPRSETRTVLRRIDYQHVELSDLTSIKELTPIRAS

SEQ ID NO: 23784 - DNA, 1688 bp, Zea mays subsp. mays
  misc_feature (1)..(1688): Ceres Seq. ID no. 12415179
cccgcaccgcatcccattccgtgccaccgccgccgcgctgcgtctgcgtgcgtcgcccgcccgcccgcccgcagtgtccgcagccagagccagcgcacgcgctgctccgccgacgccgaagcctcgtccgcgagcgcgtggctaagcaagcactcgagtcgagctccctccagcggcgggcgcagtgcagccaggccgcgcgcgccgcagcatgaacggcgtcggcgacgcgcacgcggccgtggccgcggccgccatggtgcagcagacgctggggatgtcgctgccgatggcggcgttcgtgcccgagcattgcagcgccaataagctggccaggccgccggggctgccgccgctgccgcaggcgttcgtggcccagcagcgcggggacgtgtgcatggaggccgccgaccccgccgctggcccgcgcaaggcgcaccggcgctcccgcagcgacgtcccgttcggctacttcccgccggcgggccaccaccagctcccgccgcccaaggtggaggccggctggggcggccacctccccgccggcggcggcgacgacgacctgttcaacgcgtacctcaacctggaggggctggacgggctcaactcctccgacgaccgcctggacgacggggacagccgcggcagcagcatgaggaccaacggcgccgacagcagcgagaacgagtcggaggagtgcgccgccgacagccgcgccgggatccgcctctgcgccgccgctgccgacaggcgggaggggctcaagagggccgccgctgcgcccgtgccgcgccacgccaggagcctgtccatggacagcctcatcggcaagctcaacttctccgccggcgcgacgggcgccgccagcggcgtcattccggggcccaacaggttcagcctcgagttcggcagtgccgagttttcgccggtcgagatgaagaagatcatggccgacgagaagctggccgagatggcgctcgccgaccccaagcgcgtcaagagggtgctggccaacaggcagtcggcggcgcggtccaaggagcgcaagatgcgatacattggcgagctggagcacaaggtgcagatcctgcagacggaggccaccactctctccgcccagctcacgcttcttcagcgggactccgcggggatcgcgacgcagaacaacgagctcaagttccggctgcaggccatggagcagcaggcgcagctgcgtgacgcattgaatgaggcactgacagccgaggtccaacgcctgaagctcgcgaccgcagagctcggggattcttgctcgtccagcaacctagctcagcagatccaaatcagcgttcaggaccagatgtttcaactgcatcagcagcaggcaacgcctataccgttctaccagctgcagcaggcgcagcagaatggcgcagggaagaagcatgagccgacggaatgatctcagagctgccattatccaccgctgcgtgagcagggggaaaaaaggatcggtttcgatggactgaaagcatttcttttcctaactcattggttttaagtgtcgttaataagcaccgtgcatttttttttccaggtgatgaacctgctgcttgtacctgtttatttattctttggatgattcagttgcttgagttgccaaactgatcaaattgtagccggttaatattcttttatagttgtagtgc

SEQ ID NO: 23785 - protein, 409 aa, Zea mays subsp. mays
  misc_feature (1)..(409): Ceres Seq. ID no. 12415180
MNGVGDAHAAVAAAAMVQQTLGMSLPMAAFVPEHCSANKLARPPGLPPLPQAFVAQQRGDVCMEAADPAAGPRKAHRRSRSDVPFGYFPPAGHHQLPPPKVEAGWGGHLPAGGGDDDLFNAYLNLEGLDGLNSSDDRLDDGDSRGSSMRTNGADSSENESEECAADSRAGIRLCAAAADRREGLKRAAAAPVPRHARSLSMDSLIGKLNFSAGATGAASGVIPGPNRFSLEFGSAEFSPVEMKKIMADEKLAEMALADPKRVKRVLANRQSAARSKERKMRYIGELEHKVQILQTEATTLSAQLTLLQRDSAGIATQNNELKFRLQAMEQQAQLRDALNEALTAEVQRLKLATAELGDSCSSSNLAQQIQISVQDQMFQLHQQQATPIPFYQLQQAQQNGAGKKHEPTE

SEQ ID NO: 23786 - protein, 394 aa, Zea mays subsp. mays
  misc_feature (1)..(394): Ceres Seq. ID no. 12415181
MVQQTLGMSLPMAAFVPEHCSANKLARPPGLPPLPQAFVAQQRGDVCMEAADPAAGPRKAHRRSRSDVPFGYFPPAGHHQLPPPKVEAGWGGHLPAGGGDDDLFNAYLNLEGLDGLNSSDDRLDDGDSRGSSMRTNGADSSENESEECAADSRAGIRLCAAAADRREGLKRAAAAPVPRHARSLSMDSLIGKLNFSAGATGAASGVIPGPNRFSLEFGSAEFSPVEMKKIMADEKLAEMALADPKRVKRVLANRQSAARSKERKMRYIGELEHKVQILQTEATTLSAQLTLLQRDSAGIATQNNELKFRLQAMEQQAQLRDALNEALTAEVQRLKLATAELGDSCSSSNLAQQIQISVQDQMFQLHQQQATPIPFYQLQQAQQNGAGKKHEPTE

SEQ ID NO: 23787 - protein, 387 aa, Zea mays subsp. mays
  misc_feature (1)..(387): Ceres Seq. ID no. 12415182
MSLPMAAFVPEHCSANKLARPPGLPPLPQAFVAQQRGDVCMEAADPAAGPRKAHRRSRSDVPFGYFPPAGHHQLPPPKVEAGWGGHLPAGGGDDDLFNAYLNLEGLDGLNSSDDRLDDGDSRGSSMRTNGADSSENESEECAADSRAGIRLCAAAADRREGLKRAAAAPVPRHARSLSMDSLIGKLNFSAGATGAASGVIPGPNRFSLEFGSAEFSPVEMKKIMADEKLAEMALADPKRVKRVLANRQSAARSKERKMRYIGELEHKVQILQTEATTLSAQLTLLQRDSAGIATQNNELKFRLQAMEQQAQLRDALNEALTAEVQRLKLATAELGDSCSSSNLAQQIQISVQDQMFQLHQQQATPIPFYQLQQAQQNGAGKKHEPTE

SEQ ID NO: 23788 - DNA, 1296 bp, Zea mays subsp. mays
  misc_feature (1)..(1296): Ceres Seq. ID no. 12415205
tacgccaagcgcgcaattaaccctcactaaagggaacaaaagctggagctccaccgcggtggcggccgctctagaactagtggatcccccgggctgcaggaattcgcacgagaccattacctagaacatcctaatcaaaaactagtgtgcagaaacatggcgcgaagcagcagcccagctaggatggccatgttgctgctcttgctctcggccctcgcagtgctcttcccacccgccgtggccgacgacctgctctccgtggacttccacgccgcgtcgtgcccgcagctggaccgcatcgtgcgcaccgccgtgcaggccgccctccggagggagatcgcgctcgccgcgggcctcctccgcatcttcttccacgactgcttcccgcagggctgcgacgcgtccgtgctcctcaagggcaacgccacggagcagaccatggggcccaacaccacgctgcagccgcgggcgctgcagctcatcgacgacatccgcgccaaggtgcacgccgcctgcgggcccaccgtgtcctgcgccgacgtcacggcgctcgccacccgcgccgccgtcgtcgcgtcggggggaccctcctaccccgtgcccctgggccagcgcgacagcctcgccccggcgcccgaggacgacgtcaacgcgctcccgtcgcccaccaccgccagcgtcccggagctcctggcggcgttccggggcaggggcatccgcgacgtggccgacctggtcgcgctctccggtgctcacaccgtcgggagggccatctgccccttcttccaggaccgcgccgacagccaggaggatgacttcgccaggcagctcaaggccgactgcgccagggaccccaaccggctgcagcagctggacgtcgtcacgcccgatgccttcgacaacgtctactacaagaacctcaacgccagccggggcgtcttcacgtccgacatggcgctcatcagggaccctacaacggcgccgatcgtcaggtgcttcgcggggagcaaggacgccttcttcgcccagttcgccacctccatggtcaagctcagcaaggtgcccaggaagccccccgggaacgtcggcgagatccgccgccgcagctgcttcaggaccaataacgccaagatgagcatccttgacgtcgacgatgccgtgggcagcttggcggcggcgtctgcccgttgaccaacaccaactattatattacctgctggctgtggctgctgtacgcctgtactgtactaggcgtcgtcggcgccttacgtgtatgtcctgtacgactgttatctt

SEQ ID NO: 23789 - protein, 344 aa, Zea mays subsp. mays
  misc_feature (1)..(344): Ceres Seq. ID no. 12415206
MARSSSPARMAMLLLLLSALAVLFPPAVADDLLSVDFHAASCPQLDRIVRTAVQAALRREIALAAGLLRIFFHDCFPQGCDASVLLKGNATEQTMGPNTTLQPRALQLIDDIRAKVHAACGPTVSCADVTALATRAAVVASGGPSYPVPLGQRDSLAPAPEDDVNALPSPTTASVPELLAAFRGRGIRDVADLVALSGAHTVGRAICPFFQDRADSQEDDFARQLKADCARDPNRLQQLDVVTPDAFDNVYYKNLNASRGVFTSDMALIRDPTTAPIVRCFAGSKDAFFAQFATSMVKLSKVPRKPPGNVGEIRRRSCFRTNNAKMSILDVDDAVGSLAAASAR

SEQ ID NO: 23790 - protein, 335 aa, Zea mays subsp. mays
  misc_feature (1)..(335): Ceres Seq. ID no. 12415207
MAMLLLLLSALAVLFPPAVADDLLSVDFHAASCPQLDRIVRTAVQAALRREIALAAGLLRIFFHDCFPQGCDASVLLKGNATEQTMGPNTTLQPRALQLIDDIRAKVHAACGPTVSCADVTALATRAAVVASGGPSYPVPLGQRDSLAPAPEDDVNALPSPTTASVPELLAAFRGRGIRDVADLVALSGAHTVGRAICPFFQDRADSQEDDFARQLKADCARDPNRLQQLDVVTPDAFDNVYYKNLNASRGVFTSDMALIRDPTTAPIVRCFAGSKDAFFAQFATSMVKLSKVPRKPPGNVGEIRRRSCFRTNNAKMSILDVDDAVGSLAAASAR

SEQ ID NO: 23791 - protein, 333 aa, Zea mays subsp. mays
  misc_feature (1)..(333): Ceres Seq. ID no. 12415208
MLLLLLSALAVLFPPAVADDLLSVDFHAASCPQLDRIVRTAVQAALRREIALAAGLLRIFFHDCFPQGCDASVLLKGNATEQTMGPNTTLQPRALQLIDDIRAKVHAACGPTVSCADVTALATRAAVVASGGPSYPVPLGQRDSLAPAPEDDVNALPSPTTASVPELLAAFRGRGIRDVADLVALSGAHTVGRAICPFFQDRADSQEDDFARQLKADCARDPNRLQQLDVVTPDAFDNVYYKNLNASRGVFTSDMALIRDPTTAPIVRCFAGSKDAFFAQFATSMVKLSKVPRKPPGNVGEIRRRSCFRTNNAKMSILDVDDAVGSLAAASAR

SEQ ID NO: 23792 - DNA, 1538 bp, Zea mays subsp. mays
  misc_feature (1)..(1538): Ceres Seq. ID no. 12415228
cgagaccattacctagaacatcctaatcgaaaaaagcagcccaaagcctcaaacccaatgcgaggcccttgggccagcagcgccttatcacttcgcctccgtctccgtggcgcgcgcgctcgcacgaacacgagtcccatgtcgtccaccgcagcgcgcgtcgtccacccggctgccgcggcgccgccgcctccccgcccacgccgcctggcgcccgcgaggtgcgcggctggatccgcgacggacacggccaccgcgggtccgacaagggtgacgaccgtcagcaaccgcggggactccttggcgatatgccgggtgctcaacggcatgtggcagaccagcggagggtggggccgcatagaccgcgacgccgcggttgacgccatgctcgcgcacgccgacgccggactctccaccttcgatatggctgaccactatgggccagcagaggatttgtatggcatgttcatcaacagaattaggagggagcgcccacctgagtttcttgaagaagtcaaggggcttacaaagtgggtaccacccccggttaagatgacaagaagttatgttgaggataatatcaacagatccaggaagaggatggatgttactgcattggacatgttgcagttccactggtgggagtactcaaatccaggctacttggatgcgctaaagcacatcacagacctgaaggaggaaggcaagataaagactgtggccctaacaaacttcgatacagacagactgcaaataattctcgaaaatggaatcccagttgtgagcaaccaggttcaacattctatcgttgatatgcgccctcagcagagaatggcagagctttgccagctaactggagttagacttataacgtatggcacagtgatgggtggtcttttgtctgaaaagtttctcgacaccaatgtatcaataccttttgctggtcctcctctaaataccccatccttgcagaaatataagaggatggttgatgcttggggtggctggagcctgttccagactttgcttcaaaccttaaagaaggtgtcactgaaacacggtgttactatttcaacggttgctgtgaaatacatactgaaccagacgtctgttgcaggttccatggtcggtgtgagattgggactctctgaacacatcaaagacaccaacgccatattctcacttgaattggatgaagaggacatgaacatcatcactgaagtgtcgaagaggggcagaaatttgatcgatattattggggattgtggtgacgagtaccgagcttagttggccatgctgctgctgggctactacagacctatatactcgtgcccaattttgcncagctctaaatttttgcctatttgggtctagcggctcagcgcactgttgaggcaaccatatacctgaatgcctattattcaggcgctagcatgtaccctccagtcctcaacagccagttataaaactgtaaatacacagcgatgcagatcgctaatgtggtaacttgttcagtcctttttagcgattactgtccc

SEQ ID NO: 23793 - protein, 428 aa, Zea mays subsp. mays
  misc_feature (1)..(428): Ceres Seq. ID no. 12415229
RDHYLEHPNRKKQPKASNPMRGPWASSALSLRLRLRGARARTNTSPMSSTAARVVHPAAAAPPPPRPRRLAPARCAAGSATDTATAGPTRVTTVSNRGDSLAICRVLNGMWQTSGGWGRIDRDAAVDAMLAHADAGLSTFDMADHYGPAEDLYGMFINRIRRERPPEFLEEVKGLTKWVPPPVKMTRSYVEDNINRSRKRMDVTALDMLQFHWWEYSNPGYLDALKHITDLKEEGKIKTVALTNFDTDRLQIILENGIPVVSNQVQHSIVDMRPQQRMAELCQLTGVRLITYGTVMGGLLSEKFLDTNVSIPFAGPPLNTPSLQKYKRMVDAWGGWSLFQTLLQTLKKVSLKHGVTISTVAVKYILNQTSVAGSMVGVRLGLSEHIKDTNAIFSLELDEEDMNIITEVSKRGRNLIDIIGDCGDEYRA

SEQ ID NO: 23794 - protein, 409 aa, Zea mays subsp. mays
  misc_feature (1)..(409): Ceres Seq. ID no. 12415230
MRGPWASSALSLRLRLRGARARTNTSPMSSTAARVVHPAAAAPPPPRPRRLAPARCAAGSATDTATAGPTRVTTVSNRGDSLAICRVLNGMWQTSGGWGRIDRDAAVDAMLAHADAGLSTFDMADHYGPAEDLYGMFINRIRRERPPEFLEEVKGLTKWVPPPVKMTRSYVEDNINRSRKRMDVTALDMLQFHWWEYSNPGYLDALKHITDLKEEGKIKTVALTNFDTDRLQIILENGIPVVSNQVQHSIVDMRPQQRMAELCQLTGVRLITYGTVMGGLLSEKFLDTNVSIPFAGPPLNTPSLQKYKRMVDAWGGWSLFQTLLQTLKKVSLKHGVTISTVAVKYILNQTSVAGSMVGVRLGLSEHIKDTNAIFSLELDEEDMNIITEVSKRGRNLIDIIGDCGDEYRA

SEQ ID NO: 23795 - protein, 382 aa, Zea mays subsp. mays
  misc_feature (1)..(382): Ceres Seq. ID no. 12415231
MSSTAARVVHPAAAAPPPPRPRRLAPARCAAGSATDTATAGPTRVTTVSNRGDSLAICRVLNGMWQTSGGWGRIDRDAAVDAMLAHADAGLSTFDMADHYGPAEDLYGMFINRIRRERPPEFLEEVKGLTKWVPPPVKMTRSYVEDNINRSRKRMDVTALDMLQFHWWEYSNPGYLDALKHITDLKEEGKIKTVALTNFDTDRLQIILENGIPVVSNQVQHSIVDMRPQQRMAELCQLTGVRLITYGTVMGGLLSEKFLDTNVSIPFAGPPLNTPSLQKYKRMVDAWGGWSLFQTLLQTLKKVSLKHGVTISTVAVKYILNQTSVAGSMVGVRLGLSEHIKDTNAIFSLELDEEDMNIITEVSKRGRNLIDIIGDCGDEYRA

SEQ ID NO: 23796 - DNA, 1211 bp, Zea mays subsp. mays
  misc_feature (1)..(1211): Ceres Seq. ID no. 12415232
gcacgagaccattacctagaacatcctaatcgaaaaagggtgccgtgcgagtacaagcacaggaacctgtcggtgagggtgcaggagaagaggcgctccccggggggccctggcgacctcgccatcaggtttctctaccagggcggccagaccgacatcgtcgccgtcgacgtcgcgcaggtgggctcgtccaactggaagtccatgacgcgccacagcggcgggccggcgtggagcacgaggcaggcgccggcggggccgctccagctcagggtggtggtgacgggcggctacgacggcaagtgggtgtgggcggagcgcgaggtgctgccgcggcggcggcgcgccggcgaggtctacgacacgggcgtccagatcaccgacgtcgccccaacccgcagggctccttccactacggcgccatcccgacttccaggacgctggtgctggccagctccgcttccctcgacggcgccggccgtaggcgctgcgcctgtcaacgcagtgtccttcgtcgtgcccgacacgccgctcaagctcgccgacagatacgacatcgccggcgtcatcgactgggacggcctccccgcgcggctcgacggcgccgcggcggtgccgcgcgccgggacgcccgtgctcaggctcggcctgcacgagttcgtggaggtggtgttccagaacacggaggaggagctgcagtcgtggcacctcgatggatacgacttctgggttgtagggtacggcgatggccagtggaatgagacgcagcggcagacgtacaacttggtggacgcgcaggcaagacacaccgttcaggtgtaccccaacgggtggtcggcgatcctggtgtcgctggacaaccaggggatgtggaacctgcggtcggcgatgtgggaccggcattacctcgggcagcagctctacctcagggtgtggacgccggagcagagcctctccaacgagtacgccatccccgccaacgccatcctctgcgggaaggccgccgccctcccacactgacacgacgacgttcagcagccatactactgcctgctccattcgaccaaccaagtgaaagaagaagaggagaatctatttttgttgctgcaagaattaatgtgaaaaaaaacacaattactgccactggtatacgtatctcctaactcctaattgtccagcaacagttacagcgtttttttatgcaannctgc

SEQ ID NO: 23797 - protein, 339 aa, Zea mays subsp. mays
  misc_feature (1)..(339): Ceres Seq. ID no. 12415233
ARDHYLEHPNRKRVPCEYKHRNLSVRVQEKRRSPGGPGDLAIRFLYQGGQTDIVAVDVAQVGSSNWKSMTRHSGGPAWSTRQAPAGPLQLRVVVTGGYDGKWVWAEREVLPRRRRAGEVYDTGVQITDVAPTRRAPSTTAPSRLPGRWCWPAPLPSTAPAVGAAPVNAVSFVVPDTPLKLADRYDIAGVIDWDGLPARLDGAAAVPRAGTPVLRLGLHEFVEVVFQNTEEELQSWHLDGYDFWVVGYGDGQWNETQRQTYNLVDAQARHTVQVYPNGWSAILVSLDNQGMWNLRSAMWDRHYLGQQLYLRVWTPEQSLSNEYAIPANAILCGKAAALPH

SEQ ID NO: 23798 - protein, 271 aa, Zea mays subsp. mays
  misc_feature (1)..(271): Ceres Seq. ID no. 12415234
MTRHSGGPAWSTRQAPAGPLQLRVVVTGGYDGKWVWAEREVLPRRRRAGEVYDTGVQITDVAPTRRAPSTTAPSRLPGRWCWPAPLPSTAPAVGAAPVNAVSFVVPDTPLKLADRYDIAGVIDWDGLPARLDGAAAVPRAGTPVLRLGLHEFVEVVFQNTEEELQSWHLDGYDFWVVGYGDGQWNETQRQTYNLVDAQARHTVQVYPNGWSAILVSLDNQGMWNLRSAMWDRHYLGQQLYLRVWTPEQSLSNEYAIPANAILCGKAAALPH

SEQ ID NO: 23799 - DNA, 1409 bp, Zea mays subsp. mays
  misc_feature (1)..(1409): Ceres Seq. ID no. 12415269
gcacgagaccattacctagaacatcctaatcgaaaagtttacaccgagggttctctctttgtctgttcactgttctactgggacgaccccaaatccccaaatcgaaaggggccgtccggctcagggtttctcgacggctccttgccctctccgccatggacgcacagcgagccctccttgacgagctcatgggcacagctcgcaacctaacggaggaggagaagaaggggcacaaagagctgaagtgggacgatccggacgtgtgcggcccttacatggttcgattctgtcctcacgaccttttcgtcaacaccaagagcaatatcgggccgtgctcgaggatccacgatccgaagctcaaggaaagctttgagaagtctcctaggcacgatacttatatgcaaaggtttgaggcagagcttgcacaacaatgtgagaaattggtaatggacttagatagaaagataaggcgtggtcgagaaaggctggctcacgattctgctgtgccaatgccaatccctggaaattagctgagctgctttcagtgcgaaaagaacaggtgaagaagctgctggatcaaattgaggagcttggtgaggctggtaaagtggatgaagctgaggcacttatgagaagggttgacattttaaacgctgagaagacagctttagctaacgaagcagacaacaaagtagctatgcttgagaagaagatggaactttgtgaaacatgtggatcattcttagttgctgatgatgctcttgagagaacgcagtcccatgtgactgggaaacaacacattggttatggcatggttagggatttcctggcagaatacaaggcagcaaaagagaagacaaaagaggaagagcggcttgcaagggagcagaaagcagaggagcatcggaaacagaggggaaaagagtatgatagtgggggcagggatagagataccagaagggagaggtctggggagcgtgactttgaccgtgatcgtcagtatgagcgaagcagaggaagagatagggtttatgattacagggacagaggatcagaacaccgaagcaatcgctacagaaatgggagggattctgaaagaggtggacacagatacaggagtggtggtatgacaaatgaccgagggagaatgaggagcagatcacgttctccaaccaggcatggctatggaagatctagaagtccagatcattagctgcctagctggacatttagatagttttattcacagttgggactcatgaggtagacagttcccttctgctatttattactgtacaatgggttttattgaagtgtcgcacttttttaagtctctgatctgttgtaacagctctgttggaaccctacagtctccctattttgcatggggaaaaattcccaggtcggtg

SEQ ID NO: 23800 - protein, 194 aa, Zea mays subsp. mays
  misc_feature (1)..(194): Ceres Seq. ID no. 12415270
MRRVDILNAEKTALANEADNKVAMLEKKMELCETCGSFLVADDALERTQSHVTGKQHIGYGMVRDFLAEYKAAKEKTKEEERLAREQKAEEHRKQRGKEYDSGGRDRDTRRERSGERDFDRDRQYERSRGRDRVYDYRDRGSEHRSNRYRNGRDSERGGHRYRSGGMTNDRGRMRSRSRSPTRHGYGRSRSPDH

SEQ ID NO: 23801 - protein, 171 aa, Zea mays subsp. mays
  misc_feature (1)..(171): Ceres Seq. ID no. 12415271
MLEKKMELCETCGSFLVADDALERTQSHVTGKQHIGYGMVRDFLAEYKAAKEKTKEEERLAREQKAEEHRKQRGKEYDSGGRDRDTRRERSGERDFDRDRQYERSRGRDRVYDYRDRGSEHRSNRYRNGRDSERGGHRYRSGGMTNDRGRMRSRSRSPTRHGYGRSRSPDH

SEQ ID NO: 23802 - protein, 166 aa, Zea mays subsp. mays
  misc_feature (1)..(166): Ceres Seq. ID no. 12415272
MELCETCGSFLVADDALERTQSHVTGKQHIGYGMVRDFLAEYKAAKEKTKEEERLAREQKAEEHRKQRGKEYDSGGRDRDTRRERSGERDFDRDRQYERSRGRDRVYDYRDRGSEHRSNRYRNGRDSERGGHRYRSGGMTNDRGRMRSRSRSPTRHGYGRSRSPDH

SEQ ID NO: 23803 - DNA, 918 bp, Zea mays subsp. mays
  misc_feature (1)..(918): Ceres Seq. ID no. 12415286
aactagtggatcccccgggctgcaggaattcgcacgagaccattacctagaacatcctaatcgaaaaagtgaggagccccaaatccacttcaacgatggaggaaagcctgtgcgccgtggagaagcgcgggcgggtgcacgtcatcagccctcaccggcgcgggggagcaccgcctcagcccggccctgctctccgccctccgctccgcggtcgcagccgcccgccgcgcctcccccggtgcgctcgtcctggccggcgagggcaagttcttcagcaacggctacgacctcgcgtgggcgcgcgcggggccggccccggcgccggagcaccgcctctccacgatgcgcgccgcgttccgcggcctcgtcgccgacctgctcgcgctccccgtgccaacggtcgcggccgtcacgggccacgcagcgggcgctggctgcgcgctcgcgctggcgcacgacgccgtcgccatgcgcgcctcccgcgggttcctctacattagcgaggtcgacgccgggatcaagatcgtcgattttgtcggcgagctggttcggcagaaggtccccgacgcggccgctaggagggacctggtgatgaagggggagaagatgacggccgcgcaggccgcgcgccgaggcatcgtggatgcggccgtggacggcggcgtggaggacgtcgtggccgcggcggtcgccatggctgaggagctcgctgccagagactgggacggagagaacctggccgccatcaggaaggacgcatggccggttttgtggagcaaggtcaaggactacggctgcgatgtgccggccaggccgcgtctgtaacggcctgcttgcgaatttcggtcgtttctgtgacttgccatttggtcgttatcaacaatctgaaagcaatgatccttggccttgggaatgtgc

SEQ ID NO: 23804 - protein, 196 aa, Zea mays subsp. mays
  misc_feature (1)..(196): Ceres Seq. ID no. 12415287
TSGSPGLQEFARDHYLEHPNRKSEEPQIHFNDGGKPVRRGEARAGARHQPSPARGSTASARPCSPPSAPRSQPPAAPPPVRSSWPARASSSATATTSRGRARGRPRRRSTASPRCAPRSAASSPTCSRSPCQRSRPSRATQRALAARSRWRTTPSPCAPPAGSSTLARSTPGSRSSILSASWFGRRSPTRPLGGTW

SEQ ID NO: 23805 - protein, 160 aa, Zea mays subsp. mays
  misc_feature (1)..(160): Ceres Seq. ID no. 12415288
MRAAFRGLVADLLALPVPTVAAVTGHAAGAGCALALAHDAVAMRASRGFLYISEVDAGIKIVDFVGELVRQKVPDAAARRDLVMKGEKMTAAQAARRGIVDAAVDGGVEDVVAAAVAMAEELAARDWDGENLAAIRKDAWPVLWSKVKDYGCDVPARPRL

SEQ ID NO: 23806 - protein, 134 aa, Zea mays subsp. mays
  misc_feature (1)..(134): Ceres Seq. ID no. 12415289
MEESLCAVEKRGRVHVISPHRRGGAPPQPGPALRPPLRGRSRPPRLPRCARPGRRGQVLQQRLRPRVGARGAGPGAGAPPLHDARRVPRPRRRPARAPRANGRGRHGPRSGRWLRARAGARRRRHARLPRVPLH

SEQ ID NO: 23807 - DNA, 1345 bp, Zea mays subsp. mays
  misc_feature (1)..(1345): Ceres Seq. ID no. 12415368
gcacgagaccattacctagaacatcctaatcgaaaaagaatccagatccagcgcccgcatctctctctctcgcgcgcgcgcgcgagcgcgatgagctgccgcgacgggcgatcgtgctagcggtaacagcgagcggtgcgcgagggcggagtgggagtgtggatccgaggggcggcaaatctggcaggcgccgcggtggggctgcgggcgcgggggagggcggggggctgggcggacggcggggagggaggggaggactgcggtaggctcaggccctggcgcaggaggctgctcgcgtccatggcgctctcgtggtcctcggccctccgcctcgccgtcgccgccgtcctgctcgtcgccgtcgtcgtcgcgctcttcactctccccatcgagaagattttgaaggactttctggtttggatcaaggagaatttgggtccatggggtcctttggtgttggccctcgcttacatccctctgacagtcttagctgttccagcatcaattcttacacttggagggggctatctatttggcttgccagtggggtttgttgctgattccattggagcagcaattggtgcgactgctgcatttctgcttggcaggacgattgggaggtcttatgttctctccaaatgcaaagattaccctaagtttcaagcagtagctattgccatccaaagatctggcttcaagatcgtgttgctactaaggcttgtacctttacttccgttcaacatgttgaactacctgttatctgtcactcctgttggtgttggagaatacatgctggcttcttggttgggaatgatgccaatcactcttgctctggtgtacgttggaacaacactaaaagatctatcagatgtgacacatgggtggagtgagatctcgactactcgacggattctgataatatctggttttgtattatctgtggtcttgattatctgcgtcacaaaaattgcaaaatcatctctggagaaggcattggctgagaatggagagctccatgtaggaacatcgcagcttccaggtgtaacctctcccttggatctgcaacaacctcttgtaatcaagattgacacatcaaatgaagaccacgagaagtaaaagtgttgtgtttacaatctcagatctaaattctttggttgttgagtcggtagactgtatatacacccatactctggtgaggcccgtaaatgggtaaaaaagacatcatccccccttccaaaaaagggaatgaagtttagtttactgataggttatagtaatacgatatgcgctttgtttcactccacgtgctaccttatctttggtgaaaatactcgcacttaactgg

SEQ ID NO: 23808 - protein, 271 aa, Zea mays subsp. mays
  misc_feature (1)..(271): Ceres Seq. ID no. 12415369
MALSWSSALRLAVAAVLLVAVVVALFTLPIEKILKDFLVWIKENLGPWGPLVLALAYIPLTVLAVPASILTLGGGYLFGLPVGFVADSIGAAIGATAAFLLGRTIGRSYVLSKCKDYPKFQAVAIAIQRSGFKIVLLLRLVPLLPFNMLNYLLSVTPVGVGEYMLASWLGMMPITLALVYVGTTLKDLSDVTHGWSEISTTRRILIISGFVLSVVLIICVTKIAKSSLEKALAENGELHVGTSQLPGVTSPLDLQQPLVIKIDTSNEDHEK

SEQ ID NO: 23809 - DNA, 1479 bp, Zea mays subsp. mays
  misc_feature (1)..(1479): Ceres Seq. ID no. 12415392
cccaagtcccggcccaacccatctgtagcactaggcaacagcgaagctgagcagagagctgtcactgcatctgcctcatctaccagtacgatggtgatgatgtcgggacttgctgcctactgttcactaagtatgacaacgaccgggactgcgccgttatcatggaatacacgggcaccgccggcgcgactcgctttccagaggcggcggcgcatgagtacgatcacggccacggtcacgtgcaggcgcgaatcggcgatgacggccccggagaaggccgacgtgctgcggtcgctagacgggtgggcggagtcgaacctgctgccgctgctgaagccggtggagcgggcatggcagccgcacgacctgctgccggactcggcgtcgccggggttccgcgaggcggtggacgagctgcgggcgcgggcgcgagagatccccgacgactactacgtgtgcctggtgggcaacatggtgacggaggaggccctcccccacgtaccacgccgccctcaacagcttcgtgggctacgacagcccctccagcgccgatgcctgggcgcgctggtcccgcggctggaccgccgaggagaaccgccacggcgacctgctgaaccgctatctctacctgtgcggccgcgtcgacgtccggcgcgtggagcagaccatccaccacctcatcaacgccgggatgcgcctcgcctccgacaagtgcccctacaggggcttcatctacacggcgttccaggagcgcgccaccgccgtctcgcacggcaacacggcgcggcgcgccatggcgctgggcgacgccagcctggccaggatctgcggcgccatcgcgagcgacgagaagcggcacgaggcggcctacacccgggtggtggaccagctgttcgcgctcacgcccgacgccgccgtgcgcgcgctcgagtacatgatgagggagaggatcctcatgccggcctactacatgttcgacggccgggacccggacctgttccgccactacgccgccgtcgcgcagaggctcggcgtctacaccaccgccgactacgccgacctcgtccagttcttcgtcgacaggtggggcgtggcggacctaggccccggcctcaccggcgaggggaggcaggcgcaggactacgtctgccggttgcctgagagggtgcgcaggatggaccagctggacgcgcgacgaaggctgcagccccagactcgtcaggtccccttctcttggctgttcgacaggcacgtggagctgctgacctgacttgattgatcggcagtctgcagcccagctagcggtccttttgccccctttggcagagcccagagctatcaattctgttactgcgtctccttctcctctacttctacttcttcctcgttggccactccgtagttccgtatgtgtctaccgtcaagtgactgactggaaccatgtactgtgtgtcagtcatcattcaatccatttggtgc

SEQ ID NO: 23810 - protein, 386 aa, Zea mays subsp. mays
  misc_feature (1)..(386): Ceres Seq. ID no. 12415393
PKSRPNPSVALGNSEAEQRAVTASASSTSTMVMMSGLAAYCSLSMTTTGTAPLSWNTRAPPARLAFQRRRRMSTITATVTCRRESAMTAPEKADVLRSLDGWAESNLLPLLKPVERAWQPHDLLPDSASPGFREAVDELRARAREIPDDYYVCLVGNMVTEEALPHVPRRPQQLRGLRQPLQRRCLGALVPRLDRRGEPPRRPAEPLSLPVRPRRRPARGADHPPPHQRRDAPRLRQVPLQGLHLHGVPGARHRRLARQHGAARHGAGRRQPGQDLRRHRERREAARGGLHPGGGPAVRAHARRRRARARVHDEGEDPHAGLLHVRRPGPGPVPPLRRRRAEARRLHHRRLRRPRPVLRRQVGRGGPRPRPHRRGEAGAGLRLPVA

SEQ ID NO: 23811 - protein, 356 aa, Zea mays subsp. mays
  misc_feature (1)..(356): Ceres Seq. ID no. 12415394
MVMMSGLAAYCSLSMTTTGTAPLSWNTRAPPARLAFQRRRRMSTITATVTCRRESAMTAPEKADVLRSLDGWAESNLLPLLKPVERAWQPHDLLPDSASPGFREAVDELRARAREIPDDYYVCLVGNMVTEEALPHVPRRPQQLRGLRQPLQRRCLGALVPRLDRRGEPPRRPAEPLSLPVRPRRRPARGADHPPPHQRRDAPRLRQVPLQGLHLHGVPGARHRRLARQHGAARHGAGRRQPGQDLRRHRERREAARGGLHPGGGPAVRAHARRRRARARVHDEGEDPHAGLLHVRRPGPGPVPPLRRRRAEARRLHHRRLRRPRPVLRRQVGRGGPRPRPHRRGEAGAGLRLPVA

SEQ ID NO: 23812 - protein, 354 aa, Zea mays subsp. mays
  misc_feature (1)..(354): Ceres Seq. ID no. 12415395
MMSGLAAYCSLSMTTTGTAPLSWNTRAPPARLAFQRRRRMSTITATVTCRRESAMTAPEKADVLRSLDGWAESNLLPLLKPVERAWQPHDLLPDSASPGFREAVDELRARAREIPDDYYVCLVGNMVTEEALPHVPRRPQQLRGLRQPLQRRCLGALVPRLDRRGEPPRRPAEPLSLPVRPRRRPARGADHPPPHQRRDAPRLRQVPLQGLHLHGVPGARHRRLARQHGAARHGAGRRQPGQDLRRHRERREAARGGLHPGGGPAVRAHARRRRARARVHDEGEDPHAGLLHVRRPGPGPVPPLRRRRAEARRLHHRRLRRPRPVLRRQVGRGGPRPRPHRRGEAGAGLRLPVA

SEQ ID NO: 23813 - DNA, 1374 bp, Zea mays subsp. mays
  misc_feature (1)..(1374): Ceres Seq. ID no. 12415396
acttgccagttcccactcctaactctctcttcgtttactcttcttcccacccccagcgttcgcttccatccaagctcatatcatcatagatcgacggactaggccacgcgccccaatactcagaactagtcttgagtaaagcatggcgtcgtcttctccgtcctgccgtggcagcggcggcaagtcggacgtggaccggatcaagggcccctggagccccgaggaggacgaggccctgcagcgcctggtggcccgccacggcgcccgcaactggtccctcatcagccggtccatcccgggccgctccggcaagtcgtgccgcctccggtggtgcaaccagctgtcgccgcaggtggagcaccggcccttcacggccgaggaggacgacaccatcctccgcgcgcacgccaggttcggcaacaagtgggccaccatcgcgcgcctcctctccggccgcaccgacaacgccatcaagaaccactggaactccacgctaaagcgcaagtactacgccgccagcgacgctgttgttgctgacgctgacgacgagcgcccgctgaagcgcacaagcagcgacggccacccagggctctgcttcagccccggaagcccatccgggtccgacctcagcgactctagcaaccacagccttccctccgtcatgccgtcagccgcttctgctgccgccgtcacctcccaccagcagcagcagcacgtgtaccgccccgtgccgcgcgcgggcggcgtggtcatgctaccggtggcgcctcttgcgccgccgccgccgccacagcctccggcgacctccttatcactgtccctctccctgcccgggctggacggccagaagcccgaagcatcccaagcggttctgacgccggcaccggcaccgcctcaacctcctcttcagatacagcagcagcagcctgctccacctcagatgccgccaccacaagcccaaccgagcttgccgttccagctgcaggcggccgcgacgaacctcacgtcgcagcagccggcagcagcgccgttcagctcggagttcctgttgttgatgcaggagatgatccggatcgaggtacggaactacatgtccgggtcggggctcgatccgcgcaccgacggcgccgccgtgcacgccgtgagcaagcgtatgatgggtatggccaagatcgagtagtttcagcgcgcatgcacacagcggcagcagcaggcgtggaagatacaaaagaaaacgaaccgccgatcgatccgcggcggccagcgcgtgtatgaagtagtaatgaaccagcaagaacggcgtggccttgaaccatacggaggccgtgtggtgcggcaagtgaacagctccaaccatcggctttttagctcatg

SEQ ID NO: 23814 - protein, 345 aa, Zea mays subsp. mays
  misc_feature (1)..(345): Ceres Seq. ID no. 12415397
MASSSPSCRGSGGKSDVDRIKGPWSPEEDEALQRLVARHGARNWSLISRSIPGRSGKSCRLRWCNQLSPQVEHRPFTAEEDDTILRAHARFGNKWATIARLLSGRTDNAIKNHWNSTLKRKYYAASDAVVADADDERPLKRTSSDGHPGLCFSPGSPSGSDLSDSSNHSLPSVMPSAASAAAVTSHQQQQHVYRPVPRAGGVVMLPVAPLAPPPPPQPPATSLSLSLSLPGLDGQKPEASQAVLTPAPAPPQPPLQIQQQQPAPPQMPPPQAQPSLPFQLQAAATNLTSQQPAAAPFSSEFLLLMQEMIRIEVRNYMSGSGLDPRTDGAAVHAVSKRMMGMAKIE

SEQ ID NO: 23815 - protein, 172 aa, Zea mays subsp. mays
  misc_feature (1)..(172): Ceres Seq. ID no. 12415398
MPSAASAAAVTSHQQQQHVYRPVPRAGGVVMLPVAPLAPPPPPQPPATSLSLSLSLPGLDGQKPEASQAVLTPAPAPPQPPLQIQQQQPAPPQMPPPQAQPSLPFQLQAAATNLTSQQPAAAPFSSEFLLLMQEMIRIEVRNYMSGSGLDPRTDGAAVHAVSKRMMGMAKIE

SEQ ID NO: 23816 - DNA, 1133 bp, Zea mays subsp. mays
  misc_feature (1)..(1133): Ceres Seq. ID no. 12415469
atctcgcgggctttcccgcagcaagatcaacgtcgtcgttcaagccagcggtagtagagactacgaccgaggctagctaagctaagagatggcggatcaccagtactcggcgtggacgacttccgctgctcgtcatcgggtcttctcctgtgcgctcatggctcttgttagttttgtggctgcaggacgacccatggtgctcgccgacgccatcgtctttcacgtggcgaacaggtgcccgttcccggtgtggccggcgtccgcccctaacaccggccacccagtgctcgccggcggcggcttctacgtcccgcagggcaagtcgaggcgcgtcgtcgcgccggccaactggaacgggcgcttctgggcccgcaccggttgcaacttcaccgcgaacggcatgggcgtagcgggctgcctcaccggcgactgcgagggccggctcgcctgtaacgggtccgtgggcgccccgcccgccacgctagtcgaggtgagcctgcacgaggacgccccgaaagggagctcctacgacgtgagcctggtggacgggtacaacctccccgtcgccgtctccgccaagcccgccacgggcggcgcggacccgaacaagtgcgccattgccggctgcgccaagaacgtgaacgcggtgtgcccgccggagctgcaggtgaccgctaccggcagcggcggcggcaagacggtggtggcgtgcaagagcgcgtgcctagcgttcgggctcgacgccttctgctgccgcggcgcgtacgcgacgccggccacgtgccgagggaccgtgtactcgcgcctcttcaaggacgcctgcccggcatactacagctatgcctacgacatcgccgccacgacggccagcgggtgctacgcgcaggagtacatcatcacgttctgcccgtccagatggggcgacgagcccggggatcgtgctgctcagatttgaatttggtgtcgtcatcgtcagtcaggcaattaccaatcaccattgcgtcgagcttttcgcacgtctttatgtatgtgtgtacgcttgtgtctgcttctagtgggctttcacataaatttctacatacatatacacatacaacaataaaaaataaggtagtgctatttatcggccgcgt

SEQ ID NO: 23817 - protein, 288 aa, Zea mays subsp. mays
  misc_feature (1)..(288): Ceres Seq. ID no. 12415470
MADHQYSAWTTSAARHRVFSCALMALVSFVAAGRPMVLADAIVFHVANRCPFPVWPASAPNTGHPVLAGGGFYVPQGKSRRVVAPANWNGRFWARTGCNFTANGMGVAGCLTGDCEGRLACNGSVGAPPATLVEVSLHEDAPKGSSYDVSLVDGYNLPVAVSAKPATGGADPNKCAIAGCAKNVNAVCPPELQVTATGSGGGKTVVACKSACLAFGLDAFCCRGAYATPATCRGTVYSRLFKDACPAYYSYAYDIAATTASGCYAQEYIITFCPSRWGDEPGDRAAQI

SEQ ID NO: 23818 - protein, 265 aa, Zea mays subsp. mays
  misc_feature (1)..(265): Ceres Seq. ID no. 12415471
MALVSFVAAGRPMVLADAIVFHVANRCPFPVWPASAPNTGHPVLAGGGFYVPQGKSRRVVAPANWNGRFWARTGCNFTANGMGVAGCLTGDCEGRLACNGSVGAPPATLVEVSLHEDAPKGSSYDVSLVDGYNLPVAVSAKPATGGADPNKCAIAGCAKNVNAVCPPELQVTATGSGGGKTVVACKSACLAFGLDAFCCRGAYATPATCRGTVYSRLFKDACPAYYSYAYDIAATTASGCYAQEYIITFCPSRWGDEPGDRAAQI

SEQ ID NO: 23819 - protein, 253 aa, Zea mays subsp. mays
  misc_feature (1)..(253): Ceres Seq. ID no. 12415472
MVLADAIVFHVANRCPFPVWPASAPNTGHPVLAGGGFYVPQGKSRRVVAPANWNGRFWARTGCNFTANGMGVAGCLTGDCEGRLACNGSVGAPPATLVEVSLHEDAPKGSSYDVSLVDGYNLPVAVSAKPATGGADPNKCAIAGCAKNVNAVCPPELQVTATGSGGGKTVVACKSACLAFGLDAFCCRGAYATPATCRGTVYSRLFKDACPAYYSYAYDIAATTASGCYAQEYIITFCPSRWGDEPGDRAAQI

SEQ ID NO: 23820 - DNA, 1352 bp, Zea mays subsp. mays
  misc_feature (1)..(1352): Ceres Seq. ID no. 12415473
aggcaggcaggcagccaagaggcaagaggcaagaggtccctcagtcgctaggcgctagctcccggcttaactagtaggcagccatgaatttcggtgggaatggcaacgcgacgatccggtgcaagtactgcagggccagcctgagcgtgatccccggcgagcgcgccatccagtgcgcgcaatgcaactgcgtgacgcgcatccggcgggccgaccgcatcccgctggcgcggccggcgcacgtgccgccggcgttccagcgcgcccggggcaagaagcgcgccgtcctggtcggcatcacgtacgccggcatgcgccaaggctgtggcgacctgaggggccccgtcaacgacgtcaagtgcatgaggaacctcctctgccagcgcttcggcttccccggcgaatgcatcatcatgctcactgacgaccagagggacccgttcaggctgcccacgaaggagaacatccggatggcgatgcactggctggtgcagggctgcagctacggcgactccctggtgttccacttctcgggcatcggcgcgcaggtggcggacgacgacggcgacgaggcggacgggtacgacgaggccatctgcccgctggacgcgttccagagcgggcccatcctggacgacgagatcaacgaggtcatcgtgcgcccgctggtgcacggcgccaggctgcacgccgtggtggacgcctgctacagcgccacggtcctggacctcccctacctgtgccgcatgtccaggaacgggttctggcagtgggaggacgagtgcccgccgtcgggcgcctggaagggcaccagcggaggccacgccgtgctcatcagcggatacagcgagggcaaaggcaacttcgccatgatgcccgacgcccacgcgtcggtcgtcggggccatgacgcacagcttcgtccggacgctggagtgccagccgcgcggggtcacctacggccacctgctcagctccatgagggccatcatgaagaaccgcggcgggggctgcgatctgcagggggccatcggcgcacccatccgcaccgtcgccaacttcagcggcgtgcaggagcctaacctgtcctcttcggagacgtttgacatttaccgcaagcagttcgtcctgtagacaccacgccacaccagtgtttgccccgccggccgcttgtaatgaattgccgtcgtagtatcagaataatcaattatctatcggccatgatatgatatgatatatcaagaaagaaggaactaatacctagagtacttcgttcatctgtattagcagtgaacctctcaatgaaataactaagcatgttcaatgtcctctttttattagagagagacaggg

SEQ ID NO: 23821 - protein, 349 aa, Zea mays subsp. mays
  misc_feature (1)..(349): Ceres Seq. ID no. 12415474
MNFGGNGNATIRCKYCRASLSVIPGERAIQCAQCNCVTRIRRADRIPLARPAHVPPAFQRARGKKRAVLVGITYAGMRQGCGDLRGPVNDVKCMRNLLCQRFGFPGECIIMLTDDQRDPFRLPTKENIRMAMHWLVQGCSYGDSLVFHFSGIGAQVADDDGDEADGYDEAICPLDAFQSGPILDDEINEVIVRPLVHGARLHAVVDACYSATVLDLPYLCRMSRNGFWQWEDECPPSGAWKGTSGGHAVLISGYSEGKGNFAMMPDAHASVVGAMTHSFVRTLECQPRGVTYGHLLSSMRAIMKNRGGGCDLQGAIGAPIRTVANFSGVQEPNLSSSETFDIYRKQFVL

SEQ ID NO: 23822 - protein, 273 aa, Zea mays subsp. mays
  misc_feature (1)..(273): Ceres Seq. ID no. 12415475
MRQGCGDLRGPVNDVKCMRNLLCQRFGFPGECIIMLTDDQRDPFRLPTKENIRMAMHWLVQGCSYGDSLVFHFSGIGAQVADDDGDEADGYDEAICPLDAFQSGPILDDEINEVIVRPLVHGARLHAVVDACYSATVLDLPYLCRMSRNGFWQWEDECPPSGAWKGTSGGHAVLISGYSEGKGNFAMMPDAHASVVGAMTHSFVRTLECQPRGVTYGHLLSSMRAIMKNRGGGCDLQGAIGAPIRTVANFSGVQEPNLSSSETFDIYRKQFVL

SEQ ID NO: 23823 - protein, 256 aa, Zea mays subsp. mays
  misc_feature (1)..(256): Ceres Seq. ID no. 12415476
MRNLLCQRFGFPGECIIMLTDDQRDPFRLPTKENIRMAMHWLVQGCSYGDSLVFHFSGIGAQVADDDGDEADGYDEAICPLDAFQSGPILDDEINEVIVRPLVHGARLHAVVDACYSATVLDLPYLCRMSRNGFWQWEDECPPSGAWKGTSGGHAVLISGYSEGKGNFAMMPDAHASVVGAMTHSFVRTLECQPRGVTYGHLLSSMRAIMKNRGGGCDLQGAIGAPIRTVANFSGVQEPNLSSSETFDIYRKQFVL

SEQ ID NO: 23824 - DNA, 1522 bp, Zea mays subsp. mays
  misc_feature (1)..(1522): Ceres Seq. ID no. 12415477
acagtctccagggtagctagccaagctaccaagctcgtcaggagcgagagaaagaggccggcggtgcgcggggatgatgatgatgagcagcggccgggcgggcggcggggccaccgcggggcggtacccgttcacggcgtcgcagtggcaggagctggagcaccaggcgctcatctacaagtgcctggcgtccggcaagcccatcccgtcctacctcatgccgccgctccgccgcatcctcgactccgccctcgccacgtcgccgtccctcgcctacccgccgcaaccctcgctgggctggggctgcttcgggatgggcttcacccggaaggccgacgaggacccggagcccgggcggtgccggcgcacggacggcaagaagtggcgctgctccaaggaggcgtacccggactccaagtactgcgagaagcacatgcaccggggcaagaaccgttcaagaaagcctgtggaaatgtccttggccacgccggccccggcgccggcccccgccgccgccacaaccgccaccgccacctcatccccggcgccgtcctaccaccgcccggcccacgacgccacgccgtctccgtaccacgcgctgtatggaggcggcggcggcggcggtagcccttactcggcgtcggcacgcccaggagcaaccggaggcggcggcgcgtaccaccacgcgcagcatgtgagcccattccacctccacctcgagaccacccacccgcacccgccgccgccctacaactactccgccgaccagagggactacgcgtacgggcacgcggccgccaaggaggtcggcgagcacgccttcttctcggacggcgcgggcgagcgggtcgaccgccaggccgcggcggggcagtggcagttcaggcagctcggggtggagacgaagccgggccccacgccgctgttccccgtcgccgggtacgggcacggcgcggcgtcgccgtacggcgtggagatgggcaagtacgacgacgagcaggaggagaggcgccgccagcactgcttcgttcttggagccggcctgcggctggagcggccgtcgtcgggccatggccatggccatgaccatgacgacgccgccgccgcgcagaagccgctccggcccttcttcgacgagtggccgcaccagaagggggacaaggccggttcgtggatggggctcgacggcgagacgcagctctccatttccatccccatggccgctaccgacctccccgtcacctcccgcttccgtaacgacgagtgatgccacatcaaacctggcgctggaaactcggaacgcatggtgctgatgctgaccatgagatgtaccgtttcgctcaaggccggccgtcatcaccacggccacatcaaaccggtttgaagaacttgggaaggccgaatgaaacctccagaagaatgatctgtcctcttttttctgcatttctttttctcttagtattacgcagtattgcttcgcgtgtaatatgttttcctgtaatatcaagtgagggcgtttctg

SEQ ID NO: 23825 - protein, 397 aa, Zea mays subsp. mays
  misc_feature (1)..(397): Ceres Seq. ID no. 12415478
MMMMSSGRAGGGATAGRYPFTASQWQELEHQALIYKCLASGKPIPSYLMPPLRRILDSALATSPSLAYPPQPSLGWGCFGMGFTRKADEDPEPGRCRRTDGKKWRCSKEAYPDSKYCEKHMHRGKNRSRKPVEMSLATPAPAPAPAAATTATATSSPAPSYHRPAHDATPSPYHALYGGGGGGGSPYSASARPGATGGGGAYHHAQHVSPFHLHLETTHPHPPPPYNYSADQRDYAYGHAAAKEVGEHAFFSDGAGERVDRQAAAGQWQFRQLGVETKPGPTPLFPVAGYGHGAASPYGVEMGKYDDEQEERRRQHCFVLGAGLRLERPSSGHGHGHDHDDAAAAQKPLRPFFDEWPHQKGDKAGSWMGLDGETQLSISIPMAATDLPVTSRFRNDE

SEQ ID NO: 23826 - protein, 396 aa, Zea mays subsp. mays
  misc_feature (1)..(396): Ceres Seq. ID no. 12415479
MMMSSGRAGGGATAGRYPFTASQWQELEHQALIYKCLASGKPIPSYLMPPLRRILDSALATSPSLAYPPQPSLGWGCFGMGFTRKADEDPEPGRCRRTDGKKWRCSKEAYPDSKYCEKHMHRGKNRSRKPVEMSLATPAPAPAPAAATTATATSSPAPSYHRPAHDATPSPYHALYGGGGGGGSPYSASARPGATGGGGAYHHAQHVSPFHLHLETTHPHPPPPYNYSADQRDYAYGHAAAKEVGEHAFFSDGAGERVDRQAAAGQWQFRQLGVETKPGPTPLFPVAGYGHGAASPYGVEMGKYDDEQEERRRQHCFVLGAGLRLERPSSGHGHGHDHDDAAAAQKPLRPFFDEWPHQKGDKAGSWMGLDGETQLSISIPMAATDLPVTSRFRNDE

SEQ ID NO: 23827 - protein, 395 aa, Zea mays subsp. mays
  misc_feature (1)..(395): Ceres Seq. ID no. 12415480
MMSSGRAGGGATAGRYPFTASQWQELEHQALIYKCLASGKPIPSYLMPPLRRILDSALATSPSLAYPPQPSLGWGCFGMGFTRKADEDPEPGRCRRTDGKKWRCSKEAYPDSKYCEKHMHRGKNRSRKPVEMSLATPAPAPAPAAATTATATSSPAPSYHRPAHDATPSPYHALYGGGGGGGSPYSASARPGATGGGGAYHHAQHVSPFHLHLETTHPHPPPPYNYSADQRDYAYGHAAAKEVGEHAFFSDGAGERVDRQAAAGQWQFRQLGVETKPGPTPLFPVAGYGHGAASPYGVEMGKYDDEQEERRRQHCFVLGAGLRLERPSSGHGHGHDHDDAAAAQKPLRPFFDEWPHQKGDKAGSWMGLDGETQLSISIPMAATDLPVTSRFRNDE

SEQ ID NO: 23828 - DNA, 771 bp, Zea mays subsp. mays
  misc_feature (1)..(771): Ceres Seq. ID no. 12415488
atcgatcgaacttgctaaaccagcggaaacctaaccagctaggcagcattagcttttcaacaagcctcgctcgcgcgccgtgaccgataggatggccatcacccacgacgactacgtctccctgtgcctcatggcgctcgcagccgcgggaggaggaggagggcacgctgcggctgccagtgccaggacgacgacgatgacgacgcaagagtgcgagctccgcttccggtgctccgtctgcggcaaggccttcgcgtcgcaccaggcgctgggcgggcacaaggccagccaccggaagccgccgccgacgctcgtacaggcggcgtcgtcgtcgtcgtcggtgacgacgaatacctcgtcggcgggcggcagcggcgccgggcaggggaggcacaggtgctcggtgtgccaccggggcttcgccacggggcaggcgctcggcgggcacaagaggtgccattactgggacgggctctcggtgtcgctcaccgcgtcggcggcgtcggggtccgcgtccagcttgaggggcttcgatctgaatttggtgccggccgccggcgcggcaaggtggcgagaggaggaagaggtgcagagccccttgccggtcaagaagcggcggctgtcctccggtccttccaccgaacttagtttaacgatttagagttccttttggtgagctgaggcatgtagagtgttttcgtagcttcattcttttaaccgtattttggtttttgtgtttgcgcggtgaataaacgtgtatttaattttgtc

SEQ ID NO: 23829 - protein, 189 aa, Zea mays subsp. mays
  misc_feature (1)..(189): Ceres Seq. ID no. 12415489
MAITHDDYVSLCLMALAAAGGGGGHAAAASARTTTMTTQECELRFRCSVCGKAFASHQALGGHKASHRKPPPTLVQAASSSSSVTTNTSSAGGSGAGQGRHRCSVCHRGFATGQALGGHKRCHYWDGLSVSLTASAASGSASSLRGFDLNLVPAAGAARWREEEEVQSPLPVKKRRLSSGPSTELSLTI

SEQ ID NO: 23830 - protein, 176 aa, Zea mays subsp. mays
  misc_feature (1)..(176): Ceres Seq. ID no. 12415490
MALAAAGGGGGHAAAASARTTTMTTQECELRFRCSVCGKAFASHQALGGHKASHRKPPPTLVQAASSSSSVTTNTSSAGGSGAGQGRHRCSVCHRGFATGQALGGHKRCHYWDGLSVSLTASAASGSASSLRGFDLNLVPAAGAARWREEEEVQSPLPVKKRRLSSGPSTELSLTI

SEQ ID NO: 23831 - protein, 154 aa, Zea mays subsp. mays
  misc_feature (1)..(154): Ceres Seq. ID no. 12415491
MTTQECELRFRCSVCGKAFASHQALGGHKASHRKPPPTLVQAASSSSSVTTNTSSAGGSGAGQGRHRCSVCHRGFATGQALGGHKRCHYWDGLSVSLTASAASGSASSLRGFDLNLVPAAGAARWREEEEVQSPLPVKKRRLSSGPSTELSLTI

SEQ ID NO: 23832 - DNA, 1428 bp, Zea mays subsp. mays
  misc_feature (1)..(1428): Ceres Seq. ID no. 12415601
gcacgagaccattacctagaacatcctaatcgaaaaatcgcctcctctcgggctagctccacactcctttgtcctctccaaacgaacgaacaaaaagaggccgcttccccacccagtcacctcgacctcagcccctctcccccctccctatctcgactccgatgccgccgccgctcctcgaggcgcgcgactacatgggcgccggcgccaccccgttgtcctgctcctccagcggcgagggcacggggccgcacctcgcgctgcggctcgggctcccagggtccgactcccccggccgcgacgcggggccggagccggaccacgcccacgtcgacgccgcgctcaccctcggccctgcccccgcccccgcccccgcgcctcccagggtcggcgcaaagcgcgggttcgctgactcccgcgaccggtgcgtgaagcgggacgccactgctgcggatgacgctgctgggggagtgaccggggaggagaagcgggtagctgccggccgctgccggaactccgccggctgccaaggcgcaagttgttggatggccgcctgttaggagctaccggaagaacacactagctatgagtgccacaaagacaaacggggaagatgaaggtaggagtgaggcgggatgctgttatgttaaggtcagcatggatggagccccatacctaaggaaggtggacctcaagaccttttcgagctatgaggcacctttcgcttgctctggagaaaatgttcacctgcttcatcactggccaaagcggttcgtgcaagacttcaagaagggagaggctcactgatggttctagggctgatgcccttcaggaccaagaatatgtccttacttacgaagataaagatgctgactggatgctcgttggtgatctcccctgggacttgttcaccacaatttgtgggaaacttagaatcatgagaggctctgatgctgctggcatggctccaagatcaccggagcagatagttgggaccagaataaggaacgttgcccggcatgcagagtcgtgaactgaaaggaaaggacagagtttacatggcgctgaagggagcggtgtttttacgtgaagtgctccggttaagtctctctctctctctttttaacccccacatgtgcaatgagatgtgtgtggccctactgtaagacaccccattttgcccacgaggttgtcacgcgttattgtagatggtcgcctttgtgttatgaacgatcaaactcggtagtagcttgcttgctgcttcctctacgatactttcctccgtatttggaagctcgtacttcatatggtagaagtaagaaaaaatgcccatgttgcccattaagtttttttctctcgtgatgtgtgtgcgagcgaactaactattcagtggatctagaaagaatctgatcagtgagtctgtgtgcc

SEQ ID NO: 23833 - protein, 143 aa, Zea mays subsp. mays
  misc_feature (1)..(143): Ceres Seq. ID no. 12415602
ARDHYLEHPNRKIASSRASSTLLCPLQTNEQKEAASPPSHLDLSPSPPSLSRLRCRRRSSRRATTWAPAPPRCPAPPAARARGRTSRCGSGSQGPTPPAATRGRSRTTPTSTPRSPSALPPPPPPRLPGSAQSAGSLTPATGA

SEQ ID NO: 23834 - protein, 132 aa, Zea mays subsp. mays
  misc_feature (1)..(132): Ceres Seq. ID no. 12415603
MPPPLLEARDYMGAGATPLSCSSSGEGTGPHLALRLGLPGSDSPGRDAGPEPDHAHVDAALTLGPAPAPAPAPPRVGAKRGFADSRDRCVKRDATAADDAAGGVTGEEKRVAAGRCRNSAGCQGASCWMAAC

SEQ ID NO: 23835 - protein, 121 aa, Zea mays subsp. mays
  misc_feature (1)..(121): Ceres Seq. ID no. 12415604
MGAGATPLSCSSSGEGTGPHLALRLGLPGSDSPGRDAGPEPDHAHVDAALTLGPAPAPAPAPPRVGAKRGFADSRDRCVKRDATAADDAAGGVTGEEKRVAAGRCRNSAGCQGASCWMAAC

SEQ ID NO: 23836 - DNA, 1835 bp, Zea mays subsp. mays
  misc_feature (1)..(1835): Ceres Seq. ID no. 12415689
gcacgagaccattacctagaacatcctaatcgaaaaaaaataatgctgcgcgcgcacgagcacgacacgagctttcttccatcaagacatggcgacgccggagctttggtggtactggtggctatgggtgacgacgatgctggccgtcgtcgtctcgaccgtcgtctgctacctgaccaaccagcaccgccgctgggggggctggggctcctcctcagggcgtcgctcggccgccgggcccgcgtcctctcccgctcatcggcaacctgctggacctgcggcgcgcgcccggcagcctccaccacacgctggcgcgcctggcccgcgcgcacggcgcccccgtcatgcgcctcgacctgggcctggtcccggccgtggtcgtctcctcccgcgacgctgcacgggaggcgttcgcggcgcacgaccgccgcatcgcggcacgccccgtcccggacagcaagcgcgcgctcggcttctgcgaccgctccatgctctcgctgcccagctcggccccgctctggcggaccctgcgcggcgtcatggccgcgcacgtcctgtcgccgcgcagcctcgcggcgtcgcgcgccgcgcgggagcgcaaggtcgccgacctgatcgggtacctccgcgcgcgggccgggaccgtggtggatcttaaagaggccgtctatggcggcgtcgccaacctcgtctcgactgccatgttctccatcgacgtcgtcgacgtgggcgccgccgagtcgtcgtcatcgtcgtcggcggcggcccacgggttgcaggagctcctggaggagctcatgcagtgcatggcccagcctaacgtctccgacttcttcccgttcctcagcgcactcgacctccaggggtgtcgtcgccgggtggccgtgcaactgggccaggtcctacaggtcttggacgacatcactgaccgccgtttggcctcctcctcctcctcctccacgtccagcaagggcggggacaggcgcggcgacttcctcgacatcctcctaggacctccagtccacgggcaagatcacgcgcgacaacgtgacgctgacgctcttcgacatcttcgcggccgggagcgacaccatggcgctgaccgtggtgtgggcgatggccgagctgctccgcaacccgggcgtgatggccaggctgcgcgcggaggtcagggacgcgctgggcggcagggacgccgtcgaggaggccgacgcggcgggcctgccgttcctgcaggccgtcgtgagggaggccatgcggctgcacccggcggcgcccgtgctgctgccgcacaaggccgtggaggacggggtacagataggcggctacgcggtgcccaggggttgcaccgtgatcttcaactcgtgggcgatcatgcgcgacccggcggcgtgggagaggcccgacgagttcctgccggagcggttcctggccagggacctggacttccgcgggaagcagctggagttcgtcccgttcggctccggccgtaggctgtgcccaggcgtgcccatggcggagcgggtggtgccgctggttctagcgtcgctggtgcacgcgttccagtggcagctgccggccggcatgtcggcggaccaggtcgacgtcagcgacaagttcaccaccaccagtgttttagccttccctcctatcaaagctgtgcctctgctctgatcaccacctagcaacccagcttgagtgtccagtcgattttggccagcaaaatcggaaaagaaatccctgcagccggctgcacacaagcaccacgcaggcttcgttcgtgacacgtatccacgcccaacaattttaaagcaatataacatcaatcttaaagc

SEQ ID NO: 23837 - protein, 382 aa, Zea mays subsp. mays
  misc_feature (1)..(382): Ceres Seq. ID no. 12415690
MRLDLGLVPAVVVSSRDAAREAFAAHDRRIAARPVPDSKRALGFCDRSMLSLPSSAPLWRTLRGVMAAHVLSPRSLAASRAARERKVADLIGYLRARAGTVVDLKEAVYGGVANLVSTAMFSIDVVDVGAAESSSSSSAAAHGLQELLEELMQCMAQPNVSDFFPFLSALDLQGCRRRVAVQLGQVLQVLDDITDRRLASSSSSSTSSKGGDRRGDFLDILLGPPVHGQDHARQRDADALRHLRGRERHHGADRGVGDGRAAPQPGRDGQAARGGQGRAGRQGRRRGGRRGGPAVPAGRREGGHAAAPGGARAAAAQGRGGRGTDRRLRGAQGLHRDLQLVGDHARPGGVGEARRVPAGAVPGQGPGLPREAAGVRPVRLRP

SEQ ID NO: 23838 - protein, 334 aa, Zea mays subsp. mays
  misc_feature (1)..(334): Ceres Seq. ID no. 12415691
MLSLPSSAPLWRTLRGVMAAHVLSPRSLAASRAARERKVADLIGYLRARAGTVVDLKEAVYGGVANLVSTAMFSIDVVDVGAAESSSSSSAAAHGLQELLEELMQCMAQPNVSDFFPFLSALDLQGCRRRVAVQLGQVLQVLDDITDRRLASSSSSSTSSKGGDRRGDFLDILLGPPVHGQDHARQRDADALRHLRGRERHHGADRGVGDGRAAPQPGRDGQAARGGQGRAGRQGRRRGGRRGGPAVPAGRREGGHAAAPGGARAAAAQGRGGRGTDRRLRGAQGLHRDLQLVGDHARPGGVGEARRVPAGAVPGQGPGLPREAAGVRPVRLRP

SEQ ID NO: 23839 - protein, 317 aa, Zea mays subsp. mays
  misc_feature (1)..(317): Ceres Seq. ID no. 12415692
MAAHVLSPRSLAASRAARERKVADLIGYLRARAGTVVDLKEAVYGGVANLVSTAMFSIDVVDVGAAESSSSSSAAAHGLQELLEELMQCMAQPNVSDFFPFLSALDLQGCRRRVAVQLGQVLQVLDDITDRRLASSSSSSTSSKGGDRRGDFLDILLGPPVHGQDHARQRDADALRHLRGRERHHGADRGVGDGRAAPQPGRDGQAARGGQGRAGRQGRRRGGRRGGPAVPAGRREGGHAAAPGGARAAAAQGRGGRGTDRRLRGAQGLHRDLQLVGDHARPGGVGEARRVPAGAVPGQGPGLPREAAGVRPVRLRP

SEQ ID NO: 23840 - DNA, 899 bp, Zea mays subsp. mays
  misc_feature (1)..(899): Ceres Seq. ID no. 12415693
tagttctcgtcaatggcctcttatctctagatatagagcatcagtgcacacccaatctgccagactagaaatgatgtcctcgttgtttaagccgcggggtactgatgatgatggcctcatccgggaatcactgatcgacttctacactagctctggaaagcgaaaaccagaacacataattattttcagggatggagtcagtgaaagtcagtttacccaggtcatcaacattgagctggatcagatcattgaggcatgtaagtttctggatgagaagtggtcacccaagttcactgtgattgttgctcaaaagaaccatcacaccaagttctttcagacggcatcaccagacaatgttcttcctggaactgtggtggatagtaaagtttgccatcctaagaacttcgacttctacatgtgtgcacatgctgggatgattggaacaacaaggcccacccactatcatgttctgcacgacgagataggttttaatgccgacgagatgcaggagtttgttcattcgctctcttacgtgtaccagaggagcacgacagccatctcagtggttgctccagtgtgctacgcccacctcgctgcagcccaggtgagcacgttcctgagattggaggagatgtcagacgcgtcctccagccagggaggagggcatacctcggctggcagtgctcctgtgccggagctgcctcgcctcatgacaaagtcaggagctccatgttcttctgctagctgatgtgcgtgcgcatcaggatcgagctccatgttttgtgttagtaaggcctagttagtaaggctgtagaaagaatgtttaatgtttgcatgctaaagtagctcaggaatgaaacgagccaagggcagaaccaaacaatcaaaaccactactat

SEQ ID NO: 23841 - protein, 248 aa, Zea mays subsp. mays
  misc_feature (1)..(248): Ceres Seq. ID no. 12415694
SSRQWPLISRYRASVHTQSARLEMMSSLFKPRGTDDDGLIRESLIDFYTSSGKRKPEHIIIFRDGVSESQFTQVINIELDQIIEACKFLDEKWSPKFTVIVAQKNHHTKFFQTASPDNVLPGTVVDSKVCHPKNFDFYMCAHAGMIGTTRPTHYHVLHDEIGFNADEMQEFVHSLSYVYQRSTTAISVVAPVCYAHLAAAQVSTFLRLEEMSDASSSQGGGHTSAGSAPVPELPRLMTKSGAPCSSAS

SEQ ID NO: 23842 - protein, 225 aa, Zea mays subsp. mays
  misc_feature (1)..(225): Ceres Seq. ID no. 12415695
MMSSLFKPRGTDDDGLIRESLIDFYTSSGKRKPEHIIIFRDGVSESQFTQVINIELDQIIEACKFLDEKWSPKFTVIVAQKNHHTKFFQTASPDNVLPGTVVDSKVCHPKNFDFYMCAHAGMIGTTRPTHYHVLHDEIGFNADEMQEFVHSLSYVYQRSTTAISVVAPVCYAHLAAAQVSTFLRLEEMSDASSSQGGGHTSAGSAPVPELPRLMTKSGAPCSSAS

SEQ ID NO: 23843 - protein, 224 aa, Zea mays subsp. mays
  misc_feature (1)..(224): Ceres Seq. ID no. 12415696
MSSLFKPRGTDDDGLIRESLIDFYTSSGKRKPEHIIIFRDGVSESQFTQVINIELDQIIEACKFLDEKWSPKFTVIVAQKNHHTKFFQTASPDNVLPGTVVDSKVCHPKNFDFYMCAHAGMIGTTRPTHYHVLHDEIGFNADEMQEFVHSLSYVYQRSTTAISVVAPVCYAHLAAAQVSTFLRLEEMSDASSSQGGGHTSAGSAPVPELPRLMTKSGAPCSSAS

SEQ ID NO: 23844 - DNA, 843 bp, Zea mays subsp. mays
  misc_feature (1)..(843): Ceres Seq. ID no. 12415746
agttcttcttcctcggtgcatttgcaagcgttaggaaagggagaagagaaaggaattaatggaacgtgaagaggagctgccttcatcttcttcttccttgggttacatgatgcagtgcagggtctgccatgaggaagaggatcaagggcgtgcgaccatggagtctccttgtggatgctccggctctctcaagtacgctcacaggggatgtgtgcagagatggtgtgacgagaaggggagcaccctctgtgagatctgccttcagaatttcaagccaggctacacaatgcctcccaagaaaaccccggtggttgaaacggcggtcactatcagtgaacacgaggacatgcaacatttggaacctccggagggcttggttgacggtgcagattacaccaggtgctcctacgccgcagatcaatgcgccacatggtgccggtcgctggcgatcacgttcaccattgtgacgctcgcatggcatctggttgcagtggcgacggctgaagcagcagagcactgcgcgttcagtctcctcacaatgtacttacttcgtgctgctggtatcctgctgccgctctaccttgtcatgcgaatgattggcgtcgtccaaagtgggcagaggcagtaccggttgcagctgctggaggaacaaagaagaaatgcatcaactatatgaattatatgcgtgtccaggaagaggaccagctagtaattaatattcattagccaattcatttaaataaatcttatggaaggttgtattaatgggaaaactttcaaacagaacatcatttgtaaactttcagtatacatacagttggtgcagtgaaacagcagcatttt

SEQ ID NO: 23845 - protein, 205 aa, Zea mays subsp. mays
  misc_feature (1)..(205): Ceres Seq. ID no. 12415747
MEREEELPSSSSSLGYMMQCRVCHEEEDQGRATMESPCGCSGSLKYAHRGCVQRWCDEKGSTLCEICLQNFKPGYTMPPKKTPVVETAVTISEHEDMQHLEPPEGLVDGADYTRCSYAADQCATWCRSLAITFTIVTLAWHLVAVATAEAAEHCAFSLLTMYLLRAAGILLPLYLVMRMIGVVQSGQRQYRLQLLEEQRRNASTI

SEQ ID NO: 23846 - protein, 189 aa, Zea mays subsp. mays
  misc_feature (1)..(189): Ceres Seq. ID no. 12415748
MMQCRVCHEEEDQGRATMESPCGCSGSLKYAHRGCVQRWCDEKGSTLCEICLQNFKPGYTMPPKKTPVVETAVTISEHEDMQHLEPPEGLVDGADYTRCSYAADQCATWCRSLAITFTIVTLAWHLVAVATAEAAEHCAFSLLTMYLLRAAGILLPLYLVMRMIGVVQSGQRQYRLQLLEEQRRNASTI

SEQ ID NO: 23847 - protein, 188 aa, Zea mays subsp. mays
  misc_feature (1)..(188): Ceres Seq. ID no. 12415749
MQCRVCHEEEDQGRATMESPCGCSGSLKYAHRGCVQRWCDEKGSTLCEICLQNFKPGYTMPPKKTPVVETAVTISEHEDMQHLEPPEGLVDGADYTRCSYAADQCATWCRSLAITFTIVTLAWHLVAVATAEAAEHCAFSLLTMYLLRAAGILLPLYLVMRMIGVVQSGQRQYRLQLLEEQRRNASTI

SEQ ID NO: 23848 - DNA, 835 bp, Zea mays subsp. mays
  misc_feature (1)..(835): Ceres Seq. ID no. 12415818
gctctcgggctctcggcttcgaatcccgacaacctccctccccgaagctgcttagccgccggctgggcctcagacctgcgtcaagcttccggcggcagcccttcgagcatcacaatggcgtccggcggagcggccatctcggcggggcctacaccaccgtcggcgacgacggcgtcgtcggttgagtggcaccagcggccgccgaacccgaagaatcccgtggtgttcttcgacgtgaccatcgggtccatcgccgccggccgcatcaagatggagctcttcgccgacatcgcccccaagaccgcggagaacttccggcagttctgcactggggagcatagaaaaaatgctttgccacaaggttataagggctgccaattccatagagtgatcaaagatttcatgattcagggtggtgacttcttgaagaatgatggtactggatgcacatcaatctacggtaccaaatttgatgatgaaaattttatagcaaagcatacagggcctggactgctctcgatggcaaacagtggaattaactctaatggatctcagttctttataacatgtgcaaagtgtgactggcttgacaacaaacatgtggtatttgggagagtgcttggagacggtttgctcgtcgtgaggaagattgaaaatgttgcaactggagcgaataacaaaccaaagcttgcctgcgttataagtgagtgtggtgaaatgtagcttgatccctttgtgtggctaatcgtggactctttacgctgctgatgtagaccctgtttggttgatggaagtacttaagcagtggaaacattgatggaaatgtattgtgtct

SEQ ID NO: 23849 - protein, 240 aa, Zea mays subsp. mays
  misc_feature (1)..(240): Ceres Seq. ID no. 12415819
ALGLSASNPDNLPPRSCLAAGWASDLRQASGGSPSSITMASGGAAISAGPTPPSATTASSVEWHQRPPNPKNPVVFFDVTIGSIAAGRIKMELFADIAPKTAENFRQFCTGEHRKNALPQGYKGCQFHRVIKDFMIQGGDFLKNDGTGCTSIYGTKFDDENFIAKHTGPGLLSMANSGINSNGSQFFITCAKCDWLDNKHVVFGRVLGDGLLVVRKIENVATGANNKPKLACVISECGEM

SEQ ID NO: 23850 - protein, 202 aa, Zea mays subsp. mays
  misc_feature (1)..(202): Ceres Seq. ID no. 12415820
MASGGAAISAGPTPPSATTASSVEWHQRPPNPKNPVVFFDVTIGSIAAGRIKMELFADIAPKTAENFRQFCTGEHRKNALPQGYKGCQFHRVIKDFMIQGGDFLKNDGTGCTSIYGTKFDDENFIAKHTGPGLLSMANSGINSNGSQFFITCAKCDWLDNKHVVFGRVLGDGLLVVRKIENVATGANNKPKLACVISECGEM

SEQ ID NO: 23851 - protein, 150 aa, Zea mays subsp. mays; identical to SEQ ID NO: 16181
  misc_feature (1)..(150): Ceres Seq. ID no. 12415821

SEQ ID NO: 23852 - DNA, 1391 bp, Zea mays subsp. mays
  misc_feature (1)..(1391): Ceres Seq. ID no. 12415942
agtattcgaagagaagtctgatcgtcttatctgcggtctggcggcgtccgacgagagtggaaatgatcgctctctccaagatagccctggtgtctgcggtggcgctgctggggctgggctgggcgtaccaggccacccgcccgccgcccccggcgatcttgggcgccccaggagggccgccgatcagctcacctagaatccggctgaaagacggccggcaccttgcctacagggaggaaggagtgcgcagggagaacgccaggttcaggatcgttttcatccatggcttctcctccaccaaggagagcgggttccccgtgtcccaggagcttgtggagcagctgggcatatacatgctcttcttcgacagagccgggtatggcgacagcgacgccaacccgaagcgctgcctcaagagcgacgccacggacgtcgaggagctcgccgatgcgctgcagctcggggacaggttctacgtggtagggtgctccgtgggcggctacccagcatggagctgcctcaaatacattcccaacaggctggccggagtggccctggccgcgccggcggtgaactactggtggccgctgcctgctaacgtgtcgagggccgcgtacgggaggctccacgcccgggaccgtaggaccttctggatcgcgcaccacgcgccggcgctgctccacgcctggctcgcgcagaagtggttccgggtgtcgccgatcgtcagggccgagcgcgacgcgttcaccgccaaggactgggagatcctcaccgcgctctggaggaagcagcgcgagagcggcctggtggacccggccaaagcgacgcagcaggggatctacgagtcgctgtgccgggacgcgacgatcctgttcggcacgtgggagttcgaccccacggagatcgagaacccgttccccgacggggagggcggcgtcagcatctggcaggggcgccaggacaagatcgtccaggtggagatccagcggtacgtggcgcagaagctgccgtgggtgcggtaccacgagcaccccgaggccgggcacgcgctcccggacatggacgggatcggggacgagatcatcagggagctcctgctcggcgagagcgagctgcaccaggagcccagggcgcaggatgcctgagcctcaactgaacgttgggaagggttggtgaagagattaaactagctactgtagtagatagatactcgcgtataactggagaataaacggtgttggccccaaggcagtggttgatgaacttccagttgctggattttgctggccagtagtttgtcacgctacttattggtccccacatagatgggttaattaagagacgcttcataggtgggttgatgaactcagattcagcaaccttcatgttcc

SEQ ID NO: 23853 - protein, 380 aa, Zea mays subsp. mays
  misc_feature (1)..(380): Ceres Seq. ID no. 12415943
YSKRSLIVLSAVWRRPTRVEMIALSKIALVSAVALLGLGWAYQATRPPPPAILGAPGGPPISSPRIRLKDGRHLAYREEGVRRENARFRIVFIHGFSSTKESGFPVSQELVEQLGIYMLFFDRAGYGDSDANPKRCLKSDATDVEELADALQLGDRFYVVGCSVGGYPAWSCLKYIPNRLAGVALAAPAVNYWWPLPANVSRAAYGRLHARDRRTFWIAHHAPALLHAWLAQKWFRVSPIVRAERDAFTAKDWEILTALWRKQRESGLVDPAKATQQGIYESLCRDATILFGTWEFDPTEIENPFPDGEGGVSIWQGRQDKIVQVEIQRYVAQKLPWVRYHEHPEAGHALPDMDGIGDEIIRELLLGESELHQEPRAQDA

SEQ ID NO: 23854 - protein, 360 aa, Zea mays subsp. mays
  misc_feature (1)..(360): Ceres Seq. ID no. 12415944
MIALSKIALVSAVALLGLGWAYQATRPPPPAILGAPGGPPISSPRIRLKDGRHLAYREEGVRRENARFRIVFIHGFSSTKESGFPVSQELVEQLGIYMLFFDRAGYGDSDANPKRCLKSDATDVEELADALQLGDRFYVVGCSVGGYPAWSCLKYIPNRLAGVALAAPAVNYWWPLPANVSRAAYGRLHARDRRTFWIAHHAPALLHAWLAQKWFRVSPIVRAERDAFTAKDWEILTALWRKQRESGLVDPAKATQQGIYESLCRDATILFGTWEFDPTEIENPFPDGEGGVSIWQGRQDKIVQVEIQRYVAQKLPWVRYHEHPEAGHALPDMDGIGDEIIRELLLGESELHQEPRAQDA

SEQ ID NO: 23855 - protein, 263 aa, Zea mays subsp. mays
  misc_feature (1)..(263): Ceres Seq. ID no. 12415945
MLFFDRAGYGDSDANPKRCLKSDATDVEELADALQLGDRFYVVGCSVGGYPAWSCLKYIPNRLAGVALAAPAVNYWWPLPANVSRAAYGRLHARDRRTFWIAHHAPALLHAWLAQKWFRVSPIVRAERDAFTAKDWEILTALWRKQRESGLVDPAKATQQGIYESLCRDATILFGTWEFDPTEIENPFPDGEGGVSIWQGRQDKIVQVEIQRYVAQKLPWVRYHEHPEAGHALPDMDGIGDEIIRELLLGESELHQEPRAQDA

SEQ ID NO: 23856 - DNA, 1255 bp, Zea mays subsp. mays
  misc_feature (1)..(1255): Ceres Seq. ID no. 12415959
accctcacttcccctactgcgcgtctcgtctgcactaggattggattgaatccagaaccctctcctgcagcctgcaggttgtcgtcgccctcttcctcctccttcgctgttggctgttactattgcttccgcttccgccgccgcggaaatcaaactaatctgatcgagaccacaccgttccagagagatcccccaaacaaaaaaaagagcacgggatcgaaatggagctcgacggcaagtacagcaaggaccagagcctcaaatgcgaatgcctcctcttcgacctcgatgacacactatacccgttcaactccggcattgctgccgacataaagaagaacatccaagactatatggtgcacaagctcggcgttgacgaggccataagcttggacctatgcgtcctcctctacaagcagtacggaaccaccatggctggcttgagggctgttgggtaccagtttgattacgatgactaccacagctttgttcatgggaggttgtcttatgacaaaatcaagcctgatcctgtgcttaggaacatcctcctcagcttacccattcgcaaacttgtgttcacaaacggtgacagaacacatgcttcaagggccctcaagaggcttggcattgaggattgtttcgaaggagtcgtgtgctttgagacactgaacccgacatctcctcctcctcctgtcccagctcaggaacttgaaatctttgatctaatgaagcatctggctcatccacagcccgcggtgcagctaccaaaatcacctatcctatgcaaaccgtcaagggaggccatgctgcaggctctcaaggtcgcctccattaatccacagacaactatattgttcgatgacagcttcaggaacattgaagctgcaaagcaaattggaatgtgtactgtcctggttggaacatctgagcggaaaaagggtgctgaccatgccttggaaagcctccacaacatgaaggaagcactgccggagctgtgggaggaagctgagaaggatgaagatgtgaggaattcgagcaaagccggaatcgagacatctgtgatcgcgtaatcttttttgttccttggttacaaatgtagccccttctgttttccttggaggacaacacgaggtggtggtgtatgaaaaaagaggagacctcctcaaggggtgggggggactgactgatactacgaccactgatgttacaccccgtaaactattactatccaataagaatgttttcttcttcaact

SEQ ID NO: 23857 - protein, 282 aa, Zea mays subsp. mays; identical to SEQ ID NO: 19544
  misc_feature (1)..(282): Ceres Seq. ID no. 12415960

SEQ ID NO: 23858 - protein, 238 aa, Zea mays subsp. mays; identical to SEQ ID NO: 19545
  misc_feature (1)..(238): Ceres Seq. ID no. 12415961

SEQ ID NO: 23859 - protein, 212 aa, Zea mays subsp. mays; identical to SEQ ID NO: 19546
  misc_feature (1)..(212): Ceres Seq. ID no. 12415962

SEQ ID NO: 23860 - DNA, 1059 bp, Zea mays subsp. mays
  misc_feature (1)..(1059): Ceres Seq. ID no. 12415963
cacgagaccattacctagaacatcctaatcgaaaagttttgacgtgtgttcgatcttccggatgcgccggcccactgcaggaatggcggcgaccggaggagcgatggggagctacacgcaggcgggcagcgacgccgcgctgggccccggccacggccacggccacgcgcacgtcagctcgcagtggagcttctccaggcaggacctgccgcagatctcggagatggggatgataccggccgacatcgggggagagcatcgtgggcgccggcgggtgcaacagctccagcgacgccgcgcagtcctcctcctacctctccaggaccttctccgtcggctcctgggacgacaccaactccatcatgttctcgtccgcccccagcaagaagcccaaggtggaccccgccgacgacatggtcgccagcttcagcaccattgacccgcagttcggcctttccaactcgtccctggagctgcccggcatggacgactacctgcagctgcagcaggactccgtcgcctgcagagtgcgtgcgaagcgtggctgcgcgactcaccctcggagcattgccgagagggaaagaaggacgaggatcagcaagaggctgaagaagctgcaagacctcgtgcccaacatggacaagcaaacgaatacgtcggacatgttggaccttgctgtggattacatcaaagagctcaaggaccaagtcgagaagctaaaacacgaccaagcaaactgttgttgcctaggcaacaagagctgctgctgatgctggagaagcagacggaggagggtttttacgccgtaacaatgtaacatgtggagcggcttccatgactcagcttcctcttttcttggttgttccacggactagcgacccggccggtgccaacggcttgaagactaggagataacaagtaggacgatgttgtaatttagctaccacgacgcggtggctctggcttgcgtgtaaagaagtcctccctttcaacgcgactgggattgttgttgctggtaaaattgttgtaggaatatcatctgcgctccatttttcatcc

SEQ ID NO: 23861 - protein, 135 aa, Zea mays subsp. mays
  misc_feature (1)..(135): Ceres Seq. ID no. 12415964
MFSSAPSKKPKVDPADDMVASFSTIDPQFGLSNSSLELPGMDDYLQLQQDSVACRVRAKRGCATHPRSIAERERRTRISKRLKKLQDLVPNMDKQTNTSDMLDLAVDYIKELKDQVEKLKHDQANCCCLGNKSCC

SEQ ID NO: 23862 - protein, 125 aa, Zea mays subsp. mays
  misc_feature (1)..(125): Ceres Seq. ID no. 12415965
MRRPTAGMAATGGAMGSYTQAGSDAALGPGHGHGHAHVSSQWSFSRQDLPQISEMGMIPADIGGEHRGRRRVQQLQRRRAVLLLPLQDLLRRLLGRHQLHHVLVRPQQEAQGGPRRRHGRQLQHH

SEQ ID NO: 23863 - protein, 118 aa, Zea mays subsp. mays
  misc_feature (1)..(118): Ceres Seq. ID no. 12415966
MVASFSTIDPQFGLSNSSLELPGMDDYLQLQQDSVACRVRAKRGCATHPRSIAERERRTRISKRLKKLQDLVPNMDKQTNTSDMLDLAVDYIKELKDQVEKLKHDQANCCCLGNKSCC

SEQ ID NO: 23864 - DNA, 793 bp, Zea mays subsp. mays
  misc_feature (1)..(793): Ceres Seq. ID no. 12415980
gagagagagagagcgcgcgcgcgctggcaatggcgggagccgacgacctgaaggtgctgggcctgtggacgagcccgttcgtgatccgggtccgcatcgtgctcaacctcaagggcctggcgtacgagtacgtggaggacgacctcggcaacaagagcgcgctcctgctcagctccaacccggtgcacaagaccgtgcccgtgctgctccacgcgggtcgccccgtaaacgagtcccagatcatcctgcagtacatcgacgaggtctgggcggggaccgggccggccgtgctgccgcgcgacccctatgagcgcgcggccgcgcggttctgggcggcctacatcgacgacaaggtgaagtccgcgtggctgggcatgctgttcgagtgcagggacgagggggagcgggcggaggcggtggcgcgggccggcgaggcgctcgggacgctggagggcgcgctcagggggaagcccttcttcggcggcgacggcgtcggcttcgtggacgccgtgctcggcgggtacctcggctggttcggggccgtcggcaggatcatcggccgcaggctgatcgacccgactaagacgccgctgctggccgcgtgggaggaccggttccgcgccgccgacgtggccaagggcgtcgtaccggacgacgtcgacaagatgctcgcgttcctggagaccctgctcgcgaactactactccaagtgactgtactgagagcgaactactgctccaagtgactaaataagaagggctgcttaattaataattacagtatataattgtgc

SEQ ID NO: 23865 - protein, 236 aa, Zea mays subsp. mays
  misc_feature (1)..(236): Ceres Seq. ID no. 12415981
ERESARALAMAGADDLKVLGLWTSPFVIRVRIVLNLKGLAYEYVEDDLGNKSALLLSSNPVHKTVPVLLHAGRPVNESQIILQYIDEVWAGTGPAVLPRDPYERAAARFWAAYIDDKVKSAWLGMLFECRDEGERAEAVARAGEALGTLEGALRGKPFFGGDGVGFVDAVLGGYLGWFGAVGRIIGRRLIDPTKTPLLAAWEDRFRAADVAKGVVPDDVDKMLAFLETLLANYYSK

SEQ ID NO: 23866 - protein, 227 aa, Zea mays subsp. mays
  misc_feature (1)..(227): Ceres Seq. ID no. 12415982
MAGADDLKVLGLWTSPFVIRVRIVLNLKGLAYEYVEDDLGNKSALLLSSNPVHKTVPVLLHAGRPVNESQIILQYIDEVWAGTGPAVLPRDPYERAAARFWAAYIDDKVKSAWLGMLFECRDEGERAEAVARAGEALGTLEGALRGKPFFGGDGVGFVDAVLGGYLGWFGAVGRIIGRRLIDPTKTPLLAAWEDRFRAADVAKGVVPDDVDKMLAFLETLLANYYSK

SEQ ID NO: 23867 - DNA, 1856 bp, Zea mays subsp. mays
  misc_feature (1)..(1856): Ceres Seq. ID no. 12415997
gcacgagaccattacctagaacatcctaatcgaaaaacaccagctccactgcatcaaaacccctcatcaccctgcagcctgcactcatcagacatggtgctcaccatggccagcgcccaagaggactcgctcctcctgctcctcctcccgaccacctccccactgccgcccctcgtggccgtgttcatcctagccgccgtcctcctgtggctctcccccggcggtcctgcgtgggcgctctcccgctgccgccgcccgccgcccgggccaacgggcgtggtcaccgcgctctccagccccgtggcgcaccgcaccctggcggcgctgtcccacgccgtagacggcggcaaggcactgatggccttctcggtcgggctgacccgcctcgtcgtgtcgagccagcccgatacggcgcgcgagatcctcgccagccccggcgttcggcgaccgccccgtcaaggacgcggcgcgccacctgctcttccaccgcgccatgggcttcgcgccctcgggagacgcgcactggcgcgggctcccgccgcctcgccgccaaccacctgttcggcccgcgccgccgtggcgggtgccgcgcaccaccgcgcctccatcggcgaggccatggtcgccgacgtcgccgctgccatggcgcgccacggcgaggtccctctcaagcgcgtgctgcatgtcgcgtctctcaaccacatcatggccaccgtgtttggcaagcgctacgacatgggcagccgagagggcgcccttctggacgagatggtggccgagggctacgacctcctgggcacgttcaactgggctgaccacctgccattgctcaagcatctcgacccccagggcgtgcgccgccggtgcaacaggctggtccaaaaggtcgaatcgttcgttggtaagatcatcatggagcacaggacgaggcgcgcaaatggaggattcgtgagcgatgagtgcattggtgacttcgtcgacgtccttcttggcctcgagggtgaggagaagctgtcagatgcggacatgatcgctgttctttgggagatgatcttcagaggcgccgacaccgtggcgatcttgatggagtgggtcatggcgaggatggcgctgcacccggacatccaggcgaaggcccaggcggagctggacggcgtcgtgggcatcgggcgcggcgtggcggacgccgacgtcgccagcctaccctacatccagtgcatcgtgaaggagacgctgcgcatgcacccgccaggcccgctcctgtcgtgggcgcgcctcgccgtccacgacgcgcacgtcggcggccacctggtccccgccggcaccacagccatggtgaacatgtggtccatcgcgcacgaccccgccatctgggccgagccggagaagttccgccccggagcggttccaggaggaggacgtgagcgtcctcgggagcgacctccgcctggcccccttcggcgccgggcgccgcgcctgccccggcaagatactggccctcgccaccacccacctctgtgtcgcccagcttctgcacaagttcgagtgggccgccggcgggggcgtcgacctgtcggagcgcctgagcatgtcgctggagatggccacgccgctggtgtgcaaggccgtacccagggttcagggccaagcggcctcctagcctagcctccatgcatgcctgatgcctggatgccgtagcgagagtgggagactgatgagtgtatgccgttatgtttgtgtgtccatgcatgcatgcatgcctcggctactgtagcttcctggcttgcttgttgtgcatgtcctgcgtcgagaccttgcgtagtatgatgcagtataattttaataataatattatt

SEQ ID NO: 23868 - protein, 554 aa, Zea mays subsp. mays
  misc_feature (1)..(554): Ceres Seq. ID no. 12415998
ARDHYLEHPNRKTPAPLHQNPSSPCSLHSSDMVLTMASAQEDSLLLLLLPTTSPLPPLVAVFILAAVLLWLSPGGPAWALSRCRRPPPGPTGVVTALSSPVAHRTLAALSHAVDGGKALMAFSVGLTRLVVSSQPDTAREILASPGVRRPPRQGRGAPPALPPRHGLRALGRRALARAPAASPPTTCSARAAVAGAAHHRASIGEAMVADVAAAMARHGEVPLKRVLHVASLNHIMATVFGKRYDMGSREGALLDEMVAEGYDLLGTFNWADHLPLLKHLDPQGVRRRCNRLVQKVESFVGKIIMEHRTRRANGGFVSDECIGDFVDVLLGLEGEEKLSDADMIAVLWEMIFRGADTVAILMEWVMARMALHPDIQAKAQAELDGVVGIGRGVADADVASLPYIQCIVKETLRMHPPGPLLSWARLAVHDAHVGGHLVPAGTTAMVNMWSIAHDPAIWAEPEKFRPGAVPGGGRERPRERPPPGPLRRRAPRLPRQDTGPRHHPPLCRPASAQVRVGRRRGRRPVGAPEHVAGDGHAAGVQGRTQGSGPSGLLA

SEQ ID NO: 23869 - protein, 523 aa, Zea mays subsp. mays
  misc_feature (1)..(523): Ceres Seq. ID no. 12415999
MVLTMASAQEDSLLLLLLPTTSPLPPLVAVFILAAVLLWLSPGGPAWALSRCRRPPPGPTGVVTALSSPVAHRTLAALSHAVDGGKALMAFSVGLTRLVVSSQPDTAREILASPGVRRPPRQGRGAPPALPPRHGLRALGRRALARAPAASPPTTCSARAAVAGAAHHRASIGEAMVADVAAAMARHGEVPLKRVLHVASLNHIMATVFGKRYDMGSREGALLDEMVAEGYDLLGTFNWADHLPLLKHLDPQGVRRRCNRLVQKVESFVGKIIMEHRTRRANGGFVSDECIGDFVDVLLGLEGEEKLSDADMIAVLWEMIFRGADTVAILMEWVMARMALHPDIQAKAQAELDGVVGIGRGVADADVASLPYIQCIVKETLRMHPPGPLLSWARLAVHDAHVGGHLVPAGTTAMVNMWSIAHDPAIWAEPEKFRPGAVPGGGRERPRERPPPGPLRRRAPRLPRQDTGPRHHPPLCRPASAQVRVGRRRGRRPVGAPEHVAGDGHAAGVQGRTQGSGPSGLLA

SEQ ID NO: 23870 - protein, 519 aa, Zea mays subsp. mays
  misc_feature (1)..(519): Ceres Seq. ID no. 12416000
MASAQEDSLLLLLLPTTSPLPPLVAVFILAAVLLWLSPGGPAWALSRCRRPPPGPTGVVTALSSPVAHRTLAALSHAVDGGKALMAFSVGLTRLVVSSQPDTAREILASPGVRRPPRQGRGAPPALPPRHGLRALGRRALARAPAASPPTTCSARAAVAGAAHHRASIGEAMVADVAAAMARHGEVPLKRVLHVASLNHIMATVFGKRYDMGSREGALLDEMVAEGYDLLGTFNWADHLPLLKHLDPQGVRRRCNRLVQKVESFVGKIIMEHRTRRANGGFVSDECIGDFVDVLLGLEGEEKLSDADMIAVLWEMIFRGADTVAILMEWVMARMALHPDIQAKAQAELDGVVGIGRGVADADVASLPYIQCIVKETLRMHPPGPLLSWARLAVHDAHVGGHLVPAGTTAMVNMWSIAHDPAIWAEPEKFRPGAVPGGGRERPRERPPPGPLRRRAPRLPRQDTGPRHHPPLCRPASAQVRVGRRRGRRPVGAPEHVAGDGHAAGVQGRTQGSGPSGLLA

SEQ ID NO: 23871 - DNA, 1176 bp, Zea mays subsp. mays
  misc_feature (1)..(1176): Ceres Seq. ID no. 12416015
cgcaattaaccctcactaaagggaacaaaagctggagctccaccgcggtggcggccgctctagaactagtggatcccccgggctgcaggaattcgcacgagaccattacctagaacatcctaatcgaaaaagattataaggcgaagagccgtcgtgatcaccagacgagttaccagaccaagccgcagcaggaatttctcagatgtctaaagccaagcttcctcacgtcgagacggattcttccggcgacgacgatgggccgaagccaaggctagtgttccgtagacgcatgcgcacaccagttaagctgctcggtggccggaaagtctcggacgtcctgctatggaggaacaggaacctgtcagcggggatcctcgcgggggcgacgctggtctggttcctgttcgacgtggcggagtacaacgtggtgacgctcctttgccacgtcgcgctgctcgggatggtcctgctcttcgtctggtccaacgccgcgcctctccttgacaggccgcctccacagatcccggaggtgatcgtttctgaacacgcgttcagagaagctgcgcggaccacccattacagactggctcactttgtatccgtcctctacgacgttgcgtgcgggaaggatctcaagaagttcctcatggtgattggttctctgtggatactggcgatacttggagacacatgcagcttcacgacgctgttatatggcgggcttttgtgtgctctgactttaccggcgctgtacgagagatacgaagccgaggtggaccatcttgtggccaagggacgcgaagacctcaagaaattctacaggaaggttgactccaacgtgctcaacaagataccaagaggccctgtcaagacaaaggctctctgatcaagatgtgtgctttgtcaaattgccggtgcacgccggcagtcccgtacataaaagaaaaacagtaaccagtgtcaccagaccatctcaaatcagtttttatggtatctgattgtacgtgctagactactgctgcaatgatccaccatactttaccgtgtcagcagtaaacaagcctaaaatctgaagtaatttattcgtaaaaaaacaaataggtactggaagattgtaagtgttgccaaaacggaaaagtggcgaataaaaatctgaggtcattcggtgtgggacct

SEQ ID NO: 23872 - protein, 227 aa, Zea mays subsp. mays
  misc_feature (1)..(227): Ceres Seq. ID no. 12416016
MSKAKLPHVETDSSGDDDGPKPRLVFRRRMRTPVKLLGGRKVSDVLLWRNRNLSAGILAGATLVWFLFDVAEYNVVTLLCHVALLGMVLLFVWSNAAPLLDRPPPQIPEVIVSEHAFREAARTTHYRLAHFVSVLYDVACGKDLKKFLMVIGSLWILAILGDTCSFTTLLYGGLLCALTLPALYERYEAEVDHLVAKGREDLKKFYRKVDSNVLNKIPRGPVKTKAL

SEQ ID NO: 23873 - protein, 198 aa, Zea mays subsp. mays
  misc_feature (1)..(198): Ceres Seq. ID no. 12416017
MRTPVKLLGGRKVSDVLLWRNRNLSAGILAGATLVWFLFDVAEYNVVTLLCHVALLGMVLLFVWSNAAPLLDRPPPQIPEVIVSEHAFREAARTTHYRLAHFVSVLYDVACGKDLKKFLMVIGSLWILAILGDTCSFTTLLYGGLLCALTLPALYERYEAEVDHLVAKGREDLKKFYRKVDSNVLNKIPRGPVKTKAL

SEQ ID NO: 23874 - protein, 141 aa, Zea mays subsp. mays
  misc_feature (1)..(141): Ceres Seq. ID no. 12416018
MVLLFVWSNAAPLLDRPPPQIPEVIVSEHAFREAARTTHYRLAHFVSVLYDVACGKDLKKFLMVIGSLWILAILGDTCSFTTLLYGGLLCALTLPALYERYEAEVDHLVAKGREDLKKFYRKVDSNVLNKIPRGPVKTKAL

SEQ ID NO: 23875 - DNA, 2061 bp, Zea mays subsp. mays
  misc_feature (1)..(2061): Ceres Seq. ID no. 12416040
cattgttgattacacggtatgcgcagagtggttattctgatgaggctgtagaattgtttcttgacatgctggagaacggatttcagccggaccagtacaccttgagcagtatgttatcggcctgtacagagttgggatcattcaggttggggcagcaactgcactctctagcgctcaggcttggactggaatcagacagttgcgtgagctgtgggcttgtggacatgtatgcaaagtctcacaatggacagtccttgcacaatgcgagagaagtcttcaatcggatgccaaagcataatgtgatgtcgtggacggcacttttgtcagggtatgtgcagcgtggatcgcaggacaaccaggttatgatactgttttgcaagatgttaaatgaaggcatcagaccaaaccatatcacatattctagtatgcttaaggcatgtgcaaaccttggtgatcaagattcaggcaggcaaattcatactcattgcgtcaaatctaacctagctgacttaaacgttgttgggaatgctttagtaagcatgtatgctgaatctggttccatagaggaagctagacatgcgttcgaccagctatatgaaaagaacatggtatccttcagcggcaatttagacggagatgggaggagcaacacttatcaagactatcagattgaaagaatggagttaggaatcagcactttcacatttggtagtctgatcagtgctgccgcttgtgtagggatgctaaccaaaggccagcagctgcatgccctctcactgaaggctggatttgggtcagatagagccataggaaactctcttgtatctatgtattctaggtgtggatacctagtagatgcttgccaagtctttgatgaaatgaatgaccataatgtgatctcatggacttcaatgatcagtggtttggcaaaacatgggtatgcagcaagagctctggaattgtttcacgatatgatcgcagctggggtgaaaccaaatgatgtcacatacattgctgttttatctgcatgtagccatgccggtctagttaaagaagggaaggaacactttagaatgatgcagaagcatcatggactcataccaaggatggagcattatgcttgcatggttgatctccttgggcgatcaggccttgttgaagatgcactagattttatcaacgaaatgccttgtcaagtagacgcattggtctggaagacacttcttggtgcctgtaagacccacaacaacatggatattggtgagattgctgctaaccatgtcatacagctcgaaccacaagatccagccccctatgtcttgctttccaacttatacgcagaggctggtttgtgggatcaagtagctaggataaggagtctaatgagggataaaaacttgatgaaagaaaaagggttgagctggatgcatgttgacaataccattcacgagtttcgagctggtgataccagccatccacaagcagaggagatctatacaaagttggagacactgataagagaaatcaaagtcatgggctatgtaccagacaccagcgtagtgctccatgacatgtcggatgagcttaaggaactgtgtctgcttcagcacagcgagaagattgctgttgcattcggtttgatcagttgtacatcagcaacaaagccaataaggatatttaagaacctccgtgtatgcgttgattgtcattcagcactcaagtatgtctccaaggccaccggtagggagataatattgagagatagcaacagattccacaggatgaaggatggggaatgctcgtgcggagaatactggtaacaagcaagctagctagctcacgtagtcacgtttagctgaagagccatgtacagagttctggcgcaccacaacattattgacagtgagtgtccatgttcatattttctgtaggaccttcacaaaatcatagtttatacaaagcatgagttgttgtgatagtttatactttatactagggtcagagtttgtacagttgtatgcactctcctatcaccataaatgcaaattgttttgagtggtc

SEQ ID NO: 23876 - protein, 605 aa, Zea mays subsp. mays
  misc_feature (1)..(605): Ceres Seq. ID no. 12416041
LLITRYAQSGYSDEAVELFLDMLENGFQPDQYTLSSMLSACTELGSFRLGQQLHSLALRLGLESDSCVSCGLVDMYAKSHNGQSLHNAREVFNRMPKHNVMSWTALLSGYVQRGSQDNQVMILFCKMLNEGIRPNHITYSSMLKACANLGDQDSGRQIHTHCVKSNLADLNVVGNALVSMYAESGSIEEARHAFDQLYEKNMVSFSGNLDGDGRSNTYQDYQIERMELGISTFTFGSLISAAACVGMLTKGQQLHALSLKAGFGSDRAIGNSLVSMYSRCGYLVDACQVFDEMNDHNVISWTSMISGLAKHGYAARALELFHDMIAAGVKPNDVTYIAVLSACSHAGLVKEGKEHFRMMQKHHGLIPRMEHYACMVDLLGRSGLVEDALDFINEMPCQVDALVWKTLLGACKTHNNMDIGEIAANHVIQLEPQDPAPYVLLSNLYAEAGLWDQVARIRSLMRDKNLMKEKGLSWMHVDNTIHEFRAGDTSHPQAEEIYTKLETLIREIKVMGYVPDTSVVLHDMSDELKELCLLQHSEKIAVAFGLISCTSATKPIRIFKNLRVCVDCHSALKYVSKATGREIILRDSNRFHRMKDGECSCGEYW

SEQ ID NO: 23877 - protein, 584 aa, Zea mays subsp. mays
  misc_feature (1)..(584): Ceres Seq. ID no. 12416042
MLENGFQPDQYTLSSMLSACTELGSFRLGQQLHSLALRLGLESDSCVSCGLVDMYAKSHNGQSLHNAREVFNRMPKHNVMSWTALLSGYVQRGSQDNQVMILFCKMLNEGIRPNHITYSSMLKACANLGDQDSGRQIHTHCVKSNLADLNVVGNALVSMYAESGSIEEARHAFDQLYEKNMVSFSGNLDGDGRSNTYQDYQIERMELGISTFTFGSLISAAACVGMLTKGQQLHALSLKAGFGSDRAIGNSLVSMYSRCGYLVDACQVFDEMNDHNVISWTSMISGLAKHGYAARALELFHDMIAAGVKPNDVTYIAVLSACSHAGLVKEGKEHFRMMQKHHGLIPRMEHYACMVDLLGRSGLVEDALDFINEMPCQVDALVWKTLLGACKTHNNMDIGEIAANHVIQLEPQDPAPYVLLSNLYAEAGLWDQVARIRSLMRDKNLMKEKGLSWMHVDNTIHEFRAGDTSHPQAEEIYTKLETLIREIKVMGYVPDTSVVLHDMSDELKELCLLQHSEKIAVAFGLISCTSATKPIRIFKNLRVCVDCHSALKYVSKATGREIILRDSNRFHRMKDGECSCGEYW

SEQ ID NO: 23878 - protein, 569 aa, Zea mays subsp. mays
  misc_feature (1)..(569): Ceres Seq. ID no. 12416043
MLSACTELGSFRLGQQLHSLALRLGLESDSCVSCGLVDMYAKSHNGQSLHNAREVFNRMPKHNVMSWTALLSGYVQRGSQDNQVMILFCKMLNEGIRPNHITYSSMLKACANLGDQDSGRQIHTHCVKSNLADLNVVGNALVSMYAESGSIEEARHAFDQLYEKNMVSFSGNLDGDGRSNTYQDYQIERMELGISTFTFGSLISAAACVGMLTKGQQLHALSLKAGFGSDRAIGNSLVSMYSRCGYLVDACQVFDEMNDHNVISWTSMISGLAKHGYAARALELFHDMIAAGVKPNDVTYIAVLSACSHAGLVKEGKEHFRMMQKHHGLIPRMEHYACMVDLLGRSGLVEDALDFINEMPCQVDALVWKTLLGACKTHNNMDIGEIAANHVIQLEPQDPAPYVLLSNLYAEAGLWDQVARIRSLMRDKNLMKEKGLSWMHVDNTIHEFRAGDTSHPQAEEIYTKLETLIREIKVMGYVPDTSVVLHDMSDELKELCLLQHSEKIAVAFGLISCTSATKPIRIFKNLRVCVDCHSALKYVSKATGREIILRDSNRFHRMKDGECSCGEYW

SEQ ID NO: 23879 - DNA, 891 bp, Zea mays subsp. mays
  misc_feature (1)..(891): Ceres Seq. ID no. 12416118
taatccgaactatttcttttcgtcaaactaaagtgaagacaacgttttgctccgcaggacatgttcacggcgggtacggacacgtcgtcgatcatcgtggagtgggcgatggcggagatgctcaagaacccgagcgtcatggcgcgcgcgcaggaggagctggaccgcgcggtgggccggggccggcgcctggaggagtcggacctgcccggcctcccctacctgcaggcggtgtgcaaggaggccatgcggctgcacccgtccacgccgctcagcctcccgcacttctccttggacgcctgcgacgacgtcgacggctaccgcgtcccggccaacacccgcctgctcgtcaacgtctgggccatcggccgggacccggaggcctgggagaggcccctcgacttccgccccgagcgcttcctgcccgggggcggcgcggagaaggtcgacccgctggggaactgcttcgagctcatcccgttcggcgccggccggaggatntgcgcggggaagctggcgggcatggtgttcgtgcagtacttcctgggcacgctgctgcacgcgttcgactggcgcctgcctgacggcgaggagaagctggacatgagcgagacgttcggcctcgcgctgcccaaggcagtgccgctccgcgccgtcgccacgccacggctcgtgccggaagcctatgcctgagcctgagttagctgtcagagttnttcacgcgtgctgtcccaacaagcatggtttggcttggatggtttactctgttggtgttgctgccttcctgcatacgtgngcatacactagtattctgtgttgatcctacacttgttgcctggtatagtacacaacatttgaacagatgatggttgatntgaactnnnnggagtt

SEQ ID NO: 23880 - protein, 210 aa, Zea mays subsp. mays
  misc_feature (1)..(210): Ceres Seq. ID no. 12416119
  misc_feature (147)..(147): Xaa is any aa, unknown or other
MFTAGTDTSSIIVEWAMAEMLKNPSVMARAQEELDRAVGRGRRLEESDLPGLPYLQAVCKEAMRLHPSTPLSLPHFSLDACDDVDGYRVPANTRLLVNVWAIGRDPEAWERPLDFRPERFLPGGGAEKVDPLGNCFELIPFGAGRRXCAGKLAGMVFVQYFLGTLLHAFDWRLPDGEEKLDMSETFGLALPKAVPLRAVATPRLVPEAYA

SEQ ID NO: 23881 - protein, 194 aa, Zea mays subsp. mays
  misc_feature (1)..(194): Ceres Seq. ID no. 12416120
  misc_feature (131)..(131): Xaa is any aa, unknown or other
MAEMLKNPSVMARAQEELDRAVGRGRRLEESDLPGLPYLQAVCKEAMRLHPSTPLSLPHFSLDACDDVDGYRVPANTRLLVNVWAIGRDPEAWERPLDFRPERFLPGGGAEKVDPLGNCFELIPFGAGRRXCAGKLAGMVFVQYFLGTLLHAFDWRLPDGEEKLDMSETFGLALPKAVPLRAVATPRLVPEAYA

SEQ ID NO: 23882 - protein, 193 aa, Zea mays subsp. mays
  misc_feature (1)..(193): Ceres Seq. ID no. 12416121
  misc_feature (167)..(167): Xaa is any aa, unknown or other
IRTISFRQTKVKTTFCSAGHVHGGYGHVVDHRGVGDGGDAQEPERHGARAGGAGPRGGPGPAPGGVGPARPPLPAGGVQGGHAAAPVHAAQPPALLLGRLRRRRRLPRPGQHPPARQRLGHRPGPGGLGEAPRLPPRALPARGRRGEGRPAGELLRAHPVRRRPEDXRGEAGGHGVRAVLPGHAAARVRLAPA

SEQ ID NO: 23883 - DNA, 1208 bp, Zea mays subsp. mays
  misc_feature (1)..(1208): Ceres Seq. ID no. 12416178
tatgctacgccaagcccgcaattaaccctcactaaagggaacaaaagctggagctccaccgcggtggcggccgctctagaactagtggatcccccgggctgcaggaattcgcacgagaccattacctagaacatcctaatcgaaaagttgcgttccagggcgagctatcgcgcagcaggcacagcgccctacaacgcccggccgtgcaaactaaccttcggatcagatggagacgccggcggcggactcctccggcggcgaccgctacaggtcccacctggctggcgagggcgagaagcacaccgtgtggcggcacggcgcgccgccctcgtacgacgccgtgaacgcgctcttcgaggccgagcgcacgcaggagtggccggcggggtcgctggaggagatcgtgcagaacgcgatcaagacgtgggagatggagctgtcgcacaaggcgcggctgtcggacttcaagtccgtgagccccggcaggttcaggctgtccgtgaacggcggtcgggcccggagcggggaggagacgctggccgtgggcagctacaacgcgctgctggacagcccgctcctggcgcgcgcgggcgcgtacgacgcctccgccgagacgttccggtcctcgcacgacctgttccgcgccgcgttcccgcgcggcttcgcctgggaggtgctcaaggtctactccggcccgccgctgctcgccttcaagttccggcactggggccacaaggaggggccctacaagggccacgccgccaccggcgacaaggtcgagttcttcggcgtcgccgtgcttaaggtggacgatgagctgcgagcggaagacgtggaggtgtactacgacccgggcgagcttttgggaggccttctcaagggacccaaggtggcttcctccgaggaggaccgccgcgaggccgctgccgtgtcggcgtcaggtgctgtcccgccgccgctagcttgcccctttctcaaccccgggaagccacagtgatcaaccagcaccccccatttatgtagcggtttggtgaataagtgaaagcttaaaatgacggtgttcctggtcgtccatggacatcactgagggtacttgtaccccattgattaattgatgtttcatgaccagaagaaattgttcgcgtaataattgtgtgatattccttcacccaaaaataaataaaaataaagcaacgcgtaattgttcc

SEQ ID NO: 23884 - protein, 256 aa, Zea mays subsp. mays
  misc_feature (1)..(256): Ceres Seq. ID no. 12416179
METPAADSSGGDRYRSHLAGEGEKHTVWRHGAPPSYDAVNALFEAERTQEWPAGSLEEIVQNAIKTWEMELSHKARLSDFKSVSPGRFRLSVNGGRARSGEETLAVGSYNALLDSPLLARAGAYDASAETFRSSHDLFRAAFPRGFAWEVLKVYSGPPLLAFKFRHWGHKEGPYKGHAATGDKVEFFGVAVLKVDDELRAEDVEVYYDPGELLGGLLKGPKVASSEEDRREAAAVSASGAVPPPLACPFLNPGKPQ

SEQ ID NO: 23885 - protein, 188 aa, Zea mays subsp. mays
  misc_feature (1)..(188): Ceres Seq. ID no. 12416180
MELSHKARLSDFKSVSPGRFRLSVNGGRARSGEETLAVGSYNALLDSPLLARAGAYDASAETFRSSHDLFRAAFPRGFAWEVLKVYSGPPLLAFKFRHWGHKEGPYKGHAATGDKVEFFGVAVLKVDDELRAEDVEVYYDPGELLGGLLKGPKVASSEEDRREAAAVSASGAVPPPLACPFLNPGKPQ

SEQ ID NO: 23886 - DNA, 814 bp, Zea mays subsp. mays
  misc_feature (1)..(814): Ceres Seq. ID no. 12416225
gtttgtccgccaggcgccagcgcccctctctcgttcgttccacttccacctcctcccacgcatcgcactcgcacccaccgcccgtgatctcccgcgcgcctacctacggcggccagatgagctccgcggcggccgacgtcctcccggcggcgctgccgccgatcaggaccacggcggagcccgtggcctcgtccttgcctccggcggagaagggggcgcaggagcaggagcaggaggcggagcccacgacgccgacgtcggaggagagccggcttcgggcgccggccgagtgccctccggcgccgcggaagtcggcgtgggcgcctccgcggccgccggcggtgccaccaacgcccgccaagcgcaggctcccgtcttccgctgcgccgtcggcatcggcgtcggcgtcggcgcgccgcgccttcttccccgtcgcccgcgacctcgccgccgtgttccgcgccctgccgcccaagaancggatccgcgcgggctgacggccagttgcgtgccttgcgggcacggcgacctcaccggcatggtggtncagactacagagtacagacctntcgtagaaatggtgtgttggtttattatttacttgccctatgcttcttcttcttcttcttctttttagtgtggttgtgtgcgtgtgtgtggaagtggaatagaaactgtagaattgggaattgttcttatttacagggggtgatgaattggggtggggggcgagaagaaatggaaagcatgtaagagagttcgcagagatctgttcattactacattcgntatagtaaactatagctcacagttc

SEQ ID NO: 23887 - protein, 211 aa, Zea mays subsp. mays
  misc_feature (1)..(211): Ceres Seq. ID no. 12416226
  misc_feature (160)..(160): Xaa is any aa, unknown or other
  misc_feature (182)..(182): Xaa is any aa, unknown or other
  misc_feature (190)..(190): Xaa is any aa, unknown or other
FVRQAPAPLSRSFHFHLLPRIALAPTARDLPRAYLRRPDELRGGRRPPGGAAADQDHGGARGLVLASGGEGGAGAGAGGGAHDADVGGEPASGAGRVPSGAAEVGVGASAAAGGATNARQAQAPVFRCAVGIGVGVGAPRLLPRRPRPRRRVPRPAAQEXDPRGLTASCVPCGHGDLTGMVXQTTEYRPXVEMVCWFIIYLPYASSSSSSF

SEQ ID NO: 23888 - protein, 164 aa, Zea mays subsp. mays
  misc_feature (1)..(164): Ceres Seq. ID no. 12416227
  misc_feature (159)..(159): Xaa is any aa, unknown or other
LSARRQRPSLVRSTSTSSHASHSHPPPVISRAPTYGGQMSSAAADVLPAALPPIRTTAEPVASSLPPAEKGAQEQEQEAEPTTPTSEESRLRAPAECPPAPRKSAWAPPRPPAVPPTPAKRRLPSSAAPSASASASARRAFFPVARDLAAVFRALPPKXRIRAG

SEQ ID NO: 23889 - protein, 126 aa, Zea mays subsp. mays
  misc_feature (1)..(126): Ceres Seq. ID no. 12416228
  misc_feature (121)..(121): Xaa is any aa, unknown or other
MSSAAADVLPAALPPIRTTAEPVASSLPPAEKGAQEQEQEAEPTTPTSEESRLRAPAECPPAPRKSAWAPPRPPAVPPTPAKRRLPSSAAPSASASASARRAFFPVARDLAAVFRALPPKXRIRAG

SEQ ID NO: 23890 - DNA, 802 bp, Zea mays subsp. mays
  misc_feature (1)..(802): Ceres Seq. ID no. 12416233
acaaggtgatgagcccattcctgactcagcgcaccaagagcaagatcgtcttctgcagccccggcaagtcggcggagaccctcttcaggtacatcgccccggagcaagtccccgtccagttcggcggcctgtacaaggaggacgacaccgagttctccacctccgacgccgtcaccgagctcaccgtgaaaccgtcctccaaggagaccgtcgagatcccagccaccgagaactccaccgtggtgtgggagctccgcgtgctggggtgggaggtgagctacggcgccgagttcacccccgacgcggagggcggctacaccgtcatcgtgcagaagacgcggaaggtctccgcccacgaggagcccatcatgaagggcagcttcaaggccacggagcccggcaagctggtgctgggcgtgaacaacccggcgtccaggaagaagaagctgctgtgccggttcaaggtgaggagcgccnccgcctgatgagggtcgttggtctgggtcccagcaggtacagcctgccagctgcttgaccnccagcccgacatgtataattcgatcgatcgccaaccaggtccataccgccnccatttgaatgaacatgctgcattgcattacatgataggagagagagagagagagagagaggncaataaagagtttctgcttcctagctaggcccgttccgtgtcctggtcgttctttgattatttgttggcttgctgttcttttttttccttggggggagggtcgcgtttgnatgtgtttattncttgaatgaaaacaaaagtgagcttgtt

SEQ ID NO: 23891 - protein, 177 aa, Zea mays subsp. mays
  misc_feature (1)..(177): Ceres Seq. ID no. 12416234
  misc_feature (159)..(159): Xaa is any aa, unknown or other
QGDEPIPDSAHQEQDRLLQPRQVGGDPLQVHRPGASPRPVRRPVQGGRHRVLHLRRRHRAHRETVLQGDRRDPSHRELHRGVGAPRAGVGGELRRRVHPRRGGRLHRHRAEDAEGLRPRGAHHEGQLQGHGARQAGAGREQPGVQEEEAAVPVQGEERXRLMRVVGLGPSRYSLPAA

SEQ ID NO: 23892 - protein, 160 aa, Zea mays subsp. mays
  misc_feature (1)..(160): Ceres Seq. ID no. 12416235
  misc_feature (159)..(159): Xaa is any aa, unknown or other
KVMSPFLTQRTKSKIVFCSPGKSAETLFRYIAPEQVPVQFGGLYKEDDTEFSTSDAVTELTVKPSSKETVEIPATENSTVVWELRVLGWEVSYGAEFTPDAEGGYTVIVQKTRKVSAHEEPIMKGSFKATEPGKLVLGVNNPASRKKKLLCRFKVRSAXA

SEQ ID NO: 23893 - protein, 158 aa, Zea mays subsp. mays
  misc_feature (1)..(158): Ceres Seq. ID no. 12416236
  misc_feature (157)..(157): Xaa is any aa, unknown or other
MSPFLTQRTKSKIVFCSPGKSAETLFRYIAPEQVPVQFGGLYKEDDTEFSTSDAVTELTVKPSSKETVEIPATENSTVVWELRVLGWEVSYGAEFTPDAEGGYTVIVQKTRKVSAHEEPIMKGSFKATEPGKLVLGVNNPASRKKKLLCRFKVRSAXA

SEQ ID NO: 23894 - DNA, 994 bp, Zea mays subsp. mays
  misc_feature (1)..(994): Ceres Seq. ID no. 12416292
acttcggcatgcgccgggaatttgattcttctgcctaaaatagtcacgctaccttccacctccccctactactctgactctccctcgtcttcttcgctaccaagatgatggcggaggcgtggacgccggtgctgttgccggcgacggcgccctgcttctggcagcaggacacgcactcggttttgtggcggagaggagacgcgtggacggcggaggagaacaagctgttcgagaaggcactggcgcagatcgaccggaacgcgcccgacaggtgggagaaggtggcggcggtgctgccctggaagacggtcgacgacgtgaggagccagtaccacgccctcgagaaggacgtgggcgtcatcgaggccggcgggctcgtgccgttcccgcgctacagcggctcggtcccgccgccgtccgggttcgccctcgaggactggggcggcggcgaccgcgggttcaggcgcgcgcgcggctcggaggagatgcaggagcggaagaagggtgtcccctggacggaggaggagcacaagcttttcttgatggggctgaggaagtacgggagaggggactggaggaacatctcgcgcaagtacgtgacgacccggacgccgacgcaggtggccagccacgcgcagaagtacttcatccggctcagctccggcggcaaggacaagcggcggtccagcatccacgacatcaccaccgtcaacctcccaggcgacgccccgcgctcgtcgccgcccgcggccaccaccaacccctccgccggcgccctggtggtggacgtgaagcccttcgtgtgacgaggatgaagagtggcacagcctcgtcgtccagctgccagctcgcggcagctccgagcgactgcgttcatcgagaacaagacgccatgggcggcaatgcggcatccgtttcagttcagtgtacataattcggcaagtacagagcccaacaacttccacgtaaaaggtactgaataataaagcattcg

SEQ ID NO: 23895 - protein, 233 aa, Zea mays subsp. mays
  misc_feature (1)..(233): Ceres Seq. ID no. 12416293
MMAEAWTPVLLPATAPCFWQQDTHSVLWRRGDAWTAEENKLFEKALAQIDRNAPDRWEKVAAVLPWKTVDDVRSQYHALEKDVGVIEAGGLVPFPRYSGSVPPPSGFALEDWGGGDRGFRRARGSEEMQERKKGVPWTEEEHKLFLMGLRKYGRGDWRNISRKYVTTRTPTQVASHAQKYFIRLSSGGKDKRRSSIHDITTVNLPGDAPRSSPPAATTNPSAGALVVDVKPFV

SEQ ID NO: 23896 - protein, 232 aa, Zea mays subsp. mays
  misc_feature (1)..(232): Ceres Seq. ID no. 12416294
MAEAWTPVLLPATAPCFWQQDTHSVLWRRGDAWTAEENKLFEKALAQIDRNAPDRWEKVAAVLPWKTVDDVRSQYHALEKDVGVIEAGGLVPFPRYSGSVPPPSGFALEDWGGGDRGFRRARGSEEMQERKKGVPWTEEEHKLFLMGLRKYGRGDWRNISRKYVTTRTPTQVASHAQKYFIRLSSGGKDKRRSSIHDITTVNLPGDAPRSSPPAATTNPSAGALVVDVKPFV

SEQ ID NO: 23897 - DNA, 1132 bp, Zea mays subsp. mays
  misc_feature (1)..(1132): Ceres Seq. ID no. 12416375
caactttcagaacagccaaattaagaagcaaacatattcttctagttcttccgtggtaggacatggcagagagcatggggagagacggtggtgatggtgagctcaagctgctggggctgtgggcgagcccgttcgtagcgagagcgaagctcgcgctccagatcaagggcctaagctacgagtacgtcgaggaggatctcggcaacaagagcgagctgctgctcagctccaacccggtgcacaagacggtgccggtgctgatccacaacgggacgccggtctgcgagtcgacggtcatcgtccagtacatcgacgacgctttcgccggcactggcccgtccctcctccccgctgacccctaccagcgcgcccttgctcgcttctgggccgcctacctcgaagacaagattgtgacgccgtggcggcggtttttcatggtcaaggccgacgaggagaaggccgaggcgatgaggcagacggtcgcagccatggacgcgctggagggaggcctgaaggaatgctcttctgggggtgggggccagagccccttcttcggcggcgacagcgtcggctacgtggacgtccttctgggtggcatggtttcatgggtcaaggcatccgagccgctctccggcgccaagatcatcgacgcagccaggacgccgctcctggccgcgtggatggagcgcttctgcgagctggacgcggccaaggcggtcctgcaggacgtccatgaggttgtcgagtacgccaggacggtgcaggcacgggttgccgctgcgaccgcaagcaatcagtagtggaaacaccgtgaaccccgaacccagtaggcaacgtgatcccatcttctcagttggctcccgttcggctcagtgcgtcacctctgtcctgccctttgcacctgccctatccgcgtgttcgtaagccgtcgtcccaggaaacgtcgtgccatagacgatctcccggactgttgagactaccaacgtgtgtttttgaacaggaacatgtacctgcaattaccgatacgtccatcctcgttgagtcaatggcaacgatgcaagggtctgcatcattttggaattacctgaatctatgaactgggaatgataaggtgggccacatttgatcattt

SEQ ID NO: 23898 - protein, 245 aa, Zea mays subsp. mays
  misc_feature (1)..(245): Ceres Seq. ID no. 12416376
MAESMGRDGGDGELKLLGLWASPFVARAKLALQIKGLSYEYVEEDLGNKSELLLSSNPVHKTVPVLIHNGTPVCESTVIVQYIDDAFAGTGPSLLPADPYQRALARFWAAYLEDKIVTPWRRFFMVKADEEKAEAMRQTVAAMDALEGGLKECSSGGGGQSPFFGGDSVGYVDVLLGGMVSWVKASEPLSGAKIIDAARTPLLAAWMERFCELDAAKAVLQDVHEVVEYARTVQARVAAATASNQ

SEQ ID NO: 23899 - protein, 241 aa, Zea mays subsp. mays
  misc_feature (1)..(241): Ceres Seq. ID no. 12416377
MGRDGGDGELKLLGLWASPFVARAKLALQIKGLSYEYVEEDLGNKSELLLSSNPVHKTVPVLIHNGTPVCESTVIVQYIDDAFAGTGPSLLPADPYQRALARFWAAYLEDKIVTPWRRFFMVKADEEKAEAMRQTVAAMDALEGGLKECSSGGGGQSPFFGGDSVGYVDVLLGGMVSWVKASEPLSGAKIIDAARTPLLAAWMERFCELDAAKAVLQDVHEVVEYARTVQARVAAATASNQ

SEQ ID NO: 23900 - DNA, 1214 bp, Zea mays subsp. mays
  misc_feature (1)..(1214): Ceres Seq. ID no. 12416435
gcacgagaccattacctagaacatcctaatcgaaaaaaaaactccccagtcaaggcgcatatccattccatggatctcgcgcccctgctccttctctcccagctgctgctgcttccggtggtggcggttgtctccggcgagaccgccgcgcacccgggctacacacacgctgaggaggcatgcagcggtgtgctagaggcagaggcggagaaagcaacggtgctggtgcctgcgcccagagcggcgcgaagagttcgacggggggcggatcgtggacatcagccactactaccgcgaggacatgccggagtgggagtcatcagagggctccggcgagttcctgcagctggcgcgttccatgcgcaacggctccgacatcgctaacttctcggagctccggctcactgcgcactccggcacccacgtcgacgcgccgggacacgtcttcgagcactactacgacaccggcttcgacgtcgacaccctcgacctcgctgtcctcaacggaccagcgctgttggttgacgttcccagagataagaacatcacagctgatgttatggcatccctaaacatgcctaaaggtgttcgacgtgtactctttcggaccctaaatacagacaggatggtgcacaatggttggttgataatacagacatcaaactagttggagttgactacttgtcagtgggcgcatttgatgaatgcattccagctcatctagtatttcttgaaaaaagggaggtcatacttgtcgaagccttgaatctggagcatgttagccctggaatatacatcttgcattgcttgccactaagattgcggggtgctgaaggttctcctgcaagatgcatcctcatcaagtgacatggttataaccatcccaaaaagcattgtacaatcaatcttgaaacctacctattcagtcttttcgaagtgcttatagaagtatggttttcatgcgtgtgtttatagggatggtgtgaggacccaataatatggagctgggctagtactgatccaatcgacactaatatgagctgaagatactacataaaacatgaacaatatggagttttatatactggaccccagtccaggttttaaatccacccctgcaaggggtgaatttatgtttgtgtttgggagtgtatatttctatattgcagtttgaaaaaaactatgtatgtaataaaataagaatacatcaattc

SEQ ID NO: 23901 - protein, 130 aa, Zea mays subsp. mays
  misc_feature (1)..(130): Ceres Seq. ID no. 12416436
MQRCARGRGGESNGAGACAQSGAKSSTGGGSWTSATTTARTCRSGSHQRAPASSCSWRVPCATAPTSLTSRSSGSLRTPAPTSTRRDTSSSTTTTPASTSTPSTSLSSTDQRCWLTFPEIRTSQLMLWHP

SEQ ID NO: 23902 - protein, 127 aa, Zea mays subsp. mays
  misc_feature (1)..(127): Ceres Seq. ID no. 12416437
ARDHYLEHPNRKKNSPVKAHIHSMDLAPLLLLSQLLLLPVVAVVSGETAAHPGYTHAEEACSGVLEAEAEKATVLVPAPRAARRVRRGADRGHQPLLPRGHAGVGVIRGLRRVPAAGAFHAQRLRHR

SEQ ID NO: 23903 - protein, 121 aa, Zea mays subsp. mays
  misc_feature (1)..(121): Ceres Seq. ID no. 12416438
MPEWESSEGSGEFLQLARSMRNGSDIANFSELRLTAHSGTHVDAPGHVFEHYYDTGFDVDTLDLAVLNGPALLVDVPRDKNITADVMASLNMPKGVRRVLFRTLNTDRMVHNGWLIIQTSN

SEQ ID NO: 23904 - DNA, 1087 bp, Zea mays subsp. mays
  misc_feature (1)..(1087): Ceres Seq. ID no. 12416462
gcacgagaccattacctagaacatcctaatcgaaaaagttccttcggttgctaacatctctagccgagacatttgacattttgacttgaacaatctgctcatctaccactccggcactcccacgccgggccgcgcggatcgcatcgagtttgagtggagtaggcggcgggcagcgaatcagcgatgaaggtgcagtgcgacgtgtgcgcggccgaggcggcctccgtcttctgctgcgccgacgaggccgcgctgtgcgacgcgtgcgacgaccgcgtccaccgcgccaacaagctcgcggggaagcaccgccgcttctccctcctccacccctgttcgtcctctgcgcagaagccgccgctctgcgacatctgccaggagcggagaggcttcttgttctgcaaggaggacagggcgatcctgtgccgggagtgcgacgcgccggtgcacagcgcgaacgacatgacgaggcggcacagccggttcctgctcaccggcgtgcgcctctcgtcagcgccggtggactctgctgacccatcagaaggggaggaggaggaggagcaggagaacagcagcaggcccggcaacggcgagtcctgcagcggcggcgccggcgccggcgcgaccacggcgaccgccagcgacgggagcagcatctccgagtacctgaccaagaccctgcccgggtggcacgtcgaggacttcctcgttgacgacgcgtacgccagcgacgtcggcgcctgctcagacggcctttatcagggacaagatggacagatcagcggggtgctgcaagaagcttacatgccgtggacggggcgggagctggtgccctctgacgtcgcagacgagcgggacaactgggagcggtgggtgccgcagatgcacgcggagttcgccggcgacagcaagcggcccagagcgtcgccttcgcctccctgttcgtactggtgaaaagctcgccgttattagtagagttgatttgtactgggtaccgtaggaacgaagagaaagatgagccaaaaaatcatggaacggaccggtgtttctctgttggattattattgggtcgatttcgatcgagctc

SEQ ID NO: 23905 - protein, 256 aa, Zea mays subsp. mays
  misc_feature (1)..(256): Ceres Seq. ID no. 12416463
MKVQCDVCAAEAASVFCCADEAALCDACDDRVHRANKLAGKHRRFSLLHPCSSSAQKPPLCDICQERRGFLFCKEDRAILCRECDAPVHSANDMTRRHSRFLLTGVRLSSAPVDSADPSEGEEEEEQENSSRPGNGESCSGGAGAGATTATASDGSSISEYLTKTLPGWHVEDFLVDDAYASDVGACSDGLYQGQDGQISGVLQEAYMPWTGRELVPSDVADERDNWERWVPQMHAEFAGDSKRPRASPSPPCSYW

SEQ ID NO: 23906 - protein, 163 aa, Zea mays subsp. mays
  misc_feature (1)..(163): Ceres Seq. ID no. 12416464
MTRRHSRFLLTGVRLSSAPVDSADPSEGEEEEEQENSSRPGNGESCSGGAGAGATTATASDGSSISEYLTKTLPGWHVEDFLVDDAYASDVGACSDGLYQGQDGQISGVLQEAYMPWTGRELVPSDVADERDNWERWVPQMHAEFAGDSKRPRASPSPPCSYW

SEQ ID NO: 23907 - DNA, 1534 bp, Zea mays subsp. mays
  misc_feature (1)..(1534): Ceres Seq. ID no. 12416465
agaacgccccagccttccacctcgaactccgcggtgcccagcgccctcggtaaccgccctccgccctgccacagagacaggtcgacgagacagacaaaggccggccgccatgggagaggacaagaaggcgggcaacaaggacgccgccggcggcgacaagaagaaggacgccggcgccggggccgcgccgcagcccatcgtgctgaaggtcgacttgcactgcgccggctgcgccaacaaggtccgcaaggccatcaagcacgccccaggtgtggagtcggtgacgccggacatggcggngggtaaggtggtcgtgaccggtccggcggacgcggtggagctcaaggagcgcatcgaggccagggcgaagaagcccgtgcagatcgtctccgccggcgccggcccacccaagtaaggagaaggataagaaagcggacggcggcgagaagaaggcggacaaagagaagggcggcggcggcggagagaagaaggccgacaaggagaagggcggcggagagaagaaggccgacaaggagaagggcggcggagagaagaaggccgacaaggagaagggcggcggcgagaagaaggccgacaaggagaagggtgccgacaagcccaaggaggagaagaagaagcccaaggaggagactgtgacgctgaagatccggctgcactgtgacggctgcatcgagcgcatcaagcgccgcatctccaagatcaaaggcgtgaaggacgtggcgttcgacgccgccaaggacctggtgaaggtgaccggcaccatggacggcgccgctctgccggcgtacctcagggagaagctcagccgggacgtggaagtggtggcgcccggcaagaaggacggcggcggcggcggtggtgacaagaaggacaagggcgcaggagacgggggagagaagaagaaggacggtggcggcggcggcggcggcggcggcgccgaggaaaagaaggacaaggccggggccgcggccgcctccgcgtcggtggcgccgacgcccctggccgacgccggcatgtaccaggtgccgccgcactacgggtacgcgccgtaccaccagccggctccaggcggctactacggtgccgccccaccgcccatccaccacgccggcttctaccccaacggcggcgtccattacccgcccgcgccagcctacgcgtacggccccacccacctccacgcgccccagatgttcagcgacgagaaccccaacgcntgctccgtcatgtgaactcgctcgcttcgccggtttgccgccgccgccgccgccgcgcctaggctcccccttcctccgtgtgagaccaagaaccatgggcttggcctgggattagcggtgtctttagttaaaattatcagtgagtagtagctagcttaagcagtgctccgatccgagatcagttccagcagacctgtgtaaatgagagtcccgccgctccgcgccggcccatcccggtgtaacgaatcgtcatgtgtaaaatgtatccggacccgataaagttttgcccttctgcc

SEQ ID NO: 23908 - protein, 156 aa, Zea mays subsp. mays
  misc_feature (1)..(156): Ceres Seq. ID no. 12416466
  misc_feature (152)..(152): Xaa is any aa, unknown or other
MDGAALPAYLREKLSRDVEVVAPGKKDGGGGGGDKKDKGAGDGGEKKKDGGGGGGGGGAEEKKDKAGAAAASASVAPTPLADAGMYQVPPHYGYAPYHQPAPGGYYGAAPPPIHHAGFYPNGGVHYPPAPAYAYGPTHLHAPQMFSDENPNXCSVM

SEQ ID NO: 23909 - protein, 137 aa, Zea mays subsp. mays
  misc_feature (1)..(137): Ceres Seq. ID no. 12416467
  misc_feature (100)..(100): Xaa is any aa, unknown or other
ERPSLPPRTPRCPAPSVTALRPATETGRRDRQRPAAMGEDKKAGNKDAAGGDKKKDAGAGAAPQPIVLKVDLHCAGCANKVRKAIKHAPGVESVTPDMAXGKVVVTGPADAVELKERIEARAKKPVQIVSAGAGPPK

SEQ ID NO: 23910 - protein, 101 aa, Zea mays subsp. mays
  misc_feature (1)..(101): Ceres Seq. ID no. 12416468
  misc_feature (64)..(64): Xaa is any aa, unknown or other
MGEDKKAGNKDAAGGDKKKDAGAGAAPQPIVLKVDLHCAGCANKVRKAIKHAPGVESVTPDMAXGKVVVTGPADAVELKERIEARAKKPVQIVSAGAGPPK

SEQ ID NO: 23911 - DNA, 1536 bp, Zea mays subsp. mays
  misc_feature (1)..(1536): Ceres Seq. ID no. 12416469
aatccgctccgggcgtcatcgttgtatccaaagcgccgtgctagattccacacctagacaggacgccgcacacggcagccacccccttgtgtgcgtgactgcgtctcgcgcgggcaagagtgcacgggcagagccatggacgtagaagcgcgcaaggccgacgcgccgctcgcgcaaggcaaggcgatgcaccgctttctcgtagcgctcaactgcgggatgctggcggtgggagccatcggcgggccgctcctgagccggctctacttcagcaagggtgggcaccggcagtggctgtccgcgtggctggagaccggcgggtggccgctgctggtgattcccgtggcggcgtcgntcgtggcccgccgcgcgcgcgacaggggcgccccggttcctgctcgcgccgccgcggatcctgctggccgccgcgggcctcggcgtggccacgggcgcggacgacttcatctacgcctacgggctcgcgtacctcccggtgtccacgtccgcgatcctgatctcgacgcagctggcgttcacggtgttcttcgcgttcctcgtggtgcggcagcgcctgacggccgcgtccgtgaacgccgtggcgctgctgacggtgggcaccgtggtgctgggcctgcacgtctcgtcggaccggcccccgggcgtcaccaggggccagtactggctgggcttcgtgctgacgctcggcgccgcggcgctctacggcctcgtcctgccgctcgtggagctcgcctacaggcgcgccgcgggcgccggcggccgcgccgtnacgtacgcgctggtggtgnagatgcagctggtgatgggcttcttcgccaccgcgttctgcaccgtcggcatggtcgtcaacaaggatttccaggcgatcccgagggaggcgaggcggtacgcgctgggggaggcgcggtactacgcggtgctggcgtggtcggcggtgatgtggcagtgcttcttcctgggcgcggtgggcgtcatcttctgcgtgcacacgctgctggcgggcatcctcatcgcggtgttcatcccggtgacggaggtggcggccgtcatcttcctgcgcgagaggttcagcagcgagaaaggcgtggcgctggtgctctcgctctggggcctcgcgtcctactcctacggcgagtggagcgaggccagggccaagaagaggaagaggacgaggacggaggagggcgccgccgccgcggaggccctgcagcaggcgaacccgtgatgctgctgcggactttggcctggcctcttcgatcttccccgttgtgtgtatatcagtatatgttgtgattgtgatcgctgctgtgtgctacgtggatagcgtcctgaatcgtcgtcacctgcagctgtcgcttctggtgtgggtgctcttctgttcggcggtggacgttggccaatantgtgctgcatggtgtgtagatgtaccttggcagtaccacgttcggttcggacagtaagtntggaccggcgcactttgtgggccgatcccagtacaggactgatctaatntgaacg

SEQ ID NO: 23912 - protein, 391 aa, Zea mays subsp. mays
  misc_feature (1)..(391): Ceres Seq. ID no. 12416470
  misc_feature (74)..(74): Xaa is any aa, unknown or other
  misc_feature (218)..(218): Xaa is any aa, unknown or other
  misc_feature (224)..(224): Xaa is any aa, unknown or other
MDVEARKADAPLAQGKAMHRFLVALNCGMLAVGAIGGPLLSRLYFSKGGHRQWLSAWLETGGWPLLVIPVAASXVARRARDRGAPVPARAAADPAGRRGPRRGHGRGRLHLRLRARVPPGVHVRDPDLDAAGVHGVLRVPRGAAAPDGRVRERRGAADGGHRGAGPARLVGPAPGRHQGPVLAGLRADARRRGALRPRPAARGARLQARRGRRRPRRXVRAGGXDAAGDGLLRHRVLHRRHGRQQGFPGDPEGGEAVRAGGGAVLRGAGVVGGDVAVLLPGRGGRHLLRAHAAGGHPHRGVHPGDGGGGRHLPAREVQQRERRGAGALALGPRVLLLRRVERGQGQEEEEDEDGGGRRRRGGPAAGEPVMLLRTLAWPLRSSPLCVYQYML

SEQ ID NO: 23913 - protein, 374 aa, Zea mays subsp. mays
  misc_feature (1)..(374): Ceres Seq. ID no. 12416471
  misc_feature (57)..(57): Xaa is any aa, unknown or other
  misc_feature (201)..(201): Xaa is any aa, unknown or other
  misc_feature (207)..(207): Xaa is any aa, unknown or other
MHRFLVALNCGMLAVGAIGGPLLSRLYFSKGGHRQWLSAWLETGGWPLLVIPVAASXVARRARDRGAPVPARAAADPAGRRGPRRGHGRGRLHLRLRARVPPGVHVRDPDLDAAGVHGVLRVPRGAAAPDGRVRERRGAADGGHRGAGPARLVGPAPGRHQGPVLAGLRADARRRGALRPRPAARGARLQARRGRRRPRRXVRAGGXDAAGDGLLRHRVLHRRHGRQQGFPGDPEGGEAVRAGGGAVLRGAGVVGGDVAVLLPGRGGRHLLRAHAAGGHPHRGVHPGDGGGGRHLPAREVQQRERRGAGALALGPRVLLLRRVERGQGQEEEEDEDGGGRRRRGGPAAGEPVMLLRTLAWPLRSSPLCVYQYML

SEQ ID NO: 23914 - protein, 363 aa, Zea mays subsp. mays
  misc_feature (1)..(363): Ceres Seq. ID no. 12416472
  misc_feature (46)..(46): Xaa is any aa, unknown or other
  misc_feature (190)..(190): Xaa is any aa, unknown or other
  misc_feature (196)..(196): Xaa is any aa, unknown or other
MLAVGAIGGPLLSRLYFSKGGHRQWLSAWLETGGWPLLVIPVAASXVARRARDRGAPVPARAAADPAGRRGPRRGHGRGRLHLRLRARVPPGVHVRDPDLDAAGVHGVLRVPRGAAAPDGRVRERRGAADGGHRGAGPARLVGPAPGRHQGPVLAGLRADARRRGALRPRPAARGARLQARRGRRRPRRXVRAGGXDAAGDGLLRHRVLHRRHGRQQGFPGDPEGGEAVRAGGGAVLRGAGVVGGDVAVLLPGRGGRHLLRAHAAGGHPHRGVHPGDGGGGRHLPAREVQQRERRGAGALALGPRVLLLRRVERGQGQEEEEDEDGGGRRRRGGPAAGEPVMLLRTLAWPLRSSPLCVYQYML

SEQ ID NO: 23915 - DNA, 758 bp, Zea mays subsp. mays
  misc_feature (1)..(758): Ceres Seq. ID no. 12416542
atttggtatgaacgtgcttgatctggttgaatggaggaacaagaatgtgacaggcatatatcattattggcaggagcgcaatgctgatcataccctatggaagcttgggtctttaccacctggacttcttgctttctatggcttggttgaagcattggatcccaaatggcatgttttgggacttggctacacaactgttgatcttgctactatcaaggaaggggcagtactgcactacaatggaaatatgaagccatggctcaaaataggaatggagaagtacaagagcttttgggataactatgtggactattcacatcctttgattcagcagtgcttcatgcgttgattgatgtgtatcgacattataaatttttgtaagctctgtggtagatatgttccaagcgcatgctccaactgccacacggaaacattgtaattaaatcagtgggcttcgctctcaagttataatctctgacaaaacatcagtggctgtctatagtatctgtatttgatgaaatacagcaatcacatatctccagagtccagccacaggtaaacaacacatgagctaagaccgcgatgtagtaggctgctacttgaatacatccattacatacattcattacttgtgaccattgatgtaattttccattttttatttattgggtgagacaaccacagaatggagataatgtagaattgattttaaattattgacttgttacaagttttcagttatgtatccatatttattg

SEQ ID NO: 23916 - protein, 115 aa, Zea mays subsp. mays
  misc_feature (1)..(115): Ceres Seq. ID no. 12416543
FGMNVLDLVEWRNKNVTGIYHYWQERNADHTLWKLGSLPPGLLAFYGLVEALDPKWHVLGLGYTTVDLATIKEGAVLHYNGNMKPWLKIGMEKYKSFWDNYVDYSHPLIQQCFMR

SEQ ID NO: 23917 - protein, 113 aa, Zea mays subsp. mays
  misc_feature (1)..(113): Ceres Seq. ID no. 12416544
MNVLDLVEWRNKNVTGIYHYWQERNADHTLWKLGSLPPGLLAFYGLVEALDPKWHVLGLGYTTVDLATIKEGAVLHYNGNMKPWLKIGMEKYKSFWDNYVDYSHPLIQQCFMR

SEQ ID NO: 23918 - DNA, 1546 bp, Zea mays subsp. mays
  misc_feature (1)..(1546): Ceres Seq. ID no. 12416612
cctcccttcccaccatgattaccacccacctctccccagccctcaagcaccgcttcccgtccccgctccactccacctaccacacccaccaccacctcccgctccccctcccccgccggcactgccatctcgctaagcccgccgccgccgcctcgccagacctcctcgcgagcgtcgagtccgtggcctccgcggcctccgtgctggccgccatcgtgctggtccacgagtcgggccacttcctcgccgcggcgtcacggggcatccacgtctcccagttctccatcggcttcggcccggcgctggcccgcttccgcctcggcgccgtcgagtgcacgctccgcgccgtcccgctcggcggctacgtgggcttccccgacgacgacccggagtccggcttcgcgcccgacgaccccgacctcctccgcaaccgccccgtcccggacctcctgctcgtcgtctccgccggcgtcgccgccaacctcgccttcgccttcctcgtcgtctacgcgcaggcgctcaccgtcggcgtgcccgtccaggcgcggctccccggggtgctggtgcccgaggtcctcccgggctccgccgcggcgcgcgcgggcctcctccctggggacgtcatcctcgccgcccccggtgccgcgccggacccgtccgtgcccgtcctcgtcgacctcatgaaggcgagccccggcaggaaggtgcccctcaccgtctccagagccgggcccgggaagctggagccggacccgcggcccgtcgagctcaccgtcgtgccggacaccagcgccgacggcacgggccgcatcggcgtgcagctctcccccaacgtccgggtcacgcgcgtgcgccccgagaacctggccgacgccaccgtcctagccgcgcgcgagttcgcgctcctgaccgtgaccgtgttcgacgggctcaggcagacactgctcaacttctctcagtcggccgacaaggtgtctggccctgtcgccatcatcgcggtgggagcggaggtcgccaggtccagcgcggacggcctgtttcagtttgcggcggtgatcaacctcaaccttgcggccataaacttgttacccttaccagcgttggacggtggcacgctggcattgatccttctcgaggcagctcgtggtggccgcaagattccgcgagaagttgaacaggggatcatgtcatcagggatattggtggtgctcatggttggcatgttcctcatcgtgcgtgacacactcaaccttgatttcatcaaggagatgttgtgatgatgcttcggatggaaattaactgatcgcagctgtagtaaaattgccggtatcagaacatggttggcttgggaaattaaggttagttgttgtgattctttttttttcacccttttatggaactgctctagcactccaggctttgctacactgatcgtaggtccttgtattgcaattttcggaatgaagtttgtgatcgaggcaccaaaaaaaaaaccctgagttgttcaaatgtaaattaccaattccaatgcataggtagttggccc

SEQ ID NO: 23919 - protein, 424 aa, Zea mays subsp. mays
  misc_feature (1)..(424): Ceres Seq. ID no. 12416613
SLPTMITTHLSPALKHRFPSPLHSTYHTHHHLPLPLPRRHCHLAKPAAAASPDLLASVESVASAASVLAAIVLVHESGHFLAAASRGIHVSQFSIGFGPALARFRLGAVECTLRAVPLGGYVGFPDDDPESGFAPDDPDLLRNRPVPDLLLVVSAGVAANLAFAFLVVYAQALTVGVPVQARLPGVLVPEVLPGSAAARAGLLPGDVILAAPGAAPDPSVPVLVDLMKASPGRKVPLTVSRAGPGKLEPDPRPVELTVVPDTSADGTGRIGVQLSPNVRVTRVRPENLADATVLAAREFALLTVTVFDGLRQTLLNFSQSADKVSGPVAIIAVGAEVARSSADGLFQFAAVINLNLAAINLLPLPALDGGTLALILLEAARGGRKIPREVEQGIMSSGILVVLMVGMFLIVRDTLNLDFIKEML

SEQ ID NO: 23920 - protein, 420 aa, Zea mays subsp. mays
  misc_feature (1)..(420): Ceres Seq. ID no. 12416614
MITTHLSPALKHRFPSPLHSTYHTHHHLPLPLPRRHCHLAKPAAAASPDLLASVESVASAASVLAAIVLVHESGHFLAAASRGIHVSQFSIGFGPALARFRLGAVECTLRAVPLGGYVGFPDDDPESGFAPDDPDLLRNRPVPDLLLVVSAGVAANLAFAFLVVYAQALTVGVPVQARLPGVLVPEVLPGSAAARAGLLPGDVILAAPGAAPDPSVPVLVDLMKASPGRKVPLTVSRAGPGKLEPDPRPVELTVVPDTSADGTGRIGVQLSPNVRVTRVRPENLADATVLAAREFALLTVTVFDGLRQTLLNFSQSADKVSGPVAIIAVGAEVARSSADGLFQFAAVINLNLAAINLLPLPALDGGTLALILLEAARGGRKIPREVEQGIMSSGILVVLMVGMFLIVRDTLNLDFIKEML

SEQ ID NO: 23921 - DNA, 1285 bp, Zea mays subsp. mays
  misc_feature (1)..(1285): Ceres Seq. ID no. 12416626
gaagtcgccggagccacacgcattcccctgcctcgcccttccccctcctatttaccgcccgcgtcgtcccccaacgcacgccttcccacccccgtgcctgcctctgcctgcctgctccccgacgccggggggccccacgacgacccagccccggccccgcgcggtcacagcaagccgggacatggcgcgcggcggcatcgcccgcctactcgccacgctccttttcttcctcctgctcgccacgcccctcgcagacggagcttccgaggcagagacgggcctcgcgcagggcgcgtctgaggcggcggcgccggacgcgggcgcggacacgcagcagcagcacctcctgccgcggcccctcgtcatcgagctcccgtcgtcgcgggccgaggacgaggacgagcccggcgctgacgccgtgccgccggacgtgcgctgcgccagctggcggctggcggcggaggccaacaacctcgcgccgtggagggcggtgccgccggagtgcgcgccgcacgtgcgggactacgtcaccggcgtcgcctaccgctccgacctcgacctcgtggcgcgggagtccgccgcctacgcgcgcgccgccgcgccgctcggcgccgacgggcgcgacgcctgggtcttcgacgtcgacgagaccctgctctccaacctcccgtactacgccgagcacggctacggggctgagttgttcgaccaccacaagtttgacgagtgggtggagaggggcgaggcggccgccatcccctcgagcttgaagctgtacaatgaggttcgcgagctggggttcaagaccttcctgctcacgggcagaagcgaggggcaccgaggcgtcacggtggacaacctcaacaaacaggggttccatgactgggaaaagctcgtactcagggcagcaggtgaccgcaagaaaacagcgacagtctacaaatcagaaaagaggaaggagatggaacaagagggttacaggatcctaggcaactctggcgaccaatggagcgacctgctggggtcttccatgggtgcccgctctttcaagctccctaacccaatgtattatatcccgtgacagaaactgggaaacaaggccgggtgaaaggtgctgcgtttattggatgcacaggcccggtcgaaaacagaaatcatttcgcaatggaatttaaaactgtacaaatgcttctttcactaacttggtgtacattactcgactgcatgtgcagagttacttcaactatgtaagagtgaaaacgggtccggggatcaatgttcctcg

SEQ ID NO: 23922 - protein, 359 aa, Zea mays subsp. mays
  misc_feature (1)..(359): Ceres Seq. ID no. 12416627
KSPEPHAFPCLALPPPIYRPRRPPTHAFPPPCLPLPACSPTPGGPTTTQPRPRAVTASRDMARGGIARLLATLLFFLLLATPLADGASEAETGLAQGASEAAAPDAGADTQQQHLLPRPLVIELPSSRAEDEDEPGADAVPPDVRCASWRLAAEANNLAPWRAVPPECAPHVRDYVTGVAYRSDLDLVARESAAYARAAAPLGADGRDAWVFDVDETLLSNLPYYAEHGYGAELFDHHKFDEWVERGEAAAIPSSLKLYNEVRELGFKTFLLTGRSEGHRGVTVDNLNKQGFHDWEKLVLRAAGDRKKTATVYKSEKRKEMEQEGYRILGNSGDQWSDLLGSSMGARSFKLPNPMYYIP

SEQ ID NO: 23923 - protein, 299 aa, Zea mays subsp. mays
  misc_feature (1)..(299): Ceres Seq. ID no. 12416628
MARGGIARLLATLLFFLLLATPLADGASEAETGLAQGASEAAAPDAGADTQQQHLLPRPLVIELPSSRAEDEDEPGADAVPPDVRCASWRLAAEANNLAPWRAVPPECAPHVRDYVTGVAYRSDLDLVARESAAYARAAAPLGADGRDAWVFDVDETLLSNLPYYAEHGYGAELFDHHKFDEWVERGEAAAIPSSLKLYNEVRELGFKTFLLTGRSEGHRGVTVDNLNKQGFHDWEKLVLRAAGDRKKTATVYKSEKRKEMEQEGYRILGNSGDQWSDLLGSSMGARSFKLPNPMYYIP

SEQ ID NO: 23924 - protein, 255 aa, Zea mays subsp. mays
  misc_feature (1)..(255): Ceres Seq. ID no. 12416629
SRRSHTHSPASPFPLLFTARVVPQRTPSHPRACLCLPAPRRRGAPRRPSPGPARSQQAGTWRAAASPAYSPRSFSSSCSPRPSQTELPRQRRASRRARLRRRRRTRARTRSSSTSCRGPSSSSSRRRGPRTRTSPALTPCRRTCAAPAGGWRRRPTTSRRGGRCRRSARRTCGTTSPASPTAPTSTSWRGSPPPTRAPPRRSAPTGATPGSSTSTRPCSPTSRTTPSTATGLSCSTTTSLTSGWRGARRPPSPRA

SEQ ID NO: 23925 - DNA, 1246 bp, Zea mays subsp. mays
  misc_feature (1)..(1246): Ceres Seq. ID no. 12416638
acgccaccggaccggaaacgcgaagcagccccacactgcccacgcggacacgctctgcaccaccacctgccggccgttgccgggctcccggctcgccgccgccgttgcgccctcgcgctcacacctccgccagcccaggtccatcgagcggagaaacccatggccccctcgccgatcctcgtccggccgccggcgctggcgaattcaccccttccgcctccccgatgcgtggccgcggtagcagcggcgccggcggttcggacggctccggcggccccattctctaggctccgtaccaagtgtaggttcgccgcatcggatgtgagagaagactactcttctactccgatagatattgtcgctgatgttaagacggagaagattgtggtgttaggaggaagtggattcgttggttctgcaatttgcagagctgctgtatctaaaggcattgaggttgtgagcttcagcaggtcaggaagaccatcttactctgattcctgggttgatcaagtcaattggctgccaggagatgttttctatgcaagatgggatgaagtattggttggggctactgctgttgtgtctacccttggagggtttggcaatgaagaacaaatgaaaaggataaatggtgaggcaaatgtcatagcagtaaatgctgcaaaagaatatggagtcccaaaattcattttaatctccgtccatgactacaaccttccatcctttcttcttacatcgggttacttcactggcaagagaaaggcagaatctgaagtcctttccaaatacccagcctcgggtgtcgtgttgaggccaggcttcatttacggtaaaaggaaagtaaatggcttcgaggtaccactcgacgctgtcggagaaccattggagaagttgctctcctctgtcgaaaacttcaccaagccgttgagctcgctgcctgcctctgacctaatccttgcaccccctgtgagcgtggatgatgttgcctatgctgtaatcaacggagtcatagacgacagcttctttggggtgttcacgattgaacagatcaaggaagccgcgtccaaggtacgagtgtgaacccggggtcttgttccacaatctctgaacgtgtgttgtaggtggaaagttcataaacttagcagtaactcattgatccttgtgttctttatttctcgctgaattttgaccatagtcaaccgttcaaaagtcagtgcagcattcttttttctgctggaatctcttg

SEQ ID NO: 23926 - protein, 359 aa, Zea mays subsp. mays
  misc_feature (1)..(359): Ceres Seq. ID no. 12416639
TPPDRKREAAPHCPRGHALHHHLPAVAGLPARRRRCALALTPPPAQVHRAEKPMAPSPILVRPPALANSPLPPPRCVAAVAAAPAVRTAPAAPFSRLRTKCRFAASDVREDYSSTPIDIVADVKTEKIVVLGGSGFVGSAICRAAVSKGIEVVSFSRSGRPSYSDSWVDQVNWLPGDVFYARWDEVLVGATAVVSTLGGFGNEEQMKRINGEANVIAVNAAKEYGVPKFILISVHDYNLPSFLLTSGYFTGKRKAESEVLSKYPASGVVLRPGFIYGKRKVNGFEVPLDAVGEPLEKLLSSVENFTKPLSSLPASDLILAPPVSVDDVAYAVINGVIDDSFFGVFTIEQIKEAASKVRV

SEQ ID NO: 23927 - protein, 306 aa, Zea mays subsp. mays
  misc_feature (1)..(306): Ceres Seq. ID no. 12416640
MAPSPILVRPPALANSPLPPPRCVAAVAAAPAVRTAPAAPFSRLRTKCRFAASDVREDYSSTPIDIVADVKTEKIVVLGGSGFVGSAICRAAVSKGIEVVSFSRSGRPSYSDSWVDQVNWLPGDVFYARWDEVLVGATAVVSTLGGFGNEEQMKRINGEANVIAVNAAKEYGVPKFILISVHDYNLPSFLLTSGYFTGKRKAESEVLSKYPASGVVLRPGFIYGKRKVNGFEVPLDAVGEPLEKLLSSVENFTKPLSSLPASDLILAPPVSVDDVAYAVINGVIDDSFFGVFTIEQIKEAASKVRV

SEQ ID NO: 23928 - DNA, 1281 bp, Zea mays subsp. mays
  misc_feature (1)..(1281): Ceres Seq. ID no. 12416646
aattggctgttggatctggcgtgtctaggagtgggatttggggagtctatttggtgtgctccttttggggttcccatcgtttctcgttctgtggatgggcgtgtagattcagtgaggcgtttggtactacaggaggcgcgcttgatttggtcgagttcttccatatgtgtggatcgagtggactctaatctgcccagctccagtgtcatgtgggtggggattggttgaccaatattttctgcggttgaatcttaacaagctgcatcgcagtttctaatcgtttggagagcacacaagaatgtcgttcgtgcagctctctggtgctggagtcgctgcagtggccttcacgaacaagagcctagtctctcggcacgcagcgctacgggtctgctcgtcgaggcgctcgatccgtagcctggtcgttaaggctgcaactgtcgtcaccccaaagtacacttcactgaagcctctgggagatagggtgcttgtgaagcttggtgccgcagaggagaagacagttggtggcattttgcttccatctactgcccagactaaaccacaaggaggtgaggttgttgctgttggagcaggaaggaccatcggggacaagaaaatagctgtggatatagagactggagcacaagtagtatactcaaagtatgctgggactgaggttgaattcaatgactcaaagcatcttattctcaaagaagacgatatcattggtattcttgagacagatgatgtgaaggacatgaagcctctcaatgaccgtgttctcatcaaggttgcagaagccgaagacaaaactcctgggggccttatcctcactgaaacaactaaagagaagccgtccataggaacggttgtagctgttggcccgggtcctctggacgaggaaggcaagagacagccactgtcagtgtcggcgggcagcacagtgctgtactccaagtatgcagggagtgagttcaagggcgcggatggcacggcctacattgtgttgagagcgtcggatgtgatggctgtcctgtcttgagcatttcgtttccggctcgttaatgtagtttgcagccaatagttgtcatgtggtatgaaacgatcgctttgtggtggtcatcacaccatgctggtgatcatcacaacatatgctgatactgttccggacaatcggctagaatttgttgtgtggcaggtataaacgtcagcatctgatagtgagagcactcggttacttctacagatggtatttaaggggtgatagtcacgcctctttgctgg

SEQ ID NO: 23929 - protein, 246 aa, Zea mays subsp. mays; identical to SEQ ID NO: 22244
  misc_feature (1)..(246): Ceres Seq. ID no. 12416647

SEQ ID NO: 23930 - DNA, 1022 bp, Zea mays subsp. mays
  misc_feature (1)..(1022): Ceres Seq. ID no. 12416675
agagaaaagtaataagaccgtgctgcgcctgcgctgcgcagctccagcaccacagcaccagagctcgatcgacctccctctccaatgccgtctttcatcgacggccccactttccgggcgctgctccggccgtccaccaacgggcgccggaccaagatctcggacagcggcggcggcggcgggggcatcttcaagatgttcaagctcatgcccatgctctcgtccgggtgcaagatggtggcgctgctgggcaagcacaacaaccgggcgctgctggccgaccacgcgacgacggtgacgctgttcgggccgcgccggggccgcgtgagcctggccatccacgaggacacgcgcgcgccgccgctgttcctcatcgagctgcccatgctgacgagcgcgctgcaccgggagatctcgtccggggcgctcaagctggcgctggagagcgacacccgcagcgcgcgccgccgcctcgtggaggagtacgtctgggccgtctactgcaacggccgcaaggccggatactccatccgcaggaaggaggcctccgacgacgagcgccacgtgctgcgcctcctgcgcggcgtgtccatgggcgccggcgtgctcccggccgcccccgagaaggagggcggcgtgcccgcggggcccgacggggagctcacgtacgtgcgcgcccgcgtcgagcgcgtcgtcggatccaaggactcggaggccttctacatgatcaaccccgaggagggcgggaacggcgccgataataacgggggcggtggaggcgccggcggcgcgccggagctgagcattttcctagtaaggatgaaatgaataaaccgtcatattattactgctacagcataaatatataaatataatagggtgctatattgttttttacacacacccttgtgccttgtttgcacacagcagatgtgttctatgaaactgtccatagatcgagtttgtaatctaactgatgtatatctccatgttagataattgattttgtgaatcgtgctgag

SEQ ID NO: 23931 - protein, 252 aa, Zea mays subsp. mays
  misc_feature (1)..(252): Ceres Seq. ID no. 12416676
RKVIRPCCACAAQLQHHSTRARSTSLSNAVFHRRPHFPGAAPAVHQRAPDQDLGQRRRRRGHLQDVQAHAHALVRVQDGGAAGQAQQPGAAGRPRDDGDAVRAAPGPREPGHPRGHARAAAVPHRAAHADERAAPGDLVRGAQAGAGERHPQRAPPPRGGVRLGRLLQRPQGRILHPQEGGLRRRAPRAAPPARRVHGRRRAPGRPREGGRRARGARRGAHVRARPRRARRRIQGLGGLLHDQPRGGRERRR

SEQ ID NO: 23932 - protein, 247 aa, Zea mays subsp. mays
  misc_feature (1)..(247): Ceres Seq. ID no. 12416677
MPSFIDGPTFRALLRPSTNGRRTKISDSGGGGGGIFKMFKLMPMLSSGCKMVALLGKHNNRALLADHATTVTLFGPRRGRVSLAIHEDTRAPPLFLIELPMLTSALHREISSGALKLALESDTRSARRRLVEEYVWAVYCNGRKAGYSIRRKEASDDERHVLRLLRGVSMGAGVLPAAPEKEGGVPAGPDGELTYVRARVERVVGSKDSEAFYMINPEEGGNGADNNGGGGGAGGAPELSIFLVRMK

SEQ ID NO: 23933 - protein, 210 aa, Zea mays subsp. mays
  misc_feature (1)..(210): Ceres Seq. ID no. 12416678
MFKLMPMLSSGCKMVALLGKHNNRALLADHATTVTLFGPRRGRVSLAIHEDTRAPPLFLIELPMLTSALHREISSGALKLALESDTRSARRRLVEEYVWAVYCNGRKAGYSIRRKEASDDERHVLRLLRGVSMGAGVLPAAPEKEGGVPAGPDGELTYVRARVERVVGSKDSEAFYMINPEEGGNGADNNGGGGGAGGAPELSIFLVRMK

SEQ ID NO: 23934 - DNA, 1819 bp, Zea mays subsp. mays
  misc_feature (1)..(1819): Ceres Seq. ID no. 12416772
actctgttcaaccaccagccgagttcgcagcggcactccagggtccaggcccagcagcctcttcggctcttcgttgggggtgcgtggacaccggaaattgcctcggggattgcgttcctgatctaagcccggcatgaagggctgctcagagcgtttgctgctcctgctgctgctggcatcgtcgttgttactgtccgtcgtggttgccgcgcagcagacttgccctgccgacctcgacagcaaatgcgacggtggcgcgcctgatgactgggagggggaattcttccccggcgtcccgaaaatcaagtatgagggtccaacaagcaagaaccctcttgcttataagtggtataacaaggaggaagtcattctcggaaagaagatgaaggactggatgcgcttcagtgttgcgttctggcacacgttccgtggtactggtgctgatccttttggtgcgcctacaaaggtttggccttgggaggacggcacaaattcgttggccatggctaagagaagaatgagagctcactttgagttcatggagaagctgggggttgacaaatggtgcttccatgatagggatattgcccctgatgggaaaactctcgaagaaacaaatgctaacttggatgagatagttgagctggcaaagcagctccagggtgagaccaatataaagccattgtggggtactgcacagctctttatgcatcctcgttacatgcacggagctgctactagcccagaggttaaagtatatgcatatgcggctgcacaagttaagaaagctttggaggtcactcactacctaggtggtgaaaactatgtgttttggggtggaagagagggttaccaaactcttctgaacactgatcttaagagagaacttgaccatttggctaactttcttcaagctgctgttgactacaagaagaagattggattcaacggaacactgttgatagagcctaaaccacaggaacctacaaaacaccagtatgactgggatgttgcaactacgtttgcttttctacagaagtatggtcttaccggagagttcaagattaatgttgagtgcaaccatgctactctatctggacatagctgccatcatgaactggagactgcacgcattaatgggctgcttgggaacattgatgcaaacactggtgatcctcaagttggctgggacacggatcagttcatgacagacattgcagaggctactttggttatgtcaactgtggttaagaatggtggacttgcacctggtggcttcaactttgacgccaaattgcggagggaaagcactgatgttgaggacttgtttcttgctcatatctccggaatggacaccctggcccgtggcctccgcaacgccgccaagctgatcgaggatggttccctagatgctctcgtccgcaagcggtaccagagctttgatagtgagattggtgccttgatcgaggctgggaaaggagactttgaggcgctagagaagaaggtccttgagtggggtgagcccactgttccgtccggcaaacaggaactggcggagattctgttccactctgctctatagatggcgccatgtccgtagcggtagctcctggaataagcaagcactgagcctgcgccctcccaacgcgcgcggtcgtcctcaccagtcaccaccaagggaatgtttctggttgcgcgcgatgaaccatgtacaatacaccgtggaactgaaataaattgaaatagctagtcagaatttttagaactgttgcctctttgtttggaacggaatgaaactgaacttggttagtttgagctc

SEQ ID NO: 23935 - protein, 482 aa, Zea mays subsp. mays
  misc_feature (1)..(482): Ceres Seq. ID no. 12416773
MKGCSERLLLLLLLASSLLLSVVVAAQQTCPADLDSKCDGGAPDDWEGEFFPGVPKIKYEGPTSKNPLAYKWYNKEEVILGKKMKDWMRFSVAFWHTFRGTGADPFGAPTKVWPWEDGTNSLAMAKRRMRAHFEFMEKLGVDKWCFHDRDIAPDGKTLEETNANLDEIVELAKQLQGETNIKPLWGTAQLFMHPRYMHGAATSPEVKVYAYAAAQVKKALEVTHYLGGENYVFWGGREGYQTLLNTDLKRELDHLANFLQAAVDYKKKIGFNGTLLIEPKPQEPTKHQYDWDVATTFAFLQKYGLTGEFKINVECNHATLSGHSCHHELETARINGLLGNIDANTGDPQVGWDTDQFMTDIAEATLVMSTVVKNGGLAPGGFNFDAKLRRESTDVEDLFLAHISGMDTLARGLRNAAKLIEDGSLDALVRKRYQSFDSEIGALIEAGKGDFEALEKKVLEWGEPTVPSGKQELAEILFHSAL

SEQ ID NO: 23936 - protein, 399 aa, Zea mays subsp. mays
  misc_feature (1)..(399): Ceres Seq. ID no. 12416774
MKDWMRFSVAFWHTFRGTGADPFGAPTKVWPWEDGTNSLAMAKRRMRAHFEFMEKLGVDKWCFHDRDIAPDGKTLEETNANLDEIVELAKQLQGETNIKPLWGTAQLFMHPRYMHGAATSPEVKVYAYAAAQVKKALEVTHYLGGENYVFWGGREGYQTLLNTDLKRELDHLANFLQAAVDYKKKIGFNGTLLIEPKPQEPTKHQYDWDVATTFAFLQKYGLTGEFKINVECNHATLSGHSCHHELETARINGLLGNIDANTGDPQVGWDTDQFMTDIAEATLVMSTVVKNGGLAPGGFNFDAKLRRESTDVEDLFLAHISGMDTLARGLRNAAKLIEDGSLDALVRKRYQSFDSEIGALIEAGKGDFEALEKKVLEWGEPTVPSGKQELAEILFHSAL

SEQ ID NO: 23937 - protein, 395 aa, Zea mays subsp. mays
  misc_feature (1)..(395): Ceres Seq. ID no. 12416775
MRFSVAFWHTFRGTGADPFGAPTKVWPWEDGTNSLAMAKRRMRAHFEFMEKLGVDKWCFHDRDIAPDGKTLEETNANLDEIVELAKQLQGETNIKPLWGTAQLFMHPRYMHGAATSPEVKVYAYAAAQVKKALEVTHYLGGENYVFWGGREGYQTLLNTDLKRELDHLANFLQAAVDYKKKIGFNGTLLIEPKPQEPTKHQYDWDVATTFAFLQKYGLTGEFKINVECNHATLSGHSCHHELETARINGLLGNIDANTGDPQVGWDTDQFMTDIAEATLVMSTVVKNGGLAPGGFNFDAKLRRESTDVEDLFLAHISGMDTLARGLRNAAKLIEDGSLDALVRKRYQSFDSEIGALIEAGKGDFEALEKKVLEWGEPTVPSGKQELAEILFHSAL

SEQ ID NO: 23938 - DNA, 1232 bp, Zea mays subsp. mays
  misc_feature (1)..(1232): Ceres Seq. ID no. 12416776
gcacgagaccattacctagaacatcctaatcgaaaaaaaccaaaagcagagcacgcagcccagctccacgagattccgtgactgcgacggcgaggatgggcggcgaggcaaagaagctcccaaggatcgacttctccgaggtggacccgtctgcgccgggcggccaggcatggggcacggcgcgcggcgaggtgatggacgcgctggccaccttcggctgcttcgaggcgcactgcccggctctgacccctaggctccgcgccgagctcttcgacggagccgtgaggccgctcttcgcgctgcccgccgacgccaagcgccgcaactgttacggcgccgataggccgttccacggctacctcggcgacgtcccggggttccctggctacgagagcctggccatcgtggacggcaccaaggacgagtccgtccgcggcttcgcccgccttatgtggcccgacggcggtgacaacagcgacagtttctgcggtactgtcgttgaggcggcgcagcggatcttccagctggaggaggccgtgcggcggatggtgatggaagggctcggggtggccaatcaccacgacgcgctgagcgcgtccatgtggcacctgttccggatggcggagtacaaggcgcccaacgccgcggagaaggtggtcaggtacggggcgcatcaggacaccaactggctcagcgtcgtctgccagcacgaggtggccgggctggaggtgcagagcagggacggcgagtggatcgtcgtccagccgtcgcccacgtcgctggttttcatggtcggcaacgagctccgggcatggacgaacgaccgtctatatgctccatttcaccggatcaccgtcgctggggacgtccccagatactccgcgatgctgttctcggtccccagcttccaggttcaggtggcagacgagctcgtggacgacgaacaccctccccgtttcaagccccatgacaacaacgacttcgtctgcttctgcgtttccgaagaaggcgctctccatcaagataaactcaaggccttctgtggagtgtaacgagcagcagaacatatcagccgtccggcatctgtgttattatacttttacctcagccttgcatgcagcagaggccaggccacccctgtagactagtacgtacaatttttagaacacgcgtgagatgataactcgtctgcatttcttatattctgaacatgaacaacaaagcattctgct

SEQ ID NO: 23939 - protein, 318 aa, Zea mays subsp. mays
  misc_feature (1)..(318): Ceres Seq. ID no. 12416777
MGGEAKKLPRIDFSEVDPSAPGGQAWGTARGEVMDALATFGCFEAHCPALTPRLRAELFDGAVRPLFALPADAKRRNCYGADRPFHGYLGDVPGFPGYESLAIVDGTKDESVRGFARLMWPDGGDNSDSFCGTVVEAAQRIFQLEEAVRRMVMEGLGVANHHDALSASMWHLFRMAEYKAPNAAEKVVRYGAHQDTNWLSVVCQHEVAGLEVQSRDGEWIVVQPSPTSLVFMVGNELRAWTNDRLYAPFHRITVAGDVPRYSAMLFSVPSFQVQVADELVDDEHPPRFKPHDNNDFVCFCVSEEGALHQDKLKAFCGV

SEQ ID NO: 23940 - protein, 285 aa, Zea mays subsp. mays
  misc_feature (1)..(285): Ceres Seq. ID no. 12416778
MDALATFGCFEAHCPALTPRLRAELFDGAVRPLFALPADAKRRNCYGADRPFHGYLGDVPGFPGYESLAIVDGTKDESVRGFARLMWPDGGDNSDSFCGTVVEAAQRIFQLEEAVRRMVMEGLGVANHHDALSASMWHLFRMAEYKAPNAAEKVVRYGAHQDTNWLSVVCQHEVAGLEVQSRDGEWIVVQPSPTSLVFMVGNELRAWTNDRLYAPFHRITVAGDVPRYSAMLFSVPSFQVQVADELVDDEHPPRFKPHDNNDFVCFCVSEEGALHQDKLKAFCGV

SEQ ID NO: 23941 - protein, 200 aa, Zea mays subsp. mays
  misc_feature (1)..(200): Ceres Seq. ID no. 12416779
MWPDGGDNSDSFCGTVVEAAQRIFQLEEAVRRMVMEGLGVANHHDALSASMWHLFRMAEYKAPNAAEKVVRYGAHQDTNWLSVVCQHEVAGLEVQSRDGEWIVVQPSPTSLVFMVGNELRAWTNDRLYAPFHRITVAGDVPRYSAMLFSVPSFQVQVADELVDDEHPPRFKPHDNNDFVCFCVSEEGALHQDKLKAFCGV

SEQ ID NO: 23942 - DNA, 1628 bp, Zea mays subsp. mays
  misc_feature (1)..(1628): Ceres Seq. ID no. 12416798
gcacgagaccattacctagaacatcctaatcgaaaaattatttttttaataaatcttcccaggcgtccagcgtcctcccggcgacgacgcttcccgagctctctccttcccgcgaccctctcctctgccccgctccgctagggttttgccgcagacctctcgctcgcttccggttccgcgaggcaaccgtccgaccggtcggaatggtggatgtggaggagaccgggaacaagttgcaatcgcagatgcgcctccacgcggagccggaggacgacgccgccgacctccccctcccggccctcttcgatagggcgtcgcggctccacgccctggcctccagctccgccctcgaccaggatgggatccgcacgggggttgacctgctgcggcgctgcgatgacatggtcagcaagctcgggcctcttctcccccaacgagaccaaggaggacgtctccacagcaaacctcaagtacctactggtcccatattaccttgcagaaatgaccgaaaagatagcacaggaggatcggatcccggttcttaagacgtcacaggaccatctgaaggagttcattgctctatgtgaagtactagagcttatcccagaggatgagctagaattgtctaggcagaagcagccagatactctgacaaacagaagagcgcagaaggttgcccggttcaaacgtcaaaaggctgcagaaacgaagctccaagagatcagagagagaaaagaaaggcgtggacgctcattgagagcagctgctttgtctgccccaattgaagctggagaggaagatgacctggagaatgatggggaggaagaaagagaggcttggttagctaccatctcattggctctctgcaaggcatttgatcttctcgacatgctaaagaaggaagaagaaatgcttcaagctgtaaaggaaaggaaggcaaaggatgggaatgcatttgctcgtgaaatgcttgatgaacgaacgaagaaggccgaaacatggcaccataatgctgccaaccgtgtggcatattccaaaccagcggatcctatcacttgtgcaacatttgctcaagatgtcattgaaggtagagcaagcgtttcacaagctcacgagcacaaacaccagcccctgatatttggacctgcaagtattgttggtggtggtctaacaagtgaaagggaaagaatgacagcgcaagtttttcagcctagttacaggatgccaacaatgagcattgaagaagctggtttgcgcgagatgaaaatgatggagaaatggcaagaaaggaccgctgaggtgatgaaagaatcaacctccgcgtggcacaaggatggcagcagctcggcccaagaggatgaggacgccgaggaggaaaaagcaagagcgtgggacgactggaaggatgacaaccctcgtggcgcaggcaacaagaagctcacgccctgtggttaatttgtgaaacacgctgtgtattgatactccacatggaacatgatgctcatgtagacggtaggatgtttaattttatcattgttgccgtgttttttctgtagtgatgttgagtgtatcgtagcctgtttgtgcaagtgcaatatgtcctccctaatacgacacgtttttctggc

SEQ ID NO: 23943 - protein, 414 aa, Zea mays subsp. mays
  misc_feature (1)..(414): Ceres Seq. ID no. 12416799
MWRRPGTSCNRRCASTRSRRTTPPTSPSRPSSIGRRGSTPWPPAPPSTRMGSARGLTCCGAAMTWSASSGLFSPNETKEDVSTANLKYLLVPYYLAEMTEKIAQEDRIPVLKTSQDHLKEFIALCEVLELIPEDELELSRQKQPDTLTNRRAQKVARFKRQKAAETKLQEIRERKERRGRSLRAAALSAPIEAGEEDDLENDGEEEREAWLATISLALCKAFDLLDMLKKEEEMLQAVKERKAKDGNAFAREMLDERTKKAETWHHNAANRVAYSKPADPITCATFAQDVIEGRASVSQAHEHKHQPLIFGPASIVGGGLTSERERMTAQVFQPSYRMPTMSIEEAGLREMKMMEKWQERTAEVMKESTSAWHKDGSSSAQEDEDAEEEKARAWDDWKDDNPRGAGNKKLTPCG

SEQ ID NO: 23944 - protein, 365 aa, Zea mays subsp. mays
  misc_feature (1)..(365): Ceres Seq. ID no. 12416800
MGSARGLTCCGAAMTWSASSGLFSPNETKEDVSTANLKYLLVPYYLAEMTEKIAQEDRIPVLKTSQDHLKEFIALCEVLELIPEDELELSRQKQPDTLTNRRAQKVARFKRQKAAETKLQEIRERKERRGRSLRAAALSAPIEAGEEDDLENDGEEEREAWLATISLALCKAFDLLDMLKKEEEMLQAVKERKAKDGNAFAREMLDERTKKAETWHHNAANRVAYSKPADPITCATFAQDVIEGRASVSQAHEHKHQPLIFGPASIVGGGLTSERERMTAQVFQPSYRMPTMSIEEAGLREMKMMEKWQERTAEVMKESTSAWHKDGSSSAQEDEDAEEEKARAWDDWKDDNPRGAGNKKLTPCG

SEQ ID NO: 23945 - protein, 352 aa, Zea mays subsp. mays
  misc_feature (1)..(352): Ceres Seq. ID no. 12416801
MTWSASSGLFSPNETKEDVSTANLKYLLVPYYLAEMTEKIAQEDRIPVLKTSQDHLKEFIALCEVLELIPEDELELSRQKQPDTLTNRRAQKVARFKRQKAAETKLQEIRERKERRGRSLRAAALSAPIEAGEEDDLENDGEEEREAWLATISLALCKAFDLLDMLKKEEEMLQAVKERKAKDGNAFAREMLDERTKKAETWHHNAANRVAYSKPADPITCATFAQDVIEGRASVSQAHEHKHQPLIFGPASIVGGGLTSERERMTAQVFQPSYRMPTMSIEEAGLREMKMMEKWQERTAEVMKESTSAWHKDGSSSAQEDEDAEEEKARAWDDWKDDNPRGAGNKKLTPCG

SEQ ID NO: 23946 - DNA, 1768 bp, Zea mays subsp. mays
  misc_feature (1)..(1768): Ceres Seq. ID no. 12416821
ctttagagaaggtgtacccccaatattccattaccggcccactgacgagagagagagagagagattttggcgtgactatccagagtccccaatcttacacctaaaaactcttctcagctaccggtgcggcatatcgcccctatcggcggcgaacatttgagttctcgcgacgtgtcctcgaggattctgtggtggaagatcggatcttttgctgcgggttccagttgccaaccagagatgtcggctctcctcgatctactgatggggatctttcgccagcagaccctcggcggcgccgccctggagctcgccgcgctggcggcgccgctctcgctcgccgccctcgtcggccttctcatcgggtgggcatggcgcccgaggtgggcgggggtcgtcgtcttcgacaacgcccaacagatggcgcagctccccgcggcggcggcgcctccggaccgcgccaccgccaccaccaccgcggtggtatctcgcaacgaggcggccgccgtcgtaccgagaactgtggtggctcatgcggcggccgaggacgagcagcagcagctggcggtcaacaccggtgacttgattcacctctggcggctcgtcgacgagaaggacggtggcccgtcgtggattcacatgatggaccgcaccttaccaaccatgaggtaccaagcctggcggagagacccaccgagtggtccaccacagtaccgcagcagcacaatcttggaagatgcgtcaccagaggttgtgagagatttcttctgggacgacgagttccggatgaacaacagctgggacgacatgcttcttcagcacgagacgctggaggagtgcaccgagactggaaccatggttgtccggtgggtcaggaagttcccgttcttctgcagcgacagggagtacatcataggccgcaggatatgggcgtctgggaagacattttactgtgtgaccaagggtgttcctcgtccctccgttccaagacaaaacaaacctcgccgtgtggacttgtactactctagctggtgcatccgtccagttgagtcgagaaaaggcgacggtgcaatgagtgcatgcgaggtgctcttgttccaccacgaggacatggggattccatgggagatcgcgaagcttggcgtccggcaggggatgtggggctgcgtcaagaggatagagcctggccttcgggcgtaccaggttgggaggaccgccggagaggctgtttccaagtgtgctgccatggcacaggtcaccaccaggttcagtgccgacgagctcgtcatcgcagggccgggcaacacggaggccagttcttcttcgtccggcgacggcgcagaggttgacaaggcgacgaagcactgggcgaacagcatacccaaggttctcatggtcggtggcgctgtggccctggcctgctgcaccttcgacggtgggttgttgaccaaggccgtcatcttcggcactgccaggaggtttgcaggagggccaggaaggcggtaggtacggtgtaacggtggacggaaagatccagcggcacaacacaaaacaagtgttgctgcactgcagcccgctgcgggttaataggttagaaatatagcatttgttacgaggaaacatagaagtattatgcaagaaaaccgctgttagataagaaatacactgctgtgtattagtagttaataacaagagttcttggtttttgtatgtaaccatattgtggatcggatccattgttcttccccatggacactactactaccagtct

SEQ ID NO: 23947 - protein, 421 aa, Zea mays subsp. mays
  misc_feature (1)..(421): Ceres Seq. ID no. 12416822
MSALLDLLMGIFRQQTLGGAALELAALAAPLSLAALVGLLIGWAWRPRWAGVVVFDNAQQMAQLPAAAAPPDRATATTTAVVSRNEAAAVVPRTVVAHAAAEDEQQQLAVNTGDLIHLWRLVDEKDGGPSWIHMMDRTLPTMRYQAWRRDPPSGPPQYRSSTILEDASPEVVRDFFWDDEFRMNNSWDDMLLQHETLEECTETGTMVVRWVRKFPFFCSDREYIIGRRIWASGKTFYCVTKGVPRPSVPRQNKPRRVDLYYSSWCIRPVESRKGDGAMSACEVLLFHHEDMGIPWEIAKLGVRQGMWGCVKRIEPGLRAYQVGRTAGEAVSKCAAMAQVTTRFSADELVIAGPGNTEASSSSSGDGAEVDKATKHWANSIPKVLMVGGAVALACCTFDGGLLTKAVIFGTARRFAGGPGRR

SEQ ID NO: 23948 - protein, 413 aa, Zea mays subsp. mays
  misc_feature (1)..(413): Ceres Seq. ID no. 12416823
MGIFRQQTLGGAALELAALAAPLSLAALVGLLIGWAWRPRWAGVVVFDNAQQMAQLPAAAAPPDRATATTTAVVSRNEAAAVVPRTVVAHAAAEDEQQQLAVNTGDLIHLWRLVDEKDGGPSWIHMMDRTLPTMRYQAWRRDPPSGPPQYRSSTILEDASPEVVRDFFWDDEFRMNNSWDDMLLQHETLEECTETGTMVVRWVRKFPFFCSDREYIIGRRIWASGKTFYCVTKGVPRPSVPRQNKPRRVDLYYSSWCIRPVESRKGDGAMSACEVLLFHHEDMGIPWEIAKLGVRQGMWGCVKRIEPGLRAYQVGRTAGEAVSKCAAMAQVTTRFSADELVIAGPGNTEASSSSSGDGAEVDKATKHWANSIPKVLMVGGAVALACCTFDGGLLTKAVIFGTARRFAGGPGRR

SEQ ID NO: 23949 - protein, 361 aa, Zea mays subsp. mays
  misc_feature (1)..(361): Ceres Seq. ID no. 12416824
MAQLPAAAAPPDRATATTTAVVSRNEAAAVVPRTVVAHAAAEDEQQQLAVNTGDLIHLWRLVDEKDGGPSWIHMMDRTLPTMRYQAWRRDPPSGPPQYRSSTILEDASPEVVRDFFWDDEFRMNNSWDDMLLQHETLEECTETGTMVVRWVRKFPFFCSDREYIIGRRIWASGKTFYCVTKGVPRPSVPRQNKPRRVDLYYSSWCIRPVESRKGDGAMSACEVLLFHHEDMGIPWEIAKLGVRQGMWGCVKRIEPGLRAYQVGRTAGEAVSKCAAMAQVTTRFSADELVIAGPGNTEASSSSSGDGAEVDKATKHWANSIPKVLMVGGAVALACCTFDGGLLTKAVIFGTARRFAGGPGRR

SEQ ID NO: 23950 - DNA, 1913 bp, Zea mays subsp. mays
  misc_feature (1)..(1913): Ceres Seq. ID no. 12417052
gtgagtccgtcttcaactccatcgtcgtcgtcgtcgcgcgcgccgagtgtttggttgctcgggagaggagactatggagacgaccaagagcttggaggttgctgggggcgccatggacgacaacgacgacgaccacgaggcgtgggtgcacgactcctccgtcgatcaccgcgggaggtctccctcccgcgccaccaccgggtcctggaaggccgccatgttcatcatcttgatcgagttcagcgagaggctgagctacttcggcatagccacgagcctcatgatctacctcaccaaggtgctgcaagaggagatgaaggcggccgccaagaatgccaactactggatgagcgtcaccacgctcatgcccctgctcggtggcttcctcgccgacggctacctcggcaggttctccaccgtcgtcgtctccaccgccgtctacctgctgggcctgacggtgctggcgacggcgcagctggcgccggggctgaggcccgaccgctcgccgcgcctgcacgaggcgctcttcttcgccggcatctacctggtgtccgccggcaccggcggccacaagccggccctggagagcttcggcgcggaccagttcgacgaggcccacgcggcggagcgggtgcgcaagatgtccttcttcaactggtggaactgcgcgctctgctcgggcgtcctgctcggcgtcaccgccgtcgtctacgcgcaggaccgcgccggctggggcgccgccaccgtcgcgctcgccgccgtcatggccgcctcgctcgccgtcttcctcgccggccgccggtactaccgctacagggtgcccgagggcagcccgctcacgccgctgctccaggtcctcgtcgccgccttccggaataggcggctcccgttgccggacgacgacgccgagctgtacgaggtcaggcggccgcanagtancaagaggaggctgctttgccacacctaccagctgaggttcctcgacaaggcagccatagtggagcccggcgccggcgaggacgcctgcgggccgtggcggctggcgacggtgacgcaggtggaggagacgaagctggtgctggcgatggtgcccatctgggtgtgcacgctgcccttcggcatggcggtggcgcaggtgtccaccttcttcatcaagcagggcagcgtgatggaccgtcgcctgggcccgcacttggaggccccggcggcgtcggtgttcgcgctgtcggcggtggccatgatcgccacggtggcggcctacgacaaggcgctggtgccgtacctgcggcgcgccacgggaggggagcgcgggatcagcatccttgggcgcgtgggcatcggcatggcgttcgccatcgcggggctgggcgtggcggcggcggttggagcggcggctcctgntgtcggcggnngccgcgcggccgtcgacgtcggtgctgtggctggtgccgcagttcgcgctgatgggcgtggccgacgggttcgcgctggtgggcctgcaggagtacttctacgagcaggtccccgacggcatgcgcagcctgggcatcggcctctacctcagcgtcattggcgccgggagcttcctgagcagcctggtgatcacggcggcggaccgcgccagctcccgcggagggcgcgccggctggttcgccaaggacctcaaccgcagcaggctggacctcttctactggctgctggcgtgcatcagcgccgtcaacctggcattctacgcgctggtcgccaccaagtgctcgtacaagcagaccgtcagggccggcagggtcggcgacnaggtcgagtgcgccgccgcgtagctgctgctgtacgtggnggtcatgaaaccaaccatgcatcagccgcacgaccatgtgtattattattattattataggggctaatagtaactagct

SEQ ID NO: 23951 - protein, 606 aa, Zea mays subsp. mays
  misc_feature (1)..(606): Ceres Seq. ID no. 12417053
  misc_feature (287)..(287): Xaa is any aa, unknown or other
  misc_feature (289)..(289): Xaa is any aa, unknown or other
  misc_feature (443)..(443): Xaa is any aa, unknown or other
  misc_feature (446)..(446): Xaa is any aa, unknown or other
  misc_feature (447)..(447): Xaa is any aa, unknown or other
  misc_feature (574)..(574): Xaa is any aa, unknown or other
  misc_feature (587)..(587): Xaa is any aa, unknown or other
METTKSLEVAGGAMDDNDDDHEAWVHDSSVDHRGRSPSRATTGSWKAAMFIILIEFSERLSYFGIATSLMIYLTKVLQEEMKAAAKNANYWMSVTTLMPLLGGFLADGYLGRFSTVVVSTAVYLLGLTVLATAQLAPGLRPDRSPRLHEALFFAGIYLVSAGTGGHKPALESFGADQFDEAHAAERVRKMSFFNWWNCALCSGVLLGVTAVVYAQDRAGWGAATVALAAVMAASLAVFLAGRRYYRYRVPEGSPLTPLLQVLVAAFRNRRLPLPDDDAELYEVRRPXSXKRRLLCHTYQLRFLDKAAIVEPGAGEDACGPWRLATVTQVEETKLVLAMVPIWVCTLPFGMAVAQVSTFFIKQGSVMDRRLGPHLEAPAASVFALSAVAMIATVAAYDKALVPYLRRATGGERGISILGRVGIGMAFAIAGLGVAAAVGAAAPXVGXXRAAVDVGAVAGAAVRADGRGRRVRAGGPAGVLLRAGPRRHAQPGHRPLPQRHWRRELPEQPGDHGGGPRQLPRRARRLVRQGPQPQQAGPLLLAAGVHQRRQPGILRAGRHQVLVQADRQGRQGRRXGRVRRRVAAAVRXGHETNHASAARPCVLLLLL

SEQ ID NO: 23952 - protein, 593 aa, Zea mays subsp. mays
  misc_feature (1)..(593): Ceres Seq. ID no. 12417054
  misc_feature (274)..(274): Xaa is any aa, unknown or other
  misc_feature (276)..(276): Xaa is any aa, unknown or other
  misc_feature (430)..(430): Xaa is any aa, unknown or other
  misc_feature (433)..(433): Xaa is any aa, unknown or other
  misc_feature (434)..(434): Xaa is any aa, unknown or other
  misc_feature (561)..(561): Xaa is any aa, unknown or other
  misc_feature (574)..(574): Xaa is any aa, unknown or other
MDDNDDDHEAWVHDSSVDHRGRSPSRATTGSWKAAMFIILIEFSERLSYFGIATSLMIYLTKVLQEEMKAAAKNANYWMSVTTLMPLLGGFLADGYLGRFSTVVVSTAVYLLGLTVLATAQLAPGLRPDRSPRLHEALFFAGIYLVSAGTGGHKPALESFGADQFDEAHAAERVRKMSFFNWWNCALCSGVLLGVTAVVYAQDRAGWGAATVALAAVMAASLAVFLAGRRYYRYRVPEGSPLTPLLQVLVAAFRNRRLPLPDDDAELYEVRRPXSXKRRLLCHTYQLRFLDKAAIVEPGAGEDACGPWRLATVTQVEETKLVLAMVPIWVCTLPFGMAVAQVSTFFIKQGSVMDRRLGPHLEAPAASVFALSAVAMIATVAAYDKALVPYLRRATGGERGISILGRVGIGMAFAIAGLGVAAAVGAAAPXVGXXRAAVDVGAVAGAAVRADGRGRRVRAGGPAGVLLRAGPRRHAQPGHRPLPQRHWRRELPEQPGDHGGGPRQLPRRARRLVRQGPQPQQAGPLLLAAGVHQRRQPGILRAGRHQVLVQADRQGRQGRRXGRVRRRVAAAVRXGHETNHASAARPCVLLLLL

SEQ ID NO: 23953 - protein, 558 aa, Zea mays subsp. mays
  misc_feature (1)..(558): Ceres Seq. ID no. 12417055
  misc_feature (239)..(239): Xaa is any aa, unknown or other
  misc_feature (241)..(241): Xaa is any aa, unknown or other
  misc_feature (395)..(395): Xaa is any aa, unknown or other
  misc_feature (398)..(398): Xaa is any aa, unknown or other
  misc_feature (399)..(399): Xaa is any aa, unknown or other
  misc_feature (526)..(526): Xaa is any aa, unknown or other
  misc_feature (539)..(539): Xaa is any aa, unknown or other
MFIILIEFSERLSYFGIATSLMIYLTKVLQEEMKAAAKNANYWMSVTTLMPLLGGFLADGYLGRFSTVVVSTAVYLLGLTVLATAQLAPGLRPDRSPRLHEALFFAGIYLVSAGTGGHKPALESFGADQFDEAHAAERVRKMSFFNWWNCALCSGVLLGVTAVVYAQDRAGWGAATVALAAVMAASLAVFLAGRRYYRYRVPEGSPLTPLLQVLVAAFRNRRLPLPDDDAELYEVRRPXSXKRRLLCHTYQLRFLDKAAIVEPGAGEDACGPWRLATVTQVEETKLVLAMVPIWVCTLPFGMAVAQVSTFFIKQGSVMDRRLGPHLEAPAASVFALSAVAMIATVAAYDKALVPYLRRATGGERGISILGRVGIGMAFAIAGLGVAAAVGAAAPXVGXXRAAVDVGAVAGAAVRADGRGRRVRAGGPAGVLLRAGPRRHAQPGHRPLPQRHWRRELPEQPGDHGGGPRQLPRRARRLVRQGPQPQQAGPLLLAAGVHQRRQPGILRAGRHQVLVQADRQGRQGRRXGRVRRRVAAAVRXGHETNHASAARPCVLLLLL

SEQ ID NO: 23954 - DNA, 1753 bp, Zea mays subsp. mays
  misc_feature (1)..(1753): Ceres Seq. ID no. 12417068
gcacgagaccattacctagaacatcctaatcgaaaaacagcgacagcaacacagcctcgcaagagaaagcaaagcaaagccaggagggaaagaaagaaatccttttcctacacctaaagagaccaccaaaccctgcgagcccaaaaaaaagccatggagtacaagagatcatcgcatgcggaagaggaagaagaggatgaggaggaagaagaagacgacgagaacgaggaagaagaggaggatgaggatgaggccagaggccttcgctacaccacggcggcggtggcacccgtaggcgctccgcagcagcagcggcagcaggtgcacgcccaagctcttggcctcggctcacacccctcccagctgatggattctgccgccttctcgaggccgctcttgcctcccaactcatctctggtgatgcagccaccgctgcctccaccaggcttcccgccggctcaccgccaacaaccgccgcatgcgcagctccatccgaggaaagcggagagggagagggacagagccgcgggagcgcagccccatgtccggcgccaccaccaagaaccagccaagaatggcgttctcggcggtggcgccgcgccaacgtcggcaccctctacgctcggcctcgtgcccgtggtggaagcggcccagctgtggaggtaccgggagtgcctgcggaaccacgcggcgcggcttggcgcgcacgtgctcgacggctgctgcgagttcatgccgtccgggggcgaaggggccgccgcgctggcctgcgccgcctgcggctgccaccgcagcttccaccggcgcgaggcggtccccggcggcggcgtggcggtgtcgccctcggcggcagtaacccccaccgccggcgccggcgccaactcctcccgcgccattccgctgctgctggccccgccgcacatgcacacgcgcccgccgcaccacgtgccggcgtccccggcgtccgcgcccgccgcgctggccgagtcgtccagcgaggagctgcgcggccccgcgcccccgacgcacgcgcacgcgcacccgccccacgcgcaggtggccgtagtaggagggtcggcctccgctccccccgcgccgagcaagaagcgtttccggaccaagttcacggcggagcagaaggacctcatgcgcgagttcgcgcaccgcgtcgggtggcgcgtccacaagcccgacgccgacgccgtggacgccttctgcgcccaggtcggcgtctcccggcgcgtcctcaaggtgtggatgcacaacaacaagcacctcgccaaggtcccgccctcgcccccatcctcctcctacccacagccactgcctcgccaccacccgcctccacctccgctccacatccaccatcacccgccgccgccgccgcagcagcagccgcagcagcagcagcatgatgcatgagtaccgagtagccgcagagcaacgcgagaggatcagacgatgccattagcttattagctcctttatttatccttcttcttcttcttcccttgtaatttcagtgacatcccagttgttaaggagttgactcatcatgcagcagttaggagggattaatatgattgtgtgacctaatctcatctcagccatactcctactacaagtcatcccctcgtcctcgttgctttcttggacgacctacctccattattaggttattagcatcagtggcgcttgcattggtatcttgcttatggtaatgacctaataatgatcactgtgttttagagct

SEQ ID NO: 23955 - protein, 422 aa, Zea mays subsp. mays
  misc_feature (1)..(422): Ceres Seq. ID no. 12417069
MEYKRSSHAEEEEEDEEEEEDDENEEEEEDEDEARGLRYTTAAVAPVGAPQQQRQQVHAQALGLGSHPSQLMDSAAFSRPLLPPNSSLVMQPPLPPPGFPPAHRQQPPHAQLHPRKAERERDRAAGAQPHVRRHHQEPAKNGVLGGGAAPTSAPSTLGLVPVVEAAQLWRYRECLRNHAARLGAHVLDGCCEFMPSGGEGAAALACAACGCHRSFHRREAVPGGGVAVSPSAAVTPTAGAGANSSRAIPLLLAPPHMHTRPPHHVPASPASAPAALAESSSEELRGPAPPTHAHAHPPHAQVAVVGGSASAPPAPSKKRFRTKFTAEQKDLMREFAHRVGWRVHKPDADAVDAFCAQVGVSRRVLKVWMHNNKHLAKVPPSPPSSSYPQPLPRHHPPPPPLHIHHHPPPPPQQQPQQQQHDA

SEQ ID NO: 23956 - protein, 351 aa, Zea mays subsp. mays
  misc_feature (1)..(351): Ceres Seq. ID no. 12417070
MDSAAFSRPLLPPNSSLVMQPPLPPPGFPPAHRQQPPHAQLHPRKAERERDRAAGAQPHVRRHHQEPAKNGVLGGGAAPTSAPSTLGLVPVVEAAQLWRYRECLRNHAARLGAHVLDGCCEFMPSGGEGAAALACAACGCHRSFHRREAVPGGGVAVSPSAAVTPTAGAGANSSRAIPLLLAPPHMHTRPPHHVPASPASAPAALAESSSEELRGPAPPTHAHAHPPHAQVAVVGGSASAPPAPSKKRFRTKFTAEQKDLMREFAHRVGWRVHKPDADAVDAFCAQVGVSRRVLKVWMHNNKHLAKVPPSPPSSSYPQPLPRHHPPPPPLHIHHHPPPPPQQQPQQQQHDA

SEQ ID NO: 23957 - protein, 333 aa, Zea mays subsp. mays
  misc_feature (1)..(333): Ceres Seq. ID no. 12417071
MQPPLPPPGFPPAHRQQPPHAQLHPRKAERERDRAAGAQPHVRRHHQEPAKNGVLGGGAAPTSAPSTLGLVPVVEAAQLWRYRECLRNHAARLGAHVLDGCCEFMPSGGEGAAALACAACGCHRSFHRREAVPGGGVAVSPSAAVTPTAGAGANSSRAIPLLLAPPHMHTRPPHHVPASPASAPAALAESSSEELRGPAPPTHAHAHPPHAQVAVVGGSASAPPAPSKKRFRTKFTAEQKDLMREFAHRVGWRVHKPDADAVDAFCAQVGVSRRVLKVWMHNNKHLAKVPPSPPSSSYPQPLPRHHPPPPPLHIHHHPPPPPQQQPQQQQHDA

SEQ ID NO: 23958 - DNA, 1012 bp, Zea mays subsp. mays
  misc_feature (1)..(1012): Ceres Seq. ID no. 12417137
atcttcgcccccgtctcgggcgcccattctcctcctcgacgccgcctccgtctcgcgccattgcacgtcgtcgacgactccaagaacccccccgaggagaggtctgagacggataagatggtcgacggcatggacttcggggagctctgcagcgacttcgagtgcataagcagcccctacgtggagtcgacggcgaggcaggtcgcgcgggacatcctggagctccgcgaggacaaccgcgcattcaactgctacgcggtctccgtcaagtacaaggacccactcaggacatttgttgggcgtgagaagtacaggaggccgttgtggatcaccaaggcgttggaaaaccctgtagtgacagtccaggaaatgtcaatgcagtcgacgagcaacctgaccatcagatgggcgttgagagggaagcctaagaacccgttgttcgcgagcgtcggaggagacgtcatcgtccgcgtcgagtcacggttcgtcctgaaccagataagcgggcaggtgctggagcaggccgagtcctgggacctctccgcctcgtccctccctgcccaggcctacttctggctgtcccgaagggtctactccgccgtggagtccgggaaggacgcgatcgaagccgccaagagcgcggcgtcgtctgggctgacgaccaagggagaccagaatctcgaggcctatccggatccttctgctgatcctacaaagttctttcagaggccggatgatgggttcagccaagacgtgtaccagatcggccttctcctggccgtgatctacttcattgtacagtttctgaaggcgaccctgtgaccggctgcagcctgtcgaagaatgtagcctgtgtgcagtatacatgtatgtaactatgcctagcaacattataaaatacgggcatatatcatcctgccatctgacctgcgacagatttgtgacctttcaccactgctgtcggtgatattagtttggcacgcaagttgccaatttacaggtgttaaacttg

SEQ ID NO: 23959 - protein, 273 aa, Zea mays subsp. mays
  misc_feature (1)..(273): Ceres Seq. ID no. 12417138
IFAPVSGAHSPPRRRLRLAPLHVVDDSKNPPEERSETDKMVDGMDFGELCSDFECISSPYVESTARQVARDILELREDNRAFNCYAVSVKYKDPLRTFVGREKYRRPLWITKALENPVVTVQEMSMQSTSNLTIRWALRGKPKNPLFASVGGDVIVRVESRFVLNQISGQVLEQAESWDLSASSLPAQAYFWLSRRVYSAVESGKDAIEAAKSAASSGLTTKGDQNLEAYPDPSADPTKFFQRPDDGFSQDVYQIGLLLAVIYFIVQFLKATL

SEQ ID NO: 23960 - protein, 234 aa, Zea mays subsp. mays
  misc_feature (1)..(234): Ceres Seq. ID no. 12417139
MVDGMDFGELCSDFECISSPYVESTARQVARDILELREDNRAFNCYAVSVKYKDPLRTFVGREKYRRPLWITKALENPVVTVQEMSMQSTSNLTIRWALRGKPKNPLFASVGGDVIVRVESRFVLNQISGQVLEQAESWDLSASSLPAQAYFWLSRRVYSAVESGKDAIEAAKSAASSGLTTKGDQNLEAYPDPSADPTKFFQRPDDGFSQDVYQIGLLLAVIYFIVQFLKATL

SEQ ID NO: 23961 - protein, 230 aa, Zea mays subsp. mays
  misc_feature (1)..(230): Ceres Seq. ID no. 12417140
MDFGELCSDFECISSPYVESTARQVARDILELREDNRAFNCYAVSVKYKDPLRTFVGREKYRRPLWITKALENPVVTVQEMSMQSTSNLTIRWALRGKPKNPLFASVGGDVIVRVESRFVLNQISGQVLEQAESWDLSASSLPAQAYFWLSRRVYSAVESGKDAIEAAKSAASSGLTTKGDQNLEAYPDPSADPTKFFQRPDDGFSQDVYQIGLLLAVIYFIVQFLKATL

SEQ ID NO: 23962 - DNA, 1058 bp, Zea mays subsp. mays
  misc_feature (1)..(1058): Ceres Seq. ID no. 12417219
ttgttgtcgtaattgctggcttgaacctgacagaagagcgtgaggacttcgacagagtgagccttctccttccaggcaagcagatgggcctcatacatgccattgctagtgtagcgaagaagccccttgtgttggttctcctgggtggtggtcctgttgatgtttcgtttgcaaagcaagatccacgaatcgcaagcattctttggctcggatatcctggcgaggttggtggacaagtccttccagaaattcttttcggagagtacaacccaggaggaaagctgcctataacttggtatcctgaatcctttactgctattcccatgactgatatgaacatgagagctgatccttcacgaggctaccctgggagaacatatcgattttacactggagatgtagtgtatggctttggatatggtttaagtttactccaaatatttcatatagcatctcctcggctccgaagaagatcaccgtgtcgcgttcatccgatttgggcattatcagcagaaagcctgcatacncaaggagggatggactaggctctgtgaaaactgaagatatcgcttcatgtgaagctctggttttctctgttcacgtcgctgtttcgaatcatggtagcatggatgggagtcatgctgttcttctgttcgcgagatcgaaatcaagcgtcccgggctttcctataaaacagctggttggctttgagagtgtccacacggcggctggcagtgcatccaatgtggagattactgttgacccctgcaagcaaatgagcgcagccaatcctgaaggcaaaagggtacttctgttgggtgcccatgttctaacggtgggtgatgaagagttcgaattatccattgaactctgacagggatgtgccaagtcctaccattttatggagttcaaagttgggaataatctgatgaaacttgtaaagaaacacgttgtaaagattcattattgagctggatgcgtgtacggtaaacatgctgtgacctgtgaagattcatcatttgagttgggtgctagtacaattgcagccattttgcggt

SEQ ID NO: 23963 - protein, 180 aa, Zea mays subsp. mays
  misc_feature (1)..(180): Ceres Seq. ID no. 12417220
  misc_feature (175)..(175): Xaa is any aa, unknown or other
VVVIAGLNLTEEREDFDRVSLLLPGKQMGLIHAIASVAKKPLVLVLLGGGPVDVSFAKQDPRIASILWLGYPGEVGGQVLPEILFGEYNPGGKLPITWYPESFTAIPMTDMNMRADPSRGYPGRTYRFYTGDVVYGFGYGLSLLQIFHIASPRLRRRSPCRVHPIWALSAESLHXQGGMD

SEQ ID NO: 23964 - protein, 153 aa, Zea mays subsp. mays
  misc_feature (1)..(153): Ceres Seq. ID no. 12417221
  misc_feature (148)..(148): Xaa is any aa, unknown or other
MGLIHAIASVAKKPLVLVLLGGGPVDVSFAKQDPRIASILWLGYPGEVGGQVLPEILFGEYNPGGKLPITWYPESFTAIPMTDMNMRADPSRGYPGRTYRFYTGDVVYGFGYGLSLLQIFHIASPRLRRRSPCRVHPIWALSAESLHXQGGMD

SEQ ID NO: 23965 - DNA, 2095 bp, Zea mays subsp. mays
  misc_feature (1)..(2095): Ceres Seq. ID no. 12417312
gcacgagaccattacctagaacatcctaatcaaaaaaaatcacaacccgcactcgcccaaaaccctactgctcccgctccgctcctgcttggtcgagatcacttcgccgccgccgctttcgagatctccgggtggagcaagcgaggaaaggcagcagccatgtcgctccgcgtgctgaaccctaacgccgaggtgctcaacaagtcggcagcgctgcacatgaacatcaacgccgccaagggcctccaggacgtgctcaagaccaacctcggccccaagggcaccatcaagatgcttgtgggtggagctggtgacctgaagctgacgaaggatgggaacaccctcttgaaggaaatgcaaattcagaacccaactgcaatcatgattgcgaggacggctgtggcacaggatgacacaagtggtgatggcacaacctccactgtgctatttatcggggagctaatgaagcagtccgagcggtgcatcgatgaaggaactcatccaaggttcttggttgatggttttgatgttgctaagagagcgtgtcttgattttctcgataagttcaagacgccagtcgttactggtgatgaacctgacagagataccttaaaaatgatagcaagaacaactcttaggacaaagttgtatgaagggctggctgatcagttgactgatattgttgtgaatgcagttctctgcattcgcaaaccagatgaaccaattgatctgtttatggtggaaataatgcacatgcgccacaaatttgatgttgacacccgtctggttgagggtctggtcctggaccacggttctcgtcaccctgacatgaagcgcagggcagagaattgttacatcttgacctgcaatgtctcattagaatatgagaaaagtgaaatcaatgcaggatttttttactcaaacgcagaacaaagagagaagatggttgctgcagagagacgccaagttgatgaacgtgtcaaacagattattgaattgaaaaataaggtttgtgctggaggcgataaaaactttgtggtgatcaatcagaagggcattgaccctccatctctggatctccttgctagagcggggattattgctcttcgaagagcaaagaggagaaatatggagaggcttgtgctagcatgtggtggtgaagctgtcaattcagttgatgagttgactgaagattgtctaggctgggctggtcttgtctatgagcatgttcttggagaagaaaagtacacatttgtggagaatgtgaaaaatcctcgctcttgtactatactgattaaaggacctaatgaccataccattgcacaaatcaaggatgctgtccgtgatggtctaagatctgttaagaacacagttgaggatgaagcagttgtgctgggtgctggtgcttttgaggttgctgcaaagaagcatcttatcgacaatgtgaagaaaaccgtcaaaggacgagcacaacttggggtggaggcgtttgcggaagctcttcttgttatacccaagactttggctgagaactctggtttagatactcaagatgtgattgtttctctccagaatgagcatgaccgtggattagttgtggggttgaaccatcactctggggatccgattgatccccagatggaaggcatcttcgacaactactctgtgaagcgccagatcatcaattctggacccatcattgcatcccagttgctgcttgtggatgaagtgatcagggcaggccgcaacatgaggaaaccgacttagatttttgtcgccacctagccgagacttatttgttctaccttttgttttggttttgtgcctagtagtgatctggatgatacgtttgacttgagttggtcccatttcacgaagcaggtcgcattcgcttttttttttgggattactgcgtgcttccattttaacatgggattttagttttatcgatggttttaacatcctcctatgaggaaacaaagcctctagagagacgaggttgccttcccgaagttagtgccaccaaacttgctgcatggaacataaagaagcaatgtttataacaatgttattatcaagtaatccgatgtgatgg

SEQ ID NO: 23966 - protein, 588 aa, Zea mays subsp. mays
  misc_feature (1)..(588): Ceres Seq. ID no. 12417313
ARDHYLEHPNQKKSQPALAQNPTAPAPLLLGRDHFAAAAFEISGWSKRGKAAAMSLRVLNPNAEVLNKSAALHMNINAAKGLQDVLKTNLGPKGTIKMLVGGAGDLKLTKDGNTLLKEMQIQNPTAIMIARTAVAQDDTSGDGTTSTVLFIGELMKQSERCIDEGTHPRFLVDGFDVAKRACLDFLDKFKTPVVTGDEPDRDTLKMIARTTLRTKLYEGLADQLTDIVVNAVLCIRKPDEPIDLFMVEIMHMRHKFDVDTRLVEGLVLDHGSRHPDMKRRAENCYILTCNVSLEYEKSEINAGFFYSNAEQREKMVAAERRQVDERVKQIIELKNKVCAGGDKNFVVINQKGIDPPSLDLLARAGIIALRRAKRRNMERLVLACGGEAVNSVDELTEDCLGWAGLVYEHVLGEEKYTFVENVKNPRSCTILIKGPNDHTIAQIKDAVRDGLRSVKNTVEDEAVVLGAGAFEVAAKKHLIDNVKKTVKGRAQLGVEAFAEALLVIPKTLAENSGLDTQDVIVSLQNEHDRGLVVGLNHHSGDPIDPQMEGIFDNYSVKRQIINSGPIIASQLLLVDEVIRAGRNMRKPT

SEQ ID NO: 23967 - protein, 535 aa, Zea mays subsp. mays
  misc_feature (1)..(535): Ceres Seq. ID no. 12417314
MSLRVLNPNAEVLNKSAALHMNINAAKGLQDVLKTNLGPKGTIKMLVGGAGDLKLTKDGNTLLKEMQIQNPTAIMIARTAVAQDDTSGDGTTSTVLFIGELMKQSERCIDEGTHPRFLVDGFDVAKRACLDFLDKFKTPVVTGDEPDRDTLKMIARTTLRTKLYEGLADQLTDIVVNAVLCIRKPDEPIDLFMVEIMHMRHKFDVDTRLVEGLVLDHGSRHPDMKRRAENCYILTCNVSLEYEKSEINAGFFYSNAEQREKMVAAERRQVDERVKQIIELKNKVCAGGDKNFVVINQKGIDPPSLDLLARAGIIALRRAKRRNMERLVLACGGEAVNSVDELTEDCLGWAGLVYEHVLGEEKYTFVENVKNPRSCTILIKGPNDHTIAQIKDAVRDGLRSVKNTVEDEAVVLGAGAFEVAAKKHLIDNVKKTVKGRAQLGVEAFAEALLVIPKTLAENSGLDTQDVIVSLQNEHDRGLVVGLNHHSGDPIDPQMEGIFDNYSVKRQIINSGPIIASQLLLVDEVIRAGRNMRKPT

SEQ ID NO: 23968 - protein, 515 aa, Zea mays subsp. mays
  misc_feature (1)..(515): Ceres Seq. ID no. 12417315
MNINAAKGLQDVLKTNLGPKGTIKMLVGGAGDLKLTKDGNTLLKEMQIQNPTAIMIARTAVAQDDTSGDGTTSTVLFIGELMKQSERCIDEGTHPRFLVDGFDVAKRACLDFLDKFKTPVVTGDEPDRDTLKMIARTTLRTKLYEGLADQLTDIVVNAVLCIRKPDEPIDLFMVEIMHMRHKFDVDTRLVEGLVLDHGSRHPDMKRRAENCYILTCNVSLEYEKSEINAGFFYSNAEQREKMVAAERRQVDERVKQIIELKNKVCAGGDKNFVVINQKGIDPPSLDLLARAGIIALRRAKRRNMERLVLACGGEAVNSVDELTEDCLGWAGLVYEHVLGEEKYTFVENVKNPRSCTILIKGPNDHTIAQIKDAVRDGLRSVKNTVEDEAVVLGAGAFEVAAKKHLIDNVKKTVKGRAQLGVEAFAEALLVIPKTLAENSGLDTQDVIVSLQNEHDRGLVVGLNHHSGDPIDPQMEGIFDNYSVKRQIINSGPIIASQLLLVDEVIRAGRNMRKPT

SEQ ID NO: 23969 - DNA, 2013 bp, Zea mays subsp. mays
  misc_feature (1)..(2013): Ceres Seq. ID no. 12417337
gcacgagaccattacctagaacatcctaatcgaaaacttcagtaatcagtgctcgctagcccaccacgccctgaacctagcccggacaccagccagaacaggccatgtccatgggctccccggtgcagctcaggcggctgaagcctctgtaccagttcgtggtgaacaacatcctggccatcgtggccgtgccgctcgccaccgcggtcctgctcaaggcgtcgtcgctcgggcccgaggagatcctggcgctccggccggcgcacctgttcctggccgcgttcctgcctgccgcggccacggtgctgtacctgatgctccggccgcgcacggtgtacctggtggactacgcgtgcttccgcaccagccccaactgccgcgtcccgttcgcgacgttcctggagcactcccgcgtgtggccgggcttcgacgagcgcagcgtccggttcatgacgcgcctgctggagcggtcggggctcggggaggagacgtgcctgccgtacgcgcagcactacatcccgccgtcgcgcgacctggagtcctcccgcgccgaggccgagctcgtcatcttctcggccatcgacgacctgctcgccaagaccggggtctccccgcgggacatcgacatcctggtggtgaactgcagcctgttcgcgccgacgccgtccttcgcggacatggtcacgcaccggtacaggctccgcggggacgtgcgcaacgtgcacctcgccgggatggggtgcagcgcggggctcgtctccgtggagctggcccggaacctgctgcaggtggcgccgcggggcacgcgcgctctggtggtgtccacggagaccatcacccccaattactacatgggcgaggagcgcgcgatgctgctgcccaactgcctgttccgcatgggcggcgcggcggcgctgctgtccaccgacggcgccggcgcgcggttccgcctggcgcgcgtggtgcgcacgctgcgcggcgcgtcggacggcgcgtaccgctgcgtgtaccaggaggaggacgagcgcggcaacgtgggcatcaacctgtccaaggacctgatgagcatccgcgggcgacgcgctgaaggcgaacatcacggcgatggggcccctggtgctgccggcgtcggagcagctgctgttcgcgctgtccttcatcgcgcgcaaggtgctgaacaaccggatcaggccctacatcccggacttccgcacggcgttcgagcacttctgcatccacgcgggcgggcgcgccgtgatcgacgagctccagcgcagcctgacgctgtcggacgagcaggtggaggcgtcgcggatgacgctgcaccggttcggcaacacctccagcagctccctctggtacgagctcgcctacgtcgaggccaagggccgcatgcgcaggggagaccgcgtctggatgatcggcttcggctccggtttcaagtgcaacagcgccgcctgggagtgcatccgccccgccgccaacgccgacgggccgtgggccaactgcatccaccggtaccccgtgcacattcccgacgtgctcaagcactgagcccggcgccagctccagttccgtgccgtgccttgcctttcccttttcctcctcgcccggttgccattgcacctgctgctacatttggtttgtggacatcaaaacgaaccgctggaacagcgattggccgtggtcgtgaactaggttggtggaatatgtgatggagagtgacagagtacttgtcgtgtcgtatcaaggcggcggggtggtcgtcataaaggaggcgaggtcgggccaggctgccgtacatgggcgcccggggaacggacgtgtgttgtgcttgtccggggcgttgtattatctaccattttcctatttcttattacaattcattcctgcagtataccatgaaaagagatatgacatgagctagagctactagtagacgacaagacgagcaaaagctttgatgtatgtgtgcacctactctttatacaatcaagtgttctcatttaagtg

SEQ ID NO: 23970 - protein, 536 aa, Zea mays subsp. mays
  misc_feature (1)..(536): Ceres Seq. ID no. 12417338
MSMGSPVQLRRLKPLYQFVVNNILAIVAVPLATAVLLKASSLGPEEILALRPAHLFLAAFLPAAATVLYLMLRPRTVYLVDYACFRTSPNCRVPFATFLEHSRVWPGFDERSVRFMTRLLERSGLGEETCLPYAQHYIPPSRDLESSRAEAELVIFSAIDDLLAKTGVSPRDIDILVVNCSLFAPTPSFADMVTHRYRLRGDVRNVHLAGMGCSAGLVSVELARNLLQVAPRGTRALVVSTETITPNYYMGEERAMLLPNCLFRMGGAAALLSTDGAGARFRLARVVRTLRGASDGAYRCVYQEEDERGNVGINLSKDLMSIRGRRAEGEHHGDGAPGAAGVGAAAVRAVLHRAQGAEQPDQALHPGLPHGVRALLHPRGRARRDRRAPAQPDAVGRAGGGVADDAAPVRQHLQQLPLVRARLRRGQGPHAQGRPRLDDRLRLRFQVQQRRLGVHPPRRQRRRAVGQLHPPVPRAHSRRAQALSPAPAPVPCRALPFPFPPRPVAIAPAATFGLWTSKRTAGTAIGRGRELGWWNM

SEQ ID NO: 23971 - protein, 534 aa, Zea mays subsp. mays
  misc_feature (1)..(534): Ceres Seq. ID no. 12417339
MGSPVQLRRLKPLYQFVVNNILAIVAVPLATAVLLKASSLGPEEILALRPAHLFLAAFLPAAATVLYLMLRPRTVYLVDYACFRTSPNCRVPFATFLEHSRVWPGFDERSVRFMTRLLERSGLGEETCLPYAQHYIPPSRDLESSRAEAELVIFSAIDDLLAKTGVSPRDIDILVVNCSLFAPTPSFADMVTHRYRLRGDVRNVHLAGMGCSAGLVSVELARNLLQVAPRGTRALVVSTETITPNYYMGEERAMLLPNCLFRMGGAAALLSTDGAGARFRLARVVRTLRGASDGAYRCVYQEEDERGNVGINLSKDLMSIRGRRAEGEHHGDGAPGAAGVGAAAVRAVLHRAQGAEQPDQALHPGLPHGVRALLHPRGRARRDRRAPAQPDAVGRAGGGVADDAAPVRQHLQQLPLVRARLRRGQGPHAQGRPRLDDRLRLRFQVQQRRLGVHPPRRQRRRAVGQLHPPVPRAHSRRAQALSPAPAPVPCRALPFPFPPRPVAIAPAATFGLWTSKRTAGTAIGRGRELGWWNM

SEQ ID NO: 23972 - protein, 466 aa, Zea mays subsp. mays
  misc_feature (1)..(466): Ceres Seq. ID no. 12417340
MLRPRTVYLVDYACFRTSPNCRVPFATFLEHSRVWPGFDERSVRFMTRLLERSGLGEETCLPYAQHYIPPSRDLESSRAEAELVIFSAIDDLLAKTGVSPRDIDILVVNCSLFAPTPSFADMVTHRYRLRGDVRNVHLAGMGCSAGLVSVELARNLLQVAPRGTRALVVSTETITPNYYMGEERAMLLPNCLFRMGGAAALLSTDGAGARFRLARVVRTLRGASDGAYRCVYQEEDERGNVGINLSKDLMSIRGRRAEGEHHGDGAPGAAGVGAAAVRAVLHRAQGAEQPDQALHPGLPHGVRALLHPRGRARRDRRAPAQPDAVGRAGGGVADDAAPVRQHLQQLPLVRARLRRGQGPHAQGRPRLDDRLRLRFQVQQRRLGVHPPRRQRRRAVGQLHPPVPRAHSRRAQALSPAPAPVPCRALPFPFPPRPVAIAPAATFGLWTSKRTAGTAIGRGRELGWWNM

SEQ ID NO: 23973 - DNA, 1069 bp, Zea mays subsp. mays
  misc_feature (1)..(1069): Ceres Seq. ID no. 12417357
gcacgagaccattacctagaacatcctaatcgaaaaaatcatcactgccatctctctctgactctgtgtccgtctctaaactctagtctgtgcgaatcctgctgccagcagcgaggaacagaacagtagccaatttgccatctcacagttgcgttcctccgattccccgtcccccgatggacctgtctcccagctcgtcggcgccatccgcgccgccggtgccgtgcgagtggtccggcgccgggctcggctccgcggcgtgcggcctcgcctgcagggtgctctgcgccgtcgccacctgcgtcttcgcggccgtggggtcgctggtcggggcggtgacggggtccatggtggggctggcgaccgagagcgggatgctgcgcggcgccggcatcggggccatctccggcgccgtcttctccatcgaggtcgccgagtcgtcccgcgacctctggcactcgggcgactccggcgtctggaccctcctctacatggtggacatcatctccagtctcttgagcggcaggctggtccgggagaaggtggggccggctgttcagagcgccgtgcagagccagatcagcgccatcagctcgccgttcgaggagacgagcgacctgttcgagaccggcagcgtgaggggcctccccgaggccgcggtgcgccggctgccggtgacggtggtcgcggaggacggcgccgtggacgcggcgggccaggcgctgtgctgctcggtgtgcctgcaggacttccgggtgggcgaccgcgcgcggaggctgcccggttgccgccacctgttccacgtgccctgcatcgactgctggctcctcaggcacggctcctgcccgctgtgccggcgagacatctgaaactcggtcgtctgctctgtgaaccgccacccacgtcgccggaaacgtggtgtagtgttgctgctttggacgagatggtcagttagttgagtagggttcctactttttaggacggcaccctgatgcccgtaagggaaatggtgcgctctgacgctctgttaactaaaaaagaagaagagagaaaacagcccctcagcttc

SEQ ID NO: 23974 - protein, 230 aa, Zea mays subsp. mays
  misc_feature (1)..(230): Ceres Seq. ID no. 12417358
MDLSPSSSAPSAPPVPCEWSGAGLGSAACGLACRVLCAVATCVFAAVGSLVGAVTGSMVGLATESGMLRGAGIGAISGAVFSIEVAESSRDLWHSGDSGVWTLLYMVDIISSLLSGRLVREKVGPAVQSAVQSQISAISSPFEETSDLFETGSVRGLPEAAVRRLPVTVVAEDGAVDAAGQALCCSVCLQDFRVGDRARRLPGCRHLFHVPCIDCWLLRHGSCPLCRRDI

SEQ ID NO: 23975 - protein, 173 aa, Zea mays subsp. mays
  misc_feature (1)..(173): Ceres Seq. ID no. 12417359
MVGLATESGMLRGAGIGAISGAVFSIEVAESSRDLWHSGDSGVWTLLYMVDIISSLLSGRLVREKVGPAVQSAVQSQISAISSPFEETSDLFETGSVRGLPEAAVRRLPVTVVAEDGAVDAAGQALCCSVCLQDFRVGDRARRLPGCRHLFHVPCIDCWLLRHGSCPLCRRDI

SEQ ID NO: 23976 - protein, 164 aa, Zea mays subsp. mays
  misc_feature (1)..(164): Ceres Seq. ID no. 12417360
MLRGAGIGAISGAVFSIEVAESSRDLWHSGDSGVWTLLYMVDIISSLLSGRLVREKVGPAVQSAVQSQISAISSPFEETSDLFETGSVRGLPEAAVRRLPVTVVAEDGAVDAAGQALCCSVCLQDFRVGDRARRLPGCRHLFHVPCIDCWLLRHGSCPLCRRDI

SEQ ID NO: 23977 - DNA, 1865 bp, Zea mays subsp. mays
  misc_feature (1)..(1865): Ceres Seq. ID no. 12417373
gcacgagaccattacctagaacatcctaatcgaaaaactctcacgcacacactccacagtgccactcgtctcgctcgctcgcgccagctggtccggcagcagacagcatgggttcgtcggcggcgcttcagccgaagcagctgtaccagctcgtggtgaacaacttcgtcgccgtgctcgctgcgccgctggccgtggcggccgtcgtcaatgcggcgcgcgtcgggccggacgagctgctcggcaggctgcaggcgctccgggcggtgcacgtatttctggccgtgttcgtcgcggccgccacggcgatactgtacgtcctgctgcggccccgggccgtgtacctggtggactacgcctgcttccgcacgcggcccaactgccgcgtccccttcgccaccttcctggagcacgcgaagctggtgacgttcgtggagggggcctccatcgacgagcgcagcgtccggttcatgacgcggctgctggagcggtccggcctcggcgaggagacctgcctgcccccggcccaccactacatcccgccgtaccggaacatggaggcctcgcgcgcggaggtggagctcgtcatcttctcggccatcgacgacctgctcgcgaagacgggcatcagccccagcgccatcgacatcctggtggtgaactgcagcctcttcgcgcccgtcccgtccttcacggacatggtgatcaacaggtacgggatgcggccggacgtccgcaatgtgcacctgtccgggatggggtgcagcgccgggctcatctccgtggggctggcgcgcaacctgctgcaggtggcgggccggggcgcgcacgcgctggtggtgtcgacggagaccatcacccccaactactacgtgggcaaggagcgcgccatgctcctgcccaactgcctcttccgcatcggcggcgccgccgtgctgctgtccacgtcccggtccagggcccggttccgcctggcccgcgtggtgcgcacgctgacgggcgcccaggacagcgcgtaccggtgcgtgttccaggaggaggacggcgagggccaccgcgggatcaacctgtccaaggacctgatgaccatcgcgggcgacgcgctcaaggccaacatcaccgccatcgggccgctggtgctgccggcctcggagcagctgctgttcgcgctgtccttcatcgcgcggcgcgtgctgaaccggcgcgtgaagccgtacctcccggacttccgcacggcgttcgagcacttctgcatccacgcggggggccgcgcggtgatcgacgagctgcagcgcagcctgggcctgtcggacgaggacgtggaggcgtcgcgcatggcgcctgcaccggttcggcaacacgtcgagcagctcggtgtggtacgagctggcgtacatcgaggccaagggccggatgcgccgcggcgaccgcgtgtggatgatcggattcggctccgggttcaagtgcaacagcgcggcctgggagtgcatcgcgccggcgcgcaccgccgaggggccctgggcggagagcgtcagccgctaccccgtggacatccccgaggtgctcaagcactagccgctatcccgtggacatcaggccgggcatgcatgtgaccggccgacgacgtgacagcgtgttttggacttgcttgtggtgctggccgggccggacgcgttgaatgccgagcctgacgcgtccatgtgtgcggtgcgctccagcccggacaggtggttgcgagagggtacaccgtgttaaatccgggccatttacacacgtatagtactcgtgctcctctagatcgtgtaccccttccttctcttcttgttcttcttctttttaccttccttttcaacatttgttttccc

SEQ ID NO: 23978 - protein, 501 aa, Zea mays subsp. mays
  misc_feature (1)..(501): Ceres Seq. ID no. 12417374
MGSSAALQPKQLYQLVVNNFVAVLAAPLAVAAVVNAARVGPDELLGRLQALRAVHVFLAVFVAAATAILYVLLRPRAVYLVDYACFRTRPNCRVPFATFLEHAKLVTFVEGASIDERSVRFMTRLLERSGLGEETCLPPAHHYIPPYRNMEASRAEVELVIFSAIDDLLAKTGISPSAIDILVVNCSLFAPVPSFTDMVINRYGMRPDVRNVHLSGMGCSAGLISVGLARNLLQVAGRGAHALVVSTETITPNYYVGKERAMLLPNCLFRIGGAAVLLSTSRSRARFRLARVVRTLTGAQDSAYRCVFQEEDGEGHRGINLSKDLMTIAGDALKANITAIGPLVLPASEQLLFALSFIARRVLNRRVKPYLPDFRTAFEHFCIHAGGRAVIDELQRSLGLSDEDVEASRMAPAPVRQHVEQLGVVRAGVHRGQGPDAPRRPRVDDRIRLRVQVQQRGLGVHRAGAHRRGALGGERQPLPRGHPRGAQALAAIPWTSGRACM

SEQ ID NO: 23979 - protein, 380 aa, Zea mays subsp. mays
  misc_feature (1)..(380): Ceres Seq. ID no. 12417375
MTRLLERSGLGEETCLPPAHHYIPPYRNMEASRAEVELVIFSAIDDLLAKTGISPSAIDILVVNCSLFAPVPSFTDMVINRYGMRPDVRNVHLSGMGCSAGLISVGLARNLLQVAGRGAHALVVSTETITPNYYVGKERAMLLPNCLFRIGGAAVLLSTSRSRARFRLARVVRTLTGAQDSAYRCVFQEEDGEGHRGINLSKDLMTIAGDALKANITAIGPLVLPASEQLLFALSFIARRVLNRRVKPYLPDFRTAFEHFCIHAGGRAVIDELQRSLGLSDEDVEASRMAPAPVRQHVEQLGVVRAGVHRGQGPDAPRRPRVDDRIRLRVQVQQRGLGVHRAGAHRRGALGGERQPLPRGHPRGAQALAAIPWTSGRACM

SEQ ID NO: 23980 - protein, 352 aa, Zea mays subsp. mays
  misc_feature (1)..(352): Ceres Seq. ID no. 12417376
MEASRAEVELVIFSAIDDLLAKTGISPSAIDILVVNCSLFAPVPSFTDMVINRYGMRPDVRNVHLSGMGCSAGLISVGLARNLLQVAGRGAHALVVSTETITPNYYVGKERAMLLPNCLFRIGGAAVLLSTSRSRARFRLARVVRTLTGAQDSAYRCVFQEEDGEGHRGINLSKDLMTIAGDALKANITAIGPLVLPASEQLLFALSFIARRVLNRRVKPYLPDFRTAFEHFCIHAGGRAVIDELQRSLGLSDEDVEASRMAPAPVRQHVEQLGVVRAGVHRGQGPDAPRRPRVDDRIRLRVQVQQRGLGVHRAGAHRRGALGGERQPLPRGHPRGAQALAAIPWTSGRACM

SEQ ID NO: 23981 - DNA, 2537 bp, Zea mays subsp. mays
  misc_feature (1)..(2537): Ceres Seq. ID no. 12417396
attgaccaatctgctccgggcaccatggagaggatcagtggcccgcgcctcgctgtcctgctcgctctcgccgtcctcaccgccgtcgccgcagcnaccacggacgaggtgcgcgcgcagtccacctacatcatccacctcgccccaggccacccggcgctgtccgcagcgcgcgacaacggcggcgacgaggcggccctccgccgcctcctcccgcgccgcctgcgcgcgccgaggccgcgcgtgctctactcctaccagcacgctgccacgggcatcgccgcgcggctcacgccccannaggcggcgcacgccnnnnncggggagggcgtcctggccgtgtaccccgaccaggcgcggnanctgcacaccacccacaccccggcgttcctccgnctaacggaggccgccgggctcctcccggctgcgacggggggcgcgtcgtcgtctgccgtcgtcggcgtgctcgacaccgggctctaccccatcggncggtcctcgttcgcngcagcggatggtctcggnccggcgcccgcgtccttctctggngganncgtctnngcgggnnncttcaacgcgtccncctactgcaacagcaagctcatcggngccaagttcttntaccaggggtacgaagctgctctcggccaccccatcgatgagaccaaggagtcgaagtcgccgntggacactgagggccatggcacgcacaccgcctccactgnngctggctcgccggtggccggagccgggttctttgactacgccgaggggcaggccgtgggcatggaccccggtgcgcgcatcgcggcgtacaagatctgctggacgtctggatgctacgactccgatatcctcgctgccatggacgaggccgtcgctgacggcgtcgacgtcatctcgctctccgtcggcgccaacgggtacgcccccagcttcttcaccgattccatcgccatcggcgctttccacgcggtaagcaagggcatcgtcgtctcctgctccgccggcaactccggccccggcgagtacaccgccgtcaacattgcgccgtggatcctgaccgtcggcgcgtccaccatcgaccgcgagttccccgccgatgtggttctcggcgacggccgcgtctttggtggtgtctctctgtatgccggtgaccccctggactccactcagttgcctctggtgttcgccggggactgtggttcccctctgtgcctaatgggcgagctcgactcgaagaaggtggccggcaagatggtgctctgtctgcgtggtaacaacgctcgtgtcgagaaaggagcagcagtcaagctcgccggtggggtcggaatgatcctcgccaacaccgaggagagcggggaggagctcatcgccgactcccacctcgtgccggcgactatggtcgggcagaagttcggcgacaagatcaggtactacgtccagacggacccgtcgccaacggcgaccatcgtgttccgcggcacagtcatcggcaagtcgccgtccgcgcctcgagtggcggcgttctcgagccgaggccccaactaccgcgcaccggagatcctcaagcccgacgtcatcgccccaggcgtcaacatactcgcggcgtggaccggcgccgcctcccccaccgacctggacatcgactcgaggcgcgtggagttcaacatcatctccggcacgtccatgtcctgcccgcacgtgagcggcctcgccgcgctgctccgccaggcgcaccctgagtggagccccgcggcgatcaagtcggcgctcatgaccacggcgtacaacctggacaactccgggggaaccatcaaggacctcgctacgggcgtggagtcgacgccgttcgtccgtggcgccggtcacgtcgaccccaacgccgccctcgacccagggctggtgtacgacgccggctccgacgactacgtcgccttcctctgcacgctcgggtactctccgtcgttgatctccatcttcacgcangacgcgtcggtcgccgactgctcgacgaaaattcgctcgccccggcgaccttaactaccctgccttcgccgccgtcttctcctcctaccaagactcggtcacctaccgccgggtggtgcgcaacgtcggcagcaactccagcgcggtgtaccagccgacgatcgccagcccgtacggcgtggatgtcacggtgactccgagcaagctcgcgttcgacgggaagcagcagagcctgggatacgagatcaccatcgcagtgtcaggcaacccggtgatcgtggattccagctactcgttcggatccatcacctggagcgacggcgcgcacgacgtcacgagccccattgccgtgacctggccgtccaacggtggagcagcagccatgtagtagactgatgctgttgctactgtctaccgctgtgggaagaaggacagggccatgagcccatgagatccgaaatctccacgcctcctgcctgccataggaataatttactcgactgaaccacgcaataattcagctgcccctatcgtggttgtggtggacc

SEQ ID NO: 23982 - protein, 680 aa, Zea mays subsp. mays
  misc_feature (1)..(680): Ceres Seq. ID no. 12417397
  misc_feature (32)..(32): Xaa is any aa, unknown or other
  misc_feature (100)..(100): Xaa is any aa, unknown or other
  misc_feature (101)..(101): Xaa is any aa, unknown or other
  misc_feature (106)..(106): Xaa is any aa, unknown or other
  misc_feature (107)..(107): Xaa is any aa, unknown or other
  misc_feature (121)..(121): Xaa is any aa, unknown or other
  misc_feature (132)..(132): Xaa is any aa, unknown or other
  misc_feature (164)..(164): Xaa is any aa, unknown or other
  misc_feature (169)..(169): Xaa is any aa, unknown or other
  misc_feature (175)..(175): Xaa is any aa, unknown or other
  misc_feature (183)..(183): Xaa is any aa, unknown or other
  misc_feature (185)..(185): Xaa is any aa, unknown or other
  misc_feature (187)..(187): Xaa is any aa, unknown or other
  misc_feature (189)..(189): Xaa is any aa, unknown or other
  misc_feature (190)..(190): Xaa is any aa, unknown or other
  misc_feature (195)..(195): Xaa is any aa, unknown or other
  misc_feature (203)..(203): Xaa is any aa, unknown or other
  misc_feature (207)..(207): Xaa is any aa, unknown or other
  misc_feature (229)..(229): Xaa is any aa, unknown or other
  misc_feature (242)..(242): Xaa is any aa, unknown or other
  misc_feature (663)..(663): Xaa is any aa, unknown or other
IDQSAPGTMERISGPRLAVLLALAVLTAVAAXTTDEVRAQSTYIIHLAPGHPALSAARDNGGDEAALRRLLPRRLRAPRPRVLYSYQHAATGIAARLTPXXAAHAXXGEGVLAVYPDQARXLHTTHTPAFLXLTEAAGLLPAATGGASSSAVVGVLDTGLYPIXRSSFXAADGLXPAPASFSXGXVXAXXFNASXYCNSKLIXAKFXYQGYEAALGHPIDETKESKSPXDTEGHGTHTASTXAGSPVAGAGFFDYAEGQAVGMDPGARIAAYKICWTSGCYDSDILAAMDEAVADGVDVISLSVGANGYAPSFFTDSIAIGAFHAVSKGIVVSCSAGNSGPGEYTAVNIAPWILTVGASTIDREFPADVVLGDGRVFGGVSLYAGDPLDSTQLPLVFAGDCGSPLCLMGELDSKKVAGKMVLCLRGNNARVEKGAAVKLAGGVGMILANTEESGEELIADSHLVPATMVGQKFGDKIRYYVQTDPSPTATIVFRGTVIGKSPSAPRVAAFSSRGPNYRAPEILKPDVIAPGVNILAAWTGAASPTDLDIDSRRVEFNIISGTSMSCPHVSGLAALLRQAHPEWSPAAIKSALMTTAYNLDNSGGTIKDLATGVESTPFVRGAGHVDPNAALDPGLVYDAGSDDYVAFLCTLGYSPSLISIFTXDASVADCSTKIRSPRRP

SEQ ID NO: 23983 - protein, 672 aa, Zea mays subsp. mays
  misc_feature (1)..(672): Ceres Seq. ID no. 12417398
  misc_feature (24)..(24): Xaa is any aa, unknown or other
  misc_feature (92)..(92): Xaa is any aa, unknown or other
  misc_feature (93)..(93): Xaa is any aa, unknown or other
  misc_feature (98)..(98): Xaa is any aa, unknown or other
  misc_feature (99)..(99): Xaa is any aa, unknown or other
  misc_feature (113)..(113): Xaa is any aa, unknown or other
  misc_feature (124)..(124): Xaa is any aa, unknown or other
  misc_feature (156)..(156): Xaa is any aa, unknown or other
  misc_feature (161)..(161): Xaa is any aa, unknown or other
  misc_feature (167)..(167): Xaa is any aa, unknown or other
  misc_feature (175)..(175): Xaa is any aa, unknown or other
  misc_feature (177)..(177): Xaa is any aa, unknown or other
  misc_feature (179)..(179): Xaa is any aa, unknown or other
  misc_feature (181)..(181): Xaa is any aa, unknown or other
  misc_feature (182)..(182): Xaa is any aa, unknown or other
  misc_feature (187)..(187): Xaa is any aa, unknown or other
  misc_feature (195)..(195): Xaa is any aa, unknown or other
  misc_feature (199)..(199): Xaa is any aa, unknown or other
  misc_feature (221)..(221): Xaa is any aa, unknown or other
  misc_feature (234)..(234): Xaa is any aa, unknown or other
  misc_feature (655)..(655): Xaa is any aa, unknown or other
MERISGPRLAVLLALAVLTAVAAXTTDEVRAQSTYIIHLAPGHPALSAARDNGGDEAALRRLLPRRLRAPRPRVLYSYQHAATGIAARLTPXXAAHAXXGEGVLAVYPDQARXLHTTHTPAFLXLTEAAGLLPAATGGASSSAVVGVLDTGLYPIXRSSFXAADGLXPAPASFSXGXVXAXXFNASXYCNSKLIXAKFXYQGYEAALGHPIDETKESKSPXDTEGHGTHTASTXAGSPVAGAGFFDYAEGQAVGMDPGARIAAYKICWTSGCYDSDILAAMDEAVADGVDVISLSVGANGYAPSFFTDSIAIGAFHAVSKGIVVSCSAGNSGPGEYTAVNIAPWILTVGASTIDREFPADVVLGDGRVFGGVSLYAGDPLDSTQLPLVFAGDCGSPLCLMGELDSKKVAGKMVLCLRGNNARVEKGAAVKLAGGVGMILANTEESGEELIADSHLVPATMVGQKFGDKIRYYVQTDPSPTATIVFRGTVIGKSPSAPRVAAFSSRGPNYRAPEILKPDVIAPGVNILAAWTGAASPTDLDIDSRRVEFNIISGTSMSCPHVSGLAALLRQAHPEWSPAAIKSALMTTAYNLDNSGGTIKDLATGVESTPFVRGAGHVDPNAALDPGLVYDAGSDDYVAFLCTLGYSPSLISIFTXDASVADCSTKIRSPRRP

SEQ ID NO: 23984 - protein, 418 aa, Zea mays subsp. mays
  misc_feature (1)..(418): Ceres Seq. ID no. 12417399
  misc_feature (401)..(401): Xaa is any aa, unknown or other
MDPGARIAAYKICWTSGCYDSDILAAMDEAVADGVDVISLSVGANGYAPSFFTDSIAIGAFHAVSKGIVVSCSAGNSGPGEYTAVNIAPWILTVGASTIDREFPADVVLGDGRVFGGVSLYAGDPLDSTQLPLVFAGDCGSPLCLMGELDSKKVAGKMVLCLRGNNARVEKGAAVKLAGGVGMILANTEESGEELIADSHLVPATMVGQKFGDKIRYYVQTDPSPTATIVFRGTVIGKSPSAPRVAAFSSRGPNYRAPEILKPDVIAPGVNILAAWTGAASPTDLDIDSRRVEFNIISGTSMSCPHVSGLAALLRQAHPEWSPAAIKSALMTTAYNLDNSGGTIKDLATGVESTPFVRGAGHVDPNAALDPGLVYDAGSDDYVAFLCTLGYSPSLISIFTXDASVADCSTKIRSPRRP

SEQ ID NO: 23985 - DNA, 1631 bp, Zea mays subsp. mays
  misc_feature (1)..(1631): Ceres Seq. ID no. 12417412
accaatcatttctttgcaatctgcagcctctgcaaactgatcgcgttgctggttgctggtaatcatcggaccagtccacagatatcggaagctctcttgctactgatggcgaagcccagcgtggcggtgccggaggttggcgtaccagccgcgcaggcgtcgtgcacctgcccggggacgctgctcgcgtacccgccgccgcgtggcgccggggtcgcggccgccgtgcggcgcaagtgcctgcaggtggagctcggcgcgggggcgggcctgctgggcggcgccggcgcctggggcgtggagtccatgcgggcgtcgtcgcccacgcacgccagggccgcggccgcgctcgccgccggcggcggcgtcgatgttgacgtcgacgaggagcgcgccgccagctggatggcgcggcacccgtcggcgctgggcaggttcgagcggatcgtggcggcggccgagggcaagcggatcgtcatgttcctggactacgacggcacgctgtcgcccatcgtggacgaccccgacgccgccttcatgagcgagacgatgcggatggccgtgcgtagcgtcgccaagcatttcccgacggcgatcgtgagcggccggtgccgcgacaaggtgttcgagttcgtgaagctggcagagctctactacgccggcagccacggcatggacatcaagggtccggcggcctccaaggcctcctcttcttctcggcacgccgcaaaggcaaaaggagtaacggccacgtcggcgtggcaggtggcgcggcgccattgggcggggcctgccgatcgacgacctgcgtgcgcgcgcggcgggagaggctgttacaaaaacagagaagctcacatcggccaagtggtttcgccatctccgccgcccctggatcactcggtgctctcctctcctactctcccattcagattctctaagaaaaaaaggtctagatctagcgagatcgtgctgtagtagccttgttgcttggcgcatcgttgtttgttaacattacatgcttactgttgcccgtgtgcgtgtatcaccactgtatccatccatccatgtttgtttctgaaaaaaaaaaaaaaaaaagcttctcgtgccgttttttttttttttttttgaacaaaactgcaacctcaccacaagcagcaaaaagctaatctcaggtcccatattagcgagcggatctgtcacagatggtagcaggaagggaaacaaaagtgcaaaacatgtccagactcagcatgaacctggcgacccagaggcacgcgccatccacatttattctcggcatacacaagcagccaccaaaggagcacaagaggtacaaccccaagaaactgacatacgagcagaggaaggccagtctcattgaaaggctcaaccaactcaactcctcgggcggcgcagatgacgacgacgaggatgacgagtaaagtttcgtcccatcgaagtagtgctatcttatgcggcgatcagtatttgtgctatggcatttatcgctacctgtagtcgtgcaacatgcatttttgtttaagtttgtcgatgcgaacaaagttgtttctgttagtttggagctggagttctgaatatttacttttataatataaaattggaccgagtcg

SEQ ID NO: 23986 - protein, 324 aa, Zea mays subsp. mays
  misc_feature (1)..(324): Ceres Seq. ID no. 12417413
TNHFFAICSLCKLIALLVAGNHRTSPQISEALLLLMAKPSVAVPEVGVPAAQASCTCPGTLLAYPPPRGAGVAAAVRRKCLQVELGAGAGLLGGAGAWGVESMRASSPTHARAAAALAAGGGVDVDVDEERAASWMARHPSALGRFERIVAAAEGKRIVMFLDYDGTLSPIVDDPDAAFMSETMRMAVRSVAKHFPTAIVSGRCRDKVFEFVKLAELYYAGSHGMDIKGPAASKASSSSRHAAKAKGVTATSAWQVARRHWAGPADRRPACARGGRGCYKNREAHIGQVVSPSPPPLDHSVLSSPTLPFRFSKKKRSRSSEIVL

SEQ ID NO: 23987 - protein, 289 aa, Zea mays subsp. mays
  misc_feature (1)..(289): Ceres Seq. ID no. 12417414
MAKPSVAVPEVGVPAAQASCTCPGTLLAYPPPRGAGVAAAVRRKCLQVELGAGAGLLGGAGAWGVESMRASSPTHARAAAALAAGGGVDVDVDEERAASWMARHPSALGRFERIVAAAEGKRIVMFLDYDGTLSPIVDDPDAAFMSETMRMAVRSVAKHFPTAIVSGRCRDKVFEFVKLAELYYAGSHGMDIKGPAASKASSSSRHAAKAKGVTATSAWQVARRHWAGPADRRPACARGGRGCYKNREAHIGQVVSPSPPPLDHSVLSSPTLPFRFSKKKRSRSSEIVL

SEQ ID NO: 23988 - protein, 222 aa, Zea mays subsp. mays
  misc_feature (1)..(222): Ceres Seq. ID no. 12417415
MRASSPTHARAAAALAAGGGVDVDVDEERAASWMARHPSALGRFERIVAAAEGKRIVMFLDYDGTLSPIVDDPDAAFMSETMRMAVRSVAKHFPTAIVSGRCRDKVFEFVKLAELYYAGSHGMDIKGPAASKASSSSRHAAKAKGVTATSAWQVARRHWAGPADRRPACARGGRGCYKNREAHIGQVVSPSPPPLDHSVLSSPTLPFRFSKKKRSRSSEIVL

SEQ ID NO: 23989 - DNA, 2124 bp, Zea mays subsp. mays
  misc_feature (1)..(2124): Ceres Seq. ID no. 12417416
atccaacgacccacactgagacgtcccctccccgctccgtcctctctcctctgccgccgagacgacgcgatggcggggtccgccgccttgccgccgctcgccgccttcgcgtcgctccttaccgcgcggcgcttcgccgccgccaggtccaagctccggtccctgctcacgccgcgcctactggcggtgccgttcgcggacctcgccgcctcgtcgctcccgcgcggcgcgccgccgcacgccgtggcggcgttccacgacatgctcttccgcgcgtacgcggacgcgggcgcggcgtgccgcgcggccgaggcgctcgacgccgccgtgtcccgcctcggcagcctcgacccgcgctcgctcacgttctcgctgctctcgctccgccgcgccgggcgcctcgcggacgccgcgggcctcctggagcgggcgctcggctcgtgcccgggctccgtctcgccgttcgccgcgtccgtcgtcgtcgacgggctctgcaagtcggggcgcgtggacgacgcgcgccggctgctcgacgatatgcctcgccacggcgtgagtctgaatgcgctgtgctacaactcgctgcttgactgttacgtgcgacaaaaggatgacgggcgggtccaggagattctagagatcatggagaacgaaggcatcgaggcgacggtcgggacgtatacgatccttgtggatagtttgtcgaccgccagggacatcagcaaggtcgaggctctgtttaatgagatgaaggcgaataatgttgtgggggatgtgtacctgtacaccgctgtcatcaacgcgtattgccgagcagggaacatgcggagggccgccaaggttttggatgaatgcgttggcaatggcgttgagccaaacgagcgtacatatggtgtattgatcaaagggttctgcaagattgggcagatggaggctgcagagatgttgctggcagacatgcaagggcaaggtgtagggcttaaccaaatcattttcaataccatgattgatggctattgtcgcaaagggatggtggacgatgctcttaaaataaaggcggccatggagaaaattggcgtcgaactgaacatctacacatacaacacactggcctgtggactgtgcagggtgaatagattggatgaggcaaagactctattgcacatcatgatcgagatgggtgtcgtgccaaattacgtcacttacactacactgatcagcatacactgcaaggatggcgacatggtggaggctagaaggctgttccgagaaatggcagagaaaggggcgacgcccagtgttgtgacctacagtgttatgattcatgggtacgccaagaaggggaggatccgtgaggctgagaggttcagaaagcagatggagaagaaagggtttgttccagatgtatacacctatgcatcgctagttcatgggcactgtgtcaatgggaaggtggatgtggcgctgaagctattcgaagagatgaagcagaggggaacggaacctaatgtcgtggcctatacggctctgatatcaggtctggcgaaggaagggagatcagaggcggcgttccagctgtatgatgatatgctgaaagctggattgatcccagatgactccctatattctgcccttgtaggaagccttcacacagataaccggaaagatgttaaggtttcttaggcagcttcgcttttaagggaaagcaacctaagtttttgtaagttaccctgtagcaactgaagaggtcggaagtccagaattaactccataatgttattcagtttacaaggtgggatggagtactagactgttgcatttcagttaaatgacataaggagatctcagctagctgtgatgaagcagcaaagttgcagaaatgattacatgctgacgtgcaatattacatggccacctccagattccaattcctcattgggtaacaaattttatttttgttttaagcatgtttagaacactggaacaagaggaggctgtgcagattttatttcaagattaagtttgtaatagtagtattagtagtcatggaattgttacaaaacaagcagttcttgtacattactcttgaaattgctcactgttatagagatatttgcacttggc

SEQ ID NO: 23990 - protein, 560 aa, Zea mays subsp. mays
  misc_feature (1)..(560): Ceres Seq. ID no. 12417417
IQRPTLRRPLPAPSSLLCRRDDAMAGSAALPPLAAFASLLTARRFAAARSKLRSLLTPRLLAVPFADLAASSLPRGAPPHAVAAFHDMLFRAYADAGAACRAAEALDAAVSRLGSLDPRSLTFSLLSLRRAGRLADAAGLLERALGSCPGSVSPFAASVVVDGLCKSGRVDDARRLLDDMPRHGVSLNALCYNSLLDCYVRQKDDGRVQEILEIMENEGIEATVGTYTILVDSLSTARDISKVEALFNEMKANNVVGDVYLYTAVINAYCRAGNMRRAAKVLDECVGNGVEPNERTYGVLIKGFCKIGQMEAAEMLLADMQGQGVGLNQIIFNTMIDGYCRKGMVDDALKIKAAMEKIGVELNIYTYNTLACGLCRVNRLDEAKTLLHIMIEMGVVPNYVTYTTLISIHCKDGDMVEARRLFREMAEKGATPSVVTYSVMIHGYAKKGRIREAERFRKQMEKKGFVPDVYTYASLVHGHCVNGKVDVALKLFEEMKQRGTEPNVVAYTALISGLAKEGRSEAAFQLYDDMLKAGLIPDDSLYSALVGSLHTDNRKDVKVS

SEQ ID NO: 23991 - protein, 537 aa, Zea mays subsp. mays
  misc_feature (1)..(537): Ceres Seq. ID no. 12417418
MAGSAALPPLAAFASLLTARRFAAARSKLRSLLTPRLLAVPFADLAASSLPRGAPPHAVAAFHDMLFRAYADAGAACRAAEALDAAVSRLGSLDPRSLTFSLLSLRRAGRLADAAGLLERALGSCPGSVSPFAASVVVDGLCKSGRVDDARRLLDDMPRHGVSLNALCYNSLLDCYVRQKDDGRVQEILEIMENEGIEATVGTYTILVDSLSTARDISKVEALFNEMKANNVVGDVYLYTAVINAYCRAGNMRRAAKVLDECVGNGVEPNERTYGVLIKGFCKIGQMEAAEMLLADMQGQGVGLNQIIFNTMIDGYCRKGMVDDALKIKAAMEKIGVELNIYTYNTLACGLCRVNRLDEAKTLLHIMIEMGVVPNYVTYTTLISIHCKDGDMVEARRLFREMAEKGATPSVVTYSVMIHGYAKKGRIREAERFRKQMEKKGFVPDVYTYASLVHGHCVNGKVDVALKLFEEMKQRGTEPNVVAYTALISGLAKEGRSEAAFQLYDDMLKAGLIPDDSLYSALVGSLHTDNRKDVKVS

SEQ ID NO: 23992 - protein, 473 aa, Zea mays subsp. mays
  misc_feature (1)..(473): Ceres Seq. ID no. 12417419
MLFRAYADAGAACRAAEALDAAVSRLGSLDPRSLTFSLLSLRRAGRLADAAGLLERALGSCPGSVSPFAASVVVDGLCKSGRVDDARRLLDDMPRHGVSLNALCYNSLLDCYVRQKDDGRVQEILEIMENEGIEATVGTYTILVDSLSTARDISKVEALFNEMKANNVVGDVYLYTAVINAYCRAGNMRRAAKVLDECVGNGVEPNERTYGVLIKGFCKIGQMEAAEMLLADMQGQGVGLNQIIFNTMIDGYCRKGMVDDALKIKAAMEKIGVELNIYTYNTLACGLCRVNRLDEAKTLLHIMIEMGVVPNYVTYTTLISIHCKDGDMVEARRLFREMAEKGATPSVVTYSVMIHGYAKKGRIREAERFRKQMEKKGFVPDVYTYASLVHGHCVNGKVDVALKLFEEMKQRGTEPNVVAYTALISGLAKEGRSEAAFQLYDDMLKAGLIPDDSLYSALVGSLHTDNRKDVKVS

SEQ ID NO: 23993 - DNA, 1241 bp, Zea mays subsp. mays
  misc_feature (1)..(1241): Ceres Seq. ID no. 12417443
aaagcagcacgggcaacacgccgagcaaaacagcgaaatcctcaaatccccaccccggctggtgacggcgccgcccccgctgctgcctgcggtcctgcttctgctaatagtaataggtattcagattcgagcagagcactcccgtgctgcaggcaagggaggacgcaccaccatggattgggatgctccggcattgacgagcttcgtcgccgacttgtccttccgccacctctgctgctacggggccggaatcgcagggaacgccttcgccttcgtgctcttcgtctccccgctccccacattcaagaggatcgtccgcaacggatccacggagcagttctcgtgcacgccgtacatctactcgctgctcaactgcctcatctgcatgtggtacggcctccccttcgtctcctacggcgtcgtcctcgtcgccaccgtcaactccatcggcgccgtgttccagctcgcctacaccgccgtgttcatcgccttcgccgacgccaagcagaggctcaaggtctctgctctcctggccgctgtcttcctggtgttcggactgattgtgtttgttagtctggctttgttggatcacaaagcccggcaggtgttcgtcggatatctcagcgtcgcgtccctcgtatgcatgttcgcgtcccccatgtcaatcgtcaatctggtcatccggacgaagagcgtggaatacatgcccttctacttgtcattatccatgtttctgatgagtgcatccttcgtcatatacggagtgctgcttggtgatggcttcatatatattccaaatgcattggaaccatattgggtatcgtacagttgctgctgtatgcctacatcagaaagggatcaagcgaggaagccaagctgcccttactaatcacacatacatgagcatgccaaaaggaaaaaaaaacaaggttcgctgataggctttcccgaaatcctgtctctggtcaaacttccaggtcgatgtacttgtccgaattgttttgctcctgtgaaaaaagcatgccgttctttcgttttgtttacacgcgacggggatcgtagtttcgctgtatattccatggtagatgctccaagttgttgctggagtcattcgtttatgagtgagcgaagctttgtatataatatagtagtagtaatgtggttccgtgaacttcatcaacagagaggaccagctgtatacacaaagaaaagcaataaaaggatgttactatatcattacc

SEQ ID NO: 23994 - protein, 295 aa, Zea mays subsp. mays
  misc_feature (1)..(295): Ceres Seq. ID no. 12417444
KQHGQHAEQNSEILKSPPRLVTAPPPLLPAVLLLLIVIGIQIRAEHSRAAGKGGRTTMDWDAPALTSFVADLSFRHLCCYGAGIAGNAFAFVLFVSPLPTFKRIVRNGSTEQFSCTPYIYSLLNCLICMWYGLPFVSYGVVLVATVNSIGAVFQLAYTAVFIAFADAKQRLKVSALLAAVFLVFGLIVFVSLALLDHKARQVFVGYLSVASLVCMFASPMSIVNLVIRTKSVEYMPFYLSLSMFLMSASFVIYGVLLGDGFIYIPNALEPYWVSYSCCCMPTSERDQARKPSCPY

SEQ ID NO: 23995 - protein, 238 aa, Zea mays subsp. mays
  misc_feature (1)..(238): Ceres Seq. ID no. 12417445
MDWDAPALTSFVADLSFRHLCCYGAGIAGNAFAFVLFVSPLPTFKRIVRNGSTEQFSCTPYIYSLLNCLICMWYGLPFVSYGVVLVATVNSIGAVFQLAYTAVFIAFADAKQRLKVSALLAAVFLVFGLIVFVSLALLDHKARQVFVGYLSVASLVCMFASPMSIVNLVIRTKSVEYMPFYLSLSMFLMSASFVIYGVLLGDGFIYIPNALEPYWVSYSCCCMPTSERDQARKPSCPY

SEQ ID NO: 23996 - protein, 190 aa, Zea mays subsp. mays
  misc_feature (1)..(190): Ceres Seq. ID no. 12417446
KAARATRRAKQRNPQIPTPAGDGAAPAAACGPASANSNRYSDSSRALPCCRQGRTHHHGLGCSGIDELRRRLVLPPPLLLRGRNRRERLRLRALRLPAPHIQEDRPQRIHGAVLVHAVHLLAAQLPHLHVVRPPLRLLRRRPRRHRQLHRRRVPARLHRRVHRLRRRQAEAQGLCSPGRCLPGVRTDCVC

SEQ ID NO: 23997 - DNA, 1144 bp, Zea mays subsp. mays
  misc_feature (1)..(1144): Ceres Seq. ID no. 12417524
agcctcagcctcagcctcacacggccgaagcagaacccgtgaacacctcaaacctcacggctcacgccaccgtcctccagccccgttctccggcgatcctgtcattccagacgcgtctccgcccctctcggtccaccaccccgacgccgccacatgtcgacgcagtccatttcgccggcctctgcgtccgcgcagttcacctacccggcggcagcggccccgtcttacttccccgtgcccttccacctccagaacgcgcaatacaccgcatggaccgcagccgcgccggcggtgcctgtgtacaacgccatctatcccatgccccaagtccagcaggcccaacagttgttccaaaaggactcgaagataattactcctgaagctctagctactgttaaggctgctattgcaaatagtgagaaagacaagaaggttgatgcaacaaaaaaggcagtgcctcgaaaggcagctgggcaaagttgggaggaccctaccttggctgattggcctgaaaatgatttccgtttgttctgcggtgatcttggaaatgaagtgaatgatgatgttcttgcaaaggcattctcaaaatatccatccttcaatatggccagggtttatacgggacaagtggactggtaaaactaaaggatatggttttgttagttttgctgatgcgtctgatcttacttctgccttgaaagatatgaatggtaaatatgtaggaaatcggccaatcaaattacggaagagcacatggaagaacaggatagacttagaagctttggagaagggaaagacccaaccacagaagaaaatcaaactgcagaaaagaagtgttcttcacaaatgaatctgaaaaattctgctcgttcatcgtctgtcagtatcgtttgggaaagctgtctgaagcattaacagttttacttaacgtcagatgtgtaggactgatggtcaccaagttcccggtgacactgtatacaatcgcagacgcgatgctatgttggtgattgaacaggtgtagccgaatagttggatccaataacttcacctgtagtgtaatggtccaattttatcatgggaactgtagttctaaatactccagtgaccagtgctattgtggtgaattattctgtgatctttattc

SEQ ID NO: 23998 - protein, 161 aa, Zea mays subsp. mays
  misc_feature (1)..(161): Ceres Seq. ID no. 12417525
MSTQSISPASASAQFTYPAAAAPSYFPVPFHLQNAQYTAWTAAAPAVPVYNAIYPMPQVQQAQQLFQKDSKIITPEALATVKAAIANSEKDKKVDATKKAVPRKAAGQSWEDPTLADWPENDFRLFCGDLGNEVNDDVLAKAFSKYPSFNMARVYTGQVDW

SEQ ID NO: 23999 - protein, 125 aa, Zea mays subsp. mays
  misc_feature (1)..(125): Ceres Seq. ID no. 12417526
PQPQPHTAEAEPVNTSNLTAHATVLQPRSPAILSFQTRLRPSRSTTPTPPHVDAVHFAGLCVRAVHLPGGSGPVLLPRALPPPERAIHRMDRSRAGGACVQRHLSHAPSPAGPTVVPKGLEDNYS

SEQ ID NO: 24000 - protein, 122 aa, Zea mays subsp. mays
  misc_feature (1)..(122): Ceres Seq. ID no. 12417527
ASASASHGRSRTREHLKPHGSRHRPPAPFSGDPVIPDASPPLSVHHPDAATCRRSPFRRPLRPRSSPTRRQRPRLTSPCPSTSRTRNTPHGPQPRRRCLCTTPSIPCPKSSRPNSCSKRTRR

SEQ ID NO: 24001 - DNA, 1080 bp, Zea mays subsp. mays
  misc_feature (1)..(1080): Ceres Seq. ID no. 12417528
gattttgaaaccctcgcctccctcttcctttccggccgccgcctgccgccggaaggagaaaaaatgggtgccggtggggaggaagcgccgcggataatcgtgcctatggcggtggagggtaccccgaatcagctggcgtttgtagaggagtcgaagctgcagaagcgcaaggagaacgtggactgggccgtgaggaaccgggagcgcagggcggccaagcgccagcgcatccgcgacaagcacaaggtcgccgtcaggcggcccgaggagttcgtcaccgcgttccgtaacaaggagcgcgacttcctgcggatgaggacccgcatcaaggtccgcagccagccgcccgtcgaggcgctcggctccaggctcgtcttcgcgattcgcatccctggctccgtggacttgcacccgcacatcaggaaggttttgaggaaactacgactgacgaaggtcctcactggggtgttcctcagggccaccgagttgacgctgaagaggctgcttgtggtcgaaccctttgtcacatacgggtttccgaacttaaagagtgtgaaagagcttatctacaagaagggccgcgggttctttgacatggaacctttccctcttaccagcaacgatctaattgagaaggctcttggagatcatggcatcatatgcttggaagaccttgtgtacgagatcgccactgtaggcccgcacttccgagaagcatctaggttcctcatgcccttccagctcaagtgtccggagaggaggctgcagatgaagaggaaaccgtacagggatggtggcgactcaggcaaccggggcgacaaagtcaacgaactaattgaaaaattgaattaaagcagagttgttcgcttcggactaatctatagagacaaaaatactgtataagtagtagaaactggtacggattaaaaccaagcgaacagacttgtctctctctagttgtgattttgtggtggagtgatggatctgttactttgtcagttttgtaatagcatagctggatgtaatctcgaggtgctgtttggtttacgaaatataatgctaacgataatgattcacacc

SEQ ID NO: 24002 - protein, 283 aa, Zea mays subsp. mays
  misc_feature (1)..(283): Ceres Seq. ID no. 12417529
DFETLASLFLSGRRLPPEGEKMGAGGEEAPRIIVPMAVEGTPNQLAFVEESKLQKRKENVDWAVRNRERRAAKRQRIRDKHKVAVRRPEEFVTAFRNKERDFLRMRTRIKVRSQPPVEALGSRLVFAIRIPGSVDLHPHIRKVLRKLRLTKVLTGVFLRATELTLKRLLVVEPFVTYGFPNLKSVKELIYKKGRGFFDMEPFPLTSNDLIEKALGDHGIICLEDLVYEIATVGPHFREASRFLMPFQLKCPERRLQMKRKPYRDGGDSGNRGDKVNELIEKLN

SEQ ID NO: 24003 - protein, 262 aa, Zea mays subsp. mays
  misc_feature (1)..(262): Ceres Seq. ID no. 12417530
MGAGGEEAPRIIVPMAVEGTPNQLAFVEESKLQKRKENVDWAVRNRERRAAKRQRIRDKHKVAVRRPEEFVTAFRNKERDFLRMRTRIKVRSQPPVEALGSRLVFAIRIPGSVDLHPHIRKVLRKLRLTKVLTGVFLRATELTLKRLLVVEPFVTYGFPNLKSVKELIYKKGRGFFDMEPFPLTSNDLIEKALGDHGIICLEDLVYEIATVGPHFREASRFLMPFQLKCPERRLQMKRKPYRDGGDSGNRGDKVNELIEKLN

SEQ ID NO: 24004 - protein, 248 aa, Zea mays subsp. mays
  misc_feature (1)..(248): Ceres Seq. ID no. 12417531
MAVEGTPNQLAFVEESKLQKRKENVDWAVRNRERRAAKRQRIRDKHKVAVRRPEEFVTAFRNKERDFLRMRTRIKVRSQPPVEALGSRLVFAIRIPGSVDLHPHIRKVLRKLRLTKVLTGVFLRATELTLKRLLVVEPFVTYGFPNLKSVKELIYKKGRGFFDMEPFPLTSNDLIEKALGDHGIICLEDLVYEIATVGPHFREASRFLMPFQLKCPERRLQMKRKPYRDGGDSGNRGDKVNELIEKLN

SEQ ID NO: 24005 - DNA, 1063 bp, Zea mays subsp. mays
  misc_feature (1)..(1063): Ceres Seq. ID no. 12417560
aggaaggtaggaggagaaccgtcagcagagagacatggcgccccaccaccagcagcgggcgctgctcctgttcccactcgtcttcctcctcctcctccttgccccgcccctcgccggcgcgtggggaaaggagggccacatcatggtctgcaagatcgccgagaagtacctgtcggagaaggcggcggcggcggtgcaggcgctgctgccggagtcggcgggcggggagctgtcgacggtgtgcccgtgggcgtaccaggtgcgctggcactaccactgggccagcccgctccactacgccaacaccccccaagtctgcaacttcaagtattctcgggactgccacaattctcggggccagcaagggatgtgcgtcgtcggggctatcaacaactacacggaccagctctacagctacggccagaagacttcgtataacctgacggaaagcctgatgttcctggcacacttcgtcggcgacgtccaccagccgctgcacgtaggcttcgaagatgacgagggcggtaacaccatcaccgtccactggtaccggaggaaagcaaacctccatcacgtgtgggatgtcagcattattgatacggcaatcaaggacttctacaacaagagcatggataccatggtagaggctctcaagatgaatcttacagatggatggtctgacgacatcgtccactgggaaaattgcaagaacaaacacgcgacctgcgcgaacgactatgcgattgagagcatccattattcctgcaactacgcctacaaagatgtggagcaagacatcactctaggagatgattattttttcagtaggtacccgattgtggagaagaggttagcgcaggctggaatcagattggcgttggtacttaatcggatatttggtggaggtgaagcggatgatataccactaaaagtacagtaacagctgtaataaaaggaagcatagctattacaaggatttgtccattacgtcgtctatacatcaataaattggcatgaatttgtaactccattgctatacatcaataaattggcatgaatttgt

SEQ ID NO: 24006 - protein, 301 aa, Zea mays subsp. mays
  misc_feature (1)..(301): Ceres Seq. ID no. 12417561
MAPHHQQRALLLFPLVFLLLLLAPPLAGAWGKEGHIMVCKIAEKYLSEKAAAAVQALLPESAGGELSTVCPWAYQVRWHYHWASPLHYANTPQVCNFKYSRDCHNSRGQQGMCVVGAINNYTDQLYSYGQKTSYNLTESLMFLAHFVGDVHQPLHVGFEDDEGGNTITVHWYRRKANLHHVWDVSIIDTAIKDFYNKSMDTMVEALKMNLTDGWSDDIVHWENCKNKHATCANDYAIESIHYSCNYAYKDVEQDITLGDDYFFSRYPIVEKRLAQAGIRLALVLNRIFGGGEADDIPLKVQ

SEQ ID NO: 24007 - protein, 265 aa, Zea mays subsp. mays
  misc_feature (1)..(265): Ceres Seq. ID no. 12417562
MVCKIAEKYLSEKAAAAVQALLPESAGGELSTVCPWAYQVRWHYHWASPLHYANTPQVCNFKYSRDCHNSRGQQGMCVVGAINNYTDQLYSYGQKTSYNLTESLMFLAHFVGDVHQPLHVGFEDDEGGNTITVHWYRRKANLHHVWDVSIIDTAIKDFYNKSMDTMVEALKMNLTDGWSDDIVHWENCKNKHATCANDYAIESIHYSCNYAYKDVEQDITLGDDYFFSRYPIVEKRLAQAGIRLALVLNRIFGGGEADDIPLKVQ

SEQ ID NO: 24008 - protein, 190 aa, Zea mays subsp. mays
  misc_feature (1)..(190): Ceres Seq. ID no. 12417563
MCVVGAINNYTDQLYSYGQKTSYNLTESLMFLAHFVGDVHQPLHVGFEDDEGGNTITVHWYRRKANLHHVWDVSIIDTAIKDFYNKSMDTMVEALKMNLTDGWSDDIVHWENCKNKHATCANDYAIESIHYSCNYAYKDVEQDITLGDDYFFSRYPIVEKRLAQAGIRLALVLNRIFGGGEADDIPLKVQ

SEQ ID NO: 24009 - DNA, 2025 bp, Zea mays subsp. mays
  misc_feature (1)..(2025): Ceres Seq. ID no. 12417568
acgccatacaattctcacacgcgcgcgcccaacacactagcctgcaggatcgtcgagcgcgaggcggctgccccgccggccggttcgttcgctctatagcttgagaccgatcctagggccaagacgatatcggcggcgatgatgatggacgcggcgaggatcgtagagtacttcaagggcaagtgcatcctcgtcaccggctcaacagggtttcttggaaagatccttgtggagaagatactgcgggtgcagcctgacgtgcgcaagatttacctgcttgtacgcgcggtcgacgagccatcagcgaagcagcgcgtccaacaagaggtgatagacacggagctgttcggcctgctgagagagaaacacggcaagggcttccagcagttcgtagaggccaaggtcgtcgctttggccggagacatcgtatacgacggcctggggctggaggcagccgtgctggacgcgctggccaaggacgtcgacgtcatcgtcaacatcgcagcaaccaccaacttctacgaaagatacgatgtttcgctggacgtgaacgtgctgggagtgaagcacctgtgcatgttcgccaagcagtgcgcgaggctcaggatgctcatgcacgtctccactgccttcgtctcgggcttcagggagggcctcatcctggagaagcccatcaagcccggcgagtcgctgcgggagggcacgtacctggacgtggacgcggagctgcgcctcgtcaaggaggtgaagaagtcgctggcggcgaacggcgatggcgacggcgacagcacggagcggaaggccatgaaggatctgggcctccggcgggcgcggcacttcgggtggtccaacacgtacgtgttcaccaaggccatgggggaggccgtgctgggccagcagctccggggcggcgacgtccccgtggcggtgatgcggcccagcatcatcaccagcgtccggcgcgacccgctgcccgggtggatgcagggcacccgcaccatcgacagcatcatcatcggctacgccaagcagaacctgtcctgcttcctcgccgacctccgcctcgtcatggacgtcatccccggggacatggtggtcaacgccatgatggcggccgtggtggcgcactcggaggcgttcgcgccgccgctgccgcaggtggtggtgtaccacgccacctcgtcgctgcgcaacccggccacctacgacgtgctctaccagtccggacgccgccatttctacgagaacccgcgcgtcggcaaggacggcagggtcatccccaccagggagatgtacttcttcaccagcatcgccaggttccacctctacatgactctcatctacaaggtgccattagagattctgcaccttgtgaatctgctgctctgtggccttctctcgcggctctacaacgacctcaaccgcaagtacaagtttgtgatgcatctggttgacgtctacggcccattcgccttcttcaaaggatgcttcgatgacataaacctggagcggctaaggctggcaatggcgatgaagacccctgaggatcaaatgttcaatttcgaccctaagaccatcgactgggacgattacttcaccagaatccacatccctggtattctcaagtatgtgtgcaagtgaagccttctttcttcagtctatttgcagcatgcacatgcttcttcttcgccttcttactatcgaaagttaatggctcatattctttatgaaagaaatttataccactctgtttggttgtacctgttctatggatcgaccgggtgttaccaagaaacaaaaataattcgatctctgctagattgatatagttctgtatgggagagactgaggcccctcatatcgtaaatcaatagtgatcgtcaaacgagtgtatgctgtgttaggtggcagccaatatgtatcttgattaattgagaacttgtaatctgtgtcatatgtacgcgtgtcactgtcagtgacaatgaaaagcaaatgtaatatctatttataatggcagtgaaattc

SEQ ID NO: 24010 - protein, 500 aa, Zea mays subsp. mays
  misc_feature (1)..(500): Ceres Seq. ID no. 12417569
MMMDAARIVEYFKGKCILVTGSTGFLGKILVEKILRVQPDVRKIYLLVRAVDEPSAKQRVQQEVIDTELFGLLREKHGKGFQQFVEAKVVALAGDIVYDGLGLEAAVLDALAKDVDVIVNIAATTNFYERYDVSLDVNVLGVKHLCMFAKQCARLRMLMHVSTAFVSGFREGLILEKPIKPGESLREGTYLDVDAELRLVKEVKKSLAANGDGDGDSTERKAMKDLGLRRARHFGWSNTYVFTKAMGEAVLGQQLRGGDVPVAVMRPSIITSVRRDPLPGWMQGTRTIDSIIIGYAKQNLSCFLADLRLVMDVIPGDMVVNAMMAAVVAHSEAFAPPLPQVVVYHATSSLRNPATYDVLYQSGRRHFYENPRVGKDGRVIPTREMYFFTSIARFHLYMTLIYKVPLEILHLVNLLLCGLLSRLYNDLNRKYKFVMHLVDVYGPFAFFKGCFDDINLERLRLAMAMKTPEDQMFNFDPKTIDWDDYFTRIHIPGILKYVCK

SEQ ID NO: 24011 - protein, 499 aa, Zea mays subsp. mays
  misc_feature (1)..(499): Ceres Seq. ID no. 12417570
MMDAARIVEYFKGKCILVTGSTGFLGKILVEKILRVQPDVRKIYLLVRAVDEPSAKQRVQQEVIDTELFGLLREKHGKGFQQFVEAKVVALAGDIVYDGLGLEAAVLDALAKDVDVIVNIAATTNFYERYDVSLDVNVLGVKHLCMFAKQCARLRMLMHVSTAFVSGFREGLILEKPIKPGESLREGTYLDVDAELRLVKEVKKSLAANGDGDGDSTERKAMKDLGLRRARHFGWSNTYVFTKAMGEAVLGQQLRGGDVPVAVMRPSIITSVRRDPLPGWMQGTRTIDSIIIGYAKQNLSCFLADLRLVMDVIPGDMVVNAMMAAVVAHSEAFAPPLPQVVVYHATSSLRNPATYDVLYQSGRRHFYENPRVGKDGRVIPTREMYFFTSIARFHLYMTLIYKVPLEILHLVNLLLCGLLSRLYNDLNRKYKFVMHLVDVYGPFAFFKGCFDDINLERLRLAMAMKTPEDQMFNFDPKTIDWDDYFTRIHIPGILKYVCK

SEQ ID NO: 24012 - protein, 498 aa, Zea mays subsp. mays
  misc_feature (1)..(498): Ceres Seq. ID no. 12417571
MDAARIVEYFKGKCILVTGSTGFLGKILVEKILRVQPDVRKIYLLVRAVDEPSAKQRVQQEVIDTELFGLLREKHGKGFQQFVEAKVVALAGDIVYDGLGLEAAVLDALAKDVDVIVNIAATTNFYERYDVSLDVNVLGVKHLCMFAKQCARLRMLMHVSTAFVSGFREGLILEKPIKPGESLREGTYLDVDAELRLVKEVKKSLAANGDGDGDSTERKAMKDLGLRRARHFGWSNTYVFTKAMGEAVLGQQLRGGDVPVAVMRPSIITSVRRDPLPGWMQGTRTIDSIIIGYAKQNLSCFLADLRLVMDVIPGDMVVNAMMAAVVAHSEAFAPPLPQVVVYHATSSLRNPATYDVLYQSGRRHFYENPRVGKDGRVIPTREMYFFTSIARFHLYMTLIYKVPLEILHLVNLLLCGLLSRLYNDLNRKYKFVMHLVDVYGPFAFFKGCFDDINLERLRLAMAMKTPEDQMFNFDPKTIDWDDYFTRIHIPGILKYVCK

SEQ ID NO: 24013 - DNA, 830 bp, Zea mays subsp. mays
  misc_feature (1)..(830): Ceres Seq. ID no. 12417611
accgatcccattccccaggcccaagcgcccatggatcccaagcccgacgccagcgcgcccgccgcggtgccagcggagcacgcggcgtacccgaggctgtcaccggaggacatcgccccgccgccgccgcctgtcgtgccgccgtccggcgccaacccctacgtgctctccgccccgtcgcctaacccgcccgccaagagcgctagggagaatctgagggagatgttcggcatggtggggaagaagttcaacgaggccgcgcgcaagaccgagggcatcgccggcgacgtctggcagcatctgaaaactggacccagcatcactgatactgccatggggaggattgctcagatatccaaggttatatctgagggtgtctacgacaagatatttcagcagacttttgagtgctcgcctgatgagaagctcaacaaggcatatgtgtgctacctatcaacgtcgcatggaccaatcatgggcgtcctgtatctctcgactgtcaagattgcattcggtagcgacagccctgtgaaatatgtgactgaggacaacaaaactgagtcatccttttataaggttgttttaccccttcatcacctgagatcagttactcccacagcaagtcagcaaaaccctgcagagaggtacattcaggtcgtttcagtcgacaaccacgagttctggttcatgggtttcgtgaactatgatagcgctgtaaagaatcttcaggagtctgttcgagttgttcacggggcctagaggttgcccatcacttttcctctatgtggatgtagtatgcccgtgtaaatgtatttgtgcatggcacctgt

SEQ ID NO: 24014 - protein, 252 aa, Zea mays subsp. mays
  misc_feature (1)..(252): Ceres Seq. ID no. 12417612
TDPIPQAQAPMDPKPDASAPAAVPAEHAAYPRLSPEDIAPPPPPVVPPSGANPYVLSAPSPNPPAKSARENLREMFGMVGKKFNEAARKTEGIAGDVWQHLKTGPSITDTAMGRIAQISKVISEGVYDKIFQQTFECSPDEKLNKAYVCYLSTSHGPIMGVLYLSTVKIAFGSDSPVKYVTEDNKTESSFYKVVLPLHHLRSVTPTASQQNPAERYIQVVSVDNHEFWFMGFVNYDSAVKNLQESVRVVHGA

SEQ ID NO: 24015 - protein, 242 aa, Zea mays subsp. mays
  misc_feature (1)..(242): Ceres Seq. ID no. 12417613
MDPKPDASAPAAVPAEHAAYPRLSPEDIAPPPPPVVPPSGANPYVLSAPSPNPPAKSARENLREMFGMVGKKFNEAARKTEGIAGDVWQHLKTGPSITDTAMGRIAQISKVISEGVYDKIFQQTFECSPDEKLNKAYVCYLSTSHGPIMGVLYLSTVKIAFGSDSPVKYVTEDNKTESSFYKVVLPLHHLRSVTPTASQQNPAERYIQVVSVDNHEFWFMGFVNYDSAVKNLQESVRVVHGA

SEQ ID NO: 24016 - protein, 178 aa, Zea mays subsp. mays
  misc_feature (1)..(178): Ceres Seq. ID no. 12417614
MFGMVGKKFNEAARKTEGIAGDVWQHLKTGPSITDTAMGRIAQISKVISEGVYDKIFQQTFECSPDEKLNKAYVCYLSTSHGPIMGVLYLSTVKIAFGSDSPVKYVTEDNKTESSFYKVVLPLHHLRSVTPTASQQNPAERYIQVVSVDNHEFWFMGFVNYDSAVKNLQESVRVVHGA

SEQ ID NO: 24017 - DNA, 2094 bp, Zea mays subsp. mays
  misc_feature (1)..(2094): Ceres Seq. ID no. 12417627
attgtgctcgctgcgctgtgtgtttctggataataaaaaacccgccagcccccgcatcggagggccgcgcaagtgggtcaactcgcaactgaagaccaaaggcgagagccggctgcccggattccggaagcgcccaagcccccaacgcgaccgtcgctgtcgccaccgcgctcggctcgcccgcgtccacagaagccgccagggccatacgccgatgaatcctgccgcgacggcggatcccagcagctccagcacctcggcggccacgctgcggaagcggatgatctctatagacacggctcgacgaggagccgacggcgcgtcgcctgagaccgcgcccaggccagatcgggcgggtagtgataaggcgccgcaggagcgggaggaggagggctcgatggcggcctccgcgcctgcggcggcagcagcgagggagagtgacctggaggcggtgggcgagccgatgagccccgcggggcggctgttccgcgagacgcacttcaactgctacatcgtggccgtgatcgggctgggcgcggcggtggacgtcgcggcggcgcgcgcggggctggaggtcacgctcgtccgccacccacgcttctccagcgtccaggtgaatgatggtgatgcgagaaagaacgccaagccgcggtgggtgcggaccacggttaacctggatgatcacatcatcgtcccctgcctggaacccgctgccacgtcgaccaagccggaccaggccgtggaggactacctgtcctggctgtccacggcgcccatggaccactcccgcccgctctgggagttccacgtcctggacttcccgacgtccgaggccaccgccaccgttgccatccgcatgcaccactccctcggcgacggcgtctcgctgctgtcgctgctcatcgcgtgcacccgcagcgccgcggacccggcgcggctgccggagctgccgcccgcgccgcgccgcgcgagccctgtctacgccaggcagcgccccccgctttccgcgggcctcgtggcgttctcgctgtggctgtggtcctacgtcttgctcgcgtggcacacactggtggacgtcgcgtgcttcgtggccacggcgtggttcctgcgcgaccagcgcacacccttcatggccgcgtccgagggcgtcgagttccgccgcaagcgcttcgtgcaccgcacgctcagcctcgacgacgtcaagttcgtcaagaatgtcatgaagtgtactgtcaacgatgtcctgattggagtgactaacgcagggttgtcgcggtattattttcgaaaaaccagtgataccaacaacgagaggaaaaaatcgcagaatattcgtgtccgatcagctctccttgttaacattaggagaacacctggtttacatgcattggcggaaatgatggattctatcaagaacaatagggcaaaatgggggaacctgattggttacatgatactgcctttccacatagccatgcacgatgatcctcttgaatacatccgccaagggaaaaggacagctcaaaggaagaaggcttcattagaagcggttttcacgtactggagtgggaacctaatagtcaaactatttggcatgaaggctgcagcagctctctgctatggtatgttcacaaatacgaccatgtcattctcaagcatggtcggacctgctgagaaggtggagttctacggccatccaatcatctacatcgctccctctgtctacgggcatccacatgctctgactatacattaccaaagctatacgaactccatcaagcttgtcctcgcagtggatgatgctcagtttccagactctcatcagcttttggacgacttcgccgagtccctcaggctcatccgtcaggcagcttcaacaagatgacagacacaaacaagagcatttttttcagtagaatgtagactgttggcgagaactcgcatacaaatgctggacaataacttatcaggaaattgatggcctggttacctgactggggactcttgaactttcaagaaatcattagaggcaaattgtaaagtgtaaagactagtatgtaatatcaatattgttcaaccaattgcggtggaatt

SEQ ID NO: 24018 - protein, 627 aa, Zea mays subsp. mays
  misc_feature (1)..(627): Ceres Seq. ID no. 12417628
LCSLRCVFLDNKKPASPRIGGPRKWVNSQLKTKGESRLPGFRKRPSPQRDRRCRHRARLARVHRSRQGHTPMNPAATADPSSSSTSAATLRKRMISIDTARRGADGASPETAPRPDRAGSDKAPQEREEEGSMAASAPAAAAARESDLEAVGEPMSPAGRLFRETHFNCYIVAVIGLGAAVDVAAARAGLEVTLVRHPRFSSVQVNDGDARKNAKPRWVRTTVNLDDHIIVPCLEPAATSTKPDQAVEDYLSWLSTAPMDHSRPLWEFHVLDFPTSEATATVAIRMHHSLGDGVSLLSLLIACTRSAADPARLPELPPAPRRASPVYARQRPPLSAGLVAFSLWLWSYVLLAWHTLVDVACFVATAWFLRDQRTPFMAASEGVEFRRKRFVHRTLSLDDVKFVKNVMKCTVNDVLIGVTNAGLSRYYFRKTSDTNNERKKSQNIRVRSALLVNIRRTPGLHALAEMMDSIKNNRAKWGNLIGYMILPFHIAMHDDPLEYIRQGKRTAQRKKASLEAVFTYWSGNLIVKLFGMKAAAALCYGMFTNTTMSFSSMVGPAEKVEFYGHPIIYIAPSVYGHPHALTIHYQSYTNSIKLVLAVDDAQFPDSHQLLDDFAESLRLIRQAASTR

SEQ ID NO: 24019 - protein, 556 aa, Zea mays subsp. mays
  misc_feature (1)..(556): Ceres Seq. ID no. 12417629
MNPAATADPSSSSTSAATLRKRMISIDTARRGADGASPETAPRPDRAGSDKAPQEREEEGSMAASAPAAAAARESDLEAVGEPMSPAGRLFRETHFNCYIVAVIGLGAAVDVAAARAGLEVTLVRHPRFSSVQVNDGDARKNAKPRWVRTTVNLDDHIIVPCLEPAATSTKPDQAVEDYLSWLSTAPMDHSRPLWEFHVLDFPTSEATATVAIRMHHSLGDGVSLLSLLIACTRSAADPARLPELPPAPRRASPVYARQRPPLSAGLVAFSLWLWSYVLLAWHTLVDVACFVATAWFLRDQRTPFMAASEGVEFRRKRFVHRTLSLDDVKFVKNVMKCTVNDVLIGVTNAGLSRYYFRKTSDTNNERKKSQNIRVRSALLVNIRRTPGLHALAEMMDSIKNNRAKWGNLIGYMILPFHIAMHDDPLEYIRQGKRTAQRKKASLEAVFTYWSGNLIVKLFGMKAAAALCYGMFTNTTMSFSSMVGPAEKVEFYGHPIIYIAPSVYGHPHALTIHYQSYTNSIKLVLAVDDAQFPDSHQLLDDFAESLRLIRQAASTR

SEQ ID NO: 24020 - protein, 534 aa, Zea mays subsp. mays
  misc_feature (1)..(534): Ceres Seq. ID no. 12417630
MISIDTARRGADGASPETAPRPDRAGSDKAPQEREEEGSMAASAPAAAAARESDLEAVGEPMSPAGRLFRETHFNCYIVAVIGLGAAVDVAAARAGLEVTLVRHPRFSSVQVNDGDARKNAKPRWVRTTVNLDDHIIVPCLEPAATSTKPDQAVEDYLSWLSTAPMDHSRPLWEFHVLDFPTSEATATVAIRMHHSLGDGVSLLSLLIACTRSAADPARLPELPPAPRRASPVYARQRPPLSAGLVAFSLWLWSYVLLAWHTLVDVACFVATAWFLRDQRTPFMAASEGVEFRRKRFVHRTLSLDDVKFVKNVMKCTVNDVLIGVTNAGLSRYYFRKTSDTNNERKKSQNIRVRSALLVNIRRTPGLHALAEMMDSIKNNRAKWGNLIGYMILPFHIAMHDDPLEYIRQGKRTAQRKKASLEAVFTYWSGNLIVKLFGMKAAAALCYGMFTNTTMSFSSMVGPAEKVEFYGHPIIYIAPSVYGHPHALTIHYQSYTNSIKLVLAVDDAQFPDSHQLLDDFAESLRLIRQAASTR

SEQ ID NO: 24021 - DNA, 933 bp, Zea mays subsp. mays
  misc_feature (1)..(933): Ceres Seq. ID no. 12417671
gcacgagaccattacctagaacatcctaatcgaaaaaagatccagcaaaccagagttctccaaagcgcgaagctccagctcaagctccaggcaaccgtcaccgtcagggaacgcgcgcgcagcaatggccttttactacggcgtgggcggacagtcgtcggcgtgggcggcgccgggcggcagcaggccatggaccaaggcggaggacaaggtgttcgagggcgcgctggtgatgttcccggagcacttgccgaaccggtgggcgctggtggcgtcccggctgtacgaccgcacgccgcaggaggcctgggaccactaccaggcgctggtgaccgacgtcgacctcatcgagcgcggcatggtggaggccccggactcctgggacgacgacgcggccgccgccggagggggacgctcgggccgcggccgcgggggcggcagcggcagcggcancgnagaggagcgccgccgcggggtnccgtggaccgaggacgagcacaggctgtttctggaggggcttgagaagtacgggcgcggcgactggcggaacatctcgcgctggtcggtgaagacgcggacgcccacgcaggtggccagccacgcgcagaagtacttcatccgccaggccagcgccgccagccgcggcgacaccaagcgcaagagcatccacgacatcaccaccccgtgatggctcctgctcgtggaggacaaagctagcaccgagagatccagacctggctactgctgctacctgcattttatctttacctttgcgagacgggaacaaaaaaaaacaaacagccgtccctgtggttgtagaaatgtaggcaaagctaagttagcctggctggaatctggggtccggtataactgtattaagcggcactacaatgactatcgaataaataagttttgcaagtttgtctggatttc

SEQ ID NO: 24022 - protein, 187 aa, Zea mays subsp. mays
  misc_feature (1)..(187): Ceres Seq. ID no. 12417672
  misc_feature (110)..(110): Xaa is any aa, unknown or other
  misc_feature (111)..(111): Xaa is any aa, unknown or other
  misc_feature (118)..(118): Xaa is any aa, unknown or other
MAFYYGVGGQSSAWAAPGGSRPWTKAEDKVFEGALVMFPEHLPNRWALVASRLYDRTPQEAWDHYQALVTDVDLIERGMVEAPDSWDDDAAAAGGGRSGRGRGGGSGSGXXEERRRGXPWTEDEHRLFLEGLEKYGRGDWRNISRWSVKTRTPTQVASHAQKYFIRQASAASRGDTKRKSIHDITTP

SEQ ID NO: 24023 - protein, 173 aa, Zea mays subsp. mays
  misc_feature (1)..(173): Ceres Seq. ID no. 12417673
  misc_feature (151)..(151): Xaa is any aa, unknown or other
  misc_feature (152)..(152): Xaa is any aa, unknown or other
  misc_feature (160)..(160): Xaa is any aa, unknown or other
ARDHYLEHPNRKKIQQTRVLQSAKLQLKLQATVTVRERARSNGLLLRRGRTVVGVGGAGRQQAMDQGGGQGVRGRAGDVPGALAEPVGAGGVPAVRPHAAGGLGPLPGAGDRRRPHRARHGGGPGLLGRRRGRRRRGTLGPRPRGRQRQRXXRGAPPRGXVDRGRAQAVSGGA

SEQ ID NO: 24024 - protein, 151 aa, Zea mays subsp. mays
  misc_feature (1)..(151): Ceres Seq. ID no. 12417674
  misc_feature (74)..(74): Xaa is any aa, unknown or other
  misc_feature (75)..(75): Xaa is any aa, unknown or other
  misc_feature (82)..(82): Xaa is any aa, unknown or other
MFPEHLPNRWALVASRLYDRTPQEAWDHYQALVTDVDLIERGMVEAPDSWDDDAAAAGGGRSGRGRGGGSGSGXXEERRRGXPWTEDEHRLFLEGLEKYGRGDWRNISRWSVKTRTPTQVASHAQKYFIRQASAASRGDTKRKSIHDITTP

SEQ ID NO: 24025 - DNA, 2740 bp, Zea mays subsp. mays
  misc_feature (1)..(2740): Ceres Seq. ID no. 12417747
gcacgagaccattacctagaacatcctaatcgaaaaagccccatcatactcattcatattataaggcgcgaatctatccatctatctaatctacttacgcacgaacatgcgtaacatcggcatgctgcgggcgctggtcctggcgctcgcggtggccgccgccgccgccgccgagaagaggaggacgtacatcgtccacatggccaagtcggcgatgccggccgagtacgcggaccacgccgagtggtacggcgcatcgctgcgctccgtgtccgcctcagcctccgccgccaagatgctctacgcgtacgacaccgtcctgcacggtttctccgcgcgcctcacgccgcangaggccagcgacctggcgtccgccgagggggtgctcgccgtcaacccggaggcgcggtacgagctgcacaccacgcggacgcccgagttcctgggcatcgccggccagggcctgtccccgcagtccggcacggcgggcgacgtcgtcgtcggcgtgctcgacacgggcgtctggcccgagagcaagagctacgacgacnccggcctcgccgaggtgcccgcgtggtggaagggccagtgcnaggcgggacccggcttcgacgcctccaccgcctgcaaccgcaagctcgtcggcgccaggttcttcaacaagggctacgaggccgccatgggccccatggacaccgaccgggagtcccggtccccgctcgacgacgacggccacggcacgcacaccagctccacggccgccggcgccgccgtgccgggtgccagcctcttcggcttcgccgcgggcacggcgcgcggcatggcgccccgggcgcgcgtcgccgcctacaaggtgtgctggctcggcggctgcttcagctccgacatcctcgcgggcatggacgccgccgtcgccgacggctgcggcgtgctctcgctctcgctgggcggcggcgccgccgactactcgcgcgacagcgtcgccatcggcgccttcgccgccacggagcagaacgtcctcgtctcctgctcggccgggaacgccggccccgggagctccacgctgtccaacgtggcgccgtggatcaccaccgtgggcgccggcacgctcgaccgcgacttcccggcctacgtcgtgctcggcgacgggaagaactacacgggcgtctcgctctacgccgggaagccgctgcccagcgccccgatccccatcgtgtacgcggccaacgcctccaactccaccgcggggaacctgtgcatgcccggaaccctcgtgccggagaaggtggccggcaagatcgtcgtgtgcgaccgcggcgtcagcgcgcgcgtccagaagggcctcgtcgtgcgcgacgcgggcggcgccggcatggtgctgtccaacacggccgccaacggccaggagctcgtcgccgacgcgcacctcctgcccgccgccggcgtcggcgagagggaaggcncggcgatcaagtcgtacgtggcctccgccacgaaccccacgacgacggtcgtggtcgccgggacggaggtgggcgtgcgcccctcgccggtggtggcggcgttctcgtcgcgcgggcccaacatggtgacgccggagatcctgaagccggacatgatcgcgccgggggtgaacatcctggcgtcgtggacgggcaaggccgggccgacgggcctcgccgccgacacccgccgcgtgggcttcaacatcatctccggcacgtccatgtcgtgcccgcacgtgagcgggctggcggcgctgctccggagcgcgcacccggagtggagccccgccgccgtgcgctcggcgctcatgaccacagcctacgccagctactccggcgggtcgtcgctgctggacgcggcgacgggcgggatggccacgccgttnnantacggcgcggggcacgtggaccccgcgcgggcgctggacccggggctcgtctacgacctgggcacccgcgactacgtggacttcttgtgcgcgctcaagtacagctccaccatgatcgccgccgtggcgcggagccgggagtacgcgtgcgccgagaacaagacctactccgtgggcgccctcaactacccgtccttctcggtggcctactcgacggccaacggcgacggcggcggggactcggcnnccgtgacacacacgcggacgctgaccaacgtgggcggggcgggcacgtacaaggcgtccacgtcgctcgccgctgccaagggcgtggccgtggacgtggagccggcggagctggagttcacgtcggtgggggagaagaagagctacacggtgaggttcacgtccaagtcgcagccgtcgggcaccgccggtttcgggcggctcgtgtggtcggacgggaagcacagcgtggccagcccgatagcgttcacgtggacctgaacctgatggacggatggattataccatacgacagtggtttttggcgcctcagcctcaaagaaaggcccataatccatcatccatgtgacggcctcgttccctacactacgcagtcaaaagggccgaagtgtagggtgggaaggtttggagggggtacggtgcaaattggaggtttcttctgtgttgctattattactactaataaggtcattaatcctatcagcgtccgtaggttgtgatttttggatggaaatgggatcggggtggacggttggatggagattgatggtgcttggttgattggaatggaattattagagaggagaaggtttttagctt

SEQ ID NO: 24026 - protein, 764 aa, Zea mays subsp. mays
  misc_feature (1)..(764): Ceres Seq. ID no. 12417748
  misc_feature (82)..(82): Xaa is any aa, unknown or other
  misc_feature (149)..(149): Xaa is any aa, unknown or other
  misc_feature (163)..(163): Xaa is any aa, unknown or other
  misc_feature (453)..(453): Xaa is any aa, unknown or other
  misc_feature (595)..(595): Xaa is any aa, unknown or other
  misc_feature (596)..(596): Xaa is any aa, unknown or other
  misc_feature (678)..(678): Xaa is any aa, unknown or other
  misc_feature (679)..(679): Xaa is any aa, unknown or other
MRNIGMLRALVLALAVAAAAAAEKRRTYIVHMAKSAMPAEYADHAEWYGASLRSVSASASAAKMLYAYDTVLHGFSARLTPXEASDLASAEGVLAVNPEARYELHTTRTPEFLGIAGQGLSPQSGTAGDVVVGVLDTGVWPESKSYDDXGLAEVPAWWKGQCXAGPGFDASTACNRKLVGARFFNKGYEAAMGPMDTDRESRSPLDDDGHGTHTSSTAAGAAVPGASLFGFAAGTARGMAPRARVAAYKVCWLGGCFSSDILAGMDAAVADGCGVLSLSLGGGAADYSRDSVAIGAFAATEQNVLVSCSAGNAGPGSSTLSNVAPWITTVGAGTLDRDFPAYVVLGDGKNYTGVSLYAGKPLPSAPIPIVYAANASNSTAGNLCMPGTLVPEKVAGKIVVCDRGVSARVQKGLVVRDAGGAGMVLSNTAANGQELVADAHLLPAAGVGEREGXAIKSYVASATNPTTTVVVAGTEVGVRPSPVVAAFSSRGPNMVTPEILKPDMIAPGVNILASWTGKAGPTGLAADTRRVGFNIISGTSMSCPHVSGLAALLRSAHPEWSPAAVRSALMTTAYASYSGGSSLLDAATGGMATPXXYGAGHVDPARALDPGLVYDLGTRDYVDFLCALKYSSTMIAAVARSREYACAENKTYSVGALNYPSFSVAYSTANGDGGGDSXXVTHTRTLTNVGGAGTYKASTSLAAAKGVAVDVEPAELEFTSVGEKKSYTVRFTSKSQPSGTAGFGRLVWSDGKHSVASPIAFTWT

SEQ ID NO: 24027 - protein, 759 aa, Zea mays subsp. mays
  misc_feature (1)..(759): Ceres Seq. ID no. 12417749
  misc_feature (77)..(77): Xaa is any aa, unknown or other
  misc_feature (144)..(144): Xaa is any aa, unknown or other
  misc_feature (158)..(158): Xaa is any aa, unknown or other
  misc_feature (448)..(448): Xaa is any aa, unknown or other
  misc_feature (590)..(590): Xaa is any aa, unknown or other
  misc_feature (591)..(591): Xaa is any aa, unknown or other
  misc_feature (673)..(673): Xaa is any aa, unknown or other
  misc_feature (674)..(674): Xaa is any aa, unknown or other
MLRALVLALAVAAAAAAEKRRTYIVHMAKSAMPAEYADHAEWYGASLRSVSASASAAKMLYAYDTVLHGFSARLTPXEASDLASAEGVLAVNPEARYELHTTRTPEFLGIAGQGLSPQSGTAGDVVVGVLDTGVWPESKSYDDXGLAEVPAWWKGQCXAGPGFDASTACNRKLVGARFFNKGYEAAMGPMDTDRESRSPLDDDGHGTHTSSTAAGAAVPGASLFGFAAGTARGMAPRARVAAYKVCWLGGCFSSDILAGMDAAVADGCGVLSLSLGGGAADYSRDSVAIGAFAATEQNVLVSCSAGNAGPGSSTLSNVAPWITTVGAGTLDRDFPAYVVLGDGKNYTGVSLYAGKPLPSAPIPIVYAANASNSTAGNLCMPGTLVPEKVAGKIVVCDRGVSARVQKGLVVRDAGGAGMVLSNTAANGQELVADAHLLPAAGVGEREGXAIKSYVASATNPTTTVVVAGTEVGVRPSPVVAAFSSRGPNMVTPEILKPDMIAPGVNILASWTGKAGPTGLAADTRRVGFNIISGTSMSCPHVSGLAALLRSAHPEWSPAAVRSALMTTAYASYSGGSSLLDAATGGMATPXXYGAGHVDPARALDPGLVYDLGTRDYVDFLCALKYSSTMIAAVARSREYACAENKTYSVGALNYPSFSVAYSTANGDGGGDSXXVTHTRTLTNVGGAGTYKASTSLAAAKGVAVDVEPAELEFTSVGEKKSYTVRFTSKSQPSGTAGFGRLVWSDGKHSVASPIAFTWT

SEQ ID NO: 24028 - protein, 733 aa, Zea mays subsp. mays
  misc_feature (1)..(733): Ceres Seq. ID no. 12417750
  misc_feature (51)..(51): Xaa is any aa, unknown or other
  misc_feature (118)..(118): Xaa is any aa, unknown or other
  misc_feature (132)..(132): Xaa is any aa, unknown or other
  misc_feature (422)..(422): Xaa is any aa, unknown or other
  misc_feature (564)..(564): Xaa is any aa, unknown or other
  misc_feature (565)..(565): Xaa is any aa, unknown or other
  misc_feature (647)..(647): Xaa is any aa, unknown or other
  misc_feature (648)..(648): Xaa is any aa, unknown or other
MAKSAMPAEYADHAEWYGASLRSVSASASAAKMLYAYDTVLHGFSARLTPXEASDLASAEGVLAVNPEARYELHTTRTPEFLGIAGQGLSPQSGTAGDVVVGVLDTGVWPESKSYDDXGLAEVPAWWKGQCXAGPGFDASTACNRKLVGARFFNKGYEAAMGPMDTDRESRSPLDDDGHGTHTSSTAAGAAVPGASLFGFAAGTARGMAPRARVAAYKVCWLGGCFSSDILAGMDAAVADGCGVLSLSLGGGAADYSRDSVAIGAFAATEQNVLVSCSAGNAGPGSSTLSNVAPWITTVGAGTLDRDFPAYVVLGDGKNYTGVSLYAGKPLPSAPIPIVYAANASNSTAGNLCMPGTLVPEKVAGKIVVCDRGVSARVQKGLVVRDAGGAGMVLSNTAANGQELVADAHLLPAAGVGEREGXAIKSYVASATNPTTTVVVAGTEVGVRPSPVVAAFSSRGPNMVTPEILKPDMIAPGVNILASWTGKAGPTGLAADTRRVGFNIISGTSMSCPHVSGLAALLRSAHPEWSPAAVRSALMTTAYASYSGGSSLLDAATGGMATPXXYGAGHVDPARALDPGLVYDLGTRDYVDFLCALKYSSTMIAAVARSREYACAENKTYSVGALNYPSFSVAYSTANGDGGGDSXXVTHTRTLTNVGGAGTYKASTSLAAAKGVAVDVEPAELEFTSVGEKKSYTVRFTSKSQPSGTAGFGRLVWSDGKHSVASPIAFTWT

SEQ ID NO: 24029 - DNA, 534 bp, Zea mays subsp. mays
  misc_feature (1)..(534): Ceres Seq. ID no. 12417822
ccgaggcctaagatgtccaacgctgacctgggcaggatcatcaactctgacgaggtgcagtctgtggtgaagccactcaacaaggaagtgaagcgcagggagaagaggaagaacccactcaagaacatggctgctgtgctcaaactcaacccctacctcggcactgcccggaagatggccacccttgctgaggctgctcgtgtgaaggccaggaaggcgaagctcgactccaagaggaccaagcttaccccggagactgccaaggttaaggctgctggcaaggcatggtacaagaccatggtctcggacagcgactacaccgagtttgagaacttctcaaagtggctcggcgtgactcagtgagcggcaagggtagttaagttttgagtagctcagcttatgttgagaggaaagaggatccatcaaatctgttttatcctgcatcatcataacaagttgctacaagtcttgcatgttcgtgttgtttgtgcatttccgcgagaacatagtatttttatattcgaaccagttgtc

SEQ ID NO: 24030 - protein, 120 aa, Zea mays subsp. mays
  misc_feature (1)..(120): Ceres Seq. ID no. 12417823
PRPKMSNADLGRIINSDEVQSVVKPLNKEVKRREKRKNPLKNMAAVLKLNPYLGTARKMATLAEAARVKARKAKLDSKRTKLTPETAKVKAAGKAWYKTMVSDSDYTEFENFSKWLGVTQ

SEQ ID NO: 24031 - protein, 116 aa, Zea mays subsp. mays
  misc_feature (1)..(116): Ceres Seq. ID no. 12417824
MSNADLGRIINSDEVQSVVKPLNKEVKRREKRKNPLKNMAAVLKLNPYLGTARKMATLAEAARVKARKAKLDSKRTKLTPETAKVKAAGKAWYKTMVSDSDYTEFENFSKWLGVTQ

SEQ ID NO: 24032 - protein, 78 aa, Zea mays subsp. mays
  misc_feature (1)..(78): Ceres Seq. ID no. 12417825
MAAVLKLNPYLGTARKMATLAEAARVKARKAKLDSKRTKLTPETAKVKAAGKAWYKTMVSDSDYTEFENFSKWLGVTQ

SEQ ID NO: 24033 - DNA, 1087 bp, Zea mays subsp. mays
  misc_feature (1)..(1087): Ceres Seq. ID no. 12417895
ctaatcgaaaagccaggtcgaggctttccgagctccgatccctctccaacgcctgagggatggccgtgccggcgcccgcgaaggcggcgcgcttgcttgcggcctccgcggcggtgctcgtgctgctgtggtgtgtccatttccgcggtgggctctccttcggctcccccaccaacaagggcctcatcttcaacgtgcatcctgtgcttatgctaataggattcatcatcctagggagcgaagccataatgagctacaaaatatggccatggagtcatgatacaaacaagatggttcacatgcttcttcatgctgttgcactcttcctgggttctgttgggatatatgctgccttcaagttccacaatgaaagtggaattgataatctgtacagcttgcattcgtgggttggacttggaactatctgcctgtacggtatacagtggctatttggcgttgctaccttcttcttccctggtgcttcgccaacagtccggcgcagaatgctcccatggcacactcgcgctggacttgttgtctacatactggcactgcttgcttcagagctggggttcctggagaagctcaccttccttcaggctgccggcctcggcaggtacagctcggaagctctgctggtgaacttcacagctcttgtgatcctactgcttggcgcttctgttgttctgtatgtcaccgctccaatgcacaatgagcacgcgcatgggtattcagcagtgcacaagccctgaaccacagatgcagcttcatcggttccagttggcgtatccttgtacgagtaggaatcaaatccaatcaaattttgtccgccggaattatgagactttagagtgtctccggcagtcagtgtaaaatagaggacacaaaactgtagatgacactttttgacactgtttgtagagtgtaattttaaataagggatgagatagaggatctattggagatagccttagggctagtttagaaaacccattttcccatttttctaagagatttttatttttaaagggaaattatttcattttatcttgagaaaataggaatctcttgggaaaaaaagagtccc

SEQ ID NO: 24034 - protein, 230 aa, Zea mays subsp. mays
  misc_feature (1)..(230): Ceres Seq. ID no. 12417896
MAVPAPAKAARLLAASAAVLVLLWCVHFRGGLSFGSPTNKGLIFNVHPVLMLIGFIILGSEAIMSYKIWPWSHDTNKMVHMLLHAVALFLGSVGIYAAFKFHNESGIDNLYSLHSWVGLGTICLYGIQWLFGVATFFFPGASPTVRRRMLPWHTRAGLVVYILALLASELGFLEKLTFLQAAGLGRYSSEALLVNFTALVILLLGASVVLYVTAPMHNEHAHGYSAVHKP

SEQ ID NO: 24035 - protein, 180 aa, Zea mays subsp. mays
  misc_feature (1)..(180): Ceres Seq. ID no. 12417897
MLIGFIILGSEAIMSYKIWPWSHDTNKMVHMLLHAVALFLGSVGIYAAFKFHNESGIDNLYSLHSWVGLGTICLYGIQWLFGVATFFFPGASPTVRRRMLPWHTRAGLVVYILALLASELGFLEKLTFLQAAGLGRYSSEALLVNFTALVILLLGASVVLYVTAPMHNEHAHGYSAVHKP

SEQ ID NO: 24036 - protein, 167 aa, Zea mays subsp. mays
  misc_feature (1)..(167): Ceres Seq. ID no. 12417898
MSYKIWPWSHDTNKMVHMLLHAVALFLGSVGIYAAFKFHNESGIDNLYSLHSWVGLGTICLYGIQWLFGVATFFFPGASPTVRRRMLPWHTRAGLVVYILALLASELGFLEKLTFLQAAGLGRYSSEALLVNFTALVILLLGASVVLYVTAPMHNEHAHGYSAVHKP

SEQ ID NO: 24037 - DNA, 929 bp, Zea mays subsp. mays
  misc_feature (1)..(929): Ceres Seq. ID no. 12418011
tgttctgatgctacagttgttcttggtgctgttggtaaggtagtaaaagtggagcattgtgaaagagtgcatatcattgcagctgcaaaacggatttgtattgccaactgccgggaatgcatcttctacataggagtaaatcaccaacctcttgtgttgggggacaaccataaattacaagttgctccattcaatacgtgctacccacaactgcatgaacatatgatacaagtggctgtcgatcccagtgtcaacaaatgggaccaaccttttgtgttgggagttgttgatccacatgattcattatcccatcctgctggagtttcagatgttaaagctgaatcagcaacatgtctggatcctgatctattcaccaattttttgattcctagttggtttggggatgaaaatcaagggcctacaaactgcaatcctttcccactgcctgaaatttatgggacatcccaaagcaaaaagcgttctgctctggaagatatccaaaaaggatgattcgggagctgcagcttgatgagaaccggaaaagggaattggcaactgcccttcacgttcagttcaaggattggttatacgcttcaggcaatatccgccagctctactgtctacagggcgattaacgatgggatttgcaagactgactatccttttgccgactccaaaacattcgacaattgtcgaaagctgaccttccttccctgggagagaggattcccacccgcgcagaaggatgtgaagatgtactgttacctacttttttacagattcatttgggtattccctttgctgcgagttggaggtactaattaggatgtaatctccaagcctactcatttttttggcccttgataacgtccacgagtatgtaatagggggactgatggatcatacgttgttgaataaacatttcttct

SEQ ID NO: 24038 - protein, 169 aa, Zea mays subsp. mays
  misc_feature (1)..(169): Ceres Seq. ID no. 12418012
CSDATVVLGAVGKVVKVEHCERVHIIAAAKRICIANCRECIFYIGVNHQPLVLGDNHKLQVAPFNTCYPQLHEHMIQVAVDPSVNKWDQPFVLGVVDPHDSLSHPAGVSDVKAESATCLDPDLFTNFLIPSWFGDENQGPTNCNPFPLPEIYGTSQSKKRSALEDIQKG

SEQ ID NO: 24039 - protein, 98 aa, Zea mays subsp. mays
  misc_feature (1)..(98): Ceres Seq. ID no. 12418013
MRTGKGNWQLPFTFSSRIGYTLQAISASSTVYRAINDGICKTDYPFADSKTFDNCRKLTFLPWERGFPPAQKDVKMYCYLLFYRFIWVFPLLRVGGTN

SEQ ID NO: 24040 - protein, 95 aa, Zea mays subsp. mays
  misc_feature (1)..(95): Ceres Seq. ID no. 12418014
MIQVAVDPSVNKWDQPFVLGVVDPHDSLSHPAGVSDVKAESATCLDPDLFTNFLIPSWFGDENQGPTNCNPFPLPEIYGTSQSKKRSALEDIQKG

SEQ ID NO: 24041 - DNA, 644 bp, Zea mays subsp. mays
  misc_feature (1)..(644): Ceres Seq. ID no. 12418062
cattggagactctttggacttggtacctattgctgccttctacggtagaggaaaacgaacaggtgtctttggatcattcctcctcgcatgctatgatgagcagaacgaagaatatcaaacaatatgcaacataggtactggattttctgagcaacagcttgaagaacgttctgcgagccttcgaagtaaagtgatagaaaaaccaaaggcatactatagatttggcgacacaatgaaccccgatgtgtggtttgagccatcagaggtctgggaggtcaaagctgccgatctgagcataagccctgtacatcgtgctgccaatggtatagtcgatccaaataagggtatctctctaagattccctcgcctattgagattacgtgacgataaaagcccagaacaagccaccacgtctgaccaagtcgctgacatgtaccgggtctcaaaagatcaaccacggntataaccaggaggatgaggacgatgactgatgttgacttaattctttgttgctggatgggatggttcactgtgtaaacactagtcttcgcagtttccagcttgttctcaaccgtaacctgttgatttaccggttcctgtttctatgatcaaatgaacaggtattgaccggagattgcattttc

SEQ ID NO: 24042 - protein, 154 aa, Zea mays subsp. mays
  misc_feature (1)..(154): Ceres Seq. ID no. 12418063
  misc_feature (154)..(154): Xaa is any aa, unknown or other
IGDSLDLVPIAAFYGRGKRTGVFGSFLLACYDEQNEEYQTICNIGTGFSEQQLEERSASLRSKVIEKPKAYYRFGDTMNPDVWFEPSEVWEVKAADLSISPVHRAANGIVDPNKGISLRFPRLLRLRDDKSPEQATTSDQVADMYRVSKDQPRX

SEQ ID NO: 24043 - protein, 77 aa, Zea mays subsp. mays
  misc_feature (1)..(77): Ceres Seq. ID no. 12418064
  misc_feature (77)..(77): Xaa is any aa, unknown or other
MNPDVWFEPSEVWEVKAADLSISPVHRAANGIVDPNKGISLRFPRLLRLRDDKSPEQATTSDQVADMYRVSKDQPRX

SEQ ID NO: 24044 - DNA, 1213 bp, Zea mays subsp. mays
  misc_feature (1)..(1213): Ceres Seq. ID no. 12418105
gacagcctccgcgcgccgcgtcgtcgtcactgtgcagagctagctgctgcaggtttgaaagcgatggccgcgctctacgccctcgtcgcggtctcgctgctgcccgttctcgtcacggcggagtgcgactgctcggacgacgacgccacgggccgcgacaaggcgggagcgctgcggctaaagatcatcgccatcttctgcatcctggcggggggcgcggccggcgcggcggtgccggcgctggggcgcaggctccccgcgctgcgcccgggcgcgggcccgttcctcgccgtcagggccttcgcgggcggcgtcatcctcgccacggggctggtgcacatcctgcccgcggccttcgacgcgctgggctcgccgtgcctcgcggcggccggcgggccgtgggccaggttcccgttcgccgggacggtcgccatcctcgccgcggtcgccacgctcgtggtggacacggtcgccacngggtacctgcgccggaagnccgcggcggtcggcgacgagccaccgcagctcggnggggacgaccccnaggaggcctccggcggcgggcgccacggccacgcgcacggtgtcgacgacgacgacgacctcgtacgccaccgngtcgtctctcaggtgctggagctgggcgtggtggtgcactcgctgatcatcggcatgtcccctgggcgcctcgggatttccccagcacggtgcgcccgctcgtcccggcgttgacgttccaccagctcttcgagggcatcggcctcggcgggtgcatcgtncaggccaaatttcgcctcaggtcaatggtggcgatggcagtcttcttctccctgacgaccccgatcggcgtggccatcggcatcgggatatcgtcggcgtacgacgagacgagccagacggcgctggtcgtgcagggcctgttcgaggccgcggccgcggggatcctggtgtacatggcgctcgtcgacatcctccgcgaggacttcatgagcgcccgggtgcagggcagcgcgcccctgcaggccgcgctgagcgcctcgctgctgctgggagctggcttgatgtccatgctcgccatctgggcatgagtgaccagaacgtgagctggcttgatgcgcagggagtgaattgtagtagtttcgttaggttcgtgttacagtgggtcagccgcttgcccgcttttgagtgtatagaagaggaggggtttgttttg

SEQ ID NO: 24045 - protein, 361 aa, Zea mays subsp. mays
  misc_feature (1)..(361): Ceres Seq. ID no. 12418106
  misc_feature (159)..(159): Xaa is any aa, unknown or other
  misc_feature (165)..(165): Xaa is any aa, unknown or other
  misc_feature (177)..(177): Xaa is any aa, unknown or other
  misc_feature (181)..(181): Xaa is any aa, unknown or other
  misc_feature (206)..(206): Xaa is any aa, unknown or other
  misc_feature (259)..(259): Xaa is any aa, unknown or other
QPPRAASSSLCRASCCRFESDGRALRPRRGLAAARSRHGGVRLLGRRRHGPRQGGSAAAKDHRHLLHPGGGRGRRGGAGAGAQAPRAAPGRGPVPRRQGLRGRRHPRHGAGAHPARGLRRAGLAVPRGGRRAVGQVPVRRDGRHPRRGRHARGGHGRHXVPAPEXRGGRRRATAARXGRPXGGLRRRAPRPRARCRRRRRPRTPPXRLSGAGAGRGGALADHRHVPWAPRDFPSTVRPLVPALTFHQLFEGIGLGGCIXQAKFRLRSMVAMAVFFSLTTPIGVAIGIGISSAYDETSQTALVVQGLFEAAAAGILVYMALVDILREDFMSARVQGSAPLQAALSASLLLGAGLMSMLAIWA

SEQ ID NO: 24046 - protein, 243 aa, Zea mays subsp. mays
  misc_feature (1)..(243): Ceres Seq. ID no. 12418107
  misc_feature (159)..(159): Xaa is any aa, unknown or other
  misc_feature (166)..(166): Xaa is any aa, unknown or other
  misc_feature (177)..(177): Xaa is any aa, unknown or other
  misc_feature (182)..(182): Xaa is any aa, unknown or other
  misc_feature (206)..(206): Xaa is any aa, unknown or other
DSLRAPRRRHCAELAAAGLKAMAALYALVAVSLLPVLVTAECDCSDDDATGRDKAGALRLKIIAIFCILAGGAAGAAVPALGRRLPALRPGAGPFLAVRAFAGGVILATGLVHILPAAFDALGSPCLAAAGGPWARFPFAGTVAILAAVATLVVDTVAXGYLRRKXAAVGDEPPQLXGDDPXEASGGGRHGHAHGVDDDDDLVRHXVVSQVLELGVVVHSLIIGMSPGRLGISPARCARSSRR

SEQ ID NO: 24047 - protein, 222 aa, Zea mays subsp. mays
  misc_feature (1)..(222): Ceres Seq. ID no. 12418108
  misc_feature (138)..(138): Xaa is any aa, unknown or other
  misc_feature (145)..(145): Xaa is any aa, unknown or other
  misc_feature (156)..(156): Xaa is any aa, unknown or other
  misc_feature (161)..(161): Xaa is any aa, unknown or other
  misc_feature (185)..(185): Xaa is any aa, unknown or other
MAALYALVAVSLLPVLVTAECDCSDDDATGRDKAGALRLKIIAIFCILAGGAAGAAVPALGRRLPALRPGAGPFLAVRAFAGGVILATGLVHILPAAFDALGSPCLAAAGGPWARFPFAGTVAILAAVATLVVDTVAXGYLRRKXAAVGDEPPQLXGDDPXEASGGGRHGHAHGVDDDDDLVRHXVVSQVLELGVVVHSLIIGMSPGRLGISPARCARSSRR

SEQ ID NO: 24048 - DNA, 1404 bp, Zea mays subsp. mays
  misc_feature (1)..(1404): Ceres Seq. ID no. 12418197
gcacgagaccattacctagaacatcctaatcgaaaaagagcacactagcttagctacacacaggccacaggggcacaagaaacacctgccgatcgacggcgatggacttcgacgaccacgacgacggcgacgaggaggagatggcgccgatgccggtgagctccagctacgacgccccgcctctggcagccggcgggtttggtgcaccggcgccgcccaagccgcccggcgagcgcgccaaggccccgggcgggcggtaccgcgagtgcctcaagaaccacgcggtcggcatcgggggccacgccgtggacgggtgcggcgagttcatgccggccggcgaggagggcacgctcgacgcgctccgctgcgccgcgtgcggctgccaccgcaacttccaccgcaaggagtccccggagggctcccccgccgcgctggtcgcctacggaggcggcgccgccacgccgcaccaccaccacttctccccgtactaccgcaccccgggccgggtcgtacttccaccaccatcaccagcagcagcagccgatccacatggccgccgcgggccaccacacgccgcggccgctggcgctgccgtccacgtcccacagctggcgcgacgacggcgacgactacctctccggggggatggcggccgccgggccggtgtcggcgctgggcccgctgggcctgggcggcggcgccgggccctctggctccggcgggtccggcaagaagcggttccgcaccaagttcacccaggagcagaaggacaggatgctggcgttcgcggagcgcgtggggtggcgcatccagaagcacgacgaggccgccgtgcagcagttctgcgacgaggtctgcgtcaagcgccacgtgctcaaggtgtggatgcacaacaacaagcacaccctcggcaagaagccgtaggcgtagctaagcagcaggcagcgtcacaccatgacacccccaccccaacgcgtgtactgtacacacgcaagagccacgcccacgcgcgcatgcatcacacacacacacacagcggttgatcgcagtcgcagatcgatcgacggtggccgtggccagcctctcctccgggtacgggtaggtacacctgcatcctctttgttagcattcggctccggcgccttcgtgccgtggcggccggagtaggttagttgcagtaagtaactcgtagcgaggtgctcgatcgatctttcttgctcggctttattaggccgttcttttttacttctcatttaaccgtacttgctggtgttgtttattaattaattcctgcggcatgggccatttgccggtttgcttggttgttcttggcgttaataattcttcaatggcaaatgtacttggtgttgcgatgccaacaagtgtatctggggattggggctg

SEQ ID NO: 24049 - protein, 313 aa, Zea mays subsp. mays
  misc_feature (1)..(313): Ceres Seq. ID no. 12418198
MDFDDHDDGDEEEMAPMPVSSSYDAPPLAAGGFGAPAPPKPPGERAKAPGGRYRECLKNHAVGIGGHAVDGCGEFMPAGEEGTLDALRCAACGCHRNFHRKESPEGSPAALVAYGGGAATPHHHHFSPYYRTPGRVVLPPPSPAAAADPHGRRGPPHAAAAGAAVHVPQLARRRRRLPLRGDGGRRAGVGAGPAGPGRRRRALWLRRVRQEAVPHQVHPGAEGQDAGVRGARGVAHPEARRGRRAAVLRRGLRQAPRAQGVDAQQQAHPRQEAVGVAKQQAASHHDTPTPTRVLYTRKSHAHARMHHTHTHSG

SEQ ID NO: 24050 - protein, 300 aa, Zea mays subsp. mays
  misc_feature (1)..(300): Ceres Seq. ID no. 12418199
MAPMPVSSSYDAPPLAAGGFGAPAPPKPPGERAKAPGGRYRECLKNHAVGIGGHAVDGCGEFMPAGEEGTLDALRCAACGCHRNFHRKESPEGSPAALVAYGGGAATPHHHHFSPYYRTPGRVVLPPPSPAAAADPHGRRGPPHAAAAGAAVHVPQLARRRRRLPLRGDGGRRAGVGAGPAGPGRRRRALWLRRVRQEAVPHQVHPGAEGQDAGVRGARGVAHPEARRGRRAAVLRRGLRQAPRAQGVDAQQQAHPRQEAVGVAKQQAASHHDTPTPTRVLYTRKSHAHARMHHTHTHSG

SEQ ID NO: 24051 - protein, 297 aa, Zea mays subsp. mays
  misc_feature (1)..(297): Ceres Seq. ID no. 12418200
MPVSSSYDAPPLAAGGFGAPAPPKPPGERAKAPGGRYRECLKNHAVGIGGHAVDGCGEFMPAGEEGTLDALRCAACGCHRNFHRKESPEGSPAALVAYGGGAATPHHHHFSPYYRTPGRVVLPPPSPAAAADPHGRRGPPHAAAAGAAVHVPQLARRRRRLPLRGDGGRRAGVGAGPAGPGRRRRALWLRRVRQEAVPHQVHPGAEGQDAGVRGARGVAHPEARRGRRAAVLRRGLRQAPRAQGVDAQQQAHPRQEAVGVAKQQAASHHDTPTPTRVLYTRKSHAHARMHHTHTHSG

SEQ ID NO: 24052 - DNA, 1673 bp, Zea mays subsp. mays
  misc_feature (1)..(1673): Ceres Seq. ID no. 12418201
gcacgagaccattacctagaacatcctaatcgaaaacgcctccccgagagcccccgttttctgtcacaaatcgccactaaaaccctagccttccgccatggccacctcccctgccgcctcgtcctcctccgctccgaccgcctccgcggtggctgcggctacgatggctgttgaggccaccgacgggccggtgctcagcgtagtatcgaagcgtctccgcgcactgcggaagaagtacaaccgaatcacgcagattgaggagtcgctcgccgccggcaagacgctcaaccgagagcaggaggaggttctccgctccaagcccgtcgtcgccgctctgatcgacgagctcgagcgcctccgccctccgctcgcctccgccctcgcggaggagctcttctnccgncccgcccccgccccctccgccgcttcctcctccgactcagattcgtcagtccaggacttgcttgcgctcgtctacttcggctccctctttgacgtcaagcagcaaagcgacttcgtctctttggtttacacgcgcgaactcgagcggagcagctgcctcacttatgactacgtcggggatgatccggaggacagtctcgcggagaccgatctgaacgcggtttctgcccttgcctccctcgccgcgttgcgccctcctgctgcagccggagtctcgcaccgtgacgcccttcaggcttgtgctcatcacgcccgcctctggctctgccgtgcggatgaacccatccatcctgactccaccatcacatatgctggggtgagggcaaagctggataggatcatggcatcgggctacttcacagcgcagctagaaatgaggacaccattggatctggctgctgcagtggcaagttttggagctggaggtgtgcaggtgcaagagagcatggttgtgtcacctcaggcaccggaagcagtggaggagagccaggctgttgaaggacacaagaatgagaaggaagattctcaggctacagaaatctacaatgatcatcctgttgttgactctgaacatgtggaggatgaagtcctggtgcatccaactgatgaagttcctccagctgagacagagcaggagcaggagacatttgatgctgatgtgaaggatcaggagcaaaaggaccaacaattcatccagcggcggtcttaccagaaccagcgtggtggtggtcgtggtggcagcaggagaggctatcctaatggtcgtggaggacgtggtggccgaggtggcgggtaccagaatggccgtggtggataccagaatggtcgtggcggtgctggcgggtactactacgaatctggatactaccagccgaggaactacaacagaggccggggtggtcgctccggcggtggcaactcttactacaacagccatggtggaggtgcacaggggcatcatcctgggagtgttgagctgggcgcaaacgcctagcttcgctgactgttctgtttgataatgaggagcgagtgagtcgtgccattttgttattatagaactaacttagcctgttattacgtcaccgttggtcccatccgtgagtctttttgctgctcgagtgactgcatatggtcggtcggtattgaggaaatactctgggaaagtagtttcaggtcatattcgttttctaagttacgtttttttttgtgtt

SEQ ID NO: 24053 - protein, 452 aa, Zea mays subsp. mays
  misc_feature (1)..(452): Ceres Seq. ID no. 12418202
  misc_feature (101)..(101): Xaa is any aa, unknown or other
  misc_feature (102)..(102): Xaa is any aa, unknown or other
MATSPAASSSSAPTASAVAAATMAVEATDGPVLSVVSKRLRALRKKYNRITQIEESLAAGKTLNREQEEVLRSKPVVAALIDELERLRPPLASALAEELFXXPAPAPSAASSSDSDSSVQDLLALVYFGSLFDVKQQSDFVSLVYTRELERSSCLTYDYVGDDPEDSLAETDLNAVSALASLAALRPPAAAGVSHRDALQACAHHARLWLCRADEPIHPDSTITYAGVRAKLDRIMASGYFTAQLEMRTPLDLAAAVASFGAGGVQVQESMVVSPQAPEAVEESQAVEGHKNEKEDSQATEIYNDHPVVDSEHVEDEVLVHPTDEVPPAETEQEQETFDADVKDQEQKDQQFIQRRSYQNQRGGGRGGSRRGYPNGRGGRGGRGGGYQNGRGGYQNGRGGAGGYYYESGYYQPRNYNRGRGGRSGGGNSYYNSHGGGAQGHHPGSVELGANA

SEQ ID NO: 24054 - protein, 430 aa, Zea mays subsp. mays
  misc_feature (1)..(430): Ceres Seq. ID no. 12418203
  misc_feature (79)..(79): Xaa is any aa, unknown or other
  misc_feature (80)..(80): Xaa is any aa, unknown or other
MAVEATDGPVLSVVSKRLRALRKKYNRITQIEESLAAGKTLNREQEEVLRSKPVVAALIDELERLRPPLASALAEELFXXPAPAPSAASSSDSDSSVQDLLALVYFGSLFDVKQQSDFVSLVYTRELERSSCLTYDYVGDDPEDSLAETDLNAVSALASLAALRPPAAAGVSHRDALQACAHHARLWLCRADEPIHPDSTITYAGVRAKLDRIMASGYFTAQLEMRTPLDLAAAVASFGAGGVQVQESMVVSPQAPEAVEESQAVEGHKNEKEDSQATEIYNDHPVVDSEHVEDEVLVHPTDEVPPAETEQEQETFDADVKDQEQKDQQFIQRRSYQNQRGGGRGGSRRGYPNGRGGRGGRGGGYQNGRGGYQNGRGGAGGYYYESGYYQPRNYNRGRGGRSGGGNSYYNSHGGGAQGHHPGSVELGANA

SEQ ID NO: 24055 - DNA, 1848 bp, Zea mays subsp. mays
  misc_feature (1)..(1848): Ceres Seq. ID no. 12418208
accacgggcagctcagctcagcaagccgcacaagccccaaacagaaagagactcacccaccgcgccacgcaacagcccatctccgctctgctctctcgcccaccccgattcccccccatggctatggcgacgacggaggccaccacgctgacggtgctgctcaaggaggcggcggccgccttcccgacccgccgcgcagttgccgtaccgggcaggctggagctcacgcacgccgccctcgacgctctcgtcgacgcggcggccgcacgactcgccgccgacgccggagttctcccgggccacgtcgtcgcgctctccttccccaacaccgtcgagctggtgatcatgttcctggcggtaatccgcgcgcgcggcgtggcggcgccgctcaacccggcctacacgcaggaggagttcgagttctacctctccgactcggaggcgcgcctcctcgtcaccaacgcggagggcaacgcggcagcgcaggctgccgctgccaagctcgggctcgcccacgccaccgccagcctccacgacgcggccggccctgtccacctcgccggcctcccggtccatgctccggagaacgggtcccacggcggcggcgcggcgggctctctctcccccaacgacccgtcggacgtggccctgttcctgcacacctccggcacgacgagccggcccaagggcgtgccgctgaagcagcgcaacctggcggcgtcggtgcggaacatccggtccgtgtaccgcctcgccgagacggacgccacggtggtggtgctgccgctgttccacgtgcacgggctcctctgcgccctgctgagctcgctggcttcgggcgcgtccgtggcgctgccggcggcggggcggttctcggcgtccacgttctgggccgacatgcgggcgtcgggcgccacctggtacacggcggtgccgacgatccaccagatcatcctggaccggcacgcgtcgcggccggaggcgtacccggcgctccgattcatccgcagctgcagcgcgtcgctggcgccggcgatcctggagcggctggaggcggcgttcagcgcgccggtgctggaggcgtacgcgatgacggaggcgtcgcacctgatgacgtcaaacccgctgccggaggacgggccacggaagcccgggtcagtggggcgcgcggtggggcaggagctggcggtgctggacgaggaggggcggctcgtggcggcggggagccccggggaggtgtgcgtccgcggggacaacgtgacggcgggttacaaggggaacccagaggcgaacgaggcggcgttccggttcgggtggttccacacgggggacatcggcgtggtggacgaccaagggtatgtccggctggtggggcgcatcaaggagctcatcaaccgcggcggggagaagatctccccgatcgaggtggacgccgtgctgctaggcctccccggtgtggcgcaggcggtgtcgttcggggtgcctgacgacaagtacggggaggagatcaactgcgcggtgatcccgcgggacgggtcggcgctgcgggaggaggaggtgctggcgcactgccgacggaacctggcgtccttcaaggtgcccaagaaggtgttcatcacggacgacctgcccaagacggccaccggaaagatccagcgccgcatcgtggcgcagcacttcgtgcagccgaccagtgcctgatcgttgatcctggtgcttgccaagtcatgggtcgacggattggaatttcgctacactagctagcattttgccgttgttcccgcattgcgttgcgaggtggacatggcctgactgaacctgaataaacaaacacatgcatcgtctctc

SEQ ID NO: 24056 - protein, 566 aa, Zea mays subsp. mays
  misc_feature (1)..(566): Ceres Seq. ID no. 12418209
TTGSSAQQAAQAPNRKRLTHRATQQPISALLSRPPRFPPMAMATTEATTLTVLLKEAAAAFPTRRAVAVPGRLELTHAALDALVDAAAARLAADAGVLPGHVVALSFPNTVELVIMFLAVIRARGVAAPLNPAYTQEEFEFYLSDSEARLLVTNAEGNAAAQAAAAKLGLAHATASLHDAAGPVHLAGLPVHAPENGSHGGGAAGSLSPNDPSDVALFLHTSGTTSRPKGVPLKQRNLAASVRNIRSVYRLAETDATVVVLPLFHVHGLLCALLSSLASGASVALPAAGRFSASTFWADMRASGATWYTAVPTIHQIILDRHASRPEAYPALRFIRSCSASLAPAILERLEAAFSAPVLEAYAMTEASHLMTSNPLPEDGPRKPGSVGRAVGQELAVLDEEGRLVAAGSPGEVCVRGDNVTAGYKGNPEANEAAFRFGWFHTGDIGVVDDQGYVRLVGRIKELINRGGEKISPIEVDAVLLGLPGVAQAVSFGVPDDKYGEEINCAVIPRDGSALREEEVLAHCRRNLASFKVPKKVFITDDLPKTATGKIQRRIVAQHFVQPTSA

SEQ ID NO: 24057 - protein, 527 aa, Zea mays subsp. mays
  misc_feature (1)..(527): Ceres Seq. ID no. 12418210
MAMATTEATTLTVLLKEAAAAFPTRRAVAVPGRLELTHAALDALVDAAAARLAADAGVLPGHVVALSFPNTVELVIMFLAVIRARGVAAPLNPAYTQEEFEFYLSDSEARLLVTNAEGNAAAQAAAAKLGLAHATASLHDAAGPVHLAGLPVHAPENGSHGGGAAGSLSPNDPSDVALFLHTSGTTSRPKGVPLKQRNLAASVRNIRSVYRLAETDATVVVLPLFHVHGLLCALLSSLASGASVALPAAGRFSASTFWADMRASGATWYTAVPTIHQIILDRHASRPEAYPALRFIRSCSASLAPAILERLEAAFSAPVLEAYAMTEASHLMTSNPLPEDGPRKPGSVGRAVGQELAVLDEEGRLVAAGSPGEVCVRGDNVTAGYKGNPEANEAAFRFGWFHTGDIGVVDDQGYVRLVGRIKELINRGGEKISPIEVDAVLLGLPGVAQAVSFGVPDDKYGEEINCAVIPRDGSALREEEVLAHCRRNLASFKVPKKVFITDDLPKTATGKIQRRIVAQHFVQPTSA

SEQ ID NO: 24058 - protein, 525 aa, Zea mays subsp. mays
  misc_feature (1)..(525): Ceres Seq. ID no. 12418211
MATTEATTLTVLLKEAAAAFPTRRAVAVPGRLELTHAALDALVDAAAARLAADAGVLPGHVVALSFPNTVELVIMFLAVIRARGVAAPLNPAYTQEEFEFYLSDSEARLLVTNAEGNAAAQAAAAKLGLAHATASLHDAAGPVHLAGLPVHAPENGSHGGGAAGSLSPNDPSDVALFLHTSGTTSRPKGVPLKQRNLAASVRNIRSVYRLAETDATVVVLPLFHVHGLLCALLSSLASGASVALPAAGRFSASTFWADMRASGATWYTAVPTIHQIILDRHASRPEAYPALRFIRSCSASLAPAILERLEAAFSAPVLEAYAMTEASHLMTSNPLPEDGPRKPGSVGRAVGQELAVLDEEGRLVAAGSPGEVCVRGDNVTAGYKGNPEANEAAFRFGWFHTGDIGVVDDQGYVRLVGRIKELINRGGEKISPIEVDAVLLGLPGVAQAVSFGVPDDKYGEEINCAVIPRDGSALREEEVLAHCRRNLASFKVPKKVFITDDLPKTATGKIQRRIVAQHFVQPTSA

SEQ ID NO: 24059 - DNA, 1980 bp, Zea mays subsp. mays
  misc_feature (1)..(1980): Ceres Seq. ID no. 12418235
gtcggtccaagagcacgacgagcagacgacgctgccggcccggccgtgctgctcctctgagtccgagatctgaaggcgcggcaggaaggaaacgggcgggcgagaggatccagcagccctcccccacgcgcgcgcgacggttagcgcgtcccagatctcggtgcggcgcctcccgcccggccctgccggcgagagcgcggcccgatgaggcggcggccgttcctggagcagcggcggccttcgttcaagcgccggtggcagcagcgcccgtggtgggtgcgcctcgcgctttccctccttctcgccctcgcatgcgtcctcctcctcgccgtcctcctcggctcccccgaccccggcgcctcgccgtccacctccgccgcgtcctccggatctgagaccacctcctcacctctcctccgtcagagaacttacctggagggaatcacggatgcgctcaacatgactgacgaaatgctgagcgcccgctcgttctcgaggcagctcatggaccagatttatctagccaaaacatatgtcgtcgttgccaaggaggccaacaacctcagtttgtggcggagcttagtgcccaggtacggcgggcgcagagcatccttgcgcatgctgcagcctatgggggcacggtgatggagcaggaagcagagaaggcgatcagggatatgtcggtgctgctcttccaggcgcagcagcttcggtacgtagcagtatcacaatcatgaagttgaaaggccagattcagtccctagaggagaagtcaaaagttgaggtggagaaaagcacaaaatatggccagattgctgctgaggagctcccaaagggactttattgccttggtatccggttaaccatggaatggttcaagagtcccgagcttcagaggaagttttcggataggagcccagcagtgcagagcaatctgagtgataacagcctctaccatttttgtgtcttctcagacaacatccttgctgtttcagttgttgttaattctacggctataaactcgaggcaccctgacaaggttgtttttcacttagtgactgatgagttgaactatgctccgatgaaggcatggtttggcatgaatgactacagaggggtcaccgtggagatacaaaaggtggaggactttacctggctcaatgcatcgtatgttcccgttcttaaacagctacagaatgctgctacacagaagttctacttctctggcagtggtagtcgtggaacaccaattaaattcaggaacccaaagtacttatcaatgcttaaccacttgaggttttatattccagaaatatatcctgaattgcagaaggtggtatttcttgatgatgatatcgttgttcagaaggacctatcagaattgtttactatcaacctcaatggcaatgtgatgggtgctgtagagacttgcatggagacattccacagatttcataagtatcttaaccattcccatccgctaatccgtgctcattttgaccctgatgcttgcggctgggcatttggtatgaacgtgcttgatctggttgaatggaggaacaagaatgtgacaggcatatatcattattggcaggagcgcaatgctgatcatactctatggaagcttgggtctttaccacctggacttcttgctttctatggcttggttgaagcattggatcccaaatggcatgtcttgggacttggctacacaaatgtggatcttgctactatcaaggaaggtgcagtactgcactacaatggaaatatgaagccatggctcaaaatcggaatggagaagtacaagagcttttgggataactatgtggactattcacaccctttgattcagcagtgcttcatgcgttgattgatgtgtatcaacattagaatttttgtaagcttcatggtagatatgttccgagcacatgctccaactgccacacggaaacattgtagttaaatcagttggcttttctc

SEQ ID NO: 24060 - protein, 378 aa, Zea mays subsp. mays
  misc_feature (1)..(378): Ceres Seq. ID no. 12418236
MKLKGQIQSLEEKSKVEVEKSTKYGQIAAEELPKGLYCLGIRLTMEWFKSPELQRKFSDRSPAVQSNLSDNSLYHFCVFSDNILAVSVVVNSTAINSRHPDKVVFHLVTDELNYAPMKAWFGMNDYRGVTVEIQKVEDFTWLNASYVPVLKQLQNAATQKFYFSGSGSRGTPIKFRNPKYLSMLNHLRFYIPEIYPELQKVVFLDDDIVVQKDLSELFTINLNGNVMGAVETCMETFHRFHKYLNHSHPLIRAHFDPDACGWAFGMNVLDLVEWRNKNVTGIYHYWQERNADHTLWKLGSLPPGLLAFYGLVEALDPKWHVLGLGYTNVDLATIKEGAVLHYNGNMKPWLKIGMEKYKSFWDNYVDYSHPLIQQCFMR

SEQ ID NO: 24061 - protein, 334 aa, Zea mays subsp. mays
  misc_feature (1)..(334): Ceres Seq. ID no. 12418237
MEWFKSPELQRKFSDRSPAVQSNLSDNSLYHFCVFSDNILAVSVVVNSTAINSRHPDKVVFHLVTDELNYAPMKAWFGMNDYRGVTVEIQKVEDFTWLNASYVPVLKQLQNAATQKFYFSGSGSRGTPIKFRNPKYLSMLNHLRFYIPEIYPELQKVVFLDDDIVVQKDLSELFTINLNGNVMGAVETCMETFHRFHKYLNHSHPLIRAHFDPDACGWAFGMNVLDLVEWRNKNVTGIYHYWQERNADHTLWKLGSLPPGLLAFYGLVEALDPKWHVLGLGYTNVDLATIKEGAVLHYNGNMKPWLKIGMEKYKSFWDNYVDYSHPLIQQCFMR

SEQ ID NO: 24062 - protein, 262 aa, Zea mays subsp. mays
  misc_feature (1)..(262): Ceres Seq. ID no. 12418238
MKAWFGMNDYRGVTVEIQKVEDFTWLNASYVPVLKQLQNAATQKFYFSGSGSRGTPIKFRNPKYLSMLNHLRFYIPEIYPELQKVVFLDDDIVVQKDLSELFTINLNGNVMGAVETCMETFHRFHKYLNHSHPLIRAHFDPDACGWAFGMNVLDLVEWRNKNVTGIYHYWQERNADHTLWKLGSLPPGLLAFYGLVEALDPKWHVLGLGYTNVDLATIKEGAVLHYNGNMKPWLKIGMEKYKSFWDNYVDYSHPLIQQCFMR

SEQ ID NO: 24063 - DNA, 1351 bp, Zea mays subsp. mays
  misc_feature (1)..(1351): Ceres Seq. ID no. 12418243
aacaaaaatcacgtttccatccatcctggcgcacaagaggaagcggagagctctctctctcccgcccgcaatataatggcgagagcacacctagccctggtcagcttcttcgctgcctcaattattggtgcggcgtccaagtcgttcaccatcgccaacaactgcgagcacacggtgtggccggggatcctctcgagcgccgggtccgcgggagtggacaccacaggcttcgcgctggcgccgggggagtcgcgcgctctgagcgtgcgtcggggtggtcgggccggctgtggggccgcacgctctgctccaccgacgcggccacgggccggttcgcctgcgtgaccggcgactgcggctcgggcaggcaggactgcggcggcggcggggccgccccgccggccacgcctggcagagttcaccatggacggcagcgggggcatggacttctacgacgtgagcctggtggacgggtacaacctgccgatgctggtggcgccgcagggcgcggccgctgccgcggggggcagctgcgtgcccaccggctgcatggcggacctcaacggcgcgtgccccgccgacctgcgcgtggcggcttcgacgacgtcctccggcggcggcggcgtggcctgcaagagcgcgtgcgaggcgttcgggtcggcgcagtactgctgcaacggcgactacgggaaccccagcacctgcaagccgtcggcgtactcgcagttcttcaagaacgcgtgcccccgggcgtacagctacgcctacgacgacgccacctccaccttcacctgcgccggcgacaccgcgtacgccatcaccttctgccccagcacgaccagcgtcaaggcggccggaggtagcccgcaggagcaaggagccctgccgctgatgaacgccaccatggtgtacctcggcggcgaccaggtcggatccgccacagccgcggcccggctgccgtccggcctcctccaccacgtcgtggtcctcgccgttgtgtccctcgcgctagcaggggctctgtactgatggtgatggcgaaccccactgcacagtgacgacgcgacgccacgcgggacaacagcccacgagacaatcgtgctcctctacagaccgaaggaaaaaaaattaaggatagaaacgagaaatggacgcatcacctgcctgccggtgtggacggcggtggtcctcgcggtccagcgagactgcgagccccgacgacggtgtgattattcacccgtgccgaccgagagagacgtgtgtagtggcgatacaaatttgattgaagacattattgtgcgttttcttagatatttattaattacacgataatacacacatgtattattat

SEQ ID NO: 24064 - protein, 286 aa, Zea mays subsp. mays
  misc_feature (1)..(286): Ceres Seq. ID no. 12418244
QKSRFHPSWRTRGSGELSLSRPQYNGESTPSPGQLLRCLNYWCGVQVVHHRQQLRAHGVAGDPLERRVRGSGHHRLRAGAGGVARSERASGWSGRLWGRTLCSTDAATGRFACVTGDCGSGRQDCGGGGAAPPATPGRVHHGRQRGHGLLRREPGGRVQPADAGGAAGRGRCRGGQLRAHRLHGGPQRRVPRRPARGGFDDVLRRRRRGLQERVRGVRVGAVLLQRRLREPQHLQAVGVLAVLQERVPPGVQLRLRRRHLHLHLRRRHRVRHHLLPQHDQRQGGRR

SEQ ID NO: 24065 - protein, 201 aa, Zea mays subsp. mays
  misc_feature (1)..(201): Ceres Seq. ID no. 12418245
MDGSGGMDFYDVSLVDGYNLPMLVAPQGAAAAAGGSCVPTGCMADLNGACPADLRVAASTTSSGGGGVACKSACEAFGSAQYCCNGDYGNPSTCKPSAYSQFFKNACPRAYSYAYDDATSTFTCAGDTAYAITFCPSTTSVKAAGGSPQEQGALPLMNATMVYLGGDQVGSATAAARLPSGLLHHVVVLAVVSLALAGALY

SEQ ID NO: 24066 - protein, 195 aa, Zea mays subsp. mays
  misc_feature (1)..(195): Ceres Seq. ID no. 12418246
MDFYDVSLVDGYNLPMLVAPQGAAAAAGGSCVPTGCMADLNGACPADLRVAASTTSSGGGGVACKSACEAFGSAQYCCNGDYGNPSTCKPSAYSQFFKNACPRAYSYAYDDATSTFTCAGDTAYAITFCPSTTSVKAAGGSPQEQGALPLMNATMVYLGGDQVGSATAAARLPSGLLHHVVVLAVVSLALAGALY

SEQ ID NO: 24067 - DNA, 1288 bp, Zea mays subsp. mays
  misc_feature (1)..(1288): Ceres Seq. ID no. 12418262
gcacgagaccattacctagaacatcctaatcgaaaaacaatcccacaacccaagaagccacaagaaagcagcagcagcaccgcacggacctgacctccaactacaagcgacgatccaggctccagagccccacgcaaggccggaaggagacaggcagcagcccggcagagcagctaagccatggcggtggacctcatgtcctgcggcggcggggcgtacgagcaactggcgttccaggaggcagccgcggcggggctccgcagcctggagttgctcgcttcctcgctctccccgtgcggcgcggggcgggcggagtcgccgccgctcgggcagatcgccgaccaggcggtgtcccggttccggcgcgtcatcaacctgctggaccgcacggggcacgcccgcttccgccgcgcgcccgccgtcgccgcggtggagcccatagagacggagacgccagcgtcacagcaggcggcggcggagccgcctcatcaggctcagaacaaagccctgacgctggacttcgccaagtctgtcccgccggcagcgaacaagaaggccccgcgggcgccggccgtgtccgcgacttcgacctcgttcctgtcgtccgtgaccgcgggcggcgaagggagcgtgtccaaggggtgcagcctcgccgccgtgtcctcgggcaagccgcctctcccgaagcgcacgtcgccgtgccccgccgctgctccgccgggggcgcaccacgccgagtccggcgctggaggttgccactgctcgaagaagaagcgcagccggcagggcctgtcccggcgcacggtgcgcctacccgcggccgcggcaacgccggggtcgcagccgcccggccacgtgccggcgtcgtcggacgtaccccacgacgagtactcgtggcgcaagtacgggcagaagcccatcaaggggtccccttacccgcgcggctactaccggtgcagcagcgccaagggttgccccgcgcggaagcacgtggagcgcgccgccgacgacccggccgtgctcgtcgtcacctacgagggcgaccaccgccacgacggcgacggcgacggcgacggcggcgttggcgctggcgctgcccgctcccgcgcggcgtgaagatcgtttgcttcccgccgtagcagtcagtgtagcagcggtagtcaagtcaatcgatactagtagtagacctcttgtttcatttgttcttcggattagtggtagatcgagctttgctcctgtaaaaggaattaaagagcatttaaacttaatctcgccatgaactttctcc

SEQ ID NO: 24068 - protein, 311 aa, Zea mays subsp. mays
  misc_feature (1)..(311): Ceres Seq. ID no. 12418263
MAVDLMSCGGGAYEQLAFQEAAAAGLRSLELLASSLSPCGAGRAESPPLGQIADQAVSRFRRVINLLDRTGHARFRRAPAVAAVEPIETETPASQQAAAEPPHQAQNKALTLDFAKSVPPAANKKAPRAPAVSATSTSFLSSVTAGGEGSVSKGCSLAAVSSGKPPLPKRTSPCPAAAPPGAHHAESGAGGCHCSKKKRSRQGLSRRTVRLPAAAATPGSQPPGHVPASSDVPHDEYSWRKYGQKPIKGSPYPRGYYRCSSAKGCPARKHVERAADDPAVLVVTYEGDHRHDGDGDGDGGVGAGAARSRAA

SEQ ID NO: 24069 - protein, 306 aa, Zea mays subsp. mays
  misc_feature (1)..(306): Ceres Seq. ID no. 12418264
MSCGGGAYEQLAFQEAAAAGLRSLELLASSLSPCGAGRAESPPLGQIADQAVSRFRRVINLLDRTGHARFRRAPAVAAVEPIETETPASQQAAAEPPHQAQNKALTLDFAKSVPPAANKKAPRAPAVSATSTSFLSSVTAGGEGSVSKGCSLAAVSSGKPPLPKRTSPCPAAAPPGAHHAESGAGGCHCSKKKRSRQGLSRRTVRLPAAAATPGSQPPGHVPASSDVPHDEYSWRKYGQKPIKGSPYPRGYYRCSSAKGCPARKHVERAADDPAVLVVTYEGDHRHDGDGDGDGGVGAGAARSRAA

SEQ ID NO: 24070 - DNA, 1883 bp, Zea mays subsp. mays
  misc_feature (1)..(1883): Ceres Seq. ID no. 12418285
agtatctctagctagttggccggaatgaccgccaccacctccgacaggtcggtctcgaaagccctcacgaggttccctatgaacttgcgggtgactccggtgaggttggccaccttctgcctgtacgccctgaacgcatcgccgtcgacgggcgcggcctccccgccggcgccgaagagttccttcctctccagctcggcggaggcgtgcaggcactcgagccagcggttggcctggttctgcaggtcgtcgaacagcccgcgcttggtgacgtcgcgctccgggtccaggaagtagccgtacgcgtgcgcccaccgcaggatccgccgcccttcggccacctgccggtaggcctcggccacgaacccgagctccgtggccgggacgtccgccgccctcgccatccactccagctccccgcgctccagcgtcgccgtgtccctggccacgctctccagcgccgcgcggttcgacacccaccgctcgtagtggtacaggtacctctccagcgacgccctggccaaccgcctcgcctccttctcctcggcgccggcgccggcgacgcccgtctcggccggcggatgtgggcggaggtcgttgcaggcgtagtggttctcccctcccgccggctgcaggcagagccagcagaagcggtggccgcacggcggcgagcaccgcatgtggttgcagccctggttcttctcgatggggcggccgcatctggggcacggcttggtgtgcgccatcacccagttggccgtctccgccgagtcggagctgttcttgagcagccacgcgtgcaccgtggcgcacgacaccggccggtgcgcctcctcgccgcaggcccagcagactccgtaccgtacacgcagaacacgtccgccgccgcgtcaccgccgcccgacgactccagcgcgcgggcgcacccggggccgccgcaccaccgcaccctcccgccgctctcctccacgtacgaccggagccagaaccgcgcgtaccggcccacgtcgtccgccgccagcacctcgtccacgagctcccggacgacgggcgccgagcagcgcgggtccgggcaccgcagcgacaggcagcgcgggccgtcgcccaccgccgcgcggacgtacccgcgccagcacccgttgcagtagtagtgggagcagcccgcggacgccgtctgccccgcgggctgctcgtcgaagcagatggcgcagacgcgcggccgcaagccgcgcgccgcggggacgagctggcccgggggaaggccggcggcgccgcgcacgcgccgctcgtccgcgaaccactcctcctggacccgcccgacgcgccacttgaagtggcgcagcaggacggccgcgaagcccggcgggatggacagcacctcggcgaccctggcggtgtccgcctcttgccgcgcgcggacgtcgtcctcggtcagaacggcgtacctctgctccccgtcgcacgccgcggcgtcggcctgtgtctgctcggctcctccttcgcagtcgtcgtcgtcgtcgtcgtcgtactcgaacatgtaatcctcgtcgccggagctgctgccgtcgtcagccgtttcctgggcatgcccgcgagagccatcgccatcggcgctctctccgtcgtcgtcgtggtcgcggccggatctaggggctgcttcgcatgtcttgccgcggcggctcgtcccgcagctgtcgtcgtcgtggcccgtgcagctgctgacctgtcggtacctcttgttggagacagcgccgccgccagacgccatgccgccgagccgcggtttcttggcgagggatttggactacatccttctctaacagcgttctggtccgttgatatgtactggtggatagtggtaatccatcggacgtttcggccgg

SEQ ID NO: 24071 - protein, 217 aa, Zea mays subsp. mays
  misc_feature (1)..(217): Ceres Seq. ID no. 12418286
MWLQPWFFSMGRPHLGHGLVCAITQLAVSAESELFLSSHACTVAHDTGRCASSPQAQQTPYRTRRTRPPPRHRRPTTPARGRTRGRRTTAPSRRSPPRTTGARTARTGPRRPPPAPRPRAPGRRAPSSAGPGTAATGSAGRRPPPRGRTRASTRCSSSGSSPRTPSAPRAARRSRWRRRAAASRAPRGRAGPGEGRRRRARAARPRTTPPGPARRAT

SEQ ID NO: 24072 - protein, 208 aa, Zea mays subsp. mays
  misc_feature (1)..(208): Ceres Seq. ID no. 12418287
MGRPHLGHGLVCAITQLAVSAESELFLSSHACTVAHDTGRCASSPQAQQTPYRTRRTRPPPRHRRPTTPARGRTRGRRTTAPSRRSPPRTTGARTARTGPRRPPPAPRPRAPGRRAPSSAGPGTAATGSAGRRPPPRGRTRASTRCSSSGSSPRTPSAPRAARRSRWRRRAAASRAPRGRAGPGEGRRRRARAARPRTTPPGPARRAT

SEQ ID NO: 24073 - protein, 188 aa, Zea mays subsp. mays
  misc_feature (1)..(188): Ceres Seq. ID no. 12418288
MWAEVVAGVVVLPSRRLQAEPAEAVAARRRAPHVVAALVLLDGAAASGARLGVRHHPVGRLRRVGAVLEQPRVHRGARHRPVRLLAAGPADSVPYTQNTSAAASPPPDDSSARAHPGPPHHRTLPPLSSTYDRSQNRAYRPTSSAASTSSTSSRTTGAEQRGSGHRSDRQRGPSPTAARTYPRQHPLQ

SEQ ID NO: 24074 - DNA, 864 bp, Zea mays subsp. mays
  misc_feature (1)..(864): Ceres Seq. ID no. 12418353
acctctgttcagccaaagccacctccccaaacccaatcccgtcactatctcattcccctgaccgccggaacaccctaggcaatggagcccaaatccaccacccctcccccgccccccgtgatgggcgcgcccatcgcgtatcctcccccgcccggcgccgcgtaccccgccgggccgtacgtgcacgcgccggcggccgcgctctaccctcctcctcccctgccgccggcgcccccctcctcgcagcagggcgccgcggcggcgcaccagcagcagctattctgggcggagcaataccgcgagatcgaggccaccaccgacttcaagaaccacaacctgccgctcgcccgcatcaagaagatcatgaaggccgacgaggacgtgcgcatgatcgccgccgaggcgcccgtcgtcttctcccgcgcctgcgagatgttcatcctcgagctcacccaccgcggctgggcacacgccgaggagaacaagcgccgcacgctgcagaagtccgacatcgccgccgccgtcgcgcgcaccgaggtcttcgacttcctcgtcgacatcgtgccgcgggacgaggccaaggacgccgactccgccgccatgggagcagccgggatcccgcaccccgccgccggcctgcccgccgccgatcccatgggctactactacgtccagccgcagtaacgaatttgcttccttatcatggtttcgcttccatgcagcctttgcgggtttttagtaaactattattattactgagagtgccctgttgttacccatgctctgttgttgccacccaataactcgatgacctgatgatcatctgatgtgcctcccgttccgtaacaagtgattccatttctg

SEQ ID NO: 24075 - protein, 266 aa, Zea mays subsp. mays
  misc_feature (1)..(266): Ceres Seq. ID no. 12418354
LCSAKATSPNPIPSLSHSPDRRNTLGNGAQIHHPSPAPRDGRAHRVSSPARRRVPRRAVRARAGGRALPSSSPAAGAPLLAAGRRGGAPAAAILGGAIPRDRGHHRLQEPQPAARPHQEDHEGRRGRAHDRRRGARRLLPRLRDVHPRAHPPRLGTRRGEQAPHAAEVRHRRRRRAHRGLRLPRRHRAAGRGQGRRLRRHGSSRDPAPRRRPARRRSHGLLLRPAAVTNLLPYHGFASMQPLRVFSKLLLLLRVPCCYPCSVVATQ

SEQ ID NO: 24076 - protein, 200 aa, Zea mays subsp. mays
  misc_feature (1)..(200): Ceres Seq. ID no. 12418355
MEPKSTTPPPPPVMGAPIAYPPPPGAAYPAGPYVHAPAAALYPPPPLPPAPPSSQQGAAAAHQQQLFWAEQYREIEATTDFKNHNLPLARIKKIMKADEDVRMIAAEAPVVFSRACEMFILELTHRGWAHAEENKRRTLQKSDIAAAVARTEVFDFLVDIVPRDEAKDADSAAMGAAGIPHPAAGLPAADPMGYYYVQPQ

SEQ ID NO: 24077 - protein, 187 aa, Zea mays subsp. mays
  misc_feature (1)..(187): Ceres Seq. ID no. 12418356
MGAPIAYPPPPGAAYPAGPYVHAPAAALYPPPPLPPAPPSSQQGAAAAHQQQLFWAEQYREIEATTDFKNHNLPLARIKKIMKADEDVRMIAAEAPVVFSRACEMFILELTHRGWAHAEENKRRTLQKSDIAAAVARTEVFDFLVDIVPRDEAKDADSAAMGAAGIPHPAAGLPAADPMGYYYVQPQ

SEQ ID NO: 24078 - DNA, 845 bp, Zea mays subsp. mays
  misc_feature (1)..(845): Ceres Seq. ID no. 12418375
gaagaagccgcgtgcgttatcctttgagcagtttgggcgctgagcaagtccagtgagagagggagagcggcgagaggatggctgggatggcatcgctgcagggcgccatggcgtcgctctccatctccgcgctaggcgcggcgacggcgagcagcagcagcttctggggcaaccggctcgccacctactccgcgccgcagcctggggtaaggtttatggtcaagatatgcccaattgaaatgagacttaagagatgggagcgaaagaagtgtaaaccaaacagtcttcctgtgctgcacaagatgcatgttaggatcggggacacggtacaggttattgcaggccgtgagaaaggaaaggttggagaagtcacacgccaaaaggtggatttagaaaaccttcgcttagccaagctgacaaatttcaagggccacgtaatgagatgcagctagtagcatttctgcttagacagtctagtagtctgaagaaactatttctgattgctcccaaggaggatcaccctcaaggactgcgcaaggttcagtcagatatgctgcctgattttcttaaaaaagaaatatcgcatctggaaagaccttcagcaaatacccagatatttttcggcgagcctgatgctcagacccacccgttgcattcggaggtctttgtcaggttttagcttgaaatgagcaaatgctgttgtagcccaattcctgctcatatagatttagatttctcgttagataacggacatggggaaaaaagtatctgcaaggcatacagagtttgatatatgtttcctcttttgcaattcatattactaaagaagtcctgcatagcagtcg

SEQ ID NO: 24079 - protein, 124 aa, Zea mays subsp. mays
  misc_feature (1)..(124): Ceres Seq. ID no. 12418376
MAGMASLQGAMASLSISALGAATASSSSFWGNRLATYSAPQPGVRFMVKICPIEMRLKRWERKKCKPNSLPVLHKMHVRIGDTVQVIAGREKGKVGEVTRQKVDLENLRLAKLTNFKGHVMRCS

SEQ ID NO: 24080 - protein, 121 aa, Zea mays subsp. mays
  misc_feature (1)..(121): Ceres Seq. ID no. 12418377
MASLQGAMASLSISALGAATASSSSFWGNRLATYSAPQPGVRFMVKICPIEMRLKRWERKKCKPNSLPVLHKMHVRIGDTVQVIAGREKGKVGEVTRQKVDLENLRLAKLTNFKGHVMRCS

SEQ ID NO: 24081 - protein, 114 aa, Zea mays subsp. mays
  misc_feature (1)..(114): Ceres Seq. ID no. 12418378
MASLSISALGAATASSSSFWGNRLATYSAPQPGVRFMVKICPIEMRLKRWERKKCKPNSLPVLHKMHVRIGDTVQVIAGREKGKVGEVTRQKVDLENLRLAKLTNFKGHVMRCS

SEQ ID NO: 24082 - DNA, 1404 bp, Zea mays subsp. mays
  misc_feature (1)..(1404): Ceres Seq. ID no. 12418555
gcacgagaccattacctagaacatcctaatcgaaaaacgcttttgcagctcgctcacccaagtcccaagcgcaggaggccgcggtagcgtcgacttcctgaacgatctggcggcggccgcggctcccaagttcacgaagcgggaggcgcaagcgaagcggctacctctcgccggagatgccgctggggacctctccagcggtggcggaggccgaggcatggacgtgggagaacgcagcggctggagctgccgccgggttcgccacggttgcggccctccacccgctcgacgtcgtccgcacccgcttccaagtgagcggcgggagggggtggtctgaggtgcctccgtacaggaacaccgcgcacgctgtgtacaccatcacacgatctgagggcctgagaggactttatgcaggattttatcccgcagttcttggatcaactgtttcctggggcctatatttctttttctataacagagctaaacaaaggtacttacagaggaagaatgaccagcttcatccagtccatcatctcatctcagctgcagaagcaggtgctttggtttccttgtttacaaatcccatatggctggtgaaaacaagactgcaactacaaacagctaaacaccatacttctcagtattctggtttttctgatctttgaaaactattctaagagaggagggatttcttgcactttataggggaattggacctgggcttttgctggtcacccatggtgcaatacagttcacggcctatgaggaacttcgcaaagctatgatattctttaaaagtgcacaatcaagggcagacgacacaggaggcggggagtcattgctgaattccgtcgattttgcggcacttggggctggttcaaaagtagctgctattctacttacttatccttaccaggtcatcagagcccgcttgcagcaacggcctggcactgatggtactccaaagtactcaaatagctggcatgtagtgaaggaaactgcaaagtatgaaggcgtccgtggattttacaggggcatcacgtccaatctactgaaaaaccttccagctgcgtccctcacgttcgtggtgtatgaaaatgttatcaaactattcaaagcaaccaaggagaagacgtagctactcattaaatccaggagtactgtgcatggtctgacatttctgagttcaaacgatgcctataatttccattccacgtcaagcccatattttatccatttaacatcgtatatgacaaatatgtaacagtacaggttgtgaccaacctgggtcgtggaaattttttgtacttgcattttgtagagagaaaatacacattttgtttcttcccaaagaaatatgtctttgttatataatccagccgggacgctggcgttgtagatctt

SEQ ID NO: 24083 - protein, 162 aa, Zea mays subsp. mays
  misc_feature (1)..(162): Ceres Seq. ID no. 12418556
MPLGTSPAVAEAEAWTWENAAAGAAAGFATVAALHPLDVVRTRFQVSGGRGWSEVPPYRNTAHAVYTITRSEGLRGLYAGFYPAVLGSTVSWGLYFFFYNRAKQRYLQRKNDQLHPVHHLISAAEAGALVSLFTNPIWLVKTRLQLQTAKHHTSQYSGFSDL

SEQ ID NO: 24084 - protein, 118 aa, Zea mays subsp. mays
  misc_feature (1)..(118): Ceres Seq. ID no. 12418557
MIFFKSAQSRADDTGGGESLLNSVDFAALGAGSKVAAILLTYPYQVIRARLQQRPGTDGTPKYSNSWHVVKETAKYEGVRGFYRGITSNLLKNLPAASLTFVVYENVIKLFKATKEKT

SEQ ID NO: 24085 - DNA, 1557 bp, Zea mays subsp. mays
  misc_feature (1)..(1557): Ceres Seq. ID no. 12418577
gcacgagaccattacctagaacatcctaatcgaaaaatgaacaatttggcgctctcgatgctctcgccgtcgacctcaggtttcccgccaagtcccctaccctccaaggccgccacgaacgccacagctacccgatgccgcgccgcgccctcgggagacgcctcgctgtgcgccttccgcgcgcaccacagcgccggccacgccctccacactaacccgtctctgatgcccgcgctcgccgcctgcgcgcggctgccctccgccgtggccgaggccgagcagatccacgcactcctcgtcaagtcaggcggctcgcgggctgtctcccacgtccaagccttcacgtccctgattcgcgcctacgcgaggctcggccgcgtgtgcgacgcgcggaaggtgttcgatggaatggccgaccggacggtggtcacctggaacgtgctgcttgatgcgcttatcagagatggcgacttggacgctgcgtgggaggtgtttgtgaaaatgccgcagcgcaatgcggtttcttggaacaccataatttctggttttgcaaggaacgggtgggcgccggtggcagtggacttgtttatcgagatgactgtggcttatggtttagcgccagatgaggccacgatggttggcttcgtgtcggctgttcgggacattggtctacttgcaattgggaagagcgcacacgggtatgttctccgtcgggagttctcacttgatggtcctctcggggttgcactggtcagtatgtacacgaggtgcgggagcatgggtgctgcacacagttgcttcttaagtgtcaccaccaagaatgtggagcattggacctctttgatcgcaggtttcgcagcacatggtcaaccagagaatgccttgaggttgttcgtcgagatgaggcaggtgggcattgagcctaatggtgtcaccttcgtagccgtcttgagtgcctgcagccatggcgggctcgtcgatgagggcttcaagtacttcgacctaatgaggagcatgggcatcaggccgatgatccagcactatggctgcttggttgatctccttggccgtgctgggttcttgaaggaggctttcaatcttgccagcaatctacctgaagatcctggttttgtaatctggagctcgctactagcagcctgccgtagccatggcaacgtcgagatggcagagctcactgcgtcgaagttggcagaggcaaaaccaagtcatggcagctcgtatgtgctgctatcgaacacatatgcacgagcggaacaatgggaggactcgaagaggacgcggaggaggatggaggaacatagagtagccaagaaacctgggctcagctggatagagatagatggaagcgtacattcctttgccactgcagacaagctgcatatagaaagcgagggtatttatcatatgttggaggatttgaaacataatattacatcagctgcatatgaacctgaaccgttcgctatttctgaacaattgtaataaatttttctttggaggaagattatcacttgttaataaaaaatccatcatatc

SEQ ID NO: 24086 - protein, 500 aa, Zea mays subsp. mays
  misc_feature (1)..(500): Ceres Seq. ID no. 12418578
ARDHYLEHPNRKMNNLALSMLSPSTSGFPPSPLPSKAATNATATRCRAAPSGDASLCAFRAHHSAGHALHTNPSLMPALAACARLPSAVAEAEQIHALLVKSGGSRAVSHVQAFTSLIRAYARLGRVCDARKVFDGMADRTVVTWNVLLDALIRDGDLDAAWEVFVKMPQRNAVSWNTIISGFARNGWAPVAVDLFIEMTVAYGLAPDEATMVGFVSAVRDIGLLAIGKSAHGYVLRREFSLDGPLGVALVSMYTRCGSMGAAHSCFLSVTTKNVEHWTSLIAGFAAHGQPENALRLFVEMRQVGIEPNGVTFVAVLSACSHGGLVDEGFKYFDLMRSMGIRPMIQHYGCLVDLLGRAGFLKEAFNLASNLPEDPGFVIWSSLLAACRSHGNVEMAELTASKLAEAKPSHGSSYVLLSNTYARAEQWEDSKRTRRRMEEHRVAKKPGLSWIEIDGSVHSFATADKLHIESEGIYHMLEDLKHNITSAAYEPEPFAISEQL

SEQ ID NO: 24087 - protein, 488 aa, Zea mays subsp. mays
  misc_feature (1)..(488): Ceres Seq. ID no. 12418579
MNNLALSMLSPSTSGFPPSPLPSKAATNATATRCRAAPSGDASLCAFRAHHSAGHALHTNPSLMPALAACARLPSAVAEAEQIHALLVKSGGSRAVSHVQAFTSLIRAYARLGRVCDARKVFDGMADRTVVTWNVLLDALIRDGDLDAAWEVFVKMPQRNAVSWNTIISGFARNGWAPVAVDLFIEMTVAYGLAPDEATMVGFVSAVRDIGLLAIGKSAHGYVLRREFSLDGPLGVALVSMYTRCGSMGAAHSCFLSVTTKNVEHWTSLIAGFAAHGQPENALRLFVEMRQVGIEPNGVTFVAVLSACSHGGLVDEGFKYFDLMRSMGIRPMIQHYGCLVDLLGRAGFLKEAFNLASNLPEDPGFVIWSSLLAACRSHGNVEMAELTASKLAEAKPSHGSSYVLLSNTYARAEQWEDSKRTRRRMEEHRVAKKPGLSWIEIDGSVHSFATADKLHIESEGIYHMLEDLKHNITSAAYEPEPFAISEQL

SEQ ID NO: 24088 - protein, 481 aa, Zea mays subsp. mays
  misc_feature (1)..(481): Ceres Seq. ID no. 12418580
MLSPSTSGFPPSPLPSKAATNATATRCRAAPSGDASLCAFRAHHSAGHALHTNPSLMPALAACARLPSAVAEAEQIHALLVKSGGSRAVSHVQAFTSLIRAYARLGRVCDARKVFDGMADRTVVTWNVLLDALIRDGDLDAAWEVFVKMPQRNAVSWNTIISGFARNGWAPVAVDLFIEMTVAYGLAPDEATMVGFVSAVRDIGLLAIGKSAHGYVLRREFSLDGPLGVALVSMYTRCGSMGAAHSCFLSVTTKNVEHWTSLIAGFAAHGQPENALRLFVEMRQVGIEPNGVTFVAVLSACSHGGLVDEGFKYFDLMRSMGIRPMIQHYGCLVDLLGRAGFLKEAFNLASNLPEDPGFVIWSSLLAACRSHGNVEMAELTASKLAEAKPSHGSSYVLLSNTYARAEQWEDSKRTRRRMEEHRVAKKPGLSWIEIDGSVHSFATADKLHIESEGIYHMLEDLKHNITSAAYEPEPFAISEQL

SEQ ID NO: 24089 - DNA, 1349 bp, Zea mays subsp. mays
  misc_feature (1)..(1349): Ceres Seq. ID no. 12418584
gcacgagaccattacctagaacatcctaatcgaaaaataggcgccggctgagcgaggtcttcatctgcgcttcaccagcgacgattatccactagtttgggttgcctcctgctgattgctaggtaggggagcatccgatcatgtcgagcgcggcggtgaacgggctgtccggcgccggcggcggcatcatcgcgcagatcatcacctaccctctccaaaccgtgaacacccggcagcagacggagaggtcagcgaagaagaggaaggccaggagcggctccagcgccaccccagcctccaccatgtaccagatgctccagctgattcaaaccgaaggatggagtgggttgtacagcggcctcaagccctctctcatcggcactgccgcgtcgcagggaatctattactacttctaccagatcctcaagaacaaggtggaagatatagcggttgctcgtagcaagaagggccttggggatggtactgtcgggatgctttcttggcttggtattgcagctgttgctgggtcaatcaatgttcttctaaccaatccaatatgggttcttgtgacacgtatgcagacacatactcaagcgaaaagaaaaatattggagtctaagagggagcttttactgaaagaaatgtctagggcgaattcgttggaggttgcaattctgaaggataggctggttaaattggagtcagaaaaacctcgtccatatggtactcttcaagcgatccaggaggtttaccatgagtctggtataagaggattttggaaagggcttattccaacattaatcatggtatgtaatccatcgattcagttcatgatctatgaaacattggcaaagcgtctgcagtcaaagcgttctggaaagcagctaccaaaaaggcacctcacagctatggaggtttttttattgggtgcattagcaaaacttggagctactttagtcacctatccattgctagtcgtgaagtcaaggttgcaggcaaaacaagaaattggcagcaatgtgatgtccagatacacgggtacaatagatgcgataataaagatggtttcgctacgaaggactacacgggttttacaaaggaatgggcacaaagattgtacaaagtgtctttgctgcctcggttctctttatggttaaagaggaattggtcaagttagcagtgcttttagttgggagtagtaggactattcttattactacatccaagaaacaataggtggtcgtgtatttgggagaaaagttctttttttttttttgcctcaacttgtaatgtatagggtcccattatacatatcctgttcaagatcaatatgaaattntttactggtt

SEQ ID NO: 24090 - protein, 338 aa, Zea mays subsp. mays
  misc_feature (1)..(338): Ceres Seq. ID no. 12418585
MSSAAVNGLSGAGGGIIAQIITYPLQTVNTRQQTERSAKKRKARSGSSATPASTMYQMLQLIQTEGWSGLYSGLKPSLIGTAASQGIYYYFYQILKNKVEDIAVARSKKGLGDGTVGMLSWLGIAAVAGSINVLLTNPIWVLVTRMQTHTQAKRKILESKRELLLKEMSRANSLEVAILKDRLVKLESEKPRPYGTLQAIQEVYHESGIRGFWKGLIPTLIMVCNPSIQFMIYETLAKRLQSKRSGKQLPKRHLTAMEVFLLGALAKLGATLVTYPLLVVKSRLQAKQEIGSNVMSRYTGTIDAIIKMVSLRRTTRVLQRNGHKDCTKCLCCLGSLYG

SEQ ID NO: 24091 - protein, 284 aa, Zea mays subsp. mays
  misc_feature (1)..(284): Ceres Seq. ID no. 12418586
MYQMLQLIQTEGWSGLYSGLKPSLIGTAASQGIYYYFYQILKNKVEDIAVARSKKGLGDGTVGMLSWLGIAAVAGSINVLLTNPIWVLVTRMQTHTQAKRKILESKRELLLKEMSRANSLEVAILKDRLVKLESEKPRPYGTLQAIQEVYHESGIRGFWKGLIPTLIMVCNPSIQFMIYETLAKRLQSKRSGKQLPKRHLTAMEVFLLGALAKLGATLVTYPLLVVKSRLQAKQEIGSNVMSRYTGTIDAIIKMVSLRRTTRVLQRNGHKDCTKCLCCLGSLYG

SEQ ID NO: 24092 - protein, 281 aa, Zea mays subsp. mays
  misc_feature (1)..(281): Ceres Seq. ID no. 12418587
MLQLIQTEGWSGLYSGLKPSLIGTAASQGIYYYFYQILKNKVEDIAVARSKKGLGDGTVGMLSWLGIAAVAGSINVLLTNPIWVLVTRMQTHTQAKRKILESKRELLLKEMSRANSLEVAILKDRLVKLESEKPRPYGTLQAIQEVYHESGIRGFWKGLIPTLIMVCNPSIQFMIYETLAKRLQSKRSGKQLPKRHLTAMEVFLLGALAKLGATLVTYPLLVVKSRLQAKQEIGSNVMSRYTGTIDAIIKMVSLRRTTRVLQRNGHKDCTKCLCCLGSLYG

SEQ ID NO: 24093 - DNA, 1621 bp, Zea mays subsp. mays
  misc_feature (1)..(1621): Ceres Seq. ID no. 12418615
gcacgagaccattacctagaacatcctaatcgaaaaaaccatttgtcggcgatcgccgtgctattgcttgggccttggactgagtaggtttggaggtagcgatacgagacactcgcccccgattcccctcccgttgccgaagcctgtgttgcagggatcgttcgcggaagcggtttttgatcggagagagagaaagagagagcgagggagggaggtggggatggacgcggcggcagcggcggcggcgcagatggagaggcactcgtcggcggcggcgcagatggagaggcactcgtcggcggcggccttcgtggagggcggcgttcaggacggctgcgatgacacctgcagcatctgcctcgagaccttctccgacagtgacccctccgcggtgaccagctgcaagcacgagttccacctccagtgcatcctcgagtggtgccagaggagctcccagtgccccatgtgttggcaggcaatcagcatgaaggaccctacgagccaagagctccttgaggccgtcgaggaaaagagcggaacgacgtgcaggaaaaaccacgcgcgcacaacccaccgtttttccgtcacccgctgctcggagatttcgaggtaccggtggatgcagacgacgccgagatcgaggagcggatcatgcagcacctggccgccgccgcagccattcgccggtcgcaccgccacgccagaagagaaggccgccgcagcagcagggcggcggcagctcatggccatggccacccacaaccacaagtcctgttctttccgtctgctggcgaggccactcctggtggttctggttccccgtctccgcatccgccgcggcaagaacatgctgcttcttctgtggtttctcctccgccattgcctgccgtggcctccgcagaaggaacggatgttgacagtactgcctcggctgatggcgctgtcgggccagatgacagtgtttccaggaggcagtcttcgcctgtcaaccacgatgaagctggaccatctgctgacgcgcagtcattctcagacacgatcaaatctaggctgcagtcaggtctctacaaagtacaaggactcccataacgaagagcacgcgcgggtggaaggagaggtggttcgcgcagagcagcgccatgtcgaatcttggctcggagatgaggagggaggtcggtgctgggatcgccgccgtttcccgcatgatcgagaagcagctggagacacgggatgggagtgggacagcaccgtcgtctgctaccgcttcgtctccagctcacgcccaccctggtccggatgcaagtagtagtcagggagctgctgttcccgctacaccacctgcagccgctctgaacaacgctacgcctgcagcagcgtgcgtgctctgaatgacgcctcgtcgtcttcgacagcttgaacgcgcgccaggatcatgttcagtgagtttacactaggtgtggttttcaagtgctttagatatgatgcttgcaatacaatgtgtgtcgcgtgtatagtcagtttgccaattagcctcattgttagccagtgaaacagatagtggatgccaagctactgttcgatcagtgaatgtttcagaataaagttggatacttggatgcgc

SEQ ID NO: 24094 - protein, 361 aa, Zea mays subsp. mays
  misc_feature (1)..(361): Ceres Seq. ID no. 12418616
MDAAAAAAAQMERHSSAAAQMERHSSAAAFVEGGVQDGCDDTCSICLETFSDSDPSAVTSCKHEFHLQCILEWCQRSSQCPMCWQAISMKDPTSQELLEAVEEKSGTTCRKNHARTTHRFSVTRCSEISRYRWMQTTPRSRSGSCSTWPPPQPFAGRTATPEEKAAAAAGRRQLMAMATHNHKSCSFRLLARPLLVVLVPRLRIRRGKNMLLLLWFLLRHCLPWPPQKERMLTVLPRLMALSGQMTVFPGGSLRLSTTMKLDHLLTRSHSQTRSNLGCSQVSTKYKDSHNEEHARVEGEVVRAEQRHVESWLGDEEGGRCWDRRRFPHDREAAGDTGWEWDSTVVCYRFVSSSRPPWSGCK

SEQ ID NO: 24095 - protein, 351 aa, Zea mays subsp. mays
  misc_feature (1)..(351): Ceres Seq. ID no. 12418617
MERHSSAAAQMERHSSAAAFVEGGVQDGCDDTCSICLETFSDSDPSAVTSCKHEFHLQCILEWCQRSSQCPMCWQAISMKDPTSQELLEAVEEKSGTTCRKNHARTTHRFSVTRCSEISRYRWMQTTPRSRSGSCSTWPPPQPFAGRTATPEEKAAAAAGRRQLMAMATHNHKSCSFRLLARPLLVVLVPRLRIRRGKNMLLLLWFLLRHCLPWPPQKERMLTVLPRLMALSGQMTVFPGGSLRLSTTMKLDHLLTRSHSQTRSNLGCSQVSTKYKDSHNEEHARVEGEVVRAEQRHVESWLGDEEGGRCWDRRRFPHDREAAGDTGWEWDSTVVCYRFVSSSRPPWSGCK

SEQ ID NO: 24096 - protein, 341 aa, Zea mays subsp. mays
  misc_feature (1)..(341): Ceres Seq. ID no. 12418618
MERHSSAAAFVEGGVQDGCDDTCSICLETFSDSDPSAVTSCKHEFHLQCILEWCQRSSQCPMCWQAISMKDPTSQELLEAVEEKSGTTCRKNHARTTHRFSVTRCSEISRYRWMQTTPRSRSGSCSTWPPPQPFAGRTATPEEKAAAAAGRRQLMAMATHNHKSCSFRLLARPLLVVLVPRLRIRRGKNMLLLLWFLLRHCLPWPPQKERMLTVLPRLMALSGQMTVFPGGSLRLSTTMKLDHLLTRSHSQTRSNLGCSQVSTKYKDSHNEEHARVEGEVVRAEQRHVESWLGDEEGGRCWDRRRFPHDREAAGDTGWEWDSTVVCYRFVSSSRPPWSGCK

SEQ ID NO: 24097 - DNA, 921 bp, Zea mays subsp. mays
  misc_feature (1)..(921): Ceres Seq. ID no. 12418758
tttagttgtatgagcttatataagctttcaattcagcatgaaaagaagacatatgatatactggtaaaacaattaggggaaaatgaatcacggactgaagactcaaaaaattggttgaatacatttaagcttcgagaagagcaggtcaacgcccagaagcagaagggccaggaagctaatgcatccgataacgctgttaaattcttgaaggcaaaccctgcagttttacaagcaatgaaggctgctgcgatccaatcaggtggtgtgtcagcaaatgtcaacaggtcgctcaatgctgcagtcgttggagaaggtgtaccacgactgagaggagtggatgagcgagctgctcgagcgactgcagaagcccggaagaaagctgctgcaagaggccttaatgtccgtaatggccctgtggcaaaccatgcgtctgatgaactagctcagattctcaaactcatcaacgctgtttcggggtcttccactcctggctctgcaaagactgaggtatctgcctctgaagggcaggcaacgaatggatgtattcaaaatggaactgacnctgaaccgaaggctgcggataccaacgggctatntgcatcggttaagtccactgtcaacgcaccatttggattggggacaacattggagtcgaagaagcagaaatngaagcaaaagtngtagaaaacctgtgcttggaatttcctttagcaacagttttggactgtagagtgatttgggtttttgacctttataggattgccacgttcacgtggtggaanagttcatttgtttttgttggaggttttttaggaggtctcaataatcattacaagaaagaagacaattgtttcgaatcatcattgatagaccnctgatgagatattggntaatccttaagttaataaatnttcagtcgat

SEQ ID NO: 24098 - protein, 227 aa, Zea mays subsp. mays
  misc_feature (1)..(227): Ceres Seq. ID no. 12418759
  misc_feature (188)..(188): Xaa is any aa, unknown or other
  misc_feature (199)..(199): Xaa is any aa, unknown or other
  misc_feature (223)..(223): Xaa is any aa, unknown or other
  misc_feature (227)..(227): Xaa is any aa, unknown or other
FSCMSLYKLSIQHEKKTYDILVKQLGENESRTEDSKNWLNTFKLREEQVNAQKQKGQEANASDNAVKFLKANPAVLQAMKAAAIQSGGVSANVNRSLNAAVVGEGVPRLRGVDERAARATAEARKKAAARGLNVRNGPVANHASDELAQILKLINAVSGSSTPGSAKTEVSASEGQATNGCIQNGTDXEPKAADTNGLXASVKSTVNAPFGLGTTLESKKQKXKQKX

SEQ ID NO: 24099 - protein, 224 aa, Zea mays subsp. mays
  misc_feature (1)..(224): Ceres Seq. ID no. 12418760
  misc_feature (185)..(185): Xaa is any aa, unknown or other
  misc_feature (196)..(196): Xaa is any aa, unknown or other
  misc_feature (220)..(220): Xaa is any aa, unknown or other
  misc_feature (224)..(224): Xaa is any aa, unknown or other
MSLYKLSIQHEKKTYDILVKQLGENESRTEDSKNWLNTFKLREEQVNAQKQKGQEANASDNAVKFLKANPAVLQAMKAAAIQSGGVSANVNRSLNAAVVGEGVPRLRGVDERAARATAEARKKAAARGLNVRNGPVANHASDELAQILKLINAVSGSSTPGSAKTEVSASEGQATNGCIQNGTDXEPKAADTNGLXASVKSTVNAPFGLGTTLESKKQKXKQKX

SEQ ID NO: 24100 - protein, 149 aa, Zea mays subsp. mays
  misc_feature (1)..(149): Ceres Seq. ID no. 12418761
  misc_feature (110)..(110): Xaa is any aa, unknown or other
  misc_feature (121)..(121): Xaa is any aa, unknown or other
  misc_feature (145)..(145): Xaa is any aa, unknown or other
  misc_feature (149)..(149): Xaa is any aa, unknown or other
MKAAAIQSGGVSANVNRSLNAAVVGEGVPRLRGVDERAARATAEARKKAAARGLNVRNGPVANHASDELAQILKLINAVSGSSTPGSAKTEVSASEGQATNGCIQNGTDXEPKAADTNGLXASVKSTVNAPFGLGTTLESKKQKXKQKX

SEQ ID NO: 24101 - DNA, 1540 bp, Zea mays subsp. mays
  misc_feature (1)..(1540): Ceres Seq. ID no. 12418818
gcacgagaccattacctagaacatcctaatcgaaaactttttcgaccaaccttcgtctccagactcgtccaccctataaattgtctcgccagatcattccaatccggcaactcctgctctgcctgagcctgagcgtaggcggctaccagagagaagggtaggcggcgccggcggcgggagcaatacaagagcggtaaatccaagagagatcagagcctcggagggaaacagaagcgcacagagcatggagagcccgatctcgaggactaacctgaattgcatcagcctggcggacccgaacgtccagaaatcagtggcgctcctcaagcaggcatgcctggattcaggcttcttctatgttgtggatcatgggataagccaagagttcatggatgaagtttttgcccagagcaagaagttctttgaccttcctcatagtgagaaaatgaagcttctccgagacgagaagaatagagggtacacacccatgctagatgaaattcttgatcctgaaaatcaagttaatggtgactacaaggaaggatattatattggagttgaggtacctgcagatgatccagaagcaaacaggccattttatggtccaaatcagtggccttctaaagaagtactaccaaaatggagagaagtgatggagcaatatcacagggaggcattgatagtagcaaaatcagtcgcaaggatcatcgctcttgctctagatctagacgtggacttcttcgatagacctgaaatgcttggcgagtccatagccacgctaaggctcctgcactacgaaggtggacaagaaacaggtaaggtgtcagatcctgcaaagggtgtttacggagcgggcgcccattcagactacggcctgataactctcctggcaaccgatgatgtagttgggctccaaatatgcaaggacaagaacgctcagcctcaactgtgggaatacgtagctccgttgaaaggcggatttatcgtcaaccttggcgacatgctcgaaaggtggagtaacggcgttttcaggtcaaccttacatcgagtggtcctagatgggcgagaacgctactcgatagcctacttcgtggaaccaagccacgactgcgtggtggagtgcctgccgacctgcaagtccgaatcaaatcctccaaagttccctccgatcacctgctccgcgtacctgtcccagcgctacaaggacactcacgcggatctgaaatcctacgacgacagcaaggcctgatcagaggactgccctctcctctctctgtctcagcgatcagtacgtacgacgtgtatcctgcaataacactgggtggagggcggcagtaccagtgtaccacagtatcagtataggtatagagagttctgttggtgccaccgtgccaccgtccatgtgttcatgtaagatgacgagaagaatcaagaacgggggccggcgttgaggtccccggccttaatctaggccttgttgttgctgtcgtgttgtgaggttcaatccccgagcttatcctttggtgctgttgagaggtcc

SEQ ID NO: 24102 - protein, 334 aa, Zea mays subsp. mays
  misc_feature (1)..(334): Ceres Seq. ID no. 12418819
MESPISRTNLNCISLADPNVQKSVALLKQACLDSGFFYVVDHGISQEFMDEVFAQSKKFFDLPHSEKMKLLRDEKNRGYTPMLDEILDPENQVNGDYKEGYYIGVEVPADDPEANRPFYGPNQWPSKEVLPKWREVMEQYHREALIVAKSVARIIALALDLDVDFFDRPEMLGESIATLRLLHYEGGQETGKVSDPAKGVYGAGAHSDYGLITLLATDDVVGLQICKDKNAQPQLWEYVAPLKGGFIVNLGDMLERWSNGVFRSTLHRVVLDGRERYSIAYFVEPSHDCVVECLPTCKSESNPPKFPPITCSAYLSQRYKDTHADLKSYDDSKA

SEQ ID NO: 24103 - protein, 286 aa, Zea mays subsp. mays
  misc_feature (1)..(286): Ceres Seq. ID no. 12418820
MDEVFAQSKKFFDLPHSEKMKLLRDEKNRGYTPMLDEILDPENQVNGDYKEGYYIGVEVPADDPEANRPFYGPNQWPSKEVLPKWREVMEQYHREALIVAKSVARIIALALDLDVDFFDRPEMLGESIATLRLLHYEGGQETGKVSDPAKGVYGAGAHSDYGLITLLATDDVVGLQICKDKNAQPQLWEYVAPLKGGFIVNLGDMLERWSNGVFRSTLHRVVLDGRERYSIAYFVEPSHDCVVECLPTCKSESNPPKFPPITCSAYLSQRYKDTHADLKSYDDSKA

SEQ ID NO: 24104 - protein, 267 aa, Zea mays subsp. mays
  misc_feature (1)..(267): Ceres Seq. ID no. 12418821
MKLLRDEKNRGYTPMLDEILDPENQVNGDYKEGYYIGVEVPADDPEANRPFYGPNQWPSKEVLPKWREVMEQYHREALIVAKSVARIIALALDLDVDFFDRPEMLGESIATLRLLHYEGGQETGKVSDPAKGVYGAGAHSDYGLITLLATDDVVGLQICKDKNAQPQLWEYVAPLKGGFIVNLGDMLERWSNGVFRSTLHRVVLDGRERYSIAYFVEPSHDCVVECLPTCKSESNPPKFPPITCSAYLSQRYKDTHADLKSYDDSKA

SEQ ID NO: 24105 - DNA, 1581 bp, Zea mays subsp. mays
  misc_feature (1)..(1581): Ceres Seq. ID no. 12418879
ctccattcctgcatcccatctcttcttcgcctcctccgcctcgccggcgtcaccgtccggtcccgcctctcccccccgctcgaagctcgatctcttctcccgttctccgcccacgcaatccctgccaccgccgaatgcggaacactccctttggtgaccgactgacctaccctgcttctgccgggttagttgagtgtccgcgccgcgtccggatctcgaatgcgccgccgccgccgtcgcgcgatctagcggctgcgcgctgccccgcaggagggtagagctccaggggcccggtgtggtcaggcggcagatatggcaacggaggcgtccacctctgcggcgggcgggatctgggtggaggggatgtccgcggacaacataaaggggctggtgctcgcgctctcctccagcttcttcatcggggccagcttcatcgtcaagaagaaggggcttaagaaggccggtgcgtccggcgtccgcgcaggtgttggtggttactcttacttgtatgaaccattatggtgggcaggaatgattacaatgattgttggagaagtggctaactttgcagcatatgcttttgctcctgctatcttggtcacaccacttggtgcccttagcatcataattagtgctgctcttgcagacattatgttgaaggaaaagctgcatatatttggtatacttgggtgtgttctttgtgttgtgggttcaacaactattgtacttcatgcccctcaggagcgcacaattgaatctgtagcagaagtgtgggatcttgctactgaaccagcctttctatcttatgctgccattgttcttgctgcaacatttgtcctcatatactactttattccacgatatggtcagacacacatcatggtctatattggtgtttgttcccttgtaggatctctgtcggtcatttgtgaaagctcttggaatagccttgaaactgaccttttctggcatgaatcagctaatttatccacaaacatggttgttcaccattgttgttgttgcatgtatagtaacacagatgaactacctgaacaaggctcttgatactttcaacacagcagttgtatcaccgatatactatacaatgttcacgtcactaaccattttggctagcgtgataatgttcaaggactgggatcgtcaaaatccaactcaaattgtaacagagatgtgtggttttgttaccattctttcggggacgtttcttctccacaagacaaaagacatggttgatggcctcccgccaactctacctgtccggattcctaaacatgaggacgatgcagctgaaggaatccctctcaggtctgctgaaggcatcccgctcagatcaccgagggcaacggaatcgtttcgatcaacgctataatggttggtgatccttcttcaaaggccatgctcagccattctttcatttgatacacacctttgtagattgtattttaggattccaaaaggtaaaggcaccgctccccatgtaatttttttgagacaccggtgtagagtatcgggggaacttatgttatacatctcgaaatgcccagaatgggcttagatccg

SEQ ID NO: 24106 - protein, 250 aa, Zea mays subsp. mays
  misc_feature (1)..(250): Ceres Seq. ID no. 12418880
MATEASTSAAGGIWVEGMSADNIKGLVLALSSSFFIGASFIVKKKGLKKAGASGVRAGVGGYSYLYEPLWWAGMITMIVGEVANFAAYAFAPAILVTPLGALSIIISAALADIMLKEKLHIFGILGCVLCVVGSTTIVLHAPQERTIESVAEVWDLATEPAFLSYAAIVLAATFVLIYYFIPRYGQTHIMVYIGVCSLVGSLSVICESSWNSLETDLFWHESANLSTNMVVHHCCCCMYSNTDELPEQGS

SEQ ID NO: 24107 - protein, 233 aa, Zea mays subsp. mays
  misc_feature (1)..(233): Ceres Seq. ID no. 12418881
MSADNIKGLVLALSSSFFIGASFIVKKKGLKKAGASGVRAGVGGYSYLYEPLWWAGMITMIVGEVANFAAYAFAPAILVTPLGALSIIISAALADIMLKEKLHIFGILGCVLCVVGSTTIVLHAPQERTIESVAEVWDLATEPAFLSYAAIVLAATFVLIYYFIPRYGQTHIMVYIGVCSLVGSLSVICESSWNSLETDLFWHESANLSTNMVVHHCCCCMYSNTDELPEQGS

SEQ ID NO: 24108 - protein, 177 aa, Zea mays subsp. mays
  misc_feature (1)..(177): Ceres Seq. ID no. 12418882
MITMIVGEVANFAAYAFAPAILVTPLGALSIIISAALADIMLKEKLHIFGILGCVLCVVGSTTIVLHAPQERTIESVAEVWDLATEPAFLSYAAIVLAATFVLIYYFIPRYGQTHIMVYIGVCSLVGSLSVICESSWNSLETDLFWHESANLSTNMVVHHCCCCMYSNTDELPEQGS

SEQ ID NO: 24109 - DNA, 1637 bp, Zea mays subsp. mays
  misc_feature (1)..(1637): Ceres Seq. ID no. 12418899
gcacgagaccattacctagaacatcctaatcgaaaaccatttcactcgtattctatcagctagctacccactgtcgccaactcgccgcaacaaagaaccaccatcatgcacctgctgatgctcccttggctcgccttcggccacatcgtgccgttcgtgcagctggcgcggaggctgctgtcctccacctcctcctccgtccgcgtcacgttcctcacggccgctggcaacgtcccgcgcgtcgaggccatgctgtcctctccctcgtccaccggcgaggcggccgtcgtcgtgccgctgcgcctgccccacgtgccggggctgcccgaggacgccgccagcacggcggacctctcgcccgagggcgccgagcttcttaaggccgcgctggacgctgcccggccgcagtggccgcgctgctggccgagctccgcccggacgccgtgctgctcgacttcgccaccccgtgggccgccgaggacgccgcggcgctgggcgccaagtcgctccggttcagcgtcttctccgccgtcncangcgcctacctctccgtccccgcgcgccgccccgacgcggcgggccagctgccgtcggcgcgcgacctcatgtccgcccctgccggcttccccggctcctccccgctcgccgnngccggcgtcccggcgtaccaggcagccgacttcacctacatgttcaccagcttcggcggccagccctgcgtccacgaacgcgtggtggccggcatccgggcctgcgacggcctcgtgctcaagacctgcgccgagatggagggtgcctacatcgactacctnnccgcgcagnttcgcaagcccgtgctcgtggcggggcccctgntgcctggcccgccggcgggagatctcgacgaccactgggccacctggttgtccgcgttcccggacggcgccgtcgtcttcgcctcgttcggcagcgagacgttcctgccgcccgccgcggccacggagctgctcctggggctcgaggccacgggtcgcccgttcctcgccgtgctcaactccccggacggcgccgtcccgccgccggggttcgcggagagggtgtcggggagagggctcgttcatgccgggtgggtgccgcagcagcacatcctgcgccaccggagcgtggggtgctacctcacccacgccggcttcagctccgtcgtggagggcctcgtcgccggctgccgcctcgtactgctgcccatgaagggcgaccagttcctcaacgcggcgctgttcgcgcgcgagctccgcgtgggcgtggaggtggcgcgccgcgacgacgacggctggttcgggcgccaggacgtgtgcgacgcgatcgccgcagcggtggcggacgggggggaaagggacgccaggaagtgggccgactttttgacggacgacggcgtgcaagggaggttcgccgacgagttcgtccggcagctcagggagctcgtcggcgcggcctccagttgatttgagcgctcgacgacgtttctcgtggaacacgcggcaagtgcgattattgaagaaataattccacccacctatttatttgtacattaataacattgcccacccacctgtactgtatcattattgaagaaataattccagccatggatattgcac

SEQ ID NO: 24110 - protein, 373 aa, Zea mays subsp. mays
  misc_feature (1)..(373): Ceres Seq. ID no. 12418900
  misc_feature (143)..(143): Xaa is any aa, unknown or other
  misc_feature (144)..(144): Xaa is any aa, unknown or other
  misc_feature (182)..(182): Xaa is any aa, unknown or other
  misc_feature (236)..(236): Xaa is any aa, unknown or other
  misc_feature (239)..(239): Xaa is any aa, unknown or other
  misc_feature (250)..(250): Xaa is any aa, unknown or other
MHLLMLPWLAFGHIVPFVQLARRLLSSTSSSVRVTFLTAAGNVPRVEAMLSSPSSTGEAAVVVPLRLPHVPGLPEDAASTADLSPEGAELLKAALDAARPQWPRCWPSSARTPCCSTSPPRGPPRTPRRWAPSRSGSASSPPXXAPTSPSPRAAPTRRASCRRRATSCPPLPASPAPPRSPXPASRRTRQPTSPTCSPASAASPASTNAWWPASGPATASCSRPAPRWRVPTSTTXPRXFASPCSWRGPXCLARRREISTTTGPPGCPRSRTAPSSSPRSAARRSCRPPRPRSCSWGSRPRVARSSPCSTPRTAPSRRRGSRRGCRGEGSFMPGGCRSSTSCATGAWGATSPTPASAPSWRASSPAAASYCCP

SEQ ID NO: 24111 - protein, 369 aa, Zea mays subsp. mays
  misc_feature (1)..(369): Ceres Seq. ID no. 12418901
  misc_feature (139)..(139): Xaa is any aa, unknown or other
  misc_feature (140)..(140): Xaa is any aa, unknown or other
  misc_feature (178)..(178): Xaa is any aa, unknown or other
  misc_feature (232)..(232): Xaa is any aa, unknown or other
  misc_feature (235)..(235): Xaa is any aa, unknown or other
  misc_feature (246)..(246): Xaa is any aa, unknown or other
MLPWLAFGHIVPFVQLARRLLSSTSSSVRVTFLTAAGNVPRVEAMLSSPSSTGEAAVVVPLRLPHVPGLPEDAASTADLSPEGAELLKAALDAARPQWPRCWPSSARTPCCSTSPPRGPPRTPRRWAPSRSGSASSPPXXAPTSPSPRAAPTRRASCRRRATSCPPLPASPAPPRSPXPASRRTRQPTSPTCSPASAASPASTNAWWPASGPATASCSRPAPRWRVPTSTTXPRXFASPCSWRGPXCLARRREISTTTGPPGCPRSRTAPSSSPRSAARRSCRPPRPRSCSWGSRPRVARSSPCSTPRTAPSRRRGSRRGCRGEGSFMPGGCRSSTSCATGAWGATSPTPASAPSWRASSPAAASYCCP

SEQ ID NO: 24112 - protein, 325 aa, Zea mays subsp. mays
  misc_feature (1)..(325): Ceres Seq. ID no. 12418902
  misc_feature (95)..(95): Xaa is any aa, unknown or other
  misc_feature (96)..(96): Xaa is any aa, unknown or other
  misc_feature (134)..(134): Xaa is any aa, unknown or other
  misc_feature (188)..(188): Xaa is any aa, unknown or other
  misc_feature (191)..(191): Xaa is any aa, unknown or other
  misc_feature (202)..(202): Xaa is any aa, unknown or other
MLSSPSSTGEAAVVVPLRLPHVPGLPEDAASTADLSPEGAELLKAALDAARPQWPRCWPSSARTPCCSTSPPRGPPRTPRRWAPSRSGSASSPPXXAPTSPSPRAAPTRRASCRRRATSCPPLPASPAPPRSPXPASRRTRQPTSPTCSPASAASPASTNAWWPASGPATASCSRPAPRWRVPTSTTXPRXFASPCSWRGPXCLARRREISTTTGPPGCPRSRTAPSSSPRSAARRSCRPPRPRSCSWGSRPRVARSSPCSTPRTAPSRRRGSRRGCRGEGSFMPGGCRSSTSCATGAWGATSPTPASAPSWRASSPAAASYCCP

SEQ ID NO: 24113 - protein, 291 aa, Zea mays subsp. mays
  misc_feature (1)..(291): Ceres Seq. ID no. 12418903
  misc_feature (15)..(15): Xaa is any aa, unknown or other
  misc_feature (69)..(69): Xaa is any aa, unknown or other
  misc_feature (70)..(70): Xaa is any aa, unknown or other
  misc_feature (73)..(73): Xaa is any aa, unknown or other
  misc_feature (84)..(84): Xaa is any aa, unknown or other
MSAPAGFPGSSPLAXAGVPAYQAADFTYMFTSFGGQPCVHERVVAGIRACDGLVLKTCAEMEGAYIDYXXAQXRKPVLVAGPLXPGPPAGDLDDHWATWLSAFPDGAVVFASFGSETFLPPAAATELLLGLEATGRPFLAVLNSPDGAVPPPGFAERVSGRGLVHAGWVPQQHILRHRSVGCYLTHAGFSSVVEGLVAGCRLVLLPMKGDQFLNAALFARELRVGVEVARRDDDGWFGRQDVCDAIAAAVADGGERDARKWADFLTDDGVQGRFADEFVRQLRELVGAASS

SEQ ID NO: 24114 - DNA, 1542 bp, Zea mays subsp. mays
  misc_feature (1)..(1542): Ceres Seq. ID no. 12418920
gcacgagaccattacctagaacatcctaatcgaaaaacctaactagttgctacctagcctcgaccaggtggagcaatgggctccacggcggcggcgccctgccacatcgtggccgtgccgtacccgggccgtggtcacgtcaacgcgatgctgaacctatgccgcctcctggcagctcgagacggcgtcaccatcaccatcatcgtgaccgaggagtggctcagcctcctcggcgccccggcggcgctgccggacctcggcctgcgcgttcgctttgaggccattccaaacgtgatcccctccgagcacggccgcgccaacgacatggtcggcttcatggaggccgtgtacaccaagatggcgtcgccgttcgagcagcttctcgacaggctcgcgccgccggcgcccgcggctattgtggccgacatgttcgtgccgtggaccgtaggcgtcggcgagcggaggggcgtgcctgtgtgcatcatgtgcccgattagcgccaccatgttcgcggtgcagtacaacttccacctgctaccacccgcggcggccggcggcggcgcgtctccggatatcactggttcttgttttgttgaaaactacattcctggcacgaaatcaatcaggttcgccgatcttgcgcctacacacaccgatgcgttacttctagacaaaatccttgaagcccactcctctgtaaagaaagcacaatgtatcgtcttcaccaccttccaagagctcgagagcgacgccatcggcgctatgaggcaaaactgcccagtgtacgcagttgggccctgcgtccccttcatggcactgcaagagcacaaggccagcccagacggtgacgactacatggcgtggctggacgcacagcccgcgggctcggtgatctacgtctcgctcggcagcttcctctcggtgtccgccgcccagttcgacgagatcgccgctggcctggccgagagcaaggccaggtttctgtgggtgctccgcgacgccgacgcatgctcccgcgtgcgaggcctgatccgcgatcccgacgccggcctcatcgtgccatggacgaaccagctgagggtgctgtgccacccttcggtcggggggttcttcacccactgcggcatgaactcgacgctcgaggcggtgtacgccggcgtgcccatgctcaccctgcccatcgcgttcgaccagccgaccaatagccggctcgtcaccgaggtgtggaagaatggcattggcctcagggacatggcccgcgccgacggcgtcatcgggagaggtgagatagcctcggccgtggacaggctgatgctccctgacgcggcggagttccaggacatgaggaagcgagtgacactgtggaaggacgcggctcggactgcgtctgaagagggtggatcctcgtggaaagatgttacgtctttcatcaacttcgtttcacgttgagatctccgaatgtttacggagtcagctgtagtgaattgtgatcgattctcacggagttagtgtgatatctgaatgttagcagaatctttcggc

SEQ ID NO: 24115 - protein, 457 aa, Zea mays subsp. mays
  misc_feature (1)..(457): Ceres Seq. ID no. 12418921
MGSTAAAPCHIVAVPYPGRGHVNAMLNLCRLLAARDGVTITIIVTEEWLSLLGAPAALPDLGLRVRFEAIPNVIPSEHGRANDMVGFMEAVYTKMASPFEQLLDRLAPPAPAAIVADMFVPWTVGVGERRGVPVCIMCPISATMFAVQYNFHLLPPAAAGGGASPDITGSCFVENYIPGTKSIRFADLAPTHTDALLLDKILEAHSSVKKAQCIVFTTFQELESDAIGAMRQNCPVYAVGPCVPFMALQEHKASPDGDDYMAWLDAQPAGSVIYVSLGSFLSVSAAQFDEIAAGLAESKARFLWVLRDADACSRVRGLIRDPDAGLIVPWTNQLRVLCHPSVGGFFTHCGMNSTLEAVYAGVPMLTLPIAFDQPTNSRLVTEVWKNGIGLRDMARADGVIGRGEIASAVDRLMLPDAAEFQDMRKRVTLWKDAARTASEEGGSSWKDVTSFINFVSR

SEQ ID NO: 24116 - protein, 433 aa, Zea mays subsp. mays
  misc_feature (1)..(433): Ceres Seq. ID no. 12418922
MLNLCRLLAARDGVTITIIVTEEWLSLLGAPAALPDLGLRVRFEAIPNVIPSEHGRANDMVGFMEAVYTKMASPFEQLLDRLAPPAPAAIVADMFVPWTVGVGERRGVPVCIMCPISATMFAVQYNFHLLPPAAAGGGASPDITGSCFVENYIPGTKSIRFADLAPTHTDALLLDKILEAHSSVKKAQCIVFTTFQELESDAIGAMRQNCPVYAVGPCVPFMALQEHKASPDGDDYMAWLDAQPAGSVIYVSLGSFLSVSAAQFDEIAAGLAESKARFLWVLRDADACSRVRGLIRDPDAGLIVPWTNQLRVLCHPSVGGFFTHCGMNSTLEAVYAGVPMLTLPIAFDQPTNSRLVTEVWKNGIGLRDMARADGVIGRGEIASAVDRLMLPDAAEFQDMRKRVTLWKDAARTASEEGGSSWKDVTSFINFVSR

SEQ ID NO: 24117 - protein, 374 aa, Zea mays subsp. mays
  misc_feature (1)..(374): Ceres Seq. ID no. 12418923
MVGFMEAVYTKMASPFEQLLDRLAPPAPAAIVADMFVPWTVGVGERRGVPVCIMCPISATMFAVQYNFHLLPPAAAGGGASPDITGSCFVENYIPGTKSIRFADLAPTHTDALLLDKILEAHSSVKKAQCIVFTTFQELESDAIGAMRQNCPVYAVGPCVPFMALQEHKASPDGDDYMAWLDAQPAGSVIYVSLGSFLSVSAAQFDEIAAGLAESKARFLWVLRDADACSRVRGLIRDPDAGLIVPWTNQLRVLCHPSVGGFFTHCGMNSTLEAVYAGVPMLTLPIAFDQPTNSRLVTEVWKNGIGLRDMARADGVIGRGEIASAVDRLMLPDAAEFQDMRKRVTLWKDAARTASEEGGSSWKDVTSFINFVSR

SEQ ID NO: 24118 - DNA, 1300 bp, Zea mays subsp. mays
  misc_feature (1)..(1300): Ceres Seq. ID no. 12418940
acggcacggccacagctgactgactcctcctgcgttggctgataatcatggctagagctccgctgctcctcgcgctactgtgcgcgtgcgccgccaatgcggcggggaggaagatggtcggcgtgtacgagctcaaggcgggcgatttctccgtcggcgtcaccaactggggcgccaccatcacctccgttgtgctgccggactccaaaggggatttgtctgacgtcgtgcttggctacgacaccattggaggatacgtgagtggtaaaagctacttcggagcgcttgtcggacgagtggccaacaggatcgccaacgcgcgcttcgtgctcgacggaaaggcttaccatcttttcaagaacgatggcaacaacacgcttcatggtggccatagggggttcagtcaggttgtatggacggttaaagagttcgtcggtggcggtgactcgccctacatcacgttgtactaccacagcttcgatggagaacaaggtttcccaggcgacctggacgtgtacgtgacgtaccagctggcggccccctacgtgctgcgggtgcacatgaacgcgacggccgtgaacaaggcgaccccggtgaacctggcgcagcacacgtactggaacctgggcgggcagggcagcggcgacgtcctccgcaacacggtgcagctgttcgcgtcccggtacacgcccgtgggcggcggcctcatcccgacgggcgcggtggcgcccgtggccggcacgccctacgacttcctcgcgccggccgcggtgggctcgcgcatccgccaggtctccggcggcaaggccggcgtctacggctacgacaccaactacgccgtggacggggagcccggcgcgctgcggaaggtggccgtcgtccgggacggcgcgtccggccgggcgctggagctgtgggccaaccagcctggggtgcagttctacacgggcaacttcctccaggacgtcaaggggaagggcggcaaggtgtaccagcagtacggcgcgctgtgcctcgagacgcaggggttcccggacgccgtcaaccaccctaatttcccctcccagatcgtcaggccggggcaggtgtacaagcacgacatggtgttcaagttctccttctagctgatctgtataggcaacaccctggtccctggctaatcaatctactagtacctgttatgattgccactggcaaagtggcaactgggccttattgggactggagagacacgttacatgattccaagtcaatttgttttgcggaccgtaattaatgtttatcgcaaagattatgtatt

SEQ ID NO: 24119 - protein, 358 aa, Zea mays subsp. mays
  misc_feature (1)..(358): Ceres Seq. ID no. 12418941
MARAPLLLALLCACAANAAGRKMVGVYELKAGDFSVGVTNWGATITSVVLPDSKGDLSDVVLGYDTIGGYVSGKSYFGALVGRVANRIANARFVLDGKAYHLFKNDGNNTLHGGHRGFSQVVWTVKEFVGGGDSPYITLYYHSFDGEQGFPGDLDVYVTYQLAAPYVLRVHMNATAVNKATPVNLAQHTYWNLGGQGSGDVLRNTVQLFASRYTPVGGGLIPTGAVAPVAGTPYDFLAPAAVGSRIRQVSGGKAGVYGYDTNYAVDGEPGALRKVAVVRDGASGRALELWANQPGVQFYTGNFLQDVKGKGGKVYQQYGALCLETQGFPDAVNHPNFPSQIVRPGQVYKHDMVFKFSF

SEQ ID NO: 24120 - protein, 336 aa, Zea mays subsp. mays
  misc_feature (1)..(336): Ceres Seq. ID no. 12418942
MVGVYELKAGDFSVGVTNWGATITSVVLPDSKGDLSDVVLGYDTIGGYVSGKSYFGALVGRVANRIANARFVLDGKAYHLFKNDGNNTLHGGHRGFSQVVWTVKEFVGGGDSPYITLYYHSFDGEQGFPGDLDVYVTYQLAAPYVLRVHMNATAVNKATPVNLAQHTYWNLGGQGSGDVLRNTVQLFASRYTPVGGGLIPTGAVAPVAGTPYDFLAPAAVGSRIRQVSGGKAGVYGYDTNYAVDGEPGALRKVAVVRDGASGRALELWANQPGVQFYTGNFLQDVKGKGGKVYQQYGALCLETQGFPDAVNHPNFPSQIVRPGQVYKHDMVFKFSF

SEQ ID NO: 24121 - protein, 187 aa, Zea mays subsp. mays
  misc_feature (1)..(187): Ceres Seq. ID no. 12418943
MNATAVNKATPVNLAQHTYWNLGGQGSGDVLRNTVQLFASRYTPVGGGLIPTGAVAPVAGTPYDFLAPAAVGSRIRQVSGGKAGVYGYDTNYAVDGEPGALRKVAVVRDGASGRALELWANQPGVQFYTGNFLQDVKGKGGKVYQQYGALCLETQGFPDAVNHPNFPSQIVRPGQVYKHDMVFKFSF

SEQ ID NO: 24122 - DNA, 1431 bp, Zea mays subsp. mays
  misc_feature (1)..(1431): Ceres Seq. ID no. 12419006
aatgaaggacacaaagaagcccacgcgggcgtcgtctcgcttaggcgggagggtcgtcggcgtggcatccatgcttctcttcgtctcgttggggttcgttctcggcgtgacctcctccaacgccatgttcatccgatactacctccctttcatgccaccgttacgctctagtgctgcgccgtcgtcttcgcctccgccgctgacgacaccactgacaccgtcgcaaacgccgccgccgccgccgccgccgccgctgccacaaaacccgcagctgcggtcggcgggcttcctttccccgagcggcgtcatgcacaacatgaccgacgaggaactgtactggcgagcgtccatggcgccgatggtccgccgcacgccggacagccgcgtgcccaaggtggctttcttgttcctggtcagggggaagctgcctctccggcctctgtgggagaagttcttcgcgggccacgaaggccggtactccatttacgtgcacgcccacccgtcctacaccggctcgccgccgacggactccccgttctacggccgctacatcccgagccagataacgaaatggggcgacgcgagcctggtggaggcggagcggcggctcctggcaaacgcgctcctggacctgggcaacgagcggttcgcgctcttctccgaggcgtgcatcccggtgtacgacttccccaccgtgcacgccttcctgacaggctccgacaccagcttcgtggactgctacgagaacggcggcagccggtcgcgctaccggcccttcttcgccacccgcaacatcacgctggcgcggtggcgcaagggcgcgcagtggttcgagatggaccgcgcgctggcgctggagtccgtcgcggacggctcctgcttcccggcgttccgcgacttctgcgtggggcggagggagtgcctcatcgacgagcactacctgccgacgctggtgagcctgctggggtggggccgccgcaacgccaaccgcacgctcacgtacgcggactggaagcggcccgtcaaccggcacccgcacacccacggcccggacgaggtgacggaggagcggatcagggagatcagggaggaaggcggcaggcggtgcttctacaacggagccaggagaggcatctgcaacctgttcgcgcgcaagttctcgccggacacgctcgagccgctgctccggctggcgcccaaggtcatggggttcgggtgacctgaccagacgatcgaccgaccggagcaggaggcagtgtaccatagcattctactattctttgcgccgtggatgatcgacccaggttgagctgggaatcacaggcagagagtcgactcgagtccaccatcaggctatcaggactcaggaggagaataagctctttcttttgcgaaccatatacacagtgtatcatgaacatcccgtttgtc

SEQ ID NO: 24123 - protein, 405 aa, Zea mays subsp. mays
  misc_feature (1)..(405): Ceres Seq. ID no. 12419007
MKDTKKPTRASSRLGGRVVGVASMLLFVSLGFVLGVTSSNAMFIRYYLPFMPPLRSSAAPSSSPPPLTTPLTPSQTPPPPPPPPLPQNPQLRSAGFLSPSGVMHNMTDEELYWRASMAPMVRRTPDSRVPKVAFLFLVRGKLPLRPLWEKFFAGHEGRYSIYVHAHPSYTGSPPTDSPFYGRYIPSQITKWGDASLVEAERRLLANALLDLGNERFALFSEACIPVYDFPTVHAFLTGSDTSFVDCYENGGSRSRYRPFFATRNITLARWRKGAQWFEMDRALALESVADGSCFPAFRDFCVGRRECLIDEHYLPTLVSLLGWGRRNANRTLTYADWKRPVNRHPHTHGPDEVTEERIREIREEGGRRCFYNGARRGICNLFARKFSPDTLEPLLRLAPKVMGFG

SEQ ID NO: 24124 - protein, 382 aa, Zea mays subsp. mays
  misc_feature (1)..(382): Ceres Seq. ID no. 12419008
MLLFVSLGFVLGVTSSNAMFIRYYLPFMPPLRSSAAPSSSPPPLTTPLTPSQTPPPPPPPPLPQNPQLRSAGFLSPSGVMHNMTDEELYWRASMAPMVRRTPDSRVPKVAFLFLVRGKLPLRPLWEKFFAGHEGRYSIYVHAHPSYTGSPPTDSPFYGRYIPSQITKWGDASLVEAERRLLANALLDLGNERFALFSEACIPVYDFPTVHAFLTGSDTSFVDCYENGGSRSRYRPFFATRNITLARWRKGAQWFEMDRALALESVADGSCFPAFRDFCVGRRECLIDEHYLPTLVSLLGWGRRNANRTLTYADWKRPVNRHPHTHGPDEVTEERIREIREEGGRRCFYNGARRGICNLFARKFSPDTLEPLLRLAPKVMGFG

SEQ ID NO: 24125 - protein, 364 aa, Zea mays subsp. mays
  misc_feature (1)..(364): Ceres Seq. ID no. 12419009
MFIRYYLPFMPPLRSSAAPSSSPPPLTTPLTPSQTPPPPPPPPLPQNPQLRSAGFLSPSGVMHNMTDEELYWRASMAPMVRRTPDSRVPKVAFLFLVRGKLPLRPLWEKFFAGHEGRYSIYVHAHPSYTGSPPTDSPFYGRYIPSQITKWGDASLVEAERRLLANALLDLGNERFALFSEACIPVYDFPTVHAFLTGSDTSFVDCYENGGSRSRYRPFFATRNITLARWRKGAQWFEMDRALALESVADGSCFPAFRDFCVGRRECLIDEHYLPTLVSLLGWGRRNANRTLTYADWKRPVNRHPHTHGPDEVTEERIREIREEGGRRCFYNGARRGICNLFARKFSPDTLEPLLRLAPKVMGFG

SEQ ID NO: 24126 - DNA, 1410 bp, Zea mays subsp. mays
  misc_feature (1)..(1410): Ceres Seq. ID no. 12419029
accgctacccaaccgccgccgcggttctcgctgccagcgacggacgggccacaccgcgcaggggctcagccccgccacccaccttaaccccgccgtcgggaggcgtcgtccccggcccggcccggcccggccctcgccctctactgcaactggactggcgcgtagacctgtccccgccacgagatcgttccgccctatgtcggtgaagatgctctttgcatagctcaagctgcaatctgatggactctgatgacaagaagtttggaaatggaccaagggagctcactggtgctgttgatttgatcagccactacaaactgctgccacaccatgatttcttttgcaagaaacctttgccgctggcaatatcagatacacattatcttcacaatgttgtgggagacactgaaattcgcaaaggagaaggaatggagttagatcaacttgttcataatgcatatctgagggataaacctgcttatattcagccctttgatatggaaactctggggcaagcgttccaacttcgagaaacagctcttgtggatttgccttctactgaaaaaggtataccgactatttcgggtaaaccaaaaagtgagtccaaggacaaagagaagaagcataaaaggcacaaagacaaagacaaggaacataagaagcacaaacatcggcataaggatcggagtaaggacaaagataaagacaaagacaaggataagaaaaaagataaaagtggccatcatgaaaagaagaggaagcatgagggaacagaagattcagtagatgtgcataagcacaagaagagtaagcacaagagctccaaaaccgatgagatggggaatggagttagttaacacttcctagctctacctccaatccttgtaatttgctgttaaaacttaaaaggagacagacggtctctgctatcaaaaccctgtgcagaatagtgggtatcatgaatgggagctcttatttttgcagagtccattgtgaagagaattgaatttgttaatataggtctaatccttccaactgtgcaaatcaactgtgttcctccctgaagcattggttgtagggtgcgcttgaaaggatgtgcaatgagattgtttcgatgtaacgtgcatgagtacactgagtagctgtggatggttatacagtttgtggtctagggatgtgcagtgagggcagggaattgggaataatttcgtgcccccatcgaccttgatttgtagggtaggatgatttactgtttaaccactagcaaatgttagtagccagttccatgttcatttactccacggcaactgtgctttcgtgtgccaataaccggagttgatccacatgtaatgaattggtgtcaaattgacgatcctgtgtttcaaagtatggttattggatcgtgttgcc

SEQ ID NO: 24127 - protein, 205 aa, Zea mays subsp. mays
  misc_feature (1)..(205): Ceres Seq. ID no. 12419030
MDSDDKKFGNGPRELTGAVDLISHYKLLPHHDFFCKKPLPLAISDTHYLHNVVGDTEIRKGEGMELDQLVHNAYLRDKPAYIQPFDMETLGQAFQLRETALVDLPSTEKGIPTISGKPKSESKDKEKKHKRHKDKDKEHKKHKHRHKDRSKDKDKDKDKDKKKDKSGHHEKKRKHEGTEDSVDVHKHKKSKHKSSKTDEMGNGVS

SEQ ID NO: 24128 - protein, 142 aa, Zea mays subsp. mays
  misc_feature (1)..(142): Ceres Seq. ID no. 12419031
MELDQLVHNAYLRDKPAYIQPFDMETLGQAFQLRETALVDLPSTEKGIPTISGKPKSESKDKEKKHKRHKDKDKEHKKHKHRHKDRSKDKDKDKDKDKKKDKSGHHEKKRKHEGTEDSVDVHKHKKSKHKSSKTDEMGNGVS

SEQ ID NO: 24129 - protein, 119 aa, Zea mays subsp. mays
  misc_feature (1)..(119): Ceres Seq. ID no. 12419032
METLGQAFQLRETALVDLPSTEKGIPTISGKPKSESKDKEKKHKRHKDKDKEHKKHKHRHKDRSKDKDKDKDKDKKKDKSGHHEKKRKHEGTEDSVDVHKHKKSKHKSSKTDEMGNGVS

SEQ ID NO: 24130 - DNA, 1306 bp, Zea mays subsp. mays
  misc_feature (1)..(1306): Ceres Seq. ID no. 12419040
caaaaaatttttgctcagcccgctctcggacgaacccattcacccgtccggccgtccgtgcgcggcgcacccacccggcaccggcaccagcaccaccgcccgcccggcgcccgtcacgctcgagaggaggaggaagaagaagggactggtgcgacagcgcgcgatggccgccgtcgtgtgcgtcaccggcgccggcggcttcatcggctcgtggatcgtcaagatcctcctcgcccgcgggtacgccgtccggggcacctcccgccgcgaagctgctgaccccaagaacgcgcacctgtgggcgctcgacggcgcggcggagcgcctcaccatgctgcaggtggacctgctcgaccgcgccagcctccgcgccgccttccgcggctgcgacggcgtcatccacaccgcctcgccgatgcacgacaaccccgaggagatcatcgagccgattatcgccgggacgcggaacgtcgtggaggcggcggcggacgccggcgtgcggcgcctggtgctgtcctccaccatcggcaccatgtacatggacccgcgccgcgaccccgacgccccgctcggcgactccagctggagcgacctcgagtactgcaagagcaccgagaactggtactgctacgcaaagacggtggcggagcagggcgcgtgggaggcggcgcgggcgcgggggctggacctggcggtggtcatcccggtggtggtgctcggcgagctgctgcagcccagcatgaacaccagcaccctgcacatcctcaagtacctcacgggacagacaaaggagtacgtcaacgagtcgcacgcctacgtgcacgtcatggacgccgncnaggcgcacgtaagggtgctggaggcgcccggcgccggcggccggcggtacgtctgcgccgagcgcaccctgcaccgcggcgagctctgccgcatcctcgccggactcttcccggagtaccctattccgacaaggtgcaaggatcaggtgaacccaccgaagaagggctacaagtttacgaaccaacctctgaaggaccttggcgtcaagttcactccagtgcatgggtacctgtacnaagcagtgaagtccctgcaagacaagggcttcctcccgaagacctctggcgccaaggtgcctgaacgacgcanctacctgcctcaaacgacatcacagncaccacccgaaatcgtntcgaaactttgaggtggatctgcacacgtgctcaaactggccatgttttttttttgtnagaacaagccgttcatttgattggttattaaaagattttgggcagtctgttcttac

SEQ ID NO: 24131 - protein, 400 aa, Zea mays subsp. mays
  misc_feature (1)..(400): Ceres Seq. ID no. 12419041
  misc_feature (279)..(279): Xaa is any aa, unknown or other
  misc_feature (280)..(280): Xaa is any aa, unknown or other
  misc_feature (359)..(359): Xaa is any aa, unknown or other
  misc_feature (383)..(383): Xaa is any aa, unknown or other
  misc_feature (392)..(392): Xaa is any aa, unknown or other
  misc_feature (397)..(397): Xaa is any aa, unknown or other
KKFLLSPLSDEPIHPSGRPCAAHPPGTGTSTTARPAPVTLERRRKKKGLVRQRAMAAVVCVTGAGGFIGSWIVKILLARGYAVRGTSRREAADPKNAHLWALDGAAERLTMLQVDLLDRASLRAAFRGCDGVIHTASPMHDNPEEIIEPIIAGTRNVVEAAADAGVRRLVLSSTIGTMYMDPRRDPDAPLGDSSWSDLEYCKSTENWYCYAKTVAEQGAWEAARARGLDLAVVIPVVVLGELLQPSMNTSTLHILKYLTGQTKEYVNESHAYVHVMDAXXAHVRVLEAPGAGGRRYVCAERTLHRGELCRILAGLFPEYPIPTRCKDQVNPPKKGYKFTNQPLKDLGVKFTPVHGYLYXAVKSLQDKGFLPKTSGAKVPERRXYLPQTTSQXPPEIXSKL

SEQ ID NO: 24132 - protein, 346 aa, Zea mays subsp. mays
  misc_feature (1)..(346): Ceres Seq. ID no. 12419042
  misc_feature (225)..(225): Xaa is any aa, unknown or other
  misc_feature (226)..(226): Xaa is any aa, unknown or other
  misc_feature (305)..(305): Xaa is any aa, unknown or other
  misc_feature (329)..(329): Xaa is any aa, unknown or other
  misc_feature (338)..(338): Xaa is any aa, unknown or other
  misc_feature (343)..(343): Xaa is any aa, unknown or other
MAAVVCVTGAGGFIGSWIVKILLARGYAVRGTSRREAADPKNAHLWALDGAAERLTMLQVDLLDRASLRAAFRGCDGVIHTASPMHDNPEEIIEPIIAGTRNVVEAAADAGVRRLVLSSTIGTMYMDPRRDPDAPLGDSSWSDLEYCKSTENWYCYAKTVAEQGAWEAARARGLDLAVVIPVVVLGELLQPSMNTSTLHILKYLTGQTKEYVNESHAYVHVMDAXXAHVRVLEAPGAGGRRYVCAERTLHRGELCRILAGLFPEYPIPTRCKDQVNPPKKGYKFTNQPLKDLGVKFTPVHGYLYXAVKSLQDKGFLPKTSGAKVPERRXYLPQTTSQXPPEIXSKL

SEQ ID NO: 24133 - protein, 290 aa, Zea mays subsp. mays
  misc_feature (1)..(290): Ceres Seq. ID no. 12419043
  misc_feature (169)..(169): Xaa is any aa, unknown or other
  misc_feature (170)..(170): Xaa is any aa, unknown or other
  misc_feature (249)..(249): Xaa is any aa, unknown or other
  misc_feature (273)..(273): Xaa is any aa, unknown or other
  misc_feature (282)..(282): Xaa is any aa, unknown or other
  misc_feature (287)..(287): Xaa is any aa, unknown or other
MLQVDLLDRASLRAAFRGCDGVIHTASPMHDNPEEIIEPIIAGTRNVVEAAADAGVRRLVLSSTIGTMYMDPRRDPDAPLGDSSWSDLEYCKSTENWYCYAKTVAEQGAWEAARARGLDLAVVIPVVVLGELLQPSMNTSTLHILKYLTGQTKEYVNESHAYVHVMDAXXAHVRVLEAPGAGGRRYVCAERTLHRGELCRILAGLFPEYPIPTRCKDQVNPPKKGYKFTNQPLKDLGVKFTPVHGYLYXAVKSLQDKGFLPKTSGAKVPERRXYLPQTTSQXPPEIXSKL

SEQ ID NO: 24134 - DNA, 1824 bp, Zea mays subsp. mays
  misc_feature (1)..(1824): Ceres Seq. ID no. 12419130
aggccgccccgcctgccttgctctcccagcgcgctcgtgtagtcgtcgccatcttcgcttctcttctccacatttctgcgctatcccggcgtacggctgcgatccatacacgcccaatccaaaccctacctaaaactccgcctcgtgcctccgggctcacactcgtaggcacggagtgccgttccgtggtgggtggaatcaccaaaaatgccctccgtccaccaccacctcctcctcctgacgctcgccgccttggccgtggcggcagccaccgctagcgccggcggggacccgccggcaatcgaggcgcagttcgacgcctggtgcgcggagcacgggaaggcctacgccacgcccgaggagcgcgccgcgcggctggccgtgttcgcggacaacgccgccttcgtcgccgcgcacaacgcccgtgcaggcgccaacgccgctggcggcggcggcggcggcgccgcgcccccgtcctacacgctcgcgctcaacgccttcgcggacctcacgcacgaggagttccgcgccgcgcgcctcggccgcatcgcgccgggggcggcgctccggagccgcgccgcgcccgtgtactggggcctcggcggcggtgccgcggtgcctgatgcgctggactggaggaagagcggggccgtcaccaaggtcaaggaccaaggcagctgcggagcttgttggagtttttccgcaacaggtgctatggaaggaataaacaaaataaagacaggctctctggtcagtctttctgaacaggaactaattgactgtgacagatcttataatagtggctgtggtggtggcctcatggattatgcttataagtttgtgataaaaaatggtggaattgacacagaggaggactacccctatcgtgaagcagatgggacatgtaacaagaacaagctgaaaaagcgagttgtgactattgatggttacactgatgtaccttccaacaaagaagatttgttacttcaggctgttgcccagcaacctgttagtgtaggaatatgtggtagcgctagagcatttcagttatactaccagggtatctttgatggtccatgtccgacatctcttgatcatgctgtgttaatcgttggctatggttctgaaggtggcaaggattactggattgtgaaaaactcttggggtgaaagttggggaatgaagggctatatgcatatgcatcgaaacactggtgattccaagggtgtctgcggtataaacatgatggcatcatttcctaccaaaacaagcccgaatcctcctccttcaccaggcccaggtcctaccaaatgcagtctgctcacatactgtcctgagggatccacctgttgttgctcatggcgtgtcttgggcttttgcctttcctggagctgttgcgaactggacaatgcagtttgctgcaaggataaccggtactgctgccctcatgactatcctgtttgtgatacaggtcgcgggcagtgtctcaaggccagcggcaacttctctgctatagaaggaatcaggaggaaacagtctttctctaaagctccctcgtggactggctggctggagttgatggaccaatgagcgtataatcagacatggatagtagcttcatgcaagttgtgcgatccgtaggtcggtcattggccttgttccagtgccctgccacattcctgtacgcctactgcccgctgcgttgcaccgagatgcccttattttctctttattattgaaccctatggtgtaaagtttcacgattgtacatgtatgtcacacttgtattggcctatgcattagacgtctccattagtttacctt

SEQ ID NO: 24135 - protein, 460 aa, Zea mays subsp. mays
  misc_feature (1)..(460): Ceres Seq. ID no. 12419131
MPSVHHHLLLLTLAALAVAAATASAGGDPPAIEAQFDAWCAEHGKAYATPEERAARLAVFADNAAFVAAHNARAGANAAGGGGGGAAPPSYTLALNAFADLTHEEFRAARLGRIAPGAALRSRAAPVYWGLGGGAAVPDALDWRKSGAVTKVKDQGSCGACWSFSATGAMEGINKIKTGSLVSLSEQELIDCDRSYNSGCGGGLMDYAYKFVIKNGGIDTEEDYPYREADGTCNKNKLKKRVVTIDGYTDVPSNKEDLLLQAVAQQPVSVGICGSARAFQLYYQGIFDGPCPTSLDHAVLIVGYGSEGGKDYWIVKNSWGESWGMKGYMHMHRNTGDSKGVCGINMMASFPTKTSPNPPPSPGPGPTKCSLLTYCPEGSTCCCSWRVLGFCLSWSCCELDNAVCCKDNRYCCPHDYPVCDTGRGQCLKASGNFSAIEGIRRKQSFSKAPSWTGWLELMDQ

SEQ ID NO: 24136 - protein, 291 aa, Zea mays subsp. mays
  misc_feature (1)..(291): Ceres Seq. ID no. 12419132
MEGINKIKTGSLVSLSEQELIDCDRSYNSGCGGGLMDYAYKFVIKNGGIDTEEDYPYREADGTCNKNKLKKRVVTIDGYTDVPSNKEDLLLQAVAQQPVSVGICGSARAFQLYYQGIFDGPCPTSLDHAVLIVGYGSEGGKDYWIVKNSWGESWGMKGYMHMHRNTGDSKGVCGINMMASFPTKTSPNPPPSPGPGPTKCSLLTYCPEGSTCCCSWRVLGFCLSWSCCELDNAVCCKDNRYCCPHDYPVCDTGRGQCLKASGNFSAIEGIRRKQSFSKAPSWTGWLELMDQ

SEQ ID NO: 24137 - protein, 256 aa, Zea mays subsp. mays
  misc_feature (1)..(256): Ceres Seq. ID no. 12419133
MDYAYKFVIKNGGIDTEEDYPYREADGTCNKNKLKKRVVTIDGYTDVPSNKEDLLLQAVAQQPVSVGICGSARAFQLYYQGIFDGPCPTSLDHAVLIVGYGSEGGKDYWIVKNSWGESWGMKGYMHMHRNTGDSKGVCGINMMASFPTKTSPNPPPSPGPGPTKCSLLTYCPEGSTCCCSWRVLGFCLSWSCCELDNAVCCKDNRYCCPHDYPVCDTGRGQCLKASGNFSAIEGIRRKQSFSKAPSWTGWLELMDQ

SEQ ID NO: 24138 - DNA, 1974 bp, Zea mays subsp. mays
  misc_feature (1)..(1974): Ceres Seq. ID no. 12419180
atcgctctctcctttgcacccctagctagctagtactactgctgctcctccgacttgctcttcgcgcagcaggacggagaaacaagaaccatccctccccctaccggctaccgctgctactcatggtcgcgcgcactgcctcctggtgccgccgcgtatgatccagacatgaatagggcgcacagcagcagctccaagctcatcaacgagaagctcgtggaacaccggatctccactgcgaagcactgcccccactgcggcgagaaaatcgacagcaaaccggattgggtggggctgccggcaggcgtcaagttcgatccaactgaccaggagctgatcgagcacctcgaggcgaaagtgaaggatgaaggctcgagatctcaccctctcatcgacgagttcatacccacaatagatggggaggacggcatatgttacacccaccccgagaaacttccaggtgtgacaagggatggcctaagcaagcacttcttccaccggccgtccaaggcctacacgacgggcacgaggaagaggaggaagatacagacggagtgcgacgtccacaagggggagacgaggtggcacaagaccggcaagacgcggccggtgatggtgaacggccgtcagaaggggtgcaagaagatattggtgctgtacaccaacttcggcaagcaccgcaagccggagaagacgaactgggtcatgcaccagtaccacctcggcgacctagaagaggagaaggagggggagctggtggtgtgcaagatcttctaccagacgcaacccaggcagtgcagctggtcctccgaccggggcgccgccgccactgccttggcagcaacggcggcggcagcggcggcggcggcgcaggagcagcataggagggatagtggcagtggcagctgctcgtctagggaccacgaggtgtcagccacatcgttcccagccggatacacagtcaccacggcggtcgatatgcagcagcatatgaagcagcctgcggaccatttcagcttcgcgcctttcaggaaaaccttcgatcaggaggttggtataggtggtgatcaggtgccatctaatcagcttggacgttcagagccgcatcatgccggcctggggcagcagccacacggcccggtgctcgcgacgaagacggctgtgcctgctacagctttcctgatcagtaggccatcgaaccctgtctcgactatggtgccacctgcaatgcagcacgcatcagttgttctcgatcatgatcagttccatgtgccagcaatccttctccatcaccatgacaaatttcagcaacagcaccaacagtcacagccacaacaaaagcttgaccgcagatctgccggcttggaagaactgataatgggctgcacgtcgtccacaagcacaaaaggagatgcttccattgctcacccccaagagacagaatggccttacccgtactggccacctgacaaccaagatcatcatggatagtagcaacagggacctggtaaatagtggcgatgatgtgaatgctgaaggaacactaaccgcaaccactttcactggaatggtttttgtctgcttgaatatgcagcgttgctttcttggagaatgtacacctacaatagtggggaaagaacagagaaaaaacatatctctgtagatctccctcaataaagaaatgaggataaaactagttaacagtgtgagctctccaagacagaagagacaaaatggccaacgaaaagagaagggggaaagaccgacgggaggaaaggtactgtgtgtgctgacattgaagggatcatgtgtggaccgttagatgtattagagcaccttaatcaagtataactataatcagtttacagtttaccacagtttttttattcgtactacctgttttccaattgtaaaaactagtggcattgtttgcatgtacattaacccttttaatttctttcagtttctaaactg

SEQ ID NO: 24139 - protein, 440 aa, Zea mays subsp. mays
  misc_feature (1)..(440): Ceres Seq. ID no. 12419181
MNRAHSSSSKLINEKLVEHRISTAKHCPHCGEKIDSKPDWVGLPAGVKFDPTDQELIEHLEAKVKDEGSRSHPLIDEFIPTIDGEDGICYTHPEKLPGVTRDGLSKHFFHRPSKAYTTGTRKRRKIQTECDVHKGETRWHKTGKTRPVMVNGRQKGCKKILVLYTNFGKHRKPEKTNWVMHQYHLGDLEEEKEGELVVCKIFYQTQPRQCSWSSDRGAAATALAATAAAAAAAAQEQHRRDSGSGSCSSRDHEVSATSFPAGYTVTTAVDMQQHMKQPADHFSFAPFRKTFDQEVGIGGDQVPSNQLGRSEPHHAGLGQQPHGPVLATKTAVPATAFLISRPSNPVSTMVPPAMQHASVVLDHDQFHVPAILLHHHDKFQQQHQQSQPQQKLDRRSAGLEELIMGCTSSTSTKGDASIAHPQETEWPYPYWPPDNQDHHG

SEQ ID NO: 24140 - protein, 292 aa, Zea mays subsp. mays
  misc_feature (1)..(292): Ceres Seq. ID no. 12419182
MVNGRQKGCKKILVLYTNFGKHRKPEKTNWVMHQYHLGDLEEEKEGELVVCKIFYQTQPRQCSWSSDRGAAATALAATAAAAAAAAQEQHRRDSGSGSCSSRDHEVSATSFPAGYTVTTAVDMQQHMKQPADHFSFAPFRKTFDQEVGIGGDQVPSNQLGRSEPHHAGLGQQPHGPVLATKTAVPATAFLISRPSNPVSTMVPPAMQHASVVLDHDQFHVPAILLHHHDKFQQQHQQSQPQQKLDRRSAGLEELIMGCTSSTSTKGDASIAHPQETEWPYPYWPPDNQDHHG

SEQ ID NO: 24141 - protein, 261 aa, Zea mays subsp. mays
  misc_feature (1)..(261): Ceres Seq. ID no. 12419183
MHQYHLGDLEEEKEGELVVCKIFYQTQPRQCSWSSDRGAAATALAATAAAAAAAAQEQHRRDSGSGSCSSRDHEVSATSFPAGYTVTTAVDMQQHMKQPADHFSFAPFRKTFDQEVGIGGDQVPSNQLGRSEPHHAGLGQQPHGPVLATKTAVPATAFLISRPSNPVSTMVPPAMQHASVVLDHDQFHVPAILLHHHDKFQQQHQQSQPQQKLDRRSAGLEELIMGCTSSTSTKGDASIAHPQETEWPYPYWPPDNQDHHG

SEQ ID NO: 24142 - DNA, 863 bp, Zea mays subsp. mays
  misc_feature (1)..(863): Ceres Seq. ID no. 12419219
accaaaccgcttcgcttgctcctcagctccctgtcgcacacaccttacgccgggtaggcaggagcaggactcccactgtcccaccgagccagaggccctccgatccgagcgagcaggggcgccaccgtctccaatggctcggccacagcaacggtaccgcggcgtgcggcaacgccactggggctcctgggtctccgatatccgccaccctctcctgaagacgaggatctggctgggcaccttcgagacggccgaggacgcggcgcgcgcctacgacgaggcggcgcgcatcatgtgcggccctcgcgtgcgcaccaacttccccgaggacgccgccgccgacggacaggggcagccggccgcgacggcgcttctctcccccgcgctcgtcgccaagctccaccgctttcaaccttgcgtccgtgcaggcggcgcgcggcagggccgatgactccgcggcagccgccgcctcggcgcccgccgtgctngcacgcatcgcgccgatgcctgccagcaatgccagcatgcgaatcgcccccttgacgtcggcggctgtggctgcggggcactggagcggcgactttctcgaggagcagtacgtggaccagatgatcgaggagcttctagactccaacttctctgtggagatctactagtttcacccgactcctctgctccgtctcatctctctgtttggtttcgtcagctcagctcagctagggagtgtagtgagttagtagtgagttagtacagtagtatcattagccatgccaggatgaacttgaggtttctttggttagactcttgagcagtntgatgtgtatacggtagcgtcgtcagagcataaaattttttcnnctgcc

SEQ ID NO: 24143 - protein, 149 aa, Zea mays subsp. mays
  misc_feature (1)..(149): Ceres Seq. ID no. 12419220
PNRFACSSAPCRTHLTPGRQEQDSHCPTEPEALRSERAGAPPSPMARPQQRYRGVRQRHWGSWVSDIRHPLLKTRIWLGTFETAEDAARAYDEAARIMCGPRVRTNFPEDAAADGQGQPAATALLSPALVAKLHRFQPCVRAGGARQGR

SEQ ID NO: 24144 - protein, 105 aa, Zea mays subsp. mays
  misc_feature (1)..(105): Ceres Seq. ID no. 12419221
MARPQQRYRGVRQRHWGSWVSDIRHPLLKTRIWLGTFETAEDAARAYDEAARIMCGPRVRTNFPEDAAADGQGQPAATALLSPALVAKLHRFQPCVRAGGARQGR

SEQ ID NO: 24145 - DNA, 1131 bp, Zea mays subsp. mays
  misc_feature (1)..(1131): Ceres Seq. ID no. 12419222
aagtcgcctccgcgcctccgcatataggcagcgtcgcccctctccgctttcccgaattagcgccaccgccacctccgcctccgatcccgcctctcccgggaacgaagccgagccgcccgaatcgccctccacccatccacccacccatatagccgggccccggaccgctctccaccggctcgcgcccccgacccctccgccgtccgccgccgcatcgcgtgggagggggaggaggaggaggaggaggaggccatggccgctgccgtagcttgcaggcgcgcggcgctcctgcacgggcaccagcagtggccgcagcggtgggcggccgcgccctgcccccgctccatctcgcagctcgtcaagaccaacggccgccgcgccttcctcgtagacaccctcgccctggtcaggaagctggagtcgcagggcgtgccccaccaagcaggcggaggcgatcacctccgccatcacggaggtcctcaacgacagcctcgagagcatctccgagtccttcgtctccaaggccgagatgcagaagagtgagatgctgcaggagtccaatatctccaagttcaagtcccaagtgcagagctcgcaggaaaaccatttctctttactacagcgggagactgagaaacttcgcggagatattgataagatgaggagtgaactgaagtatgagatcgacaaggtcaccgcagaacagcgattggatctgaatcttgaaagagggcgcatacgtgatgagcttgccaagcagaatgaggaaaccactgagcttaccacaaagcttgacaaggaaatccactcactgaaggcccagttggaggcagcaaagtacgatgtcatcaagtactgcataggtaccattgtttcgatctcagccgtcggcctcgccgtcctccgcatcgtgatgtgaaggcagcaaagcaaatacgttctttggttttacccatattcgtcgcccgtccgtggaaacccgcaagaagagaataggttctaattctgttcctagtttttaaaggggacaaaacgtgctcaggggagggggacacttggtagtagggagatgttgctcaaacttgtaaaaatagattgcccgtggaagaaatgcatccgaaatgattctcc

SEQ ID NO: 24146 - protein, 129 aa, Zea mays subsp. mays
  misc_feature (1)..(129): Ceres Seq. ID no. 12419223
MQKSEMLQESNISKFKSQVQSSQENHFSLLQRETEKLRGDIDKMRSELKYEIDKVTAEQRLDLNLERGRIRDELAKQNEETTELTTKLDKEIHSLKAQLEAAKYDVIKYCIGTIVSISAVGLAVLRIVM

SEQ ID NO: 24147 - protein, 124 aa, Zea mays subsp. mays
  misc_feature (1)..(124): Ceres Seq. ID no. 12419224
MLQESNISKFKSQVQSSQENHFSLLQRETEKLRGDIDKMRSELKYEIDKVTAEQRLDLNLERGRIRDELAKQNEETTELTTKLDKEIHSLKAQLEAAKYDVIKYCIGTIVSISAVGLAVLRIVM

SEQ ID NO: 24148 - protein, 96 aa, Zea mays subsp. mays
  misc_feature (1)..(96): Ceres Seq. ID no. 12419225
MAAAVACRRAALLHGHQQWPQRWAAAPCPRSISQLVKTNGRRAFLVDTLALVRKLESQGVPHQAGGGDHLRHHGGPQRQPREHLRVLRLQGRDAEE

SEQ ID NO: 24149 - DNA, 1288 bp, Zea mays subsp. mays
  misc_feature (1)..(1288): Ceres Seq. ID no. 12419233
aagagaagaatgtggcgtgaacagagagacctgaccctgaggcaggtgaggaggtccagggagcaatgggtttcggcgtagtgcacctcctcgacgcggtgttccgccgcatgttccggtcggccggcctccgcccgggctcggccacggtgaacgccgaagacgacacggtcatccactactgggcccacccgtccctcctccgcccgccgccctccgactccgactccgagcagcggcagccggtggtggtgctgatccacgggttcgggccggacccgacgtggcagtgggcggcgcangcgggcccgctgtcgcgccacttccgcctggtggtgccgacgctgctcttcttcggggcgtccggcacgcgcgcgcccgcgcggtccgacgcctcccaggccnccgcgctcgccgcgctgctcgcgggcccgggccagcagcacctcccgggcctcggcgccggccgcaccgtgcacgtggtgggcnccagctacggcggcctcgtggcgtaccacctcgcccgggagctggagcggcaaggcggcggcgttcgcgtcggcaaggtggtgntgtgcgactcggacgcgtncaagggcgccgaggncgaccgcgcgctggcggccaggagcggcgtggcggaggtggcggagctgctggcgcccgccgacacccgggcgctgcgccgcctcatggcggtctgcgcccaccgccccgtcaagtacgtccccgagtgcctcctccgcgacatgctccggagatacttcgcggncaagagggaggagaagatggcgctcatcagagggatcgccaccggagaaggcttcgagcttgctccgctgcctcaggaggtgctcatcatctggggagagttcgaccagatcttcccggtggacaaagcgcacaaggtgaaagagaagctcggggagaaggcgacggtgaaggtgatccccaacgcggggcacctgccgcagcaggaggacagcaagctnttcaaccgagtcctcctcgacttcctgctgcgcccttngtccaccgccgcctgacctccaacggcagcgcccaagccaaacagcttagcttgctcggctgccttcttctttggttatccattatcatcctgccgcgcgcgtttccggcgttcttgtttgtttgtagagtggaggaggcgctgccgccttctgtttttgtttgagggtggcaatgtgcagatcctacctgtttggttgtgctgtgaaaaaaagttgctgtgggctgtggaaaaagattttatcattattttatcatt

SEQ ID NO: 24150 - protein, 326 aa, Zea mays subsp. mays
  misc_feature (1)..(326): Ceres Seq. ID no. 12419234
  misc_feature (79)..(79): Xaa is any aa, unknown or other
  misc_feature (114)..(114): Xaa is any aa, unknown or other
  misc_feature (142)..(142): Xaa is any aa, unknown or other
  misc_feature (170)..(170): Xaa is any aa, unknown or other
  misc_feature (176)..(176): Xaa is any aa, unknown or other
  misc_feature (181)..(181): Xaa is any aa, unknown or other
  misc_feature (236)..(236): Xaa is any aa, unknown or other
  misc_feature (309)..(309): Xaa is any aa, unknown or other
  misc_feature (322)..(322): Xaa is any aa, unknown or other
MGFGVVHLLDAVFRRMFRSAGLRPGSATVNAEDDTVIHYWAHPSLLRPPPSDSDSEQRQPVVVLIHGFGPDPTWQWAAXAGPLSRHFRLVVPTLLFFGASGTRAPARSDASQAXALAALLAGPGQQHLPGLGAGRTVHVVGXSYGGLVAYHLARELERQGGGVRVGKVVXCDSDAXKGAEXDRALAARSGVAEVAELLAPADTRALRRLMAVCAHRPVKYVPECLLRDMLRRYFAXKREEKMALIRGIATGEGFELAPLPQEVLIIWGEFDQIFPVDKAHKVKEKLGEKATVKVIPNAGHLPQQEDSKXFNRVLLDFLLRPXSTAA

SEQ ID NO: 24151 - protein, 311 aa, Zea mays subsp. mays
  misc_feature (1)..(311): Ceres Seq. ID no. 12419235
  misc_feature (64)..(64): Xaa is any aa, unknown or other
  misc_feature (99)..(99): Xaa is any aa, unknown or other
  misc_feature (127)..(127): Xaa is any aa, unknown or other
  misc_feature (155)..(155): Xaa is any aa, unknown or other
  misc_feature (161)..(161): Xaa is any aa, unknown or other
  misc_feature (166)..(166): Xaa is any aa, unknown or other
  misc_feature (221)..(221): Xaa is any aa, unknown or other
  misc_feature (294)..(294): Xaa is any aa, unknown or other
  misc_feature (307)..(307): Xaa is any aa, unknown or other
MFRSAGLRPGSATVNAEDDTVIHYWAHPSLLRPPPSDSDSEQRQPVVVLIHGFGPDPTWQWAAXAGPLSRHFRLVVPTLLFFGASGTRAPARSDASQAXALAALLAGPGQQHLPGLGAGRTVHVVGXSYGGLVAYHLARELERQGGGVRVGKVVXCDSDAXKGAEXDRALAARSGVAEVAELLAPADTRALRRLMAVCAHRPVKYVPECLLRDMLRRYFAXKREEKMALIRGIATGEGFELAPLPQEVLIIWGEFDQIFPVDKAHKVKEKLGEKATVKVIPNAGHLPQQEDSKXFNRVLLDFLLRPXSTAA

SEQ ID NO: 24152 - DNA, 1375 bp, Zea mays subsp. mays
  misc_feature (1)..(1375): Ceres Seq. ID no. 12419315
aacagcgagctgcagccacgcgcgccggcgaccaaacaaagccagctaggcaccggcaagggagcggacggagcaagcgcgcggccgatcgatcgagcttcagcttgagctccagcaagatggtgaacttcatcgaggcgcagaagccgctgctgtcacggttgatgaagatggccgggctccgccccattgagatggagctggagccgggcacgaccatgcacgtgtgggcgcccaagcaccacgtgggcaagaagggcaccaccatcagcccgctcgagcctaccgccgccaagaagaagaagaagaataggaagagccccgagtcgaggcccaacgtggtgctcatccacggcttcgccgccgagggcaacgtgacgtggcagttcaacttcggcgtgctggtgtcgcgctacaacctgtacatcccggaccttatgttcttcggcaagtcgtcgacgtcgagcgcggaccggtccccggacttccaggccgagtgcgtggcgggggcgctggcgcggctgggcgtggcgcggtgcgacgtggtcgggttcagctacgggggcatggtggcgttcaagctggccgaggcgcggccggggctggtgcggtcgctgtgcgtgtccgggtccgtggtggccatgacggacgcggtgaacagggagaccatggagcggctgggggccgggtcgtccgccgagctgctcatgcccgacacgctcaaggggctcaaggcgctcctctccgtctccatgtacaggaagatgtggttccccgacaggttctacaaggactacctcaaggtgatgttcaccaacaggaaggagaggatggagctgttgcaggggctgataaccagcaacacggacgccaagatccctacattccaacagaaaataatgctgctgtggggcgaggaggacaagatcttcgacatcgagctcgccaggaagatgaaagagcagctgggcgacaactgcttcctgtacggcatccgcaaggccggccacctgctccacgtcgagcggccgtgcgcctacaaccgccagctccagaggtggttcgcctacgtcaactccacagaagaccacgtccaggccagatgatcgacacgccccgccccgctcctgctgccgctgctgctgctgctacatggagatcatgcatgcatatatacacgtcccgtctcagttgatattacctttgcattgttgttgttcgttattgatgttgttattagctgttgctcccaagaaagaagacgctggcagggcagccaacacactgtatgtatgtagtgtgttgcgctggccatggtttcagtacgtgtactctcgatcaagtgtagaccgacctcggtcgtacgtgtcgcctc

SEQ ID NO: 24153 - protein, 367 aa, Zea mays subsp. mays
  misc_feature (1)..(367): Ceres Seq. ID no. 12419316
QRAAATRAGDQTKPARHRQGSGRSKRAADRSSFSLSSSKMVNFIEAQKPLLSRLMKMAGLRPIEMELEPGTTMHVWAPKHHVGKKGTTISPLEPTAAKKKKKNRKSPESRPNVVLIHGFAAEGNVTWQFNFGVLVSRYNLYIPDLMFFGKSSTSSADRSPDFQAECVAGALARLGVARCDVVGFSYGGMVAFKLAEARPGLVRSLCVSGSVVAMTDAVNRETMERLGAGSSAELLMPDTLKGLKALLSVSMYRKMWFPDRFYKDYLKVMFTNRKERMELLQGLITSNTDAKIPTFQQKIMLLWGEEDKIFDIELARKMKEQLGDNCFLYGIRKAGHLLHVERPCAYNRQLQRWFAYVNSTEDHVQAR

SEQ ID NO: 24154 - protein, 328 aa, Zea mays subsp. mays
  misc_feature (1)..(328): Ceres Seq. ID no. 12419317
MVNFIEAQKPLLSRLMKMAGLRPIEMELEPGTTMHVWAPKHHVGKKGTTISPLEPTAAKKKKKNRKSPESRPNVVLIHGFAAEGNVTWQFNFGVLVSRYNLYIPDLMFFGKSSTSSADRSPDFQAECVAGALARLGVARCDVVGFSYGGMVAFKLAEARPGLVRSLCVSGSVVAMTDAVNRETMERLGAGSSAELLMPDTLKGLKALLSVSMYRKMWFPDRFYKDYLKVMFTNRKERMELLQGLITSNTDAKIPTFQQKIMLLWGEEDKIFDIELARKMKEQLGDNCFLYGIRKAGHLLHVERPCAYNRQLQRWFAYVNSTEDHVQAR

SEQ ID NO: 24155 - protein, 313 aa, Zea mays subsp. mays
  misc_feature (1)..(313): Ceres Seq. ID no. 12419318
MKMAGLRPIEMELEPGTTMHVWAPKHHVGKKGTTISPLEPTAAKKKKKNRKSPESRPNVVLIHGFAAEGNVTWQFNFGVLVSRYNLYIPDLMFFGKSSTSSADRSPDFQAECVAGALARLGVARCDVVGFSYGGMVAFKLAEARPGLVRSLCVSGSVVAMTDAVNRETMERLGAGSSAELLMPDTLKGLKALLSVSMYRKMWFPDRFYKDYLKVMFTNRKERMELLQGLITSNTDAKIPTFQQKIMLLWGEEDKIFDIELARKMKEQLGDNCFLYGIRKAGHLLHVERPCAYNRQLQRWFAYVNSTEDHVQAR

SEQ ID NO: 24156 - DNA, 1328 bp, Zea mays subsp. mays
  misc_feature (1)..(1328): Ceres Seq. ID no. 12419342
atgtttttattttgctttggtttgtcactcttttttctcttactattttgatttaaagttttgagctactagcagttgaggatgaactaatttttatattttttgataaagtgctgatatcgatttaccattaatttttctatggatgaggtatgccagttattttgttaagctaatgctgcttctcgtgcaggtcaaagtaaagagaaggggagatgacaaaaaatatattgccaaggttttagctaggggtgttgaatgcgatcttgcgttgctatctgttgagaatgaagagttctggagaggaacagaggcacttcattttggtcgtttgccatgccttcaggattcagtaactgttgtgggatatcctcttggtggagacactatatctgtaacaaaaggcgttgtgtcgcgcattgaggtcactccatatgcacatggaacatcagatcttcttggcattcaaattacgcagccataaatcctggaaacagtgggggaccagcctttaatgatcaaggggagtgcattggtgtggcatttcaggtgtacaggtcagatgaagctgaaaatattggatatgttattccaactacagttgtatcccatttcttaaatgactatcagaaaaatggaaagtacacaggatttccatgtttgggtgtcttacttcagaaattggaaaatccggcattgcgtgaaagcttaaaagtaccttcaagcgagggtgttcttgttcgtcgggtggaacctactgctccagcaagcagtgttttgcgaaagggagatgtaattgttagctttgatggtatcgcagtaggatgtgaagcaacagtaccatttcggtccacagaacggattgctttccgctatctcacaagccaaaagtatgcaggcgatattgcccagctaggaatcattcgtgatggcaattccatgaaagtccagactattttgcagccaagaaaacatttagtgccgtttcatgttgaggggggacaaccttcttatctgattgttgctggccttgtcttcacacctttaacagaaccatttatagaggaggaatgcgaagatacactagggctgaaattgttagcaaaagcacgttactctctagcaacctttgagggggaggaaattgttattgtgtcgcaggttttggcgcacgaggtcaacattgggtatgagcacatgggcaatcaacaagtcatgaaactaaacggaaccacaataaagaatatccatcaccttgctcatcttgtggacacctgtaaagacaagttcctgacgttcgaattcgaagacgacttccttgttgtttt

SEQ ID NO: 24157 - protein, 129 aa, Zea mays subsp. mays
  misc_feature (1)..(129): Ceres Seq. ID no. 12419343
MKVQTILQPRKHLVPFHVEGGQPSYLIVAGLVFTPLTEPFIEEECEDTLGLKLLAKARYSLATFEGEEIVIVSQVLAHEVNIGYEHMGNQQVMKLNGTTIKNIHHLAHLVDTCKDKFLTFEFEDDFLVV

SEQ ID NO: 24158 - protein, 112 aa, Zea mays subsp. mays
  misc_feature (1)..(112): Ceres Seq. ID no. 12419344
MRYASYFVKLMLLLVQVKVKRRGDDKKYIAKVLARGVECDLALLSVENEEFWRGTEALHFGRLPCLQDSVTVVGYPLGGDTISVTKGVVSRIEVTPYAHGTSDLLGIQITQP

SEQ ID NO: 24159 - protein, 102 aa, Zea mays subsp. mays
  misc_feature (1)..(102): Ceres Seq. ID no. 12419345
MLLLVQVKVKRRGDDKKYIAKVLARGVECDLALLSVENEEFWRGTEALHFGRLPCLQDSVTVVGYPLGGDTISVTKGVVSRIEVTPYAHGTSDLLGIQITQP

SEQ ID NO: 24160 - DNA, 795 bp, Zea mays subsp. mays
  misc_feature (1)..(795): Ceres Seq. ID no. 12419382
agaaggaagatgcatggcagatctatgcggcgcactacattgtgatctgatgatgcagttcaaaaaaccaaaaagtaaatgcaatgcagctgcagctacaaggaatcgtcatctttgtgagagccttgcagacagttgctttcctattaatcaaggtcttgctgccagccgtcttcatgaatttttcttgcgccagttttgtgatgctcacacttgcagtaagggaacaaaacctttccccaaaggtggcaggaaacaaacaaacaggttatacctcgctctctccattttgacgctgatacttttgccgctgttctatctaattgtgttcctgcaccagagggaaatgaggaaaggtacccaagatctaaaacggttttcgaaaattgggcagaagaaaaagccatcctagtgtccaacagtcacaacgttctcgagcccatggagccaaggatgagctggataaggaacgtggtatgcagtgtgaaatgtttttatgggcagggaagaaatttccctcatttccaggacgggaacaatgtccgcaggtcgaggaatgctggcttcgaccttttcttttctttttctttcttttttgtttcgacatgtagatgcaaacttcgagaggcaagcatgtgtggtctttgtgagattacggcgatatgaagtcctattgataatttaaggatttttgggaggcctcaggcttaaaaaccaatgtcagtaaatgtagtatgactcctatccaatgtaatgatcaatgtgttggtgaggcacaatctttattcccttgct

SEQ ID NO: 24161 - protein, 136 aa, Zea mays subsp. mays
  misc_feature (1)..(136): Ceres Seq. ID no. 12419383
EGRCMADLCGALHCDLMMQFKKPKSKCNAAAATRNRHLCESLADSCFPINQGLAASRLHEFFLRQFCDAHTCSKGTKPFPKGGRKQTNRLYLALSILTLILLPLFYLIVFLHQREMRKGTQDLKRFSKIGQKKKPS

SEQ ID NO: 24162 - protein, 132 aa, Zea mays subsp. mays
  misc_feature (1)..(132): Ceres Seq. ID no. 12419384
MADLCGALHCDLMMQFKKPKSKCNAAAATRNRHLCESLADSCFPINQGLAASRLHEFFLRQFCDAHTCSKGTKPFPKGGRKQTNRLYLALSILTLILLPLFYLIVFLHQREMRKGTQDLKRFSKIGQKKKPS

SEQ ID NO: 24163 - protein, 120 aa, Zea mays subsp. mays
  misc_feature (1)..(120): Ceres Seq. ID no. 12419385
MMQFKKPKSKCNAAAATRNRHLCESLADSCFPINQGLAASRLHEFFLRQFCDAHTCSKGTKPFPKGGRKQTNRLYLALSILTLILLPLFYLIVFLHQREMRKGTQDLKRFSKIGQKKKPS

SEQ ID NO: 24164 - DNA, 3057 bp, Zea mays subsp. mays
  misc_feature (1)..(3057): Ceres Seq. ID no. 12419621
gaaattagttctcgtgttttcggccgtgcgctcgctggcgcaagccgcgcgaatcggatcgctgtccgcctctccatttcccctcgtccgcacacccgagcctcgcttccgcctcccacttcccaccaggccaccaccccgtccggcgatcccgatcgcgagacgagggtagcgagatcgagaggattgtcgcggctgccgggcggcgctccagttccaagtcgaggcgaggaactacacgtgtgatatctgcaactcatatggctgggacccacaagaagcgaatggaagaccgttttggtagttttttctcatttgatgaagattctgaaagtgaggacatatcgctggatgagttggaggaggaacttaaagagcacaagaactgtgatgtactagtaactattttaaccaatggtgaaaaacaacgaggcatggcaacattgattgagggcgacctaggccatactgaagaagctcttattcaagattatattgaggataatgacagccttgttctgttgcacgatcagattcatgactgtgacgttattttgtcacaaataggattaattcttagtgggtttcagacccatatatgttcgataagctcggaaatcagaagcctccaggagaaatcctgggatataagcttgaaattgaagaaccgcaaggtcaggacaagcctgcatagtgcataccatatgttaacatcaataatttcctgtattttcacaaattagcttacaggtaacattaattttcatagcaatttgattgatttttcctctactatattgcaagtgtaacatacagtgcacaatacacttatttattttagctttgttataattaaatgcgctgacatgaaagcttaaacatgctcagttggttgagacaaagcttgctgggtttgttgaagagatagttgctcctcctggtttggtaaatattcttgttaatggagaggtaaatgagggttatgccagaagtctggagatccttagcagaaagttgaaatttgttcaagtggatccgttgattaatgcatcaaaagctctgaatgatattaagcaagaattggaaaggcttcgacaaaaggcactatccaagatttccagccatattatggagattttctttgctatgagaaaccctgggactaatatacagatattgcaacaaaatttgcttcagaagcacaggtatctcgttctgtttcttaaagagcatggttccgagacatatggtgatttgtgtgcatcatatgttgatacaatgaacaaggtgctgagtacatactttcatgtgtatgtagaagcattggagaagttgaagctagaaattggtgtacccagtgattttaatggacatgataccagtatcatcgatattataataagaggaagggagcatttgagaaatcatggtttcatgttttcgttaggtgaacgtgcaaatattctaaggagattcatcaacctggcttggttccacatatatctcaaggcaactctcgtaaatacccatatgaagttattttcaggagccttcagaagcttctgatggacactgctagctctgagtatcttttcatggaatcattctttggagaagagtcactgttttatcaagtttttgaaggaccttttgctgttattgatcaacatttggatattactcttccaaattgtcatgatgctgtatgcctcatgctcataatctgcataactaggaagcaccaggtaagaaggtataaacacaatgtattaattgtgtaatcaacaaaagaaaatgtgttattgctgatcacacaaactgtaattacttcaaagttaatttcttaaaccacaagattatggatcatttctaaactatttttctttctattatagcacattttgcttgttagttcaccatattgtcctttttttgtttcagttggttatgtgcaacagacagctttcttgtcttgataactattttgataaggttcgttacgagctacaattttgtatgcgtgaaaaatcactctgccgtcaacttccacttgttctgttttttagtttcttatcttgattgtgagttgtgacactcatatctgctttaggctctgatgtatctctggccacgtttcaaggtagtatttgacatgtatattcaaagcttatatcagtgtgatgcgaaaacattatggatagatggtacccatccacaccatattgcaaggtgctacgtggagttcacagcatcccttgttcaacttaatgctgaatgcggagatggtcagcttgatatgaacttggaacgcttgcagtcagctatcgaattcctacttgttaggcttgcccaaacttttacaactaccaagctgcagcacctttttcttctaaataattatgacatggccatctctgtcctgaaggaaactggcgatgaagccaaaaaactgcaaaaatattttgaagagaagttagaaagtaacatgatggcttttgtggataatttgctgatggaacatttcagtgacttacttcggtttgtgaggagtcatgtctcggaagacctggtatcttacaccgagaacaccaatattgccgacgttgagccagttgtgaagaactttgccatgaagtggagaattgctctagagctcatgcacaacgaagtcataacttcttgtactaaccttttgtctgggatggcaattctaaaagcagctatgactcagttgcttaatgactataacaggctctcagagtgcgtcaaaaaaatcacagggggttcaactttgaacagacatatggtttccatcacatctatttcatatgaaatcaggaaatactcaagaacactctagctgcttataatggtgtcaaagaaattctgataaaaaggttaaacaaaaatatcaccatcgagatttttttgaacattccaaccaggcaaatgctggttgcatttttagtttgatttttgaaattaggtattgtaaatgggacagctcgaacatgttttaatttttgtttgtgactattattgctcatttttatatgc

SEQ ID NO: 24165 - protein, 247 aa, Zea mays subsp. mays
  misc_feature (1)..(247): Ceres Seq. ID no. 12419622
MYLWPRFKVVFDMYIQSLYQCDAKTLWIDGTHPHHIARCYVEFTASLVQLNAECGDGQLDMNLERLQSAIEFLLVRLAQTFTTTKLQHLFLLNNYDMAISVLKETGDEAKKLQKYFEEKLESNMMAFVDNLLMEHFSDLLRFVRSHVSEDLVSYTENTNIADVEPVVKNFAMKWRIALELMHNEVITSCTNLLSGMAILKAAMTQLLNDYNRLSECVKKITGGSTLNRHMVSITSISYEIRKYSRTL

SEQ ID NO: 24166 - protein, 235 aa, Zea mays subsp. mays
  misc_feature (1)..(235): Ceres Seq. ID no. 12419623
MYIQSLYQCDAKTLWIDGTHPHHIARCYVEFTASLVQLNAECGDGQLDMNLERLQSAIEFLLVRLAQTFTTTKLQHLFLLNNYDMAISVLKETGDEAKKLQKYFEEKLESNMMAFVDNLLMEHFSDLLRFVRSHVSEDLVSYTENTNIADVEPVVKNFAMKWRIALELMHNEVITSCTNLLSGMAILKAAMTQLLNDYNRLSECVKKITGGSTLNRHMVSITSISYEIRKYSRTL

SEQ ID NO: 24167 - protein, 187 aa, Zea mays subsp. mays
  misc_feature (1)..(187): Ceres Seq. ID no. 12419624
MNLERLQSAIEFLLVRLAQTFTTTKLQHLFLLNNYDMAISVLKETGDEAKKLQKYFEEKLESNMMAFVDNLLMEHFSDLLRFVRSHVSEDLVSYTENTNIADVEPVVKNFAMKWRIALELMHNEVITSCTNLLSGMAILKAAMTQLLNDYNRLSECVKKITGGSTLNRHMVSITSISYEIRKYSRTL

SEQ ID NO: 24168 - DNA, 1181 bp, Zea mays subsp. mays
  misc_feature (1)..(1181): Ceres Seq. ID no. 12419652
ggcacgtactcacagctctcaggcaggctttcttcataccacacacacacacaaagagaacacagtcgtcgtccgctccgaaatggcctacgcgacgcagcatcggcgccgagccattcttaccctggccgccatcgccctcctcctggcgtctcccatggcagccgccgccgccgccgccgccgggtgcgagggcgacaagctccccgcgggccggatctacgcgcactgcgcggcgctcccgtccctcggcgccaggctgcactggacgtacgacgccaagacggggtcgctgtccgtggcgttcgtggccaagccggcgggcgcgggcggcgccgggtgggtgtcgtgggcgatcaacccggcgggcgagggcatgaagggcgcgcaggcgctgctggccctcaagagccccgccgccccctcgtcgtcctacgtagtcaacacctacaacgtgaccgggtacaccgcgctcggngccgcgtncacgcccatcgcgtacagggccgcggagctcgccgccgacganagcggcggcggggaggtgcgcatctacgggaagctgcagctggcacccggcctggagaaggtgagccacatctggcaggtgggatccacggtggccaacggcgcgccggtcaagcacgcgttcgacacggccaacctccaggccaagggcacgctcgtcctctccggcgccgcgctgcccgtggaggcggcgccggctcccgccccggtgggctctggtggtgcctcgcccgcgaagggaggaggcgatagtggagccgccccgtctactggcgggagcagcaactcggcggctgctaaggccaccacctacgtgtctgtttcagtgctcacgctgctggcggcggcattggcaggtgcaggttcctttgcgatgtaacaaacagctccgagtcatacggccaagtagttcctgccttcttagcggtggcacgtacgtacgctgacaagcgggagagagatgacacaatcacacaacacacacatgagattaagattattagcatcctcttgtcttgctagctgatgcatatgcctgcgcgcaatcctgttctcgttagctgttggcacgcgttcggtttcgccatctgatttaccctgtatgttgtgttgttgttccgagtgttgtctcgttcttaaatacgtagtacggc

SEQ ID NO: 24169 - protein, 301 aa, Zea mays subsp. mays
  misc_feature (1)..(301): Ceres Seq. ID no. 12419653
  misc_feature (159)..(159): Xaa is any aa, unknown or other
  misc_feature (162)..(162): Xaa is any aa, unknown or other
  misc_feature (176)..(176): Xaa is any aa, unknown or other
ARTHSSQAGFLHTTHTHKENTVVVRSEMAYATQHRRRAILTLAAIALLLASPMAAAAAAAAGCEGDKLPAGRIYAHCAALPSLGARLHWTYDAKTGSLSVAFVAKPAGAGGAGWVSWAINPAGEGMKGAQALLALKSPAAPSSSYVVNTYNVTGYTALXAAXTPIAYRAAELAADXSGGGEVRIYGKLQLAPGLEKVSHIWQVGSTVANGAPVKHAFDTANLQAKGTLVLSGAALPVEAAPAPAPVGSGGASPAKGGGDSGAAPSTGGSSNSAAAKATTYVSVSVLTLLAAALAGAGSFAM

SEQ ID NO: 24170 - protein, 274 aa, Zea mays subsp. mays
  misc_feature (1)..(274): Ceres Seq. ID no. 12419654
  misc_feature (132)..(132): Xaa is any aa, unknown or other
  misc_feature (135)..(135): Xaa is any aa, unknown or other
  misc_feature (149)..(149): Xaa is any aa, unknown or other
MAYATQHRRRAILTLAAIALLLASPMAAAAAAAAGCEGDKLPAGRIYAHCAALPSLGARLHWTYDAKTGSLSVAFVAKPAGAGGAGWVSWAINPAGEGMKGAQALLALKSPAAPSSSYVVNTYNVTGYTALXAAXTPIAYRAAELAADXSGGGEVRIYGKLQLAPGLEKVSHIWQVGSTVANGAPVKHAFDTANLQAKGTLVLSGAALPVEAAPAPAPVGSGGASPAKGGGDSGAAPSTGGSSNSAAAKATTYVSVSVLTLLAAALAGAGSFAM

SEQ ID NO: 24171 - protein, 259 aa, Zea mays subsp. mays
  misc_feature (1)..(259): Ceres Seq. ID no. 12419655
  misc_feature (160)..(160): Xaa is any aa, unknown or other
  misc_feature (162)..(162): Xaa is any aa, unknown or other
  misc_feature (177)..(177): Xaa is any aa, unknown or other
GTYSQLSGRLSSYHTHTQREHSRRPLRNGLRDAASAPSHSYPGRHRPPPGVSHGSRRRRRRRVRGRQAPRGPDLRALRGAPVPRRQAALDVRRQDGVAVRGVRGQAGGRGRRRVGVVGDQPGGRGHEGRAGAAGPQEPRRPLVVLRSQHLQRDRVHRARXRXHAHRVQGRGARRRRXRRRGGAHLREAAAGTRPGEGEPHLAGGIHGGQRRAGQARVRHGQPPGQGHARPLRRRAARGGGAGSRPGGLWWCLAREGRRR

SEQ ID NO: 24172 - DNA, 1054 bp, Zea mays subsp. mays
  misc_feature (1)..(1054): Ceres Seq. ID no. 12419744
aaaaaagatgtcgaactccacgatcgatcactgatcgacatcgctgtccgctgcccggcttcctttctctccccatatccatatcagatcctgcggcgaattccttccaactccaggatcgagagcacacgcagatggcgaggcacccgcgcgcgccgctgctccggcgtctgctcctcctggcggccctcgcggcctcctgctcctactacctcctcttcctgcaggcgcaggcctccgtcccgccgcggtacgacgggttcgcctacggcggcggcgccgcgacggcctggaaggacgccgtcctcgtcgaggcctttctcgacccgctctgccccgacagccgcgacgcctggcagccgctgaagctcgccgtcgagcgatacgcgccgcgggtctcactcatcgtccacccgttcccactaccataccacacatatgcattctatgcctgccgcgcgctttacatagctaacaagttgaattcatcatcgacatatccattgctggagctgttcttcaagaaccaggaaaagttctacaattctgccacatcatctctctcgggcccttccgtagctctaggaatgtcgaagatggctgcgcagactgttggtaactcagtatccgagtttctgtcgggcttcagcgatgggaagacagactcggcagcgagagtttcattcaagtacgggtgcacgaggggagtctttggcgcgccgttcttctttgtgaatggcttcctccagcctgggggcggatcgcctatcgactacagcacgtggatcggnatcctanacccccttgtttcccagaacggtgaacggatcgagatgtttacttcgatgtaagtgattgaagtggccttgctacagaggatacggtcgtacagatgtttcgctagtgccgacggcggacaagcaaacagctattatgcaattgcaaactgtgtgtaagctctgcagtggtaaatagcatcccactttgctcgttgtactgttaagctagcagttgtgtgctagctagtatatcggggtaagtatgtgaagaagct

SEQ ID NO: 24173 - protein, 282 aa, Zea mays subsp. mays
  misc_feature (1)..(282): Ceres Seq. ID no. 12419745
  misc_feature (263)..(263): Xaa is any aa, unknown or other
  misc_feature (266)..(266): Xaa is any aa, unknown or other
KRCRTPRSITDRHRCPLPGFLSLPISISDPAANSFQLQDREHTQMARHPRAPLLRRLLLLAALAASCSYYLLFLQAQASVPPRYDGFAYGGGAATAWKDAVLVEAFLDPLCPDSRDAWQPLKLAVERYAPRVSLIVHPFPLPYHTYAFYACRALYIANKLNSSSTYPLLELFFKNQEKFYNSATSSLSGPSVALGMSKMAAQTVGNSVSEFLSGFSDGKTDSAARVSFKYGCTRGVFGAPFFFVNGFLQPGGGSPIDYSTWIXILXPLVSQNGERIEMFTSM

SEQ ID NO: 24174 - protein, 238 aa, Zea mays subsp. mays
  misc_feature (1)..(238): Ceres Seq. ID no. 12419746
  misc_feature (219)..(219): Xaa is any aa, unknown or other
  misc_feature (222)..(222): Xaa is any aa, unknown or other
MARHPRAPLLRRLLLLAALAASCSYYLLFLQAQASVPPRYDGFAYGGGAATAWKDAVLVEAFLDPLCPDSRDAWQPLKLAVERYAPRVSLIVHPFPLPYHTYAFYACRALYIANKLNSSSTYPLLELFFKNQEKFYNSATSSLSGPSVALGMSKMAAQTVGNSVSEFLSGFSDGKTDSAARVSFKYGCTRGVFGAPFFFVNGFLQPGGGSPIDYSTWIXILXPLVSQNGERIEMFTSM

SEQ ID NO: 24175 - DNA, 990 bp, Zea mays subsp. mays
  misc_feature (1)..(990): Ceres Seq. ID no. 12419778
gcacgagaccattacctagaacatcctaatcgaaaaaaaccatcacaagctctagttttccagctctgcagcacacaagctagttaagctcctgcaacctccaagaaactaggcaatcgtttcctcctctgcttcagtatctccccttccagcagtagctaagctgccatatggcgacaagcaggcttgcgctcgtgtccgtgtttgccgcagccgtcctgctgggcatggcgtcggcggcgacctacaacgtcggcgagccgggcgggtcctgggacctgcgtaccaactacggcacctgggtctcctccaagaggttccacccgggtgaccagatcgtgttcaagtactcgccccaggcgcacgacgtggtggaggtgaacaaggcggactacgactcctgctcaatcgccagccccgtcgccacccacaactccggcaacgacgccatcgccctggcctcccccggcacccgctacttcatctgcggcttccctggccactgcgacgcgggcatgaagatccagatcaacgtcgtgcccagcgccaactccctcggccccgccagcgctcccgccgccaactctcccgtctctcccccgcccatgtccgcgccctcttccgccgctaccaaggccaccggtttcggcgcccttgccgccgtcatgatcgccgcaggcctcatggcttactagatactctgtcgcttgctgcgtacatttagttttccttagatattatatatacgttgtattgtattcttttgagagatcagagttcagacgaatgacatggcatacatgtatctacgtaaagacagatgactagtttatacattattcatattgtatatcattcaggtttcgctcttcggtgtatgtatcgatattcattcagatagatagagatagagatgactagtaatttcctggtgtagttttctctttgttgttccgattatagatatgaatgtaatgaatgattagtatt

SEQ ID NO: 24176 - protein, 174 aa, Zea mays subsp. mays
  misc_feature (1)..(174): Ceres Seq. ID no. 12419779
MATSRLALVSVFAAAVLLGMASAATYNVGEPGGSWDLRTNYGTWVSSKRFHPGDQIVFKYSPQAHDVVEVNKADYDSCSIASPVATHNSGNDAIALASPGTRYFICGFPGHCDAGMKIQINVVPSANSLGPASAPAANSPVSPPPMSAPSSAATKATGFGALAAVMIAAGLMAY

SEQ ID NO: 24177 - protein, 155 aa, Zea mays subsp. mays
  misc_feature (1)..(155): Ceres Seq. ID no. 12419780
MASAATYNVGEPGGSWDLRTNYGTWVSSKRFHPGDQIVFKYSPQAHDVVEVNKADYDSCSIASPVATHNSGNDAIALASPGTRYFICGFPGHCDAGMKIQINVVPSANSLGPASAPAANSPVSPPPMSAPSSAATKATGFGALAAVMIAAGLMAY

SEQ ID NO: 24178 - DNA, 2545 bp, Zea mays subsp. mays
  misc_feature (1)..(2545): Ceres Seq. ID no. 12419843
gcacgagaccattacctagaacatcctaatcgaaaaagtcgctactagctagatagccatatcaccagcatgtggaggctgacggtggccgagggcggcggcccgtggctgcgctcgacgaacggcttcgtggggcgggcggtgtgggagttcgaccctgacctcggtacgccggaggagcgcgacgaggtagagagggtacgccaggagttctccgaccaccgcttccagaggagagagtcggccgacctcctcatgcgcatgcagtgcgcaaagcagaacagatctcaacgtcgtgatctgccacgcatcaagcttggggaggatgagcacgtcactgaagaaattgtactgagctccttgaggtcggctctggaccagttctcttcactgcaagccagcgatgggcactggcctggtgatttcagcgggattatgttcatcatgcctggtttgatatttgccttgtatgtcactggatcactgaatgttgtcatatcaccagaacatcggcatgagatttgccgctacatctacaaccaccagaacgaagatggtggatgtggcacacttatcttgggttcgagcaccatgtttggcacatgctcaaactacatcaccttgaggcttctcggtgaggagccatacgccaacaacagtgtgttggctaaagggcgtgcttggattctatcccatggtggtgcaaccttgattcctcagtggggaaaaatatggctttcggtacttggattgtttgattggtcaggaaataatccaattttccctgaactatggtccattccccagtttcttccatttcatccagggaaattctggtgctttgcccgtatggtatatctaccaatggcttatctttatggcaagaaatttgttggaccaattacaccaactatattggcactaagagaggaaatctatgacactccttatggaaagattgactggagtgatgctcgtagtaaatgcgcaaaggaggacctcatctgtccacgcacactgttgcagaatgttatttggacttcactttataggtgtgtggaaccagtattgagcagttggcctatcaacaagctgagagagagagctctgggaaacatcatggagcatatccattatgaagatgagaacacacaatacctatgcatatgtcctgtgaataaggctctaaacatggtctgctgctgggtagaagatccaaattcagatgcattcaagcgtcaccttgcaaggataccagacttcttgtggatttcagaagatggcatgaaggcacaagtatatgatggctgccagagctgggagacatcattcataattcaagcattttgcgctacagatcttgttaatgactatggttcaactcttcagagagcctatgagtttatgaaaaattcacaggtcatgaggaaccatcctggtgaccaacgttattggcatcgccatagatcgaagggttcatggacactttcatctgcagacaatggatgggctgtatctgacactacaggagaagcacttaaggctgtactgttgctgtcaaagatctcaaacaaaaacaaccttgttggggatccaatagaaagagaaaggttgcatgacgctattgattgccttctatcttttgcgaacaaagatggcaccttttctacatatgagtgcaaaagaacttattcttggttagagattctaagtccttgtgagactttcccaaacattgttgtcgattatccttacccagaatgcacttcatcagtgctccaagctctgatattgttcaaagacttatatcctggttaccgcacagaagagatagaagcattagttagaagtgcagcaacgtttattgagaccaaacaacaagaagacggttcatggttaggtaattggggtatatgtttcacctacggggccttcttttcgattaaaggtttagtcgcttctggaagaacgtacaagaacagcccttgcatacggaaagcatgccacttcatattgtcgaagcagctcagtactggtggatggggagaaagccatatcgctattgaaactcaggtgtatgtaaatctcaaaggtgaccgtgctcacgctgtgaataccgcctgggcaatgctcgctttaatttatgctggacagtttgaacgagatccaacgccattacattgtgctgcaaaggaattgatcaacatgcaactggagacaggagagtttcctcagcaagagcatgtaggatgcttcaactgcagcctctacttcaattacccaagctaccgcaacttgttccccatctgggctctcggtgagtaccatcgtggccttcgtgcaaagaaagacaattgagtccgtgtgtgtatatatatagtacgtatagcattgtgaggaataaaacaggttgcgtcggtggtgagtgcgcaaaaacaagatgtacttttatgtaggtgtaccacagtgtacaatgttggtcgttgttagactgtaaggctatcatgacgtgtatattgtaatatatatactacgtgattggtgc

SEQ ID NO: 24179 - protein, 762 aa, Zea mays subsp. mays
  misc_feature (1)..(762): Ceres Seq. ID no. 12419844
MWRLTVAEGGGPWLRSTNGFVGRAVWEFDPDLGTPEERDEVERVRQEFSDHRFQRRESADLLMRMQCAKQNRSQRRDLPRIKLGEDEHVTEEIVLSSLRSALDQFSSLQASDGHWPGDFSGIMFIMPGLIFALYVTGSLNVVISPEHRHEICRYIYNHQNEDGGCGTLILGSSTMFGTCSNYITLRLLGEEPYANNSVLAKGRAWILSHGGATLIPQWGKIWLSVLGLFDWSGNNPIFPELWSIPQFLPFHPGKFWCFARMVYLPMAYLYGKKFVGPITPTILALREEIYDTPYGKIDWSDARSKCAKEDLICPRTLLQNVIWTSLYRCVEPVLSSWPINKLRERALGNIMEHIHYEDENTQYLCICPVNKALNMVCCWVEDPNSDAFKRHLARIPDFLWISEDGMKAQVYDGCQSWETSFIIQAFCATDLVNDYGSTLQRAYEFMKNSQVMRNHPGDQRYWHRHRSKGSWTLSSADNGWAVSDTTGEALKAVLLLSKISNKNNLVGDPIERERLHDAIDCLLSFANKDGTFSTYECKRTYSWLEILSPCETFPNIVVDYPYPECTSSVLQALILFKDLYPGYRTEEIEALVRSAATFIETKQQEDGSWLGNWGICFTYGAFFSIKGLVASGRTYKNSPCIRKACHFILSKQLSTGGWGESHIAIETQVYVNLKGDRAHAVNTAWAMLALIYAGQFERDPTPLHCAAKELINMQLETGEFPQQEHVGCFNCSLYFNYPSYRNLFPIWALGEYHRGLRAKKDN

SEQ ID NO: 24180 - protein, 700 aa, Zea mays subsp. mays
  misc_feature (1)..(700): Ceres Seq. ID no. 12419845
MRMQCAKQNRSQRRDLPRIKLGEDEHVTEEIVLSSLRSALDQFSSLQASDGHWPGDFSGIMFIMPGLIFALYVTGSLNVVISPEHRHEICRYIYNHQNEDGGCGTLILGSSTMFGTCSNYITLRLLGEEPYANNSVLAKGRAWILSHGGATLIPQWGKIWLSVLGLFDWSGNNPIFPELWSIPQFLPFHPGKFWCFARMVYLPMAYLYGKKFVGPITPTILALREEIYDTPYGKIDWSDARSKCAKEDLICPRTLLQNVIWTSLYRCVEPVLSSWPINKLRERALGNIMEHIHYEDENTQYLCICPVNKALNMVCCWVEDPNSDAFKRHLARIPDFLWISEDGMKAQVYDGCQSWETSFIIQAFCATDLVNDYGSTLQRAYEFMKNSQVMRNHPGDQRYWHRHRSKGSWTLSSADNGWAVSDTTGEALKAVLLLSKISNKNNLVGDPIERERLHDAIDCLLSFANKDGTFSTYECKRTYSWLEILSPCETFPNIVVDYPYPECTSSVLQALILFKDLYPGYRTEEIEALVRSAATFIETKQQEDGSWLGNWGICFTYGAFFSIKGLVASGRTYKNSPCIRKACHFILSKQLSTGGWGESHIAIETQVYVNLKGDRAHAVNTAWAMLALIYAGQFERDPTPLHCAAKELINMQLETGEFPQQEHVGCFNCSLYFNYPSYRNLFPIWALGEYHRGLRAKKDN

SEQ ID NO: 24181 - protein, 698 aa, Zea mays subsp. mays
  misc_feature (1)..(698): Ceres Seq. ID no. 12419846
MQCAKQNRSQRRDLPRIKLGEDEHVTEEIVLSSLRSALDQFSSLQASDGHWPGDFSGIMFIMPGLIFALYVTGSLNVVISPEHRHEICRYIYNHQNEDGGCGTLILGSSTMFGTCSNYITLRLLGEEPYANNSVLAKGRAWILSHGGATLIPQWGKIWLSVLGLFDWSGNNPIFPELWSIPQFLPFHPGKFWCFARMVYLPMAYLYGKKFVGPITPTILALREEIYDTPYGKIDWSDARSKCAKEDLICPRTLLQNVIWTSLYRCVEPVLSSWPINKLRERALGNIMEHIHYEDENTQYLCICPVNKALNMVCCWVEDPNSDAFKRHLARIPDFLWISEDGMKAQVYDGCQSWETSFIIQAFCATDLVNDYGSTLQRAYEFMKNSQVMRNHPGDQRYWHRHRSKGSWTLSSADNGWAVSDTTGEALKAVLLLSKISNKNNLVGDPIERERLHDAIDCLLSFANKDGTFSTYECKRTYSWLEILSPCETFPNIVVDYPYPECTSSVLQALILFKDLYPGYRTEEIEALVRSAATFIETKQQEDGSWLGNWGICFTYGAFFSIKGLVASGRTYKNSPCIRKACHFILSKQLSTGGWGESHIAIETQVYVNLKGDRAHAVNTAWAMLALIYAGQFERDPTPLHCAAKELINMQLETGEFPQQEHVGCFNCSLYFNYPSYRNLFPIWALGEYHRGLRAKKDN

SEQ ID NO: 24182 - DNA, 1914 bp, Zea mays subsp. mays
  misc_feature (1)..(1914): Ceres Seq. ID no. 12419897
gcacgagaccattacctagaacatcctaatcaaaaaagttcttctgatctctgacttctgagcgaggagtggacgagtggtgtgccgtcgtccggttcccgttggtttggcgatgaggcgcgctcgcggtcgccgcgggctgctgcttctcctcggcgtggcgctctcggcggctgcgctgctccgtggctgcgcggggcagcaaggggaggacggctcggacgcccctgcggcggcggcggcggagacggcccccatggaggagaaggagcgcagggcgctgtacgccgccatcgagagcttcgtcggcaaggggtggaacggctccggggctctaccccagacccctgcggctggtctccccatccagggggtgtcatgtgatctcttcaatggcctgtggtacccaacagtgatgagcattggcccagtccttgacaactcgctgcagtgcggccccgacgccaagttcagcgcccagctgttcgacctgaggcgcctccggacgctgtctttctacagctgcttcccggcgagcaaccccacggccatcccgaccggcagctgggagaagctggcggggacgctggagacgctggagttccgcaccaacccgggcctgaacggcgccatcccggcgtccctcggccgcctggccagcctgcagtcgctggtgctcgtggagaacaacctgacggggcccgtgcccgcggagctgggcgcgctgtcgaggctgagacggctggtgctgtccgggaacgggctgtcggggccgatcccggtgacactcggtggcctcacggggctcctgaagatggacctgagcagcaacctgctgcagggcagcatcccgccggagctcgcggggctcaggagcctcacgctgctggacctcaggaacaacagcctcaccggcgggctgcccccagttcgtgcagggcatggcgtcgctgcaggacctgctgctctcgaacaacccgctgggcggcggcctgccgcagtccggctggggggcgctggcgggcctggccacgctggacctgtccaacgtcggcctcgtgggcgccataccggggtccatggcggccctgacggggctccggttcctggcgctggaccacaaccgcctgacgggggccgtgccgcccgagctcgcccggctgcccagcatcggcgcgctgtacctgaacggcaacaacctgacggggacgctggagttctcggccgggttctaccagcgcatggggcggcggttcgcgtcgtgggacaaccccgggctgtgctacaacgtcgcggccgtggacgcggcccacgcgccgtcgggcgtggtggtgtgcaaggacctgcaggagcccagcgtgggcggcggcgcgcgggacggggacggggacggggacgcggaggaggacgggacgaagcccgaggcgggctccatcctcgtggcctcctcgtcgtccggcatgccggttggcagtgtcggtgggctcgggtacctggtggtggttcggggaatggcggctgcggttcttgggttggtgtccctcctacaatagcaagcaagcaggttcagaagaagaacacggagaaacttgaagtaatgctaggtaggttagcacgaagtagtttctgcgcgttctctgtgatcttttggcatttgtttttggctgctggtggcttaccatcgtcagatggtgacggaggaaggagggaacatggatctggatggtgtgagccacagattacattacagtagtagagtaaactatgagagttcttgtggactgaaggtgtgtagtggtggatagggtagcttctccggggttcttttgtgtgtaattagcctgtgtcgccctgtggtgtcatgttacaacagcaagtggaaatctaagctggttcgtccgttgttggagaatc

SEQ ID NO: 24183 - protein, 546 aa, Zea mays subsp. mays
  misc_feature (1)..(546): Ceres Seq. ID no. 12419898
MRRARGRRGLLLLLGVALSAAALLRGCAGQQGEDGSDAPAAAAAETAPMEEKERRALYAAIESFVGKGWNGSGALPQTPAAGLPIQGVSCDLFNGLWYPTVMSIGPVLDNSLQCGPDAKFSAQLFDLRRLRTLSFYSCFPASNPTAIPTGSWEKLAGTLETLEFRTNPGLNGAIPASLGRLASLQSLVLVENNLTGPVPAELGALSRLRRLVLSGNGLSGPIPVTLGGLTGLLKMDLSSNLLQGSIPPELAGLRSLTLLDLRNNSLTGGLPPVRAGHGVAAGPAALEQPAGRRPAAVRLGGAGGPGHAGPVQRRPRGRHTGVHGGPDGAPVPGAGPQPPDGGRAARARPAAQHRRAVPERQQPDGDAGVLGRVLPAHGAAVRVVGQPRAVLQRRGRGRGPRAVGRGGVQGPAGAQRGRRRAGRGRGRGRGGGRDEARGGLHPRGLLVVRHAGWQCRWARVPGGGSGNGGCGSWVGVPPTIASKQVQKKNTEKLEVMLGRLARSSFCAFSVIFWHLFLAAGGLPSSDGDGGRREHGSGWCEPQITLQ

SEQ ID NO: 24184 - protein, 498 aa, Zea mays subsp. mays
  misc_feature (1)..(498): Ceres Seq. ID no. 12419899
MEEKERRALYAAIESFVGKGWNGSGALPQTPAAGLPIQGVSCDLFNGLWYPTVMSIGPVLDNSLQCGPDAKFSAQLFDLRRLRTLSFYSCFPASNPTAIPTGSWEKLAGTLETLEFRTNPGLNGAIPASLGRLASLQSLVLVENNLTGPVPAELGALSRLRRLVLSGNGLSGPIPVTLGGLTGLLKMDLSSNLLQGSIPPELAGLRSLTLLDLRNNSLTGGLPPVRAGHGVAAGPAALEQPAGRRPAAVRLGGAGGPGHAGPVQRRPRGRHTGVHGGPDGAPVPGAGPQPPDGGRAARARPAAQHRRAVPERQQPDGDAGVLGRVLPAHGAAVRVVGQPRAVLQRRGRGRGPRAVGRGGVQGPAGAQRGRRRAGRGRGRGRGGGRDEARGGLHPRGLLVVRHAGWQCRWARVPGGGSGNGGCGSWVGVPPTIASKQVQKKNTEKLEVMLGRLARSSFCAFSVIFWHLFLAAGGLPSSDGDGGRREHGSGWCEPQITLQ

SEQ ID NO: 24185 - protein, 445 aa, Zea mays subsp. mays
  misc_feature (1)..(445): Ceres Seq. ID no. 12419900
MSIGPVLDNSLQCGPDAKFSAQLFDLRRLRTLSFYSCFPASNPTAIPTGSWEKLAGTLETLEFRTNPGLNGAIPASLGRLASLQSLVLVENNLTGPVPAELGALSRLRRLVLSGNGLSGPIPVTLGGLTGLLKMDLSSNLLQGSIPPELAGLRSLTLLDLRNNSLTGGLPPVRAGHGVAAGPAALEQPAGRRPAAVRLGGAGGPGHAGPVQRRPRGRHTGVHGGPDGAPVPGAGPQPPDGGRAARARPAAQHRRAVPERQQPDGDAGVLGRVLPAHGAAVRVVGQPRAVLQRRGRGRGPRAVGRGGVQGPAGAQRGRRRAGRGRGRGRGGGRDEARGGLHPRGLLVVRHAGWQCRWARVPGGGSGNGGCGSWVGVPPTIASKQVQKKNTEKLEVMLGRLARSSFCAFSVIFWHLFLAAGGLPSSDGDGGRREHGSGWCEPQITLQ

SEQ ID NO: 24186 - DNA, 1853 bp, Zea mays subsp. mays
  misc_feature (1)..(1853): Ceres Seq. ID no. 12419992
atcgacgaacatttccacgaaaatctcgctgctctcgcgaaaaaaggacgccacccgcccttgcttgctctccagtttgcaccctggaggcaggtgcaggggcgctcctcgccagcgggcagtcaaccgcccgcgtcggccatggcggaggcggggaggcggacgcttgcgctggtgaacctggcggccatcatggagcgcgccgacgaggcgctgcngcccgcggtgtaccgggaggtgggcgcagcgctgggcgccacgcccgtggcactcggcgcgctcacgctctaccgctcagccgtgcaggccgcctgctacccgctggccgcctacgccgccgtgcgctacaaccgcgcccacgtagtcgccgttggggccgttctctgggccgccgccaccttcctcgtcgccgtctcagacacctttgcccagcaggtagcgatagctagatgtttgaatggtattggcctagcacttgtcaccccggcgatccaatctctggtggcagattgctctgatgacaacactcgaggcgccgcatttggatggcttcaacttacgggaaacattggttcaattattggtggtttgttttccctgatgcttgcacccaccacagtcatgggtattgccggctggcgtgttgcatttcacattgttgctgttataagcgttgtagtcggtgtgttggttggcctatttgcagtggaccctcatttcctccatgttgaaagtggcgagcagctgttacgcaagtctgcatgggcagagatgaaggatttggtgagagaagccaaggctgttgtgaagatctcatcgtttcagatcattgtggctcagggtgtcacaggctcgtttccatggtctgccctggcctttgccccaatgtggctggagttgatggggtttacgcacaacagaactgggctcctgatggtaacatttgcattggcaagctcacttggagggctgttaggtggaaagatgggggatcactttgctactcgcttcccgaattccggccgaatagtcctgtcgcagataagctcagcttctgctattccgttggctgctctgttgcttttggggctccctgataactcttctggttccttgcatggacttgtcatgtttatcatgggtctgagcatctcctggaatggtcctgcaactaacaacccgatatttgctgagattgtacctgagaggtcaaggacaagcatctatgcattggaccgttctttagagtcagttctagcttcattcgctccaccagttgttgggtttctagccgagcatgtctatgggtacaatcccgtcccctacggagctgcagataacaatgttggcagggataaatcaaatgctggcgccctagccaaagctctgtacacgtcgatcgccatccctatgctgctgtgctgcttcatctactccctgttgtaccggacgtacccacgagacagggagagggcaaggatggactctctgatcactccagagctccagcagattgaactggaaagatgtcatgggcaagcggattattattctggaaggaaggacaaggacggctctactgtcttcgatatggattacagaggaatcgacgcctatgatgacgagaagggattaatcgatcagcaggctaagcagagcggcaatgtcaagtggcacaggagtcattcacagaatttgtgacgtttttgccaaagtatcagtgctctcggatctgtacagaaaacgtgagtgagagtgagttacctctcgaaggacgattacatagggttgtttagatagactcagaagcatcagaacaattcggttatgttcagcattatatatatatatat

SEQ ID NO: 24187 - protein, 566 aa, Zea mays subsp. mays
  misc_feature (1)..(566): Ceres Seq. ID no. 12419993
  misc_feature (73)..(73): Xaa is any aa, unknown or other
IDEHFHENLAALAKKGRHPPLLALQFAPWRQVQGRSSPAGSQPPASAMAEAGRRTLALVNLAAIMERADEALXPAVYREVGAALGATPVALGALTLYRSAVQAACYPLAAYAAVRYNRAHVVAVGAVLWAAATFLVAVSDTFAQQVAIARCLNGIGLALVTPAIQSLVADCSDDNTRGAAFGWLQLTGNIGSIIGGLFSLMLAPTTVMGIAGWRVAFHIVAVISVVVGVLVGLFAVDPHFLHVESGEQLLRKSAWAEMKDLVREAKAVVKISSFQIIVAQGVTGSFPWSALAFAPMWLELMGFTHNRTGLLMVTFALASSLGGLLGGKMGDHFATRFPNSGRIVLSQISSASAIPLAALLLLGLPDNSSGSLHGLVMFIMGLSISWNGPATNNPIFAEIVPERSRTSIYALDRSLESVLASFAPPVVGFLAEHVYGYNPVPYGAADNNVGRDKSNAGALAKALYTSIAIPMLLCCFIYSLLYRTYPRDRERARMDSLITPELQQIELERCHGQADYYSGRKDKDGSTVFDMDYRGIDAYDDEKGLIDQQAKQSGNVKWHRSHSQNL

SEQ ID NO: 24188 - protein, 519 aa, Zea mays subsp. mays
  misc_feature (1)..(519): Ceres Seq. ID no. 12419994
  misc_feature (26)..(26): Xaa is any aa, unknown or other
MAEAGRRTLALVNLAAIMERADEALXPAVYREVGAALGATPVALGALTLYRSAVQAACYPLAAYAAVRYNRAHVVAVGAVLWAAATFLVAVSDTFAQQVAIARCLNGIGLALVTPAIQSLVADCSDDNTRGAAFGWLQLTGNIGSIIGGLFSLMLAPTTVMGIAGWRVAFHIVAVISVVVGVLVGLFAVDPHFLHVESGEQLLRKSAWAEMKDLVREAKAVVKISSFQIIVAQGVTGSFPWSALAFAPMWLELMGFTHNRTGLLMVTFALASSLGGLLGGKMGDHFATRFPNSGRIVLSQISSASAIPLAALLLLGLPDNSSGSLHGLVMFIMGLSISWNGPATNNPIFAEIVPERSRTSIYALDRSLESVLASFAPPVVGFLAEHVYGYNPVPYGAADNNVGRDKSNAGALAKALYTSIAIPMLLCCFIYSLLYRTYPRDRERARMDSLITPELQQIELERCHGQADYYSGRKDKDGSTVFDMDYRGIDAYDDEKGLIDQQAKQSGNVKWHRSHSQNL

SEQ ID NO: 24189 - protein, 502 aa, Zea mays subsp. mays
  misc_feature (1)..(502): Ceres Seq. ID no. 12419995
  misc_feature (9)..(9): Xaa is any aa, unknown or other
MERADEALXPAVYREVGAALGATPVALGALTLYRSAVQAACYPLAAYAAVRYNRAHVVAVGAVLWAAATFLVAVSDTFAQQVAIARCLNGIGLALVTPAIQSLVADCSDDNTRGAAFGWLQLTGNIGSIIGGLFSLMLAPTTVMGIAGWRVAFHIVAVISVVVGVLVGLFAVDPHFLHVESGEQLLRKSAWAEMKDLVREAKAVVKISSFQIIVAQGVTGSFPWSALAFAPMWLELMGFTHNRTGLLMVTFALASSLGGLLGGKMGDHFATRFPNSGRIVLSQISSASAIPLAALLLLGLPDNSSGSLHGLVMFIMGLSISWNGPATNNPIFAEIVPERSRTSIYALDRSLESVLASFAPPVVGFLAEHVYGYNPVPYGAADNNVGRDKSNAGALAKALYTSIAIPMLLCCFIYSLLYRTYPRDRERARMDSLITPELQQIELERCHGQADYYSGRKDKDGSTVFDMDYRGIDAYDDEKGLIDQQAKQSGNVKWHRSHSQNL

SEQ ID NO: 24190 - DNA, 955 bp, Zea mays subsp. mays
  misc_feature (1)..(955): Ceres Seq. ID no. 12420073
agccttcttctagtagctacggagtaccattcatcatcagagctagcaagctcaaagaaaactgagctcgtgtgtagtgagcagcgagtgagtgactggtgagtggtgaccatttcaagaacagcgccgcagcagggagctaattcgttcgttcatcgtcgcatcatcagtttgatccttcgaccccatagcttcctgcatcttcgagctcgtcactaaacaaccatgggaggaggcacgctggagtacctgtcggatctgctgggcggcggcggccggcgccggtacaagaagaggaagcagttccagacggtggagctcaaggtgcgcatggactgcgacggctgcgagatgaaagtcaggaacgcgctctccagcatgaaaggggtgcactccgtggagatcaaccgcaagcagtacaaggtgacggtgcaggggtacgtggagccgcacaaggtggtcaagcgggtgcaggccacggggaagaaggccgagatctggccctacgtgccctacagcctcgtcgcgcacccttacgccgcgccggcctacgacaagaaggcgccgccgggctacgtgcgcagggtcgacgccgtcatgcccgtctcctccacctacggcgggcccacggcggcggccggcccgccgcaggaggagcggctcgccaccatgttcagcgacgacaaccccaacgcgtgctctgtcatgtagattagaattactttttcttttcccctacacaccaccgtgggtgcatggcgcagctctcttcgaccacagaaaatgtaaaccgtacgtggatgcatgtcaaaaccatagatgatcgcctcggttggatgtctatgtccatcacatgtgcatgtacgtacgtagctgtatgttgttgtatgctttgtatattattgtttgatggaaccaaaagagagcatgcatgcgtggcagagagattttcccc

SEQ ID NO: 24191 - protein, 161 aa, Zea mays subsp. mays
  misc_feature (1)..(161): Ceres Seq. ID no. 12420074
MGGGTLEYLSDLLGGGGRRRYKKRKQFQTVELKVRMDCDGCEMKVRNALSSMKGVHSVEINRKQYKVTVQGYVEPHKVVKRVQATGKKAEIWPYVPYSLVAHPYAAPAYDKKAPPGYVRRVDAVMPVSSTYGGPTAAAGPPQEERLATMFSDDNPNACSVM

SEQ ID NO: 24192 - protein, 126 aa, Zea mays subsp. mays
  misc_feature (1)..(126): Ceres Seq. ID no. 12420075
MDCDGCEMKVRNALSSMKGVHSVEINRKQYKVTVQGYVEPHKVVKRVQATGKKAEIWPYVPYSLVAHPYAAPAYDKKAPPGYVRRVDAVMPVSSTYGGPTAAAGPPQEERLATMFSDDNPNACSVM

SEQ ID NO: 24193 - protein, 119 aa, Zea mays subsp. mays
  misc_feature (1)..(119): Ceres Seq. ID no. 12420076
MKVRNALSSMKGVHSVEINRKQYKVTVQGYVEPHKVVKRVQATGKKAEIWPYVPYSLVAHPYAAPAYDKKAPPGYVRRVDAVMPVSSTYGGPTAAAGPPQEERLATMFSDDNPNACSVM

SEQ ID NO: 24194 - DNA, 722 bp, Zea mays subsp. mays
  misc_feature (1)..(722): Ceres Seq. ID no. 12420098
acatcatcacttgcagcttcacaagcaaactaaaacacagcggctaaaggcacagctctccagcattcatccagaaagaagagaaggaaccaagccaacagccaaccatgatcagcgccaagagggtcgctcatctggctaagaagtggcagaggatggctgcccaagggaggcagcgcctcacctggggcggcgcaggcgcggcagcaaagcaagccggcgagagctgcagctccgtggcgagcaagggccactgcgccgtgtacacggccgacggggcgcggttcgaggtgcccctggcgtgcctcagcactctggtcttcagggagctcctggaaatgtcgcaggaggagttcggcttctccggcggcgatggcagtggcaggatcacgctgccctgcgacacggcggtcatggagtacgccatgtgcttgctcaggagaagcgcctctgctgagctagagcaggcgttccttagcaccgtggcggcaacgtcgtgctgccactacgccagccgtgtggcgctggcgacgtgcgtaggagccggccctgcgggttgctgtttagtgatgttcttcagtacgtgtgtataggtagtagataaagtattattattcggagccttctgatcctgcaactgatcaagtaaggtgttagtgttctgtacgtatgtatgattcgctggatatgattggcttatgaaaattgtgaggactacttac

SEQ ID NO: 24195 - protein, 161 aa, Zea mays subsp. mays
  misc_feature (1)..(161): Ceres Seq. ID no. 12420099
MISAKRVAHLAKKWQRMAAQGRQRLTWGGAGAAAKQAGESCSSVASKGHCAVYTADGARFEVPLACLSTLVFRELLEMSQEEFGFSGGDGSGRITLPCDTAVMEYAMCLLRRSASAELEQAFLSTVAATSCCHYASRVALATCVGAGPAGCCLVMFFSTCV

SEQ ID NO: 24196 - protein, 145 aa, Zea mays subsp. mays
  misc_feature (1)..(145): Ceres Seq. ID no. 12420100
MAAQGRQRLTWGGAGAAAKQAGESCSSVASKGHCAVYTADGARFEVPLACLSTLVFRELLEMSQEEFGFSGGDGSGRITLPCDTAVMEYAMCLLRRSASAELEQAFLSTVAATSCCHYASRVALATCVGAGPAGCCLVMFFSTCV

SEQ ID NO: 24197 - protein, 84 aa, Zea mays subsp. mays
  misc_feature (1)..(84): Ceres Seq. ID no. 12420101
MSQEEFGFSGGDGSGRITLPCDTAVMEYAMCLLRRSASAELEQAFLSTVAATSCCHYASRVALATCVGAGPAGCCLVMFFSTCV

SEQ ID NO: 24198 - DNA, 961 bp, Zea mays subsp. mays
  misc_feature (1)..(961): Ceres Seq. ID no. 12420159
attctcgtaagctgaccgtccgtccctgcaatgcaccaggcggaggcggaggcggaggcggtgctctgccagccggcgagcgagttcctgccggtgatgcaggaggtgtacgcggcgctggtggccaaggtggagcgcgccatcccgggcgccaaggtggaggacaacaagttctgcctgtcggtccacttccgttgcgtggaggaggcgtgctgggccgcgctcttcgagcaggtccgcgccgtgctgagggaccacccgggcctgcgcctcaccccagggccgcaaggtgctggaggtccgccccatgatccgctgggacaagggcaaggcgctggagttcctgctccacgccctcggcttcgccgccgacgccgaccgcgacgacgtcttccccatctacgtcggcgacgaccgcaccgacgaggacgccttcagggtgctgcgcgcgcgcgggcacggcgccgggatcctcgtgtccaggttccccaaggacaccagcgcgtccttcacgctacgcgaccccgccgaggtcaaggagttcctgcgcaagctcgtcggcgccaacgacgacagctgatgatccggcccgcgattcgtttccctttcccgccgtgaccagctccgatccgcctgtgtcaagccgctaactcaacctcggctacctacctgctgcaccggcagagggcttccttgttgttgcaactgcatctccatcgagcagcttgctttgggacaagaacagacctagctagtagtacagtagagcccttttgtatcttcgttttttttttggtttccatctctcttgttcatcatgcatgcctgctgttgtttaccatttgcctcggctgaaaaggcttgtattttcggcgcccttcccgcgaggcactgtaactagttgctttgtctgctgtacgtacgcgtaccatgttgaaataatatgtcatgttgaggagcc

SEQ ID NO: 24199 - protein, 195 aa, Zea mays subsp. mays
  misc_feature (1)..(195): Ceres Seq. ID no. 12420160
MHQAEAEAEAVLCQPASEFLPVMQEVYAALVAKVERAIPGAKVEDNKFCLSVHFRCVEEACWAALFEQVRAVLRDHPGLRLTPGPQGAGGPPHDPLGQGQGAGVPAPRPRLRRRRRPRRRLPHLRRRRPHRRGRLQGAARARARRRDPRVQVPQGHQRVLHATRPRRGQGVPAQARRRQRRQLMIRPAIRFPFPP

SEQ ID NO: 24200 - protein, 173 aa, Zea mays subsp. mays
  misc_feature (1)..(173): Ceres Seq. ID no. 12420161
MQEVYAALVAKVERAIPGAKVEDNKFCLSVHFRCVEEACWAALFEQVRAVLRDHPGLRLTPGPQGAGGPPHDPLGQGQGAGVPAPRPRLRRRRRPRRRLPHLRRRRPHRRGRLQGAARARARRRDPRVQVPQGHQRVLHATRPRRGQGVPAQARRRQRRQLMIRPAIRFPFPP

SEQ ID NO: 24201 - protein, 102 aa, Zea mays subsp. mays
  misc_feature (1)..(102): Ceres Seq. ID no. 12420162
SRKLTVRPCNAPGGGGGGGGALPAGERVPAGDAGGVRGAGGQGGARHPGRQGGGQQVLPVGPLPLRGGGVLGRALRAGPRRAEGPPGPAPHPRAARCWRSAP

SEQ ID NO: 24202 - DNA, 1388 bp, Zea mays subsp. mays
  misc_feature (1)..(1388): Ceres Seq. ID no. 12420175
gcacgagaccattacctagaacatcctaatcgaaaaataggataggaggtggtaaagagagagagccagaagcgaacgaggaggattcgagatggaggtggtggtgcctgtcatggcgccaagtgcgccgtgcagcccaagaaccgcggccatcgccggcgaccacctcccggcctactgctacttctactccagcgcgccgacgagcccgtccagggcgagctgcgcggggggcgccgccacgacgacgacgccgggctcgggcgacgaggccacgttcgacttcacgctcggcttcagcgggcagctgcaggaggccacgccgaccctcgcggccgccgacgagctcttcgagggcggcaggatccggccgctgaacacgccgcacccgagcattccgctggccgacgacgcctcgagctcctcctattccggtggccctcggtggtccccgagaagagccggcggcgcggatcgtcgggcggaggcgccgttggagagaggcaggtcgggctacagacccgccgcctcgacggcggcggcggcggcggcggcctcgtcgaggagtaggagggccacgcggtctctgtccccgttcagggtcaggggcggcggcggaggaggaggaggcgtggacgacgacgaggagtcccctccgtctccccgaacctntatgatgcggggctgcggcagcggcagcaagaagtggcggctcaaggacctgttcctgttccgcagcgcgtcggagggccgcgccaccaccggcggcggcagcaaggacccgctgttcaagtacaccatgctgtcgtcgtcccagacgctgcggaccggcggcgacggcagcgcgtccatgcgcaaggggagaggctccgcggcgtccgccagcgacatgccgatgccgtacgccgtgccccggggggcggcggcggccgaggacgcgcggcgccggacgacggccaccacgccgctgccgttccaccgcaacagcctcttcggctacctgcgctccaacccggcgatccacagcatcagcaggaagctcgggggcgggggcgggggcggcagcggcagcagcaaccatcccgtaccacccgccgcctccaactccagtagtcgtggcaggccgacatgatccgtccgcataccgcaagcagtcccgaaaccttgacggcgatgcagctcgacgcagaagtggccgccggcggccgtttttatctccccaccccactcctttttgttcccttgtaatttaatttgatgcgtattctttcgtttcatgtgaaccaacaaggtactagtagttagtgtagatatgtacgtacgtacgtacacggcggtatgtatgtatccccaaggatttctttgaagaaagaaaagataattagcgt

SEQ ID NO: 24203 - protein, 346 aa, Zea mays subsp. mays
  misc_feature (1)..(346): Ceres Seq. ID no. 12420176
  misc_feature (194)..(194): Xaa is any aa, unknown or other
MEVVVPVMAPSAPCSPRTAAIAGDHLPAYCYFYSSAPTSPSRASCAGGAATTTTPGSGDEATFDFTLGFSGQLQEATPTLAAADELFEGGRIRPLNTPHPSIPLADDASSSSYSGGPRWSPRRAGGADRRAEAPLERGRSGYRPAASTAAAAAAASSRSRRATRSLSPFRVRGGGGGGGGVDDDEESPPSPRTXMMRGCGSGSKKWRLKDLFLFRSASEGRATTGGGSKDPLFKYTMLSSSQTLRTGGDGSASMRKGRGSAASASDMPMPYAVPRGAAAAEDARRRTTATTPLPFHRNSLFGYLRSNPAIHSISRKLGGGGGGGSGSSNHPVPPAASNSSSRGRPT

SEQ ID NO: 24204 - protein, 339 aa, Zea mays subsp. mays
  misc_feature (1)..(339): Ceres Seq. ID no. 12420177
  misc_feature (187)..(187): Xaa is any aa, unknown or other
MAPSAPCSPRTAAIAGDHLPAYCYFYSSAPTSPSRASCAGGAATTTTPGSGDEATFDFTLGFSGQLQEATPTLAAADELFEGGRIRPLNTPHPSIPLADDASSSSYSGGPRWSPRRAGGADRRAEAPLERGRSGYRPAASTAAAAAAASSRSRRATRSLSPFRVRGGGGGGGGVDDDEESPPSPRTXMMRGCGSGSKKWRLKDLFLFRSASEGRATTGGGSKDPLFKYTMLSSSQTLRTGGDGSASMRKGRGSAASASDMPMPYAVPRGAAAAEDARRRTTATTPLPFHRNSLFGYLRSNPAIHSISRKLGGGGGGGSGSSNHPVPPAASNSSSRGRPT

SEQ ID NO: 24205 - DNA, 855 bp, Zea mays subsp. mays
  misc_feature (1)..(855): Ceres Seq. ID no. 12420264
aatttctttattctacttgtacattctgaataatctcatgtatcttgcagctctgaatgatgcactaaagcaggagctggagaggcttaagcttgttactgggtgagatgaccaattccagtgagacatataacatgagatttcagcatattccatacaactcttccttctttccgctttcccagcaaaatgcatctccacaccctggtaccacccagttgccaccaccgttccacccaccccatcccaatgtgccaaaccaccagatgctgtcccacccaaacgctctcccagacataatgcagcaagagtctcttggacggctgcagggtttggacattggaaaggggccactggttgtcaagtcagagagcagctcgatctctgctagtgaaagcagcagcaccttctaacgaggcctaccaatgagaatctgccgtttcaatacgtcccattgttcataatagcctgacatccttgtgctgcttcctgctctgtaagcttatttgttatttaattcattcaattagttgaaattgttccttgtcgcactggcagatcgatccatgttgtagaatgatccaggaacccttctagtctgtttatgttttgggaccatttcatgtttatgtgttcggtattagggcatttggattttggagtgaaattctctgatgatacttttgttgtgttgagccatgttgactgcatgaatcctcttttgaacatactcactctgtaccaaattcgttttaggccaatggtggattcatgaaagacttgttgaatgtattttatgtgtctatattcatcctcactcatttgaatatagacaaaaactactcctttcgttcc

SEQ ID NO: 24206 - protein, 101 aa, Zea mays subsp. mays
  misc_feature (1)..(101): Ceres Seq. ID no. 12420265
MTNSSETYNMRFQHIPYNSSFFPLSQQNASPHPGTTQLPPPFHPPHPNVPNHQMLSHPNALPDIMQQESLGRLQGLDIGKGPLVVKSESSSISASESSSTF

SEQ ID NO: 24207 - protein, 92 aa, Zea mays subsp. mays
  misc_feature (1)..(92): Ceres Seq. ID no. 12420266
MRFQHIPYNSSFFPLSQQNASPHPGTTQLPPPFHPPHPNVPNHQMLSHPNALPDIMQQESLGRLQGLDIGKGPLVVKSESSSISASESSSTF

SEQ ID NO: 24208 - protein, 56 aa, Zea mays subsp. mays
  misc_feature (1)..(56): Ceres Seq. ID no. 12420267
MFWDHFMFMCSVLGHLDFGVKFSDDTFVVLSHVDCMNPLLNILTLYQIRFRPMVDS

SEQ ID NO: 24209 - DNA, 593 bp, Zea mays subsp. mays
  misc_feature (1)..(593): Ceres Seq. ID no. 12420357
tttgaatgctaaggatacagaaattgcgaggttgagagaggaaatcagaatattgtctgctcactggacgaacaaaaccaaggaacttgagtcacatttagaaaagcaccggagaactgatcaggagctgaagaagagggttctaaagcttgaattttgccttcaagaatcccagtctcagatgcgaaaattaaagaggatgggcgagagaagagacaaggctctcaaggagctcatggaccaggtggccacgaagcagccaaacagcatgtgccatggcaacaaggagaatttctgggagggccagggcttcaagttcatcgtgtctatgtcgatgctggcactagtgatcctcgcaaagcgatgaagcagcatcgcatacccaatcttgtgtaaagaaggtagagattccatctatcgttaggtgagcaactagctcatagcttaagcagatgtcgatgtagcgtttacattagtttgttgtttgtattcttgggcagctgtgcataatgcatggtcagaagttgcagtctgtaatccgtagtctctgctagggcatgtgaactcagaaggtgtnttgtactcacagctag

SEQ ID NO: 24210 - protein, 121 aa, Zea mays subsp. mays
  misc_feature (1)..(121): Ceres Seq. ID no. 12420358
LNAKDTEIARLREEIRILSAHWTNKTKELESHLEKHRRTDQELKKRVLKLEFCLQESQSQMRKLKRMGERRDKALKELMDQVATKQPNSMCHGNKENFWEGQGFKFIVSMSMLALVILAKR

SEQ ID NO: 24211 - protein, 61 aa, Zea mays subsp. mays
  misc_feature (1)..(61): Ceres Seq. ID no. 12420359
MRKLKRMGERRDKALKELMDQVATKQPNSMCHGNKENFWEGQGFKFIVSMSMLALVILAKR

SEQ ID NO: 24212 - DNA, 850 bp, Zea mays subsp. mays
  misc_feature (1)..(850): Ceres Seq. ID no. 12423719
aaaaaaatctatgtactgaagacctggcgtcgacggcggcctcctcggcggcgggcgcgggctggtctccttccgcttcccggacagcttctgggcgggccgcgtggtggcgcgcacgggatgcagctccgggcattcccggtgcgagacgggaagcgttgcgccggcgacggtggtgcagctggtggtgcacgcggaggggcaagacctggcgtcgtacagcgtgagcctggtggacgggttcaacgtgcccgctgtggtgagcccgcaggcggtgggcggcgggcagtgcccggccctggggtgcgcggcggacctcaacgccgggtgcccgccctcgcagcgcgtgctgggggccgggggcggcgtggtggcgtgcaagggccccgcgggctacttcaaggagcggtgcccgctgacgcgcaccacgcccaccgacgtggagcccgtgccgcagcggtgcttggcgcccggcgagctcaaggtcgtcttctgccagtccgccatggtgaacgccgccgccgccgccgagaccgagcgcatccgcaccgtcgtcgcggacaactagagctactagctgtctagctgcctgtggtaacgccggccggtggtcactggtcagttgaacggaggagatgccggctctctgattagtgcgtaataaaggtacgtacgttaactaggcaattaagcgcgtgtgttactgttgaacttgaacggggccgctattaaagctgtgtgtgtgtgtgtggtactagtagttgtcattggcttcgttgccatgtgttcggccggcagtgccaagtgaatagttgcgtccatccaggagaatgtatgtttttgagttgcg

SEQ ID NO: 24213 - protein, 194 aa, Zea mays subsp. mays
  misc_feature (1)..(194): Ceres Seq. ID no. 12423720
KKIYVLKTWRRRRPPRRRARAGLLPLPGQLLGGPRGGAHGMQLRAFPVRDGKRCAGDGGAAGGARGGARPGVVQREPGGRVQRARCGEPAGGGRRAVPGPGVRGGPQRRVPALAARAGGRGRRGGVQGPRGLLQGAVPADAHHAHRRGARAAAVLGARRAQGRLLPVRHGERRRRRRDRAHPHRRRGQLELLAV

SEQ ID NO: 24214 - protein, 154 aa, Zea mays subsp. mays
  misc_feature (1)..(154): Ceres Seq. ID no. 12423721
MQLRAFPVRDGKRCAGDGGAAGGARGGARPGVVQREPGGRVQRARCGEPAGGGRRAVPGPGVRGGPQRRVPALAARAGGRGRRGGVQGPRGLLQGAVPADAHHAHRRGARAAAVLGARRAQGRLLPVRHGERRRRRRDRAHPHRRRGQLELLAV

SEQ ID NO: 24215 - DNA, 803 bp, Zea mays subsp. mays
  misc_feature (1)..(803): Ceres Seq. ID no. 12423776
aaatcatcacaggtccaaagcgcttccgattctctcttctcccctccgcccgcctccggttgtcttctccaattccccaacgcagccagcagcgcaaggtccagaagcccaggaccagacgacggacctccgcgccccatcgatccgcgcggccctcccccaacgcgcgtgcgtccgcaactagcgtctgcngccggtnnctttcttccgcaccccccgacgcggcaaggagcccccccgccatgagggtccacccggccccgcggaagcgcaccatcnnngtgcaacgctgcgcctccgcggcggcgggcgcgctcggcgggaagaagctgcgccgcctgccgcacatattcgacaaggtgctggagctcccgttcgcggccgacgcggacgtgtccgtcgaggaggacgcggcggcgctgcggttcgtcgccgccgccgacgagttctccctcgcgggcgcccgcgcgcacgccgtcgagatccacccaggggtcaccaaggtcgtcgtccgcggcctctcctcctcctccctcggcggcgatggcgacgacgacgacgacggggccgccgccgccgccttcgagctcgaccgctggcgcttccgcctcccgccctgcacgcgccccgccatggccaccgccacctacgccgcgggcgagctcgttgtcaccgtccccaagggcgccggccccggcgacggcggcgcggccgctgtcctcggtggcacggagcgcgtccttgtgcttgtatagtatagtaaatctagcttttccctaaattatatatcatctgctttgtgc

SEQ ID NO: 24216 - protein, 250 aa, Zea mays subsp. mays
  misc_feature (1)..(250): Ceres Seq. ID no. 12423777
  misc_feature (64)..(64): Xaa is any aa, unknown or other
  misc_feature (66)..(66): Xaa is any aa, unknown or other
  misc_feature (93)..(93): Xaa is any aa, unknown or other
IITGPKRFRFSLLPSARLRLSSPIPQRSQQRKVQKPRTRRRTSAPHRSARPSPNARASATSVCXRXLSSAPPDAARSPPAMRVHPAPRKRTIXVQRCASAAAGALGGKKLRRLPHIFDKVLELPFAADADVSVEEDAAALRFVAAADEFSLAGARAHAVEIHPGVTKVVVRGLSSSSLGGDGDDDDDGAAAAAFELDRWRFRLPPCTRPAMATATYAAGELVVTVPKGAGPGDGGAAAVLGGTERVLVLV

SEQ ID NO: 24217 - protein, 170 aa, Zea mays subsp. mays
  misc_feature (1)..(170): Ceres Seq. ID no. 12423778
  misc_feature (13)..(13): Xaa is any aa, unknown or other
MRVHPAPRKRTIXVQRCASAAAGALGGKKLRRLPHIFDKVLELPFAADADVSVEEDAAALRFVAAADEFSLAGARAHAVEIHPGVTKVVVRGLSSSSLGGDGDDDDDGAAAAAFELDRWRFRLPPCTRPAMATATYAAGELVVTVPKGAGPGDGGAAAVLGGTERVLVLV

SEQ ID NO: 24218 - DNA, 850 bp, Zea mays subsp. mays
  misc_feature (1)..(850): Ceres Seq. ID no. 12423783
ctatgaaagtctgaaaatagctagtggattgagcggagcgtgcctctgcggtccgataggcgggttcgcatccggccatccgatactctgccagtgcggccgcgcggcggcggagcaaccacgcgcgcagaccgccgtcgccacctcctccctccctccgctccccggcgtgcgtccgatccaccaggaatcgaaggctcccacacgcccccacgcgatgctgcgcaacttcccgcaggcccggaggctcctcaggcggatggggttcgagaaggaggacgcctacttctggaagcagatgggcaaggccatgctctgcacgtacacgctcttcggcgtcgtctggctctggaacgagacgtcgccgctcgggtggtggacgctcaagccgcgccccaaggaagaaagagagatggcacacctctacgagcgcaggaagttcccgtaccctggcgatgatgaggcggtcgaggagtttgtaaagagcggaggtgctcttggaaccacaattggacccaggggattcgctgacgccaatatggattctgaaaacatgcagaagcagctgcagtctaagaagttcgagcaggaagcacagaaactgtggattcggatgaggaatgaggtcgtacaggagctccaggagaaggggtttgatatcgagtgaatttgaaacctgcagtatggtcggcgctgaggatgttaaaacttaaaaccacttgccatctaaattggagaactgtataacttaggaataaaagagtttgtagctatctttttaactaactatctggtgctgcattcttggtgctgctagattgtaccgaaaataaattttgatgtcttgtgg

SEQ ID NO: 24219 - protein, 221 aa, Zea mays subsp. mays
  misc_feature (1)..(221): Ceres Seq. ID no. 12423784
YESLKIASGLSGACLCGPIGGFASGHPILCQCGRAAAEQPRAQTAVATSSLPPLPGVRPIHQESKAPTRPHAMLRNFPQARRLLRRMGFEKEDAYFWKQMGKAMLCTYTLFGVVWLWNETSPLGWWTLKPRPKEEREMAHLYERRKFPYPGDDEAVEEFVKSGGALGTTIGPRGFADANMDSENMQKQLQSKKFEQEAQKLWIRMRNEVVQELQEKGFDIE

SEQ ID NO: 24220 - protein, 149 aa, Zea mays subsp. mays
  misc_feature (1)..(149): Ceres Seq. ID no. 12423785
MLRNFPQARRLLRRMGFEKEDAYFWKQMGKAMLCTYTLFGVVWLWNETSPLGWWTLKPRPKEEREMAHLYERRKFPYPGDDEAVEEFVKSGGALGTTIGPRGFADANMDSENMQKQLQSKKFEQEAQKLWIRMRNEVVQELQEKGFDIE

SEQ ID NO: 24221 - protein, 135 aa, Zea mays subsp. mays
  misc_feature (1)..(135): Ceres Seq. ID no. 12423786
MGFEKEDAYFWKQMGKAMLCTYTLFGVVWLWNETSPLGWWTLKPRPKEEREMAHLYERRKFPYPGDDEAVEEFVKSGGALGTTIGPRGFADANMDSENMQKQLQSKKFEQEAQKLWIRMRNEVVQELQEKGFDIE

SEQ ID NO: 24222 - DNA, 1642 bp, Zea mays subsp. mays
  misc_feature (1)..(1642): Ceres Seq. ID no. 12423800
atttctgggctggccggaaagcgagcgctcgagagcgaggggaaatcaggtggaggaagcttaaaattagaagtccagcgcaataattgagcaggcggcggcaggcccctcctaatcactgccctaaacacatgtgtgccgggccgaggtcacaatcgatgcacggaggaggatgccgccgtagctgcggagattgataatataaagcgggcggagacncggncccctctggcctcgctgctcctccccccttcctccccccacatgcgctgcccccgcccggccctgccctgccctgccctgctgcgcccaagcagctgaatctccgcacagacaattagagtagctgcattggcggggaaagcgcaagaagctcagcagaaatggcggagcaggcaggcgccggaaggtactggtgccacatgtgcgccgcggtcgtgagccccgcggagggcgaggcggaggtgaagtgcccgcattgccacagcggcttccttgaggagatggagaccgtccgcggcacgcccgcggccgatgacggcgacggtgacggcgcggtggctcaagtgtaccccggcgccgaccgcccgagctccatctgggcgcacgctatcctcagcacggtcgacagctccgtccgccgccgccgcaaccggcggcagacggaggccgccggcgacgtctacgacgggaacgaccccgagttcgccctgcgccggcgtcgcgtcaccgcgttcctgcggctcctgcacgagctccgggaccgccagctgcagcggctggaggctgctgccggggtcgccctcgaaggcgaccagctgacccctttcggccggagcctcttcatcggcgcagctggcggcggcgagcatggcgtggcgctgggcgactacttcctcggccccagcctcgacgcactggtgcagcagctcgccgagaacgacgcgggacggcacgggacgccgccggccaagaaggaggccgtggaggcaatgccgaccgtggaaatcgccggtggcaatggcaacgatgacgacacggccagctgccccgtctgcctggaggactacgcggccggcgagcgcgctcgggagatgccctgcaggcacaggttccactccaattgcatcgttccgtggctcgagatgcacagctcctgccctgtctgccggttgcagctgccggccaccgacgacaagggctcatgcagcagcggcgacggtggttttgtcagtgtcgatgcggatggtgaaggcaatgacaacggcggcggtgatggtagggcaagtattccaggcaatgcggagccagccgaagccgaagagaacggcagccggttgccgccatccttgcagtggctcaacagcctgttctcgccatcggcgcagtcctccggtagcggcagcggcagttcgcatcattgggagaattgagcaataatgcaatataaggatggatgattgttgctgcttgagcccattggtgccaatgtacataggaagagcaggagcatgccggcatgaaaatttggagcctttttttcagtgtgtcaatttggctcatgtaacgttctctctgatatagttgtcatggctataaaaagaacaaaaattggcaagtatatgaacttgcctcttgcgtg

SEQ ID NO: 24223 - protein, 349 aa, Zea mays subsp. mays
  misc_feature (1)..(349): Ceres Seq. ID no. 12423801
MAEQAGAGRYWCHMCAAVVSPAEGEAEVKCPHCHSGFLEEMETVRGTPAADDGDGDGAVAQVYPGADRPSSIWAHAILSTVDSSVRRRRNRRQTEAAGDVYDGNDPEFALRRRRVTAFLRLLHELRDRQLQRLEAAAGVALEGDQLTPFGRSLFIGAAGGGEHGVALGDYFLGPSLDALVQQLAENDAGRHGTPPAKKEAVEAMPTVEIAGGNGNDDDTASCPVCLEDYAAGERAREMPCRHRFHSNCIVPWLEMHSSCPVCRLQLPATDDKGSCSSGDGGFVSVDADGEGNDNGGGDGRASIPGNAEPAEAEENGSRLPPSLQWLNSLFSPSAQSSGSGSGSSHHWEN

SEQ ID NO: 24224 - protein, 336 aa, Zea mays subsp. mays
  misc_feature (1)..(336): Ceres Seq. ID no. 12423802
MCAAVVSPAEGEAEVKCPHCHSGFLEEMETVRGTPAADDGDGDGAVAQVYPGADRPSSIWAHAILSTVDSSVRRRRNRRQTEAAGDVYDGNDPEFALRRRRVTAFLRLLHELRDRQLQRLEAAAGVALEGDQLTPFGRSLFIGAAGGGEHGVALGDYFLGPSLDALVQQLAENDAGRHGTPPAKKEAVEAMPTVEIAGGNGNDDDTASCPVCLEDYAAGERAREMPCRHRFHSNCIVPWLEMHSSCPVCRLQLPATDDKGSCSSGDGGFVSVDADGEGNDNGGGDGRASIPGNAEPAEAEENGSRLPPSLQWLNSLFSPSAQSSGSGSGSSHHWEN

SEQ ID NO: 24225 - protein, 309 aa, Zea mays subsp. mays
  misc_feature (1)..(309): Ceres Seq. ID no. 12423803
METVRGTPAADDGDGDGAVAQVYPGADRPSSIWAHAILSTVDSSVRRRRNRRQTEAAGDVYDGNDPEFALRRRRVTAFLRLLHELRDRQLQRLEAAAGVALEGDQLTPFGRSLFIGAAGGGEHGVALGDYFLGPSLDALVQQLAENDAGRHGTPPAKKEAVEAMPTVEIAGGNGNDDDTASCPVCLEDYAAGERAREMPCRHRFHSNCIVPWLEMHSSCPVCRLQLPATDDKGSCSSGDGGFVSVDADGEGNDNGGGDGRASIPGNAEPAEAEENGSRLPPSLQWLNSLFSPSAQSSGSGSGSSHHWEN

SEQ ID NO: 24226 - DNA, 1450 bp, Zea mays subsp. mays
  misc_feature (1)..(1450): Ceres Seq. ID no. 12423817
cactctgcctttccattcccccatccgccatggcggcgccgccggagctcgttgacgacacgatcgccgagatctgcctccgccttcccccggacgagcccgcgcacctcgtccgtgccgccctggtctccaggcgctggcgccgcatcctctccggcggggccttcctccgccggtaccgcgcgttccacggggcaccccctctgctcggcttcgtcgacaacaccatcgggctccacggcgccacggcccctcgcttctcccccaccacctcatccggctcccctttccccaggcggacgttcgactgcatctgctgggaggccctcgactgccgccacggccgcgtcctcctcggcctcttcgccgagagggtcaacctcgtcgtgtgggaccccgtcaccggcgaccactgtgggctgcctgaccccggggtgctccccggttactacagcgcggcggtgctctgcgccgcgcgcggctgcgaccacctccactgccgcggcggcggcccgttccgcgtcgtcctggcgggcatggactacttctcaagggacgccggcgtgcgggcgcgcctctactgctcggaggccgctgcctgggtcgcctctgctcagttggcctccgattcccatgtcatgcggaagcccagcgcgctcgtcggagacaacgtctacttccagctcatggagggtgacgtgtttctgaggtacgacatgggcaggaaccgtctgtccaccttcgaccctccggcggcgcacgtcgacgaagggggcgtcgtgctcatgcccatgggcggtgacggctcgctggggcttgccggcgtcaggggatcaaggctttgcctgtggtcgacgagtgtcggcgcagaggggattggaaggatgggttcgacgcggggacattgagcttatgacacggatcccctttatgccctatagcgaagcacatgtgattgcttctgcggagggcttgggtttcggtacaatcttcttggtctcaactgaggttggcctcttcgcggtcgacctcaaatcagggcaggagcgcaaactaagcgagcctgggaactacaacgacttcgctgtcttccccttcatgagcttctatactccagactgtacaagcggcaaggtaccgtcacccaggaggacacactaatcactgtaatactgaggcgaagaatggtattgcctggctcatctncagatccatcaagttgagtttgcaggtgctgtcatctttctgttgcaggaatgacgtctcgcaagaaacacaagccatgaagccaacatattggtcgcttatgctcctatgctctctagctgattcttagatgcataatgtatacgcagccttttttttgttctcgtaatatgtgtgttgtttggttcacatatttgtaatataataggtaacagataacgttaaattatgtttgtttaaatcc

SEQ ID NO: 24227 - protein, 301 aa, Zea mays subsp. mays
  misc_feature (1)..(301): Ceres Seq. ID no. 12423818
LCLSIPPSAMAAPPELVDDTIAEICLRLPPDEPAHLVRAALVSRRWRRILSGGAFLRRYRAFHGAPPLLGFVDNTIGLHGATAPRFSPTTSSGSPFPRRTFDCICWEALDCRHGRVLLGLFAERVNLVVWDPVTGDHCGLPDPGVLPGYYSAAVLCAARGCDHLHCRGGGPFRVVLAGMDYFSRDAGVRARLYCSEAAAWVASAQLASDSHVMRKPSALVGDNVYFQLMEGDVFLRYDMGRNRLSTFDPPAAHVDEGGVVLMPMGGDGSLGLAGVRGSRLCLWSTSVGAEGIGRMGSTRGH

SEQ ID NO: 24228 - protein, 292 aa, Zea mays subsp. mays
  misc_feature (1)..(292): Ceres Seq. ID no. 12423819
MAAPPELVDDTIAEICLRLPPDEPAHLVRAALVSRRWRRILSGGAFLRRYRAFHGAPPLLGFVDNTIGLHGATAPRFSPTTSSGSPFPRRTFDCICWEALDCRHGRVLLGLFAERVNLVVWDPVTGDHCGLPDPGVLPGYYSAAVLCAARGCDHLHCRGGGPFRVVLAGMDYFSRDAGVRARLYCSEAAAWVASAQLASDSHVMRKPSALVGDNVYFQLMEGDVFLRYDMGRNRLSTFDPPAAHVDEGGVVLMPMGGDGSLGLAGVRGSRLCLWSTSVGAEGIGRMGSTRGH

SEQ ID NO: 24229 - protein, 235 aa, Zea mays subsp. mays
  misc_feature (1)..(235): Ceres Seq. ID no. 12423820
HSAFPFPHPPWRRRRSSLTTRSPRSASAFPRTSPRTSSVPPWSPGAGAASSPAGPSSAGTARSTGHPLCSASSTTPSGSTAPRPLASPPPPHPAPLSPGGRSTASAGRPSTAATAASSSASSPRGSTSSCGTPSPATTVGCLTPGCSPVTTARRCSAPRAAATTSTAAAAARSASSWRAWTTSQGTPACGRASTARRPLPGSPLLSWPPIPMSCGSPARSSETTSTSSSWRVTCF

SEQ ID NO: 24230 - DNA, 1466 bp, Zea mays subsp. mays
  misc_feature (1)..(1466): Ceres Seq. ID no. 12423837
ataacagatacaggcaccccctcctctcctctcctctcctctctctccctctcatcaccaaagaactgcaactaggaacggttcgccacaaaaaaagaacgtacggctatgaagacgaggcgcggtgcctgccacgcggcggcggcggccacggcgccgggcgaggggccggaggcgcaacgccggaagcggcgcaggacggcggcggccgaggggtcgccagcggcggccggcactccaggtgtccgcccggtgggcagagacatgttcgagagagctgcctgacgatctcgtcgtctccatactacgggacgtcgccgcgtccgccagttcgccggccgatctcgccggcgccatgctcacgtgcaagaggttcagggagctcgggcagagcaaggtggtgctggcgcgggcgtcnccgcagtgcctggcggtgcgcgccaaggcctggtcggaggaggcgcaccggttcctgcagcgctgcgccgacgcgggcagcctggaagcgtgctacctccttggcatgattcggttctactgcctggggatccgcggctcgggcgcggcgctgatggcggcggcggcggtgggcgggcaccgcgaggcgctctactcgctggccgtggtccagttcaacggcagcggcgggggcaaggacgaccgcgacctccgcgccggagccgcgctgtgcgcgcgcgcggcgtcgctgggccacgtgggcgcgctccgcgagctggggcactgcctccaggacggctacggcgtgcggcggtccgtgctggacgggcggcgcctcctgatccaggcgaacgcgcgcgagctcgccgccgccgccgcctcgccgccgcaagccgcagccgctcggcaaggcggcgccccacccgactcggcgtcactcgtgcctcctgagcgacttcgggtgccgcgccgcggccggggagccgcacgcggccaaccggttcctggcggactggttcgngtcncggccgctcggtacggcggcggcggcggcagcggncggcgggancggctcctcgcccnaggaggacggcgccggcgcgnngcggntgtgctngcaggcgctgtgcgggcggcccnagacgcggcggcacgagttcaggcggtgctccgtgtggcggcctggtgaannactgctaccgcgcgtgccaggcgctgcantggaagatggcgcacaaggcggagtgcacgcccatggaccggtggctnnnacgtggtcggcgtcggcggcggcgcggcgccgcagccccacgctaatgccgacggcgccgcggcggccccggcgccgtgacgcgctggcggtcgtccgtttcttgtcacttgtcagttagcgtccgcaacgtcagtttttactccttttttttttctgtccgtttctcgccctccatttgtcctctgtactacggcacctgtggttatagttggcaattggcatggcatgctgaggt

SEQ ID NO: 24231 - protein, 263 aa, Zea mays subsp. mays
  misc_feature (1)..(263): Ceres Seq. ID no. 12423838
  misc_feature (21)..(21): Xaa is any aa, unknown or other
  misc_feature (208)..(208): Xaa is any aa, unknown or other
  misc_feature (210)..(210): Xaa is any aa, unknown or other
  misc_feature (221)..(221): Xaa is any aa, unknown or other
  misc_feature (224)..(224): Xaa is any aa, unknown or other
  misc_feature (229)..(229): Xaa is any aa, unknown or other
  misc_feature (236)..(236): Xaa is any aa, unknown or other
  misc_feature (238)..(238): Xaa is any aa, unknown or other
  misc_feature (240)..(240): Xaa is any aa, unknown or other
  misc_feature (248)..(248): Xaa is any aa, unknown or other
MLTCKRFRELGQSKVVLARAXPQCLAVRAKAWSEEAHRFLQRCADAGSLEACYLLGMIRFYCLGIRGSGAALMAAAAVGGHREALYSLAVVQFNGSGGGKDDRDLRAGAALCARAASLGHVGALRELGHCLQDGYGVRRSVLDGRRLLIQANARELAAAAASPPQAAAARQGGAPPDSASLVPPERLRVPRRGRGAARGQPVPGGLVXVXAARYGGGGGSXRRXRLLAXGGRRRRXAXVXAGAVRAAXDAAARVQAVLRVAAW

SEQ ID NO: 24232 - protein, 207 aa, Zea mays subsp. mays
  misc_feature (1)..(207): Ceres Seq. ID no. 12423839
  misc_feature (152)..(152): Xaa is any aa, unknown or other
  misc_feature (154)..(154): Xaa is any aa, unknown or other
  misc_feature (165)..(165): Xaa is any aa, unknown or other
  misc_feature (168)..(168): Xaa is any aa, unknown or other
  misc_feature (173)..(173): Xaa is any aa, unknown or other
  misc_feature (180)..(180): Xaa is any aa, unknown or other
  misc_feature (182)..(182): Xaa is any aa, unknown or other
  misc_feature (184)..(184): Xaa is any aa, unknown or other
  misc_feature (192)..(192): Xaa is any aa, unknown or other
MIRFYCLGIRGSGAALMAAAAVGGHREALYSLAVVQFNGSGGGKDDRDLRAGAALCARAASLGHVGALRELGHCLQDGYGVRRSVLDGRRLLIQANARELAAAAASPPQAAAARQGGAPPDSASLVPPERLRVPRRGRGAARGQPVPGGLVXVXAARYGGGGGSXRRXRLLAXGGRRRRXAXVXAGAVRAAXDAAARVQAVLRVAAW

SEQ ID NO: 24233 - protein, 191 aa, Zea mays subsp. mays
  misc_feature (1)..(191): Ceres Seq. ID no. 12423840
  misc_feature (136)..(136): Xaa is any aa, unknown or other
  misc_feature (138)..(138): Xaa is any aa, unknown or other
  misc_feature (149)..(149): Xaa is any aa, unknown or other
  misc_feature (152)..(152): Xaa is any aa, unknown or other
  misc_feature (157)..(157): Xaa is any aa, unknown or other
  misc_feature (164)..(164): Xaa is any aa, unknown or other
  misc_feature (166)..(166): Xaa is any aa, unknown or other
  misc_feature (168)..(168): Xaa is any aa, unknown or other
  misc_feature (176)..(176): Xaa is any aa, unknown or other
MAAAAVGGHREALYSLAVVQFNGSGGGKDDRDLRAGAALCARAASLGHVGALRELGHCLQDGYGVRRSVLDGRRLLIQANARELAAAAASPPQAAAARQGGAPPDSASLVPPERLRVPRRGRGAARGQPVPGGLVXVXAARYGGGGGSXRRXRLLAXGGRRRRXAXVXAGAVRAAXDAAARVQAVLRVAAW

SEQ ID NO: 24234 - DNA, 1760 bp, Zea mays subsp. mays
  misc_feature (1)..(1760): Ceres Seq. ID no. 12423851
aaaaccgaccggcctcgctttcgccggttacccggtcaaacgcatcaaccgccggcacgtctccgatcggatcacgatggctgccccgtgcccccgccggtcaggccaggtcgcgtggtcacgtgcgacgcgcatgccgtcctcggccggcgccccagccccctcgccgtgtccttttattctcccccgcctcaccgcccgcatccccaattcacgcccccaccacgacttccgtgctcgccgccttctcggactaggggggttcggctcgagatctgatttcgggcgccggaggactacatggaggttagggagatggcgatggccgcggcggctgcggctgcggcgtccggcgggggaggcgtcaagctgccgccgcccaatcccaacctgccctacagggaggactgctggagcgacggcgagacggcagctctcgtctccgcctggggcagccgctacgtcgagctcaaccgcggtaacctgcgccagaagcagtggcaggaggtggcggacgccgtcaactcgcgccggggagcctccgcgcggcgccgcccgccgcgcaccgacatccagtgcaagaaccgcgtcgataccctcaagaagaagtacaaggccgagctcgcccgcaacgcgccgtccgcctggtcctacttccccgagctcgaccgcctcgtcggcccaaccctcagcgcctccgcctccaagagacccttggcgtctctgcctcctcaattcgctttgcccatgcatccaccagccgtgcggaggcccccgtcgccttcgccgtcatcgtcctccccgccgcagccgcctatggctttgcctctacccaattaccgccgtgggtccccgctccctgctgctgccctcatccagaaggaagccgcggctgctgcggctgctgcgtctgattcagaggactccgatgatgcggctggcggcaataatcacaaattgccccggtcgccttcgcgctcggtgtcgtcactctctgccagtaacaagaagcgctgcagagatgaggctggcagcagtgctgacaaaggtttcagagagttagcaagggcgatcgaagcttttgcggagatgtatgagcgtgtggagagtgctaagcaaaagcatgtggtggagatggagcgccagcgaattgaattcctgaagcaactggaggtgaaacgcatggagaatttcgttgatgcccatgtgaagctggctagagcaaagcgcacgaagaagactacagggggtgctgccgacggtgctggtggtatggagttggttgccaccgttgctgcgctgcctttcgtctccacctccaccttcctctgatattgaggaagagtttagagaaagagggagcaaaaaatggtggtccaaggaagcaagctaatccgaaagatagcaagtgaagcgtttggccgggcgtttgggtggtgcgaatttctgggtgatcaaaactggaatgtggattctgcagttggagatagcctttcttttagttgatgacttgaatctgtgccttttgttttcgcctgtctgtcgtgatctggttgtaaataagaaagtcttatgccgctagtcgcaggtcgaactttatcttctatcctaggccctctacttatctaggttgatagtgtaaggtgtctagatagagatctgacctaattgctattctgtcggatcgtttgatcgcgatggatgtcgttgttctgaaactttcctatttcctaatgaaatagggggcttcgccccttcgt

SEQ ID NO: 24235 - protein, 353 aa, Zea mays subsp. mays
  misc_feature (1)..(353): Ceres Seq. ID no. 12423852
KPTGLAFAGYPVKRINRRHVSDRITMAAPCPRRSGQVAWSRATRMPSSAGAPAPSPCPFILPRLTARIPNSRPHHDFRARRLLGLGGFGSRSDFGRRRTTWRLGRWRWPRRLRLRRPAGEASSCRRPIPTCPTGRTAGATARRQLSSPPGAAATSSSTAVTCARSSGRRWRTPSTRAGEPPRGAARRAPTSSARTASIPSRRSTRPSSPATRRPPGPTSPSSTASSAQPSAPPPPRDPWRLCLLNSLCPCIHQPCGGPRRLRRHRPPRRSRLWLCLYPITAVGPRSLLLPSSRRKPRLLRLLRLIQRTPMMRLAAIITNCPGRLRARCRHSLPVTRSAAEMRLAAVLTKVSES

SEQ ID NO: 24236 - protein, 343 aa, Zea mays subsp. mays
  misc_feature (1)..(343): Ceres Seq. ID no. 12423853
MEVREMAMAAAAAAAASGGGGVKLPPPNPNLPYREDCWSDGETAALVSAWGSRYVELNRGNLRQKQWQEVADAVNSRRGASARRRPPRTDIQCKNRVDTLKKKYKAELARNAPSAWSYFPELDRLVGPTLSASASKRPLASLPPQFALPMHPPAVRRPPSPSPSSSSPPQPPMALPLPNYRRGSPLPAAALIQKEAAAAAAAASDSEDSDDAAGGNNHKLPRSPSRSVSSLSASNKKRCRDEAGSSADKGFRELARAIEAFAEMYERVESAKQKHVVEMERQRIEFLKQLEVKRMENFVDAHVKLARAKRTKKTTGGAADGAGGMELVATVAALPFVSTSTFL

SEQ ID NO: 24237 - protein, 338 aa, Zea mays subsp. mays
  misc_feature (1)..(338): Ceres Seq. ID no. 12423854
MAMAAAAAAAASGGGGVKLPPPNPNLPYREDCWSDGETAALVSAWGSRYVELNRGNLRQKQWQEVADAVNSRRGASARRRPPRTDIQCKNRVDTLKKKYKAELARNAPSAWSYFPELDRLVGPTLSASASKRPLASLPPQFALPMHPPAVRRPPSPSPSSSSPPQPPMALPLPNYRRGSPLPAAALIQKEAAAAAAAASDSEDSDDAAGGNNHKLPRSPSRSVSSLSASNKKRCRDEAGSSADKGFRELARAIEAFAEMYERVESAKQKHVVEMERQRIEFLKQLEVKRMENFVDAHVKLARAKRTKKTTGGAADGAGGMELVATVAALPFVSTSTFL

SEQ ID NO: 24238 - DNA, 1265 bp, Zea mays subsp. mays
  misc_feature (1)..(1265): Ceres Seq. ID no. 12423889
gttactccaggtctccagcccaaccaacgccacgtacaggtacagtacctgtagagaggcagaggcagaggcagaggcagaggcaccaaccttttggacatccctcctccactccctaccaacgacctctgctcatcctaagtttgccaatttgccgctccttcacttcacagttacagtagattacctccatctctcagacggaacggaggaggagagccatgtccagccccacgcacgccaggctcgcgcagcaaggcaaggccggcgtggcgctgcgcctgctcctctccgccgcgctcgccggcttcctcctcgtcttcgccgcgcgcaccctggtcacgtcgcctgtcccggcatcgccctcgtactcgtcgcagccgcatccgctgccgctgcccgtggcggaggcgctggtgcactacgccacgtccaacgcgacgccgcagcagacggcggaggagatcggggtggcgctgcgcgtgctacagcggcgcgcgccctgcaacttcctggtgttcggtctgggcctcgacagccccatgtgggcggcgctgaaccacggggggcggaccgtgttcctggaggaggacgcggcgtggatcaccagcgtgcggggcaggcacccggcgctggagtcccaccacgtggcctacgacacggcgctggccgacgccgacgcgctgctagggctccgcgcccacccggcctgcgtcgcgcagcccgacctcgcggcggccgccgccgcgtcctgccgcctcgcgctccggggcctcccgcccgtcttcgccggcctcgactgggacctcgtcatggtggacgcgcccacggggtggacgccccgggcgcccggccgcatgggcgccatctacaccgccggcatggcggcgcgcgcgcgcaggccaggggccggccccacccacgtcttcgtccacgacgtcgaccgccccgtcgaggacgccttctccagggcgttcctgtgcgagggctacctcgccgagcaggtcggacggatcaggcacttcgtcatcccgtcacaccgcgacaaggacggcacgccattctgcccttgatcaagtttgttctgctttggtttggatcccacggtgcccattgccaaactactacagtactattattgctgcatagatgttgctttgcagttgctcattctacactgatgagtgcctgagatttgggtagacgattacaatgtaaaatcgacaacttgctttgtctgttactcggatgaaaaactccagggt

SEQ ID NO: 24239 - protein, 396 aa, Zea mays subsp. mays
  misc_feature (1)..(396): Ceres Seq. ID no. 12423890
LLQVSSPTNATYRYSTCREAEAEAEAEAPTFWTSLLHSLPTTSAHPKFANLPLLHFTVTVDYLHLSDGTEEESHVQPHARQARAARQGRRGAAPAPLRRARRLPPRLRRAHPGHVACPGIALVLVAAASAAAARGGGAGALRHVQRDAAADGGGDRGGAARATAARALQLPGVRSGPRQPHVGGAEPRGADRVPGGGRGVDHQRAGQAPGAGVPPRGLRHGAGRRRRAARAPRPPGLRRAARPRGGRRRVLPPRAPGPPARLRRPRLGPRHGGRAHGVDAPGARPHGRHLHRRHGGARAQARGRPHPRLRPRRRPPRRGRLLQGVPVRGLPRRAGRTDQALRHPVTPRQGRHAILPLIKFVLLWFGSHGAHCQTTTVLLLLHRCCFAVAHSTLMSA

SEQ ID NO: 24240 - protein, 283 aa, Zea mays subsp. mays
  misc_feature (1)..(283): Ceres Seq. ID no. 12423891
MSSPTHARLAQQGKAGVALRLLLSAALAGFLLVFAARTLVTSPVPASPSYSSQPHPLPLPVAEALVHYATSNATPQQTAEEIGVALRVLQRRAPCNFLVFGLGLDSPMWAALNHGGRTVFLEEDAAWITSVRGRHPALESHHVAYDTALADADALLGLRAHPACVAQPDLAAAAAASCRLALRGLPPVFAGLDWDLVMVDAPTGWTPRAPGRMGAIYTAGMAARARRPGAGPTHVFVHDVDRPVEDAFSRAFLCEGYLAEQVGRIRHFVIPSHRDKDGTPFCP

SEQ ID NO: 24241 - DNA, 1845 bp, Zea mays subsp. mays
  misc_feature (1)..(1845): Ceres Seq. ID no. 12423896
gagtgtctcgtgctgctgcttccgctgcagtaaaatacggggaagaggaggggagggagacgcggccgctgcctgccgcacatgctttaagtcccactccccacctccccagatctccgccctcctccccaccgcccccattcctcccctcggccgcaaccgtagccgccgcactacggagcaagatcgtcgggtagacggacgggcgggcgggcgggcgcggctctgtatctatctgtcggtgggagaccgcgtgtgtcggttaggcggcgggtggcaaggaagaatggcggcgagcggcagatccgtcgcgtgctgtgccgccgcgctgctcgcggccgcgttgctcctctccgcaccgactgcaacagaggcttatgattcgctggatccaaatggcaacatcaccataaaatgggatatcatgcagtggactcctgatggatatgtcgctgttgtcacaatgtttaattatcaacaatttcggcatatcggcgcacctggttggcagcttgggtggacatgggcaaagaaggaggttatatggtcaatggttggggctcagaccactgaacagggcgactgctcaaagttcaagagcagcccaccccattgctgcaagaaagatccaacaattgtcgatttacttccaggcactccatacaacatgcaaattgccaattgctgcaaggcaggagttgtaaatacctttaaccaggacccagcaaatgctgcttcctccttccagatcagtgttggtcttgctggaactaccaataaaactgttaaggtgcccaggaacttcactcttaagactccaggccctgggtacacatgtgggcgtgccattgttggcaggcctacgaagtttttcaccgcggacgggcgcagggcaacccaagctctaatgacatggaatgtgacctgcacatattcccaatttcttgctcagaagactccatcctgctgtgtatctctatcatcgttttataatgacacaattgtgaactgcccaacatgctcatgtggctgccagaacccaagtgggtcaaactgtgtgaatgaggattcacctaatctacaagctgcaattgatggccctggcaaatgcactggtcagccccttgtacaatgcacttcccacatgtgcccgataagaatccactggcatgtgaagctcaactacaaggattactggagagtgaaaatcactatcacaaacttcaacttccgcatgaattacacgcagtggaacttagtagcccagcatccaaactttgataatatcactcagttgttcagcttcaactacaaaccacttactccatatggtggtggcataaatgatacggcaatgttctggggtgtaaaattctacaatgatctgctgatgcaagccggcaaacttgggaatgtgcaatcagagctgcttctccgcaaggactcccggactttcactttcgaaaagggatgggccttcccacgccgagtttacttcaatggtgataattgtgtcatgccatctcctgaaaattatccatggctgccgaatgcaagccctctaacaaaaccattggcactcccattcttggtattctgggttgccttggctgctctgttggcttatgcatgattagtgggatcaagaggtttagcaagtttcaagttgatgtcagattccatgaggtgcactgcaacaagtcatttgttcattcaattccatggttgcacagaaaagatgaggcgatgccaagaaaaagtcgatatgtctatgtgtttaagttaaagggccaaaatgtatttcttgtttggtatataacagccctacaacactttggtgaactg

SEQ ID NO: 24242 - protein, 543 aa, Zea mays subsp. mays
  misc_feature (1)..(543): Ceres Seq. ID no. 12423897
SVSCCCFRCSKIRGRGGEGDAAAACRTCFKSHSPPPQISALLPTAPIPPLGRNRSRRTTEQDRRVDGRAGGRARLCIYLSVGDRVCRLGGGWQGRMAASGRSVACCAAALLAAALLLSAPTATEAYDSLDPNGNITIKWDIMQWTPDGYVAVVTMFNYQQFRHIGAPGWQLGWTWAKKEVIWSMVGAQTTEQGDCSKFKSSPPHCCKKDPTIVDLLPGTPYNMQIANCCKAGVVNTFNQDPANAASSFQISVGLAGTTNKTVKVPRNFTLKTPGPGYTCGRAIVGRPTKFFTADGRRATQALMTWNVTCTYSQFLAQKTPSCCVSLSSFYNDTIVNCPTCSCGCQNPSGSNCVNEDSPNLQAAIDGPGKCTGQPLVQCTSHMCPIRIHWHVKLNYKDYWRVKITITNFNFRMNYTQWNLVAQHPNFDNITQLFSFNYKPLTPYGGGINDTAMFWGVKFYNDLLMQAGKLGNVQSELLLRKDSRTFTFEKGWAFPRRVYFNGDNCVMPSPENYPWLPNASPLTKPLALPFLVFWVALAALLAYA

SEQ ID NO: 24243 - protein, 448 aa, Zea mays subsp. mays
  misc_feature (1)..(448): Ceres Seq. ID no. 12423898
MAASGRSVACCAAALLAAALLLSAPTATEAYDSLDPNGNITIKWDIMQWTPDGYVAVVTMFNYQQFRHIGAPGWQLGWTWAKKEVIWSMVGAQTTEQGDCSKFKSSPPHCCKKDPTIVDLLPGTPYNMQIANCCKAGVVNTFNQDPANAASSFQISVGLAGTTNKTVKVPRNFTLKTPGPGYTCGRAIVGRPTKFFTADGRRATQALMTWNVTCTYSQFLAQKTPSCCVSLSSFYNDTIVNCPTCSCGCQNPSGSNCVNEDSPNLQAAIDGPGKCTGQPLVQCTSHMCPIRIHWHVKLNYKDYWRVKITITNFNFRMNYTQWNLVAQHPNFDNITQLFSFNYKPLTPYGGGINDTAMFWGVKFYNDLLMQAGKLGNVQSELLLRKDSRTFTFEKGWAFPRRVYFNGDNCVMPSPENYPWLPNASPLTKPLALPFLVFWVALAALLAYA

SEQ ID NO: 24244 - protein, 402 aa, Zea mays subsp. mays
  misc_feature (1)..(402): Ceres Seq. ID no. 12423899
MQWTPDGYVAVVTMFNYQQFRHIGAPGWQLGWTWAKKEVIWSMVGAQTTEQGDCSKFKSSPPHCCKKDPTIVDLLPGTPYNMQIANCCKAGVVNTFNQDPANAASSFQISVGLAGTTNKTVKVPRNFTLKTPGPGYTCGRAIVGRPTKFFTADGRRATQALMTWNVTCTYSQFLAQKTPSCCVSLSSFYNDTIVNCPTCSCGCQNPSGSNCVNEDSPNLQAAIDGPGKCTGQPLVQCTSHMCPIRIHWHVKLNYKDYWRVKITITNFNFRMNYTQWNLVAQHPNFDNITQLFSFNYKPLTPYGGGINDTAMFWGVKFYNDLLMQAGKLGNVQSELLLRKDSRTFTFEKGWAFPRRVYFNGDNCVMPSPENYPWLPNASPLTKPLALPFLVFWVALAALLAYA

SEQ ID NO: 24245 - DNA, 1797 bp, Zea mays subsp. mays
  misc_feature (1)..(1797): Ceres Seq. ID no. 12423918
aaagctccagcacatccaatcgcacgacactccctgctgctctctgctgagaggtgctagatctcggactcgccgttgatttgattccaagttaaagacagcgagcaatccatagattgaccggtggagagcgagagaaagcgagagagagaagggaattggttggtaggtggagaccggagggagagctcagctcaggagattgatgcttgcatggtgatgcgggcgcgggcgatggggctgagcagcatccggcgggaggtgctggtctccgccgtcttcacggcgctcctcgtggcctccatcctcctcctcccctcgctcctcctaacgggcgctgggcccatcaggtggccgtccctgtccccgtcgaaggatgccggcatcggcgaggaggaggagcagcaggcgcggtaccccgtgacgttcgcgtacctgatctcggcgtcgacgggggacgcgtcccgcgccgcgcggctgctggcggcgctgtaccacccgggcaacagctacctgctgcacctggaccgggaggcccccgcggaggagcaccggcgtctggcggagctggtgtccgggcgcggcgtgtacgcgcgcgcgggcaacgtgtggatcgtgggcaggcccaacctggtaacctaccgtggccccaccatgctgaccaccacgctgcacgccgtcgccgtgctgctccgcctccgccgccgctgggactggttcatcaacctcagcgcctccgactacccgctcgtcacccaggacggtaccctgtgatgcttgcttgcttgcttgctgttggtcgtccactggatggacagactgtttctgaattttgggggttgcagatttgatggaggcgttcgccgggctgcccagggacctcaacttcatccagcacacgagccacctgggctggaagataaagaagcgggcgctgccggtgatcctggacacggcgctgtacgaggacgggagggcggagctgatccgcccggtgaacatctccaccaacctcaggaggctgcccacggcattcaagctcttcacagggtcggcgtggacgatgctgtcgcgggcgttcgcggagtacgtgacgatggggtgggacgacaacctgccgcggacgctgctgctgtaccacgccaacatcgtctcctcgcccgagttctacttccagacggtggcctgcaactcgcgccggttccgcaacgccacggtcaaccacgacctgcacttcatccgctgggacaccccgcccaagcagcacccgctctacctcaccgccagggactaccgccggatgctgctcagcggggccgccttcgcgcgcaagttcagggacggcgaccccgtgctgggaccgcatcgacagggacatcctccgccgccgggaccccgccgcccancnttctacggcggctggtgctccgaggccggcgaccaaaacggcggcgccgcgctctgctccaacccgcaggagcccgggaggcgcggggccgtcaagcccggcgccgggtccaggcggctcaaggccatgctcaggaagacgctgtcgccgaggaatttcaggaggcagcagtgtaggtaggggaactgttctgttatgttctgatcaaacaaacaggtcgttgactcaattttgtatgtatagaaaaggcagatctgaaacgcatcaaagcggcccaaagccaattttgttcagttgattcgcacaagtctgaattgaattgtagtagggagatactcctggtggttgatcatctcatacacggaataataatggaaggggcattatgt

SEQ ID NO: 24246 - protein, 257 aa, Zea mays subsp. mays
  misc_feature (1)..(257): Ceres Seq. ID no. 12423919
  misc_feature (199)..(199): Xaa is any aa, unknown or other
  misc_feature (200)..(200): Xaa is any aa, unknown or other
MDRLFLNFGGCRFDGGVRRAAQGPQLHPAHEPPGLEDKEAGAAGDPGHGAVRGREGGADPPGEHLHQPQEAAHGIQALHRVGVDDAVAGVRGVRDDGVGRQPAADAAAVPRQHRLLARVLLPDGGLQLAPVPQRHGQPRPALHPLGHPAQAAPALPHRQGLPPDAAQRGRLRAQVQGRRPRAGTASTGTSSAAGTPPPXXLRRLVLRGRRPKRRRRALLQPAGAREARGRQARRRVQAAQGHAQEDAVAEEFQEAAV

SEQ ID NO: 24247 - protein, 245 aa, Zea mays subsp. mays
  misc_feature (1)..(245): Ceres Seq. ID no. 12423920
  misc_feature (186)..(186): Xaa is any aa, unknown or other
MEAFAGLPRDLNFIQHTSHLGWKIKKRALPVILDTALYEDGRAELIRPVNISTNLRRLPTAFKLFTGSAWTMLSRAFAEYVTMGWDDNLPRTLLLYHANIVSSPEFYFQTVACNSRRFRNATVNHDLHFIRWDTPPKQHPLYLTARDYRRMLLSGAAFARKFRDGDPVLGPHRQGHPPPPGPRRPXFYGGWCSEAGDQNGGAALCSNPQEPGRRGAVKPGAGSRRLKAMLRKTLSPRNFRRQQCR

SEQ ID NO: 24248 - protein, 186 aa, Zea mays subsp. mays
  misc_feature (1)..(186): Ceres Seq. ID no. 12423921
MVMRARAMGLSSIRREVLVSAVFTALLVASILLLPSLLLTGAGPIRWPSLSPSKDAGIGEEEEQQARYPVTFAYLISASTGDASRAARLLAALYHPGNSYLLHLDREAPAEEHRRLAELVSGRGVYARAGNVWIVGRPNLVTYRGPTMLTTTLHAVAVLLRLRRRWDWFINLSASDYPLVTQDGTL

SEQ ID NO: 24249 - DNA, 1957 bp, Zea mays subsp. mays
  misc_feature (1)..(1957): Ceres Seq. ID no. 12423946
aagcgtcctcggatccacgtccaccgcgtcgccgtagtccgtagaggtcgccgccgccgagcaagctgctgtcaccaacgacagcgaggccgccacgctccgcagcgaggttgagcgcctcgagggtctcctcgccgcggagaaggctagccatgaggaggagatgcgcaggggtgcatggctcggggaccagctgcagaccgcgtaccaggagaaggccgccctcgaggaggagatcgagaccctgaagggttccgccactgccgagggcaagggcatggaagagggatgtgattctgttgctgctagggccaggacgcctaaggatcagggcgtggtgcctcccgcactggtccgcggctgctggagcagctgccacggctggcatcgcagtggtcttgtttaacctcaagaggtaatctggtggtccgatgcgcggaagttttgatctgctgctatggcctatatgagaataggcctacatgtatggcaagtacctttactttctgaagttttcaatggtaataagagtcgtgaacacaaacatgaggtataattgagttcttgtctgatcttttgagttgcacctgatcttttgagttcttgtcttggttcgttcttgattcttggacgaggtgggatttggagagccaagggcggcgcggcagcagcgggtttctcggtcggactagattgtttccatcgagatggtgggcggcggagggcattcgtcgatggaccaccctggcgccaaggacctcgagcgcggcgagctgcgccgtggcgcgcctgagtttgcggacggcgacgatggagacggggaagaaagccagtacttctcggacgcggaggaccggttcgtggccgtcgcactcgcgccacgactccaccgcctacgaggactacgtctcgctgtgcgtgtccgcccgcgcgagctccgtcgacgccgacgccgatgccgacggcgaggccgtcagacaacactgcaggaagtcgtcgtgcgtgtcagagggctcgctggacgacgttgacctggaggccggactgagcgagatcatcaaggccagccctgagaaggccgaacagaactgtcgcatttgccaccttggcctggagagcacggcggtcgagtccggtgccggcatcacgctcggctgctcctgcaagggggacttatcctacgcccacaagcagtgcgccgacacctggttcaagatcagaggcaacaaatgccaatcggctggagtagacaccctgtttgtggaaggaggtaccatttcataattcggaatgaatacaaaacctgcaagcattgtgaccattgtgggcttatggcccagtcgtttggaacacggtgctcgacatgcaaatatgtgatctcctctgatgatccggaagattgggactataggcagttggataatccacgtcacttgctgcatgcaaatcagaacattcatccagatgaggactaacttgaaggtggtcgataactctggggccaagtgagtgatgtgcatccagtccctgagggggaagaaaggagcaaggctcggggacatgatcatcggatccgtaaaggaggcccagcctcgtggcaaggtcaagaaagaagacgtagtctacggcgtggtcgtccgcgccgccatgaagaaagggcgcagcgacggcagcgaggtccagttcgacgacaacgaggtggtcctcgtgaacaagaagggtgagctgatcggcacccgcgtcttcggccccgtcccccacgagctgaggaagaagaagcacctcaagatcctggccctggctgaacacatcgtttgaggtgtgtcgcagagccaagagccaagtgtttatgggaatgtttttttgtctgtgttctctgtttgaataatgcattgtgaaacgatagcatggaccgtttgaactattttgatgatattgctcgcccatttggatggtc

SEQ ID NO: 24250 - protein, 157 aa, Zea mays subsp. mays
  misc_feature (1)..(157): Ceres Seq. ID no. 12423947
METGKKASTSRTRRTGSWPSHSRHDSTAYEDYVSLCVSARASSVDADADADGEAVRQHCRKSSCVSEGSLDDVDLEAGLSEIIKASPEKAEQNCRICHLGLESTAVESGAGITLGCSCKGDLSYAHKQCADTWFKIRGNKCQSAGVDTLFVEGGTIS

SEQ ID NO: 24251 - protein, 107 aa, Zea mays subsp. mays
  misc_feature (1)..(107): Ceres Seq. ID no. 12423948
MVGGGGHSSMDHPGAKDLERGELRRGAPEFADGDDGDGEESQYFSDAEDRFVAVALAPRLHRLRGLRLAVRVRPRELRRRRRRCRRRGRQTTLQEVVVRVRGLAGRR

SEQ ID NO: 24252 - protein, 101 aa, Zea mays subsp. mays
  misc_feature (1)..(101): Ceres Seq. ID no. 12423949
MCIQSLRGKKGARLGDMIIGSVKEAQPRGKVKKEDVVYGVVVRAAMKKGRSDGSEVQFDDNEVVLVNKKGELIGTRVFGPVPHELRKKKHLKILALAEHIV

SEQ ID NO: 24253 - DNA, 1611 bp, Zea mays subsp. mays
  misc_feature (1)..(1611): Ceres Seq. ID no. 12423958
gcacgagaccattacctagaacatcctaatcgaaaaaacaaagcccccaaaaccctacggccacctcgccacccccaacgaaaacccagaccacgagatggcccccggtggagagggcaagccaagcacgggcggcggcggcggcggcgtcaagggtgggaggaagcgcaagttccttccccacgggaagccggtgcggaagggggcctacccgctgcgccccggcgtgcagggcttcttcatcacctgcgacggcggccgcgagcaccaggccacccgcgaggcgctctccctcctcgactccttctatgaagacctggtggatgggaaaggatcggatgagaagcctaaaaacattccagacaagccactgaacaaaaagataaattttgaggactctgattcctcagatgatgaggatgaagacaactctggtgaggaagccgacaatgggaatgtgaatgatgtggagaaaggtgaaaccgctccatctgagaagcaacaggaggtgcttgatacctctaataccgcaagcaaggacaatactgctctatctgagaagaaagaggaggtgcttgatacctctgataccgtgagtaaggacaatgaggaacaagcagtcactgctgatgaaccaagagaaaagaagcaacgagtgnaagatcctccagtttttgagcaggccgtgcaaaaagagnntgntgatgaaccaaaggagtccnctgataaaccaaaggagtccagtgaaaaaaatattgacgatttaattgatgaggacctgaaagaaataggggacaggaaaaagaggctctttgcaagcctcgagacaggctgcaatggatgcatattcattcaaatgcataaaagagcaggagaccctggtccagttgagattgtacaaaacatgatgtcatctgctgcattgactcgtaaacatatgtcaagatttattctgcgagttttgcctgttgaggtggcatgctatgcatctgaagaggaaataacaaaggcaattagtccccttattgaaaagtacttcccaaaagaatgctcctcaggtcataagtttgcagtgttatatgaagcaaggtcaaacacaggaattgatagaatgaaaatcataaacgcagcagcgaaatctgtaccacaacctcataaagttgacctgaagaacccagacaagactattgttgtccagattgcaaagaccatatgcatgattggagttgtggaaaggtacaaagagctctcgaagttcaacctaaggcagctgacctcaccggagtcggagaagtaagcctatgagtgacaaaatcttccaggcaaaacgtggaccaacttaaatcagcagcagcgtcaggtggttaggcgctagcgaattaaattaaggccggccgaacctcactgtcttgaaagattcagatgttctaatgtttaatgctttaccaccagtggttagtggttgctggttcatgcttcccaggttagagtcacgatttttttttttttgaggctgtagaaagatctgacgatacttcatgtgtgctttctctctgacgatggttccatacaggggcttaccaaagacgtagaatctatcgttgcagctcc

SEQ ID NO: 24254 - protein, 399 aa, Zea mays subsp. mays
  misc_feature (1)..(399): Ceres Seq. ID no. 12423959
  misc_feature (188)..(188): Xaa is any aa, unknown or other
  misc_feature (201)..(201): Xaa is any aa, unknown or other
  misc_feature (202)..(202): Xaa is any aa, unknown or other
  misc_feature (209)..(209): Xaa is any aa, unknown or other
MAPGGEGKPSTGGGGGGVKGGRKRKFLPHGKPVRKGAYPLRPGVQGFFITCDGGREHQATREALSLLDSFYEDLVDGKGSDEKPKNIPDKPLNKKINFEDSDSSDDEDEDNSGEEADNGNVNDVEKGETAPSEKQQEVLDTSNTASKDNTALSEKKEEVLDTSDTVSKDNEEQAVTADEPREKKQRVXDPPVFEQAVQKEXXDEPKESXDKPKESSEKNIDDLIDEDLKEIGDRKKRLFASLETGCNGCIFIQMHKRAGDPGPVEIVQNMMSSAALTRKHMSRFILRVLPVEVACYASEEEITKAISPLIEKYFPKECSSGHKFAVLYEARSNTGIDRMKIINAAAKSVPQPHKVDLKNPDKTIVVQIAKTICMIGVVERYKELSKFNLRQLTSPESEK

SEQ ID NO: 24255 - DNA, 1777 bp, Zea mays subsp. mays
  misc_feature (1)..(1777): Ceres Seq. ID no. 12423983
gcacgagaccattacctagaacatcctaatcgaaaaattgctgttagctccacacaaaagagagaaccggcggcgagctaggagctagccatggacggacacggcgcggtctcgccgtggagcgtgctaggcggggcggcggctgtgctgttcctgtggttggcgtcgcaggtgctggagtgggcctggtgggcgccccggcgcgtgaaccgtgcgctgagggcgcagggcctgaggggcacccggtaccgcctcctctgcggcgacctcatcgaggagcagcgtctccgcgcggcggccctggcaaggcccgtccccgtggatcgaccacacgacttcctccctcgcgtcgcgcctttccttcaccgcgtcctccaagagcacggcaagctctcgtttacatggtttgggccgaccccaagagttctaatcaccgatcccgagcttgcccgggaagtgctgtcgaataagtgtggcgacttcgtgaagtcgctgctctctcccctgtcaacgctgctggttgctgggctcgtcgtccttgacggtgaaaagtgggtcaaacatcgaaggattctgaatccggcattccacgcggagaagctgaagggaatgctgccggcattcttagcatgttgcaacgaactggttgacagatgggagaaacagatctcctgcttccgctgaaccaactgagctggatgtctggccagagttccaaaacttatcgggagatgtgatttcaagagctgcattcggtgttagctatgaagaaggcagaagaattttcctacttcaggcggagcaagctgaacgccttgttcaatctttcaagacaaattacatccctggcttctctctcctgccaacagaaaacaacagaaggatgaatgaaatcgacagggaggtgaagacggtcntgaggggcataatagagaagagacagaaggcagccaagaacggtgaagcaaccaaggacgacctgctgggcttgctactggagtcgaacatgaattacagcgactcggacggcaaatccagcaaggggattacggtggaggaggtgatcggcgagtgcaaggtgttctacttcgcagggatggagaccaccgccgtgctgctcacatggacagtggccgtgctaagcatgcacccggagtggcaggaccgtgccagggaggaggtcctgcaggtctttggtgaaaacaagccggacttcaatggtgtggcacgcctaaaagtggtgaccatggtgctctacgaggtgctgcgtctgtaccctccggtggcggccatcaaccgccggacacgccagccgacaaagctcggaggcgtcacgtacccggcgggggtcatgcttatgacgcccgtcatgttcatccaccgggaccctgccctgtggggctccgacgccgacgagttcaacccggggaggttcgccgacggcgtgtccaaggcgtgcagggaccccggcgccttcgcccccttcagctggggcccgcgcgtctgcatcggccagaactttgcgctcctggaggccaagctggccgtcagcatgatcctgcagcgcttcgcgttcgaggtgtcgccggcgtacgtccacgcgccctacaccgtgctgacactgcacccgcagcacggcgctccggtcaggctgcgcaggctatgaatacacgatcggtgcttccgttaagcaatttctctccaatacccgaagactcttgtttattcatttcaaagttacgattacaaaacataatgcaaaatctcaaacttatat

SEQ ID NO: 24256 - protein, 260 aa, Zea mays subsp. mays
  misc_feature (1)..(260): Ceres Seq. ID no. 12423984
  misc_feature (12)..(12): Xaa is any aa, unknown or other
MNEIDREVKTVXRGIIEKRQKAAKNGEATKDDLLGLLLESNMNYSDSDGKSSKGITVEEVIGECKVFYFAGMETTAVLLTWTVAVLSMHPEWQDRAREEVLQVFGENKPDFNGVARLKVVTMVLYEVLRLYPPVAAINRRTRQPTKLGGVTYPAGVMLMTPVMFIHRDPALWGSDADEFNPGRFADGVSKACRDPGAFAPFSWGPRVCIGQNFALLEAKLAVSMILQRFAFEVSPAYVHAPYTVLTLHPQHGAPVRLRRL

SEQ ID NO: 24257 - protein, 219 aa, Zea mays subsp. mays
  misc_feature (1)..(219): Ceres Seq. ID no. 12423985
MNYSDSDGKSSKGITVEEVIGECKVFYFAGMETTAVLLTWTVAVLSMHPEWQDRAREEVLQVFGENKPDFNGVARLKVVTMVLYEVLRLYPPVAAINRRTRQPTKLGGVTYPAGVMLMTPVMFIHRDPALWGSDADEFNPGRFADGVSKACRDPGAFAPFSWGPRVCIGQNFALLEAKLAVSMILQRFAFEVSPAYVHAPYTVLTLHPQHGAPVRLRRL

SEQ ID NO: 24258 - protein, 197 aa, Zea mays subsp. mays
  misc_feature (1)..(197): Ceres Seq. ID no. 12423986
MDGHGAVSPWSVLGGAAAVLFLWLASQVLEWAWWAPRRVNRALRAQGLRGTRYRLLCGDLIEEQRLRAAALARPVPVDRPHDFLPRVAPFLHRVLQEHGKLSFTWFGPTPRVLITDPELAREVLSNKCGDFVKSLLSPLSTLLVAGLVVLDGEKWVKHRRILNPAFHAEKLKGMLPAFLACCNELVDRWEKQISCFR

SEQ ID NO: 24259 - DNA, 1326 bp, Zea mays subsp. mays
  misc_feature (1)..(1326): Ceres Seq. ID no. 12424016
aatccaccggatccccacccacacctcgctaccccgaccgatgaaggcgtcgatcaagttccgcgacgacgagcggccgctggtgcgcgccaaggtgccgatcgtcgtgctggggctgccgttccagtcggggctcgcggcgggaagggacctgcgggagctccgcttcgacgtgtccacggcgttcgcatcgggcccggcgctccggctctcgtaccgccccaacgacccggcgctccccttcgcgctcgccgtgcgcgcggggctcggcccgctggggtccccggcacgcgcgcccttcgcgctcgccgccgagttcaacctcgtcgcccacgacccctcctcgtcgcccgccttcttcctccgcctcaagccgcggctcggcgacttctcgctctcccacacgctgcgctcccctgcggcggcgccagcgccacggaaggccggggagccgagctccgacggccggcgggaggtgaagcctctggantacatgcnnccgttcacgttcaccgggagcgggctcgcgnccgacgtggcggcggcggggaccggcagcggggtcggcacgctgctgtccggcatgcggctcacgaccaggagcgtgctcccgctgtggggccgggcgagcctgcggttcaactggggcctgcgcgtgccgccggagctgctcgccgccgacggcaagggcgcttgcgcgcccgtcagcaanatnccnntgctggtcatgagcaaggtttgcatcgagcagtccccgcgctccgtcacgggcaccaaggccggcggccgagcacctgcacccgccctggcctccacgnacgcggcgtcgnacggcgacgcggcgttctcgctggtgaggcggcagctggagtcgctgagcgtggacaacatgctgntccggcgcgccgtggaggacctccgcgcggaggtccgcagcagcaacagcagggccgcgccgcccgctgcttntgntgcggggcgtggcttgggcagggtggcggcgaccgcgccacaaatgcagacgcagacgcagccttaccacgtgacgaagccggaccaccgaccccggggcgccgcgagggaggctgcggccgcgccggacgacgtcggcgaggagctgaagaaggcgttggaggcccgcctgcgctgagcagccagccttggctgccaggccgcgtcgcgtgcgagcccggcagctcaccggcaccgctcgagtgaaggtgaagtgctagtgtcgctgttaggcgttgtaatctgttggtgtcagcagcaatttggagctgctgatttgatcgctgagaagaaggggatcggacttgtcttgcc

SEQ ID NO: 24260 - protein, 405 aa, Zea mays subsp. mays
  misc_feature (1)..(405): Ceres Seq. ID no. 12424017
  misc_feature (164)..(164): Xaa is any aa, unknown or other
  misc_feature (166)..(166): Xaa is any aa, unknown or other
  misc_feature (167)..(167): Xaa is any aa, unknown or other
  misc_feature (177)..(177): Xaa is any aa, unknown or other
  misc_feature (238)..(238): Xaa is any aa, unknown or other
  misc_feature (239)..(239): Xaa is any aa, unknown or other
  misc_feature (240)..(240): Xaa is any aa, unknown or other
  misc_feature (273)..(273): Xaa is any aa, unknown or other
  misc_feature (277)..(277): Xaa is any aa, unknown or other
  misc_feature (299)..(299): Xaa is any aa, unknown or other
  misc_feature (323)..(323): Xaa is any aa, unknown or other
  misc_feature (324)..(324): Xaa is any aa, unknown or other
NPPDPHPHLATPTDEGVDQVPRRRAAAGARQGADRRAGAAVPVGARGGKGPAGAPLRRVHGVRIGPGAPALVPPQRPGAPLRARRARGARPAGVPGTRALRARRRVQPRRPRPLLVARLLPPPQAAARRLLALPHAALPCGGASATEGRGAELRRPAGGEASGXHXXVHVHRERARXRRGGGGDRQRGRHAAVRHAAHDQERAPAVGPGEPAVQLGPARAAGAARRRRQGRLRARQQXXXAGHEQGLHRAVPALRHGHQGRRPSTCTRPGLHXRGVXRRRGVLAGEAAAGVAERGQHAXPARRGGPPRGGPQQQQQGRAARCXXCGAWLGQGGGDRATNADADAALPRDEAGPPTPGRREGGCGRAGRRRRGAEEGVGGPPALSSQPWLPGRVACEPGSSPAPLE

SEQ ID NO: 24261 - protein, 382 aa, Zea mays subsp. mays
  misc_feature (1)..(382): Ceres Seq. ID no. 12424018
  misc_feature (163)..(163): Xaa is any aa, unknown or other
  misc_feature (166)..(166): Xaa is any aa, unknown or other
  misc_feature (177)..(177): Xaa is any aa, unknown or other
  misc_feature (237)..(237): Xaa is any aa, unknown or other
  misc_feature (238)..(238): Xaa is any aa, unknown or other
  misc_feature (239)..(239): Xaa is any aa, unknown or other
  misc_feature (240)..(240): Xaa is any aa, unknown or other
  misc_feature (273)..(273): Xaa is any aa, unknown or other
  misc_feature (277)..(277): Xaa is any aa, unknown or other
  misc_feature (299)..(299): Xaa is any aa, unknown or other
  misc_feature (323)..(323): Xaa is any aa, unknown or other
  misc_feature (324)..(324): Xaa is any aa, unknown or other
IHRIPTHTSLPRPMKASIKFRDDERPLVRAKVPIVVLGLPFQSGLAAGRDLRELRFDVSTAFASGPALRLSYRPNDPALPFALAVRAGLGPLGSPARAPFALAAEFNLVAHDPSSSPAFFLRLKPRLGDFSLSHTLRSPAAAPAPRKAGEPSSDGRREVKPLXYMXPFTFTGSGLAXDVAAAGTGSGVGTLLSGMRLTTRSVLPLWGRASLRFNWGLRVPPELLAADGKGACAPVSXXXXLVMSKVCIEQSPRSVTGTKAGGRAPAPALASTXAASXGDAAFSLVRRQLESLSVDNMLXRRAVEDLRAEVRSSNSRAAPPAAXXAGRGLGRVAATAPQMQTQTQPYHVTKPDHRPRGAAREAAAAPDDVGEELKKALEARLR

SEQ ID NO: 24262 - protein, 369 aa, Zea mays subsp. mays
  misc_feature (1)..(369): Ceres Seq. ID no. 12424019
  misc_feature (150)..(150): Xaa is any aa, unknown or other
  misc_feature (153)..(153): Xaa is any aa, unknown or other
  misc_feature (164)..(164): Xaa is any aa, unknown or other
  misc_feature (224)..(224): Xaa is any aa, unknown or other
  misc_feature (225)..(225): Xaa is any aa, unknown or other
  misc_feature (226)..(226): Xaa is any aa, unknown or other
  misc_feature (227)..(227): Xaa is any aa, unknown or other
  misc_feature (260)..(260): Xaa is any aa, unknown or other
  misc_feature (264)..(264): Xaa is any aa, unknown or other
  misc_feature (286)..(286): Xaa is any aa, unknown or other
  misc_feature (310)..(310): Xaa is any aa, unknown or other
  misc_feature (311)..(311): Xaa is any aa, unknown or other
MKASIKFRDDERPLVRAKVPIVVLGLPFQSGLAAGRDLRELRFDVSTAFASGPALRLSYRPNDPALPFALAVRAGLGPLGSPARAPFALAAEFNLVAHDPSSSPAFFLRLKPRLGDFSLSHTLRSPAAAPAPRKAGEPSSDGRREVKPLXYMXPFTFTGSGLAXDVAAAGTGSGVGTLLSGMRLTTRSVLPLWGRASLRFNWGLRVPPELLAADGKGACAPVSXXXXLVMSKVCIEQSPRSVTGTKAGGRAPAPALASTXAASXGDAAFSLVRRQLESLSVDNMLXRRAVEDLRAEVRSSNSRAAPPAAXXAGRGLGRVAATAPQMQTQTQPYHVTKPDHRPRGAAREAAAAPDDVGEELKKALEARLR

SEQ ID NO: 24263 - DNA, 1461 bp, Zea mays subsp. mays
  misc_feature (1)..(1461): Ceres Seq. ID no. 12424045
gcacgagaccattacctagaacatcctaatcaaaaaaccaagtcctaggaataacaccacggcgcaaaaactcgcaccaccaccgccactaccgccgcgctgtagctagctaccataccagctgcacgcctcagtgctagcttcgccgggcgggggcggctgggacaccagcagggcgtgctgcgctgcgcctctccctgccactcactcgaggagcaaccgtctcagctgcaagggcgacaagaggatcgaccagctgctagtagctagctcgcacatgttcccggtcgaagtgtcggcgctcgcggcgggcggtgcgggagcggggcgtcaggctgccggcgacgccgccgggacgatgctaccgccctttttcatgggctccatctggcccgcggccgctggcgccgctggctccgaggaggacgaggcggccgccgccgccgccgcccacgaccgcgcgctcgccgcgtcgcgcaaccaccgcgaggccgagaagcgccggcgcgagcgcattaagtcgcacctcgaccgcctccgcaacgtcctcgcctgcgaccccaagatagacaaggcttcgctgctggcgaaggcggtggagagggtgcgggacctgaagcagcgggcggcgggcgtcggggaggcggcgccggcgcacctgttcccgacggagcacgacgagatcgtggtgctcgcgtcgggcagcggcgccgtcttcgaggcctccgtctgctgcgacgaccgctccgacctcctcccggacctcatcgagacgctgcgcgcgctccgcctccgcacgctccgctccgagatggccaccctcggcggccgcgtccgcaacgtgctcgtcctggcgcgcgacgtcgtcgacggcggcggcggtgccgtcgcgggaggtgatgacggatacggtggacgcgctgctgactcggcgggcggtgccacagacggcggcggcggtgacttcctcaaggaagccctgcgggctctggtagagaggccaggcgctgccggagaccggcccaagaggcgacgggtctcggacatgaacatgcaagcggcagcatagctagcacgccgccgcaggaggcgggcagatcatctcgctcgattggtcgtcgtagctcaaatacctaattgcatgcatgctcatgtcgaatatataaaaatggtactacctccatcatctccatgtttagttagatgtcttcatgatgctagctagatatctcttcatctcccattctctcatgcatggctttcttcttgagatgccataccattattagggatagtatggtattgctattagggtttgcttgagcttgaaccaaatgttgttccaaagccaatgcaaatctacctttgagctataataacaaaaaagagtcaggcaaaggttgcggacttgttacccaactagttaataagcaatatatattctaagcaatatatatttgg

SEQ ID NO: 24264 - protein, 263 aa, Zea mays subsp. mays
  misc_feature (1)..(263): Ceres Seq. ID no. 12424046
MFPVEVSALAAGGAGAGRQAAGDAAGTMLPPFFMGSIWPAAAGAAGSEEDEAAAAAAAHDRALAASRNHREAEKRRRERIKSHLDRLRNVLACDPKIDKASLLAKAVERVRDLKQRAAGVGEAAPAHLFPTEHDEIVVLASGSGAVFEASVCCDDRSDLLPDLIETLRALRLRTLRSEMATLGGRVRNVLVLARDVVDGGGGAVAGGDDGYGGRAADSAGGATDGGGGDFLKEALRALVERPGAAGDRPKRRRVSDMNMQAAA

SEQ ID NO: 24265 - protein, 236 aa, Zea mays subsp. mays
  misc_feature (1)..(236): Ceres Seq. ID no. 12424047
MLPPFFMGSIWPAAAGAAGSEEDEAAAAAAAHDRALAASRNHREAEKRRRERIKSHLDRLRNVLACDPKIDKASLLAKAVERVRDLKQRAAGVGEAAPAHLFPTEHDEIVVLASGSGAVFEASVCCDDRSDLLPDLIETLRALRLRTLRSEMATLGGRVRNVLVLARDVVDGGGGAVAGGDDGYGGRAADSAGGATDGGGGDFLKEALRALVERPGAAGDRPKRRRVSDMNMQAAA

SEQ ID NO: 24266 - protein, 230 aa, Zea mays subsp. mays
  misc_feature (1)..(230): Ceres Seq. ID no. 12424048
MGSIWPAAAGAAGSEEDEAAAAAAAHDRALAASRNHREAEKRRRERIKSHLDRLRNVLACDPKIDKASLLAKAVERVRDLKQRAAGVGEAAPAHLFPTEHDEIVVLASGSGAVFEASVCCDDRSDLLPDLIETLRALRLRTLRSEMATLGGRVRNVLVLARDVVDGGGGAVAGGDDGYGGRAADSAGGATDGGGGDFLKEALRALVERPGAAGDRPKRRRVSDMNMQAAA

SEQ ID NO: 24267 - DNA, 2143 bp, Zea mays subsp. mays
  misc_feature (1)..(2143): Ceres Seq. ID no. 12424075
acaaattaagacgggcgtcgttggcttcaaatactggtctctcccctgtccaaaagtctctcgaatctccaccctggttccgcaccggttccagaattttctcccatttccagggtctccccgtttctgtccggcggttctgccgttccactgcttttgatttcggagtgtgagcttacatcttgctggacaataaagattggattttaagcgatttggggggtgcttgcctgatctccccctgcgaggtactgccgggggattggatttcggggaagttttggtggtttgatattcggcttggccggagcaggaatgacgatcgacatgtccattcccaggagctccgggctgctgaacgctgcggggaagagggacatgaagttcttcagcaacccctacgtgcttgcgctcacgggcgctgcaggaatcggtggattcctctttggctacgatacaggtgtcatatctggagcccttctgtatatccgcgatgattttccagcggtcaaggacaattacttcttacaggaaacgattgttagcatggccttagtcggagctatgattggagctgctgggggtggttggatcaatgatgcatacggtcgcaagaagtctactcttcttgctgatttgatgtttgctcttggctcacttgtcatgtgtgctgctgctggtccttacattctaattatcggaaggctcctcgttggtttgggtgtgggtgttgcatcagtcacagcaccggtatacattgctgaagctgctccttcagaaatcaggggaggtttggtgtcaactaatgtactcatgattaccggtggccaattcttctcctatcttatcaatcttggctttactgaggtgcctggaacatggcgctggatgcttggtgttgctgctgttcctgccattatacagtttgtgctgatgctattcctgccagaatctccgcgttggctttactggaaggatgagaaggcaaaagctattgccgtccttgagaggatctatgaatcggaccgcttggaggaagaggtagagctgcttgctacatcctccatgcatgaattccagtccaacaataccggaagctatctggatgtcttcaagtcgaaagaattgaggctagctttctttgctggggctggccttcaggccttccagcaatttactgggatcaacaccgtgatgtattacagccccacgatagtccagatggctggtttctcctccaacaggctggccttgctcctctccctgatcgtggcggccatgaacgccgccggaaccatcgtcgggatctacctaatcgaccgttgcggccgccgccgcctggccctcacaagcttggccggggtcgtggtctccctggccatcctcgccacggccttcatactgcagtcatcatccggcctctgcgcgagcgccgccagcggcacgtgccagggcgcgctaggctggttcgcggtggccggcctcgctctgtacatcgccttcttctccccgggcatggggcccgtgccgtgggccgtgaactcggagatctaccccgaggcgtaccgtgggatgtgcggcggcatgtcggccaccgtgaactgggtctctaacctcgtcgtggcacagacgttcctgtcgatcgtggggctggtcgggaccggcccgacgttcctgatcgtcgccgggatcgcggtgctggccttcgtcttcgtggccacgtacgtgccggagacgaagggcctgacttttgagcaggtggagcagatgtggagggagagagcgtgggggaacagcggcggcaactgcgagagccttttggcgggtactgcttctgcgccgtaggctacccgttgtcagcactggtcaagcgcgtcagttttagtatggccgcgctgggcttgatcggctccgtcctggcattagttggaagaaagtaaaaaacaaattggagatgcagatgcaaactgttgtatgtggtggtgctttatattgctatcctgttgcctgattgtacgtgttgtcatcgtggcaaatgtgcagtgggtgtaaaatatgaggtcataccgtaacgtcaaactaaggcaaaagggcagttgtatgacccagatgggtgattataattatttgtacagtttccggc

SEQ ID NO: 24268 - protein, 509 aa, Zea mays subsp. mays
  misc_feature (1)..(509): Ceres Seq. ID no. 12424076
MTIDMSIPRSSGLLNAAGKRDMKFFSNPYVLALTGAAGIGGFLFGYDTGVISGALLYIRDDFPAVKDNYFLQETIVSMALVGAMIGAAGGGWINDAYGRKKSTLLADLMFALGSLVMCAAAGPYILIIGRLLVGLGVGVASVTAPVYIAEAAPSEIRGGLVSTNVLMITGGQFFSYLINLGFTEVPGTWRWMLGVAAVPAIIQFVLMLFLPESPRWLYWKDEKAKAIAVLERIYESDRLEEEVELLATSSMHEFQSNNTGSYLDVFKSKELRLAFFAGAGLQAFQQFTGINTVMYYSPTIVQMAGFSSNRLALLLSLIVAAMNAAGTIVGIYLIDRCGRRRLALTSLAGVVVSLAILATAFILQSSSGLCASAASGTCQGALGWFAVAGLALYIAFFSPGMGPVPWAVNSEIYPEAYRGMCGGMSATVNWVSNLVVAQTFLSIVGLVGTGPTFLIVAGIAVLAFVFVATYVPETKGLTFEQVEQMWRERAWGNSGGNCESLLAGTASAP

SEQ ID NO: 24269 - protein, 505 aa, Zea mays subsp. mays
  misc_feature (1)..(505): Ceres Seq. ID no. 12424077
MSIPRSSGLLNAAGKRDMKFFSNPYVLALTGAAGIGGFLFGYDTGVISGALLYIRDDFPAVKDNYFLQETIVSMALVGAMIGAAGGGWINDAYGRKKSTLLADLMFALGSLVMCAAAGPYILIIGRLLVGLGVGVASVTAPVYIAEAAPSEIRGGLVSTNVLMITGGQFFSYLINLGFTEVPGTWRWMLGVAAVPAIIQFVLMLFLPESPRWLYWKDEKAKAIAVLERIYESDRLEEEVELLATSSMHEFQSNNTGSYLDVFKSKELRLAFFAGAGLQAFQQFTGINTVMYYSPTIVQMAGFSSNRLALLLSLIVAAMNAAGTIVGIYLIDRCGRRRLALTSLAGVVVSLAILATAFILQSSSGLCASAASGTCQGALGWFAVAGLALYIAFFSPGMGPVPWAVNSEIYPEAYRGMCGGMSATVNWVSNLVVAQTFLSIVGLVGTGPTFLIVAGIAVLAFVFVATYVPETKGLTFEQVEQMWRERAWGNSGGNCESLLAGTASAP

SEQ ID NO: 24270 - protein, 488 aa, Zea mays subsp. mays
  misc_feature (1)..(488): Ceres Seq. ID no. 12424078
MKFFSNPYVLALTGAAGIGGFLFGYDTGVISGALLYIRDDFPAVKDNYFLQETIVSMALVGAMIGAAGGGWINDAYGRKKSTLLADLMFALGSLVMCAAAGPYILIIGRLLVGLGVGVASVTAPVYIAEAAPSEIRGGLVSTNVLMITGGQFFSYLINLGFTEVPGTWRWMLGVAAVPAIIQFVLMLFLPESPRWLYWKDEKAKAIAVLERIYESDRLEEEVELLATSSMHEFQSNNTGSYLDVFKSKELRLAFFAGAGLQAFQQFTGINTVMYYSPTIVQMAGFSSNRLALLLSLIVAAMNAAGTIVGIYLIDRCGRRRLALTSLAGVVVSLAILATAFILQSSSGLCASAASGTCQGALGWFAVAGLALYIAFFSPGMGPVPWAVNSEIYPEAYRGMCGGMSATVNWVSNLVVAQTFLSIVGLVGTGPTFLIVAGIAVLAFVFVATYVPETKGLTFEQVEQMWRERAWGNSGGNCESLLAGTASAP

SEQ ID NO: 24271 - DNA, 2197 bp, Zea mays subsp. mays
  misc_feature (1)..(2197): Ceres Seq. ID no. 12424079
gttgggtgccgtgcgagctccaagtacccctgtctccctcccgtcttgcgggcttgcctttgcctgttccatttccggctcctccagttggtagtgtcgtttcaatgcgagacgccgtccttcacgagcttgattgcccttgaaagcgaagttggtgttggtgtcgttgccggtgaggaggaagaggggatatatggctcccacggaagaggcagcaggggaggacgagcggctgctgaaggatcttctcgcttcttcgtcagataaggaaggagaggatgaagagagtacaaagacacagtccgatgaatctactaggggggattgtgataacggcgggtccgtagccgccttatcgagtgaagatgtcaatgataggcatggtagtgacagcaacagccaatgtgctgaatctgatggtgcttgcagtcaagtgcctggaacaggctccaagagcagcaacgatgagtgcggtgctgaagtgcctcaaaccggatccaagagcagtaatgatgaagatgacgggtgtgctgatgaaatgccaggagccctctccaagagcagtagcaatgacagcagtgagtgcgctgaccggagctctccgcgagctgtcctagatatctcagtatctggcagcatggactcggatgacagtgtttcagtcgagcagtcagcagaatcaaaccaaaatgtgcagtggaggaacctgatcagcagtctaatactcagaagaaagaagtccatgggcagcgcagtgacgttccctcagagacccaagagcaaagggcttagagggtacttggagaggatgaggagtggtaagaaccaaatggactgcagcgccattgctcctgagatcctccctcagatcgggaaatggaggccatcatggcggagctttgactacaatgagctttgtgctgcaactgacagttttggttcagagaaaatgattgggaagggagggcatgcagaggtatacaaaggacagcttgctgatggacaatttgtggcagtgaagagattaacaaaaggcggtaacaaagaggacagagttagcgatttcttatctgagcttggaataatagcccatgttaaccacccaaacgcagcacagctcctggggtttagcgtggaagggggtctgcacttggttcttcagttctcacctcatggaagccttgcttctgttctacatggtacaaaggagcccctgaagtggaaagtcaggttcaaaattgcacttggaattgctgaagggctgctttatctacatgaaggctgccatcgccgcataattcacagagacatcaaggcatctaatatccttctaactgaagactaccaacctcagatatcagattttgggcttgcaaagtggctccctgacaaattgacccatcatgttgtgtatcccattgaaggcacattcgggtatatggccccagaatacttcatgcatgggatcataaatgagaagaccgatgtgttcgcatatggagttctacttcttgaactagttaccgggcggaaagcggtggactcatccagacagagcctagtgatatgggcaaaaccgctgcttgatgcgaacaacatccaagagctggtggatccttcccttggtaacgagtatgaccctgaagagatggtgtacacactagcagtggcatccttgtgcatccaccacagctcaacctcgaggcctagtatgaaatcggtagtctgtttcttgaagggtgaccgggagtcacttgagctggtgagaaggcctaaaatcgtgaagcccctgatgtttgactcgggcgattcagaagattacacgcgctcgagctacctcagcgatctcaaccggcacaagcagctcgcgctggagcagtgaacatcgaattgagtttgaacagattcactgtaattttgtacatcatttacgctgtacccatgcacactgtgatcctcccacctttccacataggttttaaaaattgtatggattgatgtgggggggtcagctatcattcactacatggttgctgatctatgctgtaactttgcccagagtttcagcgcatgttacggccctgcgatcatctgtatcatccggactgtccgattgtaatgtcaggtgatgcagccactagcgaccagtctgctatactgttcgtgaaatggtgattgttagcatggttgtgtcctg

SEQ ID NO: 24272 - protein, 562 aa, Zea mays subsp. mays
  misc_feature (1)..(562): Ceres Seq. ID no. 12424080
MAPTEEAAGEDERLLKDLLASSSDKEGEDEESTKTQSDESTRGDCDNGGSVAALSSEDVNDRHGSDSNSQCAESDGACSQVPGTGSKSSNDECGAEVPQTGSKSSNDEDDGCADEMPGALSKSSSNDSSECADRSSPRAVLDISVSGSMDSDDSVSVEQSAESNQNVQWRNLISSLILRRKKSMGSAVTFPQRPKSKGLRGYLERMRSGKNQMDCSAIAPEILPQIGKWRPSWRSFDYNELCAATDSFGSEKMIGKGGHAEVYKGQLADGQFVAVKRLTKGGNKEDRVSDFLSELGIIAHVNHPNAAQLLGFSVEGGLHLVLQFSPHGSLASVLHGTKEPLKWKVRFKIALGIAEGLLYLHEGCHRRIIHRDIKASNILLTEDYQPQISDFGLAKWLPDKLTHHVVYPIEGTFGYMAPEYFMHGIINEKTDVFAYGVLLLELVTGRKAVDSSRQSLVIWAKPLLDANNIQELVDPSLGNEYDPEEMVYTLAVASLCIHHSSTSRPSMKSVVCFLKGDRESLELVRRPKIVKPLMFDSGDSEDYTRSSYLSDLNRHKQLALEQ

SEQ ID NO: 24273 - protein, 447 aa, Zea mays subsp. mays
  misc_feature (1)..(447): Ceres Seq. ID no. 12424081
MPGALSKSSSNDSSECADRSSPRAVLDISVSGSMDSDDSVSVEQSAESNQNVQWRNLISSLILRRKKSMGSAVTFPQRPKSKGLRGYLERMRSGKNQMDCSAIAPEILPQIGKWRPSWRSFDYNELCAATDSFGSEKMIGKGGHAEVYKGQLADGQFVAVKRLTKGGNKEDRVSDFLSELGIIAHVNHPNAAQLLGFSVEGGLHLVLQFSPHGSLASVLHGTKEPLKWKVRFKIALGIAEGLLYLHEGCHRRIIHRDIKASNILLTEDYQPQISDFGLAKWLPDKLTHHVVYPIEGTFGYMAPEYFMHGIINEKTDVFAYGVLLLELVTGRKAVDSSRQSLVIWAKPLLDANNIQELVDPSLGNEYDPEEMVYTLAVASLCIHHSSTSRPSMKSVVCFLKGDRESLELVRRPKIVKPLMFDSGDSEDYTRSSYLSDLNRHKQLALEQ

SEQ ID NO: 24274 - protein, 414 aa, Zea mays subsp. mays
  misc_feature (1)..(414): Ceres Seq. ID no. 12424082
MDSDDSVSVEQSAESNQNVQWRNLISSLILRRKKSMGSAVTFPQRPKSKGLRGYLERMRSGKNQMDCSAIAPEILPQIGKWRPSWRSFDYNELCAATDSFGSEKMIGKGGHAEVYKGQLADGQFVAVKRLTKGGNKEDRVSDFLSELGIIAHVNHPNAAQLLGFSVEGGLHLVLQFSPHGSLASVLHGTKEPLKWKVRFKIALGIAEGLLYLHEGCHRRIIHRDIKASNILLTEDYQPQISDFGLAKWLPDKLTHHVVYPIEGTFGYMAPEYFMHGIINEKTDVFAYGVLLLELVTGRKAVDSSRQSLVIWAKPLLDANNIQELVDPSLGNEYDPEEMVYTLAVASLCIHHSSTSRPSMKSVVCFLKGDRESLELVRRPKIVKPLMFDSGDSEDYTRSSYLSDLNRHKQLALEQ

SEQ ID NO: 24275 - DNA, 1833 bp, Zea mays subsp. mays
  misc_feature (1)..(1833): Ceres Seq. ID no. 12424091
gcacgagaccattacctagaacatcctaatcgaaaaaaaaaatttcaatgcctctctagatctttcaagctatccttgcttcctagctccctttggcgtgctgtaccggacgacaggggtaggtaggtaggtaggtgtagctagctcggcgagcgagggagcaatccggccaacagcacacgcgtcgatcgccatgccgagaagcggcggcggcggcaatggcggtggcattagtagtagtagtagggtgatgcccaacctcccggccgggttccgcttccaccccacggacgaggagctcatggtgcactacctcatgaggcaggccgcctccatgccgtgccccgtccccatcatcgccgaggtcaacatctaccagtgcaacccctgggatctccctgccaaggcattgttcggcgacaaggagtggtttttcttcagcccccgggaccgcaagtaccccaacggcgcccgccccaaccgcgccgccgggtccgggtactggaaggccaccggcaccgacaaggccatcctgtcgtcgtccacgcccacgagccacggcggcgccaacatcgtcgtcggcgtcaagaaggcgctcgtcttctacggcggcaggccgcccaagggcaccaagacggactggatcatgcacgagtaccgcctctcgggcgcggcggacgacgactgcaagggcagcaccaggcgcagagtgtcttcctcctcgtcgtcctccatgaggctggacgactgggtgctgtgcaggatccacaagaagagcaacgatttccagttgtcgtcgtcgtcggagcatgagcacgagcaggaggagccggcggcgggcggctcagcgacgactgtggaggaactagacgctctcgtcgtcgtcgacaacagcagcagcagcgacaccaccaccaccaccaccaccaccaacaacaactctactgaaacagctgcgactcatcacgatcctcagacgatgatgatgctgagcaagtcgtgctcgctcaccgacctcctcgacagcatcgactacgcggcgctctcctcgcagatgctcctcctcgacgcgccccagccccacgctgatgacccgccgccacacatggtctactacccaccggcggcgtcggcgacgatgcaccagcaagcaataatagctaataacaccaacagtaatgactactatgacgacgacaacttgttgccgactgctgcggtagacgcggcgacggcggtgctactcagctcgtcgcctgcagacaccaacggtgtgaacaagaggaagcgagtgacggccgtggactactacggcgccgctgaaccgccgaccttcttccaccaccacctcgatgatggcggcaacagcttcttcagtacgaccaagaagctcaagccgccgccgccaagtgattcgaggcatggcggccatttcggcaccgccacagcgagcagctaccgcgacagccagcagctcgtggacagcgcgagcagcagcggcgtcttcttccatcagtatgggtacggctacagcagcagcaacccgttcttgaacttgaaccagcagcagcagctgctactcaacagccacatcgggatgcagtagagctcgagagatcgagagagagagagagagagagagatgatatatcattggaaggatcagcacgcgtacgtgcagattaattgcagcgagttctatcttgtttgctttcattattatatactccgtatgtgtcgttcatgtaaaattagtttaaattgtaaattagtgtgctgaaattcatgtgcctgctctctgctcatcaatgaatggatgatgacgacccatgc

SEQ ID NO: 24276 - protein, 470 aa, Zea mays subsp. mays
  misc_feature (1)..(470): Ceres Seq. ID no. 12424092
MPRSGGGGNGGGISSSSRVMPNLPAGFRFHPTDEELMVHYLMRQAASMPCPVPIIAEVNIYQCNPWDLPAKALFGDKEWFFFSPRDRKYPNGARPNRAAGSGYWKATGTDKAILSSSTPTSHGGANIVVGVKKALVFYGGRPPKGTKTDWIMHEYRLSGAADDDCKGSTRRRVSSSSSSSMRLDDWVLCRIHKKSNDFQLSSSSEHEHEQEEPAAGGSATTVEELDALVVVDNSSSSDTTTTTTTTNNNSTETAATHHDPQTMMMLSKSCSLTDLLDSIDYAALSSQMLLLDAPQPHADDPPPHMVYYPPAASATMHQQAIIANNTNSNDYYDDDNLLPTAAVDAATAVLLSSSPADTNGVNKRKRVTAVDYYGAAEPPTFFHHHLDDGGNSFFSTTKKLKPPPPSDSRHGGHFGTATASSYRDSQQLVDSASSSGVFFHQYGYGYSSSNPFLNLNQQQQLLLNSHIGMQ

SEQ ID NO: 24277 - protein, 451 aa, Zea mays subsp. mays
  misc_feature (1)..(451): Ceres Seq. ID no. 12424093
MPNLPAGFRFHPTDEELMVHYLMRQAASMPCPVPIIAEVNIYQCNPWDLPAKALFGDKEWFFFSPRDRKYPNGARPNRAAGSGYWKATGTDKAILSSSTPTSHGGANIVVGVKKALVFYGGRPPKGTKTDWIMHEYRLSGAADDDCKGSTRRRVSSSSSSSMRLDDWVLCRIHKKSNDFQLSSSSEHEHEQEEPAAGGSATTVEELDALVVVDNSSSSDTTTTTTTTNNNSTETAATHHDPQTMMMLSKSCSLTDLLDSIDYAALSSQMLLLDAPQPHADDPPPHMVYYPPAASATMHQQAIIANNTNSNDYYDDDNLLPTAAVDAATAVLLSSSPADTNGVNKRKRVTAVDYYGAAEPPTFFHHHLDDGGNSFFSTTKKLKPPPPSDSRHGGHFGTATASSYRDSQQLVDSASSSGVFFHQYGYGYSSSNPFLNLNQQQQLLLNSHIGMQ

SEQ ID NO: 24278 - protein, 434 aa, Zea mays subsp. mays
  misc_feature (1)..(434): Ceres Seq. ID no. 12424094
MVHYLMRQAASMPCPVPIIAEVNIYQCNPWDLPAKALFGDKEWFFFSPRDRKYPNGARPNRAAGSGYWKATGTDKAILSSSTPTSHGGANIVVGVKKALVFYGGRPPKGTKTDWIMHEYRLSGAADDDCKGSTRRRVSSSSSSSMRLDDWVLCRIHKKSNDFQLSSSSEHEHEQEEPAAGGSATTVEELDALVVVDNSSSSDTTTTTTTTNNNSTETAATHHDPQTMMMLSKSCSLTDLLDSIDYAALSSQMLLLDAPQPHADDPPPHMVYYPPAASATMHQQAIIANNTNSNDYYDDDNLLPTAAVDAATAVLLSSSPADTNGVNKRKRVTAVDYYGAAEPPTFFHHHLDDGGNSFFSTTKKLKPPPPSDSRHGGHFGTATASSYRDSQQLVDSASSSGVFFHQYGYGYSSSNPFLNLNQQQQLLLNSHIGMQ

SEQ ID NO: 24279 - DNA, 1406 bp, Zea mays subsp. mays
  misc_feature (1)..(1406): Ceres Seq. ID no. 12424103
gcacgagaccattaccagaacatcctaatcgaaaaattgtccattttgcaccaccgatcgatcgagctctaggctctagctagcgcgctgcatatgtgaggcaacttttcatttatctgacacacgtacttacggcccacgatggccgccgccgccggcctcccgtggtggctgctgctcctcgccgtggtcccggccgtcaccgctgcggccaccgccggcggagaggggagggcgccggcgctgttcgtgttcggcgactcgctcatcgacagcggcaacaacaacaacctcgcatcgcttgccaaggccaactacttcccctacggcatcggacttcgccggcggccccaccggccgcttctgcaacggctacaccatcgtcgacgagctcgccgagctgcttggactgcccctggtgccaccctactctgaagcctcgtccgtgcagcatgtcctgcagggcgtcaactacccctctgccgccgccgggatcctcnacgacagtggcggcaactttgtcgggcggatcccattcaaccagcagatccagaacttngagacgaccgtggcgcggatcgccggcgcggcgggcgcggcggcggcggcggacctggtggcncgctccgtcctgttcgtggggatgggcagnaacgactacctcaacaactacctgatgcccaactacgacacgcggnggcggtaacggcccgcagcagttcgcggacctgctcgcgcggcagctggccgcgcagctggccaggctgcacggcgccgggggcaggcggttcgtggtggccggcgtggggtccgtgggctgcatcccgagcgtgcgcgcgcagagcctcgcggggcggtgctcgcgcgcggtggacgacctcgtgctccccttcaacgccaacgtgcgggcgctggtcgaccgcctcaacggcaacgctgccgccggccttcccggcgccagcctcacgtacctcgacaacttcgcggtgttcagggccatcctcaccgacccggccgcgttcggcttcgccgtcgtcgaccgcgggtgctgcggcatcggcaggaacgccgggcaggtcacctgcntgcccttcatgccgccgtgcgaccacagggagcgctacgtgttctgggacgcataccaccccacggcggccgtcaacgtcatcgtcgccagggtggggttccacnncggcgctgacgtngtntngcccgtcaacgtccgtgagcttgccggcatgtgacaagatgatcggagcggacatatatnctcctatatatagcaataataatttgtttggtgaattattgtatcagtagattttgtgctacaagcctccatccacaaaccatgcatgtagtagttatttgttactccgatctatttataaattcgctttgcactg

SEQ ID NO: 24280 - protein, 97 aa, Zea mays subsp. mays
  misc_feature (1)..(97): Ceres Seq. ID no. 12424104
MAAAAGLPWWLLLLAVVPAVTAAATAGGEGRAPALFVFGDSLIDSGNNNNLASLAKANYFPYGIGLRRRPHRPLLQRLHHRRRARRAAWTAPGATLL

SEQ ID NO: 24281 - protein, 74 aa, Zea mays subsp. mays
  misc_feature (1)..(74): Ceres Seq. ID no. 12424105
  misc_feature (16)..(16): Xaa is any aa, unknown or other
  misc_feature (36)..(36): Xaa is any aa, unknown or other
  misc_feature (57)..(57): Xaa is any aa, unknown or other
  misc_feature (67)..(67): Xaa is any aa, unknown or other
MSCRASTTPLPPPGSXTTVAATLSGGSHSTSRSRTXRRPWRGSPARRARRRRRTWWXAPSCSWGWAXTTTSTTT

SEQ ID NO: 24282 - protein, 49 aa, Zea mays subsp. mays
  misc_feature (1)..(49): Ceres Seq. ID no. 12424106
  misc_feature (33)..(33): Xaa is any aa, unknown or other
  misc_feature (37)..(37): Xaa is any aa, unknown or other
  misc_feature (38)..(38): Xaa is any aa, unknown or other
  misc_feature (39)..(39): Xaa is any aa, unknown or other
MPPCDHRERYVFWDAYHPTAAVNVIVARVGFHXGADXXXPVNVRELAGM

SEQ ID NO: 24283 - DNA, 749 bp, Zea mays subsp. mays
  misc_feature (1)..(749): Ceres Seq. ID no. 12424123
gcacgagaccattacctagaacatcctaatcgaaaattacggcttaaggcatatttgccacttggagttcgtggtgtttttgatggtgtaattgaaaatatgcacttgcattggaagcacagggaagttgttaaactaatttcaaagcagaagaccttgtcattcgttgaagagacggcacggcttcttgcatatgagagtggtggtatactagttgcaattgaaagagttccaaagggttatgcactcattttttaccgtgggaagaactataggagacctattaacataaggccaagaaacctcttaacaaaagctaaggcattgaagcgtgcggttgctatgcaacgccatgaggcccttagtcagcatatagatcaactggaaagcaatataaagcagatgaagttggatttgggtattgaggactatgaggaacaagatgaggatagctcagattcagaaaatgaatatgacaacgcagtcacctctgttagctatgatgaggatcaagacgattttgacgaatcagctgatgaagatgaatatgatgattacgacgatgaagatgacgagattgacagctagtggtttggaattgtttcttgtgatgtgccgctctgaattagtgattctctggacgttgtacttctgtctctgggacatttcgtggtacgagaaaacaaagttgcttcttgtgttcactagtccttttctattagttaacctcaagggctcaaggtttagtt

SEQ ID NO: 24284 - protein, 195 aa, Zea mays subsp. mays
  misc_feature (1)..(195): Ceres Seq. ID no. 12424124
ARDHYLEHPNRKLRLKAYLPLGVRGVFDGVIENMHLHWKHREVVKLISKQKTLSFVEETARLLAYESGGILVAIERVPKGYALIFYRGKNYRRPINIRPRNLLTKAKALKRAVAMQRHEALSQHIDQLESNIKQMKLDLGIEDYEEQDEDSSDSENEYDNAVTSVSYDEDQDDFDESADEDEYDDYDDEDDEIDS

SEQ ID NO: 24285 - protein, 162 aa, Zea mays subsp. mays
  misc_feature (1)..(162): Ceres Seq. ID no. 12424125
MHLHWKHREVVKLISKQKTLSFVEETARLLAYESGGILVAIERVPKGYALIFYRGKNYRRPINIRPRNLLTKAKALKRAVAMQRHEALSQHIDQLESNIKQMKLDLGIEDYEEQDEDSSDSENEYDNAVTSVSYDEDQDDFDESADEDEYDDYDDEDDEIDS

SEQ ID NO: 24286 - protein, 106 aa, Zea mays subsp. mays
  misc_feature (1)..(106): Ceres Seq. ID no. 12424126
MRNKMRIAQIQKMNMTTQSPLLAMMRIKTILTNQLMKMNMMITTMKMTRLTASGLELFLVMCRSELVILWTLYFCLWDISWYEKTKLLLVFTSPFLLVNLKGSRFS

SEQ ID NO: 24287 - DNA, 1224 bp, Zea mays subsp. mays
  misc_feature (1)..(1224): Ceres Seq. ID no. 12425143
gcacgagaccattacctagaacatcctaatcgaaaaattttttggtgagtgccccctttcccttccctagaccagatcctcgccccgttttccacttttgcctccaccgccggcccaattcggataacaagctccctccgcctcgccgcgtctcctcccagccgcaggagccgccgccatccgatccggaagagggaggaggggggagggaggaggatctgtgtcccgattcgattggagctctcgtccccggcggtccaggatggtgcggggcaagacgcagatgaagcggatagagaacccggccagtcgccaggtcaccttctccaagcgccgcaacggcctgctcaagaaggcgttcgagctctccgtcctctgcgacgccgaggtcgcgctcgtcgtcttctccccgcgcggcaagctctacgaattcgccagcggaagtgcccagaaaacaattgaacgttatagaacgtacacaaaggataatgtcagcaacaagacagcacatcaggacattgagcaagtaaaagctgatgctgagggcctggcaaagaaactggaagcacttgaagcttacaaaagaaaacttttgggtgagaggttggaagaatgctcctttgaagaactgcacagtttggaagtgaaactcgaaaagagccttcattgcatcaggggaagaaagactcagctgctggaggagcaactccataagctgaaggagaaggagatgaatctgcgcaagagcaacgaagatttacgtgaaaagtgcaagaagcagccgccgccgccgccgcctatgctgatggctcctccgccgcctccagcgccggcagccatcgatcacacggggccgaaggatgtcgggatggacgtggagacggagctgtacataggattgcccggcagagattaccgctcaaacaacaaagacatgactgcacagtagctgtcaggtcaggtcaggtcaggctagccagcagtgcagagaataatcttagatctgtggtgcggagaactggagatgcaagccaagcccaagccaatcaacatgataaggatcatgagtgtcgcgtcgtgttttacaaacctgtccaccgtccgtcaaaggcacatgcgccagaacgtccgtcagagaacacttaccccctcatctccctctattagctanctgctccggcctgctcatgtcgaaaccttctgttcaagtatgttctcctcctg

SEQ ID NO: 24288 - protein, 228 aa, Zea mays subsp. mays
  misc_feature (1)..(228): Ceres Seq. ID no. 12425144
MVRGKTQMKRIENPASRQVTFSKRRNGLLKKAFELSVLCDAEVALVVFSPRGKLYEFASGSAQKTIERYRTYTKDNVSNKTAHQDIEQVKADAEGLAKKLEALEAYKRKLLGERLEECSFEELHSLEVKLEKSLHCIRGRKTQLLEEQLHKLKEKEMNLRKSNEDLREKCKKQPPPPPPMLMAPPPPPAPAAIDHTGPKDVGMDVETELYIGLPGRDYRSNNKDMTAQ

SEQ ID NO: 24289 - protein, 221 aa, Zea mays subsp. mays
  misc_feature (1)..(221): Ceres Seq. ID no. 12425145
MKRIENPASRQVTFSKRRNGLLKKAFELSVLCDAEVALVVFSPRGKLYEFASGSAQKTIERYRTYTKDNVSNKTAHQDIEQVKADAEGLAKKLEALEAYKRKLLGERLEECSFEELHSLEVKLEKSLHCIRGRKTQLLEEQLHKLKEKEMNLRKSNEDLREKCKKQPPPPPPMLMAPPPPPAPAAIDHTGPKDVGMDVETELYIGLPGRDYRSNNKDMTAQ

SEQ ID NO: 24290 - DNA, 1475 bp, Zea mays subsp. mays
  misc_feature (1)..(1475): Ceres Seq. ID no. 12425146
acactgccccactctcctctacctccgcgccaatgcgcctccccaacatttaaacggccaaaccagcccaaaccccaaccccaaacccacagcagtaacaggggcacactagctaagctaaacctcgccacggcacagcaatggcgccgctccccgcttccctcctgccctgcctctggctcttcctctgcctcctcgccgcgccgtgccccacagcgcgggcggcgcggttcgcgtgcaacgccacggcgccgcgagcgtccacgtgccaggcgctcgtctcctacgcgccgcccaacgggacggncacgcccacgctggccgccgtgcgcgcgctcttccagctccgctcccaccgcgcgctgctggccgccaacggcctcccgctctccacgccgcccacggcgcccgcgcccgtgccgctgctgggtccgcctgccctgcctctgctcggggggcgccggggccacgttccagcggcccacgtaccgggtccgcgccggggacacgctcgacgccgtcgcgcggggcgtcttcgcgggcctcgtcacctaccaggacatcgccgccgccaacaacgtctccgaccccaacagggtcgccgtcggccagcagctctggatccccgtgccctgcagctgcgaccccgtgggcggccaacccgtcgtgcacttcacctacgtcgtgccggccgggggctccgtgtccggcatcgcggaggagttcggcaccacggaggagacgattctcacgctgaacaagatgcccgacgccaagtcccttctcgccggccaggttcttgacgtgccacttcgagcttgtagttctgccattagcagcacagccattgaccgcaaccttctcgtgccaaatggaagctacatcctcaccgccaacaactgcgtcaagtgtggctgcagctctagcacctggcagttggactgccagccaacacagggactgagctcgtcgttctgccctgcggccaagtgcggagacatgttcctcggcaacacatcctcctccacctcatcctgcgagagcacagcatgctcctacgccgggtacaccaacagcacatcgttcgccatcctcgccaatgtgaccaccagcaacgtgtgtaacgctgggatgactccgacggcgcagccggctcactcttcggcgtttcggttggagccggtgtggctgagatggacggagctggttgccttgtctctcttcacgctgtctttcttcgtctaggctatctgcggcaaaggctgaacgttgttgccatgcgtctgtcgttagaatctggccctctgattcctagtttgatgttgtgagtaatatctgcagtgtttgcgcgacttcgatctgtaactggttggatttgtaagggcaaactctagggtaacactgatctgtgttagacggtaaatcaggaaacatttgtacttcgtcaaacttttgcaaagataatttcttctgtt

SEQ ID NO: 24291 - protein, 414 aa, Zea mays subsp. mays
  misc_feature (1)..(414): Ceres Seq. ID no. 12425147
  misc_feature (103)..(103): Xaa is any aa, unknown or other
TLPHSPLPPRQCASPTFKRPNQPKPQPQTHSSNRGTLAKLNLATAQQWRRSPLPSCPASGSSSASSPRRAPQRGRRGSRATPRRRERPRARRSSPTRRPTGRXRPRWPPCARSSSSAPTARCWPPTASRSPRRPRRPRPCRCWVRLPCLCSGGAGATFQRPTYRVRAGDTLDAVARGVFAGLVTYQDIAAANNVSDPNRVAVGQQLWIPVPCSCDPVGGQPVVHFTYVVPAGGSVSGIAEEFGTTEETILTLNKMPDAKSLLAGQVLDVPLRACSSAISSTAIDRNLLVPNGSYILTANNCVKCGCSSSTWQLDCQPTQGLSSSFCPAAKCGDMFLGNTSSSTSSCESTACSYAGYTNSTSFAILANVTTSNVCNAGMTPTAQPAHSSAFRLEPVWLRWTELVALSLFTLSFFV

SEQ ID NO: 24292 - protein, 220 aa, Zea mays subsp. mays
  misc_feature (1)..(220): Ceres Seq. ID no. 12425148
  misc_feature (56)..(56): Xaa is any aa, unknown or other
MAPLPASLLPCLWLFLCLLAAPCPTARAARFACNATAPRASTCQALVSYAPPNGTXTPTLAAVRALFQLRSHRALLAANGLPLSTPPTAPAPVPLLGPPALPLLGGRRGHVPAAHVPGPRRGHARRRRAGRLRGPRHLPGHRRRQQRLRPQQGRRRPAALDPRALQLRPRGRPTRRALHLRRAGRGLRVRHRGGVRHHGGDDSHAEQDARRQVPSRRPGS

SEQ ID NO: 24293 - DNA, 1527 bp, Zea mays subsp. mays
  misc_feature (1)..(1527): Ceres Seq. ID no. 12425149
gcacgagaccattacctagaacatcctaatcgaaaaaactttagccacaaatttcacccaaaaccaaaaaaataataatcccaaattaaagaaaaggagcagaagaaaaacaactttcatcgccgtccgccaccggagctcacttcgtcggccttccctcagtgtcaacccccttctcaaaacttgtatttgcacctcagtccctgccggtctgcccggtcgccgcctcgccggaggaagcccctcgtctccttgccctgcggcgggttcatggggttctcgctgtaccccatgaagacgtccacgcggatgctctggagcactagcttcttccgccataagctcagctcctcctcctgcttcctctgaggacgccccacccgcctcgatcgcttcggcggcgggccgctgctgctgcgctgtcctagcatccgttcaagtgtgtgtttgcgttcttaggtttcaagattggcttttgttgcgttcttggcgagacgaagggactagggcgcggacaaagaatcagcatgcatccgagcgcggtcagtttcgactccggcgacgggcggcggcgcggtggcgcgcagatgctgctcttcggcggcggaggcagcgccaacagcaacggcttcttccgaggtgttccgatggcggtcctggccatggacgacgcgacgcgcgtgggcaagcggcccttcttcacgacacacgaggagctcctggaggaggagtactacgacgagcaggcgccggagaagaagcgccgtctgacggcggagcaggtgcagctgctggagcggagcttcgaggaagagaacaagctggagcctgagcgcaagaccgagctggctcgccgcctggggatggcgccccgccaggtggccgtgtggttccagaaccgccgcgcgcgttggaagacaaagcagctcgagaccgactatgaccgcctcaaggctgcctacaacgcgctcgccgctgaccaccagggcctcctggccgacaacgatagcctccgggcacaggtgatctgcctaacagagaagctgcaaggcaaggagacatccctgtcggcaaccatcgctgcccaagaggtcgaccagccaaacgaacacaccacaggcactgagaaattgctggcgcagcagctcaaggacgacctgcacagcagctgcggttgcactggacatggtgccctgtcttcggaggaagaggatggtggcgtggtcagcgatgagggctgcaactttgatctccccgacgccatgtttgctgttggggtcaccaaccatggtgctgaggaggcgcagctggccaactggacatcttggttctggaactgatcggttgatggatggatgcatcaagtgcaaagagcaaatcctctcctggtttcgactcttttctgcaacatataattactgtgttgattatgtgccgtcagatgttttcaagtaatgaaacagaactgatgttgtaagtttatgtttctgaagatttgtatgttcatatatataataatatgcttgg

SEQ ID NO: 24294 - protein, 270 aa, Zea mays subsp. mays
  misc_feature (1)..(270): Ceres Seq. ID no. 12425150
MHPSAVSFDSGDGRRRGGAQMLLFGGGGSANSNGFFRGVPMAVLAMDDATRVGKRPFFTTHEELLEEEYYDEQAPEKKRRLTAEQVQLLERSFEEENKLEPERKTELARRLGMAPRQVAVWFQNRRARWKTKQLETDYDRLKAAYNALAADHQGLLADNDSLRAQVICLTEKLQGKETSLSATIAAQEVDQPNEHTTGTEKLLAQQLKDDLHSSCGCTGHGALSSEEEDGGVVSDEGCNFDLPDAMFAVGVTNHGAEEAQLANWTSWFWN

SEQ ID NO: 24295 - protein, 250 aa, Zea mays subsp. mays
  misc_feature (1)..(250): Ceres Seq. ID no. 12425151
MLLFGGGGSANSNGFFRGVPMAVLAMDDATRVGKRPFFTTHEELLEEEYYDEQAPEKKRRLTAEQVQLLERSFEEENKLEPERKTELARRLGMAPRQVAVWFQNRRARWKTKQLETDYDRLKAAYNALAADHQGLLADNDSLRAQVICLTEKLQGKETSLSATIAAQEVDQPNEHTTGTEKLLAQQLKDDLHSSCGCTGHGALSSEEEDGGVVSDEGCNFDLPDAMFAVGVTNHGAEEAQLANWTSWFWN

SEQ ID NO: 24296 - protein, 230 aa, Zea mays subsp. mays
  misc_feature (1)..(230): Ceres Seq. ID no. 12425152
MAVLAMDDATRVGKRPFFTTHEELLEEEYYDEQAPEKKRRLTAEQVQLLERSFEEENKLEPERKTELARRLGMAPRQVAVWFQNRRARWKTKQLETDYDRLKAAYNALAADHQGLLADNDSLRAQVICLTEKLQGKETSLSATIAAQEVDQPNEHTTGTEKLLAQQLKDDLHSSCGCTGHGALSSEEEDGGVVSDEGCNFDLPDAMFAVGVTNHGAEEAQLANWTSWFWN

SEQ ID NO: 24297 - DNA, 1500 bp, Zea mays subsp. mays
  misc_feature (1)..(1500): Ceres Seq. ID no. 12425157
gaaccaaccaaacctcaccgaatcgcaacgacagcgagaacgtccaaacgagcgcgagtctccggcgataaccaagagcgcgggcacgcaaagcggcgaagcgggaaggaagcagtaacgatggggcttgactattacaagatcctaggcgtcgacaagggcgccaccgatgacgacctcaagaaggcctaccgcaagctcgccatgaaatggcaccccgacaagaaccccaacaacaagaaggaggccgagaacaagttcaagcagatctcggaggcgtacgaggtgctgagcgacccgcagaagcgcgcggtgtacgaccagtacggcgaggagggtctcaaggggcaggtgccgccgccgggcgccggcggggcgggccccggcggcgcaaccttcttctccaccggcggcgacgggccgacggtgttccggttcaacccgcgcaacgcggaggacatcttcgccgagttcttcggcggctccagccccttcggcggtatgggcggcggtggcatgggcggcagcggcatggggggtgggatgcccggcatgcggagcggcgggacaaggttctcctcctccatcttcggggacgacatattcggctctgcgttccgcagcggcccggacgggcacggcatgcacgccggcgggcgggccgtgaaggcgccggccatagagcggaagctgccgtgcagcctcgaggagctgtacaagggcaccaccaagaagatgaagatctccagggaaatctctgacgccagtgggaagacgatcccagtggaagagatcctaacgatcgacgtgaagccggggtggaagaagggcaccaagatcacgttcccggagaagggcaacgagacgcccaacacgatcccggcggacctcgtcttcatcatcgacgagaagccgcacccggtgttcacccgcgacggcaacgacctggtggtgacccagaagatcccgctggcggaggccctgacggggtacaccgcgcacgtgacgacgctggacgggcgcagcctgacggtgcccatcagctccgtgatccacccgggctacgaggagntggtgcgaggggagggcatgccgatacccaaggacccgtccaggaagggcaacctccggatcaagttcgacatcaagttcccggcgaggctcacggcggaccagaagtccggcgtcaagaggctgctcgggcagtagagcgcgcttgtgttgttttgtattgtgtatcagacattttcgtgttggttcatcttgaactggggtggagggagctgccatttgcagcctccgcaacgacgacgacgatgacgaggccaccaagtgttgagtacagaacagctactgttgtacggtgtatggttgagaaacttgagatgtgtagcggaggattccttgtgcgaacttccagatcgtggtggttgtctgttcactggtccacgtcgttgcatttgcaacttgcaaggatcgcggatggagtaactgttggcc

SEQ ID NO: 24298 - protein, 402 aa, Zea mays subsp. mays
  misc_feature (1)..(402): Ceres Seq. ID no. 12425158
  misc_feature (358)..(358): Xaa is any aa, unknown or other
EPTKPHRIATTARTSKRARVSGDNQERGHAKRRSGKEAVTMGLDYYKILGVDKGATDDDLKKAYRKLAMKWHPDKNPNNKKEAENKFKQISEAYEVLSDPQKRAVYDQYGEEGLKGQVPPPGAGGAGPGGATFFSTGGDGPTVFRFNPRNAEDIFAEFFGGSSPFGGMGGGGMGGSGMGGGMPGMRSGGTRFSSSIFGDDIFGSAFRSGPDGHGMHAGGRAVKAPAIERKLPCSLEELYKGTTKKMKISREISDASGKTIPVEEILTIDVKPGWKKGTKITFPEKGNETPNTIPADLVFIIDEKPHPVFTRDGNDLVVTQKIPLAEALTGYTAHVTTLDGRSLTVPISSVIHPGYEEXVRGEGMPIPKDPSRKGNLRIKFDIKFPARLTADQKSGVKRLLGQ

SEQ ID NO: 24299 - protein, 362 aa, Zea mays subsp. mays
  misc_feature (1)..(362): Ceres Seq. ID no. 12425159
  misc_feature (318)..(318): Xaa is any aa, unknown or other
MGLDYYKILGVDKGATDDDLKKAYRKLAMKWHPDKNPNNKKEAENKFKQISEAYEVLSDPQKRAVYDQYGEEGLKGQVPPPGAGGAGPGGATFFSTGGDGPTVFRFNPRNAEDIFAEFFGGSSPFGGMGGGGMGGSGMGGGMPGMRSGGTRFSSSIFGDDIFGSAFRSGPDGHGMHAGGRAVKAPAIERKLPCSLEELYKGTTKKMKISREISDASGKTIPVEEILTIDVKPGWKKGTKITFPEKGNETPNTIPADLVFIIDEKPHPVFTRDGNDLVVTQKIPLAEALTGYTAHVTTLDGRSLTVPISSVIHPGYEEXVRGEGMPIPKDPSRKGNLRIKFDIKFPARLTADQKSGVKRLLGQ

SEQ ID NO: 24300 - protein, 334 aa, Zea mays subsp. mays
  misc_feature (1)..(334): Ceres Seq. ID no. 12425160
  misc_feature (290)..(290): Xaa is any aa, unknown or other
MKWHPDKNPNNKKEAENKFKQISEAYEVLSDPQKRAVYDQYGEEGLKGQVPPPGAGGAGPGGATFFSTGGDGPTVFRFNPRNAEDIFAEFFGGSSPFGGMGGGGMGGSGMGGGMPGMRSGGTRFSSSIFGDDIFGSAFRSGPDGHGMHAGGRAVKAPAIERKLPCSLEELYKGTTKKMKISREISDASGKTIPVEEILTIDVKPGWKKGTKITFPEKGNETPNTIPADLVFIIDEKPHPVFTRDGNDLVVTQKIPLAEALTGYTAHVTTLDGRSLTVPISSVIHPGYEEXVRGEGMPIPKDPSRKGNLRIKFDIKFPARLTADQKSGVKRLLGQ

SEQ ID NO: 24301 - DNA, 1342 bp, Zea mays subsp. mays
  misc_feature (1)..(1342): Ceres Seq. ID no. 12425290
gcacgagaccattacctagaacatcctaatcgaaaagggagcaatataactaactgcacaaacgcaaaagtcaaacttgcagctgaggaatcgatcgcatcggtatcttgacgtgttcattgcccgattctagctactagtccccgctagctcttgagcgatcgtcgtagctagccgcccgccgtcgatcgatgggtgcaccggcgccgtccgtcgccgtggtcgccgcggtggtggtttgcctgtgcggcgcctttgcgcgcgcgcaggacatggacaacgagtgggcgcggccgccgtaccgcggcttcttcggcggccccgggtcgctgctgccgcagtcggacgtggacctgctggagttcccgctgaacctggagtacctggagacggagttcttctgctgggccgctctggggtacggcctcgacgccatcgatgccaacctcaccggcggcgggccgccctccatcggcggccagtccgccttccctcaccccgttcatccgcgacgtcgccacccagttctgctaccaagaagtcggacacctcagggcgatcaagcagacggtgaggggcttcccgcggccgttgctggacatcagcgcggccaacttcggcaagatcatcgagcaggcgctgaacgcgacgctggatccgcccttcaacccctacgagaacagcgtcaacttcctcgtcgcctcctacatcatcccctacgtcggcctcaccggctacgtcggcgccaaccccaggctcttcacccctcaggccagaaagctgctggcggggctgctggcggtggagtcagcgcaggacgcggtgatccggacgctgctgtacgagcgcgggatggcgcgtgtggcgggctacgccgtcggggtggcggaggtcacggcgcacatctcggacctcaggaactcgctggggaggaggggcgtcaaggacgagggactggtggtggcggccgagctggggcccgaggggctcaccgtggggaatgtcatcgccggtgaccacctctcgctcgcctacgaccgcacgcccgaggagatcctcggcatcgtctacggcaccggcaaccccgctcagcacggtgggttctttccccagggcgccgacggccgcatcgccagggggctcctcgcgtagcgcatgggcgtgtagcgaccgtgcgctgagcagcacggggggtaaagttgtccgtgtccctgctgcacggtacaggctgtagactagtactagtactttacgtgtttgtatgttcgcgactttgacgcatgtagttgtgtggtgagtgtgtaaactggatgatataaatgaatgttggtggaaataaagc

SEQ ID NO: 24302 - protein, 274 aa, Zea mays subsp. mays
  misc_feature (1)..(274): Ceres Seq. ID no. 12425291
MGAPAPSVAVVAAVVVCLCGAFARAQDMDNEWARPPYRGFFGGPGSLLPQSDVDLLEFPLNLEYLETEFFCWAALGYGLDAIDANLTGGGPPSIGGQSAFPHPVHPRRRHPVLLPRSRTPQGDQADGEGLPAAVAGHQRGQLRQDHRAGAERDAGSALQPLREQRQLPRRLLHHPLRRPHRLRRRQPQALHPSGQKAAGGAAGGGVSAGRGDPDAAVRARDGACGGLRRRGGGGHGAHLGPQELAGEEGRQGRGTGGGGRAGARGAHRGECHRR

SEQ ID NO: 24303 - protein, 247 aa, Zea mays subsp. mays
  misc_feature (1)..(247): Ceres Seq. ID no. 12425292
MDNEWARPPYRGFFGGPGSLLPQSDVDLLEFPLNLEYLETEFFCWAALGYGLDAIDANLTGGGPPSIGGQSAFPHPVHPRRRHPVLLPRSRTPQGDQADGEGLPAAVAGHQRGQLRQDHRAGAERDAGSALQPLREQRQLPRRLLHHPLRRPHRLRRRQPQALHPSGQKAAGGAAGGGVSAGRGDPDAAVRARDGACGGLRRRGGGGHGAHLGPQELAGEEGRQGRGTGGGGRAGARGAHRGECHRR

SEQ ID NO: 24304 - protein, 237 aa, Zea mays subsp. mays
  misc_feature (1)..(237): Ceres Seq. ID no. 12425293
MPTSPAAGRPPSAASPPSLTPFIRDVATQFCYQEVGHLRAIKQTVRGFPRPLLDISAANFGKIIEQALNATLDPPFNPYENSVNFLVASYIIPYVGLTGYVGANPRLFTPQARKLLAGLLAVESAQDAVIRTLLYERGMARVAGYAVGVAEVTAHISDLRNSLGRRGVKDEGLVVAAELGPEGLTVGNVIAGDHLSLAYDRTPEEILGIVYGTGNPAQHGGFFPQGADGRIARGLLA

SEQ ID NO: 24305 - DNA, 1293 bp, Zea mays subsp. mays
  misc_feature (1)..(1293): Ceres Seq. ID no. 12425298
gtgtgttctctgcgcggtcggcccggcaaacttcctctggttcctgatgatggatgtatcgcaagttgccgcagccgtggcgctgatggcgttcgcggtcgcgtttccggcgtcgggcttcccgtcaggcttcccgccagggacaccagcagcgttcccgaacccgtgggcggcgttccagaacctgtctggctgtcacatgggggaggagcggcagggcctggccgggctcaaggactacctcagccacttcggctacctcccgccgccgccgccgtcgtcccccttcagcgacgcgttcgaccagaacctggaggcggccatcgcgacgtaccagcgcaacttcggtctcaacgccaccggcgcgctggacccgtccaccgtctcgcagatggtcgcgcctcgctgcggcgtggccgacgtcatcaacggcacgtccaccatggcgaggagctcctccgccgacgcccacggcaggcacctgtacgcctacttccccggcgggccgacgtggccgccgttccggcgggacctcaagtacgcgatcaccgcgacctcggccgcgtccatcgaccggtccacgctgagcgacgtcttcgcgcgcgccttctcccggtgggccgcggccaccaacctgcggttcgcggagaccgcgtcggagtccgacgccgacatcaccatcggcttctactcgggctcgcacggcgacggcgagccgttcgacgggccgctgggaacgctggcgcacgccttctcgcccacggacggccggttccacctggacgccgcggaggcgtgggtggccggcagcgacgtgtcacgctcgtcggcgaccggggcggtggacctagagtccgtggcggtgcacgagatcggccacctcctggggctcggccactcctcggtgccggacgccatcatgtacccgacgatccggacggggacgaggaaggtggagctggaggccgacgacgtccaggggatacagagcctgtacgggagcaaccccaacttcaagggcgcgaccccgacttcgccggcgacgagcagccgcgagatggacagtagcgccggcgcgggatgccgaccagatagagtcttcgtcggagtagttgcggcagttggcctgctcctcctagtcctctagtgccgtagacctctagtgtttgccattttttttcggccacgtccttccttgtatcgatttgttgctcgattagctgattcttggatagattcttgtgtacataatatggttatcactattacagaataatataatatctgatacct

SEQ ID NO: 24306 - protein, 381 aa, Zea mays subsp. mays
  misc_feature (1)..(381): Ceres Seq. ID no. 12425299
CVLCAVGPANFLWFLMMDVSQVAAAVALMAFAVAFPASGFPSGFPPGTPAAFPNPWAAFQNLSGCHMGEERQGLAGLKDYLSHFGYLPPPPPSSPFSDAFDQNLEAAIATYQRNFGLNATGALDPSTVSQMVAPRCGVADVINGTSTMARSSSADAHGRHLYAYFPGGPTWPPFRRDLKYAITATSAASIDRSTLSDVFARAFSRWAAATNLRFAETASESDADITIGFYSGSHGDGEPFDGPLGTLAHAFSPTDGRFHLDAAEAWVAGSDVSRSSATGAVDLESVAVHEIGHLLGLGHSSVPDAIMYPTIRTGTRKVELEADDVQGIQSLYGSNPNFKGATPTSPATSSREMDSSAGAGCRPDRVFVGVVAAVGLLLLVL

SEQ ID NO: 24307 - protein, 366 aa, Zea mays subsp. mays
  misc_feature (1)..(366): Ceres Seq. ID no. 12425300
MMDVSQVAAAVALMAFAVAFPASGFPSGFPPGTPAAFPNPWAAFQNLSGCHMGEERQGLAGLKDYLSHFGYLPPPPPSSPFSDAFDQNLEAAIATYQRNFGLNATGALDPSTVSQMVAPRCGVADVINGTSTMARSSSADAHGRHLYAYFPGGPTWPPFRRDLKYAITATSAASIDRSTLSDVFARAFSRWAAATNLRFAETASESDADITIGFYSGSHGDGEPFDGPLGTLAHAFSPTDGRFHLDAAEAWVAGSDVSRSSATGAVDLESVAVHEIGHLLGLGHSSVPDAIMYPTIRTGTRKVELEADDVQGIQSLYGSNPNFKGATPTSPATSSREMDSSAGAGCRPDRVFVGVVAAVGLLLLVL

SEQ ID NO: 24308 - protein, 365 aa, Zea mays subsp. mays
  misc_feature (1)..(365): Ceres Seq. ID no. 12425301
MDVSQVAAAVALMAFAVAFPASGFPSGFPPGTPAAFPNPWAAFQNLSGCHMGEERQGLAGLKDYLSHFGYLPPPPPSSPFSDAFDQNLEAAIATYQRNFGLNATGALDPSTVSQMVAPRCGVADVINGTSTMARSSSADAHGRHLYAYFPGGPTWPPFRRDLKYAITATSAASIDRSTLSDVFARAFSRWAAATNLRFAETASESDADITIGFYSGSHGDGEPFDGPLGTLAHAFSPTDGRFHLDAAEAWVAGSDVSRSSATGAVDLESVAVHEIGHLLGLGHSSVPDAIMYPTIRTGTRKVELEADDVQGIQSLYGSNPNFKGATPTSPATSSREMDSSAGAGCRPDRVFVGVVAAVGLLLLVL

SEQ ID NO: 24309 - DNA, 1123 bp, Zea mays subsp. mays
  misc_feature (1)..(1123): Ceres Seq. ID no. 12425309
aacgcccgcgcatgcgcatgcccgtgtcgttgaggattccgagaggcctcgcggcggcgtggcctgggtggagaaggagcacatgttcgagaaggtggtcaccccgagcgacgtggggaagctcaatcgcctggtcatcccaaagcagcacgcggagcgctacttccccgcgctggacgcctcgtccgccgcggcggcggcggcggcagcagccgcgggaggcgggaaggggctggtgctcagcttcgaggaccgggcggggaaggcgtggcgcttccgctactcgtactggaacagcagccagagctacgtgatgaccaaaggttggagccgcttcgtgaaggagaagccctcggtgccggggacacagtcttgttcgcgcgcggcgcgggcggcgcgcgcggccgcttcttcatcgatttccgccgccgtcgccaggatctcgcgttcctgcagccgacgctggcgtctgcgcagcgactcctgccgctgccgtcggtgcccatctgcccgtggcaggactacggcgcctcggctccggcgcccaaccggcacgtgctgttcctgcggccgcaggtgccggccgccgtagtgctcaagtcggtccccgtgcacgttgctgcatccgcggtggaggcgaccatgtcgaagcgcgtccgcctgttcggggtgaacctcgactgcccgccggacgccgaagacagcgccacagtcccccggggccgggcggcgtcgacgacgcttctgcaactgccctcgccatcgtcgtcaacatcctcctcgacggcagggaaggacgtgtgctgtttggatcttggactgtgaagacaatcaacatcctctagcaaaaagaaggagaaattgggtcgaggaactgatggggcactgacacacgaactgatatggctccagtactgcatctgcatgtgtaattgttgatgaattggtatttcttgatgatatcctgctcatataatcatattagctcatttgtgctttccgtaactaatgtgtgtttcttctcttttcttgatttgatctttgttccgaggatatgatatcgatcttctcattataaatgtacatattctgaatcatctctgactaaattcagtaattattt

SEQ ID NO: 24310 - protein, 196 aa, Zea mays subsp. mays
  misc_feature (1)..(196): Ceres Seq. ID no. 12425310
TPAHAHARVVEDSERPRGGVAWVEKEHMFEKVVTPSDVGKLNRLVIPKQHAERYFPALDASSAAAAAAAAAAGGGKGLVLSFEDRAGKAWRFRYSYWNSSQSYVMTKGWSRFVKEKPSVPGTQSCSRAARAARAAASSSISAAVARISRSCSRRWRLRSDSCRCRRCPSARGRTTAPRLRRPTGTCCSCGRRCRPP

SEQ ID NO: 24311 - protein, 169 aa, Zea mays subsp. mays
  misc_feature (1)..(169): Ceres Seq. ID no. 12425311
MFEKVVTPSDVGKLNRLVIPKQHAERYFPALDASSAAAAAAAAAAGGGKGLVLSFEDRAGKAWRFRYSYWNSSQSYVMTKGWSRFVKEKPSVPGTQSCSRAARAARAAASSSISAAVARISRSCSRRWRLRSDSCRCRRCPSARGRTTAPRLRRPTGTCCSCGRRCRPP

SEQ ID NO: 24312 - protein, 103 aa, Zea mays subsp. mays
  misc_feature (1)..(103): Ceres Seq. ID no. 12425312
RPRMRMPVSLRIPRGLAAAWPGWRRSTCSRRWSPRATWGSSIAWSSQSSTRSATSPRWTPRPPRRRRRQQPREAGRGWCSASRTGRGRRGASATRTGTAARAT

SEQ ID NO: 24313 - DNA, 1333 bp, Zea mays subsp. mays
  misc_feature (1)..(1333): Ceres Seq. ID no. 12425320
gccgcacgccggggctcaatctgctccgattccctccagcctttgtttcctccatcccccgcgtcaatcctgcagcctcctgctcgcgcgcttactgtagccgcagctttctccacccttggcaatggaggccgcgatcgctcacgctccatctgctccggtcctgcgccgctcgcgtagcctcaaccccacgcccgccgtccggccgcacccaaaaccctggcagggggtgctttcggcgaggcacccgtcgaacgccgtcaggtgcgagccgtcccagcgcccagaggcgcgcccgcgcctgcgcgcggcgcagccggctggtgctgacgcggcggccgggaggaagcggctggcagtgttcgtgtccggagggggatcaaacttccgggcgatccatgaggccgcgctgggcggtgccgtgcacggagatgtcgtcgcgcttgtcaccgacaagccaggtgaaggaaactgcatcccgcgacgctacccacattgttagcggaggctaaaactgcaataactacattgcaggttgtggtggcgcggaatatgctaggagcaatgacatccctgtgctcgtatttcccaagtccaagtntgcgcccgaggggatttcggttgctcaactgctggatactctgaggggaaacaatgtagattttgttcttcttgccggttacctgaagcttatacccactgaattgatccaggaatacccaaaatccatattaaatatccacccttctctccttccagcattcggagggaaaggtttctatggttcaaaggtgcataaagctgttattgcctctggagcaagatactcgggtccaaccgtacattttgtggatgagcactatgataccggtaaaacgttagcccagagggttgtgcctgtgttcgcagatgacacgccagagttattggctgcaagagtcctccatgaggaacatatggtctatgttgaagcagttgctgctttgtgcgaggaccgcgtcgtatggagggaagatggtgtcccacttatcaaaagtcggacaaatccagctgtgtacatctaattgacaatacggcaatagtagcactattttggagtaataatggaatttgtagagcccttgccacttttcccggtaaaaggggtacttagcagttgacgtagggttgatatacagggcacaacttatttgccaccgaaacatttccatgcgttggaagtgagaaacattgcccccaataggccgcagtatccattactgcatggaacaaggttgaaattttaccttgatttgagataactatcaaatactgcgaatgcattattcttccg

SEQ ID NO: 24314 - protein, 169 aa, Zea mays subsp. mays
  misc_feature (1)..(169): Ceres Seq. ID no. 12425321
RTPGLNLLRFPPAFVSSIPRVNPAASCSRAYCSRSFLHPWQWRPRSLTLHLLRSCAARVASTPRPPSGRTQNPGRGCFRRGTRRTPSGASRPSAQRRARACARRSRLVLTRRPGGSGWQCSCPEGDQTSGRSMRPRWAVPCTEMSSRLSPTSQVKETASRDATHIVSGG

SEQ ID NO: 24315 - protein, 125 aa, Zea mays subsp. mays
  misc_feature (1)..(125): Ceres Seq. ID no. 12425322
MEAAIAHAPSAPVLRRSRSLNPTPAVRPHPKPWQGVLSARHPSNAVRCEPSQRPEARPRLRAAQPAGADAAAGRKRLAVFVSGGGSNFRAIHEAALGGAVHGDVVALVTDKPGEGNCIPRRYPHC

SEQ ID NO: 24316 - DNA, 1874 bp, Zea mays subsp. mays
  misc_feature (1)..(1874): Ceres Seq. ID no. 12425365
gcgcgtcacgttcgcatcgcttctggttcgggtctcacctctcgcgatcaaagcagtagcgggttcagtggcttggcgaaggaaaaaagaggaaaaaaattagcaaggctgtgcagcgaggagacgactcgactacaactgggaggcgaaaaataaaaaagaggataaggcgaggcccgaccgggcggccaccgcgctcccagatccgctccgctgccgtggagatccagctcccttgcgcgcctgagcgtggacgccggcgtctcgctcccggatcccgaccttgaggttgcagctgcttcagatccagcgttaccagatctgtgacccgctggcgcctgggcacatgacaccgacggttttaatggagtttgggcagcagaggccaatgaaacggggatacgaggaaatggtcttcagggcagcctcctcccgtggttatgcagagactgttggcgagtcgggagttgcagctggtagtcctcttcgtgttgattctgaggactcatctgtgccaaagcgcaagtgcatcagcctgaacagcgttggctttgatgtgaagcgggagatcttggtgccctctaagatgtcgtcatctgaacggcggtaccttcgaaagagattccgggcagagcttgattcggtgcgggatctcctcaagaagccagagtttgcagcccctgttcctctcaatcgggcacctgctttgtcatcctcagctgcacctcgagctaagaagccacagaagtctcagcgtggtgggaccaatgttatacgtggtgcaaagggacgattcttgcctacaaaacccctccggagacttccactgtgttatctgaagctgcagcgtttaagcagtgtgaagctattttgaagaagcttatgactcaaaagtatagtcatatattcaatgttccagttgatattgtgaagctgcaaattcctgattattttgacattgtgaagaccccaatggatcttggtactgtcaagaaaaagcttgaatctggttcatacacaagtccatcagattttgctgctgatgtccggctgacctttaacaacgctatggcttataatccgcgggggcatgctgtgcacgacatgttcatccagctgaacaagatgtttgagagtcgatggaggccaattgagaagaaattggcttctgctgctactgagaaacatgttgaggttgacagggctgactcgaagaggaggaagacacctcctgtggaccgcagtgatgtgtcaatggagtgtgcacgacagacagagccagaaacactgaagatgacagctgaagagagggaagcctttgggaactgcttggcatccatatctgatgaattacctcctcacatatttgaactgctacaacaatgcatcgacagcaatgcagatttgtctggggatggagagatagagattgacatccatgctgtcagtgatgacttgttatttgagctgaagaaacatgttgacaagtatttgcaagagaaagagcagagccagcaggtgaaatctgagccctccgagaatgaagctgtgaatgtatctggccttagccactcttctacaaatccttgcaaaggcggcgaacctatcgaagaggatgtggacatctgtggcaatgcctcacctatcatgctagacaaagatgcacaaatcaggaatagcaagtgtggtagtccaagtagttccagcagcgactctgaatcatcttctagcggtctgtgtctcatggtgtttatctgcatctctttatatcattatagacaattcttatgtaaagaaagtgatgcttttcttcccagttttgtattgtaaattctttgagaacatggatattatctcttcatgtgtttttgggc

SEQ ID NO: 24317 - protein, 315 aa, Zea mays subsp. mays
  misc_feature (1)..(315): Ceres Seq. ID no. 12425366
MTQKYSHIFNVPVDIVKLQIPDYFDIVKTPMDLGTVKKKLESGSYTSPSDFAADVRLTFNNAMAYNPRGHAVHDMFIQLNKMFESRWRPIEKKLASAATEKHVEVDRADSKRRKTPPVDRSDVSMECARQTEPETLKMTAEEREAFGNCLASISDELPPHIFELLQQCIDSNADLSGDGEIEIDIHAVSDDLLFELKKHVDKYLQEKEQSQQVKSEPSENEAVNVSGLSHSSTNPCKGGEPIEEDVDICGNASPIMLDKDAQIRNSKCGSPSSSSSDSESSSSGLCLMVFICISLYHYRQFLCKESDAFLPSFVL

SEQ ID NO: 24318 - protein, 285 aa, Zea mays subsp. mays
  misc_feature (1)..(285): Ceres Seq. ID no. 12425367
MDLGTVKKKLESGSYTSPSDFAADVRLTFNNAMAYNPRGHAVHDMFIQLNKMFESRWRPIEKKLASAATEKHVEVDRADSKRRKTPPVDRSDVSMECARQTEPETLKMTAEEREAFGNCLASISDELPPHIFELLQQCIDSNADLSGDGEIEIDIHAVSDDLLFELKKHVDKYLQEKEQSQQVKSEPSENEAVNVSGLSHSSTNPCKGGEPIEEDVDICGNASPIMLDKDAQIRNSKCGSPSSSSSDSESSSSGLCLMVFICISLYHYRQFLCKESDAFLPSFVL

SEQ ID NO: 24319 - protein, 253 aa, Zea mays subsp. mays
  misc_feature (1)..(253): Ceres Seq. ID no. 12425368
MAYNPRGHAVHDMFIQLNKMFESRWRPIEKKLASAATEKHVEVDRADSKRRKTPPVDRSDVSMECARQTEPETLKMTAEEREAFGNCLASISDELPPHIFELLQQCIDSNADLSGDGEIEIDIHAVSDDLLFELKKHVDKYLQEKEQSQQVKSEPSENEAVNVSGLSHSSTNPCKGGEPIEEDVDICGNASPIMLDKDAQIRNSKCGSPSSSSSDSESSSSGLCLMVFICISLYHYRQFLCKESDAFLPSFVL

SEQ ID NO: 24320 - DNA, 2117 bp, Zea mays subsp. mays
  misc_feature (1)..(2117): Ceres Seq. ID no. 12425413
aaccaaatctgccgcaaaacccctcgcctgcggcttcgcgttggccggcaaccgccgctgttgccgactcttcaacgcgtacctcgcgcccccgcgctgctgatgcgatcagcgacgcacgccagatccgagcttctgtaggaccttcagccgtccccgtcccatgggggactgcgtcgtcgaggacggccacgtgcaccatccctcggatgaggtggagggcgcggttccattgacggtagccgtggagctcgatgagcgggcgggagagtcacgggaggagggtggtgggcagcggaagaaagtgggcgggatccgaagggagccgtcgttctcgcggtggtgcagggacacctctgtcgccgccgcctccaatactgccgttgctgcggcgatcagcgacagcgacagcgacgactcagaggagttcgacctaccgctcctgccatcctcctcgggcggcgggagctcacctatggacattgaggcgggggcgacggtgagatctgatgatctgccgatctcaccgaggttgcttgcgaaggtcattgggttgatagcgtgttggtacacgctgagcacatgcttgactctgtacaacaaggagatgctggggaagcacatgtggaagttcccggcgccattcctgatgaacacggtgcatttcacgatgcaggctgtggcgtccagggccatagtgtggttccagcaacgtggcctggagggagggccaaacaaaatgtcgtggaaggattactgtttacgagttgtcccaacagctttggctactgctcttgatataaatctgagcaacatttcacttgttttcattactgtgacatttgctacaatgtgtaaatctgcttctccaattttcattcttctctttgcttttatgttcaggcttgagaaaccaagctttagccttcttggaatcatgctggttgtttcgtttggagttctactaacagttgctaaagagacagaatttaatctgtggggatttatatttattatgcttgctgctgttatgtctggtttcctctggtccatgactcagattcttctccagaaagaggaatacggattaaagaatccttttaccttgatgagccatgttaccccggtgatggcaatagtaacagcaattatttccattgtgatggatccatggcacgacttcagagcaagtcacttttttgatagttctgctcacataataagaagcagcttgttgctgcttttaggtggcgctttggcctttttcatggttttgacagaatatgtccttgtttctgtgactagtgctgtaacagtgactgtagcaggaattgtgaaggaagctgtcactattctggttgctgtgctattcttcaacgatccatttacatgattgaaggcgcttgggctagcaataataatatttggtgtcagtctattcaatatttacaagtataaaaggttcaaaaaagggcattacaatgaaaatgctgggacaaatacccaatcttccaattggacttcaaaatacgtcatccttgatgaagatactgaagctcaagatgatacaggctgatctgaatgtgatagaatgcagactatatatggcgcttccagagaagcaagatcatctgtgcctgcatagtcttactttcacaggctaactgacttcatattctttgagttcatcaattactctggtcagccatgcacgaacatgactcttgcagccgtgtggcaagttgggaagattacacatacatggaacatacaagatacaacctggtatcagtacatatgttttgtcctttcattcaaaacaaagaacagtgcatatatctgaacgaggcattctgcattatgtccactaagaaaatgctccatcaaatacaattagaactacagctgacacacttaactttctggaagaggataggactcaattttatagtccattctgattgttgaagagagattcggcatcggaacgtagctttcttttctttatttatttttagatgaaaataaacactcgtatatgtaatgttgtatgtatgggactgtatactgttttacacacgagcaccacaagttgaagttcttcccaccgtattggt

SEQ ID NO: 24321 - protein, 409 aa, Zea mays subsp. mays
  misc_feature (1)..(409): Ceres Seq. ID no. 12425414
MGDCVVEDGHVHHPSDEVEGAVPLTVAVELDERAGESREEGGGQRKKVGGIRREPSFSRWCRDTSVAAASNTAVAAAISDSDSDDSEEFDLPLLPSSSGGGSSPMDIEAGATVRSDDLPISPRLLAKVIGLIACWYTLSTCLTLYNKEMLGKHMWKFPAPFLMNTVHFTMQAVASRAIVWFQQRGLEGGPNKMSWKDYCLRVVPTALATALDINLSNISLVFITVTFATMCKSASPIFILLFAFMFRLEKPSFSLLGIMLVVSFGVLLTVAKETEFNLWGFIFIMLAAVMSGFLWSMTQILLQKEEYGLKNPFTLMSHVTPVMAIVTAIISIVMDPWHDFRASHFFDSSAHIIRSSLLLLLGGALAFFMVLTEYVLVSVTSAVTVTVAGIVKEAVTILVAVLFFNDPFT

SEQ ID NO: 24322 - protein, 305 aa, Zea mays subsp. mays
  misc_feature (1)..(305): Ceres Seq. ID no. 12425415
MDIEAGATVRSDDLPISPRLLAKVIGLIACWYTLSTCLTLYNKEMLGKHMWKFPAPFLMNTVHFTMQAVASRAIVWFQQRGLEGGPNKMSWKDYCLRVVPTALATALDINLSNISLVFITVTFATMCKSASPIFILLFAFMFRLEKPSFSLLGIMLVVSFGVLLTVAKETEFNLWGFIFIMLAAVMSGFLWSMTQILLQKEEYGLKNPFTLMSHVTPVMAIVTAIISIVMDPWHDFRASHFFDSSAHIIRSSLLLLLGGALAFFMVLTEYVLVSVTSAVTVTVAGIVKEAVTILVAVLFFNDPFT

SEQ ID NO: 24323 - protein, 261 aa, Zea mays subsp. mays
  misc_feature (1)..(261): Ceres Seq. ID no. 12425416
MLGKHMWKFPAPFLMNTVHFTMQAVASRAIVWFQQRGLEGGPNKMSWKDYCLRVVPTALATALDINLSNISLVFITVTFATMCKSASPIFILLFAFMFRLEKPSFSLLGIMLVVSFGVLLTVAKETEFNLWGFIFIMLAAVMSGFLWSMTQILLQKEEYGLKNPFTLMSHVTPVMAIVTAIISIVMDPWHDFRASHFFDSSAHIIRSSLLLLLGGALAFFMVLTEYVLVSVTSAVTVTVAGIVKEAVTILVAVLFFNDPFT

SEQ ID NO: 24324 - DNA, 1925 bp, Zea mays subsp. mays
  misc_feature (1)..(1925): Ceres Seq. ID no. 12425449
gtgtttccagccttccaggcgcctctgctgcctgcgcctgcgcgcgtcgtgaaggcgtgaacggcagctcggctcggcgcaggccccccgcccgcgccggcatcgcgtcgcggccgccgcgcgagccccatgctgcgttgctgccgcacgacacgtcacttcggctgcggcgtggttgtgtggactcctctcgctcctggccctcgccggcgctgcgtcggctgcggatggggcggagggtgagtgggagccgctgatacggatgccgacggcgaaggggagtgacgctgcttctgctccggctgctgaggatgatgaagtggggacgaggtgggccgtgctcgtcgccggatccttcggttatgggaactaccggcaccaggccgatgtgtgccatgcgtaccagatactgcagaagggaggagtgaagaaggagaacattgtggtgttcatgtatgatgatattgcccacaacattctgaaccctaggcctggagttatcattaaccatcctaaaggagcaaatgtttatgatggtgttccaaaggattacacaggtgatcaggtcactactgaaaacttctttgctgtcctcttgggcaatagaagtgctaccactggagggagtaagaaggtgatagacagcaaacctaatgaccacatcttcatctattactcagatcatgggggtcctggagttcttggtatgccgaacctgccatatctgtatgctggtgacttcatcaaggtcttgaaaaagaagcatgcttccaatagctactcaaaaatggttatatatgttgaagcatgtgaaagtggcagtatctttgaggggttaatgcctgaagatctaaatatttatgtcacaacagcctcaaatccagttgaaaatagttggggaacttactgccctgggatggaaccatcaccccctcctgagtacattacctgtttaggtgatttgtacagtgtttcttggatggaagacagtgaaacccacaatctaaagaaggaaaccatcaaggatcagtatgaagtggtgaaaacaagaacctcaaactcaaataagtacaaagagggttctcatgttatggagtatggtgataagaccttcaaggatgagaagctttccttttatcaaggttttgatcctgctaatgccaacattgcaaacatgctgctttggccaggcccaaagggtgcagtcaatcaaagagatgctgatcttctcttcatgtggaagaggtacgagcagttaaatggggggaccgaagagaagctgagggctctcatagagattaaagaaactgttcagcacaggaagcatcttgacagcagtatcgatttcgttgggaggctcgtcttcggatttgagaaagggccttcgatgcttgaggctgttagaacctctggtcaaccattagtcgatgactgggactgtttgaagaggatggtgcggattttcgagtcccagtgtggttcacttactcagtacggcatgaagtacatgagagcgtttgcaaacatctgcaacagtggtatatctgagatgaaaatgagggagtcgagcatcagcgcttgcagcagctacaactcggcgaggtggagcccgatggctcggggacacagtgcttgatggtaaagatcaaatagcaaagccccccgaggtctgctgccccatgtccctgtgagcgagctcgtatcatctggggactgtggacccatcgacggttgtacatatcatgcacttgtgctcgtgcctatgtaaagtagtaataccaactcaactctgatcttcatccaagtaccgaaatgattaaaagatcagatgtgaatgctgttgcgatgggtgatcgcaagtaggccataatcagtggaccgaaaatgatgacccaaatcaaggtagtgctcctctgatcgatagc

SEQ ID NO: 24325 - protein, 457 aa, Zea mays subsp. mays
  misc_feature (1)..(457): Ceres Seq. ID no. 12425450
MPTAKGSDAASAPAAEDDEVGTRWAVLVAGSFGYGNYRHQADVCHAYQILQKGGVKKENIVVFMYDDIAHNILNPRPGVIINHPKGANVYDGVPKDYTGDQVTTENFFAVLLGNRSATTGGSKKVIDSKPNDHIFIYYSDHGGPGVLGMPNLPYLYAGDFIKVLKKKHASNSYSKMVIYVEACESGSIFEGLMPEDLNIYVTTASNPVENSWGTYCPGMEPSPPPEYITCLGDLYSVSWMEDSETHNLKKETIKDQYEVVKTRTSNSNKYKEGSHVMEYGDKTFKDEKLSFYQGFDPANANIANMLLWPGPKGAVNQRDADLLFMWKRYEQLNGGTEEKLRALIEIKETVQHRKHLDSSIDFVGRLVFGFEKGPSMLEAVRTSGQPLVDDWDCLKRMVRIFESQCGSLTQYGMKYMRAFANICNSGISEMKMRESSISACSSYNSARWSPMARGHSA

SEQ ID NO: 24326 - protein, 394 aa, Zea mays subsp. mays
  misc_feature (1)..(394): Ceres Seq. ID no. 12425451
MYDDIAHNILNPRPGVIINHPKGANVYDGVPKDYTGDQVTTENFFAVLLGNRSATTGGSKKVIDSKPNDHIFIYYSDHGGPGVLGMPNLPYLYAGDFIKVLKKKHASNSYSKMVIYVEACESGSIFEGLMPEDLNIYVTTASNPVENSWGTYCPGMEPSPPPEYITCLGDLYSVSWMEDSETHNLKKETIKDQYEVVKTRTSNSNKYKEGSHVMEYGDKTFKDEKLSFYQGFDPANANIANMLLWPGPKGAVNQRDADLLFMWKRYEQLNGGTEEKLRALIEIKETVQHRKHLDSSIDFVGRLVFGFEKGPSMLEAVRTSGQPLVDDWDCLKRMVRIFESQCGSLTQYGMKYMRAFANICNSGISEMKMRESSISACSSYNSARWSPMARGHSA

SEQ ID NO: 24327 - protein, 309 aa, Zea mays subsp. mays
  misc_feature (1)..(309): Ceres Seq. ID no. 12425452
MPNLPYLYAGDFIKVLKKKHASNSYSKMVIYVEACESGSIFEGLMPEDLNIYVTTASNPVENSWGTYCPGMEPSPPPEYITCLGDLYSVSWMEDSETHNLKKETIKDQYEVVKTRTSNSNKYKEGSHVMEYGDKTFKDEKLSFYQGFDPANANIANMLLWPGPKGAVNQRDADLLFMWKRYEQLNGGTEEKLRALIEIKETVQHRKHLDSSIDFVGRLVFGFEKGPSMLEAVRTSGQPLVDDWDCLKRMVRIFESQCGSLTQYGMKYMRAFANICNSGISEMKMRESSISACSSYNSARWSPMARGHSA

SEQ ID NO: 24328 - DNA, 1884 bp, Zea mays subsp. mays
  misc_feature (1)..(1884): Ceres Seq. ID no. 12425457
aaaaaaacccaaaaaaacaattggcagcgcaaccgcccacagctcgtgacgaggcgacccaacccccccgtagcggcggcggcggcggcgagcaatcctccggtccggccggcggaaacactagcggcgggaggcagagcgtccaatggcggaggacgggggcaaggccgcggcggcgactgcggcggaggcgggaggcggaggagccaaggagggcggcgaggagaggaccgtcaagctcttcgtgggccaggtgcccaagcacatggccgaggccgacctgctcgccttgttccgcgaggtagccgccgtcgacgaggtcaccgtcatcaaggacaaggccaccaaggtctcccgagggtgctgcttcgtcatatgcccctcaagggaggaagctgacaaggcggtgaatgcctaccacaacaagcaaaccctctctggggtatgcgagcatactactaaccttgttctggcatcaagtcctttgcaagtaaaatatgctgatggagagttggagaggcttgaacataagcttttcattggaatgcttccgaaaaatgttacggacactgagttgactgatttgttttccaaatatgggaatgtcacggatttgcaaattttgagaggttcacaacaaacaaacaaagctggctgtgccttcattaaatatcaaacaaaagatcaagcattggcagctattgaagctctaaacgggaaacacaaaatagagggttctagcgtgccgttggttgtcaaatgggctgatacagaaaaggaaaggcaggctcggaaagcacaaaaagctcagtcacagctatctcatatacccaatgcaagtccaatgcagcagcactcttcagtatttggtgctttacagatgggatatatgcctcaatacaatggatttggttatcagccaacagggacatacggacttatgcagtaccctctatctcctatgcaaaatcaaggccccttccagaatatggtccaacctcttaatcaagggaactcgataagaggagtcaatcctgaagtgtctcccagttcagttcaaaggtcatttaatgcaatgcagctaggcagcccttatcctgctatgcctggtatgcagtatcctggatcatatcccggtggtcccatgggcaaccgtcatttgggaaattctcacaatccgattaaagttccaaattcgaatgccaattccactgtttcttctagtcccagcagcaatgctggtgggcaggttgaaggtcctcctggagccaacctatttatttatcatatcccacaagaatacggtgaccaggagctttccagcgccttccagagtttcggaagagtagtaagcgctaaggtgttcgtggacaaagcaacgggcgtgagcaaatgcttcggtttcgtgagctacgactctcctgcctccgcgcaggcagccatcaacaggatgaacggctaccagttaggcggtaaaaaactcaaggtacaactgaagagagaaaacaacaccaagcacagtagtaaaccgttttgacagacaaggcagcagccgtccggtacccggtacatattaattgaccatcaacacattgcagcagcagccttcagggcctggggagggaagagacccgtgtaccccctctttgttcaccttcacattcttggagattcgtcagtcagctcagctcgtgtaattcattgcagcagacataggccgtagcagcagtttgtaccatgatcagatcacttgtacacatgattcattcaattgttactgacagccggctttcatcctagaataattcgctgtgacaaccttatcatttgctgacgaatgaagtcaggtagacttgttcatctatggaatgatggcaactttcg

SEQ ID NO: 24329 - protein, 463 aa, Zea mays subsp. mays
  misc_feature (1)..(463): Ceres Seq. ID no. 12425458
MAEDGGKAAAATAAEAGGGGAKEGGEERTVKLFVGQVPKHMAEADLLALFREVAAVDEVTVIKDKATKVSRGCCFVICPSREEADKAVNAYHNKQTLSGVCEHTTNLVLASSPLQVKYADGELERLEHKLFIGMLPKNVTDTELTDLFSKYGNVTDLQILRGSQQTNKAGCAFIKYQTKDQALAAIEALNGKHKIEGSSVPLVVKWADTEKERQARKAQKAQSQLSHIPNASPMQQHSSVFGALQMGYMPQYNGFGYQPTGTYGLMQYPLSPMQNQGPFQNMVQPLNQGNSIRGVNPEVSPSSVQRSFNAMQLGSPYPAMPGMQYPGSYPGGPMGNRHLGNSHNPIKVPNSNANSTVSSSPSSNAGGQVEGPPGANLFIYHIPQEYGDQELSSAFQSFGRVVSAKVFVDKATGVSKCFGFVSYDSPASAQAAINRMNGYQLGGKKLKVQLKRENNTKHSSKPF

SEQ ID NO: 24330 - protein, 423 aa, Zea mays subsp. mays
  misc_feature (1)..(423): Ceres Seq. ID no. 12425459
MAEADLLALFREVAAVDEVTVIKDKATKVSRGCCFVICPSREEADKAVNAYHNKQTLSGVCEHTTNLVLASSPLQVKYADGELERLEHKLFIGMLPKNVTDTELTDLFSKYGNVTDLQILRGSQQTNKAGCAFIKYQTKDQALAAIEALNGKHKIEGSSVPLVVKWADTEKERQARKAQKAQSQLSHIPNASPMQQHSSVFGALQMGYMPQYNGFGYQPTGTYGLMQYPLSPMQNQGPFQNMVQPLNQGNSIRGVNPEVSPSSVQRSFNAMQLGSPYPAMPGMQYPGSYPGGPMGNRHLGNSHNPIKVPNSNANSTVSSSPSSNAGGQVEGPPGANLFIYHIPQEYGDQELSSAFQSFGRVVSAKVFVDKATGVSKCFGFVSYDSPASAQAAINRMNGYQLGGKKLKVQLKRENNTKHSSKPF

SEQ ID NO: 24331 - protein, 330 aa, Zea mays subsp. mays
  misc_feature (1)..(330): Ceres Seq. ID no. 12425460
MLPKNVTDTELTDLFSKYGNVTDLQILRGSQQTNKAGCAFIKYQTKDQALAAIEALNGKHKIEGSSVPLVVKWADTEKERQARKAQKAQSQLSHIPNASPMQQHSSVFGALQMGYMPQYNGFGYQPTGTYGLMQYPLSPMQNQGPFQNMVQPLNQGNSIRGVNPEVSPSSVQRSFNAMQLGSPYPAMPGMQYPGSYPGGPMGNRHLGNSHNPIKVPNSNANSTVSSSPSSNAGGQVEGPPGANLFIYHIPQEYGDQELSSAFQSFGRVVSAKVFVDKATGVSKCFGFVSYDSPASAQAAINRMNGYQLGGKKLKVQLKRENNTKHSSKPF

SEQ ID NO: 24332 - DNA, 1913 bp, Zea mays subsp. mays
  misc_feature (1)..(1913): Ceres Seq. ID no. 12425465
aacacaagcatgcaagtccatcagcttctcggcttatggtgccagaccgacgtgcctagtagcgtactatcttagcttcaagagaccgaccaggcaagatccattgatcgatggagctgcttcctctgctcacgtggctcctccttgcgcacgccctggcctgcctggcctggacggccgccgcgcggcgccggcagtctcggtgctacctcctggactacgtctgccacaagcccagcgacgaccgcaagctgtccacggagacggccggcaacgtgatccagcgcaacgcgcggctggggctcaccgactaccgcttcctcctccgcgtcatcgtccgctccggcatcggcgaggagacctacgccccgcgcaacatcctggagggccgcgaggactcgcccaccctggaggacgcggtggacgagatggacgccttcttcgacgaggccatcgccgagctcttcgcccggaccggcctcgcgccccgcgacgtggacgtgctcgtcttcaacgtctccatgctctccccggcgccgtcgctgtcgtccaggatcgtgcgccgctacggcctgcgcgaggacgtggcggcgtacaacctcacgggcatggggtgcagcgcgggcctgatcgcgctggacctggcccggaacgcgctccggacgcgtccccgggcgctggcgctggtggtgtcgtccgagtccatcgcgcccaactggtactccggcaccgacaagactatgatgctggccaactgcctgttccgcagcggcggctccgcggtgctggtgaccaacgacccggcgcggcgcgggcaggccaagatggagctcagctgcctggtgcgcgccaacatcggcgccagcgacgacgcgcacgcgtgcgcgctgcagcgcgaggacggcgagggccgcgtcgggatcagcctgagcaaggcgctccccaaggccgccgtgcgcgccttcgccgtcaacctgcgccgcctcgcgccgcgcgtgctccccgtgggcgagctcgcgcggttcgccgcgcgtctcctcgcccggaggctcttcacgacgtccccgcacctgcgtcagcagcacctatcgggcggcaagcagaagggcgacgcggcggcggccccaaagatcaacttcaaggccggggtggaccacttctgcctccaccccggcggcacggccgtcatcgaggcggtgaagaagagcctggacctggaggacgaggacgtggagccggcgcggatgacgctgcaccggtgggggaacacgtcggcgagcagcctgtggtacgtgctgtcttacatggaggccaaagggcggctcaaggtcggggacagggtgctcatggtcacgttcgggtcggggttcaagtgcaacagctgcgtgtgggaggtgaccggcgacatggccgacaagggggcgtgggccgactgcatcgacgcctacccgccggagaagctcgccaacccgtacttggacaagttcggttggatcaacgatgtcgacggcgataccctgatgctctaacggtacggtatacgatcgaggaccgctctccaccggcggaaatgacgacaacggcggaagcagtaaaaagcaggctagctgttgttcagaacgacaggccggtgatgctagcttgcagcctgcgtaggtgtatttatgcccttggttttactgggcctgtcgttctgaacaatatagccctatttatttaccacccaattatatatgtgtagccgatgcagcagtagcacaatatattcttcttcttcttctgaattgttttctatagcaaaaggaaaaaacatatatagcttttttagaacagaagatcgatcggatctccatgtatacagaaacgattgcaagaacaaacaatataatatcaagtgtacttttacccgcctg

SEQ ID NO: 24333 - protein, 579 aa, Zea mays subsp. mays
  misc_feature (1)..(579): Ceres Seq. ID no. 12425466
TQACKSISFSAYGARPTCLVAYYLSFKRPTRQDPLIDGAASSAHVAPPCARPGLPGLDGRRAAPAVSVLPPGLRLPQAQRRPQAVHGDGRQRDPAQRAAGAHRLPLPPPRHRPLRHRRGDLRPAQHPGGPRGLAHPGGRGGRDGRLLRRGHRRALRPDRPRAPRRGRARLQRLHALPGAVAVVQDRAPLRPARGRGGVQPHGHGVQRGPDRAGPGPERAPDASPGAGAGGVVRVHRAQLVLRHRQDYDAGQLPVPQRRLRGAGDQRPGAARAGQDGAQLPGARQHRRQRRRARVRAAARGRRGPRRDQPEQGAPQGRRARLRRQPAPPRAARAPRGRARAVRRASPRPEALHDVPAPASAAPIGRQAEGRRGGGPKDQLQGRGGPLLPPPRRHGRHRGGEEEPGPGGRGRGAGADDAAPVGEHVGEQPVVRAVLHGGQRAAQGRGQGAHGHVRVGVQVQQLRVGGDRRHGRQGGVGRLHRRLPAGEARQPVLGQVRLDQRCRRRYPDALTVRYTIEDRSPPAEMTTTAEAVKSRLAVVQNDRPVMLACSLRRCIYALGFTGPVVLNNIALFIYHPIIYV

SEQ ID NO: 24334 - protein, 472 aa, Zea mays subsp. mays
  misc_feature (1)..(472): Ceres Seq. ID no. 12425467
MELLPLLTWLLLAHALACLAWTAAARRRQSRCYLLDYVCHKPSDDRKLSTETAGNVIQRNARLGLTDYRFLLRVIVRSGIGEETYAPRNILEGREDSPTLEDAVDEMDAFFDEAIAELFARTGLAPRDVDVLVFNVSMLSPAPSLSSRIVRRYGLREDVAAYNLTGMGCSAGLIALDLARNALRTRPRALALVVSSESIAPNWYSGTDKTMMLANCLFRSGGSAVLVTNDPARRGQAKMELSCLVRANIGASDDAHACALQREDGEGRVGISLSKALPKAAVRAFAVNLRRLAPRVLPVGELARFAARLLARRLFTTSPHLRQQHLSGGKQKGDAAAAPKINFKAGVDHFCLHPGGTAVIEAVKKSLDLEDEDVEPARMTLHRWGNTSASSLWYVLSYMEAKGRLKVGDRVLMVTFGSGFKCNSCVWEVTGDMADKGAWADCIDAYPPEKLANPYLDKFGWINDVDGDTLML

SEQ ID NO: 24335 - protein, 366 aa, Zea mays subsp. mays
  misc_feature (1)..(366): Ceres Seq. ID no. 12425468
MDAFFDEAIAELFARTGLAPRDVDVLVFNVSMLSPAPSLSSRIVRRYGLREDVAAYNLTGMGCSAGLIALDLARNALRTRPRALALVVSSESIAPNWYSGTDKTMMLANCLFRSGGSAVLVTNDPARRGQAKMELSCLVRANIGASDDAHACALQREDGEGRVGISLSKALPKAAVRAFAVNLRRLAPRVLPVGELARFAARLLARRLFTTSPHLRQQHLSGGKQKGDAAAAPKINFKAGVDHFCLHPGGTAVIEAVKKSLDLEDEDVEPARMTLHRWGNTSASSLWYVLSYMEAKGRLKVGDRVLMVTFGSGFKCNSCVWEVTGDMADKGAWADCIDAYPPEKLANPYLDKFGWINDVDGDTLML

SEQ ID NO: 24336 - DNA, 1181 bp, Zea mays subsp. mays
  misc_feature (1)..(1181): Ceres Seq. ID no. 12434843
atcccaacccactcacagtctcacgctactatcgctatctagagctccggccgtcacagacacgagctagagctagagctgcagggaagaagaagaaggaggaggaggagaagatgagggcgtccgcgctggtctgcttcgtggcggtgtcggcgtgcatagcgtgcatcgcgcatggcggcaacttctaccaggacacggagatgacctgggggcaggggcgcggcaaggtggtggacggcgggcgcgggctggacctgagcctggacagggcctccgggtccgggttccagtccaaggacgagtacctgttcggcaagatcgagatgcagatgaagctggtgcctggcaactcggcgggcaccgtgacgaccttgtacctgtcgtcgcagggcgacgcgcacgacgagatcgacctggagttcctgggcaacgtgtcgggcgagccctacacgctgcacacgaacgtgttcacgcgcgggcgggggcagcgggagcancagttccgcctctggttcgaccccaccgccgacttccacacctactccgtggtgtggaacccgcggcacgtcatcttcgcggtggacggcacgccggtgagggacttcgccaaccgcgaggcccgcggggtggcgttcccgcggacgcagcccatgcgggtgtacgccagcctctggaacgccgacgactgggccacgcagggcggccgcgtcaaggcggactgggcgcgggcgccgttcgtcgcctcgttccgcgggttcagcgccgacgcctgcgtctggtccggcggcaggtcgcagtgccccgtcggcaccatggaggaggcgggaggaggcggcggctggtggaaccagcagctcaccgacgccagctaccgccgcatgcgctgggtgcagaggaagttcatgatctacaactactgcaccgacgccaagcggttcccgcagggccggggcgtgcccgctgaatgcaggctccggcgataaaggtggctggatgagcgaacgcgaagccacctgcgtgcgtgcacgacgatcgatcccctcgtcgtcgttcacttcagaccagagatcggtggtctggcgaataatgtttgggtttttttttttgccatgggcgatggcaatgtaaatgtagcacgtgacgcacgtcgcagtgatattctttcatctgttttctgc

SEQ ID NO: 24337 - protein, 327 aa, Zea mays subsp. mays
  misc_feature (1)..(327): Ceres Seq. ID no. 12434844
  misc_feature (166)..(166): Xaa is any aa, unknown or other
PNPLTVSRYYRYLELRPSQTRARARAAGKKKKEEEEKMRASALVCFVAVSACIACIAHGGNFYQDTEMTWGQGRGKVVDGGRGLDLSLDRASGSGFQSKDEYLFGKIEMQMKLVPGNSAGTVTTLYLSSQGDAHDEIDLEFLGNVSGEPYTLHTNVFTRGRGQREXQFRLWFDPTADFHTYSVVWNPRHVIFAVDGTPVRDFANREARGVAFPRTQPMRVYASLWNADDWATQGGRVKADWARAPFVASFRGFSADACVWSGGRSQCPVGTMEEAGGGGGWWNQQLTDASYRRMRWVQRKFMIYNYCTDAKRFPQGRGVPAECRLRR

SEQ ID NO: 24338 - protein, 290 aa, Zea mays subsp. mays
  misc_feature (1)..(290): Ceres Seq. ID no. 12434845
  misc_feature (129)..(129): Xaa is any aa, unknown or other
MRASALVCFVAVSACIACIAHGGNFYQDTEMTWGQGRGKVVDGGRGLDLSLDRASGSGFQSKDEYLFGKIEMQMKLVPGNSAGTVTTLYLSSQGDAHDEIDLEFLGNVSGEPYTLHTNVFTRGRGQREXQFRLWFDPTADFHTYSVVWNPRHVIFAVDGTPVRDFANREARGVAFPRTQPMRVYASLWNADDWATQGGRVKADWARAPFVASFRGFSADACVWSGGRSQCPVGTMEEAGGGGGWWNQQLTDASYRRMRWVQRKFMIYNYCTDAKRFPQGRGVPAECRLRR

SEQ ID NO: 24339 - protein, 260 aa, Zea mays subsp. mays
  misc_feature (1)..(260): Ceres Seq. ID no. 12434846
  misc_feature (99)..(99): Xaa is any aa, unknown or other
MTWGQGRGKVVDGGRGLDLSLDRASGSGFQSKDEYLFGKIEMQMKLVPGNSAGTVTTLYLSSQGDAHDEIDLEFLGNVSGEPYTLHTNVFTRGRGQREXQFRLWFDPTADFHTYSVVWNPRHVIFAVDGTPVRDFANREARGVAFPRTQPMRVYASLWNADDWATQGGRVKADWARAPFVASFRGFSADACVWSGGRSQCPVGTMEEAGGGGGWWNQQLTDASYRRMRWVQRKFMIYNYCTDAKRFPQGRGVPAECRLRR

SEQ ID NO: 24340 - DNA, 1441 bp, Zea mays subsp. mays
  misc_feature (1)..(1441): Ceres Seq. ID no. 12434855
agcgcttctcccagccacgtcttcatcacacacggtcgcggcgcgaagcaatggcgaccacggcgccgctgctctcgccccagcgcgcttgccctacccatctccggcgccgcctctcgcccctacatctcgtattccccctcgacgcgtcagcgaggcggctgcgccttcgccgggcgccgccaccttgttcggccaagttcggcaagttcgacgcctccgacgccccggcggaggccgaggaggcggggggcgcgacggatggtgggctggcgcagcccgtggaggaggacgacagttgcttgccatcggatttggagggcgcgattcggcagtcagggaaggcgagcgcagatttcgtaaactccggaggcatgcgagctatcgcagaactgctgatccctcagttggaattcctcaacgaggaaggagcacaggctgaactctgggcgttgtcaaagattttcctggacacacttgtacaagagacaggacagaaagttactgccattttccctgacgctggagcagctgcccttctcaagcatcaatggaaagatgcacaattcaagtgtgccagtttaggtgaccggaagccagttggtcctgaagatgaggtcgcagttatgattatccctgatcatcagatgctggaagctgttgaacgcatcacatctcaactctctgatgatcctataaaacctcttgtcatgtggaacccacggcttgttagtggagatgttggagtaggctttaatgtacggaatctgcggagaaatttcttaagcacttttaccactgtttactcgatgaggccattgccaactggtgcagtctttagatgctttccagggcagtggaaagtgttttatgatgatccaaataggccaaatcggtatttgcttgcccgagaactcacaagtaggcccgatgcaactgatattgagagaatatttggtggtgccgatgagcaatctgaagaggcaccatcgttgatgaacaatgtcatgggcgtgttcagttccgtgagtcggtttatgagggtcatctccaagtgagagtcgaagcaaacattggtcacacttgaagccatcaacaatcatcatgatgcttgagttatacaagaagattattttagtgcatccatgttgttttcagtctgtaattactccatggtactgctattcggaacagtatagtttggcgttccggcacatgccaccaaatgtgtgcacataccataccgtggattcctggagtcatctgctgatcctacaccgtgaggtcatttatgtaacttaggaaaaaaaagtagatagatcctcattctggaaaaggccgggtatctgattgtaattcaatactgtgcttgatatatcacaatcagctcgcattttgtaattcaatactggacgaatataaattcaatcctttgttttgc

SEQ ID NO: 24341 - protein, 351 aa, Zea mays subsp. mays
  misc_feature (1)..(351): Ceres Seq. ID no. 12434856
RFSQPRLHHTRSRREAMATTAPLLSPQRACPTHLRRRLSPLHLVFPLDASARRLRLRRAPPPCSAKFGKFDASDAPAEAEEAGGATDGGLAQPVEEDDSCLPSDLEGAIRQSGKASADFVNSGGMRAIAELLIPQLEFLNEEGAQAELWALSKIFLDTLVQETGQKVTAIFPDAGAAALLKHQWKDAQFKCASLGDRKPVGPEDEVAVMIIPDHQMLEAVERITSQLSDDPIKPLVMWNPRLVSGDVGVGFNVRNLRRNFLSTFTTVYSMRPLPTGAVFRCFPGQWKVFYDDPNRPNRYLLARELTSRPDATDIERIFGGADEQSEEAPSLMNNVMGVFSSVSRFMRVISK

SEQ ID NO: 24342 - protein, 335 aa, Zea mays subsp. mays
  misc_feature (1)..(335): Ceres Seq. ID no. 12434857
MATTAPLLSPQRACPTHLRRRLSPLHLVFPLDASARRLRLRRAPPPCSAKFGKFDASDAPAEAEEAGGATDGGLAQPVEEDDSCLPSDLEGAIRQSGKASADFVNSGGMRAIAELLIPQLEFLNEEGAQAELWALSKIFLDTLVQETGQKVTAIFPDAGAAALLKHQWKDAQFKCASLGDRKPVGPEDEVAVMIIPDHQMLEAVERITSQLSDDPIKPLVMWNPRLVSGDVGVGFNVRNLRRNFLSTFTTVYSMRPLPTGAVFRCFPGQWKVFYDDPNRPNRYLLARELTSRPDATDIERIFGGADEQSEEAPSLMNNVMGVFSSVSRFMRVISK

SEQ ID NO: 24343 - protein, 227 aa, Zea mays subsp. mays
  misc_feature (1)..(227): Ceres Seq. ID no. 12434858
MRAIAELLIPQLEFLNEEGAQAELWALSKIFLDTLVQETGQKVTAIFPDAGAAALLKHQWKDAQFKCASLGDRKPVGPEDEVAVMIIPDHQMLEAVERITSQLSDDPIKPLVMWNPRLVSGDVGVGFNVRNLRRNFLSTFTTVYSMRPLPTGAVFRCFPGQWKVFYDDPNRPNRYLLARELTSRPDATDIERIFGGADEQSEEAPSLMNNVMGVFSSVSRFMRVISK

SEQ ID NO: 24344 - DNA, 1442 bp, Zea mays subsp. mays
  misc_feature (1)..(1442): Ceres Seq. ID no. 12434863
acctttggcttttctggctttatataatcattcgttcaccctttatccatcaccacctaatttcccaacaaatttcaatctccatcgatcgattcctcccgaacccgacccgatggcctccgacgccgccgccgagccctcctccggcgtcacccaccccccgcgctacgtcatcggttacgcgctcgcgccgaagaagcagcagagcttcatccagccgtcgctggtggcccaggcggcgtcgcggggcatggacctcgtccccgtggatgcgtcgcagcccctcgcagagcaagggcccttccacctcctcatccacaagctctacggagacgactggcgcgcccagctcgtggccttcgccgcgcgccacccggccgtccccatcgtcgacccgccccacgccatcgaccgcctccacaaccgcatctccatgctccaggtcgtctccgagctcgaccacgccgccgaccaggacagcactttcggtatccccagccaggtcgtcgtctacgacgccgccgcgctcgccgacttcggactccttgccgcgctccgcttcccgctcatcgccaagcccctcgtcgccgacggcaccgccaagtcccacaagatgtcgctcgtctaccaccgcgagggcctcggcaagctccgcccgccgcttgtgctccaggagttcgtcaaccatggcggcgtcatcttcaaggtctacgtcgtcggcggccacgtcacttgcgtcaagcgccgtagccttcccgacgtgtcccccgaggatgacgcatcggcccagggatccgtctccttctcccaggtctccaacctccccactgagcgcacggcggaggagtactacggcgaaaagagtctcgaggacgccgtcgtgccgcccgccgcattcatcaaccagatcgcgggcggcctccgccgcgcgctgggcctgcaactcttcaacttcgacatgatccgcgacgtccgcgccggcgaccgctatctcgtcattgacatcaactacttcccgggctacgccaagatgccaggatacgagactgtcctcacggatttcttctgggagatggtccatgaggacggcgtgggcaaccaacaggaggagaaaggggccaaccatgttgtcgtgaaataagatgatgattgatggcactggatatctggcgaatgctgctgattctggatgcagaattcgatgaggggatttagttggttgtagtatctggcgaatgctgctggttctggatgcagaatttgatgaggggatttagttggatttcaacccacagcatgccgaggacctcctagctctttccagaccagttgtttaggtatcttttctgggtaagtcagcttcatctagtttagtctgtctgaacaaaagagtgggacatgacccaaacggaattctaatgaaaaatgagctctctatctgc

SEQ ID NO: 24345 - protein, 379 aa, Zea mays subsp. mays
  misc_feature (1)..(379): Ceres Seq. ID no. 12434864
PLAFLALYNHSFTLYPSPPNFPTNFNLHRSIPPEPDPMASDAAAEPSSGVTHPPRYVIGYALAPKKQQSFIQPSLVAQAASRGMDLVPVDASQPLAEQGPFHLLIHKLYGDDWRAQLVAFAARHPAVPIVDPPHAIDRLHNRISMLQVVSELDHAADQDSTFGIPSQVVVYDAAALADFGLLAALRFPLIAKPLVADGTAKSHKMSLVYHREGLGKLRPPLVLQEFVNHGGVIFKVYVVGGHVTCVKRRSLPDVSPEDDASAQGSVSFSQVSNLPTERTAEEYYGEKSLEDAVVPPAAFINQIAGGLRRALGLQLFNFDMIRDVRAGDRYLVIDINYFPGYAKMPGYETVLTDFFWEMVHEDGVGNQQEEKGANHVVVK

SEQ ID NO: 24346 - protein, 342 aa, Zea mays subsp. mays
  misc_feature (1)..(342): Ceres Seq. ID no. 12434865
MASDAAAEPSSGVTHPPRYVIGYALAPKKQQSFIQPSLVAQAASRGMDLVPVDASQPLAEQGPFHLLIHKLYGDDWRAQLVAFAARHPAVPIVDPPHAIDRLHNRISMLQVVSELDHAADQDSTFGIPSQVVVYDAAALADFGLLAALRFPLIAKPLVADGTAKSHKMSLVYHREGLGKLRPPLVLQEFVNHGGVIFKVYVVGGHVTCVKRRSLPDVSPEDDASAQGSVSFSQVSNLPTERTAEEYYGEKSLEDAVVPPAAFINQIAGGLRRALGLQLFNFDMIRDVRAGDRYLVIDINYFPGYAKMPGYETVLTDFFWEMVHEDGVGNQQEEKGANHVVVK

SEQ ID NO: 24347 - protein, 319 aa, Zea mays subsp. mays
  misc_feature (1)..(319): Ceres Seq. ID no. 12434866
LWLFWLYIIIRSPFIHHHLISQQISISIDRFLPNPTRWPPTPPPSPPPASPTPRATSSVTRSRRRSSRASSSRRWWPRRRRGAWTSSPWMRRSPSQSKGPSTSSSTSSTETTGAPSSWPSPRATRPSPSSTRPTPSTASTTASPCSRSSPSSTTPPTRTALSVSPARSSSTTPPRSPTSDSLPRSASRSSPSPSSPTAPPSPTRCRSSTTARASASSARRLCSRSSSTMAASSSRSTSSAATSLASSAVAFPTCPPRMTHRPRDPSPSPRSPTSPLSARRRSTTAKRVSRTPSCRPPHSSTRSRAASAARWACNSSTST

SEQ ID NO: 24348 - DNA, 1252 bp, Zea mays subsp. mays
  misc_feature (1)..(1252): Ceres Seq. ID no. 12434879
aagaatccagcctccactacccccagccgggccagcccccccaagccaagcagaatcctcgccccgcaatgcagcacctggccgccgtgctcctcgtcctggcggctaccaccgcgctgccgcccggcgcggcggcgtggcgcccgtggccgccgcgcgacaacgcgacggctgcggcgggccttggcgcgtccaagaggctggagggctcgtcggagttcgtgaagctggagtaccacatgggcccggtcctggcgtcggccatcacggtgcacccgatctggtacgggccctggccggcggcgcaggaagcgcacgatccgcgcgttcctccgctccctgtcgccttctgccgccatcccttcgccgtccgtgtcggcgtggtggcgcacggtgcggctgtaccgcggaccagacctcggccaacgtgtcggcgtcggtgtcgctgggcgcggagaagtcggacgcgcgcatgtcccgcggcgcgcggctgtcgcgcatggacatccaggcagtggtccgcgacgccgtgacggcgcgcacccggcccctgcccgtggacgccagcggcggcgtgtacctggtgctcacgtccccggacgtcgccgtggacgacttctgcgggcaggtgtgcggcttccactacttcaccttcgcgtcggtggtcgggtccacgctgccgtacgcgtgggtgggcaactcggcgcgcaggtgccccgaggtgtgcgcgtacccgttcgcggtcccggcgtacgtgcgcgggcgcaggcccgagtcccccgcccaacggcgacgtcggggtggacggcatggtcagcgtcatcgcgcacgagctcgcggagatggcgtccaacccgctcgccaacgcctggtacgccggcggcgacccgtcgttccccacggagatcgcagacctctgcgagggcatctacggcaccggcgggggaggggcgtacacggggcagctgctcacggacgcgcgctccggcgcggcctacaacgtgaacggcgtcggcgggcgcaggttcctcgtgcagtgggtgtggaaccccgtgctcagctactgctccggccccaacgcgctcgaccagtagctgtttgatttcggtttcgtttcatttcgtttcatctacgtaccaatgaatcgaatcctctagcgcatttggattttcctctcctctccccggggaaatccatgggatgcttctgtatagagttgttattatcaattaattaatgccactttcggtgg

SEQ ID NO: 24349 - protein, 366 aa, Zea mays subsp. mays
  misc_feature (1)..(366): Ceres Seq. ID no. 12434880
RIQPPLPPAGPAPPSQAESSPRNAAPGRRAPRPGGYHRAAARRGGVAPVAAARQRDGCGGPWRVQEAGGLVGVREAGVPHGPGPGVGHHGAPDLVRALAGGAGSARSARSSAPCRLLPPSLRRPCRRGGARCGCTADQTSANVSASVSLGAEKSDARMSRGARLSRMDIQAVVRDAVTARTRPLPVDASGGVYLVLTSPDVAVDDFCGQVCGFHYFTFASVVGSTLPYAWVGNSARRCPEVCAYPFAVPAYVRGRRPESPAQRRRRGGRHGQRHRARARGDGVQPARQRLVRRRRPVVPHGDRRPLRGHLRHRRGRGVHGAAAHGRALRRGLQRERRRRAQVPRAVGVEPRAQLLLRPQRARPVAV

SEQ ID NO: 24350 - protein, 209 aa, Zea mays subsp. mays
  misc_feature (1)..(209): Ceres Seq. ID no. 12434881
MSRGARLSRMDIQAVVRDAVTARTRPLPVDASGGVYLVLTSPDVAVDDFCGQVCGFHYFTFASVVGSTLPYAWVGNSARRCPEVCAYPFAVPAYVRGRRPESPAQRRRRGGRHGQRHRARARGDGVQPARQRLVRRRRPVVPHGDRRPLRGHLRHRRGRGVHGAAAHGRALRRGLQRERRRRAQVPRAVGVEPRAQLLLRPQRARPVAV

SEQ ID NO: 24351 - protein, 200 aa, Zea mays subsp. mays
  misc_feature (1)..(200): Ceres Seq. ID no. 12434882
MDIQAVVRDAVTARTRPLPVDASGGVYLVLTSPDVAVDDFCGQVCGFHYFTFASVVGSTLPYAWVGNSARRCPEVCAYPFAVPAYVRGRRPESPAQRRRRGGRHGQRHRARARGDGVQPARQRLVRRRRPVVPHGDRRPLRGHLRHRRGRGVHGAAAHGRALRRGLQRERRRRAQVPRAVGVEPRAQLLLRPQRARPVAV

SEQ ID NO: 24352 - DNA, 1229 bp, Zea mays subsp. mays
  misc_feature (1)..(1229): Ceres Seq. ID no. 12434883
atacccaaacccaccgaccgccgcctaggcttccacctctcccgctcaaactccggccactgaggtcgaacccgagcacgcgccgcagcggcacgatggtgaacgacgccgcggcgatggccgtcgtgagggcggcgcgcccagccctccgtggcgcccacgatggcgtcgccttcgccgcccacgccgccttcctcgccgatgggtactcgctctgcgccgtcggccctgccgcgctcgccgacccctcgaccttaggtgatgaggaggtggggattgatggttggaacatcatggaggattgttacgcctttttgtatagcaaggaggagaagggcaagaagaaaagggtactagtgaaatgtctggtgatcggtgaagtacttgcaattgatgtcttggatcttgaggcacaagataaggcgccttataatatccagattaatgtgaaagacttctttgttgaagagcagccaaagaattatggggatatgtacaagaattttacaagtctcattgatactgtgaactcaaatgtgttgtgcaaattgcatggagacggttctggtgctgaggctgctaagagcactgccgtcgctgctgccaagaactctgatgggagaagttcaccaatacagagctctggagatccaggtcctagaactgctgacccttccggcctaatttatcctccaatagcaccgattggttctgatgatctctaccctggacctggtgcaggcttctaccctcacagtggcattgggagcggtggcagcatgcatgttggtcctaatgatccgcgcttctttccttctaatcccttctctgccccatttggtgggcttgggagtgttccaccaggtggtcgctatgatccaattggcccacctgacgtcccagggtttgagccatctagctttgttaggcgtccaaggcggcctccaggcgggagcacccacccagacctcgagttcttccagcaaggcccagacttctgagagtcgcgcatcgcgcagaggccggccggagcctcgccctaccctcacgaaataacttcaaaatgctgagccctcgagctagatatcccgcttgttgtgattgcaactgctgtatcgagtatagtcctagtgcgctttggctgtaaagatggatgtgaacatcgtcctagtgtatttactcttaattccaaaccatcgtctgtcatagcctaatatactcttttgtgt

SEQ ID NO: 24353 - protein, 332 aa, Zea mays subsp. mays
  misc_feature (1)..(332): Ceres Seq. ID no. 12434884
TQTHRPPPRLPPLPLKLRPLRSNPSTRRSGTMVNDAAAMAVVRAARPALRGAHDGVAFAAHAAFLADGYSLCAVGPAALADPSTLGDEEVGIDGWNIMEDCYAFLYSKEEKGKKKRVLVKCLVIGEVLAIDVLDLEAQDKAPYNIQINVKDFFVEEQPKNYGDMYKNFTSLIDTVNSNVLCKLHGDGSGAEAAKSTAVAAAKNSDGRSSPIQSSGDPGPRTADPSGLIYPPIAPIGSDDLYPGPGAGFYPHSGIGSGGSMHVGPNDPRFFPSNPFSAPFGGLGSVPPGGRYDPIGPPDVPGFEPSSFVRRPRRPPGGSTHPDLEFFQQGPDF

SEQ ID NO: 24354 - protein, 301 aa, Zea mays subsp. mays
  misc_feature (1)..(301): Ceres Seq. ID no. 12434885
MVNDAAAMAVVRAARPALRGAHDGVAFAAHAAFLADGYSLCAVGPAALADPSTLGDEEVGIDGWNIMEDCYAFLYSKEEKGKKKRVLVKCLVIGEVLAIDVLDLEAQDKAPYNIQINVKDFFVEEQPKNYGDMYKNFTSLIDTVNSNVLCKLHGDGSGAEAAKSTAVAAAKNSDGRSSPIQSSGDPGPRTADPSGLIYPPIAPIGSDDLYPGPGAGFYPHSGIGSGGSMHVGPNDPRFFPSNPFSAPFGGLGSVPPGGRYDPIGPPDVPGFEPSSFVRRPRRPPGGSTHPDLEFFQQGPDF

SEQ ID NO: 24355 - protein, 294 aa, Zea mays subsp. mays
  misc_feature (1)..(294): Ceres Seq. ID no. 12434886
MAVVRAARPALRGAHDGVAFAAHAAFLADGYSLCAVGPAALADPSTLGDEEVGIDGWNIMEDCYAFLYSKEEKGKKKRVLVKCLVIGEVLAIDVLDLEAQDKAPYNIQINVKDFFVEEQPKNYGDMYKNFTSLIDTVNSNVLCKLHGDGSGAEAAKSTAVAAAKNSDGRSSPIQSSGDPGPRTADPSGLIYPPIAPIGSDDLYPGPGAGFYPHSGIGSGGSMHVGPNDPRFFPSNPFSAPFGGLGSVPPGGRYDPIGPPDVPGFEPSSFVRRPRRPPGGSTHPDLEFFQQGPDF

SEQ ID NO: 24356 - DNA, 1430 bp, Zea mays subsp. mays
  misc_feature (1)..(1430): Ceres Seq. ID no. 12434895
aggagacttggcttgtactgcatcgcaaaccgcaatcgcacgcggcacttgcccccgcgatcataacctcacaccgcccgccaccagctgcgcagcgctcgacagcctcaccagccgccatcactcgcggcagtacacggccgctgggactgggagagtgggagtgagacgctgctgttgccgagtgcgaggagacactactactcactctcaagactcgagagcagcaggggcgaccgagctctgcgtgcgtggggagaaccggagaaggcagcagaggagggagggagcgcgtggacgggctaggcgcagcagcatgggcgccgggatcagggtcctggcggcgctcttggcggcgctcgcggcagccaccgccggcgtgacggcgcagctgcggcaggactactacgcggcggtgtgcccggacctggagagcatcgtgcgcgccgcggtgtccaagaaggtgcaggcgcagcccgtcgccgtgggcgccaccatccgcctcttcttccacgactgcttcgtcgagggctgngacgcgtcggtgatcctggtgtccacggggaacaacacggcggagaaggaccacccgagcaacctctccctggccggcgacggcttcgacaccgtcatccaggccaaggcggccgtggacgccgtgccggcgtgcgccaaccaggtgtcgtgcgccgacatcctggcgctggccacccgggacgtcattgagctggctggcgggccgtcgtacgcggtggagctggggaggctggacgggctggtgtccatgtccaccaacgtcgacggcaagctgccgccgccgtccttcaacctggaccagctcacgagcattttcgccctcaacaacctgtcgcaggccgacatgattgctttatctgcggcgcacacggtggggttcgcgcactgcagcacgttctcggaccggatccagccgcagtcggtggacccgacgatgaacgcgacgtacgcggaggacctgcaggcggcgtgcccggcgggggtggaccccaacatcgcgctgcagctggaccccgtgacgccgcaggccttcgacaaccagtacttcgccaacctggtggaacggccgggggctgttcgcctccgaccaggtgctcttctccgacgcgcggtcgcagcccaccgtggtggcgtgggcgcagaacgccaccgccttcgagcaggccttcgtcgacgccatcaccaggctcggccgcgtcggcgtcaagaccgacccgtcgctgggggacgtccgccgcgactgcgccttcctcaactgaaaaggatggacatggagagctggtttatatctcacacaagtgttcatacacaatctagagtaaagtttttttgttgttgttattattatcatgtcaggtatgagcacaaggttgaattaatggttaatgcgattg

SEQ ID NO: 24357 - protein, 476 aa, Zea mays subsp. mays
  misc_feature (1)..(476): Ceres Seq. ID no. 12434896
  misc_feature (178)..(178): Xaa is any aa, unknown or other
GDLACTASQTAIARGTCPRDHNLTPPATSCAALDSLTSRHHSRQYTAAGTGRVGVRRCCCRVRGDTTTHSQDSRAAGATELCVRGENRRRQQRREGARGRARRSSMGAGIRVLAALLAALAAATAGVTAQLRQDYYAAVCPDLESIVRAAVSKKVQAQPVAVGATIRLFFHDCFVEGXDASVILVSTGNNTAEKDHPSNLSLAGDGFDTVIQAKAAVDAVPACANQVSCADILALATRDVIELAGGPSYAVELGRLDGLVSMSTNVDGKLPPPSFNLDQLTSIFALNNLSQADMIALSAAHTVGFAHCSTFSDRIQPQSVDPTMNATYAEDLQAACPAGVDPNIALQLDPVTPQAFDNQYFANLVERPGAVRLRPGALLRRAVAAHRGGVGAERHRLRAGLRRRHHQARPRRRQDRPVAGGRPPRLRLPQLKRMDMESWFISHTSVHTQSRVKFFCCCYYYHVRYEHKVELMVNAI

SEQ ID NO: 24358 - protein, 371 aa, Zea mays subsp. mays
  misc_feature (1)..(371): Ceres Seq. ID no. 12434897
  misc_feature (73)..(73): Xaa is any aa, unknown or other
MGAGIRVLAALLAALAAATAGVTAQLRQDYYAAVCPDLESIVRAAVSKKVQAQPVAVGATIRLFFHDCFVEGXDASVILVSTGNNTAEKDHPSNLSLAGDGFDTVIQAKAAVDAVPACANQVSCADILALATRDVIELAGGPSYAVELGRLDGLVSMSTNVDGKLPPPSFNLDQLTSIFALNNLSQADMIALSAAHTVGFAHCSTFSDRIQPQSVDPTMNATYAEDLQAACPAGVDPNIALQLDPVTPQAFDNQYFANLVERPGAVRLRPGALLRRAVAAHRGGVGAERHRLRAGLRRRHHQARPRRRQDRPVAGGRPPRLRLPQLKRMDMESWFISHTSVHTQSRVKFFCCCYYYHVRYEHKVELMVNAI

SEQ ID NO: 24359 - DNA, 1126 bp, Zea mays subsp. mays
  misc_feature (1)..(1126): Ceres Seq. ID no. 12434906
ctccaagtccaagccacctctcagctctcaccagctagctctactctcgcggcgcttcccctcgccgttcgtcgccatcgattgacattggtccaacccaaccgcgcagctagatagatctacgtctaccggcggccgtgagggacgaggcgcgcgctcggtcgctcgctcgtgcgtcgacatggcgaaatgcagcagcaagatccggtacatcgtgtggctgcggcagacgctgcggcggtggcggtcccgcgcggcggctcgcgcggcggtcccggcggggcacgtggcggtgtgcgtgggcggcgcggcgcggcggttcgtggtgcgggcggcgcacctgaaccaccccgtgttccgggagctgctccggcaggcggaggaggagtacgggttcccgtcgggggcctgcgcgggccccatcgcgctcccctgcnacgagggcctcttcgagcacgtcctccgccacctctcctccccgtccaagtccgcccgcttcgtcaccctcgaggacctcgagagtggcgcactgtcctgctgctgcgtcgcctgccgccgccgccgccgccggagactcgctcccgctcctccgcggcatctccgccgacaaggccgtctggtgagcgcgccgccctgcccattgcgggcgcgcgcgcgacggccgtttcgccggagactcgctcccgctcctccacggcatctccgtcgagaaggccgtctgttgagcgcgccgctctgcccatcgcgcgcgcgacggccatttcgtcgtctcgtctctttttttttctttcttttaaccacttttttcgcgctcgctcccttcgttcccactcgagtggagtgaagctggacgcggcgccgacagacacctcgacgacgagcaagagccaagaggagtgcggccggccggaggcggtgaagtgagatggctgagaaagtcctaggattttttagacgactgtcaagtctagtcatccattcattccccccctgttgtaagatcaatccgggaatttagtggctaagttttgtttcttttttctttgcctttttttaataatcattcagtactgctgcggttcggccagcattgttgcaagtgaaaaacattcgtttattttcccgc

SEQ ID NO: 24360 - protein, 244 aa, Zea mays subsp. mays
  misc_feature (1)..(244): Ceres Seq. ID no. 12434907
  misc_feature (83)..(83): Xaa is any aa, unknown or other
MQQQDPVHRVAAADAAAVAVPRGGSRGGPGGARGGVRGRRGAAVRGAGGAPEPPRVPGAAPAGGGGVRVPVGGLRGPHRAPLXRGPLRARPPPPLLPVQVRPLRHPRGPREWRTVLLLRRLPPPPPPETRSRSSAASPPTRPSGERAALPIAGARATAVSPETRSRSSTASPSRRPSVERAALPIARATAISSSRLFFFLSFNHFFRARSLRSHSSGVKLDAAPTDTSTTSKSQEECGRPEAVK

SEQ ID NO: 24361 - protein, 220 aa, Zea mays subsp. mays
  misc_feature (1)..(220): Ceres Seq. ID no. 12434908
  misc_feature (86)..(86): Xaa is any aa, unknown or other
MAKCSSKIRYIVWLRQTLRRWRSRAAARAAVPAGHVAVCVGGAARRFVVRAAHLNHPVFRELLRQAEEEYGFPSGACAGPIALPCXEGLFEHVLRHLSSPSKSARFVTLEDLESGALSCCCVACRRRRRRRLAPAPPRHLRRQGRLVSAPPCPLRARARRPFRRRLAPAPPRHLRREGRLLSAPLCPSRARRPFRRLVSFFFFLLTTFFALAPFVPTRVE

SEQ ID NO: 24362 - DNA, 1476 bp, Zea mays subsp. mays
  misc_feature (1)..(1476): Ceres Seq. ID no. 12434929
gtcaatgcatgccacacccacactctgccaccagtgccactgccaccctctctactataatctctttcagaagctcgtcaccgagcgagcactgtcgtccactcccgcgtcccgcccaagcaaaaaagcaaagcctgcaatggcatctgcagccaccgccgtggcgctcgtggttgttgccgccctggcctcgctgactcagctgtccgcgtcggggtgctcggcggcggaccgcgacgcgctactttcgatccgcgcggcgctgtcggaggaggagcggcagctgggcgtgttctcgacgtgggcggcgggcacggactgctgcgccgggtggtacggcgtggcctgcgacccgaccacggggcgcgtcgcggacctgtccctccgcggggaggccgacgacgcggtgatggcgcccgcggggcggcccgcgtcgggggtcatgtccgggtacgtctccgacgctgtgtgccgcctggaccgcctctcgacgctggtgctggcggactggaagcggatctcgggggcccatcccggcctgcgtcgccacgtcgctcccgtacctccgcgtcctggagctcccggggaaccgcctcacgggcgccgtcccgccgctgggcggcgggcagtcgcgcctcgccgtgctcaacctcgccggcaaccagctgtccggcggcatcccggcgtcgctcacgtcgctcaccgagctcaagcacctcgacctcgccggcaaccggctcagcgggcgcgtgccgccggacctcggccggctccggatgctcagccgcgcgctgctggcgcgcaaccggctgtcgggccccatcccggcgtcggtggcgtcgctgccccggctcgccgacctcgacctctccgagaaccagctgacgggcgcgatccccgagggtcttggtgccggccccgggaatagcggcgtgctcacgacgctgtacctcggcgggaaccggctgtcgggcggcgtcccggcgagcctgcttcggagcggcgggctcgggatgctcaacctcagccggaacgcgctgggcggcggcgtccccgacgcgttcacgccgcgctcctacttcatgctgctggacctatcgcggaaccggctcacgggcggcgtgccgcggtcgctggcctcggcggcgtacgtgggccacctggacctcagccacaaccggctgtgcggtaccatccccgccggcccgccgttcgaccgcctcggcgccgagtcgttcgtcggcaacagctgcctctgcggtggcccgctcggcaagtgcacgtgacacccctagcccgcccatacgcgggaagcatgtagacatattcgtgcggcttggttaacatgacatgcatcatgatgatttcgcggtgctgcatgtgcctgtctttttctttctttctttttatttatcttcttttgtttactttttaaaaatgcttgtggtttgtccatgtgtctgaacgaatggaagc

SEQ ID NO: 24363 - protein, 308 aa, Zea mays subsp. mays
  misc_feature (1)..(308): Ceres Seq. ID no. 12434930
SMHATPTLCHQCHCHPLYYNLFQKLVTERALSSTPASRPSKKAKPAMASAATAVALVVVAALASLTQLSASGCSAADRDALLSIRAALSEEERQLGVFSTWAAGTDCCAGWYGVACDPTTGRVADLSLRGEADDAVMAPAGRPASGVMSGYVSDAVCRLDRLSTLVLADWKRISGAHPGLRRHVAPVPPRPGAPGEPPHGRRPAAGRRAVAPRRAQPRRQPAVRRHPGVAHVAHRAQAPRPRRQPAQRARAAGPRPAPDAQPRAAGAQPAVGPHPGVGGVAAPARRPRPLREPADGRDPRGSWCRPRE

SEQ ID NO: 24364 - protein, 307 aa, Zea mays subsp. mays
  misc_feature (1)..(307): Ceres Seq. ID no. 12434931
MHATPTLCHQCHCHPLYYNLFQKLVTERALSSTPASRPSKKAKPAMASAATAVALVVVAALASLTQLSASGCSAADRDALLSIRAALSEEERQLGVFSTWAAGTDCCAGWYGVACDPTTGRVADLSLRGEADDAVMAPAGRPASGVMSGYVSDAVCRLDRLSTLVLADWKRISGAHPGLRRHVAPVPPRPGAPGEPPHGRRPAAGRRAVAPRRAQPRRQPAVRRHPGVAHVAHRAQAPRPRRQPAQRARAAGPRPAPDAQPRAAGAQPAVGPHPGVGGVAAPARRPRPLREPADGRDPRGSWCRPRE

SEQ ID NO: 24365 - protein, 262 aa, Zea mays subsp. mays
  misc_feature (1)..(262): Ceres Seq. ID no. 12434932
MASAATAVALVVVAALASLTQLSASGCSAADRDALLSIRAALSEEERQLGVFSTWAAGTDCCAGWYGVACDPTTGRVADLSLRGEADDAVMAPAGRPASGVMSGYVSDAVCRLDRLSTLVLADWKRISGAHPGLRRHVAPVPPRPGAPGEPPHGRRPAAGRRAVAPRRAQPRRQPAVRRHPGVAHVAHRAQAPRPRRQPAQRARAAGPRPAPDAQPRAAGAQPAVGPHPGVGGVAAPARRPRPLREPADGRDPRGSWCRPRE

SEQ ID NO: 24366 - DNA, 1116 bp, Zea mays subsp. mays
  misc_feature (1)..(1116): Ceres Seq. ID no. 12434957
atatacctgtcactcacgctaccgccgtgaccgatcgttcgttccttccttctccctcccttcgcgggccgcgcgcctattttattatttactactctattcatatcattatattgtttggtttccttcttcccggccagatctctcactctctcgtcagatcctctcggctagctagctaggacagaggagggaggggaaggcgctggctatggcgactgcggcggcggcggcggcggcggccatggaggagccggacgtcgtcaacggccgcgacgtggtgagctgggtggcgtccggggtggtgctgtggtcgaccgccttcttgctggtgcgggcgctgttccccaagcgctcctacgacttctgcaaccgcgccgtctccaccatgcacgccgtcgccgccgtgtgcctcgcctgcctctccgtcgacgactggtcgtgccccgtctgcccgctcgccgccgcatcctcccgtcgccagatgaaggcgctggcggttacgctggcgtacatggtgtacgacgcggcgtgctgccacctcaacggcgacacgcggctggacaacgccgtgcaccacctggtcagcatcgtcggcatcggcgcggggctcgcctaccagaggtgcgggacggagatggtggccagcatgctcgtgacggagatgtccagcccgctgctgcacctgcgggagatgctcaaggagctgggcgtgcgggacacggagctgaacctcctcgtcgacgtgctcttcgccgccaccttctccgccgcccggatgggcgtcgggccgtacctcacctacgtcaccgtgacggcccgacaaccccatcctcatcaaggcgatggcgacggggctgcagctggtgagcgcctactggttcctgcggatcctccggatggtcaggtacaagctcgccggcaagaagaagccgacgccggccaagctcgccgccgccgccgccaactgacgtaataagcgccggcgacgaccttcacgagctacgcacatttatgataccgggagttggattcgacagaggccgtgctgtacatatagtacaaatacacacacacgcccgcctctgaagcaatgcaatgcaatgcaatttctcc

SEQ ID NO: 24367 - protein, 254 aa, Zea mays subsp. mays
  misc_feature (1)..(254): Ceres Seq. ID no. 12434958
MATAAAAAAAAMEEPDVVNGRDVVSWVASGVVLWSTAFLLVRALFPKRSYDFCNRAVSTMHAVAAVCLACLSVDDWSCPVCPLAAASSRRQMKALAVTLAYMVYDAACCHLNGDTRLDNAVHHLVSIVGIGAGLAYQRCGTEMVASMLVTEMSSPLLHLREMLKELGVRDTELNLLVDVLFAATFSAARMGVGPYLTYVTVTARQPHPHQGDGDGAAAGERLLVPADPPDGQVQARRQEEADAGQARRRRRQLT

SEQ ID NO: 24368 - protein, 243 aa, Zea mays subsp. mays
  misc_feature (1)..(243): Ceres Seq. ID no. 12434959
MEEPDVVNGRDVVSWVASGVVLWSTAFLLVRALFPKRSYDFCNRAVSTMHAVAAVCLACLSVDDWSCPVCPLAAASSRRQMKALAVTLAYMVYDAACCHLNGDTRLDNAVHHLVSIVGIGAGLAYQRCGTEMVASMLVTEMSSPLLHLREMLKELGVRDTELNLLVDVLFAATFSAARMGVGPYLTYVTVTARQPHPHQGDGDGAAAGERLLVPADPPDGQVQARRQEEADAGQARRRRRQLT

SEQ ID NO: 24369 - protein, 195 aa, Zea mays subsp. mays
  misc_feature (1)..(195): Ceres Seq. ID no. 12434960
MHAVAAVCLACLSVDDWSCPVCPLAAASSRRQMKALAVTLAYMVYDAACCHLNGDTRLDNAVHHLVSIVGIGAGLAYQRCGTEMVASMLVTEMSSPLLHLREMLKELGVRDTELNLLVDVLFAATFSAARMGVGPYLTYVTVTARQPHPHQGDGDGAAAGERLLVPADPPDGQVQARRQEEADAGQARRRRRQLT

SEQ ID NO: 24370 - DNA, 1315 bp, Zea mays subsp. mays
  misc_feature (1)..(1315): Ceres Seq. ID no. 12434961
aagcaggatcatcatcatcagaagcagcagcaaggcaacatgtctcagcacggcggcctcggcgacacggcccggcggtggcgcgagctccacggcgacggcggctgggcgggaacgctggacccgctggacctcgacctgcggcgcaccgtgctccgctacggcgagatggcgcaggcgacctacgacgccttcaacaacgagcgggcgtcgccgcacgcggggctgtcccgcttcgccagggcgcgcttcttcgaccgggtgcggctgccggcgcacgccgccgcgtaccgggtcaccaggttcctgtacgccacgtcgtcggtggccgtgccggacgccttcatcctcaggtccgtgtccaggtcgcgccggtgcagggagtccaactggatcggctacgtcgcggtggccaccgacgaagggaaggccgcgctcggccgccgcgacgtcgtggtcgcgtggcgcggcaccatgcgggcgctggagtgggccgacgacctcgagttccccatggtgccgacgggaggcctcctcggggacggcgacgccatggtgcaccgcggctggctgtccatgtacacctccagcgacccggcgtccagccacaaccaggacagcgcacggcatcaggcgctgggcgaggtgcggaggctggtggacgcgtacaggggcgaggagctgagcatcaccgtgacgggccacagcctcggcgcggcgctagccacgctcaacgcgttcgacatcgccgccaacggctacaacgtgacggccacgggcgcggccgcctgcccggtgacctcgttcgcgttcgccagcccgcgcgtcggcggcggcggcttcaagaagcggttcgacgccgtcccggggctgcggctcctccgcgtccgcaacgcccgcgacgtggttcccaagtacccggtcgtgttcctaccacgacgtaggcgcggagctcgcgatcgacacgggggagtcgccgtacctgagaagccccgggggcgagcagacctggcacaacctcgaggtgtacctgcacggcgtggcgggcacgcggggcgcgcgcggcgggttcgagctcgccgtggcgcgggacgtggcgctggtgaacaaggcgtacgacgccctgcgggaccaccacggggtgccgccagggtggtgggtgccgctgaacaggggaatggtggagggcgccgacgggcgctggagcttggtggattgcgaggaggacgaggatgatgagtagtagacagcagacggagtaaacacttggcatgctggcggcagacaacatctgtagctgcccttgtgcgtcgcc

SEQ ID NO: 24371 - protein, 411 aa, Zea mays subsp. mays
  misc_feature (1)..(411): Ceres Seq. ID no. 12434962
KQDHHHQKQQQGNMSQHGGLGDTARRWRELHGDGGWAGTLDPLDLDLRRTVLRYGEMAQATYDAFNNERASPHAGLSRFARARFFDRVRLPAHAAAYRVTRFLYATSSVAVPDAFILRSVSRSRRCRESNWIGYVAVATDEGKAALGRRDVVVAWRGTMRALEWADDLEFPMVPTGGLLGDGDAMVHRGWLSMYTSSDPASSHNQDSARHQALGEVRRLVDAYRGEELSITVTGHSLGAALATLNAFDIAANGYNVTATGAAACPVTSFAFASPRVGGGGFKKRFDAVPGLRLLRVRNARDVVPKYPVVFLPRRRRGARDRHGGVAVPEKPRGRADLAQPRGVPARRGGHAGRARRVRARRGAGRGAGEQGVRRPAGPPRGAARVVGAAEQGNGGGRRRALELGGLRGGRG

SEQ ID NO: 24372 - protein, 398 aa, Zea mays subsp. mays
  misc_feature (1)..(398): Ceres Seq. ID no. 12434963
MSQHGGLGDTARRWRELHGDGGWAGTLDPLDLDLRRTVLRYGEMAQATYDAFNNERASPHAGLSRFARARFFDRVRLPAHAAAYRVTRFLYATSSVAVPDAFILRSVSRSRRCRESNWIGYVAVATDEGKAALGRRDVVVAWRGTMRALEWADDLEFPMVPTGGLLGDGDAMVHRGWLSMYTSSDPASSHNQDSARHQALGEVRRLVDAYRGEELSITVTGHSLGAALATLNAFDIAANGYNVTATGAAACPVTSFAFASPRVGGGGFKKRFDAVPGLRLLRVRNARDVVPKYPVVFLPRRRRGARDRHGGVAVPEKPRGRADLAQPRGVPARRGGHAGRARRVRARRGAGRGAGEQGVRRPAGPPRGAARVVGAAEQGNGGGRRRALELGGLRGGRG

SEQ ID NO: 24373 - protein, 355 aa, Zea mays subsp. mays
  misc_feature (1)..(355): Ceres Seq. ID no. 12434964
MAQATYDAFNNERASPHAGLSRFARARFFDRVRLPAHAAAYRVTRFLYATSSVAVPDAFILRSVSRSRRCRESNWIGYVAVATDEGKAALGRRDVVVAWRGTMRALEWADDLEFPMVPTGGLLGDGDAMVHRGWLSMYTSSDPASSHNQDSARHQALGEVRRLVDAYRGEELSITVTGHSLGAALATLNAFDIAANGYNVTATGAAACPVTSFAFASPRVGGGGFKKRFDAVPGLRLLRVRNARDVVPKYPVVFLPRRRRGARDRHGGVAVPEKPRGRADLAQPRGVPARRGGHAGRARRVRARRGAGRGAGEQGVRRPAGPPRGAARVVGAAEQGNGGGRRRALELGGLRGGRG

SEQ ID NO: 24374 - DNA, 1486 bp, Zea mays subsp. mays
  misc_feature (1)..(1486): Ceres Seq. ID no. 12434994
gttcccgctgcccttccagggccacatcgacccgatgctgcacctggcgggcgtgctccacgcgcggggcctcggcggtgaccgtgctccacacgcgcttcaacgcgttggaccccgcgcggcacccggagttccagttcgtggccgtccccgacggcacgcccgccgacgtcgccgccacggggaggatcatcgacatcatcctggccatgaacgccgccatggaggcgtcgccggccgtcggggaggcgctgccgggcgtccgcggtcgcggggcaggaggggcggccccgcgcctcgtgcctcttcgtcgacgccaacctcctcgccgtgcacagggcggccagggcgctcggactgcccacgctggtgctgcgcaccgggagcgccgcctgcctcggctgcttcctggcctaccccatgctccacgaaaagggctatctgcctccgcaagagtcgcagctgtgcacgccggtgccggagctgccaccactccgagtgaaggacctgatctactcgaagcacagcgaccacgagctgatgcgcaaagtcctcgcccggggcagcgaaacagtgagagattgctccggcgtcgtcatcaacacagccgaggcactggaggcagccgagctagggaggctccgcgacgagctggtccacctcccggtggtgctcgcggccggcccactccacaagctctcctcctccaggggcgccgggagcagcttgctcgccccggaccacagctgcatcgagtggctggacgcgcagcagcccgggtcggtgctgtacgtgagcttcgggagcctggcggccatggacacgagcgagctccgggaggtggcatggggtctggcggagtgcggccaccccttcctatgggtcgtccggcccaacatggtacgaggctgcgacgtcgacagcgcgcggcagctgccggatggcttcgaggacgccgtcaagggcagaggcgcgtggtccgctgggccccgcagcaggaggtgctggcccaccgcgcagtgggtgggttctggagccactgcgggtggaactcgactctggaggcggtcagcgagggggtcccgatgatctgtaggccggacgccgtggaccagatgatgaacacgaggtacttgcaggacgtctggggcgtcggcttcgagctccaaggggagctggagagggggaagatcaaggacgcggttaggaagttgatgggtgagcgggagggtgctgagatgagaagagcagcgcaagagctttgcgcgaaactagcaggctgcttggagagcgctgggtcttctcaggttgccattgacaagttggttagctacatactgtctctgtgaatcttctgttctatggcgtatgtgtgttccgctggtttagcattggcagcagcttaacagctggtattctgatggacaattattcctgtcaattatatgtagtgttctctttctctaggtatttttttaatttctcc

SEQ ID NO: 24375 - protein, 448 aa, Zea mays subsp. mays
  misc_feature (1)..(448): Ceres Seq. ID no. 12434995
SRCPSRATSTRCCTWRACSTRGASAVTVLHTRFNALDPARHPEFQFVAVPDGTPADVAATGRIIDIILAMNAAMEASPAVGEALPGVRGRGAGGAAPRLVPLRRRQPPRRAQGGQGARTAHAGAAHRERRLPRLLPGLPHAPRKGLSASARVAAVHAGAGAATTPSEGPDLLEAQRPRADAQSPRPGQRNSERLLRRRHQHSRGTGGSRAREAPRRAGPPPGGARGRPTPQALLLQGRREQLARPGPQLHRVAGRAAARVGAVRELREPGGHGHERAPGGGMGSGGVRPPLPMGRPAQHGTRLRRRQRAAAAGWLRGRRQGQRRVVRWAPQQEVLAHRAVGGFWSHCGWNSTLEAVSEGVPMICRPDAVDQMMNTRYLQDVWGVGFELQGELERGKIKDAVRKLMGEREGAEMRRAAQELCAKLAGCLESAGSSQVAIDKLVSYILSL

SEQ ID NO: 24376 - protein, 379 aa, Zea mays subsp. mays
  misc_feature (1)..(379): Ceres Seq. ID no. 12434996
MNAAMEASPAVGEALPGVRGRGAGGAAPRLVPLRRRQPPRRAQGGQGARTAHAGAAHRERRLPRLLPGLPHAPRKGLSASARVAAVHAGAGAATTPSEGPDLLEAQRPRADAQSPRPGQRNSERLLRRRHQHSRGTGGSRAREAPRRAGPPPGGARGRPTPQALLLQGRREQLARPGPQLHRVAGRAAARVGAVRELREPGGHGHERAPGGGMGSGGVRPPLPMGRPAQHGTRLRRRQRAAAAGWLRGRRQGQRRVVRWAPQQEVLAHRAVGGFWSHCGWNSTLEAVSEGVPMICRPDAVDQMMNTRYLQDVWGVGFELQGELERGKIKDAVRKLMGEREGAEMRRAAQELCAKLAGCLESAGSSQVAIDKLVSYILSL

SEQ ID NO: 24377 - protein, 375 aa, Zea mays subsp. mays
  misc_feature (1)..(375): Ceres Seq. ID no. 12434997
MEASPAVGEALPGVRGRGAGGAAPRLVPLRRRQPPRRAQGGQGARTAHAGAAHRERRLPRLLPGLPHAPRKGLSASARVAAVHAGAGAATTPSEGPDLLEAQRPRADAQSPRPGQRNSERLLRRRHQHSRGTGGSRAREAPRRAGPPPGGARGRPTPQALLLQGRREQLARPGPQLHRVAGRAAARVGAVRELREPGGHGHERAPGGGMGSGGVRPPLPMGRPAQHGTRLRRRQRAAAAGWLRGRRQGQRRVVRWAPQQEVLAHRAVGGFWSHCGWNSTLEAVSEGVPMICRPDAVDQMMNTRYLQDVWGVGFELQGELERGKIKDAVRKLMGEREGAEMRRAAQELCAKLAGCLESAGSSQVAIDKLVSYILSL

SEQ ID NO: 24378 - DNA, 1555 bp, Zea mays subsp. mays
  misc_feature (1)..(1555): Ceres Seq. ID no. 12434998
acaccaagagcaggctcacgccgcaacctagcctgcacgcactctcagtctctcactgaccgcgaccagcgctcagccttctgctccggaagctagctctccggccagccaccccaccccgtccacccgacaatggcggccgccgtggccctcctcctgctctccgccctcggcggagcggcggcgcaggtgttccctccgtggaacggcacgttcccgatggggcccgggttcggaggcgggagcagcggcggcggcgcgggcgcgggcgcggggaccggcgtgccggcgatgttcgtgttcggggactcgctgacggacaacggcaacaacaacgacctgaactcgctcgccaaggctaactacccgccctacggcatcgacttcgccggcggccctaccggccgcttctccaacggctacaccatggtcgacgagatcgctcagctgctgggcctgccgctgctgccgtcgcacacggacgcggcgtcgagcggcggcggcgacgcggcgctgcacggcgtgaactacgcgtcggcggcggcggggatcctggacaacacggggcagaacttcgtggggcgcatcccgttcaaccagcagatcaagaacttcgagcagacgctggagcagctgcggcgccggacgacgacgacgaggccgggcgcgggcgcgggcgggctggcgcggagcatcttctacgtgggcatgggcagcaacgactacctcaacaactacctcatgcccaactacaacacccgcaacgagtacaacggcgaccagtactccacgctgctggtgcgccagtacgccaggcagctcgacgcgctctacggcctgggcgcccgcaggttcgtcatcgccggggtgggctccatggcctgcatccccaacatgcgcgcgcggagccccgtcaacatgtgctcgcccgacgtcgacgacctcatcatccctttcaacaccaaggtcaaggccatggtgaccagcctcaacgccaaccgcccggacgccaagttcatctacgtcgacaactacgccatgatctcccagatcctaagcaacccgtggtcctacgggttcagcgtggccgaccgcggctgctgcggcatcgggaggaaccggggcatgatcacctgcctgcccttcctgcgcccgtgcctcaaccgcaactcctacatcttctgggacgccttccacccgacggagagggtcaacgtgctcctcggcagggccgccttcagtggcggcaacgacgtcgtctaccccatgaacatccagcagctcgccgcatggcagccgtgactcggtgcaaagctgtcgatcgatcgatgcgtcgttttgtagcactacttactgctatagcgtgtgtggtcatgagtaggagggagctgagcggagttatggtacggtgcgtatcagcgaccagtatcctgctgtttggggtcaatgtcaacatcgtgtctcttgtttttggttcatcagttagttatctatcaatgtttgttcgcttattacctgtactgcatcacggagatcagtggagtcatatatttcc

SEQ ID NO: 24379 - protein, 389 aa, Zea mays subsp. mays
  misc_feature (1)..(389): Ceres Seq. ID no. 12434999
MAAAVALLLLSALGGAAAQVFPPWNGTFPMGPGFGGGSSGGGAGAGAGTGVPAMFVFGDSLTDNGNNNDLNSLAKANYPPYGIDFAGGPTGRFSNGYTMVDEIAQLLGLPLLPSHTDAASSGGGDAALHGVNYASAAAGILDNTGQNFVGRIPFNQQIKNFEQTLEQLRRRTTTTRPGAGAGGLARSIFYVGMGSNDYLNNYLMPNYNTRNEYNGDQYSTLLVRQYARQLDALYGLGARRFVIAGVGSMACIPNMRARSPVNMCSPDVDDLIIPFNTKVKAMVTSLNANRPDAKFIYVDNYAMISQILSNPWSYGFSVADRGCCGIGRNRGMITCLPFLRPCLNRNSYIFWDAFHPTERVNVLLGRAAFSGGNDVVYPMNIQQLAAWQP

SEQ ID NO: 24380 - protein, 360 aa, Zea mays subsp. mays
  misc_feature (1)..(360): Ceres Seq. ID no. 12435000
MGPGFGGGSSGGGAGAGAGTGVPAMFVFGDSLTDNGNNNDLNSLAKANYPPYGIDFAGGPTGRFSNGYTMVDEIAQLLGLPLLPSHTDAASSGGGDAALHGVNYASAAAGILDNTGQNFVGRIPFNQQIKNFEQTLEQLRRRTTTTRPGAGAGGLARSIFYVGMGSNDYLNNYLMPNYNTRNEYNGDQYSTLLVRQYARQLDALYGLGARRFVIAGVGSMACIPNMRARSPVNMCSPDVDDLIIPFNTKVKAMVTSLNANRPDAKFIYVDNYAMISQILSNPWSYGFSVADRGCCGIGRNRGMITCLPFLRPCLNRNSYIFWDAFHPTERVNVLLGRAAFSGGNDVVYPMNIQQLAAWQP

SEQ ID NO: 24381 - protein, 336 aa, Zea mays subsp. mays
  misc_feature (1)..(336): Ceres Seq. ID no. 12435001
MFVFGDSLTDNGNNNDLNSLAKANYPPYGIDFAGGPTGRFSNGYTMVDEIAQLLGLPLLPSHTDAASSGGGDAALHGVNYASAAAGILDNTGQNFVGRIPFNQQIKNFEQTLEQLRRRTTTTRPGAGAGGLARSIFYVGMGSNDYLNNYLMPNYNTRNEYNGDQYSTLLVRQYARQLDALYGLGARRFVIAGVGSMACIPNMRARSPVNMCSPDVDDLIIPFNTKVKAMVTSLNANRPDAKFIYVDNYAMISQILSNPWSYGFSVADRGCCGIGRNRGMITCLPFLRPCLNRNSYIFWDAFHPTERVNVLLGRAAFSGGNDVVYPMNIQQLAAWQP

SEQ ID NO: 24382 - DNA, 1601 bp, Zea mays subsp. mays
  misc_feature (1)..(1601): Ceres Seq. ID no. 12435006
actccaactctcaagcgtctctactcctcttcctcctctctctactctccaagttctcttctccgtcgaccgctctacacgtctcttgtcgacctggacaccgaggtggaagaaggaagcagtcagcagatggatccatggatcagcagccagccttctctgagccttgacctgcgcgtcggcctgccgccgctcagcctccaccaccaggcgccggtggccgtcgccttgcccaggcccaagctgctcgtcgaggagaacttcctcctgccgcctccaaagaaagaaccagaggtcgcggctctcgagacggagctgcagcggatgggcgaggagaaccggcgcctggcggaggcgctggccgaggtggcctccaagtacgaggcgctgcgggggcagtacacggagatggtggccgcggcggccacggcctgcgggaaccacccgtcgtccacgtcggagggcgggtccgtgtcgccgtcgcggaagcgcaagagcgagagcacggacaccgcgccgcccgcgcagcagctactgcaccagcactacccggcggtggcgccggaccagacggagtgcacctcgggcgagccgtgcaagcgcatccgggaggcggagtgcaagcccagggtgtcgaagctgcacgtgcacgccgacccggccgacctcagcctggtggtcaaggacgggtaccagtggcgcaagtacggtcagaaggtcaccaaggacaacccctgcccgcgggcctacttccgctgctccttcgccccggcctgcccagtcaagaagaaggtgcagcgcagcgccgacgaccccaccatcctggtcgccacgtacgagggcgaccacaaccacggccagcccccgccacaggcgcaggcgccgcacgacggctccagccctggcgccagcaagaagccgccgtcgccgccgaggccggtcgccgccgctccggcgccgctccaccaccagcaggtccagcagcaccagcagcagcaggcggttggcgcggtgaaatgcgagccgcccgtggccgcggcggcgtcggagctcatccggcggaacctcgcggagcagatgnccatgnactgacgcgggaccccagcttcaaggcggcgttcgtcaccgcgctgtccggccggctcttcgagatgtcgccgaccaaggactgacggaacggatcggatggattgggagattggcatcgcaggagattctggatcagattgtcttcgagcgcacgccgcaatggtcaactgcgcagcgctggcttggctgctgcctccgttcactcttcgctgtcagagcgaaacagcggtaacagagcaagacacgaggggtctgcactctgcagttgtgcaggaggaggaacagacacagggagaggagggcgcgcggccggacatggcgtggaacagagatcgtcgtcaccgccggcgggggtgtggtcgacgacgcgacatgcgaaacactacgtgctagctagcataggaaaaaacaacatgaaatcgtacaaccaaccaatccctcgcactgttttagttgttagctgtaggcgaaactgttcatccaattgatcaaatgaaaattatttttccctg

SEQ ID NO: 24383 - protein, 363 aa, Zea mays subsp. mays
  misc_feature (1)..(363): Ceres Seq. ID no. 12435007
  misc_feature (361)..(361): Xaa is any aa, unknown or other
  misc_feature (363)..(363): Xaa is any aa, unknown or other
TPTLKRLYSSSSSLYSPSSLLRRPLYTSLVDLDTEVEEGSSQQMDPWISSQPSLSLDLRVGLPPLSLHHQAPVAVALPRPKLLVEENFLLPPPKKEPEVAALETELQRMGEENRRLAEALAEVASKYEALRGQYTEMVAAAATACGNHPSSTSEGGSVSPSRKRKSESTDTAPPAQQLLHQHYPAVAPDQTECTSGEPCKRIREAECKPRVSKLHVHADPADLSLVVKDGYQWRKYGQKVTKDNPCPRAYFRCSFAPACPVKKKVQRSADDPTILVATYEGDHNHGQPPPQAQAPHDGSSPGASKKPPSPPRPVAAAPAPLHHQQVQQHQQQQAVGAVKCEPPVAAAASELIRRNLAEQMXMX

SEQ ID NO: 24384 - protein, 320 aa, Zea mays subsp. mays
  misc_feature (1)..(320): Ceres Seq. ID no. 12435008
  misc_feature (318)..(318): Xaa is any aa, unknown or other
  misc_feature (320)..(320): Xaa is any aa, unknown or other
MDPWISSQPSLSLDLRVGLPPLSLHHQAPVAVALPRPKLLVEENFLLPPPKKEPEVAALETELQRMGEENRRLAEALAEVASKYEALRGQYTEMVAAAATACGNHPSSTSEGGSVSPSRKRKSESTDTAPPAQQLLHQHYPAVAPDQTECTSGEPCKRIREAECKPRVSKLHVHADPADLSLVVKDGYQWRKYGQKVTKDNPCPRAYFRCSFAPACPVKKKVQRSADDPTILVATYEGDHNHGQPPPQAQAPHDGSSPGASKKPPSPPRPVAAAPAPLHHQQVQQHQQQQAVGAVKCEPPVAAAASELIRRNLAEQMXMX

SEQ ID NO: 24385 - protein, 255 aa, Zea mays subsp. mays
  misc_feature (1)..(255): Ceres Seq. ID no. 12435009
  misc_feature (253)..(253): Xaa is any aa, unknown or other
  misc_feature (255)..(255): Xaa is any aa, unknown or other
MGEENRRLAEALAEVASKYEALRGQYTEMVAAAATACGNHPSSTSEGGSVSPSRKRKSESTDTAPPAQQLLHQHYPAVAPDQTECTSGEPCKRIREAECKPRVSKLHVHADPADLSLVVKDGYQWRKYGQKVTKDNPCPRAYFRCSFAPACPVKKKVQRSADDPTILVATYEGDHNHGQPPPQAQAPHDGSSPGASKKPPSPPRPVAAAPAPLHHQQVQQHQQQQAVGAVKCEPPVAAAASELIRRNLAEQMXMX

SEQ ID NO: 24386 - DNA, 1366 bp, Zea mays subsp. mays
  misc_feature (1)..(1366): Ceres Seq. ID no. 12435021
cttcttctcgccgggcgtcctcagtgctgccctgtccaaggcgctcgtccgcttctaccccctcgccggccggctcgcgcaggacggcgccggccgcccgcagatccactgcaccggagaaggcgcgctcctcgtcaccgcgcgcgccgacgctaccctccaggacacccccggcgggttcgccccgtcggatgagctgcggcagatgcttgtcccctcggctgccgacggcgaagaccgcgccggcatcttggccatgttccaggtgacgtccttcaagtgcggcggggtgtgcgtgggcgcggcgatccaccacacggcggcggacggcctagcggcgctcgacttcgtcaacacgtgggccgccatcgcgagcaagggcgtcgacgaggccgcgccggcgccgcgcccgtggctggaccgcacgctgctccgcgcgcgctcccctcccgacgtgcgcttcgaccacagcgagtactccccgcggggcggcggcggtccaaagacggcgagggtcccgttcgactccgccatcctacccatgtccaagacccaggtggacgcgctcagggccggcaagaaggtgtccacgttcaaggccgtggtcgcccacgtgtggcggtgcgcgtgcatagcgcgcgggctcgcgggagacgaggacacccgtctgtacatgaccgccgacgcgcgctcccgcgtccgcccgccgctcccggaaggctacctcggcaacgccatcttccgcgcgtcagcggtggccacggcgggcgacgtcgtctccgagcagctcgacgccgttgcgggtagggtgtccggcgccaccgcccggctggacgacgagtacgtccgatcgctggtggactacctggagcaggtggtgggcgatgtggcggggctccgcaagggggagtgggtgatgccggagaccgacctgtgggtgataagctggcaggggctgcccatctacgacgccgacttcggctggggacggccggcgttcatgggccgcgcgtgcctccagttcagcggcctcgtgtacctcgtcccgggcccggacggcgacggccgcctcgacgtcgtcgtggccatggagcccaagagcctggccagattcaaggagctgttgtacgagctcaaaggtgcaggtgttccgtgcacggcagactgagctgctgcattccgtgcaggttccttagcttgctaccggctggcaaaacgaaaacctgtttgccggattgttccttgcattgcgtatctacttcgacctttactgcagtactcctagttttctactcgttgcttttgatggcaatctggtgagtactgtactctatatgcatttacatggctatctatattcggagcg

SEQ ID NO: 24387 - protein, 388 aa, Zea mays subsp. mays
  misc_feature (1)..(388): Ceres Seq. ID no. 12435022
FFSPGVLSAALSKALVRFYPLAGRLAQDGAGRPQIHCTGEGALLVTARADATLQDTPGGFAPSDELRQMLVPSAADGEDRAGILAMFQVTSFKCGGVCVGAAIHHTAADGLAALDFVNTWAAIASKGVDEAAPAPRPWLDRTLLRARSPPDVRFDHSEYSPRGGGGPKTARVPFDSAILPMSKTQVDALRAGKKVSTFKAVVAHVWRCACIARGLAGDEDTRLYMTADARSRVRPPLPEGYLGNAIFRASAVATAGDVVSEQLDAVAGRVSGATARLDDEYVRSLVDYLEQVVGDVAGLRKGEWVMPETDLWVISWQGLPIYDADFGWGRPAFMGRACLQFSGLVYLVPGPDGDGRLDVVVAMEPKSLARFKELLYELKGAGVPCTAD

SEQ ID NO: 24388 - protein, 320 aa, Zea mays subsp. mays
  misc_feature (1)..(320): Ceres Seq. ID no. 12435023
MLVPSAADGEDRAGILAMFQVTSFKCGGVCVGAAIHHTAADGLAALDFVNTWAAIASKGVDEAAPAPRPWLDRTLLRARSPPDVRFDHSEYSPRGGGGPKTARVPFDSAILPMSKTQVDALRAGKKVSTFKAVVAHVWRCACIARGLAGDEDTRLYMTADARSRVRPPLPEGYLGNAIFRASAVATAGDVVSEQLDAVAGRVSGATARLDDEYVRSLVDYLEQVVGDVAGLRKGEWVMPETDLWVISWQGLPIYDADFGWGRPAFMGRACLQFSGLVYLVPGPDGDGRLDVVVAMEPKSLARFKELLYELKGAGVPCTAD

SEQ ID NO: 24389 - protein, 303 aa, Zea mays subsp. mays
  misc_feature (1)..(303): Ceres Seq. ID no. 12435024
MFQVTSFKCGGVCVGAAIHHTAADGLAALDFVNTWAAIASKGVDEAAPAPRPWLDRTLLRARSPPDVRFDHSEYSPRGGGGPKTARVPFDSAILPMSKTQVDALRAGKKVSTFKAVVAHVWRCACIARGLAGDEDTRLYMTADARSRVRPPLPEGYLGNAIFRASAVATAGDVVSEQLDAVAGRVSGATARLDDEYVRSLVDYLEQVVGDVAGLRKGEWVMPETDLWVISWQGLPIYDADFGWGRPAFMGRACLQFSGLVYLVPGPDGDGRLDVVVAMEPKSLARFKELLYELKGAGVPCTAD

SEQ ID NO: 24390 - DNA, 1186 bp, Zea mays subsp. mays
  misc_feature (1)..(1186): Ceres Seq. ID no. 12435025
aacaacgcgcactcgcgcagcagacactgcccatcaggatttcgcaaaagcaacaaaacccacgtcgagggtagaagaggcctgcaaatttccgaagagctcgcggaaatggcgacggtgctgccgcttgccgccgcctcggcctcgcccacgccgaggacttgcatctccggcggcccagttcccgcgcgattccttgggactcgcatgcgtctccgcatccacatcccaccgcggggcgttgcctgcgccctccgaaggagacccaccaagtacaagactaaaatccagagtgaggaggatgtggtggctgcagaagatgtcatggatgatgatgacgacgaggatggtgcactggaagcacttttcaagcagctggaagaagatcttgacaatgatgatttatctgtcgatgataatgatatatcagaagaagatatggcaaggtttgaaaaggagttggcagaagcaattgaagatgtcagtggtgttgatgactcagcgggggattcgttgctgagctctggcgactatggtattgatgagcancnagatggaagcgnacgggtagagctgaaaacctggcaactccggagattggctcgtgnnctgaaaataggccggcgtaaaactagtattaagaatcttgcaggggagctaggcctagataggggtttggttattgaaatgctccgcaatccaccaccgangcttctactcatgnctgattctttgcctgatgaagtcccttctaaatctgaagtgaaggaaatagaaacccctagtacgaccactgttgacgaggttgataccagtgaaatcaaaccacagttggagcttccagtgcacgtcatgagtncagaatggtctgcaagaaaaagactgaaaaaggtgcaacttgagaccttagaaagagtctacctgcgaagcaaacggcccacgaatacaatggtcagcagcatagttcaagtgacaaaccttccgcgaaagaccattgttaagtggtttgaggatagaagggagcaagatggagtccctgaccatcgtgctgcattcaagagatccctatctgagattggtgctagttcataacttcttcagtataagcatttgttacggtgtttacttggaaccattacaaacatgtaaatatgagctttgaaattatgacaagttttgcaagctc

SEQ ID NO: 24391 - protein, 363 aa, Zea mays subsp. mays
  misc_feature (1)..(363): Ceres Seq. ID no. 12435026
  misc_feature (183)..(183): Xaa is any aa, unknown or other
  misc_feature (184)..(184): Xaa is any aa, unknown or other
  misc_feature (188)..(188): Xaa is any aa, unknown or other
  misc_feature (203)..(203): Xaa is any aa, unknown or other
  misc_feature (237)..(237): Xaa is any aa, unknown or other
  misc_feature (242)..(242): Xaa is any aa, unknown or other
  misc_feature (287)..(287): Xaa is any aa, unknown or other
NNAHSRSRHCPSGFRKSNKTHVEGRRGLQISEELAEMATVLPLAAASASPTPRTCISGGPVPARFLGTRMRLRIHIPPRGVACALRRRPTKYKTKIQSEEDVVAAEDVMDDDDDEDGALEALFKQLEEDLDNDDLSVDDNDISEEDMARFEKELAEAIEDVSGVDDSAGDSLLSSGDYGIDEXXDGSXRVELKTWQLRRLARXLKIGRRKTSIKNLAGELGLDRGLVIEMLRNPPPXLLLMXDSLPDEVPSKSEVKEIETPSTTTVDEVDTSEIKPQLELPVHVMSXEWSARKRLKKVQLETLERVYLRSKRPTNTMVSSIVQVTNLPRKTIVKWFEDRREQDGVPDHRAAFKRSLSEIGASS

SEQ ID NO: 24392 - protein, 327 aa, Zea mays subsp. mays
  misc_feature (1)..(327): Ceres Seq. ID no. 12435027
  misc_feature (147)..(147): Xaa is any aa, unknown or other
  misc_feature (148)..(148): Xaa is any aa, unknown or other
  misc_feature (152)..(152): Xaa is any aa, unknown or other
  misc_feature (167)..(167): Xaa is any aa, unknown or other
  misc_feature (201)..(201): Xaa is any aa, unknown or other
  misc_feature (206)..(206): Xaa is any aa, unknown or other
  misc_feature (251)..(251): Xaa is any aa, unknown or other
MATVLPLAAASASPTPRTCISGGPVPARFLGTRMRLRIHIPPRGVACALRRRPTKYKTKIQSEEDVVAAEDVMDDDDDEDGALEALFKQLEEDLDNDDLSVDDNDISEEDMARFEKELAEAIEDVSGVDDSAGDSLLSSGDYGIDEXXDGSXRVELKTWQLRRLARXLKIGRRKTSIKNLAGELGLDRGLVIEMLRNPPPXLLLMXDSLPDEVPSKSEVKEIETPSTTTVDEVDTSEIKPQLELPVHVMSXEWSARKRLKKVQLETLERVYLRSKRPTNTMVSSIVQVTNLPRKTIVKWFEDRREQDGVPDHRAAFKRSLSEIGASS

SEQ ID NO: 24393 - protein, 294 aa, Zea mays subsp. mays
  misc_feature (1)..(294): Ceres Seq. ID no. 12435028
  misc_feature (114)..(114): Xaa is any aa, unknown or other
  misc_feature (115)..(115): Xaa is any aa, unknown or other
  misc_feature (119)..(119): Xaa is any aa, unknown or other
  misc_feature (134)..(134): Xaa is any aa, unknown or other
  misc_feature (168)..(168): Xaa is any aa, unknown or other
  misc_feature (173)..(173): Xaa is any aa, unknown or other
  misc_feature (218)..(218): Xaa is any aa, unknown or other
MRLRIHIPPRGVACALRRRPTKYKTKIQSEEDVVAAEDVMDDDDDEDGALEALFKQLEEDLDNDDLSVDDNDISEEDMARFEKELAEAIEDVSGVDDSAGDSLLSSGDYGIDEXXDGSXRVELKTWQLRRLARXLKIGRRKTSIKNLAGELGLDRGLVIEMLRNPPPXLLLMXDSLPDEVPSKSEVKEIETPSTTTVDEVDTSEIKPQLELPVHVMSXEWSARKRLKKVQLETLERVYLRSKRPTNTMVSSIVQVTNLPRKTIVKWFEDRREQDGVPDHRAAFKRSLSEIGASS

SEQ ID NO: 24394 - DNA, 1480 bp, Zea mays subsp. mays
  misc_feature (1)..(1480): Ceres Seq. ID no. 12435038
agggacggagcagttggtcgcccgccattggtccgccgatatctatttttcctctctctccttttctctgcttcagttcccgtccacgagcaggtgtagtagcttctagtagctagcaagtcggccagcacgctcgctcgcagcagtcgctagccagacagcattggcgccggcccgctcgcacgcgcgctatggaggaggcgaggcaaaggcggcggctgtgcctgtgcctggtggtggcggccgggagctgggcgctgctggcggcggtggcgcggtgcgacccgcaggtgccgtgctacttcatcttcggcgactcgctggtggacaacggcaacaacaactacatcgtgtcgctggcgcgcgccaactacccgccctacggcatcgacttcgccgccggcccgtcggggcgcttcaccaacggactcaccaccgtcgatgtcatcgctcaacttctgggtttcgacaacttcatcccgccgttcgccgcaacgagcgcagaccagctcctgggcggcgccaacttcgcctccgcggccgccggcatccgcgccgaaaccggccagcagctgggcgggcggatcccgttcgcggggcaggtgcagaactaccagacggcggtgcagacgctggtgagcatcctgggcgaccaggacacggcgtcggaccacctgagccggtgcatcttcagcgtgggcatgggcagcaacgactacctcaacaactacttcatgccggccttctacaacacgggcagccggtacaccccggagcagttcgccgactcgctcatcgccgactaccgccgccacctgcgggtgctgtacaactacggcgcgcgcaaggtggtgatgatcggggtcggccaggtcgggtgcagccccaacgagctggcccgctacagcgccgacggcgtcacctgcgtcgaccgcatcgacgacgccatccagatgttcaaccgccgcctcgtcggcctcgtcgacgagttcaacgcgctcccaggcgcgcacttcaccttcatcaacgcctacaacatcttcgacgacatcctcgccaacgccgcctcctacgggttcacggtgaccaacgccgggtgctgcggggtcggcaggaacaacgggcaggtgacgtgcctgccctaccaggcgccgtgcgccaacagggaccagcacatcttctgggacgccttccacccgtcggaggcggccaacatcatcgtcggccgccggtcctaccgcgccgagtcgcccaacgacgtctacccgatggacatcagcacgctcgcctccatctgattctcattctgatccctccataaatataaacataaatatatatataatccacccaccactgcgcaaatgctgcaatactaaacggggctccaagaggaggtagccgtgcaattctttcctgtgtacaagctcgcgccttatctgtaatttttcatgctttcatatatttgcatcgggcactt

SEQ ID NO: 24395 - protein, 368 aa, Zea mays subsp. mays
  misc_feature (1)..(368): Ceres Seq. ID no. 12435039
MEEARQRRRLCLCLVVAAGSWALLAAVARCDPQVPCYFIFGDSLVDNGNNNYIVSLARANYPPYGIDFAAGPSGRFTNGLTTVDVIAQLLGFDNFIPPFAATSADQLLGGANFASAAAGIRAETGQQLGGRIPFAGQVQNYQTAVQTLVSILGDQDTASDHLSRCIFSVGMGSNDYLNNYFMPAFYNTGSRYTPEQFADSLIADYRRHLRVLYNYGARKVVMIGVGQVGCSPNELARYSADGVTCVDRIDDAIQMFNRRLVGLVDEFNALPGAHFTFINAYNIFDDILANAASYGFTVTNAGCCGVGRNNGQVTCLPYQAPCANRDQHIFWDAFHPSEAANIIVGRRSYRAESPNDVYPMDISTLASI

SEQ ID NO: 24396 - protein, 198 aa, Zea mays subsp. mays
  misc_feature (1)..(198): Ceres Seq. ID no. 12435040
MGSNDYLNNYFMPAFYNTGSRYTPEQFADSLIADYRRHLRVLYNYGARKVVMIGVGQVGCSPNELARYSADGVTCVDRIDDAIQMFNRRLVGLVDEFNALPGAHFTFINAYNIFDDILANAASYGFTVTNAGCCGVGRNNGQVTCLPYQAPCANRDQHIFWDAFHPSEAANIIVGRRSYRAESPNDVYPMDISTLASI

SEQ ID NO: 24397 - protein, 187 aa, Zea mays subsp. mays
  misc_feature (1)..(187): Ceres Seq. ID no. 12435041
MPAFYNTGSRYTPEQFADSLIADYRRHLRVLYNYGARKVVMIGVGQVGCSPNELARYSADGVTCVDRIDDAIQMFNRRLVGLVDEFNALPGAHFTFINAYNIFDDILANAASYGFTVTNAGCCGVGRNNGQVTCLPYQAPCANRDQHIFWDAFHPSEAANIIVGRRSYRAESPNDVYPMDISTLASI

SEQ ID NO: 24398 - DNA, 1531 bp, Zea mays subsp. mays
  misc_feature (1)..(1531): Ceres Seq. ID no. 12435048
gcacgagaccattacctagaacatcctaatcgaaaaaagtcgcatcgcacgccatcagcagctagcgcgctcctcgagcccagcagagaaaggccggcagcgctaatcgtaatagccatgggctccaccgccgccgacgtggccgcggtggtggacgaggaggcgtgcatgtacgcgatgcagctggcgtcgtcgtccatcctgccctgaagaacgccatcgagctgggcctgctggaggtgctgcagaaggaggccggcggcggcaaggcggcgctggcgccgaggaggtggtggcgcggatgcccgcggcgcccagcgaccccgccgccgccgcgncattggtggaccgcatgctccgcctgctcgcctcctacgacgtcgtccggtgccagatggaggaccgggacggccggtacgagcgccgctactccgccgcgcccgtctgcaagtggctcacccccaacgaggacggcgtgtccatggccgccctcgcgctcatgaaccaggacaaggtcctcatggagagctggtactatctcaaggacgcggtgctggacggcggcatcccgttcaacaaggcgtacgggatgacggcgttcgagtaccacggcacggacgcgcgcttcaaccgcgtgttcaacgagggcatgaagaaccactcggtgatcatcaccaagaagctgctggacttctacacgggcttcgagggcgtgtcgacgctggtggacgtgggcggcggcgtgggcgccacgctgcacgccatcacgtcccgccacccgcacatctccggggtcaacttcgacctgccgcacgtcatctccgaggcgccgccgttccccggcgtgcgccacgtgggcggggacatgttcgcgtccgtgcccgccggcgacgccatcctcatgaagtggatcctccacgactggagcgacgcgcactgcgccacgctgctcaagaactgctacgacgcgctgccggaaaatggcaaggtcatcgtcgtcgagtgcgtgctgccggtcaacacggaggccacccccaaggcgcagggcgtgttccacgtcgacatgatcatgctcgcgcacaaccccggcggcaaggagcggtacgagcgcgagttccgcgagctcgccaagggcgccggcttctccgggttcaaggccacctacatctacgccaacgcctgggccatcgagttcatcaagtgaatacggctaccaccgtcgccgcgatgagatgcatggctgccacatgcatgcttgcttgcttggtcctcgtatcgtacgtcgccgtcgtcgtcttcttctggttgcgctgctaccttgctgctctcgccctcgcgtatgcatgtacttttgcttaattttctttcttcatatcatgcactctggctggcctagactgcccccgatccatggtggccatgtcttcggtacgtcttgtcgagctcttgcatgtcgtggattctaaattcttcttctgcgtcgaattgtctctgccatgtgcgagtaataacaatcaaggttatacttacc

SEQ ID NO: 24399 - protein, 300 aa, Zea mays subsp. mays
  misc_feature (1)..(300): Ceres Seq. ID no. 12435049
  misc_feature (13)..(13): Xaa is any aa, unknown or other
MPAAPSDPAAAAXLVDRMLRLLASYDVVRCQMEDRDGRYERRYSAAPVCKWLTPNEDGVSMAALALMNQDKVLMESWYYLKDAVLDGGIPFNKAYGMTAFEYHGTDARFNRVFNEGMKNHSVIITKKLLDFYTGFEGVSTLVDVGGGVGATLHAITSRHPHISGVNFDLPHVISEAPPFPGVRHVGGDMFASVPAGDAILMKWILHDWSDAHCATLLKNCYDALPENGKVIVVECVLPVNTEATPKAQGVFHVDMIMLAHNPGGKERYEREFRELAKGAGFSGFKATYIYANAWAIEFIK

SEQ ID NO: 24400 - protein, 283 aa, Zea mays subsp. mays
  misc_feature (1)..(283): Ceres Seq. ID no. 12435050
MLRLLASYDVVRCQMEDRDGRYERRYSAAPVCKWLTPNEDGVSMAALALMNQDKVLMESWYYLKDAVLDGGIPFNKAYGMTAFEYHGTDARFNRVFNEGMKNHSVIITKKLLDFYTGFEGVSTLVDVGGGVGATLHAITSRHPHISGVNFDLPHVISEAPPFPGVRHVGGDMFASVPAGDAILMKWILHDWSDAHCATLLKNCYDALPENGKVIVVECVLPVNTEATPKAQGVFHVDMIMLAHNPGGKERYEREFRELAKGAGFSGFKATYIYANAWAIEFIK

SEQ ID NO: 24401 - protein, 269 aa, Zea mays subsp. mays
  misc_feature (1)..(269): Ceres Seq. ID no. 12435051
MEDRDGRYERRYSAAPVCKWLTPNEDGVSMAALALMNQDKVLMESWYYLKDAVLDGGIPFNKAYGMTAFEYHGTDARFNRVFNEGMKNHSVIITKKLLDFYTGFEGVSTLVDVGGGVGATLHAITSRHPHISGVNFDLPHVISEAPPFPGVRHVGGDMFASVPAGDAILMKWILHDWSDAHCATLLKNCYDALPENGKVIVVECVLPVNTEATPKAQGVFHVDMIMLAHNPGGKERYEREFRELAKGAGFSGFKATYIYANAWAIEFIK

SEQ ID NO: 24402 - DNA, 1679 bp, Zea mays subsp. mays
  misc_feature (1)..(1679): Ceres Seq. ID no. 12435060
gcacgagaccattacctagaacatcctaatcgaaaaacattccatcggtcgtgaaaagaaaaagggaaacaaaccaagctagctagagaaaagaagaagctggtactagctagctagctagcttagctatgggcaccatcgtggacgctgacgtcgggttcgcggtgaagaggacgagcaggtcgctggtgccgcctgcgtcggcgacgccgcgggagacgctgcggctgtcggtgatcgaccgcgtggcggggctgcgccacctggtgcggtcgctgcacgtgttcgccgcgggcggcgacaagaagcggcagcaggcgacggcggcgacgccggccaaggcgctgcgggaggcgctggggaaggcgctggtggactactacccgttcgcggggcggttcgtggtggtggacgcggagggcggcggggagacgcgggtggcgtgcaccggcgagggcgcctggttcgtggaggccaacgccgcgtgctcgctcgaggaggcccgccacctcgaccaccccatgctcatccccaaggagcagctgctgccggagccctcgccggacgtcaacccgctggacatgccgctcatgatgcaggtgacggagttctcgtgcggcggcttccgtggtggggctcatctccgtgcacacgatcgcggacggcctgggcgcggggcagttcatcaacacggtggcgacgtacgcgcggggcgccacgtccgccacgcccaagcccgtgtggggcgcgcgacgtgatcccggacccgcccaagatgccggcgcctccgccgcgcctggacctgctggacctgcgctacttcacggcggacctgagcccggaccacatcggcaaggtgaaggcgcggtacctggagtcgacggggcagcgctgctcggcgttcgacgtgtgcgtggcgcgcacgtggcaggcccgcgtgcgcgcgctgcggctccccgacccggccgcgcccgtgcacgtctgcttcttcgccaacacccgccacctgcttccggcggcggccacggccgggttctacggcaactgcttctacacggtgaaggcgacgcgggcgagcggggaggtggcggcggccgacgtggtggacgttgtgcgcgccatccgcgacgccaaggcgaggctgggcgccgacttcgcgcgctgggccgcgggcggcttcgaccgcgacccctacgagctcaccttcacctacgactcgctcttcgtctccgactggacgcgcctcggcttcctcgaggcggactacggctggggcaccccgacgcacgtcctgcccttctcctaccacccgttcatggcagtcgccgtcatcggcgccccgcctaagcccaagcccggcgcccgcatcatgaccatgtgcgtccaggagcagcacctgcccgagttccaggagcagatgatgagccagcaggccgcctaggcctagctagctcctgatcacccccatcaccatgttcatctatatcgtcatcgtcatcatgcatgcggcgtgcacgtttggaatatttgttaatcaatcaataacggtgaggtgaggttgctattatatgaagtagtagtaacacctcaacaacaacaacccaatgcaatgggaactcgcgtgtaatttgctccttcttcttcaaatataattccgcctcaattgtatgtatgtatgt

SEQ ID NO: 24403 - protein, 221 aa, Zea mays subsp. mays
  misc_feature (1)..(221): Ceres Seq. ID no. 12435061
MPAPPPRLDLLDLRYFTADLSPDHIGKVKARYLESTGQRCSAFDVCVARTWQARVRALRLPDPAAPVHVCFFANTRHLLPAAATAGFYGNCFYTVKATRASGEVAAADVVDVVRAIRDAKARLGADFARWAAGGFDRDPYELTFTYDSLFVSDWTRLGFLEADYGWGTPTHVLPFSYHPFMAVAVIGAPPKPKPGARIMTMCVQEQHLPEFQEQMMSQQAA

SEQ ID NO: 24404 - protein, 209 aa, Zea mays subsp. mays
  misc_feature (1)..(209): Ceres Seq. ID no. 12435062
MGTIVDADVGFAVKRTSRSLVPPASATPRETLRLSVIDRVAGLRHLVRSLHVFAAGGDKKRQQATAATPAKALREALGKALVDYYPFAGRFVVVDAEGGGETRVACTGEGAWFVEANAACSLEEARHLDHPMLIPKEQLLPEPSPDVNPLDMPLMMQVTEFSCGGFRGGAHLRAHDRGRPGRGAVHQHGGDVRAGRHVRHAQARVGRAT

SEQ ID NO: 24405 - DNA, 1374 bp, Zea mays subsp. mays
  misc_feature (1)..(1374): Ceres Seq. ID no. 12435065
acgaccgactccctcaattacctgcccgtcccaattgtttccgcaagtcgcccagaccagatttgccagaacgcaacctcggctccgaaaccctagccgcacgcagctgtccacttctactcccctcgcctcgccacacccgccgcgcggcacgatcagacgccatggccgccgagaactactggaggtacgctgatgcgcggcagcagcagcaggcgatggtngccgccgcggcggcgcagcggggatggctcccgcggcgaccgtcgccgcgncccanacggtcgggagtncgncgncgnctatgaaccagcaggctgccgccgccgccatggcgcagcaggccgccgctgcgccgcctctcaagcgcgcgcgccccgacttcggtgatgtgtctggtgggcaagacatgacaggatattatccacgtgaaactgacaggtcaggataccattccctcagagagaacgacacacttggggcatcttatgaccgttacttgcgcaatgggatggcctccgtcggtgcaaatgacacttctagggctgccgggatgggtgctggattggctgcagggatgactgcagggatgggtgctggaatggctgcagggatggctggctatggtgttgatggtcagcgtatgatgggtgttgttggtatggacagcagagggatgggatatggtggcagacctgagccacctcttccgcctgatgcatcaagcactctatatattgagggcttacctgcaaactgcacacgacgggaggtttcacatatatttcgcccatttgttggttttcgtgaagttcgtcttgtcaacaaggagtccagacatcctggtggagatccacatgtgttgtgtttcgtcgattttgacaaccctgctcaggctacaattgctctggaagcattacaaggttataagtttgacgaacacgagcgtgattcagcccatttgcgtctgcaattctcacgctttcccggtccaaggtcagctggtgggcctcgcggtaggcgttaagacgtgcggacctcgtggttgccgaacctatcgtttatacgagcgatccaactacggtgggctaacgcttcgatatgcgctgaatttcggggcggtggctttttagggttcgtcagctcatttcgtgaatgcgtgaaagggacaatgcaataagtgatattctgccatatgttattagatgccgtataatgtgttaggcatggaaagttattcgacatactgtatctgctgccttagctattgtggtctactgtaacttcattaccttgcttcacatccgagacaatttgagtttgttatcatgtggattatctgttttgaaaatgaaaactagatgatgttagcct

SEQ ID NO: 24406 - protein, 259 aa, Zea mays subsp. mays
  misc_feature (1)..(259): Ceres Seq. ID no. 12435066
  misc_feature (10)..(10): Xaa is any aa, unknown or other
  misc_feature (11)..(11): Xaa is any aa, unknown or other
  misc_feature (16)..(16): Xaa is any aa, unknown or other
  misc_feature (17)..(17): Xaa is any aa, unknown or other
  misc_feature (18)..(18): Xaa is any aa, unknown or other
  misc_feature (19)..(19): Xaa is any aa, unknown or other
MAPAATVAAXXTVGSXXXXMNQQAAAAAMAQQAAAAPPLKRARPDFGDVSGGQDMTGYYPRETDRSGYHSLRENDTLGASYDRYLRNGMASVGANDTSRAAGMGAGLAAGMTAGMGAGMAAGMAGYGVDGQRMMGVVGMDSRGMGYGGRPEPPLPPDASSTLYIEGLPANCTRREVSHIFRPFVGFREVRLVNKESRHPGGDPHVLCFVDFDNPAQATIALEALQGYKFDEHERDSAHLRLQFSRFPGPRSAGGPRGRR

SEQ ID NO: 24407 - protein, 240 aa, Zea mays subsp. mays
  misc_feature (1)..(240): Ceres Seq. ID no. 12435067
MNQQAAAAAMAQQAAAAPPLKRARPDFGDVSGGQDMTGYYPRETDRSGYHSLRENDTLGASYDRYLRNGMASVGANDTSRAAGMGAGLAAGMTAGMGAGMAAGMAGYGVDGQRMMGVVGMDSRGMGYGGRPEPPLPPDASSTLYIEGLPANCTRREVSHIFRPFVGFREVRLVNKESRHPGGDPHVLCFVDFDNPAQATIALEALQGYKFDEHERDSAHLRLQFSRFPGPRSAGGPRGRR

SEQ ID NO: 24408 - protein, 231 aa, Zea mays subsp. mays
  misc_feature (1)..(231): Ceres Seq. ID no. 12435068
MAQQAAAAPPLKRARPDFGDVSGGQDMTGYYPRETDRSGYHSLRENDTLGASYDRYLRNGMASVGANDTSRAAGMGAGLAAGMTAGMGAGMAAGMAGYGVDGQRMMGVVGMDSRGMGYGGRPEPPLPPDASSTLYIEGLPANCTRREVSHIFRPFVGFREVRLVNKESRHPGGDPHVLCFVDFDNPAQATIALEALQGYKFDEHERDSAHLRLQFSRFPGPRSAGGPRGRR

SEQ ID NO: 24409 - DNA, 1509 bp, Zea mays subsp. mays
  misc_feature (1)..(1509): Ceres Seq. ID no. 12435069
agaactctgcaagtccgcatcaattcgcactcccagcttcctttaccttcgcaacaagcaagccggtagcagcaagctagatcgcggggaagcgactcgcctccaccatcggcgctgctccggcgcggagaagcgtcctctcgcggcggctgggaagaccagtctccgccagtcccggcgactgcttccgtgaggtgcccttggctcctgggcgacgggctcgtggcggccggcgagatgaacagccatgcggccggaacaagcaacgggggacccggggatgcggccgctgggggcgcagccaggaggaacaccaggatgcccaagtattccaagttcacacagcaggagttgccagcttgcaagccgattcttactccaaaatgggttgtctctgttttcttcatcgtcggggtcatctttgttcccattggtgttgttttcactgctagctgcgagagatgttgttgagattattgatcggtatgatgaggcatgtgtgccagggcaacatgactgagaacaagcttgcttacatccagaatgacaccttatccaaagagtgcataaggaatcttacggttacaaaggatatgaagcagcctatttttgtgtattatgaacttggtaacttctaccagaaccataggaggtatgtaaagagccgaaacgatgcacagctaagagatgctagtaaagctaaccagacatccgcttgtgaacctgagaagaccacagctaatgggcaaccaattgttccttgcggcctcattgcttggagcttgtttaatgatacatataatttcactcgtggtaatgagaacttgacagtggacaagaaagatatttcctggaagagcgatagggaacataaatttggtaaagatgtctatccgagcaacttccagaatggcgcacttaaaggtggagcaacacttgacccaaagatcccgttgagtgagcaagaggatctcatcgtttggatgcggactgcagcacttcctacattcagaaagttatatgggagaatatacattgacctcaaggagaatgacacaataacagtgacattgaataacaactacaatacatatagcttcggtggcaagaaaaagctggtcctctccactgcaacttggcttggggggaagaacgattttcttggctttgcataccttatagttggcgggctctgcattttcctggcatttgcattcaccttgctgtacttcgtaaaaccaaggaaactgggagaccacaactacttatcctggaacagacgccatgcaggacgctaagatgttttggaaccccaagtgtcctaactacttaagtgcaacttgtatgaaatgaaatgccctgaaccagaaatctcgttgggcagactggatcagactagaacttcatgtacattttttttacaaagggtctaggtggctacgtgattttgtttcttgtgttctatagagctgcatgtagcagtgattatgagaatacatattgatctcg

SEQ ID NO: 24410 - protein, 278 aa, Zea mays subsp. mays
  misc_feature (1)..(278): Ceres Seq. ID no. 12435070
MLLRLLIGMMRHVCQGNMTENKLAYIQNDTLSKECIRNLTVTKDMKQPIFVYYELGNFYQNHRRYVKSRNDAQLRDASKANQTSACEPEKTTANGQPIVPCGLIAWSLFNDTYNFTRGNENLTVDKKDISWKSDREHKFGKDVYPSNFQNGALKGGATLDPKIPLSEQEDLIVWMRTAALPTFRKLYGRIYIDLKENDTITVTLNNNYNTYSFGGKKKLVLSTATWLGGKNDFLGFAYLIVGGLCIFLAFAFTLLYFVKPRKLGDHNYLSWNRRHAGR

SEQ ID NO: 24411 - protein, 270 aa, Zea mays subsp. mays
  misc_feature (1)..(270): Ceres Seq. ID no. 12435071
MMRHVCQGNMTENKLAYIQNDTLSKECIRNLTVTKDMKQPIFVYYELGNFYQNHRRYVKSRNDAQLRDASKANQTSACEPEKTTANGQPIVPCGLIAWSLFNDTYNFTRGNENLTVDKKDISWKSDREHKFGKDVYPSNFQNGALKGGATLDPKIPLSEQEDLIVWMRTAALPTFRKLYGRIYIDLKENDTITVTLNNNYNTYSFGGKKKLVLSTATWLGGKNDFLGFAYLIVGGLCIFLAFAFTLLYFVKPRKLGDHNYLSWNRRHAGR

SEQ ID NO: 24412 - protein, 269 aa, Zea mays subsp. mays
  misc_feature (1)..(269): Ceres Seq. ID no. 12435072
MRHVCQGNMTENKLAYIQNDTLSKECIRNLTVTKDMKQPIFVYYELGNFYQNHRRYVKSRNDAQLRDASKANQTSACEPEKTTANGQPIVPCGLIAWSLFNDTYNFTRGNENLTVDKKDISWKSDREHKFGKDVYPSNFQNGALKGGATLDPKIPLSEQEDLIVWMRTAALPTFRKLYGRIYIDLKENDTITVTLNNNYNTYSFGGKKKLVLSTATWLGGKNDFLGFAYLIVGGLCIFLAFAFTLLYFVKPRKLGDHNYLSWNRRHAGR

SEQ ID NO: 24413 - DNA, 994 bp, Zea mays subsp. mays
  misc_feature (1)..(994): Ceres Seq. ID no. 12435085
atctacacacgccgttcccaagtcccaaccgaacacacacagcaacagcggccacctgccgctcagtgcgtgcgccgtgccatgaccatgaagctcgatgccccggcgaggcagaagagccaggacgcagagcagaacggcaggacagcggccgcgggcgtcctcggcattgacgagccgtggagccagccgaaactccgtctcaccggccacgcgcaggccgacgccgacgccctggtgccgccgctcaacttcgccatggtcgacgacggcatcttccgctcgggcctcccggacgccggcagcttccgcttcctgctctccctcaatctgcgctccgtcgtgtacctgtgcccggagccgtacccggaggagaacgcgcggttcctgcagcagaacgggatccagcttcaccagttcggcatcgaagggagcaagagtggttcgacagtgccggatgccatggtggtgcaggaaccattcgtctacatccctgaagagaccatccgagaggcgctcaaagttattcttgacgcaagaaaccagccggtgctcatccactgcaagagaggcaagcatcgcactggctgcgtcgtcgggtgcctgaggaagctgcagaagtggtgcctgtcttcggtgttcgacgagtacctgcacttcgcggcggcgaaggcgaggagcactgaccagaggttcatggagctgttcgacgcttcgagcttgacgcacctggcggcctcacagtattgagcgctgaccagagcgagtggctcccgaccggtcccgatcctgcaaccatgctgcatcaagcaagcgattttcccctgctgtttccgaagcaactcggccgagaataatgctgctggaaccatgagtgtgtccgcgagaattgataggcaatggccttaggttttgttgtgtgagtgctgtggttgcttcgtgtgcaactgatttcagattctgaattggtgatggctgtgattggtgatggccg

SEQ ID NO: 24414 - protein, 249 aa, Zea mays subsp. mays
  misc_feature (1)..(249): Ceres Seq. ID no. 12435086
IYTRRSQVPTEHTQQQRPPAAQCVRRAMTMKLDAPARQKSQDAEQNGRTAAAGVLGIDEPWSQPKLRLTGHAQADADALVPPLNFAMVDDGIFRSGLPDAGSFRFLLSLNLRSVVYLCPEPYPEENARFLQQNGIQLHQFGIEGSKSGSTVPDAMVVQEPFVYIPEETIREALKVILDARNQPVLIHCKRGKHRTGCVVGCLRKLQKWCLSSVFDEYLHFAAAKARSTDQRFMELFDASSLTHLAASQY

SEQ ID NO: 24415 - protein, 222 aa, Zea mays subsp. mays
  misc_feature (1)..(222): Ceres Seq. ID no. 12435087
MTMKLDAPARQKSQDAEQNGRTAAAGVLGIDEPWSQPKLRLTGHAQADADALVPPLNFAMVDDGIFRSGLPDAGSFRFLLSLNLRSVVYLCPEPYPEENARFLQQNGIQLHQFGIEGSKSGSTVPDAMVVQEPFVYIPEETIREALKVILDARNQPVLIHCKRGKHRTGCVVGCLRKLQKWCLSSVFDEYLHFAAAKARSTDQRFMELFDASSLTHLAASQY

SEQ ID NO: 24416 - protein, 220 aa, Zea mays subsp. mays
  misc_feature (1)..(220): Ceres Seq. ID no. 12435088
MKLDAPARQKSQDAEQNGRTAAAGVLGIDEPWSQPKLRLTGHAQADADALVPPLNFAMVDDGIFRSGLPDAGSFRFLLSLNLRSVVYLCPEPYPEENARFLQQNGIQLHQFGIEGSKSGSTVPDAMVVQEPFVYIPEETIREALKVILDARNQPVLIHCKRGKHRTGCVVGCLRKLQKWCLSSVFDEYLHFAAAKARSTDQRFMELFDASSLTHLAASQY

SEQ ID NO: 24417 - DNA, 1042 bp, Zea mays subsp. mays
  misc_feature (1)..(1042): Ceres Seq. ID no. 12435100
aagaaaaagccccaaatacacagcctaggcccaccaattcggacacgctcacacgccagagaagagagaggaaaggaacccaacacactctctcgcgcggcaagagcttcccggcccgaaaccgaaagcaccaccaatctctgcgtttttcgtctgcngcggcggcggcggcagcagcggaggaggtggacgagatgctgtccgccgacatccccccaaaccagaccatctacctcaacaacctcaacgagaaggtcaagaaagaagagttgaagagatcgctttatgccctgtgctcgcagtatggaaggatactggatgtggtggctctgaaaacacagaaactgagagggcaggcatgggtggtgtttagcgagattacagctgctaccaatgctttccgtggattgcaagactttgatttctacggcaaaaaaatgcgagtacaatatgcaaaaacaaaatcagactgtattgcaaaagaagatggtacttatgcacctaaggagaaaaggaagaagcaagaggagaaagctgctgagaaaaaacgacgagcagaagaggcacagcaagctggccccaatgctgctgctgctcaaagcaatggaactggctatcaagcgtctcgtctgggcaaggcttcgcaggagccacctgctcctccgaacaacatcctcttcatccagaacttgccagaccagaccacgagcatgatgctccagatcctgttccagcagtatcccggcttccgggaagtccggatgatcgaagccaaaccaggcattgcctttgtggagttcgaggacgacggccagtccatggtggcgatgcaggctctccagggcttcaagatcaccccggagaaccccatggctatatcctatgccaaaaaatgagaaccctcgcggaatccctgtacccaatacccataatattttccgttccgccttccggaatcgagccacagtatctagtctactttccggccatgtatttttggaaagcacttgcttaatttagaagttagactcttgccactttc

SEQ ID NO: 24418 - protein, 297 aa, Zea mays subsp. mays
  misc_feature (1)..(297): Ceres Seq. ID no. 12435101
  misc_feature (52)..(52): Xaa is any aa, unknown or other
EKAPNTQPRPTNSDTLTRQRRERKGTQHTLSRGKSFPARNRKHHQSLRFSSXAAAAAAAEEVDEMLSADIPPNQTIYLNNLNEKVKKEELKRSLYALCSQYGRILDVVALKTQKLRGQAWVVFSEITAATNAFRGLQDFDFYGKKMRVQYAKTKSDCIAKEDGTYAPKEKRKKQEEKAAEKKRRAEEAQQAGPNAAAAQSNGTGYQASRLGKASQEPPAPPNNILFIQNLPDQTTSMMLQILFQQYPGFREVRMIEAKPGIAFVEFEDDGQSMVAMQALQGFKITPENPMAISYAKK

SEQ ID NO: 24419 - protein, 233 aa, Zea mays subsp. mays
  misc_feature (1)..(233): Ceres Seq. ID no. 12435102
MLSADIPPNQTIYLNNLNEKVKKEELKRSLYALCSQYGRILDVVALKTQKLRGQAWVVFSEITAATNAFRGLQDFDFYGKKMRVQYAKTKSDCIAKEDGTYAPKEKRKKQEEKAAEKKRRAEEAQQAGPNAAAAQSNGTGYQASRLGKASQEPPAPPNNILFIQNLPDQTTSMMLQILFQQYPGFREVRMIEAKPGIAFVEFEDDGQSMVAMQALQGFKITPENPMAISYAKK

SEQ ID NO: 24420 - protein, 152 aa, Zea mays subsp. mays
  misc_feature (1)..(152): Ceres Seq. ID no. 12435103
MRVQYAKTKSDCIAKEDGTYAPKEKRKKQEEKAAEKKRRAEEAQQAGPNAAAAQSNGTGYQASRLGKASQEPPAPPNNILFIQNLPDQTTSMMLQILFQQYPGFREVRMIEAKPGIAFVEFEDDGQSMVAMQALQGFKITPENPMAISYAKK

SEQ ID NO: 24421 - DNA, 1301 bp, Zea mays subsp. mays
  misc_feature (1)..(1301): Ceres Seq. ID no. 12435108
gcacgagaccattacctagaacatcctaatcgaaaaactgcgcgtgtgcgccactacaccaaccgtttggtccgccgttcggggattccttccgcactactacatagtagcacccgtgtggccgtgtccgagctacccacgcccccaacgccaagaacgtcgacgggcgcgacggcatggcggcggcggacccggacaccgaggtgcaggcagagttcccacccctcgtccgccagtacaaaagcggccgcgtcgagcggttcttcaacctggccccgctcccggccggcaccgacccggccacgggcgtcgtgtccaaggacgtcgtcgtcgacccggccaccggcctctgggcgcgcctcttcctccccgccggcagccacgggaagaagctccccgtcgtcgtctactaccatggcggcgcctacgtgatcggctcggcggccgacccgatgacgcacggctacctcaacgcgctcgtcgccaaggccggcgtcctcgcggtcgcgctcgagtaccgcctcgcgccggagcacccgctcccggccgcctacgaggactcatgggagggactcaagtgggtggccacccacgcctccgcctccgccgccgcgggaggaggaccggccgccgagccgtggctaaccgagcacggcgacttctcccgcgtgttcctggccggggccagcgcgggggccaccatcgctcacttcgtagcagtccgtgccggtgagcagcacaagagcggcggcctcgggatgcggatcagggggctgctgatagtgcacccctacttcagcggcgcggcggacatcggcgacgaggggacgacggggaaggcgcgcaaggcgcgggccgacgcgttctggcggttcctgtgccctggcacccccgggctcgacgaccctctctccaacccgttctcggaggcctccggcgggagcgcggcgcgcgtcgccgccgagcgcgtgctcgtctgcgtcgccgagaaggacgacctcagggacaggggcgtctggtactacgagagcctcaaggccagcggctaccctggcgaggtggagctgctcgagtccatgggcgagggccacgtcttctactgcatgaacccgcgctgcgacagggcgcgggagatggaggagcgcgtcctcggcttcctgcgcaagtgagcgagcgacggagcgcgcgccttgctncgcgattgagatggaataatttcaccgtttccagatgtggaggcgtttgagcatgaggccatgagggtcttatttgtttgcttaagatcaattgattgaagtttc

SEQ ID NO: 24422 - protein, 330 aa, Zea mays subsp. mays
  misc_feature (1)..(330): Ceres Seq. ID no. 12435109
MAAADPDTEVQAEFPPLVRQYKSGRVERFFNLAPLPAGTDPATGVVSKDVVVDPATGLWARLFLPAGSHGKKLPVVVYYHGGAYVIGSAADPMTHGYLNALVAKAGVLAVALEYRLAPEHPLPAAYEDSWEGLKWVATHASASAAAGGGPAAEPWLTEHGDFSRVFLAGASAGATIAHFVAVRAGEQHKSGGLGMRIRGLLIVHPYFSGAADIGDEGTTGKARKARADAFWRFLCPGTPGLDDPLSNPFSEASGGSAARVAAERVLVCVAEKDDLRDRGVWYYESLKASGYPGEVELLESMGEGHVFYCMNPRCDRAREMEERVLGFLRK

SEQ ID NO: 24423 - protein, 238 aa, Zea mays subsp. mays
  misc_feature (1)..(238): Ceres Seq. ID no. 12435110
MTHGYLNALVAKAGVLAVALEYRLAPEHPLPAAYEDSWEGLKWVATHASASAAAGGGPAAEPWLTEHGDFSRVFLAGASAGATIAHFVAVRAGEQHKSGGLGMRIRGLLIVHPYFSGAADIGDEGTTGKARKARADAFWRFLCPGTPGLDDPLSNPFSEASGGSAARVAAERVLVCVAEKDDLRDRGVWYYESLKASGYPGEVELLESMGEGHVFYCMNPRCDRAREMEERVLGFLRK

SEQ ID NO: 24424 - DNA, 1534 bp, Zea mays subsp. mays
  misc_feature (1)..(1534): Ceres Seq. ID no. 12435123
caatattgctgcttcagaacatgaaataactgggcctaacaccctctctactgacttcctcagctacgtggaatctgaagttttaagacttgaacagcttaaagcgagcaagatgaaagacctcgttcttaaaaagaagacagaactggaagatcataggagacgtgctcatttgattggtgaggaaggttatgcagccgaatttagcgatgaggctattgaggcaggagctgtcgatcctgcgctggtgctggaacaaattgaggctcacattgccacagtgaaagaggaagcttttagccgtaaggatattcttgagaaggttgaaagatggctgaatgcatgtgaggaggaagcttggctggaagattataacaaagacgacaatcgttataatgccgggaggggggcccacttgacactcaaaagggctgagaaagctcgtattttggttaacaagatcccaggactggtagatgttttgaccacaaaaattgtagcttgggagacagaaagaggaaaggagttcacatatgatggtgtccgcctgcggtcaatgcttgaagactacataatcattcgccaggagaaagagctagagaagaagaggcaaagggatcagaagaagatccaggatcaactcaaagcctgagcaggaagcgctgtatggatcaaaaccaagtccatctaagactcaaagcacgaagaaggtgcctagacaatccatgggtggtgcgaaccgaagactgtctcttggtggagccacaacgcaagcccccaaaacagatataatgcactccaagacagctcgtgctgcgaagaaggctgaagatttgggcgctttatctcctagtagcagaggcttggacattgccggtcttcccatcaagaaactatctttcaacgcaagcactctgcgagaggcagaaacaccacgcaagccttttgcccagatcatgccaggaaacaatgtctcgtcgatgcctgcgcggcccatctccaacgacacagaggaagagaacaaaacccccaaaacatttgcagggctcaatccaaaaacgccggtgacagtgacggctcctatgcagttggcggtgacaccagctgtggccaacaaggtcatagccactcctgcaacccttttccaggagaaggcagagtcgccagcgctgcctggggaccatcgagtactcgttcgaagagaggcgactcgccgtttacctggccaggcaagtggcattttttgttcattcaccttctcccagttgcgctaatacccagctattacttagttgaaagctgagctgactgcgatttctcggcagaggccaatgttacctgttggtcgatactcgatagtagtgggcctcggtcttactttgcactactattcattcatagccatattgctactagccagtaaagggagtttttagtcttgagagcttgtggtctgcatcgtaagttgtatagctttatacggtgcatcgtcgatgacctgttattgttattatatggtttattactgttatcc

SEQ ID NO: 24425 - protein, 216 aa, Zea mays subsp. mays
  misc_feature (1)..(216): Ceres Seq. ID no. 12435124
NIAASEHEITGPNTLSTDFLSYVESEVLRLEQLKASKMKDLVLKKKTELEDHRRRAHLIGEEGYAAEFSDEAIEAGAVDPALVLEQIEAHIATVKEEAFSRKDILEKVERWLNACEEEAWLEDYNKDDNRYNAGRGAHLTLKRAEKARILVNKIPGLVDVLTTKIVAWETERGKEFTYDGVRLRSMLEDYIIIRQEKELEKKRQRDQKKIQDQLKA

SEQ ID NO: 24426 - protein, 182 aa, Zea mays subsp. mays
  misc_feature (1)..(182): Ceres Seq. ID no. 12435125
MGGANRRLSLGGATTQAPKTDIMHSKTARAAKKAEDLGALSPSSRGLDIAGLPIKKLSFNASTLREAETPRKPFAQIMPGNNVSSMPARPISNDTEEENKTPKTFAGLNPKTPVTVTAPMQLAVTPAVANKVIATPATLFQEKAESPALPGDHRVLVRREATRRLPGQASGIFCSFTFSQLR

SEQ ID NO: 24427 - protein, 179 aa, Zea mays subsp. mays
  misc_feature (1)..(179): Ceres Seq. ID no. 12435126
MKDLVLKKKTELEDHRRRAHLIGEEGYAAEFSDEAIEAGAVDPALVLEQIEAHIATVKEEAFSRKDILEKVERWLNACEEEAWLEDYNKDDNRYNAGRGAHLTLKRAEKARILVNKIPGLVDVLTTKIVAWETERGKEFTYDGVRLRSMLEDYIIIRQEKELEKKRQRDQKKIQDQLKA

SEQ ID NO: 24428 - DNA, 1161 bp, Zea mays subsp. mays
  misc_feature (1)..(1161): Ceres Seq. ID no. 12435127
acctctaaaatcccccagcggcccaaccgaacccgcctagggattcctaccgagggaggccgcacgcagccatggatttcctgcaggagcaaagcgtcgagaccacagtggccgtcgccgtcgctgtcgccgccgtcgccgcaggcggcgccttcctcctccttcgatccaggaagcccaagggctgcttggatcctgagaacttcaggaagttcaaacttgttgaaaagaagcaaataagtcataatgttgccaggttcaagttcgctcttccaactccaacttctgtattgggccttccaatcggtcaacatatcagctgcagaggacaagacgctacaggtgaagaagtaatcaagccttatacccctactacattggattctgatcttggatattttgagcttgtcataaagatgtatccccaagggagaatgtcccatcatttccgcgagatgaaagttggtgattatttgtctgtgaagggacctaagggccgattcaagtaccacgttggccaagtgagggcatttggaatgctggctggtggatcaggcattactccaatgtttcaagttgccagagcaattcttgagaaccctaatgacaacaccaaggttcacttaatttatgctaatgtcacatatgaagacattcttctgaaggatgagctggacgacatggccaaaacctatcctggccgctttaagatctactatgtgttgaatcagcctcctgagaactggaacggtggtgttgggtttgtgtctaaggaaatgatccaatctcattgtccagcgcctgctgaggacattcagatcctgagatgtggtcctcctccgatgaacaaggccatggctgcacaccttgacgagctcaactacacaaaggagatgcagttccagttctaagcaatgttaagtttgcaaataataattagtgaccgacatggttcttcggtcacaggaatagtacctgactctgctcgttagctgatatcaggaggaattcaggatcacatgatgattagtagtgcgccagcattttttgcaatctctatttttgaggtcaaatgatatctacctccacataaatccacattggcagagacaacattttgttactatcattattgattttaaatgtggaccattggatgcg

SEQ ID NO: 24429 - protein, 279 aa, Zea mays subsp. mays
  misc_feature (1)..(279): Ceres Seq. ID no. 12435128
MDFLQEQSVETTVAVAVAVAAVAAGGAFLLLRSRKPKGCLDPENFRKFKLVEKKQISHNVARFKFALPTPTSVLGLPIGQHISCRGQDATGEEVIKPYTPTTLDSDLGYFELVIKMYPQGRMSHHFREMKVGDYLSVKGPKGRFKYHVGQVRAFGMLAGGSGITPMFQVARAILENPNDNTKVHLIYANVTYEDILLKDELDDMAKTYPGRFKIYYVLNQPPENWNGGVGFVSKEMIQSHCPAPAEDIQILRCGPPPMNKAMAAHLDELNYTKEMQFQF

SEQ ID NO: 24430 - protein, 164 aa, Zea mays subsp. mays
  misc_feature (1)..(164): Ceres Seq. ID no. 12435129
MYPQGRMSHHFREMKVGDYLSVKGPKGRFKYHVGQVRAFGMLAGGSGITPMFQVARAILENPNDNTKVHLIYANVTYEDILLKDELDDMAKTYPGRFKIYYVLNQPPENWNGGVGFVSKEMIQSHCPAPAEDIQILRCGPPPMNKAMAAHLDELNYTKEMQFQF

SEQ ID NO: 24431 - protein, 158 aa, Zea mays subsp. mays
  misc_feature (1)..(158): Ceres Seq. ID no. 12435130
MSHHFREMKVGDYLSVKGPKGRFKYHVGQVRAFGMLAGGSGITPMFQVARAILENPNDNTKVHLIYANVTYEDILLKDELDDMAKTYPGRFKIYYVLNQPPENWNGGVGFVSKEMIQSHCPAPAEDIQILRCGPPPMNKAMAAHLDELNYTKEMQFQF

SEQ ID NO: 24432 - DNA, 1683 bp, Zea mays subsp. mays
  misc_feature (1)..(1683): Ceres Seq. ID no. 12435135
aagttccagagccctccagagcaaaaaaaatatattatcgaatactaaagcattttcctcatcgatagaatatagaattttaaaaagggagcgaaataggtttttcctttttgcagctccgtcgtccaccaacctcctccgatccggccgccgcagcgtagccgaattgtcccctcgctagcttctccggccggctagaggctgtttcaggcggcctcgatctcctccgcgcggctgaggaaggagatcacgcggttgctcaggggctggggcgtgcatgatgggattttggttgattccgatggagactccgggcgaggcttctgtggaagcacgagcttcttccgccacaagatcgccgccatgctcgcctcctcctcctgcttcttatagatcccaccccctcgccgtcgtcgtcggcacggcagctagctcgctagcttctgtacataggtcgacgcgccatatagatactagtctcggattaagcgataattaaggcaaagaatctccaagtttgcttcgttcttgcattgaaccatggagtctggacggctcatcttcaacgcgccgggctctggcgccgggcagatgctcttcctcgactgcggcgcaggcggcggtcccggcggcggcttgttccatcgaggcgggagaccgatgcttggccttgaagaagggcgcggcgtaaaacggcccttcttcacctcgcccgacgagctcctcgaggaagagtactacgacgagcagctgccggagaagaagcgccgcctcaccccagagcaggtgcttctgctggagaggagcttcgaggaggagaacaagctggagccggagcgcaagacggagctggcgcgcaagctgggcctgcagcctcgccaggtggccgtctggttccagaaccgccgcgcccggtggaagaccaagcagctcgagcgcgacttcgaccgcctcaaggcctccttcgacgctctccgagcggaccagcgacgccctcctccaggacaacaaccgcctccgctcacaggttgtgtcgttgaccgagaagctgcaagagaaggaggatgcgacggagggcggcgccaccgctgacaccgccgcgccggcggtggacgtcgaggcttccctggccgacgacgtcgaggagccagcagagcctgcggcgacgttcgaggtgctgcaggaggtgaagtccgaggacaggctgagcaccggcagcggcgggagcgcggtggtggacgcggacgcgctgctgtacggcaggtttgccgcggcagttgatagcagcgtggagtcgtacttccccggcggcgaggaccactaccacgactgcgggacgatgggccccgtgaaccatggcgccggaggaggcatccagtcggacgacgacggcgccggcagcgacgaggggtgcagctactacgccgacgaagccgccgccgccgccgccgccgcgttcttcgccggacacgccacccaccaccacgcggacgaggacgaggacgccggccagatcagctggtggatgtggaactagacgttcgatcttcccacgccgatcgatcgaccgtcttcgaatcctgtgtcaacaagaagaaaaaagaatcgtgccgtgatttttctttgcgcaacgctgctgtaagcctgtaatggtgaatttctagctatggttatgccgttatg

SEQ ID NO: 24433 - protein, 183 aa, Zea mays subsp. mays
  misc_feature (1)..(183): Ceres Seq. ID no. 12435136
MESGRLIFNAPGSGAGQMLFLDCGAGGGPGGGLFHRGGRPMLGLEEGRGVKRPFFTSPDELLEEEYYDEQLPEKKRRLTPEQVLLLERSFEEENKLEPERKTELARKLGLQPRQVAVWFQNRRARWKTKQLERDFDRLKASFDALRADQRRPPPGQQPPPLTGCVVDREAAREGGCDGGRRHR

SEQ ID NO: 24434 - protein, 166 aa, Zea mays subsp. mays
  misc_feature (1)..(166): Ceres Seq. ID no. 12435137
MLFLDCGAGGGPGGGLFHRGGRPMLGLEEGRGVKRPFFTSPDELLEEEYYDEQLPEKKRRLTPEQVLLLERSFEEENKLEPERKTELARKLGLQPRQVAVWFQNRRARWKTKQLERDFDRLKASFDALRADQRRPPPGQQPPPLTGCVVDREAAREGGCDGGRRHR

SEQ ID NO: 24435 - protein, 143 aa, Zea mays subsp. mays
  misc_feature (1)..(143): Ceres Seq. ID no. 12435138
MLGLEEGRGVKRPFFTSPDELLEEEYYDEQLPEKKRRLTPEQVLLLERSFEEENKLEPERKTELARKLGLQPRQVAVWFQNRRARWKTKQLERDFDRLKASFDALRADQRRPPPGQQPPPLTGCVVDREAAREGGCDGGRRHR

SEQ ID NO: 24436 - DNA, 1471 bp, Zea mays subsp. mays
  misc_feature (1)..(1471): Ceres Seq. ID no. 12435165
atgttccagctcgccggcctgctccacgcgcgcggcttcgccgtcaccgtcttccacacccacttcaacgcgccggacgcgtcccagcacccggcctacgacttcgtccccgtccagttcgacgggacgccggcggacagcgcggacacggtgcgggtgaccgtggagcacgtcctcgccgtgaaccgcgcgtgcgaggccccgttccgggagcgcctggccgcgctgctggaggaggaggaggaggaggtcgcgtgcctcgtcgccgacgcgcacctgctcacgctcatggacgtggcacgcgggctcggcgtgccgactctcgcgctccgcaccggcagcgccgcgtgcttccgctggttcatggcgtttcccatgctctgcgacaagggctacctgtcctctcaagagtcgcaggagccggacatgctggtgacggagctgccgccgtaccgcgtccgtgacatgccgtccgccagcggggccaccctcgggctaatgcgggacctgatttcgcgagcggtgacggccgtgaacgcctcgtcgggtctcatcatcaacacgttcgacgcgctggagacggacgagctggcgtcgctccggcgcggcctcgccgtcccggtgttcgacatcgggccgctgcacgtgcactcgccggcggcctcgagcagcctgctgcggcaggaccgagggtgcctggactggctggacgcgcggggccccgcgtccgtgctctacgtcagcttcggcagcctggccagcatgtccgcggcggacctggtggagacggcatggggcatcgccaacagcggccgccctttcctgtgggtgctccggccgggcctcgtccgcggcgcgccgccgagtcagccgccgccgctgcccgacggcttccacgccgagacgcgcggtcgcggcacggtggtgagctgggcgccgcaggaggaggtcctggcgcaccctgccgtgggcgcgttctggacgcactgcggctggaactccacgctggagggcgtgtgcgccggcgtgccgatgctgtgccgcccctgcttcggcgaccagatggggaacgccaggtacgtggaccacgtgtggcggaccggcctcgcgctccacggcgagctggagaggggcaaggtggaggcggccatctcgacgatgatgggggcaggcgagcccgccacggcgctgcgtgggagggcacgggagctctgtagaagagcggcggagtgcgtggccaaggccggctcgtccgacctcaacgtcgacaagctggtgaaccacatcatgtccctcacggcgcggcggtgccaatagagacttaattatttgagtaacacatactcatctgcataattaagcctgacaaatctgtttgatacaaatccacttgcactggctgtttcaaagtttcaagtttgatggagacatggagcatgaattagttactgttgtacacttgtgcatcttc

SEQ ID NO: 24437 - protein, 438 aa, Zea mays subsp. mays
  misc_feature (1)..(438): Ceres Seq. ID no. 12435166
MFQLAGLLHARGFAVTVFHTHFNAPDASQHPAYDFVPVQFDGTPADSADTVRVTVEHVLAVNRACEAPFRERLAALLEEEEEEVACLVADAHLLTLMDVARGLGVPTLALRTGSAACFRWFMAFPMLCDKGYLSSQESQEPDMLVTELPPYRVRDMPSASGATLGLMRDLISRAVTAVNASSGLIINTFDALETDELASLRRGLAVPVFDIGPLHVHSPAASSSLLRQDRGCLDWLDARGPASVLYVSFGSLASMSAADLVETAWGIANSGRPFLWVLRPGLVRGAPPSQPPPLPDGFHAETRGRGTVVSWAPQEEVLAHPAVGAFWTHCGWNSTLEGVCAGVPMLCRPCFGDQMGNARYVDHVWRTGLALHGELERGKVEAAISTMMGAGEPATALRGRARELCRRAAECVAKAGSSDLNVDKLVNHIMSLTARRCQ

SEQ ID NO: 24438 - protein, 342 aa, Zea mays subsp. mays
  misc_feature (1)..(342): Ceres Seq. ID no. 12435167
MDVARGLGVPTLALRTGSAACFRWFMAFPMLCDKGYLSSQESQEPDMLVTELPPYRVRDMPSASGATLGLMRDLISRAVTAVNASSGLIINTFDALETDELASLRRGLAVPVFDIGPLHVHSPAASSSLLRQDRGCLDWLDARGPASVLYVSFGSLASMSAADLVETAWGIANSGRPFLWVLRPGLVRGAPPSQPPPLPDGFHAETRGRGTVVSWAPQEEVLAHPAVGAFWTHCGWNSTLEGVCAGVPMLCRPCFGDQMGNARYVDHVWRTGLALHGELERGKVEAAISTMMGAGEPATALRGRARELCRRAAECVAKAGSSDLNVDKLVNHIMSLTARRCQ

SEQ ID NO: 24439 - protein, 317 aa, Zea mays subsp. mays
  misc_feature (1)..(317): Ceres Seq. ID no. 12435168
MAFPMLCDKGYLSSQESQEPDMLVTELPPYRVRDMPSASGATLGLMRDLISRAVTAVNASSGLIINTFDALETDELASLRRGLAVPVFDIGPLHVHSPAASSSLLRQDRGCLDWLDARGPASVLYVSFGSLASMSAADLVETAWGIANSGRPFLWVLRPGLVRGAPPSQPPPLPDGFHAETRGRGTVVSWAPQEEVLAHPAVGAFWTHCGWNSTLEGVCAGVPMLCRPCFGDQMGNARYVDHVWRTGLALHGELERGKVEAAISTMMGAGEPATALRGRARELCRRAAECVAKAGSSDLNVDKLVNHIMSLTARRCQ

SEQ ID NO: 24440 - DNA, 1213 bp, Zea mays subsp. mays
  misc_feature (1)..(1213): Ceres Seq. ID no. 12435169
atcgagaagccaggaccaggacgacgatggcccggccgcgcctcctcctcaccttcctgctcgccgcggcggccgtgctgaccacggtgcccggcgtcgcgctcgccaagtcgaagctcgccaagaagagcgacgacgtcgtgaacgggcccctcctgaccgagtagatccaggcgaagaagacgctgatcgtggggccggacgaggagttcaagaccgtgcagtccgccatcgacgcggtgcccgccggcaacgccgagtgggtcatcgtccacctccgctctggcctgcacaggggcaaagttgtgataccggagaacaagcccttcatcttcgtgaggggcaacggcaaaggccggacctccatctcccacgagtccgcctcttccgacaacgccgagtccgccgcgttcaccgtgaactcggacaacgtcatcgtcttcggcgtcagcttcaggaacagcgcccgcgtcggcctggtgaacgacccggagatccgttccgtggcggcgatggtggccggcgacaaggtggccttctaccactgcgcgttctacagcccccaccacaccctgttcgacagcgccggccgccactactacgagagctgctacatccagggcaacatcgacttcatcttcggcagcggccagtccatcttccagtgccccgagatcttcgtgaggcctgaccggcggacggagatccgcggctccatcaccgcgcaggtgcggcaggaggaggacagcagcggcttcgtcttcctcaagggcaaggtgtacggcgtcggggaggtgtacctgggccgcgtcaccgcgccggactcgcgcgtcatcttcgccgacacctacctctccaagaccatccacccggccggctggacaaccataggctacagcggcagcaccgacaaggtgacgctcgccgagttcaactgcactgggccgggcgctgacgtgacgaaccgcgtgccatggtcgcggaggttctctcccgacgacgcggccaagtacctcaccatcgacttcatcaacggcaaggactggctgccggcgtactactactgatccgacgatcgactgctggatcgatcaagcatgcatgcatgtatacacatcttgtaacgctgaattttgattcatggcacactgtactggacgaggatcattttttcttgcctaagtactgacacgcgtttccattgttgatcccg

SEQ ID NO: 24441 - protein, 229 aa, Zea mays subsp. mays
  misc_feature (1)..(229): Ceres Seq. ID no. 12435170
SRSQDQDDDGPAAPPPHLPARRGGRADHGARRRARQVEARQEERRRRERAPPDRVDPGEEDADRGAGRGVQDRAVRHRRGARRQRRVGHRPPPLWPAQGQSCDTGEQALHLREGQRQRPDLHLPRVRLFRQRRVRRVHRELGQRHRLRRQLQEQRPRRPGERPGDPFRGGDGGRRQGGLLPLRVLQPPPHPVRQRRPPLLRELLHPGQHRLHLRQRPVHLPVPRDLREA

SEQ ID NO: 24442 - protein, 184 aa, Zea mays subsp. mays
  misc_feature (1)..(184): Ceres Seq. ID no. 12435171
MVAGDKVAFYHCAFYSPHHTLFDSAGRHYYESCYIQGNIDFIFGSGQSIFQCPEIFVRPDRRTEIRGSITAQVRQEEDSSGFVFLKGKVYGVGEVYLGRVTAPDSRVIFADTYLSKTIHPAGWTTIGYSGSTDKVTLAEFNCTGPGADVTNRVPWSRRFSPDDAAKYLTIDFINGKDWLPAYYY

SEQ ID NO: 24443 - DNA, 878 bp, Zea mays subsp. mays
  misc_feature (1)..(878): Ceres Seq. ID no. 12435195
acaaccatcaggacgcggacgcggacgcggctcacatcaaacacccccttcagctgtgctcagtgctcactgccgcaaaaccacagccacacaggcaacaagcgcccagcgccctttcacatcaccacatccaccgtccacgctcctccgttccatggccatgtcgagcagcgccagcaagaagcaagcccaggcccagaaggccgggcggaggcccccggcggtgtcgtcggccgcggccgcggacgcggagatgcagagggtgttctcgcgcatcgacgcggacggcgacgggcggatctcgccgtcggagctggcggcggtgtcgcgcgccatctccccgccggcgagctcctcgcacgggcggcgcgaggtggcggccatgatggaggagctggacacggaccgcgacggcttcgtggacctgggcgagttcagggcgttccacgcgcgcggcgttggcggcggcggggacgacgacgacgacgcggagctccgcgccgccttcgccgtgtacgacgccgacggcgacgggcgcatcacggcggccgagctgggcagcgtgctcgcccgcatcggcgaggggtgcagcgccgaggagtgccgccggatgatcgccggcgtcgacgccgacggcgacggctgcgtcgggttcgaggagttcaagatcatgatgcgcggcccccagccccagccccagccccaggccggcgccggactgactgccgtgccggacaaggccaagaaggagtgacgggtgtaggtgtaggtgtactcatcagggcatcagtcgggggggaaagggatcgggttcctctgcctcttctgttgctttcacctagtctggactggaggaatggaaatactcaacttcctgc

SEQ ID NO: 24444 - protein, 292 aa, Zea mays subsp. mays
  misc_feature (1)..(292): Ceres Seq. ID no. 12435196
TTIRTRTRTRLTSNTPFSCAQCSLPQNHSHTGNKRPAPFHITTSTVHAPPFHGHVEQRQQEASPGPEGRAEAPGGVVGRGRGRGDAEGVLAHRRGRRRADLAVGAGGGVARHLPAGELLARAARGGGHDGGAGHGPRRLRGPGRVQGVPRARRWRRRGRRRRRGAPRRLRRVRRRRRRAHHGGRAGQRARPHRRGVQRRGVPPDDRRRRRRRRRLRRVRGVQDHDARPPAPAPAPGRRRTDCRAGQGQEGVTGVGVGVLIRASVGGERDRVPLPLLLLSPSLDWRNGNTQLP

SEQ ID NO: 24445 - protein, 250 aa, Zea mays subsp. mays
  misc_feature (1)..(250): Ceres Seq. ID no. 12435197
QPSGRGRGRGSHQTPPSAVLSAHCRKTTATQATSAQRPFTSPHPPSTLLRSMAMSSSASKKQAQAQKAGRRPPAVSSAAAADAEMQRVFSRIDADGDGRISPSELAAVSRAISPPASSSHGRREVAAMMEELDTDRDGFVDLGEFRAFHARGVGGGGDDDDDAELRAAFAVYDADGDGRITAAELGSVLARIGEGCSAEECRRMIAGVDADGDGCVGFEEFKIMMRGPQPQPQPQAGAGLTAVPDKAKKE

SEQ ID NO: 24446 - protein, 199 aa, Zea mays subsp. mays
  misc_feature (1)..(199): Ceres Seq. ID no. 12435198
MAMSSSASKKQAQAQKAGRRPPAVSSAAAADAEMQRVFSRIDADGDGRISPSELAAVSRAISPPASSSHGRREVAAMMEELDTDRDGFVDLGEFRAFHARGVGGGGDDDDDAELRAAFAVYDADGDGRITAAELGSVLARIGEGCSAEECRRMIAGVDADGDGCVGFEEFKIMMRGPQPQPQPQAGAGLTAVPDKAKKE

SEQ ID NO: 24447 - DNA, 658 bp, Zea mays subsp. mays
  misc_feature (1)..(658): Ceres Seq. ID no. 12435220
gagctgaacggttctgcttcctcccaatggccttgcaggatggcgacattatcaacatcgacgttactgtctacttaaacggataccatggggacacctcgaggacgtacctgtgcggagaagtcgacgacgcaactaagcagctcgtgaaggtcactgaagagtgcatgatgcgcggcatatcagcctgcaggcacggcgccagtttcaaggaaatcggccagagaataagtgagcacgcggagaagtacggatacggcatcgaccccttcgtggggcacggcgttgggaggatgttccactgcgagcccatcatatggcatacctacgattacgagcccgggttcatggtcgcaggccagacattcaccgtagagccgacgctgtcgatggggagcacgcagtgcgtggtgtgggacgacgggtggacggccgtggcggcggacggcagcctcagcgcgcagttcgagcacaccgtgctggtcaccggcgacggcgcggaggtcctgaccgggttcccgtagctgcctgcacgcatcacgtgagcggtgagcctgggtgggccactgcgtcggcgagggacggaactgcaggagcaggcatgcagctatgcgcacgctgacaattttattaaaaatctatgttggacggttgccgt

SEQ ID NO: 24448 - protein, 173 aa, Zea mays subsp. mays
  misc_feature (1)..(173): Ceres Seq. ID no. 12435221
AERFCFLPMALQDGDIINIDVTVYLNGYHGDTSRTYLCGEVDDATKQLVKVTEECMMRGISACRHGASFKEIGQRISEHAEKYGYGIDPFVGHGVGRMFHCEPIIWHTYDYEPGFMVAGQTFTVEPTLSMGSTQCVVWDDGWTAVAADGSLSAQFEHTVLVTGDGAEVLTGFP

SEQ ID NO: 24449 - protein, 165 aa, Zea mays subsp. mays
  misc_feature (1)..(165): Ceres Seq. ID no. 12435222
MALQDGDIINIDVTVYLNGYHGDTSRTYLCGEVDDATKQLVKVTEECMMRGISACRHGASFKEIGQRISEHAEKYGYGIDPFVGHGVGRMFHCEPIIWHTYDYEPGFMVAGQTFTVEPTLSMGSTQCVVWDDGWTAVAADGSLSAQFEHTVLVTGDGAEVLTGFP

SEQ ID NO: 24450 - protein, 118 aa, Zea mays subsp. mays
  misc_feature (1)..(118): Ceres Seq. ID no. 12435223
MMRGISACRHGASFKEIGQRISEHAEKYGYGIDPFVGHGVGRMFHCEPIIWHTYDYEPGFMVAGQTFTVEPTLSMGSTQCVVWDDGWTAVAADGSLSAQFEHTVLVTGDGAEVLTGFP

SEQ ID NO: 24451 - DNA, 1805 bp, Zea mays subsp. mays
  misc_feature (1)..(1805): Ceres Seq. ID no. 12435271
aggaaattaagcttacagccccacaccgacaccgccggccaccgccatcgcctcgctgccgatggcggccgccgccgccgcccggatcctccgcttggccccgcgccggatccaggttcccaagacctccccgctcgccgcactctcgttcccactccctcgaacggcgccgatcgccgctggccttggggaggcggcagcgcttctgcgccgtggcgcaggcccccgcccccgcccccgcagccgcggcgacaggggcggcgggagaggccgtgggggagttcaggaagcggctgcgggtggcggacgtgaagggcggggaggacgagggcgccgcgtgggtgggcaaggagctcgccgtgccgggtgggtgcgcacctgccgcgcccagaggaccataaccttcgtcgaggtcaatgatggctcttgcttatccaatatgcaatgtgtattgactcctgaaacagaaggctatgaccagatagactctgtcactactggagcatctgtactagttgagggagttgttgcaagcagccaaggcggtaagcaaaaagtggagttgaaggtttcaaagatcaccgtgattggtaagagtgaccccacatcttttcctatacagaagaaacgggcatcaagagaattccttaggaccgtagcccatctccgtcctcggacaaacacttttggtgcagttgcaagagtgagaaatactctggcatacgcaactcataaattctttcaagacaatggatttgtttgggtttcgagcccaattattactgcctcagattgtgaaggagctggggagcagttttacgtgactactttgcgctgaaggtggttctctactcaaagatattcctgctaccaaggatggaagggttgattggtcacaggatttcttctgcaaaccagcatttctgacagtgtctggacagcttaatggtgaaacatatgcttcagctctatctgatatttacacatttggtccaacgtttagggctgaaaattcaaacacttcaaggcatctggctgaattttggatgattgaacctgagcttgcctttgcggatctgaacgatgacatggcttgtgcaactgcatatctccagtatgtagtaaagtatattctggagaactgcaaagaggatatggatttcttcaatacttggattgaaaaaggcatcatagatcggttaaatgatgtagtagagaagaacttcgttcacctgtcttacactgatgctgttgagctacttcttgggtccaagaaggaattcgagttcccggtaaagtggggtttggatcttcaaagcgagcatgagcgatatatcacagaagttgcctttggtgggcgccctgtaataattagagattacccaaaggagatcaaagctttctatatgagagaaaatgatgatgggaagacagttgctgcaatggatctgttggttcctcgggttggtgaacttattggaggaagccagagggaagagcgtcttgattaccttgaagcccggttggacgagcaaaatctgaataaggagagctactggtggtatttggacctacgacgatatggatcagttccacacgctggtttcggtctcggatttgagcggcttgtacagtttgctactggaatggacaacatcagagacaccatcccatttcctcgagttcctggctctgccgagttttagcgccctggaagtgttgtcgtatacgtatactttagaaacattctttcctaggatgtaatgtgaggaaaggcatacgttgtactgtacaactgnttcatc

SEQ ID NO: 24452 - protein, 258 aa, Zea mays subsp. mays
  misc_feature (1)..(258): Ceres Seq. ID no. 12435272
MAAAAAARILRLAPRRIQVPKTSPLAALSFPLPRTAPIAAGLGEAAALLRRGAGPRPRPRSRGDRGGGRGRGGVQEAAAGGGREGRGGRGRRVGGQGARRAGWVRTCRAQRTITFVEVNDGSCLSNMQCVLTPETEGYDQIDSVTTGASVLVEGVVASSQGGKQKVELKVSKITVIGKSDPTSFPIQKKRASREFLRTVAHLRPRTNTFGAVARVRNTLAYATHKFFQDNGFVWVSSPIITASDCEGAGEQFYVTTLR

SEQ ID NO: 24453 - protein, 219 aa, Zea mays subsp. mays
  misc_feature (1)..(219): Ceres Seq. ID no. 12435273
MIEPELAFADLNDDMACATAYLQYVVKYILENCKEDMDFFNTWIEKGIIDRLNDVVEKNFVHLSYTDAVELLLGSKKEFEFPVKWGLDLQSEHERYITEVAFGGRPVIIRDYPKEIKAFYMRENDDGKTVAAMDLLVPRVGELIGGSQREERLDYLEARLDEQNLNKESYWWYLDLRRYGSVPHAGFGLGFERLVQFATGMDNIRDTIPFPRVPGSAEF

SEQ ID NO: 24454 - protein, 205 aa, Zea mays subsp. mays
  misc_feature (1)..(205): Ceres Seq. ID no. 12435274
MACATAYLQYVVKYILENCKEDMDFFNTWIEKGIIDRLNDVVEKNFVHLSYTDAVELLLGSKKEFEFPVKWGLDLQSEHERYITEVAFGGRPVIIRDYPKEIKAFYMRENDDGKTVAAMDLLVPRVGELIGGSQREERLDYLEARLDEQNLNKESYWWYLDLRRYGSVPHAGFGLGFERLVQFATGMDNIRDTIPFPRVPGSAEF

SEQ ID NO: 24455 - DNA, 1885 bp, Zea mays subsp. mays
  misc_feature (1)..(1885): Ceres Seq. ID no. 12435283
actgccagtgctcggtgcccgtgcccgcgcgcgctagcctagctgctcctgcctggttcgccgtagcccgtagcccgtagcacaacaacaacaaaaaaaatctccgcggcgcggggggaggtggtctgttcaccttggggagcagcggcgggccgtcggccgagaaatgcccggtggcgccttcctcctcaacggcagcggcggcggcatggcggactacggcggcggcctcaccgtccccgtcgtcgtgacctgcctcatcggcggcctccggcggcctcatcttcggctacgacattggcatctcaggaggtgtgtcggagatggaggatttcctgaacaagttcttccccgggttgctcaagaggacggcgcgcgccaacaaggacgtgtactgcatttacaacaaccaggcgctgacggccttcacgtcgtcgctgtacgcgttcggcatggtggggacgctgctggcgagccgcgtgacccggcggctggggcggcaggccgtcatgctgatcggcggcggcctgttcttggccggcgccctcgtcaacgccgccgcggccaacatcgccatgctcatcgtcgggaggatgctgctcggcctggggctcggcttctccggccaggccacgccggtgtacctcgccgaggtgtcgcccccgcgctggcgcggcggcttcatctcggccttccccctcttcatcagcgtcgggtacctggtggccaacctcatcaactacggcacctcgcggatcccgggctggggctggcgcctctcgctcggcctcgcctccgtcccggccgccgtcatggtggtcggcgccgcgttcatcccggacacccccagcagcctcgtcctgcgcgggaagcacgacgacgcccgcgccgcgctccagcgggtgcgcggcaagggcgtggacatcggccccgagttcgcggacatcctcgccgcggcggagaacgaccgccggaacgaggagggcgcgttccgccggatcctgcgccgggagtaccggccctacctggtgatggccgtggcgttcccggtgttcctcaacctcacaggggtggccgtcaccgccttcttctcgccgatactgttccggaccgtcggcttcgagagcgacgccgcgctcatgggcgccgtcatcctgggcctcatgaacatcggcggcatcctcgcgtcgggcttcgccatggaccgctacggccggaagctgctcttcatgatcggtggcgcgctcatgttcacgtgccaggtggcgatggcgagcataatcggatcacacctcggcaacgggagcaagatgcccaaggggtacgcggtgacggtgctggtggtggcgctgatcttctcggcgagcttcagctggtcgtggggcgcgctgtactggaccatccccggcgagatataccccgtggaggtgcggtcggcggggcagggcgcggccgtggcgctcaacctggggctcaacttcttgcaggcgcagttcttcctggccatgctgtgctgcttcaagtacggcaccttcctcttctacgcgtcgtggctggttgtcatgaccgccttcgccgtggcgttcgtgccggagaccaagggcgtgccgctcgagtccatggctcacgtcttcgcgcgccactggtactggggcaggttcgtcaaggaccaccagaagttgggcgaagagtccacctagctaagctaataattcggaatcagcgaacgacgtaccctactaccagtagcagattattgataagggagtcaaacacatattgcgtgtgtgtgtcttttaaagtgttcgtttagaatggcttgagaagctcatccgtgtagtaaatttggagacttcgaaatataataaatatgttcgtagttggc

SEQ ID NO: 24456 - protein, 548 aa, Zea mays subsp. mays
  misc_feature (1)..(548): Ceres Seq. ID no. 12435284
MPGGAFLLNGSGGGMADYGGGLTVPVVVTCLIGGLRRPHLRLRHWHLRRCVGDGGFPEQVLPRVAQEDGARQQGRVLHLQQPGADGLHVVAVRVRHGGDAAGEPRDPAAGAAGRHADRRRPVLGRRPRQRRRGQHRHAHRREDAARPGARLLRPGHAGVPRRGVAPALARRLHLGLPPLHQRRVPGGQPHQLRHLADPGLGLAPLARPRLRPGRRHGGRRRVHPGHPQQPRPAREARRRPRRAPAGARQGRGHRPRVRGHPRRGGERPPERGGRVPPDPAPGVPALPGDGRGVPGVPQPHRGGRHRLLLADTVPDRRLRERRRAHGRRHPGPHEHRRHPRVGLRHGPLRPEAALHDRWRAHVHVPGGDGEHNRITPRQREQDAQGVRGDGAGGGADLLGELQLVVGRAVLDHPRRDIPRGGAVGGAGRGRGAQPGAQLLAGAVLPGHAVLLQVRHLPLLRVVAGCHDRLRRGVRAGDQGRAARVHGSRLRAPLVLGQVRQGPPEVGRRVHLAKLIIRNQRTTYPTTSSRLLIRESNTYCVCVSFKVFV

SEQ ID NO: 24457 - protein, 534 aa, Zea mays subsp. mays
  misc_feature (1)..(534): Ceres Seq. ID no. 12435285
MADYGGGLTVPVVVTCLIGGLRRPHLRLRHWHLRRCVGDGGFPEQVLPRVAQEDGARQQGRVLHLQQPGADGLHVVAVRVRHGGDAAGEPRDPAAGAAGRHADRRRPVLGRRPRQRRRGQHRHAHRREDAARPGARLLRPGHAGVPRRGVAPALARRLHLGLPPLHQRRVPGGQPHQLRHLADPGLGLAPLARPRLRPGRRHGGRRRVHPGHPQQPRPAREARRRPRRAPAGARQGRGHRPRVRGHPRRGGERPPERGGRVPPDPAPGVPALPGDGRGVPGVPQPHRGGRHRLLLADTVPDRRLRERRRAHGRRHPGPHEHRRHPRVGLRHGPLRPEAALHDRWRAHVHVPGGDGEHNRITPRQREQDAQGVRGDGAGGGADLLGELQLVVGRAVLDHPRRDIPRGGAVGGAGRGRGAQPGAQLLAGAVLPGHAVLLQVRHLPLLRVVAGCHDRLRRGVRAGDQGRAARVHGSRLRAPLVLGQVRQGPPEVGRRVHLAKLIIRNQRTTYPTTSSRLLIRESNTYCVCVSFKVFV

SEQ ID NO: 24458 - protein, 458 aa, Zea mays subsp. mays
  misc_feature (1)..(458): Ceres Seq. ID no. 12435286
MEDFLNKFFPGLLKRTARANKDVYCIYNNQALTAFTSSLYAFGMVGTLLASRVTRRLGRQAVMLIGGGLFLAGALVNAAAANIAMLIVGRMLLGLGLGFSGQATPVYLAEVSPPRWRGGFISAFPLFISVGYLVANLINYGTSRIPGWGWRLSLGLASVPAAVMVVGAAFIPDTPSSLVLRGKHDDARAALQRVRGKGVDIGPEFADILAAAENDRRNEEGAFRRILRREYRPYLVMAVAFPVFLNLTGVAVTAFFSPILFRTVGFESDAALMGAVILGLMNIGGILASGFAMDRYGRKLLFMIGGALMFTCQVAMASIIGSHLGNGSKMPKGYAVTVLVVALIFSASFSWSWGALYWTIPGEIYPVEVRSAGQGAAVALNLGLNFLQAQFFLAMLCCFKYGTFLFYASWLVVMTAFAVAFVPETKGVPLESMAHVFARHWYWGRFVKDHQKLGEEST

SEQ ID NO: 24459 - DNA, 2889 bp, Zea mays subsp. mays
  misc_feature (1)..(2889): Ceres Seq. ID no. 12435287
gcacgagaccattacctagaacatcctaatcgaaaagcgattaatcaactccgccacgaccaacacgtacgtaaccagcggcggttcggcagcatgcggcgacgacggtgtccgctcctcgccgccgtcctcttcctcctccccctcttccaccgccaccacgccgccagcggcaccgacacggacacggtcacgctggccgcgccgctcatggggaaccggacgctggtgtccgccggcagcgccaagtacgtgctgggcttcttcgcgccggacccggacgccacgggatcaggacgggcgtacctcgggatatggttcaacggcatccccgcgcggaccgtcgtgtgggtggccaaccgcgagagccccgtcctgggcagcgtgggcgccgccgcgctcagggtcctcgccaacgggagcctggccatcgtcgtcgtggacgagaccgactacgaccacgaccagcagcccgtggtctgggcgacgccgccgccggccacgtccagcggcagcaacgccaccgcgcagctcctggacaacggcaacctcgtgctgcgggtcccgggcgccggcgtggtgtggcagagcttcgaccaccccacggacacgctcctgccgggcatgaagctgggcatcgacttccgcacggggctggaccggcgcatggtctcgtggcgcgccgcgggggacccgtcaccgggggagtactcgttccgcctggacccgagcggctcgccggagctcttcctctaccgcgggtccgcgcgcgtctacggcagcgggccctggaacggctaccagttcacgggcgtgcccaacctcaagtccaacagcctcctcaccttccgcttcgtctccgccgcggacgaggcctactacagctacggcgtggtcgacagcgccgccgtgctcacgcgcttcgtcctagactcgtcggggcagatccagcgcctcatgtggattgacatgacccgctcctggagcctcttctggtcctacccgctcgacgagtgcgacggctaccgcgcctgcgggccctacggcgtgtgcagcgtcgagcgcagccccatctgcggctgcgcgccgggcttcgacccgcgcttccccaaggagtgggcgctcagggacggctccggcgggtgcaggcgccgcacggacctcgcctgcgccggcgacggcttngccgcgctcaccaacatgaagctgccggagtcggccaacgccaccgtcgacatgtccctcaccctcgaccagtgccgagaggcctgcctcaggaactgcgcgtgccgggcctacgccggcgccaatgtcagcgcgccgggggccaccggctgcttcctgtggaccggcgacctcctcgacatgaggcagttcggcaaaggcgggcagaatctcttcgtccggctcgcggcgtccgacctacctctcagcagctcttcgccagcagacacggacgggcgaaccaagaggctcgtcgagatcatcgtcccgtcggttgccgcaccggcgctgctgctgctggccggactctgcatctgcgccgtgaggacgagaaggcgtaggacgaaggagaaggaggccatccccctggcgctgctgagagacgcgcagaggcagagcgcaccgttcggccgaaggaaccagattgccgcgtccaccgacgcgcaggacgagtccctgcacgacggccagcagggcggcagccaggactgcgacctgccgtcgttcgacgtcgagacgatccaggccgccacgggcaacttctcggctcacagcaagatcggccagggcgggttcgggcccgtctacatggggaagctggacagcgggcaggacatcgccgtgaaaaggctgtcgcggcggtccacgcaggggctccgggagttcaagaacgaggtgaagctgatagccaagctgcagcacaggaacctcgtcaggctcctcggctgctgcatcgacgggtcggagaggatgctggtctacgagtacatgcacaaccggagcctcaacaccttcctcttcaatgaggagaagcagccgatgctgagctgggagaaacggttcagcatcatcaacggcatcgcgaggggcatactgtacctgcaccaggattcggcgctgaggatcatccacagggacctcaaggccagcaacattctgctcgacaaggacatgaaccccaagatctccgacttcggtgtcgccaggatattcgggaccgaccagacggccgcgtacaccaagaaagtagtcggaacatatgggtatatgtctcctgagtacgccatggacggagtcttctccaccaagtccgacgtgttcagcttcggcgttctggtgctcgagatcgtcagcgggaagaagaacagagggttctaccacaccgagcttgacctcaacctcctaagatatgcgtggaggctgtggaaggacggcgagagcctggagttcatggaccagtccatcgcggacacgtccaacgcggcggaggtgctcaagtgcatccagatcgggctgctgtgcgtgcaggagcagccgaagcgccggcccaccatgtcggcggtgaccacgatgctcacctgcgagaaccccacgctgccggagccatgcgagccggcgttcagcacggggaggaaccacgacgacgacgacgaggacccggaggcgaaggcctgccggtctaacagcgccagcagctggacttgcaccgtcgtcgagggtagatgagatagattactgactgtttctgctgcgatgtgtactgtaaatatcaaagcatttttaacttcaacagcagtgagattaattcaattgaatttacctaaacattgaacagcagtgggcctcgtcaatgatggtccagataattcatattgcttttttcgc

SEQ ID NO: 24460 - protein, 909 aa, Zea mays subsp. mays
  misc_feature (1)..(909): Ceres Seq. ID no. 12435288
  misc_feature (395)..(395): Xaa is any aa, unknown or other
ARDHYLEHPNRKAINQLRHDQHVRNQRRFGSMRRRRCPLLAAVLFLLPLFHRHHAASGTDTDTVTLAAPLMGNRTLVSAGSAKYVLGFFAPDPDATGSGRAYLGIWFNGIPARTVVWVANRESPVLGSVGAAALRVLANGSLAIVVVDETDYDHDQQPVVWATPPPATSSGSNATAQLLDNGNLVLRVPGAGVVWQSFDHPTDTLLPGMKLGIDFRTGLDRRMVSWRAAGDPSPGEYSFRLDPSGSPELFLYRGSARVYGSGPWNGYQFTGVPNLKSNSLLTFRFVSAADEAYYSYGVVDSAAVLTRFVLDSSGQIQRLMWIDMTRSWSLFWSYPLDECDGYRACGPYGVCSVERSPICGCAPGFDPRFPKEWALRDGSGGCRRRTDLACAGDGXAALTNMKLPESANATVDMSLTLDQCREACLRNCACRAYAGANVSAPGATGCFLWTGDLLDMRQFGKGGQNLFVRLAASDLPLSSSSPADTDGRTKRLVEIIVPSVAAPALLLLAGLCICAVRTRRRRTKEKEAIPLALLRDAQRQSAPFGRRNQIAASTDAQDESLHDGQQGGSQDCDLPSFDVETIQAATGNFSAHSKIGQGGFGPVYMGKLDSGQDIAVKRLSRRSTQGLREFKNEVKLIAKLQHRNLVRLLGCCIDGSERMLVYEYMHNRSLNTFLFNEEKQPMLSWEKRFSIINGIARGILYLHQDSALRIIHRDLKASNILLDKDMNPKISDFGVARIFGTDQTAAYTKKVVGTYGYMSPEYAMDGVFSTKSDVFSFGVLVLEIVSGKKNRGFYHTELDLNLLRYAWRLWKDGESLEFMDQSIADTSNAAEVLKCIQIGLLCVQEQPKRRPTMSAVTTMLTCENPTLPEPCEPAFSTGRNHDDDDEDPEAKACRSNSASSWTCTVVEGR

SEQ ID NO: 24461 - protein, 878 aa, Zea mays subsp. mays
  misc_feature (1)..(878): Ceres Seq. ID no. 12435289
  misc_feature (364)..(364): Xaa is any aa, unknown or other
MRRRRCPLLAAVLFLLPLFHRHHAASGTDTDTVTLAAPLMGNRTLVSAGSAKYVLGFFAPDPDATGSGRAYLGIWFNGIPARTVVWVANRESPVLGSVGAAALRVLANGSLAIVVVDETDYDHDQQPVVWATPPPATSSGSNATAQLLDNGNLVLRVPGAGVVWQSFDHPTDTLLPGMKLGIDFRTGLDRRMVSWRAAGDPSPGEYSFRLDPSGSPELFLYRGSARVYGSGPWNGYQFTGVPNLKSNSLLTFRFVSAADEAYYSYGVVDSAAVLTRFVLDSSGQIQRLMWIDMTRSWSLFWSYPLDECDGYRACGPYGVCSVERSPICGCAPGFDPRFPKEWALRDGSGGCRRRTDLACAGDGXAALTNMKLPESANATVDMSLTLDQCREACLRNCACRAYAGANVSAPGATGCFLWTGDLLDMRQFGKGGQNLFVRLAASDLPLSSSSPADTDGRTKRLVEIIVPSVAAPALLLLAGLCICAVRTRRRRTKEKEAIPLALLRDAQRQSAPFGRRNQIAASTDAQDESLHDGQQGGSQDCDLPSFDVETIQAATGNFSAHSKIGQGGFGPVYMGKLDSGQDIAVKRLSRRSTQGLREFKNEVKLIAKLQHRNLVRLLGCCIDGSERMLVYEYMHNRSLNTFLFNEEKQPMLSWEKRFSIINGIARGILYLHQDSALRIIHRDLKASNILLDKDMNPKISDFGVARIFGTDQTAAYTKKVVGTYGYMSPEYAMDGVFSTKSDVFSFGVLVLEIVSGKKNRGFYHTELDLNLLRYAWRLWKDGESLEFMDQSIADTSNAAEVLKCIQIGLLCVQEQPKRRPTMSAVTTMLTCENPTLPEPCEPAFSTGRNHDDDDEDPEAKACRSNSASSWTCTVVEGR

SEQ ID NO: 24462 - protein, 839 aa, Zea mays subsp. mays
  misc_feature (1)..(839): Ceres Seq. ID no. 12435290
  misc_feature (325)..(325): Xaa is any aa, unknown or other
MGNRTLVSAGSAKYVLGFFAPDPDATGSGRAYLGIWFNGIPARTVVWVANRESPVLGSVGAAALRVLANGSLAIVVVDETDYDHDQQPVVWATPPPATSSGSNATAQLLDNGNLVLRVPGAGVVWQSFDHPTDTLLPGMKLGIDFRTGLDRRMVSWRAAGDPSPGEYSFRLDPSGSPELFLYRGSARVYGSGPWNGYQFTGVPNLKSNSLLTFRFVSAADEAYYSYGVVDSAAVLTRFVLDSSGQIQRLMWIDMTRSWSLFWSYPLDECDGYRACGPYGVCSVERSPICGCAPGFDPRFPKEWALRDGSGGCRRRTDLACAGDGXAALTNMKLPESANATVDMSLTLDQCREACLRNCACRAYAGANVSAPGATGCFLWTGDLLDMRQFGKGGQNLFVRLAASDLPLSSSSPADTDGRTKRLVEIIVPSVAAPALLLLAGLCICAVRTRRRRTKEKEAIPLALLRDAQRQSAPFGRRNQIAASTDAQDESLHDGQQGGSQDCDLPSFDVETIQAATGNFSAHSKIGQGGFGPVYMGKLDSGQDIAVKRLSRRSTQGLREFKNEVKLIAKLQHRNLVRLLGCCIDGSERMLVYEYMHNRSLNTFLFNEEKQPMLSWEKRFSIINGIARGILYLHQDSALRIIHRDLKASNILLDKDMNPKISDFGVARIFGTDQTAAYTKKVVGTYGYMSPEYAMDGVFSTKSDVFSFGVLVLEIVSGKKNRGFYHTELDLNLLRYAWRLWKDGESLEFMDQSIADTSNAAEVLKCIQIGLLCVQEQPKRRPTMSAVTTMLTCENPTLPEPCEPAFSTGRNHDDDDEDPEAKACRSNSASSWTCTVVEGR

SEQ ID NO: 24463 - DNA, 1544 bp, Zea mays subsp. mays
  misc_feature (1)..(1544): Ceres Seq. ID no. 12435291
actttgtggcagacgaacagggaaagtgaaaaatcgctttcgcacaagtcgcggaacagaggcaagcgctgtgccacacagcgggagtcctccccgactccccgagagatttgctgcccagagccttcgaatcgggttcaatcccttcgatctttctgcccgccgccgccacgggactccagaagttgccttcgattcggccggggccgtggaagcggggatggggctcggagaggcggcggggcggctcctggcggccgtggactgggagcgcgaggcctaccctgcgtacgacgacttcctcgcgctccccgccttcgttctcttcttccctaccgtccgcttcctcctcgaccgcttcgtcttcaagtgggttgcaatgaggcttatacatgggcagggacatcagagagctaataatgaaacagaagaggcaaggaagaagataagaaaattcaaggaatcagcttggaaatgtgtttatttcctgtctggagagcttttatctttgtctgtcacatataatgagccttggttcaccaataccagatatttttgggtaggaccaggagaacaggtctggcctgaccaaaagataaaattgaaacttaaggctgtatatatgtatgctgctggattctacacatattccatatttgcacttatgttttgggaaacaaggcgttcagactttggagtgtcaatgtctcatcatgttgctactgttgttctgattgttctatcttacgtgttcagatttgctagagttggctctatagtattggcaattcatgatgcaagtgacgttttcctggaagtagggaagatgtccaagtacagccattgtgattggcttgccaatgtttcgtttctgttttttgttatttcgtgggttcttctccgcctcacatattttccgttctggattctgagaagtacaagctatgaggtcttgttgactttggacaaaaagaagcacaattttgatggtcctatatactattatgtgttcaattcccttctattttcactacttgttctccacatatattggtgggttttaatatatcggatgcttgtgagacaaatcaagacaagaaatgttggagatgatgttcgatctgattctgaaggagaagacgaccatgaagattgattgggggcatcatcttactttctgtgttataacggtgcttatacattcttttacttgattccaacattgttcctcacgagattcaccgaagccgggctacgggttacctgtgtcttggctgccaatttctgtgcattagaaacaacgctgcaatgcattagaaaaaagctggatgtcgaatataacattcttttcagtgttcacacaaagtgcagcggtaaatgtagcgccaatttagtattccggaaacaaaaggactggttgtaaatcaaagcctttctgccgacataccatgtacattctgtttgccaggatgacaccgcttggagttttgtgaacggtagcgctggccgccggtgaaacgcttctcttgagctcctgttgttcc

SEQ ID NO: 24464 - protein, 384 aa, Zea mays subsp. mays
  misc_feature (1)..(384): Ceres Seq. ID no. 12435292
LCGRRTGKVKNRFRTSRGTEASAVPHSGSPPRLPERFAAQSLRIGFNPFDLSARRRHGTPEVAFDSAGAVEAGMGLGEAAGRLLAAVDWEREAYPAYDDFLALPAFVLFFPTVRFLLDRFVFKWVAMRLIHGQGHQRANNETEEARKKIRKFKESAWKCVYFLSGELLSLSVTYNEPWFTNTRYFWVGPGEQVWPDQKIKLKLKAVYMYAAGFYTYSIFALMFWETRRSDFGVSMSHHVATVVLIVLSYVFRFARVGSIVLAIHDASDVFLEVGKMSKYSHCDWLANVSFLFFVISWVLLRLTYFPFWILRSTSYEVLLTLDKKKHNFDGPIYYYVFNSLLFSLLVLHIYWWVLIYRMLVRQIKTRNVGDDVRSDSEGEDDHED

SEQ ID NO: 24465 - protein, 311 aa, Zea mays subsp. mays
  misc_feature (1)..(311): Ceres Seq. ID no. 12435293
MGLGEAAGRLLAAVDWEREAYPAYDDFLALPAFVLFFPTVRFLLDRFVFKWVAMRLIHGQGHQRANNETEEARKKIRKFKESAWKCVYFLSGELLSLSVTYNEPWFTNTRYFWVGPGEQVWPDQKIKLKLKAVYMYAAGFYTYSIFALMFWETRRSDFGVSMSHHVATVVLIVLSYVFRFARVGSIVLAIHDASDVFLEVGKMSKYSHCDWLANVSFLFFVISWVLLRLTYFPFWILRSTSYEVLLTLDKKKHNFDGPIYYYVFNSLLFSLLVLHIYWWVLIYRMLVRQIKTRNVGDDVRSDSEGEDDHED

SEQ ID NO: 24466 - protein, 258 aa, Zea mays subsp. mays
  misc_feature (1)..(258): Ceres Seq. ID no. 12435294
MRLIHGQGHQRANNETEEARKKIRKFKESAWKCVYFLSGELLSLSVTYNEPWFTNTRYFWVGPGEQVWPDQKIKLKLKAVYMYAAGFYTYSIFALMFWETRRSDFGVSMSHHVATVVLIVLSYVFRFARVGSIVLAIHDASDVFLEVGKMSKYSHCDWLANVSFLFFVISWVLLRLTYFPFWILRSTSYEVLLTLDKKKHNFDGPIYYYVFNSLLFSLLVLHIYWWVLIYRMLVRQIKTRNVGDDVRSDSEGEDDHED

SEQ ID NO: 24467 - DNA, 2141 bp, Zea mays subsp. mays
  misc_feature (1)..(2141): Ceres Seq. ID no. 12435299
gcacgagaccattacctagaacatcctaatcaaaatcgcctcgccgtcgccgtcgtcatctcagctttaattcgcagcaggcgggcagtggcaggccaggccacggcgtccagcaccagctacgcctgtgcgcgcgcttgtgcagtacctacgttggtgggtgggtaggtagctagtgcggcggagcatcgatcgcgcggtactctcagttccatccgtcgagagatcgaccggtcgtcgatcgacatggcgggccggggaggagcctcggcggcggcgccgttgctggagaagacagcggcggcggcggagtcgggcggcgggtgctgctacgtggacgggtgccccgggtgcgccgtggaccggcacaaggcggcgaacccgggcattccctacggcaacttcatctacgtctggatcgtcaccctctgcacagccttaccgatatcgtcgctcttccccttcttgtatttcatgataagagacctgaatgtcgctaaaagaacagaagacatcgggttctacgctggttttgtaggtgcctcattcatgtttggtagatgcttgacttcaacagtatggggcatagcggcagaccgcgttgggaggaaacctgttgtcgtgttcggcatttcctctgtagttgtgttcaacacattgtttggtctgagtgtcaactactggatggcaatagctacccggtttctgcttggtgccttgaatggtttgcttggaccgataaaggcttatgccattgaagtttgccgacctgaacatgaagccctagcactatcacttgtcagcacagcatggggaataggtctcattattggtcctgctcttggaggctaccttgcactgcctgcagaaaattttccaactgtcttttcacctgactcaatctttggaaggttcccatatttcttaccatgcttatgcacgtcaatcttcgctgcggttgttctcataagctgcatatggatgccggagactttgcacaagcacaaagtccatgaaaatagaagtcggaacattgaagctttggaggcccgtctgattgattcaaatgaaaaggttgaagaaagtggtagtttagatagtaagaagagcctattcaggaattggccattgatgtcatcaataattgtctattgtgtcttctccttccatgacatggcttacacagaggtgttctctctatgggctgaaagcgacaagaagtatggtgggctgagtttatcatctgaggatgttggtcaagtgcttgcagtcacaggtgccagtcttcttgtataccaactctttctataccccagtatcaataaggttcttgggcctatcaaatcttctcgagttgcagctatcctgtgcatacccatcctctttgcctacccctacatgacgtacctgtcggaacctggattatcaatcgttttgaatattgcgtcagtgataaagaataatctcggtgtcaccatcattacaggcactttcatccttcaaaacaatgccgtgcctcaggaccagcgaggcgctgcgaatggactgtccatgactgggatgtcctttttcaaggcacttgctccagcaggagcaggcattgtgttctcatgggcgcagaaacgccagcatgcgtttttcttcccaggtgaccagatggtattcttcctcctgaacgccgtcgagctggtcgggcttctcctcacgttcaagcccttcctggcagtaccagagcagtacgatacgagatagttagacgatctatctatctatacaagttctggaacgttcaagacgattcatcgtgtgcggctgtaccagtgaaggagaagcgccaaagcgtgtgccctttacgccgcggaaggtctacaaacagggacatactcctatataggaagatgcaatgcaagagctgtggtgtacttttaattgtaggtgatgtagtagtgtatggtagtatcagcattttctgcattcatgaaatgcacacgcaggtggtgggaaatgtgggcatggatcgagagtcgctgcgctgttaagtagcaataaatgttaaggttcagtgactcgctgttatttgttgggaatgaaattactgggcatctgtaccctcgttgttttatatctggctgttggattct

SEQ ID NO: 24468 - protein, 501 aa, Zea mays subsp. mays
  misc_feature (1)..(501): Ceres Seq. ID no. 12435300
MAGRGGASAAAPLLEKTAAAAESGGGCCYVDGCPGCAVDRHKAANPGIPYGNFIYVWIVTLCTALPISSLFPFLYFMIRDLNVAKRTEDIGFYAGFVGASFMFGRCLTSTVWGIAADRVGRKPVVVFGISSVVVFNTLFGLSVNYWMAIATRFLLGALNGLLGPIKAYAIEVCRPEHEALALSLVSTAWGIGLIIGPALGGYLALPAENFPTVFSPDSIFGRFPYFLPCLCTSIFAAVVLISCIWMPETLHKHKVHENRSRNIEALEARLIDSNEKVEESGSLDSKKSLFRNWPLMSSIIVYCVFSFHDMAYTEVFSLWAESDKKYGGLSLSSEDVGQVLAVTGASLLVYQLFLYPSINKVLGPIKSSRVAAILCIPILFAYPYMTYLSEPGLSIVLNIASVIKNNLGVTIITGTFILQNNAVPQDQRGAANGLSMTGMSFFKALAPAGAGIVFSWAQKRQHAFFFPGDQMVFFLLNAVELVGLLLTFKPFLAVPEQYDTR

SEQ ID NO: 24469 - protein, 425 aa, Zea mays subsp. mays
  misc_feature (1)..(425): Ceres Seq. ID no. 12435301
MIRDLNVAKRTEDIGFYAGFVGASFMFGRCLTSTVWGIAADRVGRKPVVVFGISSVVVFNTLFGLSVNYWMAIATRFLLGALNGLLGPIKAYAIEVCRPEHEALALSLVSTAWGIGLIIGPALGGYLALPAENFPTVFSPDSIFGRFPYFLPCLCTSIFAAVVLISCIWMPETLHKHKVHENRSRNIEALEARLIDSNEKVEESGSLDSKKSLFRNWPLMSSIIVYCVFSFHDMAYTEVFSLWAESDKKYGGLSLSSEDVGQVLAVTGASLLVYQLFLYPSINKVLGPIKSSRVAAILCIPILFAYPYMTYLSEPGLSIVLNIASVIKNNLGVTIITGTFILQNNAVPQDQRGAANGLSMTGMSFFKALAPAGAGIVFSWAQKRQHAFFFPGDQMVFFLLNAVELVGLLLTFKPFLAVPEQYDTR

SEQ ID NO: 24470 - protein, 400 aa, Zea mays subsp. mays
  misc_feature (1)..(400): Ceres Seq. ID no. 12435302
MFGRCLTSTVWGIAADRVGRKPVVVFGISSVVVFNTLFGLSVNYWMAIATRFLLGALNGLLGPIKAYAIEVCRPEHEALALSLVSTAWGIGLIIGPALGGYLALPAENFPTVFSPDSIFGRFPYFLPCLCTSIFAAVVLISCIWMPETLHKHKVHENRSRNIEALEARLIDSNEKVEESGSLDSKKSLFRNWPLMSSIIVYCVFSFHDMAYTEVFSLWAESDKKYGGLSLSSEDVGQVLAVTGASLLVYQLFLYPSINKVLGPIKSSRVAAILCIPILFAYPYMTYLSEPGLSIVLNIASVIKNNLGVTIITGTFILQNNAVPQDQRGAANGLSMTGMSFFKALAPAGAGIVFSWAQKRQHAFFFPGDQMVFFLLNAVELVGLLLTFKPFLAVPEQYDTR

SEQ ID NO: 24471 - DNA, 1623 bp, Zea mays subsp. mays
  misc_feature (1)..(1623): Ceres Seq. ID no. 12435326
aacccaaaatccacgagcacctcccccatcgtcctcacggacctcacgcgccctgcccctctcgctctccgcctccccgccccacacccatcgccacccaccagcacctccggcggcccccacccccgcctcctccccgcgtgtccgcggtctgcacccggcgtccctcgcggcgttgacgcgcgaacgtcccgtcgcccggtgagtaacggagagaccgaaccatgagcggaggggtggaaccggagaccccgccgggtagcagcagcaggagcgggggcagcaggagcgtcggtggcaagccgccacgccaccacctcacgtctatccgccactgcgccagcatcgcccgcatcgccgccgcctccgccggattcgggctggattcggggacgctcagcttgatctcacctaccgcagacatccatccgggcttcttgcctgtgttcaggtcggggagtttcgctgatattggacccaaaacgtacatggaggacgaacatgtctgtgtggacaacctggttgagcacctcgggttctatggcccgggcatccctgcaccgggtgctttctatggggtgtttgatggccatggtggcactgatgctgcctgttttgtccggaaaaatatactgaagttcataaccgaagattgccacttccccaacagcatcgagaaggcaatcagaagcgcttttgtaaaggccgacaatgcaattgcggattcccattctcttgaccggaattctgggaccacagcattgacggtccttatatttggcaggacactgcttgttgcgaatgccggtgactgtcgagctgtattaggaaagcgaggccgagctgttgaactctctagagaccacaaacccagctgcatagttgaaaggctcagaatcgaaaacctgggtggtaccgtctttgatggctacctcaacggtcagctggctgtagcaagggcaatcggtgattggcacatgaaaggctccaagggctctgtatgccctcttacaccagaacctgagtttagggaggttaggcttactgaggaagatgagttcttgataataggctgtgatggcctttgggatgtgatgagcagccagtttgctgtttccatggtcaggaaagagctgatggaacacaatgatccacaacggtgctcgcgagagcttgtccacgaagcgcttaggcgcgactgctgtgataacctaaccgtagttgttgtgtgcttctcagcggacccaccccctcaaatcgagatcccaagattccgagtacgaagaagcatctcaatggaagggcttcataggctgaggggtgctcttgacagtaatatctgaagcttaaaagtgtcccttcggctgtaacttctgtcgtcgttggtatgttgaagttgctccacccattggtgttttgagatagtctcagaataagttttgtagaattattttggaagaaattttgttgaggtgtaggctaattaatcttttttttgttgaggcagtgatttatatgtaccggtcaccatttgattgttggatgctcacgatgtaatcgagcaattaaccgacattgttctggtacgaatgagagttataggagttgatcatttttttctct

SEQ ID NO: 24472 - protein, 372 aa, Zea mays subsp. mays
  misc_feature (1)..(372): Ceres Seq. ID no. 12435327
MSGGVEPETPPGSSSRSGGSRSVGGKPPRHHLTSIRHCASIARIAAASAGFGLDSGTLSLISPTADIHPGFLPVFRSGSFADIGPKTYMEDEHVCVDNLVEHLGFYGPGIPAPGAFYGVFDGHGGTDAACFVRKNILKFITEDCHFPNSIEKAIRSAFVKADNAIADSHSLDRNSGTTALTVLIFGRTLLVANAGDCRAVLGKRGRAVELSRDHKPSCIVERLRIENLGGTVFDGYLNGQLAVARAIGDWHMKGSKGSVCPLTPEPEFREVRLTEEDEFLIIGCDGLWDVMSSQFAVSMVRKELMEHNDPQRCSRELVHEALRRDCCDNLTVVVVCFSADPPPQIEIPRFRVRRSISMEGLHRLRGALDSNI

SEQ ID NO: 24473 - protein, 284 aa, Zea mays subsp. mays
  misc_feature (1)..(284): Ceres Seq. ID no. 12435328
MEDEHVCVDNLVEHLGFYGPGIPAPGAFYGVFDGHGGTDAACFVRKNILKFITEDCHFPNSIEKAIRSAFVKADNAIADSHSLDRNSGTTALTVLIFGRTLLVANAGDCRAVLGKRGRAVELSRDHKPSCIVERLRIENLGGTVFDGYLNGQLAVARAIGDWHMKGSKGSVCPLTPEPEFREVRLTEEDEFLIIGCDGLWDVMSSQFAVSMVRKELMEHNDPQRCSRELVHEALRRDCCDNLTVVVVCFSADPPPQIEIPRFRVRRSISMEGLHRLRGALDSNI

SEQ ID NO: 24474 - DNA, 1737 bp, Zea mays subsp. mays
  misc_feature (1)..(1737): Ceres Seq. ID no. 12435333
gcaaaagcgcacagttcccgttccccctccgacccgttcattccgcttggttttctcctcctccgtcctcttcgctccccgtcagaccatccctgtgaggctgtgacgcaaccgggcgccggcggtctctcctgcaccacagggcacgccgcctcccgcgcacgtgttctcctcttccggggattcagatctggggattgctattctgtccgtctgactccgtccgtcccgaggcgcggcgaggggagcgagatgggttacattggccaccacggcgtcgccacgctgcggcgctacaagtacagcggcgtcgaccactcgctcgtcgccaagtacatcctccagcccttctggtcccgattcgtcaacatcttcccgctatggttcccaccgaacatgattacactgacaggtttcatgtttctactgacatcagcattccttggctttttatattcaccccatctagatacagcaccccccagatgggttcaccttgctcatggactgcttctctttctttatcagacttttgatgctgtggatggaaaacaagcaaggcgtaccaactcatcaagtcctctaggcgagctttttgaccacggatgtgatgcgcttgcgtgtgcttttgaatccttggcttttggaagcacggcgatgtgtggaaaggctaccttctggttttggttcatttcagctgtcccattttacttcgcaacctgggaacacttttttacaaatacacttattcttcctatagtcaacggaccaactgaaggccttatgctgatctacttgtgccattttttcacctttttcacaggagccgagtggtgggcacaggattttcagaagtcaatgcccctgctgggttgggttcctcttatctctgaaatcccggtgtatgacattgtgctatgtcttatgattgcttttgctgtaatcccaacaattggatctaacatccacaatgtatataaagtcgttgaagcaagaaaaggaagcatgcttctggcactagccatgctctttccttttggtttgctcttggctggagttcttgtctggtcctacctttctccttcagatataatgagaacccaaccacatttgctaattattggaactggttttgcatttggatttcttgtgggaagaatgattctggctcacttgtgtgatgaacccaagggtttgaaaacagggatgtgcatgtcccttgcgtattttccatttgcaattgcaaacgcgttgactgcccggcttgatgatggaaatccactcgttgatgagcagctagtgctcctgatgtactgcctatttacagtggctctgtacatgcattttgctacatcagttattcatgagatcaccaatgcactcgggatccactgcttcaggatcactaggaaaaaggcatagttcctccgtccacgggcatcagcgttgccctggattgtgtaatcaatcacaactcacaaggtggtgcctgacagacaagcaatttttcatatttaatggatgctgcttcctgaatactcacatggatgacgcccccccgccccttaaaattcacatcggcatgaacgtgcggatgagaaagcagtgtttttttttgaaacaattagcaacatcatgctgtatcttaccaattttttgtggaattcgttgaatttgctgatagtgatgtattgcaaattaagaattgtttggattttgttaaaggaatgccccccc

SEQ ID NO: 24475 - protein, 473 aa, Zea mays subsp. mays
  misc_feature (1)..(473): Ceres Seq. ID no. 12435334
AKAHSSRSPSDPFIPLGFLLLRPLRSPSDHPCEAVTQPGAGGLSCTTGHAASRARVLLFRGFRSGDCYSVRLTPSVPRRGEGSEMGYIGHHGVATLRRYKYSGVDHSLVAKYILQPFWSRFVNIFPLWFPPNMITLTGFMFLLTSAFLGFLYSPHLDTAPPRWVHLAHGLLLFLYQTFDAVDGKQARRTNSSSPLGELFDHGCDALACAFESLAFGSTAMCGKATFWFWFISAVPFYFATWEHFFTNTLILPIVNGPTEGLMLIYLCHFFTFFTGAEWWAQDFQKSMPLLGWVPLISEIPVYDIVLCLMIAFAVIPTIGSNIHNVYKVVEARKGSMLLALAMLFPFGLLLAGVLVWSYLSPSDIMRTQPHLLIIGTGFAFGFLVGRMILAHLCDEPKGLKTGMCMSLAYFPFAIANALTARLDDGNPLVDEQLVLLMYCLFTVALYMHFATSVIHEITNALGIHCFRITRKKA

SEQ ID NO: 24476 - protein, 389 aa, Zea mays subsp. mays
  misc_feature (1)..(389): Ceres Seq. ID no. 12435335
MGYIGHHGVATLRRYKYSGVDHSLVAKYILQPFWSRFVNIFPLWFPPNMITLTGFMFLLTSAFLGFLYSPHLDTAPPRWVHLAHGLLLFLYQTFDAVDGKQARRTNSSSPLGELFDHGCDALACAFESLAFGSTAMCGKATFWFWFISAVPFYFATWEHFFTNTLILPIVNGPTEGLMLIYLCHFFTFFTGAEWWAQDFQKSMPLLGWVPLISEIPVYDIVLCLMIAFAVIPTIGSNIHNVYKVVEARKGSMLLALAMLFPFGLLLAGVLVWSYLSPSDIMRTQPHLLIIGTGFAFGFLVGRMILAHLCDEPKGLKTGMCMSLAYFPFAIANALTARLDDGNPLVDEQLVLLMYCLFTVALYMHFATSVIHEITNALGIHCFRITRKKA

SEQ ID NO: 24477 - protein, 341 aa, Zea mays subsp. mays
  misc_feature (1)..(341): Ceres Seq. ID no. 12435336
MITLTGFMFLLTSAFLGFLYSPHLDTAPPRWVHLAHGLLLFLYQTFDAVDGKQARRTNSSSPLGELFDHGCDALACAFESLAFGSTAMCGKATFWFWFISAVPFYFATWEHFFTNTLILPIVNGPTEGLMLIYLCHFFTFFTGAEWWAQDFQKSMPLLGWVPLISEIPVYDIVLCLMIAFAVIPTIGSNIHNVYKVVEARKGSMLLALAMLFPFGLLLAGVLVWSYLSPSDIMRTQPHLLIIGTGFAFGFLVGRMILAHLCDEPKGLKTGMCMSLAYFPFAIANALTARLDDGNPLVDEQLVLLMYCLFTVALYMHFATSVIHEITNALGIHCFRITRKKA

SEQ ID NO: 24478 - DNA, 1936 bp, Zea mays subsp. mays
  misc_feature (1)..(1936): Ceres Seq. ID no. 12435348
gcacgagaccattacctagaacatcctaatcgaaaaagggaaagcattctccaatatccacctcctcctcgcccccctctctctctctaaaagaactgaaaagataagggggaaatcctcaagtgctcgttacataaaccctaacctcgttggattcgcagcaaaagcccaccaattggaagccctccgatgttccagctgcatgctggagctgagccgtgctcggtttgacgaaattttgcatcccttctgtgcttggaccacccgattgaggctgtttctccgagggggcgtgccagcggtttcgcggcccaggtcctcacctgtgctatccggcgccggatccgggtttgttccggtgagaggtcgggcttttggtggggtctgtacagcttggagctcaatttgccggcctgagttggagtcgcgactgcggtggcggtgattgaggtagtcgcgtcgatttggcacgcgtttcctgccatttgggtgagccagcctttcctggcaatcttggcgggcgtttcgtcttgctgcgtggcagaaaggtgtgacctttgtgccgtgcgatgcatcccaaggcacgaatccacgccgacccagtgcgcgaggtcgaccactttgactgcctgccggattcgctcgtcctgctgatcctgaacaaggtcgaggacgtgcgatcgctcggccggtgctacgccgtgtccaagcggctttgtgggcttgtcccccttgtccatgatgtgtatgtcaagattgaccgcgtcgtggcggtcgacggcgacgctgaggacgcgctcaacctgtcatcgccgaagcctcggaacatcttctcgcacttcctgaagctgatgctcttcaccatcatcaagcctttccacaacatgcgcaaccctaatggtactgggaggtcattgttcccgcagctctcgcaccactcgccagcgcaggtgctcaggaacttcacgcacatcaggaatcttcggatcgagctcccctctggggatgtgggtactgaggagggagttctcctgaaatggcgggcagagtatgggagcacacttcagagttgtgtgatcctggggggtacccgggttgaccgcaagcctgttggtggagagcatgagcagtctttggaggataatggaagcatgccagagtctttctataccaacggtgggctgaaacttcgtgtcgtctggacaatcagctctctaattgcggcatcaacgaggcactatcttctccgctcaatcatcaatgaccatcccacacttctgagcttggtactgacagatgccgatggccaaggcacattgtgcatgggggcagagcagctgaaggaattcagagagaaccagttgtcggcatcagcatgttccaacaggactcaggtcccagcctgcaacatgaagctcaagtatgctccatatcttgaactgcctggtggtatggcgttgcaaggcgccactttggtggctatcaaaccctcacctgacggaagcaatggaagccaccctaaccgtaaagaagctgacgcatttgtctttggagcatttgatgggccatttaaggctgctgtgaaggctttgatgaagaggcgcacttaccttctggagatgaatggcttctagaaatcttgtgttcgcggtggtatcgagcttgttggtgctatgcatggcacatttagctaagcttttcacctgtgtaatatccaagaaggcaccatctctagttgctgcttttagtctgctgttttagctctttgtacagtgttaacatttggttatataaaaatcgtatcaagttctctagtgtaatagtgaatctctccatagttcaccatcctggcccctggtgtaatatccaagaaatcatatcaggtacataacattcattttgggattgtgaattgaaagagactgatctgatgccg

SEQ ID NO: 24479 - protein, 354 aa, Zea mays subsp. mays
  misc_feature (1)..(354): Ceres Seq. ID no. 12435349
MHPKARIHADPVREVDHFDCLPDSLVLLILNKVEDVRSLGRCYAVSKRLCGLVPLVHDVYVKIDRVVAVDGDAEDALNLSSPKPRNIFSHFLKLMLFTIIKPFHNMRNPNGTGRSLFPQLSHHSPAQVLRNFTHIRNLRIELPSGDVGTEEGVLLKWRAEYGSTLQSCVILGGTRVDRKPVGGEHEQSLEDNGSMPESFYTNGGLKLRVVWTISSLIAASTRHYLLRSIINDHPTLLSLVLTDADGQGTLCMGAEQLKEFRENQLSASACSNRTQVPACNMKLKYAPYLELPGGMALQGATLVAIKPSPDGSNGSHPNRKEADAFVFGAFDGPFKAAVKALMKRRTYLLEMNGF

SEQ ID NO: 24480 - protein, 260 aa, Zea mays subsp. mays
  misc_feature (1)..(260): Ceres Seq. ID no. 12435350
MLFTIIKPFHNMRNPNGTGRSLFPQLSHHSPAQVLRNFTHIRNLRIELPSGDVGTEEGVLLKWRAEYGSTLQSCVILGGTRVDRKPVGGEHEQSLEDNGSMPESFYTNGGLKLRVVWTISSLIAASTRHYLLRSIINDHPTLLSLVLTDADGQGTLCMGAEQLKEFRENQLSASACSNRTQVPACNMKLKYAPYLELPGGMALQGATLVAIKPSPDGSNGSHPNRKEADAFVFGAFDGPFKAAVKALMKRRTYLLEMNGF

SEQ ID NO: 24481 - protein, 249 aa, Zea mays subsp. mays
  misc_feature (1)..(249): Ceres Seq. ID no. 12435351
MRNPNGTGRSLFPQLSHHSPAQVLRNFTHIRNLRIELPSGDVGTEEGVLLKWRAEYGSTLQSCVILGGTRVDRKPVGGEHEQSLEDNGSMPESFYTNGGLKLRVVWTISSLIAASTRHYLLRSIINDHPTLLSLVLTDADGQGTLCMGAEQLKEFRENQLSASACSNRTQVPACNMKLKYAPYLELPGGMALQGATLVAIKPSPDGSNGSHPNRKEADAFVFGAFDGPFKAAVKALMKRRTYLLEMNGF

SEQ ID NO: 24482 - DNA, 2101 bp, Zea mays subsp. mays
  misc_feature (1)..(2101): Ceres Seq. ID no. 12435356
acaaccacccccgccgcaatggacaagattgagacgacgacgaggaggaggaggaaagggagaagcagcagcagccgccgccgccagggggcacggggaccggcgggcctcgtagccacggccttggccctcctctgcgcctgcgccttctccacgcctgccgccacggctctcaccccggacggcgaggcgttgctggagctcaagctggccttcaacgccaccgtgcatcatcggctcaccagctggcggcgcagcgaccccaacccctgtgtctgggagggcatctcctgctccgtccccgacctcagggtacaatccataaatctcccatacatgcagcttgggggcatcatttcgcccagcatcgggaggctggacaagctgcagagactagctctgcaccagaacagcttgcacggcccaatccccgcagagatcaagaactgcaccgagctcagggcaatttacctgagagccaactacctgcaaggaggtatcccttcggagattggcgagctcgtgcacctcaccatcttggacctgtcaagcaatctgttgaggggaacgataccggcctccatcggaagcctcactcaccttcgcttcctgaacctgtctactaatttcttctccggagagatcccaaatgtcggtgtcctcggagccttcaaaagcagctcgttcgttggaaatctggagctctgtggcctgtccatccagaaagcttgccgtggaaccctcggctttcctgccgtgctgccccactccgatccgctctcttcagctggcggtgtctctccaatcagtaacaacaagaagaagacatcgcgctttctgaatggcgtcgtgatcggctcgatgtcaaccttggctcttgccctgatcgctgtgctcggattcctgtggatctgcttgctgtccaggaagaagagcgtcggtggaaactacgtaaagatggacaagaaaactgttcctgacggcgcgaagcttgtgacgtaccagtggaaccttccgtactcgtcgagtgagatcattagaaggctggagctgcttgacgaagaggatgtggttggctgcgggggcttcggcacggtgtacagaatggtgatggacgatggcacgtcgttcgccgtcaagaggattgatctcagccgccaaagccgcgacaggaccatggagaaggagctcgagttcctgggcagcatcaggcacataaatcttgtcactttgcgaggctactgccggctgctccctgcagcaaagctactcgtatacgatttcgttgagctgggcagcttggactgctaccttcatggagatggacaagaggaccagccgttgaactggaacgcgcgtatgaagatcgcccttggctcggctcgaggcctggcatatctgcaccatgattgctcgcctgggatcgtgcacagggacatcaaggccagcaatatcctgctggacagaagcttggagcctcgtgtctctgattttggacttgcaaagctgcttgtagacaatgccgccgcccatgttaccactgttgtggcgggcacctttggatacctagcaccagagtacttgcaaaacgggcatgctactgagaaatcagacgtgtatagctttggagtgcttttgctggagctagtgacgggaaagaggccaaccgattcatgcttcatcaagaagggactgaacattgttggctggctgaacaccctgacgggggagcaccggctggaggatatcgttgacgagcgatgcggcgacgtcgaggtggaagccgtggaagccatcctggacatcgcagcgatgtgcaccgacgcagacccggcgcagcggccgtccatgagcgctgtcctcaagatgctggaggaagagatcctgtccccctgcatgagcgagctgtgctacgagcagcacctggagctctgagccgaggaagcctgacctgactacgatgcagtgcatgatggatgagactgtgtaggaaacaaaagttttgtagatatgacgatgatgaaccgcgtacgtagtgtaggtgtttgtgagcagctcaaaagtaggacaagtgcagaaccaacaacctgatcggcacgtt

SEQ ID NO: 24483 - protein, 644 aa, Zea mays subsp. mays
  misc_feature (1)..(644): Ceres Seq. ID no. 12435357
TTTPAAMDKIETTTRRRRKGRSSSSRRRQGARGPAGLVATALALLCACAFSTPAATALTPDGEALLELKLAFNATVHHRLTSWRRSDPNPCVWEGISCSVPDLRVQSINLPYMQLGGIISPSIGRLDKLQRLALHQNSLHGPIPAEIKNCTELRAIYLRANYLQGGIPSEIGELVHLTILDLSSNLLRGTIPASIGSLTHLRFLNLSTNFFSGEIPNVGVLGAFKSSSFVGNLELCGLSIQKACRGTLGFPAVLPHSDPLSSAGGVSPISNNKKKTSRFLNGVVIGSMSTLALALIAVLGFLWICLLSRKKSVGGNYVKMDKKTVPDGAKLVTYQWNLPYSSSEIIRRLELLDEEDVVGCGGFGTVYRMVMDDGTSFAVKRIDLSRQSRDRTMEKELEFLGSIRHINLVTLRGYCRLLPAAKLLVYDFVELGSLDCYLHGDGQEDQPLNWNARMKIALGSARGLAYLHHDCSPGIVHRDIKASNILLDRSLEPRVSDFGLAKLLVDNAAAHVTTVVAGTFGYLAPEYLQNGHATEKSDVYSFGVLLLELVTGKRPTDSCFIKKGLNIVGWLNTLTGEHRLEDIVDERCGDVEVEAVEAILDIAAMCTDADPAQRPSMSAVLKMLEEEILSPCMSELCYEQHLEL

SEQ ID NO: 24484 - protein, 638 aa, Zea mays subsp. mays
  misc_feature (1)..(638): Ceres Seq. ID no. 12435358
MDKIETTTRRRRKGRSSSSRRRQGARGPAGLVATALALLCACAFSTPAATALTPDGEALLELKLAFNATVHHRLTSWRRSDPNPCVWEGISCSVPDLRVQSINLPYMQLGGIISPSIGRLDKLQRLALHQNSLHGPIPAEIKNCTELRAIYLRANYLQGGIPSEIGELVHLTILDLSSNLLRGTIPASIGSLTHLRFLNLSTNFFSGEIPNVGVLGAFKSSSFVGNLELCGLSIQKACRGTLGFPAVLPHSDPLSSAGGVSPISNNKKKTSRFLNGVVIGSMSTLALALIAVLGFLWICLLSRKKSVGGNYVKMDKKTVPDGAKLVTYQWNLPYSSSEIIRRLELLDEEDVVGCGGFGTVYRMVMDDGTSFAVKRIDLSRQSRDRTMEKELEFLGSIRHINLVTLRGYCRLLPAAKLLVYDFVELGSLDCYLHGDGQEDQPLNWNARMKIALGSARGLAYLHHDCSPGIVHRDIKASNILLDRSLEPRVSDFGLAKLLVDNAAAHVTTVVAGTFGYLAPEYLQNGHATEKSDVYSFGVLLLELVTGKRPTDSCFIKKGLNIVGWLNTLTGEHRLEDIVDERCGDVEVEAVEAILDIAAMCTDADPAQRPSMSAVLKMLEEEILSPCMSELCYEQHLEL

SEQ ID NO: 24485 - protein, 532 aa, Zea mays subsp. mays
  misc_feature (1)..(532): Ceres Seq. ID no. 12435359
MQLGGIISPSIGRLDKLQRLALHQNSLHGPIPAEIKNCTELRAIYLRANYLQGGIPSEIGELVHLTILDLSSNLLRGTIPASIGSLTHLRFLNLSTNFFSGEIPNVGVLGAFKSSSFVGNLELCGLSIQKACRGTLGFPAVLPHSDPLSSAGGVSPISNNKKKTSRFLNGVVIGSMSTLALALIAVLGFLWICLLSRKKSVGGNYVKMDKKTVPDGAKLVTYQWNLPYSSSEIIRRLELLDEEDVVGCGGFGTVYRMVMDDGTSFAVKRIDLSRQSRDRTMEKELEFLGSIRHINLVTLRGYCRLLPAAKLLVYDFVELGSLDCYLHGDGQEDQPLNWNARMKIALGSARGLAYLHHDCSPGIVHRDIKASNILLDRSLEPRVSDFGLAKLLVDNAAAHVTTVVAGTFGYLAPEYLQNGHATEKSDVYSFGVLLLELVTGKRPTDSCFIKKGLNIVGWLNTLTGEHRLEDIVDERCGDVEVEAVEAILDIAAMCTDADPAQRPSMSAVLKMLEEEILSPCMSELCYEQHLEL

SEQ ID NO: 24486 - DNA, 919 bp, Zea mays subsp. mays
  misc_feature (1)..(919): Ceres Seq. ID no. 12435382
ctcttcgtctgcagtctgctcgctcgcgattgcgattcccactcagccctccaggctcgaaacctaacccacccgcccggggatcccaagcggcggcggcggcggccatggagccctcccccgtcggcgacggtggctcggcggagcggtggcgcgcggaggcgtcgcgggcgttccagcactacctggaccgcgcggcgccgcacacggcggggcggtgggcgggcacgctcgtggccgcggcggtgtacgcgcttcgggtctactacgtgcgcggcttctacgtcgtcacctacgggctgggcatctacctgctcaacctcctcatcggcttcctctcccccatggtcgacccggagctcgaggcgctcgaggccgggcccgggctccccacccgcggntccgaagagttcaagcccttcgtccgccgcctccccgagttcaagttctggtatgccataacaaaagccttttgcattgctttcgtcatgaccttcttctctgtattcgatgttcctgtcttctggccaatacttctctgttactggattgtgctctttgtcctgacaatgaagcgacaaattatgcatatggncaagtacaantatgtcccattcagctttggaaagcagaggtatngcggaaagaaacgccctggagccagtgcatnaaaagagtaaagaccggagggtcttgtacctcaaagagcaaatgcctgtgttatctgtgaggcattttgctggcatcatggtattttgagtaccagctactgatagtgaatgcacaccatattcactagtggagtctgcagagaagctaaccagacttttgcattggttaatgattcctgtttcacaagtcggtagtttatgtacaatgacatggaacatagctagtaaatcagattctcagttcctct

SEQ ID NO: 24487 - protein, 225 aa, Zea mays subsp. mays
  misc_feature (1)..(225): Ceres Seq. ID no. 12435383
  misc_feature (133)..(133): Xaa is any aa, unknown or other
  misc_feature (198)..(198): Xaa is any aa, unknown or other
  misc_feature (201)..(201): Xaa is any aa, unknown or other
  misc_feature (213)..(213): Xaa is any aa, unknown or other
  misc_feature (223)..(223): Xaa is any aa, unknown or other
LRLQSARSRLRFPLSPPGSKPNPPARGSQAAAAAAMEPSPVGDGGSAERWRAEASRAFQHYLDRAAPHTAGRWAGTLVAAAVYALRVYYVRGFYVVTYGLGIYLLNLLIGFLSPMVDPELEALEAGPGLPTRXSEEFKPFVRRLPEFKFWYAITKAFCIAFVMTFFSVFDVPVFWPILLCYWIVLFVLTMKRQIMHMXKYXYVPFSFGKQRYXGKKRPGASAXKE

SEQ ID NO: 24488 - protein, 190 aa, Zea mays subsp. mays
  misc_feature (1)..(190): Ceres Seq. ID no. 12435384
  misc_feature (98)..(98): Xaa is any aa, unknown or other
  misc_feature (163)..(163): Xaa is any aa, unknown or other
  misc_feature (166)..(166): Xaa is any aa, unknown or other
  misc_feature (178)..(178): Xaa is any aa, unknown or other
  misc_feature (188)..(188): Xaa is any aa, unknown or other
MEPSPVGDGGSAERWRAEASRAFQHYLDRAAPHTAGRWAGTLVAAAVYALRVYYVRGFYVVTYGLGIYLLNLLIGFLSPMVDPELEALEAGPGLPTRXSEEFKPFVRRLPEFKFWYAITKAFCIAFVMTFFSVFDVPVFWPILLCYWIVLFVLTMKRQIMHMXKYXYVPFSFGKQRYXGKKRPGASAXKE

SEQ ID NO: 24489 - protein, 153 aa, Zea mays subsp. mays
  misc_feature (1)..(153): Ceres Seq. ID no. 12435385
  misc_feature (134)..(134): Xaa is any aa, unknown or other
LFVCSLLARDCDSHSALQARNLTHPPGDPKRRRRRPWSPPPSATVARRSGGARRRRGRSSTTWTARRRTRRGGGRARSWPRRCTRFGSTTCAASTSSPTGWASTCSTSSSASSPPWSTRSSRRSRPGPGSPPAXPKSSSPSSAASPSSSSGMP

SEQ ID NO: 24490 - DNA, 1198 bp, Zea mays subsp. mays
  misc_feature (1)..(1198): Ceres Seq. ID no. 12435386
gtgttccacttgctagtccactcccctctcagtcgaggcaatggccttcgcttccagtagcttccgcctcgctctgttcttggttctgctggcgtttgtcagcttggcacggcacgccacgggggaggccagcccgagcaggaggctcatggagctgtacaagccaccgcccagcgatctcctaaggtaccacgacggcgccgtgctgagcggcgacatccccgtctccgtcctctggtacggccgcttcacgcccgcgcagaaggccatcgtcaccgacttcctcctctccctctccgccgcgccgacgtcccctgcgccttccgtctcccagtggtggggcaccatcgaccggctctacctatcgaaggcggcggacgcggccgccgtcgggaagagcggcgcgcacggcggcggtggtggcaggaaaggcgctcgggtggtcctggccggccaggtctccgacgaagggtgctcgctggggaagagcctgacgctcgcccagctcccggcgctggcggccgcggcgcgccccgcgaagggcggcctcgcgctgctgctcacggcgcaggacgtgctggtggagggcttctgcatgagccggtgcggccaccacgggtcgtacggcgcgcggccccgcgtggcggcggcggcgtacgcgtgggtcgggaacccgggcacgcagtgccccggccagtgcgcgtggncgttccaccagccgccgtacgggccgcaggcgccgccgctggtgccgccgaacggggacgcgggcatggacggcgccatgatcagcgtggccagcatggtggccggcgcggtcaccaaccccttcggagacgggttctaccagggcgaccgcgccgcgccgcttgaggccgccacggcgtgcgcgggcgtctacggcaacggcgcgtaccccggctacgccggccagctgctcgtggacgcggccacgggtgccagctacaacgccaacggggcgcgcgggaggaagtacctgctccccgcgctgtacgatcccgacacggctgcctgcaccaccttggtttgagcaaacgcgcggcgccgtgttttggcatctgtcaccgtaggtgggcggggatacagtgaagtgataatgcgcttgtgttaggcgcatgtatatatataataattagatggatacccgtgcgttacaatataaacatataataccatg

SEQ ID NO: 24491 - protein, 336 aa, Zea mays subsp. mays
  misc_feature (1)..(336): Ceres Seq. ID no. 12435387
  misc_feature (223)..(223): Xaa is any aa, unknown or other
MAFASSSFRLALFLVLLAFVSLARHATGEASPSRRLMELYKPPPSDLLRYHDGAVLSGDIPVSVLWYGRFTPAQKAIVTDFLLSLSAAPTSPAPSVSQWWGTIDRLYLSKAADAAAVGKSGAHGGGGGRKGARVVLAGQVSDEGCSLGKSLTLAQLPALAAAARPAKGGLALLLTAQDVLVEGFCMSRCGHHGSYGARPRVAAAAYAWVGNPGTQCPGQCAWXFHQPPYGPQAPPLVPPNGDAGMDGAMISVASMVAGAVTNPFGDGFYQGDRAAPLEAATACAGVYGNGAYPGYAGQLLVDAATGASYNANGARGRKYLLPALYDPDTAACTTLV

SEQ ID NO: 24492 - protein, 300 aa, Zea mays subsp. mays
  misc_feature (1)..(300): Ceres Seq. ID no. 12435388
  misc_feature (187)..(187): Xaa is any aa, unknown or other
MELYKPPPSDLLRYHDGAVLSGDIPVSVLWYGRFTPAQKAIVTDFLLSLSAAPTSPAPSVSQWWGTIDRLYLSKAADAAAVGKSGAHGGGGGRKGARVVLAGQVSDEGCSLGKSLTLAQLPALAAAARPAKGGLALLLTAQDVLVEGFCMSRCGHHGSYGARPRVAAAAYAWVGNPGTQCPGQCAWXFHQPPYGPQAPPLVPPNGDAGMDGAMISVASMVAGAVTNPFGDGFYQGDRAAPLEAATACAGVYGNGAYPGYAGQLLVDAATGASYNANGARGRKYLLPALYDPDTAACTTLV

SEQ ID NO: 24493 - DNA, 1095 bp, Zea mays subsp. mays
  misc_feature (1)..(1095): Ceres Seq. ID no. 12435389
gagaccgagagcctccagaaacccacgcgacgcgaccgaccaccatggccgcctccgcgctcctcctctcgccgcggctcgtgtctttcccgcctcacccgagcctcgccccactcttcaccaagagaccaccgccctaccccctcggcggcgccggcgcgaggctccgggccgtcggggacgggcccggcgcggggctgccacccgagcaggccacggtctacgacggcgcctacggtccctggaccctggaggactccgacgtgcgcgaggtcctgctgtaccggtcggggctggtgacggcggcggcgtccttcgtggcggcgtcctccgcggcgttcctgccggaagggaaccccgccgcctccgccgtcaccggcgccgccgacctcctgtacgccgccggcgccgcggggctggggctgtcgctggtcctcatccacatctacgtcaccccgataaagcgcttcctccaggcgctgtgggcggccggggcgctcggctccatcgggacctacctcgtcgccgcccgcccgctggatgagggcctcgtgcagtacgtgctggaccaccccgccgcgctgtggttcgtcggccccacgttcgccgcgctcactggcctcgtcttcaaggaaggtctctgctatgggaaactggaagctggcatcttgacgtttcttatccctgggcttcttcttgggcatttgtctggtttaatggataacagcacaaaggcaggtcttttaggactgtggatgcttcttttcacaatcttcgccgctagaaaattccagcagcccatcaaggatgacgttggagacaaatctgttttcatgttcaacgctcttcccgaagaggaaaagaaggcttggatccagaaactcgagaggcaaaagggacaagagttgtttgagtagaaaagagtagcttgtcttggtgcagccaatagttcgtccgtgaatgtttgtagctcatgtattatggctccagaaatttgacaaatacgttccaatagagatgtaattacaaatctgttagatcacaggtaagatgtaactaaataaagcactttcaattttgttgttatagtcgttg

SEQ ID NO: 24494 - protein, 304 aa, Zea mays subsp. mays
  misc_feature (1)..(304): Ceres Seq. ID no. 12435390
DREPPETHATRPTTMAASALLLSPRLVSFPPHPSLAPLFTKRPPPYPLGGAGARLRAVGDGPGAGLPPEQATVYDGAYGPWTLEDSDVREVLLYRSGLVTAAASFVAASSAAFLPEGNPAASAVTGAADLLYAAGAAGLGLSLVLIHIYVTPIKRFLQALWAAGALGSIGTYLVAARPLDEGLVQYVLDHPAALWFVGPTFAALTGLVFKEGLCYGKLEAGILTFLIPGLLLGHLSGLMDNSTKAGLLGLWMLLFTIFAARKFQQPIKDDVGDKSVFMFNALPEEEKKAWIQKLERQKGQELFE

SEQ ID NO: 24495 - protein, 290 aa, Zea mays subsp. mays
  misc_feature (1)..(290): Ceres Seq. ID no. 12435391
MAASALLLSPRLVSFPPHPSLAPLFTKRPPPYPLGGAGARLRAVGDGPGAGLPPEQATVYDGAYGPWTLEDSDVREVLLYRSGLVTAAASFVAASSAAFLPEGNPAASAVTGAADLLYAAGAAGLGLSLVLIHIYVTPIKRFLQALWAAGALGSIGTYLVAARPLDEGLVQYVLDHPAALWFVGPTFAALTGLVFKEGLCYGKLEAGILTFLIPGLLLGHLSGLMDNSTKAGLLGLWMLLFTIFAARKFQQPIKDDVGDKSVFMFNALPEEEKKAWIQKLERQKGQELFE

SEQ ID NO: 24496 - protein, 180 aa, Zea mays subsp. mays
  misc_feature (1)..(180): Ceres Seq. ID no. 12435392
RPRASRNPRDATDHHGRLRAPPLAAARVFPASPEPRPTLHQETTALPPRRRRREAPGRRGRARRGAATRAGHGLRRRLRSLDPGGLRRARGPAVPVGAGDGGGVLRGGVLRGVPAGREPRRLRRHRRRRPPVRRRRRGAGAVAGPHPHLRHPDKALPPGAVGGRGARLHRDLPRRRPPAG

SEQ ID NO: 24497 - DNA, 1394 bp, Zea mays subsp. mays
  misc_feature (1)..(1394): Ceres Seq. ID no. 12435464
ccacccgctaacggcgacgacgactgcttccccagtgggagacctgcaatcctcagccacctgcccctccccctcccccatctccgttcacctcttcccctcttccctaccttcctgtattcgcggcgtcgagtgccgccgcccttcgccggcgccgagcacggagcaacgcaccagtttcagtacctggattcgaactgagagtggattacgaagtcatggcaaggttatgttgcttcggcgccggttgctccgatttcacggggcaagggtcaatagcatccggtaaagggaaaggctgtcaagggcaagtcaagatctgctatggatataaccttgtaagagggatgacgaatcatccaatggaggactatcattttgccgaacttgttgatgtcaaaggaaacgagcttggtctttttgctatttatgatggtcatttaggggataccgttcctatgtatttacagaagaatttatttacaaatattttgaatgaggaagagttttggacacacacagatagagcgattataaaagcgtatgaaaaaacagaccaagctattctgtcacatactccagatctgggacaaggtggctccactgctgtaaccgccattcttgtgaacggcaggaagttatgggtagctaatgttggcgattcaagagctgttcttttgaaaggtggtgagcccatacagatgtcgatagaccatgatccgaatgttgagcggagtgtaatcgaaaataggggtggttttgtttcaaatatgccaggagatgttccccgagtatgtggtcagttggctgtctccagagcttttggagacaggaatctaaaatcactattgagatcagagcctgatataaaaatcgaagacatagatcacactgccgagctacttgttcttgcgagtgacggtctttggaaggtgatgaacaatcaagaggttgtcgatttggccaaaaggtacaaggatccctatgctgctgccaagccaattaaccgtcgaagcacaaaaaagagatagtaaggatgatatatcatgcatcgttgttcggttcaaggcgtaagtcggtctcgaaggattttcatcgagagcaaaaaaacaagtgaattaggctgcctgacgatggtagtgataatctgatggttgaataatgactggggtgttggatgtaaatgatttgtctgctccaatgtaaagttcatatataagtatgctaggattatttggtttggcgatttcaaaggtacaggtgcgagggcccgagagctactaaatagctaccatctgtaaataatggttatattggatgttgaatttgtaagagtagactgagcaaaagacatctggatagttcctaaaagaacaaggtactctttatgttcg

SEQ ID NO: 24498 - protein, 270 aa, Zea mays subsp. mays
  misc_feature (1)..(270): Ceres Seq. ID no. 12435465
MARLCCFGAGCSDFTGQGSIASGKGKGCQGQVKICYGYNLVRGMTNHPMEDYHFAELVDVKGNELGLFAIYDGHLGDTVPMYLQKNLFTNILNEEEFWTHTDRAIIKAYEKTDQAILSHTPDLGQGGSTAVTAILVNGRKLWVANVGDSRAVLLKGGEPIQMSIDHDPNVERSVIENRGGFVSNMPGDVPRVCGQLAVSRAFGDRNLKSLLRSEPDIKIEDIDHTAELLVLASDGLWKVMNNQEVVDLAKRYKDPYAAAKPINRRSTKKR

SEQ ID NO: 24499 - protein, 227 aa, Zea mays subsp. mays
  misc_feature (1)..(227): Ceres Seq. ID no. 12435466
MTNHPMEDYHFAELVDVKGNELGLFAIYDGHLGDTVPMYLQKNLFTNILNEEEFWTHTDRAIIKAYEKTDQAILSHTPDLGQGGSTAVTAILVNGRKLWVANVGDSRAVLLKGGEPIQMSIDHDPNVERSVIENRGGFVSNMPGDVPRVCGQLAVSRAFGDRNLKSLLRSEPDIKIEDIDHTAELLVLASDGLWKVMNNQEVVDLAKRYKDPYAAAKPINRRSTKKR

SEQ ID NO: 24500 - protein, 222 aa, Zea mays subsp. mays
  misc_feature (1)..(222): Ceres Seq. ID no. 12435467
MEDYHFAELVDVKGNELGLFAIYDGHLGDTVPMYLQKNLFTNILNEEEFWTHTDRAIIKAYEKTDQAILSHTPDLGQGGSTAVTAILVNGRKLWVANVGDSRAVLLKGGEPIQMSIDHDPNVERSVIENRGGFVSNMPGDVPRVCGQLAVSRAFGDRNLKSLLRSEPDIKIEDIDHTAELLVLASDGLWKVMNNQEVVDLAKRYKDPYAAAKPINRRSTKKR

SEQ ID NO: 24501 - DNA, 1940 bp, Zea mays subsp. mays
  misc_feature (1)..(1940): Ceres Seq. ID no. 12435492
agtggccgtgggcgccggcggcggctaacaaaagcgccgggaagtgggcaccgaccgaagcatcccggaacagacacagattaccgcttgtatttagatcggcccagaccatctgacgacgaggaggagggcggggaggcgaggccaaatccggtcggactcggaccggcgaactcccccgacctcgctatgggcagcctccgcgtcgtcggctgggcttggaccgccgccgccgcgccggagtggggcgtgcaccgccgctgctgccgcgggacgccgctggcccgcccccgcgcggcgacgtcctcccttggcgcggggcagctccgggtcgggacggagcncgggtggctctgggattnccncggcggcggcggcgcgggggattacgccagggagatggaggtggcggtgcgcgtcgtgcaggtggcctgcaccctgtgccagcgcgtgcaggactcgctcctccgccccggccccgacgccgccggcggcgacgggcgcgtccacgccaagctcgaccgctcccccgtaaccgtcgctgattggggtgttcaagcgatagtaagctggctgctttccagttcctttcatgatgaggacatatcgatcattgccgaagaagatgatgagacactatctagtagtgacggtgtaactttgcttgaatctgttgttgaggctgtcaacggctgcctggttgaagctccaaactatgggctgagatcccctgagaaagagctcagagctcatgatgttattcaagccatacggaaatgcagctctactggaggcccgaaaggaagattttgggtgcttgatcctgtcgacggcacccttgggtttgtgagaggggaccaatatgctattgctctagccttgattgaagatggagaagttatacttggtgttcttgggtgcccaaattatccaatgaaaaaggagtggctcaattaccatcaaaagtactataggttgatgtctaaggttgctcctcctccattggggtcctggcataaaggttgtgtgatgtatgcccagaaaggatgtggccaagcttggatgcaaccactggttcacgacttcggtaagcttaattggcaccacccaagggagattcaagtatcatccatcagtgatccaatctcagctacgttctgtgaaccagttgagaaagctaactcaagccattccttcacagcaggacttgctcaaagtgtaggattaaggaatcaacctctgcgcgtgtacagcatggtgaaatatgctgcaatagcacgaggcgatgctgaaatcttcatgaaatttgcaagagctggatacaaagagaagatatgggatcatgctgcaggggtggttatcattcaggaggctggtggagtggtcacagatgctggtggccgcccattggacttctcaaggggtgtttacctggaaggtttggatcgaggcataatagcttgttccggagcattgcttcatcaaagaattttaaatgctgttgatgcgagctggaactcatcaacactatgaaccaaacaataaggtcttaggagagaatggcctcatgttggtcatagcatggtaaattggaaaactgatttaagtattcattgtggtgctgttgtgactatggggtaacaccgtaacagtgcagcatataggatagtaatagattgtctgctcatataaacaagaagtcgtctcttgaggctgacaaattgctggcttttgttcaacgatgccatatgtaattttgtataggtgtctgttgatgaaaagcatgtgtgcatgcttttgtttttactaattgacatgtttcttttcaacttgtgcctgtcaatcgtcaggtgtattggttaagacagtgcagcaccatttgctgacaatcataatgttaaaaccttcaactgattcatcaaatgagttattgtccgcct

SEQ ID NO: 24502 - protein, 510 aa, Zea mays subsp. mays
  misc_feature (1)..(510): Ceres Seq. ID no. 12435493
  misc_feature (115)..(115): Xaa is any aa, unknown or other
  misc_feature (121)..(121): Xaa is any aa, unknown or other
  misc_feature (122)..(122): Xaa is any aa, unknown or other
SGRGRRRRLTKAPGSGHRPKHPGTDTDYRLYLDRPRPSDDEEEGGEARPNPVGLGPANSPDLAMGSLRVVGWAWTAAAAPEWGVHRRCCRGTPLARPRAATSSLGAGQLRVGTEXGWLWDXXGGGGAGDYAREMEVAVRVVQVACTLCQRVQDSLLRPGPDAAGGDGRVHAKLDRSPVTVADWGVQAIVSWLLSSSFHDEDISIIAEEDDETLSSSDGVTLLESVVEAVNGCLVEAPNYGLRSPEKELRAHDVIQAIRKCSSTGGPKGRFWVLDPVDGTLGFVRGDQYAIALALIEDGEVILGVLGCPNYPMKKEWLNYHQKYYRLMSKVAPPPLGSWHKGCVMYAQKGCGQAWMQPLVHDFGKLNWHHPREIQVSSISDPISATFCEPVEKANSSHSFTAGLAQSVGLRNQPLRVYSMVKYAAIARGDAEIFMKFARAGYKEKIWDHAAGVVIIQEAGGVVTDAGGRPLDFSRGVYLEGLDRGIIACSGALLHQRILNAVDASWNSSTL

SEQ ID NO: 24503 - protein, 447 aa, Zea mays subsp. mays
  misc_feature (1)..(447): Ceres Seq. ID no. 12435494
  misc_feature (52)..(52): Xaa is any aa, unknown or other
  misc_feature (58)..(58): Xaa is any aa, unknown or other
  misc_feature (59)..(59): Xaa is any aa, unknown or other
MGSLRVVGWAWTAAAAPEWGVHRRCCRGTPLARPRAATSSLGAGQLRVGTEXGWLWDXXGGGGAGDYAREMEVAVRVVQVACTLCQRVQDSLLRPGPDAAGGDGRVHAKLDRSPVTVADWGVQAIVSWLLSSSFHDEDISIIAEEDDETLSSSDGVTLLESVVEAVNGCLVEAPNYGLRSPEKELRAHDVIQAIRKCSSTGGPKGRFWVLDPVDGTLGFVRGDQYAIALALIEDGEVILGVLGCPNYPMKKEWLNYHQKYYRLMSKVAPPPLGSWHKGCVMYAQKGCGQAWMQPLVHDFGKLNWHHPREIQVSSISDPISATFCEPVEKANSSHSFTAGLAQSVGLRNQPLRVYSMVKYAAIARGDAEIFMKFARAGYKEKIWDHAAGVVIIQEAGGVVTDAGGRPLDFSRGVYLEGLDRGIIACSGALLHQRILNAVDASWNSSTL

SEQ ID NO: 24504 - protein, 377 aa, Zea mays subsp. mays
  misc_feature (1)..(377): Ceres Seq. ID no. 12435495
MEVAVRVVQVACTLCQRVQDSLLRPGPDAAGGDGRVHAKLDRSPVTVADWGVQAIVSWLLSSSFHDEDISIIAEEDDETLSSSDGVTLLESVVEAVNGCLVEAPNYGLRSPEKELRAHDVIQAIRKCSSTGGPKGRFWVLDPVDGTLGFVRGDQYAIALALIEDGEVILGVLGCPNYPMKKEWLNYHQKYYRLMSKVAPPPLGSWHKGCVMYAQKGCGQAWMQPLVHDFGKLNWHHPREIQVSSISDPISATFCEPVEKANSSHSFTAGLAQSVGLRNQPLRVYSMVKYAAIARGDAEIFMKFARAGYKEKIWDHAAGVVIIQEAGGVVTDAGGRPLDFSRGVYLEGLDRGIIACSGALLHQRILNAVDASWNSSTL

SEQ ID NO: 24505 - DNA, 1750 bp, Zea mays subsp. mays
  misc_feature (1)..(1750): Ceres Seq. ID no. 12435496
aactgggatggcccgctaaagattagagcaacatgtactggaccatcatcaacaatagctaagatagtccgcatggttgaggatgcccaagcacgtgaagctcctgttcaaaggctcgcagattccatcgcaggaccatttgtgtatactgttatgacgttggctgcaacaaccttttccttctggtattacattggcacacacttatttcctgaggttcttctgaatgatattgctggtccggatggggattcattacttttgagtataaagcttgctgtggatgtattagttgtttcctgtccttgtgcacttggattagctacacctacagctatcttaataggaacttccctaggtgctaaaagagggttactggttagaggaggtgatgttttagagcgtttggctggaatagatactcttgtgcttgataaaacagggacgcttacagaaggaaaaccagtagtgacttctattgcttctctggcatatgaggagacagaggtccttcgtcttgctgctgcagtggagaaaacagcattgcacccaattgcaaatgctataatgaacaaggctgaactactcaagttggatattccgatcacaagtggtcagcttacatcgcctggatttggttgtttggctgaagtagatgggagtttagttgcagtgggcactttggattgggtgcatgatcgttttgaaactaaagcatcgccaactgaactgagagaccttagaaaccggctggagtttatgttgtcaagtgaagcatcatcatcaaaccagtcgaagtcaattgcttatgttggccgtgagggagaaggaattataggtgctattgctatatcagatattttacgagaagatgcaaacttaactgtggagaggttgcagcaggaaagcattacaacgttcctgctgtcaggggataggggagaagcagtgacaagcattgggaggaccattggaatcaggaatgaaaacataaagtcttccctgactccgcaagacaaagcaagcattatatcaactttgcaagcgaagggacacagagttgcaatggttggtgatggaataaacgatgccccgtctttagcagccgcagatgttggaatagccatgcgaactcattcaaaagagaacgctgcctctgatgcagcttcagttgttctactaggcaacagactttctcaggtggtagatgcgctatccctgtcgaaggcaacgatggcaaaagttcaccaaaatttggcctgggcagtggcatataacatagtagccattccaattgccgctggagtgctgctgccacaatatgatttcgccatgacaccatctctctcaggggggttgatggcccttagctcaatctttgttgtcagcaattctttgcttctgcagctgcatgggtcgtttcagaacacagaaaaacggcagggtgatctgagctcaagattaaactgaattgttgggtttagtttgacccagccgaaggacagtggtattgaattatagagggttctgatactggttttccagctccggctaattgaactgagtcagaactataagtagcaagctattcgtgtcagtagtagcatgttcctgtactgtttgtcaacccaactatagtagcaagtatgacccagaaggacaataatctaccacggccttcaaaaacattgtaaattagtaatggtactgctgtaagcctgtaaacaaagttaaggcgtatgactatcgt

SEQ ID NO: 24506 - protein, 489 aa, Zea mays subsp. mays
  misc_feature (1)..(489): Ceres Seq. ID no. 12435497
NWDGPLKIRATCTGPSSTIAKIVRMVEDAQAREAPVQRLADSIAGPFVYTVMTLAATTFSFWYYIGTHLFPEVLLNDIAGPDGDSLLLSIKLAVDVLVVSCPCALGLATPTAILIGTSLGAKRGLLVRGGDVLERLAGIDTLVLDKTGTLTEGKPVVTSIASLAYEETEVLRLAAAVEKTALHPIANAIMNKAELLKLDIPITSGQLTSPGFGCLAEVDGSLVAVGTLDWVHDRFETKASPTELRDLRNRLEFMLSSEASSSNQSKSIAYVGREGEGIIGAIAISDILREDANLTVERLQQESITTFLLSGDRGEAVTSIGRTIGIRNENIKSSLTPQDKASIISTLQAKGHRVAMVGDGINDAPSLAAADVGIAMRTHSKENAASDAASVVLLGNRLSQVVDALSLSKATMAKVHQNLAWAVAYNIVAIPIAAGVLLPQYDFAMTPSLSGGLMALSSIFVVSNSLLLQLHGSFQNTEKRQGDLSSRLN

SEQ ID NO: 24507 - protein, 465 aa, Zea mays subsp. mays
  misc_feature (1)..(465): Ceres Seq. ID no. 12435498
MVEDAQAREAPVQRLADSIAGPFVYTVMTLAATTFSFWYYIGTHLFPEVLLNDIAGPDGDSLLLSIKLAVDVLVVSCPCALGLATPTAILIGTSLGAKRGLLVRGGDVLERLAGIDTLVLDKTGTLTEGKPVVTSIASLAYEETEVLRLAAAVEKTALHPIANAIMNKAELLKLDIPITSGQLTSPGFGCLAEVDGSLVAVGTLDWVHDRFETKASPTELRDLRNRLEFMLSSEASSSNQSKSIAYVGREGEGIIGAIAISDILREDANLTVERLQQESITTFLLSGDRGEAVTSIGRTIGIRNENIKSSLTPQDKASIISTLQAKGHRVAMVGDGINDAPSLAAADVGIAMRTHSKENAASDAASVVLLGNRLSQVVDALSLSKATMAKVHQNLAWAVAYNIVAIPIAAGVLLPQYDFAMTPSLSGGLMALSSIFVVSNSLLLQLHGSFQNTEKRQGDLSSRLN

SEQ ID NO: 24508 - protein, 438 aa, Zea mays subsp. mays
  misc_feature (1)..(438): Ceres Seq. ID no. 12435499
MTLAATTFSFWYYIGTHLFPEVLLNDIAGPDGDSLLLSIKLAVDVLVVSCPCALGLATPTAILIGTSLGAKRGLLVRGGDVLERLAGIDTLVLDKTGTLTEGKPVVTSIASLAYEETEVLRLAAAVEKTALHPIANAIMNKAELLKLDIPITSGQLTSPGFGCLAEVDGSLVAVGTLDWVHDRFETKASPTELRDLRNRLEFMLSSEASSSNQSKSIAYVGREGEGIIGAIAISDILREDANLTVERLQQESITTFLLSGDRGEAVTSIGRTIGIRNENIKSSLTPQDKASIISTLQAKGHRVAMVGDGINDAPSLAAADVGIAMRTHSKENAASDAASVVLLGNRLSQVVDALSLSKATMAKVHQNLAWAVAYNIVAIPIAAGVLLPQYDFAMTPSLSGGLMALSSIFVVSNSLLLQLHGSFQNTEKRQGDLSSRLN

SEQ ID NO: 24509 - DNA, 1486 bp, Zea mays subsp. mays
  misc_feature (1)..(1486): Ceres Seq. ID no. 12435516
aaacaaaaccctcctcgtcatccgcggccgcttttcccctgacccctgtctcgaccaatcctccctcccacacacatcacacccacaagacaaaaaaaaaaagcgcctttgagcgccgcgcgatctctggtgcttggtgtcgtcgcgacaccagcgttagtttctgtttcagcgcgcacgcgcgtttgtgctgtgggggttgggaagagccgaagagcgaggcggcagcgcgatcgagcggttcggcgggcggcggccgatccgatgggaagggcaccctgctgcgacaagaacaagggcctcaagaaagggccctggacgccggaggaggacaagctcctcgtcgactacatccagaccaacggccatggcagctggcgcctgctccccaagctcgcagggctgaaccggtgcggcaagagctgccgactgcggtggaccaactacctccggccggacatcaagcgcgggcccttcacagccgaggaggagaagtccatcgtccagctccacgccatcgtcggcaacaagtggtccatgatcgcggcacagctcccaggccggacggacaacgagatcaagaactactggaacacgcacctcaagaagcagctgcgtcggatgggcctcgacgagcccccgcccggcccggccgccggctgccccgccgcgcgccacatggcgcagtgggagacggccaggctcgaggccgaggcgcgcctctccctcctcgccgccaccgccgcctcctccggtaccactgcgaccaccaccaccaccacgtctgcagcctcctcgtcctccaccaccgtcgctggcgcggccgacaacaaggcctccaaccccgcggacatcttcctgcgcctgtggagctcggacatcggggactccttccgccgcaagacggacacgccggcggtgcccgcgcttcccggcgcccgtcgtcaagaggaaggacacggcgatcaagcaggagccgcgggcgctgctgctcggcctcggggacgactcctcggcggcgtccaacgacaacgagacggaggtggcggaggcgctggaggcggagtaccagatgttcctcgacttcgcgggcgaagagctgggactattccatggccggcacggcggcttctcgctgttcccgccgctcgacgtgctcgctgaggcgtccctggactcggctttcaagtgaagacgtagccagcaccacgtacgtacacggtactcatacgtacggcaagcggcagtggccaactggccatgcctctacggcttagctatacgcctcgaaatgcgcgcatggatgtatatagatatgcgtgtgactgcactggcatatcggcaattttttgggttaggccagcaagtgcgtggtttagcttgttattatgcagggttggttttggtaggacatcatggtgtatgggggattctctgttcattggagatgctctaatacatcacgagatgttcttcaatcttcggc

SEQ ID NO: 24510 - protein, 424 aa, Zea mays subsp. mays
  misc_feature (1)..(424): Ceres Seq. ID no. 12435517
TKPSSSSAAAFPLTPVSTNPPSHTHHTHKTKKKSAFERRAISGAWCRRDTSVSFCFSAHARLCCGGWEEPKSEAAARSSGSAGGGRSDGKGTLLRQEQGPQERALDAGGGQAPRRLHPDQRPWQLAPAPQARRAEPVRQELPTAVDQLPPAGHQARALHSRGGEVHRPAPRHRRQQVVHDRGTAPRPDGQRDQELLEHAPQEAAASDGPRRAPARPGRRLPRRAPHGAVGDGQARGRGAPLPPRRHRRLLRYHCDHHHHHVCSLLVLHHRRWRGRQQGLQPRGHLPAPVELGHRGLLPPQDGHAGGARASRRPSSRGRTRRSSRSRGRCCSASGTTPRRRPTTTRRRWRRRWRRSTRCSSTSRAKSWDYSMAGTAASRCSRRSTCSLRRPWTRLSSEDVASTTYVHGTHTYGKRQWPTGHASTA

SEQ ID NO: 24511 - protein, 299 aa, Zea mays subsp. mays
  misc_feature (1)..(299): Ceres Seq. ID no. 12435518
MGRAPCCDKNKGLKKGPWTPEEDKLLVDYIQTNGHGSWRLLPKLAGLNRCGKSCRLRWTNYLRPDIKRGPFTAEEEKSIVQLHAIVGNKWSMIAAQLPGRTDNEIKNYWNTHLKKQLRRMGLDEPPPGPAAGCPAARHMAQWETARLEAEARLSLLAATAASSGTTATTTTTTSAASSSSTTVAGAADNKASNPADIFLRLWSSDIGDSFRRKTDTPAVPALPGARRQEEGHGDQAGAAGAAARPRGRLLGGVQRQRDGGGGGAGGGVPDVPRLRGRRAGTIPWPARRLLAVPAARRAR

SEQ ID NO: 24512 - DNA, 1102 bp, Zea mays subsp. mays
  misc_feature (1)..(1102): Ceres Seq. ID no. 12435527
gcacgagaccattacctagaacatcctaatcgaaaaaatggattattggatggatgaaggtctgggcgggctgggtgtggacgagacgacgctggtgtccgcgctggggcggtggcggcgggagccggagaagcgggcgcagttccggcgcggcttcccgggcttcttctcgtcgagcgccggcgccgggatcgagcggtgcgaggacgagtacctgctgcacctcaaggcggagttcgcgcgcttcaaggacgcggcggtgctgtgggcgatgcacccgtgggagcgcgacgcgcgctgggcgcaccacgtgctgcacaaggcgcacccgccgcacatcctcgtcgaggtcgcctgcacgcgcgccgccgacgacctgctcggcgcccgccgcgcgtaccaggcgctctaccaccgctcgctcgaggaggacgtcgcgtaccgcgtcagggacgccaacgccagtctgctgttggggctggtgagcgcgtaccggtacgagggcgcgcgcgtgaacgaggacctcgccactgaggaagccaaggcgctggccgccgccgttagggccgcgccggcggcggcgaccaagctagtgcagaacgagcaggtggtgcgggtgctggttaccagaagcaagccccatctcggggccaccttcagggtctacatggagctgcacggcaagccgcttgaagaggaactgcccgccgagccgtgcctgcgagaggccgtcaggtgcttggactcgccgcccaagtacttcagcgaggtgatccacagggcgttcagcgacgacgcggacaggtaggccaaggcggcgctcacccgcgtcctcgtgtcccgcgccgacacggacatggaggatatcaaggacgcctacaccaggcagtacgggaccaagctcgccgacgccgtggccaagaacacccacggccactacaaggaagcgctgctcgccatcatcggcaagtgaaaggaacccagggtgtcgtgtggccacatgaataataacacgttctttcaaatgaaacagttaaataagattgtacccatctctgcggaatagataaaagaagagcattctgttgtcatgttatgactg

SEQ ID NO: 24513 - protein, 256 aa, Zea mays subsp. mays
  misc_feature (1)..(256): Ceres Seq. ID no. 12435528
MDYWMDEGLGGLGVDETTLVSALGRWRREPEKRAQFRRGFPGFFSSSAGAGIERCEDEYLLHLKAEFARFKDAAVLWAMHPWERDARWAHHVLHKAHPPHILVEVACTRAADDLLGARRAYQALYHRSLEEDVAYRVRDANASLLLGLVSAYRYEGARVNEDLATEEAKALAAAVRAAPAAATKLVQNEQVVRVLVTRSKPHLGATFRVYMELHGKPLEEELPAEPCLREAVRCLDSPPKYFSEVIHRAFSDDADR

SEQ ID NO: 24514 - protein, 252 aa, Zea mays subsp. mays
  misc_feature (1)..(252): Ceres Seq. ID no. 12435529
MDEGLGGLGVDETTLVSALGRWRREPEKRAQFRRGFPGFFSSSAGAGIERCEDEYLLHLKAEFARFKDAAVLWAMHPWERDARWAHHVLHKAHPPHILVEVACTRAADDLLGARRAYQALYHRSLEEDVAYRVRDANASLLLGLVSAYRYEGARVNEDLATEEAKALAAAVRAAPAAATKLVQNEQVVRVLVTRSKPHLGATFRVYMELHGKPLEEELPAEPCLREAVRCLDSPPKYFSEVIHRAFSDDADR

SEQ ID NO: 24515 - protein, 178 aa, Zea mays subsp. mays
  misc_feature (1)..(178): Ceres Seq. ID no. 12435530
MHPWERDARWAHHVLHKAHPPHILVEVACTRAADDLLGARRAYQALYHRSLEEDVAYRVRDANASLLLGLVSAYRYEGARVNEDLATEEAKALAAAVRAAPAAATKLVQNEQVVRVLVTRSKPHLGATFRVYMELHGKPLEEELPAEPCLREAVRCLDSPPKYFSEVIHRAFSDDADR

SEQ ID NO: 24516 - DNA, 1837 bp, Zea mays subsp. mays
  misc_feature (1)..(1837): Ceres Seq. ID no. 12435551
agtctctaggctctggagacctcgcgcaccatcccaccagcagcaagcgcccactaattccgcaccacaacgcgcactctccggcaccaccgccgtcctcgcgacgtcacatagtacgcattacgcactcgcgcgcgcgcgtgcgcgtacatttacgcagcgatgagctcgagaacgcaccacccctgctttgcgtctgtggagtcatgggagcaagcggcgatggcgcacgacggcttcctcggcgatcttgcctgcccgctcccgctcgctcacgctgcaaccgcggcgccgttcgacccgctgcgggtacatgtggcgcacgcgctcacgggcgccggcgcggggtgggaacacgacgccgcgacgggcgcgctcgtgccgtcgcggccgcgaccgctgtcgccgtcctcgctcgcggcggccaccgccgtagtagttggaggaggaggagacgccgtggaggccgcgctgatggagcagcttgcgagcaggctcggcgtcagcgtgccttcgccgccgccatcgcggtacgcgtcctgccacggcacgccggcgggctccccctccaagtcggcggcgccgtgggtgctggccggggacgcggcgcctgcggagcgcgccacagggctcccgtgcttcccggcctcctgtggggagctctcgcgcgtgcccagctgccagtcgtcgcttctcggcgagcacgcaccgactccggcgcccgcgccgttgcctggcgctgccaaacagcacgcgagcgacgggtcgtgcagcgatggcccctgccggaagcggaaggcgtcgggcggcaaggccaaggacgtggtcaccacggccacacccaagtcccgggagccggagacgatggccaagagacgcaagctctcgacagacgccgcccgcgacgaggctgggtcgcacgggaacggcaaggggaaggaggtggcgccggcggcagagccagagccacagccacccaaggactacatccacgtgcgagcgcggaggggccaggccaccgacagccacagcctcgccgagcgggtgaggagggaaaagatcagcgaacgcatgaagctgctgcaggacctcgtgccaggctgcagcaaggttaccgggaaggccgtgatgctggacgagatcataaactacgtacagtcgctgcagtgccaggtggagttcctgtcgatgaagctgtcgacggtcgacccgcgccgggagctcgacgtgggctgcttcgtcgtccccaaagacgacgtaacgatgcaggccaacaggctgtgcgcgcccgcgacgtcgtcgtcgagctcagccttctgctacgccgcgcggagtgttgttacgaacgccaaaggattcgagacgccgctgcccttggcgaaccatggcgtcgcggcggacgacaggccacttgagcggcggactcgagacgcaggtccccaggcggggagcttgtgggaagaggacgatctgcagagcctggtcctgatgggattccggggccgttgatcgttgacgctctgattaggctaggccgctagggacgacagttcgtttccaccgaccgccaaccaaagcgagagttgcagggccacgtaacagcagggttgggctccaatcattgggaactctccatgattgtacacagacaggacgcttacacgctaatttccagctcggcggaggccaagaaacgaaacaaaaaaaaaaggcgaaaagaagatgtttttttctcgcattccccctcacgaatttgcagtttaatcgatgtaagataactcaatgtaattattaatggtatttgagtcttatagacatcaagttgatgaaattttat

SEQ ID NO: 24517 - protein, 470 aa, Zea mays subsp. mays
  misc_feature (1)..(470): Ceres Seq. ID no. 12435552
SLGSGDLAHHPTSSKRPLIPHHNAHSPAPPPSSRRHIVRITHSRARVRVHLRSDELENAPPLLCVCGVMGASGDGARRLPRRSCLPAPARSRCNRGAVRPAAGTCGARAHGRRRGVGTRRRDGRARAVAAATAVAVLARGGHRRSSWRRRRRRGGRADGAACEQARRQRAFAAAIAVRVLPRHAGGLPLQVGGAVGAGRGRGACGARHRAPVLPGLLWGALARAQLPVVASRRARTDSGARAVAWRCQTARERRVVQRWPLPEAEGVGRQGQGRGHHGHTQVPGAGDDGQETQALDRRRPRRGWVARERQGEGGGAGGRARATATQGLHPRASAEGPGHRQPQPRRAGEEGKDQRTHEAAAGPRARLQQGYREGRDAGRDHKLRTVAAVPGGVPVDEAVDGRPAPGARRGLLRRPQRRRNDAGQQAVRARDVVVELSLLLRRAECCYERQRIRDAAALGEPWRRGGRQAT

SEQ ID NO: 24518 - protein, 448 aa, Zea mays subsp. mays
  misc_feature (1)..(448): Ceres Seq. ID no. 12435553
MSSRTHHPCFASVESWEQAAMAHDGFLGDLACPLPLAHAATAAPFDPLRVHVAHALTGAGAGWEHDAATGALVPSRPRPLSPSSLAAATAVVVGGGGDAVEAALMEQLASRLGVSVPSPPPSRYASCHGTPAGSPSKSAAPWVLAGDAAPAERATGLPCFPASCGELSRVPSCQSSLLGEHAPTPAPAPLPGAAKQHASDGSCSDGPCRKRKASGGKAKDVVTTATPKSREPETMAKRRKLSTDAARDEAGSHGNGKGKEVAPAAEPEPQPPKDYIHVRARRGQATDSHSLAERVRREKISERMKLLQDLVPGCSKVTGKAVMLDEIINYVQSLQCQVEFLSMKLSTVDPRRELDVGCFVVPKDDVTMQANRLCAPATSSSSSAFCYAARSVVTNAKGFETPLPLANHGVAADDRPLERRTRDAGPQAGSLWEEDDLQSLVLMGFRGR

SEQ ID NO: 24519 - protein, 428 aa, Zea mays subsp. mays
  misc_feature (1)..(428): Ceres Seq. ID no. 12435554
MAHDGFLGDLACPLPLAHAATAAPFDPLRVHVAHALTGAGAGWEHDAATGALVPSRPRPLSPSSLAAATAVVVGGGGDAVEAALMEQLASRLGVSVPSPPPSRYASCHGTPAGSPSKSAAPWVLAGDAAPAERATGLPCFPASCGELSRVPSCQSSLLGEHAPTPAPAPLPGAAKQHASDGSCSDGPCRKRKASGGKAKDVVTTATPKSREPETMAKRRKLSTDAARDEAGSHGNGKGKEVAPAAEPEPQPPKDYIHVRARRGQATDSHSLAERVRREKISERMKLLQDLVPGCSKVTGKAVMLDEIINYVQSLQCQVEFLSMKLSTVDPRRELDVGCFVVPKDDVTMQANRLCAPATSSSSSAFCYAARSVVTNAKGFETPLPLANHGVAADDRPLERRTRDAGPQAGSLWEEDDLQSLVLMGFRGR

SEQ ID NO: 24520 - DNA, 1757 bp, Zea mays subsp. mays
  misc_feature (1)..(1757): Ceres Seq. ID no. 12435555
gtccgccgcctcctctctccgcacaggctcaccaaacgacgaacactctccctcgacccgtgaccgtgagcaagcgggtggcgacggcgcgcggccggccatggtgagcgagagcaaccgcggcggtgcggaccggacgacggcggcgggggaggagcgcgggcagctgctgttcgacgtgccggagatcaggttcaccaagctcttcatcaacggatccttcgtcgacgccgtctcagagccggacgttcgagacgagggacccgcgcacggggggcgtcatcgccagcgtggcagaagctgacaaagaagacgtggacttggcagtgagggcagccagggccgctttcgaccacggcgagtggccacgcatgtctggatccgaacgggggcggatcatggcgaggctggccgacctggtggaggagcgcgcggacgagctggcggccctggagagcctggacgccggcaagcacccggccgtgacccgggcggtggacgtcggcaacgccgccggcagcctgcgctacttcgccggcgcggccgacaagatccacggcgagacgctcaagatgccgggccagttccagggccacaccctgcgcgagccgctcggcgtcgccggcgtcatcatcccctggaacttcccgtccaccatgttcgccgtcaaggtggcgccggcgctggccgcacggctgcgccctggtcgtcaagcccgccgagcagacgccgctcagcgccctgtacctcgcgcagctcgccaagcaggcaggggtcccagacggcgtgatcaacgtcgtgccaggcttcggncngacggcaggagccgcgctggcntctcacatggacgttgacatggtgagtttcaccggatccacggaggtcgggcgccttataatgaaggcctccncggagagcaacnngnagcccgtntacctggagctgggcggcaagtccccgctcatcgtnttnnacgacgccgacctcgacatgnccgtggagctnnccgtcggcgccagcttctttaacaagggagaggcctgcgtcgccgcgagccgcgtctacgtgcaggaacgcgtctacgacaggttcgaggagaggttgccggagaggatgaggagctgggtcgtgggcgacccgttcagcgaccctagcgccgaccagggcccgcaggtggacaaggctcagtatgagagggttctgagctacattgaccatggcnagcgagaaggggccactcttctgactggaggaaggccatgcggtccggaagggaaaggctactacattgagcccacagttttcaccaacgtcaaggaggacatgatcatagcgaaggaggagatcttcggacccgtcatgtgcctgatgaagttcaagacggtggaggaggcgatcgcgagggcgaacgacacgcggtacgggctgggggcgggggtggtgacgcgggacctggacgtggcgaaccgggtggtgaggtcggtgcgcgccggggtggtgtgggtgaactgctacttcgccatgggcagcgactgccccttcggcggccgcaanatgagcggcttcggcaaggacgagggcatgcacgcgctcgacaagtacctggccgtcaagtccgtcgtcaccccgctccgcgcctcgccctggatctgattctctttaatttctggtgtcagtcacccacccncaacacatatacagcagtggtcaaaagatatttatttattgataataaagtagctagctatattgtgcgg

SEQ ID NO: 24521 - protein, 269 aa, Zea mays subsp. mays
  misc_feature (1)..(269): Ceres Seq. ID no. 12435556
  misc_feature (23)..(23): Xaa is any aa, unknown or other
  misc_feature (27)..(27): Xaa is any aa, unknown or other
  misc_feature (28)..(28): Xaa is any aa, unknown or other
  misc_feature (30)..(30): Xaa is any aa, unknown or other
  misc_feature (42)..(42): Xaa is any aa, unknown or other
  misc_feature (43)..(43): Xaa is any aa, unknown or other
  misc_feature (44)..(44): Xaa is any aa, unknown or other
  misc_feature (51)..(51): Xaa is any aa, unknown or other
  misc_feature (54)..(54): Xaa is any aa, unknown or other
  misc_feature (55)..(55): Xaa is any aa, unknown or other
  misc_feature (127)..(127): Xaa is any aa, unknown or other
  misc_feature (237)..(237): Xaa is any aa, unknown or other
MDVDMVSFTGSTEVGRLIMKASXESNXXPXYLELGGKSPLIXXXDADLDMXVEXXVGASFFNKGEACVAASRVYVQERVYDRFEERLPERMRSWVVGDPFSDPSADQGPQVDKAQYERVLSYIDHGXREGATLLTGGRPCGPEGKGYYIEPTVFTNVKEDMIIAKEEIFGPVMCLMKFKTVEEAIARANDTRYGLGAGVVTRDLDVANRVVRSVRAGVVWVNCYFAMGSDCPFGGRXMSGFGKDEGMHALDKYLAVKSVVTPLRASPWI

SEQ ID NO: 24522 - protein, 265 aa, Zea mays subsp. mays
  misc_feature (1)..(265): Ceres Seq. ID no. 12435557
  misc_feature (19)..(19): Xaa is any aa, unknown or other
  misc_feature (23)..(23): Xaa is any aa, unknown or other
  misc_feature (24)..(24): Xaa is any aa, unknown or other
  misc_feature (26)..(26): Xaa is any aa, unknown or other
  misc_feature (38)..(38): Xaa is any aa, unknown or other
  misc_feature (39)..(39): Xaa is any aa, unknown or other
  misc_feature (40)..(40): Xaa is any aa, unknown or other
  misc_feature (47)..(47): Xaa is any aa, unknown or other
  misc_feature (50)..(50): Xaa is any aa, unknown or other
  misc_feature (51)..(51): Xaa is any aa, unknown or other
  misc_feature (123)..(123): Xaa is any aa, unknown or other
  misc_feature (233)..(233): Xaa is any aa, unknown or other
MVSFTGSTEVGRLIMKASXESNXXPXYLELGGKSPLIXXXDADLDMXVEXXVGASFFNKGEACVAASRVYVQERVYDRFEERLPERMRSWVVGDPFSDPSADQGPQVDKAQYERVLSYIDHGXREGATLLTGGRPCGPEGKGYYIEPTVFTNVKEDMIIAKEEIFGPVMCLMKFKTVEEAIARANDTRYGLGAGVVTRDLDVANRVVRSVRAGVVWVNCYFAMGSDCPFGGRXMSGFGKDEGMHALDKYLAVKSVVTPLRASPWI

SEQ ID NO: 24523 - protein, 251 aa, Zea mays subsp. mays
  misc_feature (1)..(251): Ceres Seq. ID no. 12435558
  misc_feature (5)..(5): Xaa is any aa, unknown or other
  misc_feature (9)..(9): Xaa is any aa, unknown or other
  misc_feature (10)..(10): Xaa is any aa, unknown or other
  misc_feature (12)..(12): Xaa is any aa, unknown or other
  misc_feature (24)..(24): Xaa is any aa, unknown or other
  misc_feature (25)..(25): Xaa is any aa, unknown or other
  misc_feature (26)..(26): Xaa is any aa, unknown or other
  misc_feature (33)..(33): Xaa is any aa, unknown or other
  misc_feature (36)..(36): Xaa is any aa, unknown or other
  misc_feature (37)..(37): Xaa is any aa, unknown or other
  misc_feature (109)..(109): Xaa is any aa, unknown or other
  misc_feature (219)..(219): Xaa is any aa, unknown or other
MKASXESNXXPXYLELGGKSPLIXXXDADLDMXVEXXVGASFFNKGEACVAASRVYVQERVYDRFEERLPERMRSWVVGDPFSDPSADQGPQVDKAQYERVLSYIDHGXREGATLLTGGRPCGPEGKGYYIEPTVFTNVKEDMIIAKEEIFGPVMCLMKFKTVEEAIARANDTRYGLGAGVVTRDLDVANRVVRSVRAGVVWVNCYFAMGSDCPFGGRXMSGFGKDEGMHALDKYLAVKSVVTPLRASPWI

SEQ ID NO: 24524 - DNA, 1721 bp, Zea mays subsp. mays
  misc_feature (1)..(1721): Ceres Seq. ID no. 12435567
gcacgagaccattacctagaacatcctaatcgaaaaagtgccatggctgaagcagcgccccacttcgtgctcgtgccgatgctggcgcagggccacttgctccccatgctggacctggcgcgcgtcctcgccagccacggcgcccgtgccacggtggtgctgacgcccgtcaacgccgcgcgcaacagggccttcctggagcaggccgcgggggcggggctcaccatcaacttcgccgagctcgcgttcccggggccagcgctcggcctcgccgcgggctgcgagagggtcgacatgctgcaagacctctccctcatcgtcccgttctacgatgccgtgtggctgctcgccgagccgctcgaggcgtacctcctctcgctgccccggatgccggactgcctcgtctccgactcgttcatggcgtggactgccagcgtcgcgcggcggcacggcatccttcggttcgtggtccacttctcgcccgcgtcctacgtcctcgccgcgcacatcctcgaaacgcgcggcgtctacgaccgcgccgccgacgacttcgaaccgttcgaggtgccggagttccccgtacgcgccgtggtgagcagggctacggcgcaaggggtcttccagtggcctgcaggcatggagaggttccggcgcgacacgctcgatgccgaggccaccgccgacgggatactgttcaacacgtgtgctgccctggaggacgcgttcgtggagcgcttcgcttcggaggtcggcaagaagatttgggcggtcgggccgctgttcctcctcggttccggttccgacgccggcgggatggccgggagaggcaaccgcgcggcggtggacgccgaccaaatcgtgtcctggcttgacgcgcgtccggcggcgtccgtgctctacatcagcttcggcagcatcggccgtctgttcccggctcaggccgccgagctcgccgccggactggaggcgtcgcgcctgccgttcatctggtcggccaaggagacggcgcccggcctcgacgcgggaattcgaggagcgcgtgaaggaccggggcctcgtcgtccacgggtgggcgccccagatgaccatcctgtcgcaccctgccgtgggcggcttcctgacgcactgcggctggaactccatcctggagagcctctgctacggcgtgccgctcatgacctggccgctgttcgtcgaccagttcctgaacgaggcgttggtcgtggacgtgctcggcgccggcgtccgctccggcgccaaggtgccggtgacgcacgtgacggtcgtgaagccaggggaggtgctggaagtgcaggtctggagggacggcgtcgagagggcggtcaccgacctcatggacgagggccccgcgggcgcggcgaggcgggcgagggccaaggagctcgggcaacagatgagggccgcaatggcgaagggtgggtcgtcggacaccgatgtgaggaacttggttcgccacgtcgttgaggtcgcgcggaaaaaggaggagcacgaggacacggctcttgctggaggtgaccaagtgatcacgagcaaggaaaagacgatgaacggcgccggtggaaaacactactgatgaaattcgtgtggtacggtcgtttttggctgaaagaatctctcgagttaagctagctactagccacgcaacccaacttgcatgtaccagcagcaatgacatattatgttatcgtgctttttgtgcg

SEQ ID NO: 24525 - protein, 494 aa, Zea mays subsp. mays
  misc_feature (1)..(494): Ceres Seq. ID no. 12435568
ARDHYLEHPNRKSAMAEAAPHFVLVPMLAQGHLLPMLDLARVLASHGARATVVLTPVNAARNRAFLEQAAGAGLTINFAELAFPGPALGLAAGCERVDMLQDLSLIVPFYDAVWLLAEPLEAYLLSLPRMPDCLVSDSFMAWTASVARRHGILRFVVHFSPASYVLAAHILETRGVYDRAADDFEPFEVPEFPVRAVVSRATAQGVFQWPAGMERFRRDTLDAEATADGILFNTCAALEDAFVERFASEVGKKIWAVGPLFLLGSGSDAGGMAGRGNRAAVDADQIVSWLDARPAASVLYISFGSIGRLFPAQAAELAAGLEASRLPFIWSAKETAPGLDAGIRGAREGPGPRRPRVGAPDDHPVAPCRGRLPDALRLELHPGEPLLRRAAHDLAAVRRPVPERGVGRGRARRRRPLRRQGAGDARDGREARGGAGSAGLEGRRREGGHRPHGRGPRGRGEAGEGQGARATDEGRNGEGWVVGHRCEELGSPRR

SEQ ID NO: 24526 - protein, 480 aa, Zea mays subsp. mays
  misc_feature (1)..(480): Ceres Seq. ID no. 12435569
MAEAAPHFVLVPMLAQGHLLPMLDLARVLASHGARATVVLTPVNAARNRAFLEQAAGAGLTINFAELAFPGPALGLAAGCERVDMLQDLSLIVPFYDAVWLLAEPLEAYLLSLPRMPDCLVSDSFMAWTASVARRHGILRFVVHFSPASYVLAAHILETRGVYDRAADDFEPFEVPEFPVRAVVSRATAQGVFQWPAGMERFRRDTLDAEATADGILFNTCAALEDAFVERFASEVGKKIWAVGPLFLLGSGSDAGGMAGRGNRAAVDADQIVSWLDARPAASVLYISFGSIGRLFPAQAAELAAGLEASRLPFIWSAKETAPGLDAGIRGAREGPGPRRPRVGAPDDHPVAPCRGRLPDALRLELHPGEPLLRRAAHDLAAVRRPVPERGVGRGRARRRRPLRRQGAGDARDGREARGGAGSAGLEGRRREGGHRPHGRGPRGRGEAGEGQGARATDEGRNGEGWVVGHRCEELGSPRR

SEQ ID NO: 24527 - protein, 468 aa, Zea mays subsp. mays
  misc_feature (1)..(468): Ceres Seq. ID no. 12435570
MLAQGHLLPMLDLARVLASHGARATVVLTPVNAARNRAFLEQAAGAGLTINFAELAFPGPALGLAAGCERVDMLQDLSLIVPFYDAVWLLAEPLEAYLLSLPRMPDCLVSDSFMAWTASVARRHGILRFVVHFSPASYVLAAHILETRGVYDRAADDFEPFEVPEFPVRAVVSRATAQGVFQWPAGMERFRRDTLDAEATADGILFNTCAALEDAFVERFASEVGKKIWAVGPLFLLGSGSDAGGMAGRGNRAAVDADQIVSWLDARPAASVLYISFGSIGRLFPAQAAELAAGLEASRLPFIWSAKETAPGLDAGIRGAREGPGPRRPRVGAPDDHPVAPCRGRLPDALRLELHPGEPLLRRAAHDLAAVRRPVPERGVGRGRARRRRPLRRQGAGDARDGREARGGAGSAGLEGRRREGGHRPHGRGPRGRGEAGEGQGARATDEGRNGEGWVVGHRCEELGSPRR

SEQ ID NO: 24528 - DNA, 1829 bp, Zea mays subsp. mays
  misc_feature (1)..(1829): Ceres Seq. ID no. 12435597
aacgtgcgggactggtctctcccgaataagttgtcacccacacagggcacagcttggagttttcctgattgcattaccctgtccaaactgttcttgccaggaacattattcctcctcgtgttccatcttctaaacaaactgcatcctgccatgattcgatgatcgacctcatgtcgctagcactgccctggccagcagaccggcacggcgatgcgatcggtgcacagagcggtggcgcgagtggtggtgtgggttgcggcgccggcgatgatccgcgcggggctgacgacgccggtgatgacggtgctgctggtgtcgttcctgctggagtacctgcccaagatctaccacgcggcgcgcctgctccggcggatgcagaggcagtctggctacatcttcggcaccatctggtggggcatcgcgctcaacctcatggcctacttcgtcgccgcccatgctgtgggcgcgtgctggtacctgctcggcgtccagcgggccagcaagtgcctgaaagagcagtgcctccaggcggctgggtgcgcgcgcggcagcgcggtggcctgcgcggcgccgctgtactacggcggctccccgtctcccggagtcgtcggcggcgacaggctcgcctgggccgggaacgcgcaggcccggggcacgtgcctcgccagcggcgacaactaccagtacggcgcgtacacgtggacggtgatgctggtggcgaacccgagccgggtggagcggatgctgctccccatcttctggggcctcatgacgctcagcacgttcggcaacctggagagcacgacggagtggctggagatcgtgttcaacatcatcaccatcacgggcgggctcgtcctcgtcaccatgctcatcggcaacatcaaggtgttcctgaacgcgaccacgtccaagaagcaggccatgcacacgcggctgcgcggcgtggagtggtggatgaagcgcaagaaactgccgcggagcttccgcggccgggtgcgccagttcgagcgccagcggtgggccgccacgcgcggcgtcgacgagtgccaaatcgtgcgcgacctccccgagggcctccgccgggacatcaagtaccacctctgcctcgacctcgtccgccaggtcccattcttccagcacatggacgacctcgtgctcgagaacatctgcgacagggtgaaatccctcatctttcccaagggagaaaccatcgtgagggagggcgacgtggtgcagcggatgctgttcatcgtgcggggccacctgcagtgcagccaggtgctgcggaacggcgcgacgagcagctgcacgctggggcctggcaacttcagcggcgacgagctgctgtcgtggtgcctgcgccgcccgttcctggaacgcctcccgacgtcgtcggcgacgctggtgacgctggagagcaccgaggtgttcggcctggacgccgccgacgtcaagtacgtcacgcagcacttccgctacaccttcaccaacgacaaggtgcgccgcagcgcgcgctactactcgcccggctggcgtacctgggcggccgtcgcccgttcagctggcctggaggaggtacaagcaccgcaagacgctctcatcgctctccttcatccgcccgcggcgcccgctgtcccgctgctcctcgctcggggaggagaagctccgcctgtacacggccatcctcacctcgcccaagcccaaccaggacgacgacttctagctagcttatagctaggccgttccaggccggattctcttctcctcagcgaggaggagtatatatatcaaacaacatgcatttattagtagtattcattactctc

SEQ ID NO: 24529 - protein, 523 aa, Zea mays subsp. mays
  misc_feature (1)..(523): Ceres Seq. ID no. 12435598
MIDLMSLALPWPADRHGDAIGAQSGGASGGVGCGAGDDPRGADDAGDDGAAGVVPAGVPAQDLPRGAPAPADAEAVWLHLRHHLVGHRAQPHGLLRRRPCCGRVLVPARRPAGQQVPERAVPPGGWVRARQRGGLRGAAVLRRLPVSRSRRRRQARLGRERAGPGHVPRQRRQLPVRRVHVDGDAGGEPEPGGADAAPHLLGPHDAQHVRQPGEHDGVAGDRVQHHHHHGRARPRHHAHRQHQGVPERDHVQEAGHAHAAARRGVVDEAQETAAELPRPGAPVRAPAVGRHARRRRVPNRARPPRGPPPGHQVPPLPRPRPPGPILPAHGRPRAREHLRQGEIPHLSQGRNHREGGRRGAADAVHRAGPPAVQPGAAERRDEQLHAGAWQLQRRRAAVVVPAPPVPGTPPDVVGDAGDAGEHRGVRPGRRRRQVRHAALPLHLHQRQGAPQRALLLARLAYLGGRRPFSWPGGGTSTARRSHRSPSSARGARCPAAPRSGRRSSACTRPSSPRPSPTRTTTSS

SEQ ID NO: 24530 - protein, 519 aa, Zea mays subsp. mays
  misc_feature (1)..(519): Ceres Seq. ID no. 12435599
MSLALPWPADRHGDAIGAQSGGASGGVGCGAGDDPRGADDAGDDGAAGVVPAGVPAQDLPRGAPAPADAEAVWLHLRHHLVGHRAQPHGLLRRRPCCGRVLVPARRPAGQQVPERAVPPGGWVRARQRGGLRGAAVLRRLPVSRSRRRRQARLGRERAGPGHVPRQRRQLPVRRVHVDGDAGGEPEPGGADAAPHLLGPHDAQHVRQPGEHDGVAGDRVQHHHHHGRARPRHHAHRQHQGVPERDHVQEAGHAHAAARRGVVDEAQETAAELPRPGAPVRAPAVGRHARRRRVPNRARPPRGPPPGHQVPPLPRPRPPGPILPAHGRPRAREHLRQGEIPHLSQGRNHREGGRRGAADAVHRAGPPAVQPGAAERRDEQLHAGAWQLQRRRAAVVVPAPPVPGTPPDVVGDAGDAGEHRGVRPGRRRRQVRHAALPLHLHQRQGAPQRALLLARLAYLGGRRPFSWPGGGTSTARRSHRSPSSARGARCPAAPRSGRRSSACTRPSSPRPSPTRTTTSS

SEQ ID NO: 24531 - protein, 508 aa, Zea mays subsp. mays
  misc_feature (1)..(508): Ceres Seq. ID no. 12435600
MRSVHRAVARVVVWVAAPAMIRAGLTTPVMTVLLVSFLLEYLPKIYHAARLLRRMQRQSGYIFGTIWWGIALNLMAYFVAAHAVGACWYLLGVQRASKCLKEQCLQAAGCARGSAVACAAPLYYGGSPSPGVVGGDRLAWAGNAQARGTCLASGDNYQYGAYTWTVMLVANPSRVERMLLPIFWGLMTLSTFGNLESTTEWLEIVFNIITITGGLVLVTMLIGNIKVFLNATTSKKQAMHTRLRGVEWWMKRKKLPRSFRGRVRQFERQRWAATRGVDECQIVRDLPEGLRRDIKYHLCLDLVRQVPFFQHMDDLVLENICDRVKSLIFPKGETIVREGDVVQRMLFIVRGHLQCSQVLRNGATSSCTLGPGNFSGDELLSWCLRRPFLERLPTSSATLVTLESTEVFGLDAADVKYVTQHFRYTFTNDKVRRSARYYSPGWRTWAAVARSAGLEEVQAPQDALIALLHPPAAPAVPLLLARGGEAPPVHGHPHLAQAQPGRRLLASL

SEQ ID NO: 24532 - DNA, 1415 bp, Zea mays subsp. mays
  misc_feature (1)..(1415): Ceres Seq. ID no. 12435621
tcgaaaaacccccacgccccaccccaccaaacaatggcgccggcggcgacttccacagcctctgcgccctcctccttccactccaccggtaggcatagggccagggtcggggcccggccatcgctcgtctctctccgcgtcagagcagccaatcccaacgttaccgccgatcccgcaccggccttccagtccgtcacggccttcgcgccagccaccgtcgccaacctcggcccgggcttcgacttcctcggatgcgccgtcgccgacgcctccctctccctgggtgacaccgtcaccgcaaccctggacccgtcactcccgcccgccaccgtctccatcgcctccgtcacatccccgtcccgccccaacctcgccgagcgcctctctagggacccgctccgcaactgcgcgggcgtcgccgccatcgccgcgctccgcgccctcggcgtccgctcccacgccgtgtccatccacctcaccaagggcctgccgctcggctcggggctcggctcctccgcggcctccgccgccgccgccgccaaggccgtcgacgccctcttcggctcgcgcctcggccgcgacgacctcgtcctcgcggggctcgagtcggagaaggccgtcagcggcttccacgccgacaacatcgcccccgccatcctcggcggcttcgtcctcgtccgcagctacgacccctttcacctcgtcccgctttccttcccgccagcgctccgcctccacttcgtcctggtcacccccgacttcgaggcgcccacgagcaagatgcgcgccgcgctgcccaggcaggtcgacgtccagcagcacgtgcgcaactccagccaggcagcggcgctcgtggcggcggtgctgcagggggacgcgggcctcatcggctccgcgatgtcgtccgacggcatcgtggagcccaccagggcacccctcatacctggcatggcggccgtaaaggcggcggccctgcaagctggagcgctgggctgcacaattagcggcgcgggccccacagtggtggccgtcatccaaggggaggaaaggggggaggaggttgcccgcaggatggtggacgcgttctggagcgcaggcaagctcaaggcgacagcaaccgtcgcgcagctcgatacccttggtgccagggtcatcgccacgtcatccttgaactagcaaaagattcggaaagtggtactgcaattgtatcaccaaacaaggaagaatgaaggggaaccccatggatttgtatgttttctcttctttcttgcatctttaggtggttaattggctttggaataagtgagatggaggacatcgctagaacaattctgttccgtgggctgtaatttcaatttgggctggtttcttcatcatgccatggataattatgaataaatttgaggtagtttgtt

SEQ ID NO: 24533 - protein, 391 aa, Zea mays subsp. mays
  misc_feature (1)..(391): Ceres Seq. ID no. 12435622
SKNPHAPPHQTMAPAATSTASAPSSFHSTGRHRARVGARPSLVSLRVRAANPNVTADPAPAFQSVTAFAPATVANLGPGFDFLGCAVADASLSLGDTVTATLDPSLPPATVSIASVTSPSRPNLAERLSRDPLRNCAGVAAIAALRALGVRSHAVSIHLTKGLPLGSGLGSSAASAAAAAKAVDALFGSRLGRDDLVLAGLESEKAVSGFHADNIAPAILGGFVLVRSYDPFHLVPLSFPPALRLHFVLVTPDFEAPTSKMRAALPRQVDVQQHVRNSSQAAALVAAVLQGDAGLIGSAMSSDGIVEPTRAPLIPGMAAVKAAALQAGALGCTISGAGPTVVAVIQGEERGEEVARRMVDAFWSAGKLKATATVAQLDTLGARVIATSSLN

SEQ ID NO: 24534 - protein, 380 aa, Zea mays subsp. mays
  misc_feature (1)..(380): Ceres Seq. ID no. 12435623
MAPAATSTASAPSSFHSTGRHRARVGARPSLVSLRVRAANPNVTADPAPAFQSVTAFAPATVANLGPGFDFLGCAVADASLSLGDTVTATLDPSLPPATVSIASVTSPSRPNLAERLSRDPLRNCAGVAAIAALRALGVRSHAVSIHLTKGLPLGSGLGSSAASAAAAAKAVDALFGSRLGRDDLVLAGLESEKAVSGFHADNIAPAILGGFVLVRSYDPFHLVPLSFPPALRLHFVLVTPDFEAPTSKMRAALPRQVDVQQHVRNSSQAAALVAAVLQGDAGLIGSAMSSDGIVEPTRAPLIPGMAAVKAAALQAGALGCTISGAGPTVVAVIQGEERGEEVARRMVDAFWSAGKLKATATVAQLDTLGARVIATSSLN

SEQ ID NO: 24535 - protein, 319 aa, Zea mays subsp. mays
  misc_feature (1)..(319): Ceres Seq. ID no. 12435624
RKTPTPHPTKQWRRRRLPQPLRPPPSTPPVGIGPGSGPGHRSSLSASEQPIPTLPPIPHRPSSPSRPSRQPPSPTSARASTSSDAPSPTPPSPWVTPSPQPWTRHSRPPPSPSPPSHPRPAPTSPSASLGTRSATARASPPSPRSAPSASAPTPCPSTSPRACRSARGSAPPRPPPPPPPRPSTPSSARASAATTSSSRGSSRRRPSAASTPTTSPPPSSAASSSSAATTPFTSSRFPSRQRSASTSSWSPPTSRRPRARCAPRCPGRSTSSSTCATPARQRRSWRRCCRGTRASSAPRCRPTASWSPPGHPSYLAWRP

SEQ ID NO: 24536 - DNA, 1651 bp, Zea mays subsp. mays
  misc_feature (1)..(1651): Ceres Seq. ID no. 12435629
gtcaactaaactctagccagtgagtcgatgatgggtcggacgggtgacggccgccgccgcgacgtcgacggccggctggaggcgctgctctctggcgccggcggcgaggagccgtggctccggcgcgtggcgctcgcgacggctctggagctgcggctgctggcgccctggccgcgccggccgtggtggtctacatgctcatcatcgtcatgtcgtcgaccacgcagatcgtgtgcggccagctcggcaacgtccagctcgccgccgcctccctcggcaacaacggcatccaggtcttcgcctacggcatcatgctggggatgggcagcgcggtggagacgctgtgcgggcaggcgtacggcgccgagaagtacgagatgctgggcgtgtacctgcagcgctcgacggtgctgctcacggccaccggcgtgccgctcgccgccgtgtacgcgctgtcggagccgctgctgctgctgctggggcagtcgcctgagatcgccggcgccgccgccgagttcgcctacggcctcgtcccgcagatcttcgcgtacgccgccaacttccccatccagaagttcctgcaggcgcagagcatcgtggcgcccagcgcctacatcctggcggccagcttcgcgctccacgtgccgctcagctggctcgccgtctacgggctgggcctcggcctgctcggggcctcgctcacgctcagcctcacgtggtgggtgctggtcctggcccagttcgcgtacatcgtgtggagcccgcgctgccgggccacctggaccgggtttacgtgggctgccttcgccgacctgcccgggttcgccggcctgtccgcggcgtcggctgtcatgctggcgctcgaggtctggtacttccaggtgctcatcctcctcgccggcgtgctgcctgacccgcagatcgctctggactcgctaacggtctgcacgtcgatccagtcatgggtgttcatgatctctgtgggcttcaatgcagctgccagcgtgagggttgggaatgagctgggcgccggcaaccccaggtccgccgcgttctctgcgtgggtggtcaccgccctgtcggcgttcgtctctgggatagctggcctcgtcactttcctgctcagggacaagctcagctacatcttcaccggtggcgaggccgtctcgcgcgccgtcgtcgacttgtgcccgctgctcgttgggaccattgtgctctgcgggatccagcccgtgctatcaggtgtggccgttggctgcgggtggcaagccatggttgcctacatcaacgtcggatgctactacttcatcggcgtacccctcgggcgtgctcctcggattcaagttcggtttcgggatcaagggactgtggggaggcatgattgggggtaccctcatccaaacacttgctttgatctggatcacgttaagaactgactggaacaaggaggtcgaggaagcgcggaaaagattggataagtgggacgacacaaggcagcctcttctcgcaagcaaggagtgatgtatgatggtacaggagtggatgaagaagattcagtaggcttctgctagctgatccagtctgaaatcatcttgtagtcgccaccgctaactgcaattcagggatgtactaatgcagagcttctctgggc

SEQ ID NO: 24537 - protein, 413 aa, Zea mays subsp. mays
  misc_feature (1)..(413): Ceres Seq. ID no. 12435630
MLIIVMSSTTQIVCGQLGNVQLAAASLGNNGIQVFAYGIMLGMGSAVETLCGQAYGAEKYEMLGVYLQRSTVLLTATGVPLAAVYALSEPLLLLLGQSPEIAGAAAEFAYGLVPQIFAYAANFPIQKFLQAQSIVAPSAYILAASFALHVPLSWLAVYGLGLGLLGASLTLSLTWWVLVLAQFAYIVWSPRCRATWTGFTWAAFADLPGFAGLSAASAVMLALEVWYFQVLILLAGVLPDPQIALDSLTVCTSIQSWVFMISVGFNAAASVRVGNELGAGNPRSAAFSAWVVTALSAFVSGIAGLVTFLLRDKLSYIFTGGEAVSRAVVDLCPLLVGTIVLCGIQPVLSGVAVGCGWQAMVAYINVGCYYFIGVPLGRAPRIQVRFRDQGTVGRHDWGYPHPNTCFDLDHVKN

SEQ ID NO: 24538 - protein, 408 aa, Zea mays subsp. mays
  misc_feature (1)..(408): Ceres Seq. ID no. 12435631
MSSTTQIVCGQLGNVQLAAASLGNNGIQVFAYGIMLGMGSAVETLCGQAYGAEKYEMLGVYLQRSTVLLTATGVPLAAVYALSEPLLLLLGQSPEIAGAAAEFAYGLVPQIFAYAANFPIQKFLQAQSIVAPSAYILAASFALHVPLSWLAVYGLGLGLLGASLTLSLTWWVLVLAQFAYIVWSPRCRATWTGFTWAAFADLPGFAGLSAASAVMLALEVWYFQVLILLAGVLPDPQIALDSLTVCTSIQSWVFMISVGFNAAASVRVGNELGAGNPRSAAFSAWVVTALSAFVSGIAGLVTFLLRDKLSYIFTGGEAVSRAVVDLCPLLVGTIVLCGIQPVLSGVAVGCGWQAMVAYINVGCYYFIGVPLGRAPRIQVRFRDQGTVGRHDWGYPHPNTCFDLDHVKN

SEQ ID NO: 24539 - protein, 374 aa, Zea mays subsp. mays
  misc_feature (1)..(374): Ceres Seq. ID no. 12435632
MLGMGSAVETLCGQAYGAEKYEMLGVYLQRSTVLLTATGVPLAAVYALSEPLLLLLGQSPEIAGAAAEFAYGLVPQIFAYAANFPIQKFLQAQSIVAPSAYILAASFALHVPLSWLAVYGLGLGLLGASLTLSLTWWVLVLAQFAYIVWSPRCRATWTGFTWAAFADLPGFAGLSAASAVMLALEVWYFQVLILLAGVLPDPQIALDSLTVCTSIQSWVFMISVGFNAAASVRVGNELGAGNPRSAAFSAWVVTALSAFVSGIAGLVTFLLRDKLSYIFTGGEAVSRAVVDLCPLLVGTIVLCGIQPVLSGVAVGCGWQAMVAYINVGCYYFIGVPLGRAPRIQVRFRDQGTVGRHDWGYPHPNTCFDLDHVKN

SEQ ID NO: 24540 - DNA, 1573 bp, Zea mays subsp. mays
  misc_feature (1)..(1573): Ceres Seq. ID no. 12435633
gcacgagaccattacctagaacatcctaatcgaaaagtaaactaaccaccaaagccgaagaaggcggcttgccctgcccgccgccttggtgccgcgcgcgccatggccaagagcaagtcgtccgccaaggccggccccccgctcctcggcaagtacgagctcggccacctcctcggccggggcaacttcgccaaggtataccacgcgcgctgcctcggcggaggcgaccccgtggccgtgaaggtgctggacaaggccgggctggccgccacgggcatggcgtcgcggctcctgcgcgaggtgtccgccatgcgccgcctgagccaccccaacgtgctccgcctccacgaggtgctggcgacgcgctccaaggtgtacctcgtgatggagctggccccgggcggggacctcctgtcccggctggcgtcgctgccgtcccgcaggctccccgagcacgcggcgcggcgcgtgttcctccagctggcgtcggcgctcatctacagccacgcgcgcggggtgttccaccgcgacgtgaagccgcagaacgtgctgctggacgccgagggcaacctcaaggtgtccgacttcggcctcgcggcgctcccggactcggtccgcgacgacgggcgcctgcacacggcgtgcggcaccccggcgttcgcggcgcccgaggtgctccggcgcagggcctacgacggcgccaaggcggacgcgtggtcctgcggggtcatcctcttcgtcctcctcgcgggccacctccccttcgacgacgccaacatcgccgacatgtgccgcagggcgcaccgccgggagtacacggtcccgcggtgggtgtcgcagccggcgcgccgcctcgtggcgcgcctgctggacccgaacccggcgacgcgcctcgccgtcgcggagctcgccggccacccctggttcaagcgctcgctcagcgtggactcccagctcggcggcctcctggacggccaggcggagcgcgagctggcgttccaggccccgccggcgctgaacgccttcgacatcatctccatgtccccagggctggacctgtcgggcctgttcggcgagggcaggcgccgccgcgagaagcggttcatgacgacggcgtccccggagcgggcggtggagcggctcgcgcaggccggcgcgaggctcggctacttcattgtggggaagaagggggccgagcgcctgccgctgggcgtcctgccgggcctcgtggccatgtcgatggagatgtcggaggtgtcgccggagctgatgctggtggagctgaggctggagggcggccacggccgacgaggacgaggcgttcgggtgggaggagctccgggttgagctgggggacgtggtaacagcatggcacgtgagtgaagaaggttaaaaattcgcaagaggaaatgcgagaacgatttcgcaggtgtatcagtgtagtatgtatagccgtatagcaagtgcgcatctcatctcgtgtacgtgaaattagttggttaggacgaacagcagcgtgtgatgttggggattaactagactggtagtttcaatcaaatgtgtgatgtgtggg

SEQ ID NO: 24541 - protein, 414 aa, Zea mays subsp. mays
  misc_feature (1)..(414): Ceres Seq. ID no. 12435634
MAKSKSSAKAGPPLLGKYELGHLLGRGNFAKVYHARCLGGGDPVAVKVLDKAGLAATGMASRLLREVSAMRRLSHPNVLRLHEVLATRSKVYLVMELAPGGDLLSRLASLPSRRLPEHAARRVFLQLASALIYSHARGVFHRDVKPQNVLLDAEGNLKVSDFGLAALPDSVRDDGRLHTACGTPAFAAPEVLRRRAYDGAKADAWSCGVILFVLLAGHLPFDDANIADMCRRAHRREYTVPRWVSQPARRLVARLLDPNPATRLAVAELAGHPWFKRSLSVDSQLGGLLDGQAERELAFQAPPALNAFDIISMSPGLDLSGLFGEGRRRREKRFMTTASPERAVERLAQAGARLGYFIVGKKGAERLPLGVLPGLVAMSMEMSEVSPELMLVELRLEGGHGRRGRGVRVGGAPG

SEQ ID NO: 24542 - protein, 356 aa, Zea mays subsp. mays
  misc_feature (1)..(356): Ceres Seq. ID no. 12435635
MASRLLREVSAMRRLSHPNVLRLHEVLATRSKVYLVMELAPGGDLLSRLASLPSRRLPEHAARRVFLQLASALIYSHARGVFHRDVKPQNVLLDAEGNLKVSDFGLAALPDSVRDDGRLHTACGTPAFAAPEVLRRRAYDGAKADAWSCGVILFVLLAGHLPFDDANIADMCRRAHRREYTVPRWVSQPARRLVARLLDPNPATRLAVAELAGHPWFKRSLSVDSQLGGLLDGQAERELAFQAPPALNAFDIISMSPGLDLSGLFGEGRRRREKRFMTTASPERAVERLAQAGARLGYFIVGKKGAERLPLGVLPGLVAMSMEMSEVSPELMLVELRLEGGHGRRGRGVRVGGAPG

SEQ ID NO: 24543 - protein, 345 aa, Zea mays subsp. mays
  misc_feature (1)..(345): Ceres Seq. ID no. 12435636
MRRLSHPNVLRLHEVLATRSKVYLVMELAPGGDLLSRLASLPSRRLPEHAARRVFLQLASALIYSHARGVFHRDVKPQNVLLDAEGNLKVSDFGLAALPDSVRDDGRLHTACGTPAFAAPEVLRRRAYDGAKADAWSCGVILFVLLAGHLPFDDANIADMCRRAHRREYTVPRWVSQPARRLVARLLDPNPATRLAVAELAGHPWFKRSLSVDSQLGGLLDGQAERELAFQAPPALNAFDIISMSPGLDLSGLFGEGRRRREKRFMTTASPERAVERLAQAGARLGYFIVGKKGAERLPLGVLPGLVAMSMEMSEVSPELMLVELRLEGGHGRRGRGVRVGGAPG

SEQ ID NO: 24544 - DNA, 1909 bp, Zea mays subsp. mays
  misc_feature (1)..(1909): Ceres Seq. ID no. 12435641
atgcatcgggaacccttacacaggtagataccacaaccctgtgcagagttcttgcattctcgtcaaggtgacaggaacgacataggaaatggaggccaccctgtgcccaaagccccatttcgtggtcatcccatggccagccaccagccacatgatccccatcgtggacatcggctgcctcctcgccgcgcacggcgccgcggtcacgatcatcaccacgccctccagctcgcaactcgtccagagccgcgtggaccgcgccgggcaaggctcagcgggggtcacggtcaccgcgatcccgttcccgggcgcggaggccggcctgccggacggctgcgagaggacggaccacatcccctcccctgacctcgtgcccaacttcttcgtcgccaccgcgcggttcggcgaggccgtggcgcggcactgccgccgcctgcccacggccacggcggcgcacccccggccgagctgcgtcgtcgccgggatgtgccacacgtgggcgcacggcgtggcgcgcgagctcggcgccccctgcttcatcttccacggcttctgcgcgttcgctctgctgtgctgcgagtacctcaacacgcacaggccgcacgaggcggtcgggtcgccggacgagctcttcgacctccccgccctgccgccgttcgagttcaggttcgccaggaggcagctgccgatccacttccagccgtcttcctccatcccggaggaccgccaccgggagctccggaagttcgagctggccgtggacggcatcgtcgtgaacagcttcgaggagctggagcacggctcggtttcgcgcctcgcggcggccacgggcaaggccgtgctctccgtcggccccgtctcgctgtgcggcgccgccgcacctcctagcctcctcgactcgcgggccaactcggacgatgccaggctgtgcatggcgtggctggacgccaagagagccgactccgttctctacgtcagcttcggcagcgccgggcgcatgcctccagcgcagctgatacagctcgggctggcgctcgtgtcgtgcccctggcctgtcctttgggtcatcaagggcgcagacacgttgcccgatgacgtcaacgagtggttgcagcgcaacaccgatggaagcggcctcccggagagccagtgtcttgcgcttcgcgggtgggcgccgcaggtcgccatcctggagcacccggccgtcggcggctttctgacgcactgcgggtggggctcgacgctggagagcgtcgccgcgggcgtgcccatggccacctggccgttctccgccgagcagttcctgaacgagaagttgatcgtccacgtgcttggcatcggattgtctgtcggcgtgacgaagcccacggagagcgtgctgaccggtgccaaagacggcggtggcaaggcggacgcagatgtgggaatggaacaggtgaagcaagccttggatatgctcatggatggaggggcggatggggaggcaaggaagacgaaagctaaggaactgaaggccaaatcaaagactgctctggagcatggaggatcgtcatatatgaacctggagaagctgatacagtttggtgcttgaaaatggagtggtcgtggactcgtggtctgtttcggcacccaaacttagtttatttctccctaataaaggttaataaactaggactgcaagcaaaacgtggtacatgtaggtttcaggaacgctgcaggccgggcaaactttgtccaggattgcgagtggacaggacaggagcagaggaaaaacggcaacagaagcgacaaaatgaagagtaacaaagagccgttggattgaagatcaatgactcatgtgcgttgcctaagaattagacatatagtcatatgagcgtcttctctatgatacctgaggtttcttcgattc

SEQ ID NO: 24545 - protein, 500 aa, Zea mays subsp. mays
  misc_feature (1)..(500): Ceres Seq. ID no. 12435642
MEATLCPKPHFVVIPWPATSHMIPIVDIGCLLAAHGAAVTIITTPSSSQLVQSRVDRAGQGSAGVTVTAIPFPGAEAGLPDGCERTDHIPSPDLVPNFFVATARFGEAVARHCRRLPTATAAHPRPSCVVAGMCHTWAHGVARELGAPCFIFHGFCAFALLCCEYLNTHRPHEAVGSPDELFDLPALPPFEFRFARRQLPIHFQPSSSIPEDRHRELRKFELAVDGIVVNSFEELEHGSVSRLAAATGKAVLSVGPVSLCGAAAPPSLLDSRANSDDARLCMAWLDAKRADSVLYVSFGSAGRMPPAQLIQLGLALVSCPWPVLWVIKGADTLPDDVNEWLQRNTDGSGLPESQCLALRGWAPQVAILEHPAVGGFLTHCGWGSTLESVAAGVPMATWPFSAEQFLNEKLIVHVLGIGLSVGVTKPTESVLTGAKDGGGKADADVGMEQVKQALDMLMDGGADGEARKTKAKELKAKSKTALEHGGSSYMNLEKLIQFGA

SEQ ID NO: 24546 - protein, 479 aa, Zea mays subsp. mays
  misc_feature (1)..(479): Ceres Seq. ID no. 12435643
MIPIVDIGCLLAAHGAAVTIITTPSSSQLVQSRVDRAGQGSAGVTVTAIPFPGAEAGLPDGCERTDHIPSPDLVPNFFVATARFGEAVARHCRRLPTATAAHPRPSCVVAGMCHTWAHGVARELGAPCFIFHGFCAFALLCCEYLNTHRPHEAVGSPDELFDLPALPPFEFRFARRQLPIHFQPSSSIPEDRHRELRKFELAVDGIVVNSFEELEHGSVSRLAAATGKAVLSVGPVSLCGAAAPPSLLDSRANSDDARLCMAWLDAKRADSVLYVSFGSAGRMPPAQLIQLGLALVSCPWPVLWVIKGADTLPDDVNEWLQRNTDGSGLPESQCLALRGWAPQVAILEHPAVGGFLTHCGWGSTLESVAAGVPMATWPFSAEQFLNEKLIVHVLGIGLSVGVTKPTESVLTGAKDGGGKADADVGMEQVKQALDMLMDGGADGEARKTKAKELKAKSKTALEHGGSSYMNLEKLIQFGA

SEQ ID NO: 24547 - protein, 368 aa, Zea mays subsp. mays
  misc_feature (1)..(368): Ceres Seq. ID no. 12435644
MCHTWAHGVARELGAPCFIFHGFCAFALLCCEYLNTHRPHEAVGSPDELFDLPALPPFEFRFARRQLPIHFQPSSSIPEDRHRELRKFELAVDGIVVNSFEELEHGSVSRLAAATGKAVLSVGPVSLCGAAAPPSLLDSRANSDDARLCMAWLDAKRADSVLYVSFGSAGRMPPAQLIQLGLALVSCPWPVLWVIKGADTLPDDVNEWLQRNTDGSGLPESQCLALRGWAPQVAILEHPAVGGFLTHCGWGSTLESVAAGVPMATWPFSAEQFLNEKLIVHVLGIGLSVGVTKPTESVLTGAKDGGGKADADVGMEQVKQALDMLMDGGADGEARKTKAKELKAKSKTALEHGGSSYMNLEKLIQFGA

SEQ ID NO: 24548 - DNA, 1694 bp, Zea mays subsp. mays
  misc_feature (1)..(1694): Ceres Seq. ID no. 12435649
aaccacgcaccagcagcagcgaggagctagagcagcggcagagcgcgcggcgcacaccacgcatcgtacgtcctagctcacgatggcgggcgcctggtccttgctcgcgctcgccctatcgctctgctccgtcgcggccgtcgcggtgcagcaggtgaacacggtggccgcggcgcagcaggcggcggaccgggtggcggggctcccggggcagccgcccgtggggttcgcgcagtacgccggctacgtgaccgtgaacgagacgcacggccgcgcgctcttctactggttcttcgaggccaccgcgtcgcccgacaagaagccgctcgtgctctggctcaacggcgggcccgggtgctcgtcgattgggtacggggaggcggaggagctgggtcccttcctggtgcagaagggcaagccggagctcagatggaacaactactcctggaacacagaggccaaccttatgttcctggagtccccggtgggcgtcggcttctcctacacaaacacgagctccgacctgctgcaactcggcgacaagatcaccgctgacgacgcttacaagttcctgctcaactggttcaagaggttcccgcagtacaggtcccacgacttctacatcgccggcgagagctacgccgggcactacgtcccgcagctgtcggagaagatcttcgacggcaacagggcggggcccaaggagagctacgtcaacctcaagggcctgatggtcgggaacgcgctcatggacgacgagacggaccagacgggcatggtcgactacgcctgggaccacgccgtcatctccgaccgggtgtacgccgacgtcaaggccaggtgcgacttcagcatggccaacgtcaccgacgcctgcaacgccgcgctccaggagtacttcgccgtgtaccgcctcatcgacatgtacagcctctacaccccggtctgcaccgacgacccggccggcgcgtcggcgttgccgtcctcctacgacgcgcgcggccaccggaaggtcgccgtccacggcgccgcccccaggatcttctccaaataccgaggatggatcatgaagccggcgggctacgacccctgcacggcggagtacgcggagacctacttcaaccggcccgacgtccaggcggcgctgcacgcgaacgtgaccaagatcggctacaactggacgcactgcagcgatgtgatcaacacttggaacgacgccgccttctccaccctccccaccatccgcaagctcgtcgccagcggcctcagggtgtgggtcttcagcggcgacaccgacgggaggatccccgtgacgtccacgaggctcaccctcaacaagctagggctcaagaccatccaggagtggacgccgtggtacgaccatctgcaggttggtggatggacggtcgtctatgagggcctgacgttcgtcaccatccgcggagccggacacgaggtgcctctgcacgcgccacggcaggcgctgacgctcttcagcaacttcctggcaggcaccaagatgcctccaacggcgttcccctagtttcaaaagaatttaaaaaaggtgcctcctcttgcccggcaaagccggctgatatgtttctttccccccttctcgcttctactaaagttgtaagtgtaattcgattggaaaaaagttcagaataaaagtcatagtgctgacctcaatgctc

SEQ ID NO: 24549 - protein, 486 aa, Zea mays subsp. mays
  misc_feature (1)..(486): Ceres Seq. ID no. 12435650
MAGAWSLLALALSLCSVAAVAVQQVNTVAAAQQAADRVAGLPGQPPVGFAQYAGYVTVNETHGRALFYWFFEATASPDKKPLVLWLNGGPGCSSIGYGEAEELGPFLVQKGKPELRWNNYSWNTEANLMFLESPVGVGFSYTNTSSDLLQLGDKITADDAYKFLLNWFKRFPQYRSHDFYIAGESYAGHYVPQLSEKIFDGNRAGPKESYVNLKGLMVGNALMDDETDQTGMVDYAWDHAVISDRVYADVKARCDFSMANVTDACNAALQEYFAVYRLIDMYSLYTPVCTDDPAGASALPSSYDARGHRKVAVHGAAPRIFSKYRGWIMKPAGYDPCTAEYAETYFNRPDVQAALHANVTKIGYNWTHCSDVINTWNDAAFSTLPTIRKLVASGLRVWVFSGDTDGRIPVTSTRLTLNKLGLKTIQEWTPWYDHLQVGGWTVVYEGLTFVTIRGAGHEVPLHAPRQALTLFSNFLAGTKMPPTAFP

SEQ ID NO: 24550 - protein, 358 aa, Zea mays subsp. mays
  misc_feature (1)..(358): Ceres Seq. ID no. 12435651
MFLESPVGVGFSYTNTSSDLLQLGDKITADDAYKFLLNWFKRFPQYRSHDFYIAGESYAGHYVPQLSEKIFDGNRAGPKESYVNLKGLMVGNALMDDETDQTGMVDYAWDHAVISDRVYADVKARCDFSMANVTDACNAALQEYFAVYRLIDMYSLYTPVCTDDPAGASALPSSYDARGHRKVAVHGAAPRIFSKYRGWIMKPAGYDPCTAEYAETYFNRPDVQAALHANVTKIGYNWTHCSDVINTWNDAAFSTLPTIRKLVASGLRVWVFSGDTDGRIPVTSTRLTLNKLGLKTIQEWTPWYDHLQVGGWTVVYEGLTFVTIRGAGHEVPLHAPRQALTLFSNFLAGTKMPPTAFP

SEQ ID NO: 24551 - protein, 270 aa, Zea mays subsp. mays
  misc_feature (1)..(270): Ceres Seq. ID no. 12435652
MVGNALMDDETDQTGMVDYAWDHAVISDRVYADVKARCDFSMANVTDACNAALQEYFAVYRLIDMYSLYTPVCTDDPAGASALPSSYDARGHRKVAVHGAAPRIFSKYRGWIMKPAGYDPCTAEYAETYFNRPDVQAALHANVTKIGYNWTHCSDVINTWNDAAFSTLPTIRKLVASGLRVWVFSGDTDGRIPVTSTRLTLNKLGLKTIQEWTPWYDHLQVGGWTVVYEGLTFVTIRGAGHEVPLHAPRQALTLFSNFLAGTKMPPTAFP

SEQ ID NO: 24552 - DNA, 2088 bp, Zea mays subsp. mays
  misc_feature (1)..(2088): Ceres Seq. ID no. 12435689
tacaaaaaagtgctgcgcatatgcacacaaagggcaggaggaggaacggcacgcgcgccaggaccgcaggagcacacacctcagtgcgccagcgttctgcacctcgctagctcgtcgtgtcttgcctgcgctgtcgtcgctgacccttgagatctgcagactccatggaggctgcagcagcgacgacggcggcggcgcttcttcctcccgctcggaaggtgttcatcctgcccttgcttctcctcctggctgcatcacgagcttcgtctgatggagtgcaatatgattatagagcttacactgagtgcaaacctcaccctgagcctgctctgtacaacggtggcgtcctccgctgggcgagcaaaataacggacttcagaacggaggacgaaggcaactactccccggcatttgtgctctacaacatgtcggcggcgactgcgtacagcttctcttgctgggtgaaaatcgacgggccagaaagcgcacatgtgaaggcgaagatactgaccgtggagaacgcagcgtcgcagtgcgtcggcaccgctatcgcgcgcaacgactgctggtcttttctcaagggtggctttactctcaactccacgtctcaaacctcggtgctctatttgcagactgcgagcccaaatgcttcgacgatctcaatcagaagcccctccttgcagccattctcacccgatgagtggaatcagcacagggaggagcgtatccaacagattcggaagcgtttcgtgaacctgcatgtctccgacggcaacggcagccgcgtggtcggggcggacgtggccgtgcaccagatcaccagagacttccccttcggctccgccatcagcaagagcatcctcgggaacaggccgtaccaggactggttcaacgcgcggttcaacgcggcggtgttcgagaacgagctcaagtggtacgcgacggagccgtcgcctgggaaggaggagtacgcggcggcggaccagctgctgcggttcgtgcagtccaacgacgtgacggcgcgcgggcacaacatcttctgggaggaccccaggtacacgccggcgtgggtgaagaacctgacgggcccgcagctgcgcgccgcggtggcaggccgcgtccagagcctgctgtcgcggtacaagggcgacttcgngcactgggacgtgagcaacgagatgctgcacttcgacttctacgaggaccggctgggcggcaacgccacggccgacttcttcagcacggccaggcgcgccgacccgctggccacgctcttcctcaacgacttcaacgtggtggaggcgtgcgacgacctcagctccagcgccgactcctacgtgtccaggcttcgccagctcgccgacgacgccggggtcaccttcgagggcatcgggctggagggccacttcgccaagcccaacgtcccctacgtgcgcgccgtgctcgacaagctgggcacgctccgcctgcccgtctggctcaccgaggtcgacgtcagcgccgccttcgaccacgccacgcaggccgcgtacctagaggacgtcctccgcgaaggcttcgcgcacccggccgtcgacggcatcgtgctgtggacggccatgggcgccaacgccacctgctaccagatgtgcctcacggacgccgacttcaccaacctcccggccggagacgtcgtcgacaggctgctgggggagtggcagaccaaggaggtgctgggagccaccgatgaccgcggctccttcaacttcagcgccttccacggcgagtacaggctctccgtcacctatctcaaccgcactgccgacgccaccttctcgctgcctcgcagcgacgacaccaagcacatcaacatccgcctaccgcctggacctgcagcctgatctcattattagaaatgtactactagaatttaagaactaaatatactgtggtgcatcagctgtgttaattggtacgtgtccgtggattgatacaactactactatacgcgcgcaactatctcgacctcttatgatgaaactagtacaatgagtgtgttgtgatggtacacaaattacgcatagtatctttaaaaactctattgtagtt

SEQ ID NO: 24553 - protein, 571 aa, Zea mays subsp. mays
  misc_feature (1)..(571): Ceres Seq. ID no. 12435690
  misc_feature (331)..(331): Xaa is any aa, unknown or other
MEAAAATTAAALLPPARKVFILPLLLLLAASRASSDGVQYDYRAYTECKPHPEPALYNGGVLRWASKITDFRTEDEGNYSPAFVLYNMSAATAYSFSCWVKIDGPESAHVKAKILTVENAASQCVGTAIARNDCWSFLKGGFTLNSTSQTSVLYLQTASPNASTISIRSPSLQPFSPDEWNQHREERIQQIRKRFVNLHVSDGNGSRVVGADVAVHQITRDFPFGSAISKSILGNRPYQDWFNARFNAAVFENELKWYATEPSPGKEEYAAADQLLRFVQSNDVTARGHNIFWEDPRYTPAWVKNLTGPQLRAAVAGRVQSLLSRYKGDFXHWDVSNEMLHFDFYEDRLGGNATADFFSTARRADPLATLFLNDFNVVEACDDLSSSADSYVSRLRQLADDAGVTFEGIGLEGHFAKPNVPYVRAVLDKLGTLRLPVWLTEVDVSAAFDHATQAAYLEDVLREGFAHPAVDGIVLWTAMGANATCYQMCLTDADFTNLPAGDVVDRLLGEWQTKEVLGATDDRGSFNFSAFHGEYRLSVTYLNRTADATFSLPRSDDTKHINIRLPPGPAA

SEQ ID NO: 24554 - protein, 484 aa, Zea mays subsp. mays
  misc_feature (1)..(484): Ceres Seq. ID no. 12435691
  misc_feature (244)..(244): Xaa is any aa, unknown or other
MSAATAYSFSCWVKIDGPESAHVKAKILTVENAASQCVGTAIARNDCWSFLKGGFTLNSTSQTSVLYLQTASPNASTISIRSPSLQPFSPDEWNQHREERIQQIRKRFVNLHVSDGNGSRVVGADVAVHQITRDFPFGSAISKSILGNRPYQDWFNARFNAAVFENELKWYATEPSPGKEEYAAADQLLRFVQSNDVTARGHNIFWEDPRYTPAWVKNLTGPQLRAAVAGRVQSLLSRYKGDFXHWDVSNEMLHFDFYEDRLGGNATADFFSTARRADPLATLFLNDFNVVEACDDLSSSADSYVSRLRQLADDAGVTFEGIGLEGHFAKPNVPYVRAVLDKLGTLRLPVWLTEVDVSAAFDHATQAAYLEDVLREGFAHPAVDGIVLWTAMGANATCYQMCLTDADFTNLPAGDVVDRLLGEWQTKEVLGATDDRGSFNFSAFHGEYRLSVTYLNRTADATFSLPRSDDTKHINIRLPPGPAA

SEQ ID NO: 24555 - DNA, 2939 bp, Zea mays subsp. mays
  misc_feature (1)..(2939): Ceres Seq. ID no. 12435700
ccaggacgacaactcccaggtcccgactcccccaaatttcccccttcccttccgcctcgcctccagccaccgcgtccgcctcgcctccagccaccgcgtccgcctccgatggcgtcggcggcggggtcctcgaacgtgatgctcgcgatcaacgagaagaaaacgatcaccactgacctctaccgcccgctgcgcctctacatcgcctccacctactcggaacgcgaggccgctgcggccgacgacgaccttagcgtggtgtgcgacctccgcgctgctgtcgagaagccctccctcccggatccgtcctccctcgagcagcgccgcgacgcgctcctcgcctacgcgcgggctctggcactcgtggagccccgcttccccatctcccccgatcgcgcccacgtccactccctcaccttcacctggcacgacgcattcaaggggaacaagaagtgcgccctcgcctccatccacctcgagaaggcatccgtgctctttaacctcggcgccgtctactcccagatcgcgctcgccgcggaccgctcgactgacgtcgggatcaggatcgcgtgcggcgccttccagagtgcggcgggggcgttcgcgtggctcagggagagcggggccgcggcgaaggctgtcgctgcggggaccaccaccgtggacatcacgcccgagtgcgccggcatgctggagaaactcatgctcgcgcaggcgcaagaatgcttcttcgagaaggtcataggtggagggaagccacccgcgctgtgctccaaggtggcgcggcaggttggcatactctatgaagaagcatacacagctctcagtgcatctcctctaagtcagcactttgataagacatgggtgtcccatgtccagcttaaagctgctcaattctacgccgatgcttgctacaggtattcactggatcttcatgagaaagaagaaattgctgaggaaattgcacgtttaaagattggtatgagtgccttggcagatgctaagaagactacgaagggagttgctgcccaacttctggattccgtcaacaagctggaaagtaacatgaaaaccaacttggaaagggctatgaaggagaatgatcgtgtttacttgatgcgggttccagctgctggttccttgggtgccctccctgcagcgtcccttgtaaaacctacctctttggctgaagttttagatgccagcaaggaaaggcttttttcatcacttgtgcctgatggcagcatgaaagcactttctaagtacacagagatggtagataatagtatccggacccaggctgagaaattgcagcaagctagtgagatcactagagtcaggctgaaggaaatggacttaccagattctattctttcattggaaggaaatataaccttgcccatggatctgaaggaagacgtagaggctgtgcagataagcggtggccctgctggcttagaatctgagttgcagcaacttagggatttgagcagggtcaatcaggaactacttgtccagactgaagagcttctacagaaggaggcgaatgaagacgctcaatttcgtacacaatttgggagtcgttggactagacctcaatcaagcaccctaacaaagaatattcaggatagattgaatctgtttgcttctaatttgaagagagctgctgatagtgattctctgattgaacgaggcgtgaaggagaactattcattgatgtctatccttgacaaaagaccgatagagtcttcacttccaagtatttccaggcctatcatgtccttggatggaaatgaagatgccattgttggagccctgaaacaaagcttgagacaactggagtctcttggcgcacaaagggcaggtcttgaagacatgctcaaagaaatgaaaagaaaggatgatatattgcctaagttgatggttggcgtgggatcacatgatgatcttttcaagaaggagattgctaagtatgatcctatatgtgctgatattgctgataacattgtggcacaggaacaattgttgctacaaatacaggcacaaaacgagcaatttgctgctgtattcaacctagaggattacaaagctgcccgtgagagatgttacaagcaaatcgctgctgctgttgtgaaataccaggagtttaaaaagaacatcaacgagggcctaaacttttatgtgactttacaggaagcaattggcaaaataaaacagcagtgcagcgacttcataatgacccgaaacattcagtgccgtgaaatgatggaagatgtgcagaggaagctacccggcttcagattctcgtcgtccagccgctcctctatgcagaggaatgctgcttctgtgccacctgacgagagcagcccatcaccgccaccgccgcatgcccaggctccctatgcctctccaccaggggtagactcgaggcatggatattctcaaccggaggcaagacctgcatactcgcagccataccccccatcctatggcgcgacaccgcaacagccgacgtatggtgcacaacaccccgggcagtaccagccgcctcctggccatgactgcggtcagccggcatatcctggatggcgcgggccatacccatactacaatgccccccagccgcagcaatctgtgccatgtccacaggcgccgtacaatgccactggggcttaccctccgcaccagagcaactattaccgacctcaataagtgctgcaactatttcttattattttgcttcttttttttccattgggtcttaccattctggtgtactactactgcatacgagagagttcgggtagtgtaatagcaggtatagctttgtatgatttagtggcggacccagaaagacccggaccgaagcgaccataaactataatatagtagcatataaaaaattgtacggttaaacaatgttgtcatagatgttaaag

SEQ ID NO: 24556 - protein, 903 aa, Zea mays subsp. mays
  misc_feature (1)..(903): Ceres Seq. ID no. 12435701
PGRQLPGPDSPKFPPSLPPRLQPPRPPRLQPPRPPPMASAAGSSNVMLAINEKKTITTDLYRPLRLYIASTYSEREAAAADDDLSVVCDLRAAVEKPSLPDPSSLEQRRDALLAYARALALVEPRFPISPDRAHVHSLTFTWHDAFKGNKKCALASIHLEKASVLFNLGAVYSQIALAADRSTDVGIRIACGAFQSAAGAFAWLRESGAAAKAVAAGTTTVDITPECAGMLEKLMLAQAQECFFEKVIGGGKPPALCSKVARQVGILYEEAYTALSASPLSQHFDKTWVSHVQLKAAQFYADACYRYSLDLHEKEEIAEEIARLKIGMSALADAKKTTKGVAAQLLDSVNKLESNMKTNLERAMKENDRVYLMRVPAAGSLGALPAASLVKPTSLAEVLDASKERLFSSLVPDGSMKALSKYTEMVDNSIRTQAEKLQQASEITRVRLKEMDLPDSILSLEGNITLPMDLKEDVEAVQISGGPAGLESELQQLRDLSRVNQELLVQTEELLQKEANEDAQFRTQFGSRWTRPQSSTLTKNIQDRLNLFASNLKRAADSDSLIERGVKENYSLMSILDKRPIESSLPSISRPIMSLDGNEDAIVGALKQSLRQLESLGAQRAGLEDMLKEMKRKDDILPKLMVGVGSHDDLFKKEIAKYDPICADIADNIVAQEQLLLQIQAQNEQFAAVFNLEDYKAARERCYKQIAAAVVKYQEFKKNINEGLNFYVTLQEAIGKIKQQCSDFIMTRNIQCREMMEDVQRKLPGFRFSSSSRSSMQRNAASVPPDESSPSPPPPHAQAPYASPPGVDSRHGYSQPEARPAYSQPYPPSYGATPQQPTYGAQHPGQYQPPPGHDCGQPAYPGWRGPYPYYNAPQPQQSVPCPQAPYNATGAYPPHQSNYYRPQ

SEQ ID NO: 24557 - protein, 867 aa, Zea mays subsp. mays
  misc_feature (1)..(867): Ceres Seq. ID no. 12435702
MASAAGSSNVMLAINEKKTITTDLYRPLRLYIASTYSEREAAAADDDLSVVCDLRAAVEKPSLPDPSSLEQRRDALLAYARALALVEPRFPISPDRAHVHSLTFTWHDAFKGNKKCALASIHLEKASVLFNLGAVYSQIALAADRSTDVGIRIACGAFQSAAGAFAWLRESGAAAKAVAAGTTTVDITPECAGMLEKLMLAQAQECFFEKVIGGGKPPALCSKVARQVGILYEEAYTALSASPLSQHFDKTWVSHVQLKAAQFYADACYRYSLDLHEKEEIAEEIARLKIGMSALADAKKTTKGVAAQLLDSVNKLESNMKTNLERAMKENDRVYLMRVPAAGSLGALPAASLVKPTSLAEVLDASKERLFSSLVPDGSMKALSKYTEMVDNSIRTQAEKLQQASEITRVRLKEMDLPDSILSLEGNITLPMDLKEDVEAVQISGGPAGLESELQQLRDLSRVNQELLVQTEELLQKEANEDAQFRTQFGSRWTRPQSSTLTKNIQDRLNLFASNLKRAADSDSLIERGVKENYSLMSILDKRPIESSLPSISRPIMSLDGNEDAIVGALKQSLRQLESLGAQRAGLEDMLKEMKRKDDILPKLMVGVGSHDDLFKKEIAKYDPICADIADNIVAQEQLLLQIQAQNEQFAAVFNLEDYKAARERCYKQIAAAVVKYQEFKKNINEGLNFYVTLQEAIGKIKQQCSDFIMTRNIQCREMMEDVQRKLPGFRFSSSSRSSMQRNAASVPPDESSPSPPPPHAQAPYASPPGVDSRHGYSQPEARPAYSQPYPPSYGATPQQPTYGAQHPGQYQPPPGHDCGQPAYPGWRGPYPYYNAPQPQQSVPCPQAPYNATGAYPPHQSNYYRPQ

SEQ ID NO: 24558 - protein, 857 aa, Zea mays subsp. mays
  misc_feature (1)..(857): Ceres Seq. ID no. 12435703
MLAINEKKTITTDLYRPLRLYIASTYSEREAAAADDDLSVVCDLRAAVEKPSLPDPSSLEQRRDALLAYARALALVEPRFPISPDRAHVHSLTFTWHDAFKGNKKCALASIHLEKASVLFNLGAVYSQIALAADRSTDVGIRIACGAFQSAAGAFAWLRESGAAAKAVAAGTTTVDITPECAGMLEKLMLAQAQECFFEKVIGGGKPPALCSKVARQVGILYEEAYTALSASPLSQHFDKTWVSHVQLKAAQFYADACYRYSLDLHEKEEIAEEIARLKIGMSALADAKKTTKGVAAQLLDSVNKLESNMKTNLERAMKENDRVYLMRVPAAGSLGALPAASLVKPTSLAEVLDASKERLFSSLVPDGSMKALSKYTEMVDNSIRTQAEKLQQASEITRVRLKEMDLPDSILSLEGNITLPMDLKEDVEAVQISGGPAGLESELQQLRDLSRVNQELLVQTEELLQKEANEDAQFRTQFGSRWTRPQSSTLTKNIQDRLNLFASNLKRAADSDSLIERGVKENYSLMSILDKRPIESSLPSISRPIMSLDGNEDAIVGALKQSLRQLESLGAQRAGLEDMLKEMKRKDDILPKLMVGVGSHDDLFKKEIAKYDPICADIADNIVAQEQLLLQIQAQNEQFAAVFNLEDYKAARERCYKQIAAAVVKYQEFKKNINEGLNFYVTLQEAIGKIKQQCSDFIMTRNIQCREMMEDVQRKLPGFRFSSSSRSSMQRNAASVPPDESSPSPPPPHAQAPYASPPGVDSRHGYSQPEARPAYSQPYPPSYGATPQQPTYGAQHPGQYQPPPGHDCGQPAYPGWRGPYPYYNAPQPQQSVPCPQAPYNATGAYPPHQSNYYRPQ

SEQ ID NO: 24559 - DNA, 1071 bp, Zea mays subsp. mays
  misc_feature (1)..(1071): Ceres Seq. ID no. 12435826
attaacaaaacgcctcccgaagcagacagcctcactccgcgcgcccgcgcagcgaagcagggagcatggagctgaggccgccgcgcctgcgaccgtgagcacgctctgtagccagccgggtccggctgggcggccatggcagccaccgttctcttcactccggcgcagtgccaccgcgccaccgcgacgacgagcgggcgaggagccccctcgcattgcgccctggcccctgggcaccggcgcccggggcggggatcggtgagggcggtgcctcccgagcagagcagcttgcctcaggcggcggctgctgtctacgggactgctggcgacgtcaaggccgcgctgtaccgagcgctggacggcgccaacagggggatattcgggatgacgtccgccaagcgctcggagatccatggcctggtggagctgctcgagtccaggaaccccacgccggagcccaccgccaagctgcaggacaaggtggatggatgctggaaactcatctacagcacgatctccatactggggaagaagagaaccaagttagggctgcgagatttcatcagcctaggggacttcctccagataattgacgtcaaacaggaaaaggcggtgaatgtggtagagttcagcgcgagagcactgaagatactgacggggaagctcaccatcgaggcttcgtacagagttaccagccaaacaagagtggatatcaagctcgagagctcaaccatcacccctgagcagctgatgaacatatttcagaagaactacgacatgctcctggaaatattcaatccagagggctggctggagataacatatgttgatgaatctctacggattggacgagatgacaaagaaaacatattcgtgctggagagagcagacctgccagacgtccgatgacgcgcagttcatgcgcacaggcggtccgtaattttgtgacgaggagcgagtgtaacacgcagaaaacatagcctctgcaaatatataaatatggtatatccgacagctaggactcttgcatggttattggcagttcgatgcagacaatctactacttgaagt

SEQ ID NO: 24560 - protein, 257 aa, Zea mays subsp. mays
  misc_feature (1)..(257): Ceres Seq. ID no. 12435827
MAATVLFTPAQCHRATATTSGRGAPSHCALAPGHRRPGRGSVRAVPPEQSSLPQAAAAVYGTAGDVKAALYRALDGANRGIFGMTSAKRSEIHGLVELLESRNPTPEPTAKLQDKVDGCWKLIYSTISILGKKRTKLGLRDFISLGDFLQIIDVKQEKAVNVVEFSARALKILTGKLTIEASYRVTSQTRVDIKLESSTITPEQLMNIFQKNYDMLLEIFNPEGWLEITYVDESLRIGRDDKENIFVLERADLPDVR

SEQ ID NO: 24561 - protein, 174 aa, Zea mays subsp. mays
  misc_feature (1)..(174): Ceres Seq. ID no. 12435828
MTSAKRSEIHGLVELLESRNPTPEPTAKLQDKVDGCWKLIYSTISILGKKRTKLGLRDFISLGDFLQIIDVKQEKAVNVVEFSARALKILTGKLTIEASYRVTSQTRVDIKLESSTITPEQLMNIFQKNYDMLLEIFNPEGWLEITYVDESLRIGRDDKENIFVLERADLPDVR

SEQ ID NO: 24562 - DNA, 1540 bp, Zea mays subsp. mays
  misc_feature (1)..(1540): Ceres Seq. ID no. 12435829
ggggacctcttctcatcgtcatctccgccgacggaagctgcgtgcgctcgtcgtctttatgctgttccatccaggcttcagttcacaaataaccgccgcactgctggctgctgttaccagcttccttgacgatcgaccagtccaaagctttcgtcatctctttgatcccacgcggcctcacccggctccggctccggctcagcaatcaattccccatacgaattactaatctctctgatttcctttcagctcatcggcatgccgcaggcagcagcagcagcagcagcagcagccgtgcacggcaaggaccccagcaccgtccgtccggccgcgctgcccctgaagctcctccgccctctcctcctcgtggcggtgctcggcacgggcttcctcgccgccgtggccctgctcgtcggcggccccgcctactcgtccgcgctcccgcgcccgccggtcgccctgccgcccgcgccgccgtcgggcggcgggaagcagcagccgctggagcggtgggcgcgggcgccggcgtcccgcgtggcacaacatgaccgacgacgagctgctgtgggcggcgtcgtggcgccccagcgtccggcgctacccgtaccgccggacgcccaaggtggccttcatgttcctgacccgcggcccgctgccgctggcgccgctgtgggagcgcttcttcgccggcgccgggggcggggacgccggcctcttctccgtctacgtgcacgccacgccggggtaccgccccgacttcgcgccggcgtccgccttctaccgccgccaagtgcccagccaggtggccgagtggggcgagccgagcatgttcgacgcggagcggcggctgctggcgaacgcgctgctggacccgggcaacgagcgcttcgtgctgctgtccgagtcgtgcgtgccgctgtacggcttcccggcggtgtacagctacctgacgcggtcgcgggagagcttcgtgggcgcgttcgacgacccgggcccgggaggccggggccggtaccagggcgggctggccccggaggtggtccgcgagcagttccgcaagggcgcagtggttcgagctggaccgcgccctcgccgtcgacgttgtcgccgacggccgctactaccccaagttccgggagcactgccggccgccgtgctacgcggacgagcactacctgccgacggcgctctccatcctggcccccgcgcggatcgccaaccgcagcgtcacgtgggtggactggtcccgcggcggcgcgcacccggccacgttcggggaggccgacgtcggcgaggcgttcctcaggcggctcacggcgcccgggaagggccagggcaactgcacctacaacggccagccggcgcaggtgtgcttcctgttcgcaaggaagctggcgcccggcacgctgcagccgctgctcaggctcgccccgaagctgctcggatacggctgactgtcactgtcactctgactgctcacctctgaatctgaatctgaatcttctccaaagtgacacaaagacacctctgaatctgattt

SEQ ID NO: 24563 - protein, 427 aa, Zea mays subsp. mays
  misc_feature (1)..(427): Ceres Seq. ID no. 12435830
MPQAAAAAAAAAVHGKDPSTVRPAALPLKLLRPLLLVAVLGTGFLAAVALLVGGPAYSSALPRPPVALPPAPPSGGGKQQPLERWARAPASRVAQHDRRRAAVGGVVAPQRPALPVPPDAQGGLHVPDPRPAAAGAAVGALLRRRRGRGRRPLLRLRARHAGVPPRLRAGVRLLPPPSAQPGGRVGRAEHVRRGAAAAGERAAGPGQRALRAAVRVVRAAVRLPGGVQLPDAVAGELRGRVRRPGPGRPGPVPGRAGPGGGPRAVPQGRSGSSWTAPSPSTLSPTAATTPSSGSTAGRRATRTSTTCRRRSPSWPPRGSPTAASRGWTGPAAARTRPRSGRPTSARRSSGGSRRPGRARATAPTTASRRRCASCSQGSWRPARCSRCSGSPRSCSDTADCHCHSDCSPLNLNLNLLQSDTKTPLNLI

SEQ ID NO: 24564 - protein, 313 aa, Zea mays subsp. mays
  misc_feature (1)..(313): Ceres Seq. ID no. 12435831
MTDDELLWAASWRPSVRRYPYRRTPKVAFMFLTRGPLPLAPLWERFFAGAGGGDAGLFSVYVHATPGYRPDFAPASAFYRRQVPSQVAEWGEPSMFDAERRLLANALLDPGNERFVLLSESCVPLYGFPAVYSYLTRSRESFVGAFDDPGPGGRGRYQGGLAPEVVREQFRKGAVVRAGPRPRRRRCRRRPLLPQVPGALPAAVLRGRALPADGALHPGPRADRQPQRHVGGLVPRRRAPGHVRGGRRRRGVPQAAHGAREGPGQLHLQRPAGAGVLPVRKEAGARHAAAAAQARPEAARIRLTVTVTLTAHL

SEQ ID NO: 24565 - protein, 284 aa, Zea mays subsp. mays
  misc_feature (1)..(284): Ceres Seq. ID no. 12435832
MFLTRGPLPLAPLWERFFAGAGGGDAGLFSVYVHATPGYRPDFAPASAFYRRQVPSQVAEWGEPSMFDAERRLLANALLDPGNERFVLLSESCVPLYGFPAVYSYLTRSRESFVGAFDDPGPGGRGRYQGGLAPEVVREQFRKGAVVRAGPRPRRRRCRRRPLLPQVPGALPAAVLRGRALPADGALHPGPRADRQPQRHVGGLVPRRRAPGHVRGGRRRRGVPQAAHGAREGPGQLHLQRPAGAGVLPVRKEAGARHAAAAAQARPEAARIRLTVTVTLTAHL

SEQ ID NO: 24566 - DNA, 744 bp, Zea mays subsp. mays
  misc_feature (1)..(744): Ceres Seq. ID no. 12435845
cataccatccctcgaccggccacctctccccaattgcatcgcatccccaggacttgcgcccggtccagagacggcgataatgggggcttctgaggtgtggtcatcggtgccggcctggctggcgatcgccgtcggcttggcggccgtggtttcctcgtcggaggctcacgtcttctacgccggtggccgcgacggctgggtccttgaccccaccgagagctacaaccattgggccgggcgcagccggttccaagtgaacgacaccatcgtgttcacgcacgaggagggcgtcgactcggtgctgctggtgacggagcaggacttcgacacgtgcaacacgcgcaacccggtccggcggctccaggccgtcggcagcagcggcagttcggagcgttcggtgttcaagctcgaccggtccggcccgttcttcttcatcagcagcgacgaggaacggtgccaaaagggccagaagctgtacgtaatcgtgatggcggttcgccggtcgacgacgccggcggcaccggcaccggcacccgacgcggcgttcccgccggcgccttcaccggtacccgattcggcgttcccgccggcgccttcaccggtgtgggcctcggcgcccgacaacgcgcacgctccaccaccgacggcgggtgcgtcacgtctggacgacggagcgatcatcggctctgtgcttggggttataggagctttggtgctctgtaccgtgtactaatcagaaatcag

SEQ ID NO: 24567 - protein, 243 aa, Zea mays subsp. mays
  misc_feature (1)..(243): Ceres Seq. ID no. 12435846
IPSLDRPPLPNCIASPGLAPGPETAIMGASEVWSSVPAWLAIAVGLAAVVSSSEAHVFYAGGRDGWVLDPTESYNHWAGRSRFQVNDTIVFTHEEGVDSVLLVTEQDFDTCNTRNPVRRLQAVGSSGSSERSVFKLDRSGPFFFISSDEERCQKGQKLYVIVMAVRRSTTPAAPAPAPDAAFPPAPSPVPDSAFPPAPSPVWASAPDNAHAPPPTAGASRLDDGAIIGSVLGVIGALVLCTVY

SEQ ID NO: 24568 - protein, 217 aa, Zea mays subsp. mays
  misc_feature (1)..(217): Ceres Seq. ID no. 12435847
MGASEVWSSVPAWLAIAVGLAAVVSSSEAHVFYAGGRDGWVLDPTESYNHWAGRSRFQVNDTIVFTHEEGVDSVLLVTEQDFDTCNTRNPVRRLQAVGSSGSSERSVFKLDRSGPFFFISSDEERCQKGQKLYVIVMAVRRSTTPAAPAPAPDAAFPPAPSPVPDSAFPPAPSPVWASAPDNAHAPPPTAGASRLDDGAIIGSVLGVIGALVLCTVY

SEQ ID NO: 24569 - DNA, 1057 bp, Zea mays subsp. mays
  misc_feature (1)..(1057): Ceres Seq. ID no. 12435854
aacgaagccacaagcagcgccgcgagccacagctagcaccaccaccttgcaccgcacccgcaccgagacgaacagatctatcgatcgatagctagatccatggctgccggcggcgacgacaccaccatcgcgcaggtccacagcggcatcgacagcagcaacaagacgctgctcaagagcgaggccctctacaagtacgtgctggacacgtcggtgctgccgcacgagccggagagcatgcgtgagctgcggctggtgaccgacaagcacgagtgggggttcatgcagtcgtccccggacgaggcgtcgctgctgcggatgctgatcaagctgagcggcgcgcggcggacgctggaggtgggcgtgttcacgggctactcgctgctggcgacggcgctggcgctgcccgccgacggcaaggtcatcgcattcgacgtgagccgcgagtactacgacatcggccgccccttcatcgagcgcgccggggtggcgggcaaggtggacttccgggagggcccggcgctggagcagctggacgagctcctcgccgacccggccaaccacggcgccttcgacttcgcgttcgtcgacgccgacaagcctaactacgtccggtaccacgagcagctgctccgcctggtgcgcgtcgggggtaccgtcgtgtacgacaacacgctgtgggccggtactgtggcgcttccccccgacgcgccgctcagcgacctcgaccgcaggttctccgccgccatcagggaactcaacgtccggctttctcaggatccccgcgtcgaggtctgccagctcgccatcgccgacggcgtcaccatctgccgccgcgtcgtctgatgtgatgatgatccgacgaccaagatcgtatatcattcgctcgtcgtctctgtcatctttcaactgcctgcccgctgccgtcgtcaactaataatgcatggttctgctggttctttttttttattttcttttgtgcttgcattgtgtgtgttgagttgaacatcccccgcgatgtactgcaacaactggnatgcaatgcaacatcatgcgt

SEQ ID NO: 24570 - protein, 248 aa, Zea mays subsp. mays
  misc_feature (1)..(248): Ceres Seq. ID no. 12435855
MAAGGDDTTIAQVHSGIDSSNKTLLKSEALYKYVLDTSVLPHEPESMRELRLVTDKHEWGFMQSSPDEASLLRMLIKLSGARRTLEVGVFTGYSLLATALALPADGKVIAFDVSREYYDIGRPFIERAGVAGKVDFREGPALEQLDELLADPANHGAFDFAFVDADKPNYVRYHEQLLRLVRVGGTVVYDNTLWAGTVALPPDAPLSDLDRRFSAAIRELNVRLSQDPRVEVCQLAIADGVTICRRVV

SEQ ID NO: 24571 - protein, 202 aa, Zea mays subsp. mays
  misc_feature (1)..(202): Ceres Seq. ID no. 12435856
MRELRLVTDKHEWGFMQSSPDEASLLRMLIKLSGARRTLEVGVFTGYSLLATALALPADGKVIAFDVSREYYDIGRPFIERAGVAGKVDFREGPALEQLDELLADPANHGAFDFAFVDADKPNYVRYHEQLLRLVRVGGTVVYDNTLWAGTVALPPDAPLSDLDRRFSAAIRELNVRLSQDPRVEVCQLAIADGVTICRRVV

SEQ ID NO: 24572 - protein, 187 aa, Zea mays subsp. mays
  misc_feature (1)..(187): Ceres Seq. ID no. 12435857
MQSSPDEASLLRMLIKLSGARRTLEVGVFTGYSLLATALALPADGKVIAFDVSREYYDIGRPFIERAGVAGKVDFREGPALEQLDELLADPANHGAFDFAFVDADKPNYVRYHEQLLRLVRVGGTVVYDNTLWAGTVALPPDAPLSDLDRRFSAAIRELNVRLSQDPRVEVCQLAIADGVTICRRVV

SEQ ID NO: 24573 - DNA, 2161 bp, Zea mays subsp. mays
  misc_feature (1)..(2161): Ceres Seq. ID no. 12435871
cttttattagggtttttttgtctccttagatttgcgcctgttctcacctgtgcgcatactagtctctgcatcagagagtagagacctcggagccgatcttcaacacgcagattgggcagagctgcctgccggagggagagtggagagagagagagagagagagagagagagagctcaaggggggcaaaaggagtttttttttatccagcttgttagcttgattctctttgatccgggagagcagccgccagtccaactaatcctagctattggtgtgccggggctttgattgttctccagatccgagccacctgctgggtggactccaggaatccgagcacgaagttgacaggggagttctcagggaaaagttgcgcaggggaggaaggaagagcctgaaagggcggtgcggagagaaagactataagagcgacctgggtcccttgaggatgccgtcaagaaaccgcgtggagaggagggcgatgagatgagggatgctggccgcggtgatggactatttcagctcctgctggggcccgcgatcgggtgacgggcacagggggaagggccccgacgccgccggccggcaggacggtctcctctggtacaaggacgccggtcagctcgtcactggggagttctccatggccgtggtgcaggccaaccagctgcttgaggaccagagccaagtggagtccggatcgctctccctggctgacccgggcccgcagggcaccttcgtcggcgtctatgatggccatggcggtcctgagacgtcccggttcatcaatgaccacctcttcaaccatctcagaaggtttgcaactgagcacaagtttatgtcagcggacgtgatccggaaagctttccaagcaactgaggagggctttctttctctagtcagcaaggaatggtctttgaagcctcagattgcttcagtgggctcctgctgccttgttggtgtaatctgtgctgggactctctatgttgcaaacctgggtgactcacgtgcagttcttggaaggcttgttaaggcaactggagaggtcgtggccatgcagttgtcatcggagcacaatgcatgctatgaggaagttagacaagaactgcagtcatcacatcctgacgatccacatattgtggttctcaaacacaatgtttggcgagtgaagggtctcatccagatctcaagatctattggagatgtatatctaaagaaaccagagtataacagagaaccacttcacagcaagtttcggcttcgagaaaccttccagaggccgatccttagttctgaacctcaaattactgaacatcgaatacagccaaatgatcaatttgttatatttgcttctgatggtctatgggagcacctcaccaataaggaagcagttgaccttgtccaaagtagtccacgcaatggaattgctcggagactagtgaaagcggcgatgcaagaagctgccaagaagagggagatgagatactcagacctcaagaagatcgaccgtggtgtgagaaggcatttcctcgacgatataacggtcgtcgtggtattccttgatttgaatgccatgagcaaagctagctggagcaaaagcccctcggtttctctccgagggggcggtgtcaccgtccctgccaagtccctcgcacctttctcagctccggcacggctgaacagcacctactgaagttgctaccactcttgaaaggaagaacacggtgcagatctgcagtggtgagagaaaaaaaaaacagcaatcaagtgtagcgttacacttacacctgctgtgctgttgctctttgcaaaactactgtctagactcctggtaattagtgtactgatagcgaggtaaaaaaaagttagattatttgttagcagcggcagtgatttgacatctaaggaacaacaacacggtgcccaccgattctgctatcctgatggctcgcggcagcctggctggtcggcacacgacacgaagtgaagctgttttactggcggcatctggctttgttttctcatgggacagtgatccacaagagtaagggatcagctcaatccaaagtcaatagatgttccttataaaaaatagaggtacagatgttcccatcggctatgtgtatttggggaaaaaatcaatataaggggtgtttggtg

SEQ ID NO: 24574 - protein, 399 aa, Zea mays subsp. mays
  misc_feature (1)..(399): Ceres Seq. ID no. 12435872
MLAAVMDYFSSCWGPRSGDGHRGKGPDAAGRQDGLLWYKDAGQLVTGEFSMAVVQANQLLEDQSQVESGSLSLADPGPQGTFVGVYDGHGGPETSRFINDHLFNHLRRFATEHKFMSADVIRKAFQATEEGFLSLVSKEWSLKPQIASVGSCCLVGVICAGTLYVANLGDSRAVLGRLVKATGEVVAMQLSSEHNACYEEVRQELQSSHPDDPHIVVLKHNVWRVKGLIQISRSIGDVYLKKPEYNREPLHSKFRLRETFQRPILSSEPQITEHRIQPNDQFVIFASDGLWEHLTNKEAVDLVQSSPRNGIARRLVKAAMQEAAKKREMRYSDLKKIDRGVRRHFLDDITVVVVFLDLNAMSKASWSKSPSVSLRGGGVTVPAKSLAPFSAPARLNSTY

SEQ ID NO: 24575 - protein, 394 aa, Zea mays subsp. mays
  misc_feature (1)..(394): Ceres Seq. ID no. 12435873
MDYFSSCWGPRSGDGHRGKGPDAAGRQDGLLWYKDAGQLVTGEFSMAVVQANQLLEDQSQVESGSLSLADPGPQGTFVGVYDGHGGPETSRFINDHLFNHLRRFATEHKFMSADVIRKAFQATEEGFLSLVSKEWSLKPQIASVGSCCLVGVICAGTLYVANLGDSRAVLGRLVKATGEVVAMQLSSEHNACYEEVRQELQSSHPDDPHIVVLKHNVWRVKGLIQISRSIGDVYLKKPEYNREPLHSKFRLRETFQRPILSSEPQITEHRIQPNDQFVIFASDGLWEHLTNKEAVDLVQSSPRNGIARRLVKAAMQEAAKKREMRYSDLKKIDRGVRRHFLDDITVVVVFLDLNAMSKASWSKSPSVSLRGGGVTVPAKSLAPFSAPARLNSTY

SEQ ID NO: 24576 - protein, 349 aa, Zea mays subsp. mays
  misc_feature (1)..(349): Ceres Seq. ID no. 12435874
MAVVQANQLLEDQSQVESGSLSLADPGPQGTFVGVYDGHGGPETSRFINDHLFNHLRRFATEHKFMSADVIRKAFQATEEGFLSLVSKEWSLKPQIASVGSCCLVGVICAGTLYVANLGDSRAVLGRLVKATGEVVAMQLSSEHNACYEEVRQELQSSHPDDPHIVVLKHNVWRVKGLIQISRSIGDVYLKKPEYNREPLHSKFRLRETFQRPILSSEPQITEHRIQPNDQFVIFASDGLWEHLTNKEAVDLVQSSPRNGIARRLVKAAMQEAAKKREMRYSDLKKIDRGVRRHFLDDITVVVVFLDLNAMSKASWSKSPSVSLRGGGVTVPAKSLAPFSAPARLNSTY

SEQ ID NO: 24577 - DNA, 2327 bp, Zea mays subsp. mays
  misc_feature (1)..(2327): Ceres Seq. ID no. 12435879
gcatagagagcagttggattggatcaaagagaggagggctttgctttccgttttccttctccaaatggctcattagctcgtgcttcttccttccttgctaccgagttcggggcgctaaccaatgcgcagcgacaagctgatctctctctgccacgggatggaggtggaggctctagagaaggggtacacagcttttgccaaggcggtgaagtcttttacttcttcagaacggtacaagcgatcagagagtcgcagctattttgaggacatgtatggtacagatgctttgcgttcttcagacaagacaattgttctacctatgccagaagctgtaaaagctaaggtgaaaggtgatatcagcaaggaagctcaacctggaaggggagcacaaagcaccttgagaaaggagatccttgagcttgagaagcacttcagggaacaacaggttgtgagtggtgcactggaaaacgctttaggacctaacgccggttcagtcaacttttcaccagagaatccaatgccaaaggcagctaatgaactgatacgggagattgccacattggagctcgaggtgaagaacatggagcagtatctcctgacactctaccgcaaagcattcgagcagcaagcgccggcactctctccccctgattgccgggaagcttcgaagccgtcagtgagctcacgctttgggcagctccgagaaacacccgtggcggcgaagtcttgcaagagtggaggaggggatgcggcactccggaccagttacccgccgccggcgcataagaaactgaacgatccgttggcagactgctgcacatctgctcgctcccatagagcggttgattcagatgtcctccgctgccagtcagccctgtcgtaccgcggagtttgctcgtccagggtactgccttcagaagaggatgatgatagcctcgcgagggctcttcgctcgtgccactcacagccattctcattcgcagaggaaggagagggggccggtgcatctggaggagcgataagcttagcagagtatctaggaaccaacgtagccgaccacatcccggaaacccccaacaacctgtcggaggagatggtgagatgcatggcggggatatactgcaggcttgcagaccctcccttggtccaccacggctcgtcgtcctcgccgacattgtccttctcctcgaccaccagcgcagtctctccacagtacgtcggagacgacatgtggagtcccagctaccgcaggagagaagcgatgaccctggactcccgcctgatcaacccgttccacgtcgagggtctgaaggagttcagtgggccttacaacacgatggtcgaggttcctacgatcagccgtgacggtcggaggatgaaagaagccgaggacctgctccagacttacaggctggttttgtaccggctggaagccgttgatctgaggacgatgacgaacgaagaaaagatagcgttctgggtgaacgtacacaatgccttgctgatgcatgcttatctggagaacggcgtcccacagaacaaaacatccctgcttgctaaggccgcctgcaaaatagctggacgcagcatcaacgcggccgttatccagagcgttgttcttggatgtaccacgcactgccccggacagtggctacgacggacgctgctctaccccaggaccaaaagcaaagtgagcaaagcggggcatgagtggcgagcctttgccgtcgcacaaccggagcctcttttgcgctttgcgctttgctccggcagccattctgatcccgcggtgagggtgtacactccgaagcggctgttccaccagctggaggcggccaaggaggagttcatccgggcgacggccggcgtgtggaaggagcagaagctgcttctccccaagctggtggaggcgtacgccaaggacgtgaggctgtcgccgcagggcctcgtggacatggtccagcgccacctcccggagaccatgagggtggccgtgcagcggtgccagcagggcggcagggcgtcgtcgggcaaggtcgtcgtcgactgggtgccccacaacccggccttccggtacctgctcgcaagggacctcgcgttccctcacctcagctgacgctgacactgagcatatatcgatgggcatgggctcaagtagtatatgcatgtgtcaaagggttaggacttaggagtaaagaagggatcgtgtgcagtttttgtgtgggtggttatcaatggcgtggcgtgtaaagatgcttctgtagtctgtagatgatgaacaggaaaggaaacagttgacgaaatgatagaaagcacgtttgacggtc

SEQ ID NO: 24578 - protein, 664 aa, Zea mays subsp. mays
  misc_feature (1)..(664): Ceres Seq. ID no. 12435880
MRSDKLISLCHGMEVEALEKGYTAFAKAVKSFTSSERYKRSESRSYFEDMYGTDALRSSDKTIVLPMPEAVKAKVKGDISKEAQPGRGAQSTLRKEILELEKHFREQQVVSGALENALGPNAGSVNFSPENPMPKAANELIREIATLELEVKNMEQYLLTLYRKAFEQQAPALSPPDCREASKPSVSSRFGQLRETPVAAKSCKSGGGDAALRTSYPPPAHKKLNDPLADCCTSARSHRAVDSDVLRCQSALSYRGVCSSRVLPSEEDDDSLARALRSCHSQPFSFAEEGEGAGASGGAISLAEYLGTNVADHIPETPNNLSEEMVRCMAGIYCRLADPPLVHHGSSSSPTLSFSSTTSAVSPQYVGDDMWSPSYRRREAMTLDSRLINPFHVEGLKEFSGPYNTMVEVPTISRDGRRMKEAEDLLQTYRLVLYRLEAVDLRTMTNEEKIAFWVNVHNALLMHAYLENGVPQNKTSLLAKAACKIAGRSINAAVIQSVVLGCTTHCPGQWLRRTLLYPRTKSKVSKAGHEWRAFAVAQPEPLLRFALCSGSHSDPAVRVYTPKRLFHQLEAAKEEFIRATAGVWKEQKLLLPKLVEAYAKDVRLSPQGLVDMVQRHLPETMRVAVQRCQQGGRASSGKVVVDWVPHNPAFRYLLARDLAFPHLS

SEQ ID NO: 24579 - protein, 652 aa, Zea mays subsp. mays
  misc_feature (1)..(652): Ceres Seq. ID no. 12435881
MEVEALEKGYTAFAKAVKSFTSSERYKRSESRSYFEDMYGTDALRSSDKTIVLPMPEAVKAKVKGDISKEAQPGRGAQSTLRKEILELEKHFREQQVVSGALENALGPNAGSVNFSPENPMPKAANELIREIATLELEVKNMEQYLLTLYRKAFEQQAPALSPPDCREASKPSVSSRFGQLRETPVAAKSCKSGGGDAALRTSYPPPAHKKLNDPLADCCTSARSHRAVDSDVLRCQSALSYRGVCSSRVLPSEEDDDSLARALRSCHSQPFSFAEEGEGAGASGGAISLAEYLGTNVADHIPETPNNLSEEMVRCMAGIYCRLADPPLVHHGSSSSPTLSFSSTTSAVSPQYVGDDMWSPSYRRREAMTLDSRLINPFHVEGLKEFSGPYNTMVEVPTISRDGRRMKEAEDLLQTYRLVLYRLEAVDLRTMTNEEKIAFWVNVHNALLMHAYLENGVPQNKTSLLAKAACKIAGRSINAAVIQSVVLGCTTHCPGQWLRRTLLYPRTKSKVSKAGHEWRAFAVAQPEPLLRFALCSGSHSDPAVRVYTPKRLFHQLEAAKEEFIRATAGVWKEQKLLLPKLVEAYAKDVRLSPQGLVDMVQRHLPETMRVAVQRCQQGGRASSGKVVVDWVPHNPAFRYLLARDLAFPHLS

SEQ ID NO: 24580 - protein, 615 aa, Zea mays subsp. mays
  misc_feature (1)..(615): Ceres Seq. ID no. 12435882
MYGTDALRSSDKTIVLPMPEAVKAKVKGDISKEAQPGRGAQSTLRKEILELEKHFREQQVVSGALENALGPNAGSVNFSPENPMPKAANELIREIATLELEVKNMEQYLLTLYRKAFEQQAPALSPPDCREASKPSVSSRFGQLRETPVAAKSCKSGGGDAALRTSYPPPAHKKLNDPLADCCTSARSHRAVDSDVLRCQSALSYRGVCSSRVLPSEEDDDSLARALRSCHSQPFSFAEEGEGAGASGGAISLAEYLGTNVADHIPETPNNLSEEMVRCMAGIYCRLADPPLVHHGSSSSPTLSFSSTTSAVSPQYVGDDMWSPSYRRREAMTLDSRLINPFHVEGLKEFSGPYNTMVEVPTISRDGRRMKEAEDLLQTYRLVLYRLEAVDLRTMTNEEKIAFWVNVHNALLMHAYLENGVPQNKTSLLAKAACKIAGRSINAAVIQSVVLGCTTHCPGQWLRRTLLYPRTKSKVSKAGHEWRAFAVAQPEPLLRFALCSGSHSDPAVRVYTPKRLFHQLEAAKEEFIRATAGVWKEQKLLLPKLVEAYAKDVRLSPQGLVDMVQRHLPETMRVAVQRCQQGGRASSGKVVVDWVPHNPAFRYLLARDLAFPHLS

SEQ ID NO: 24581 - DNA, 2160 bp, Zea mays subsp. mays
  misc_feature (1)..(2160): Ceres Seq. ID no. 12435948
atcctttccactactctcgtcagcttgctcagctcagctagctagctagctttcccctccctgctgcaatgcaagcttgcccaacccaataagctaagcaagcactcatcacacactctctacttgctagctagccgcccttagcttcggacgcgacatctatcatcggccaagaaacggagcagatcggtcggccgccgacatgggggatcacgctgagatgttgcatgccactccggccatatacaacggcgccggcgctgcccctcgtggtggctggtggagtacggccgtgcccgcgaccacgtgctcgacggagctggccggcttcaccacgtggtcgtccgccctggctgctagctacgacctggcggcggagggggcaaaggccaacaagagcgccaccaccgcctcgtcggagtcgcccgggaacaacagctccgtgaccttccaagaaccggccggcggcgtcggaaccgccgtggtgcagcagcctcttgctggttgcgctgactggacgcatccctatttgagcagcggcgctgctactttgcatgggtttatgcaagatggtcaccagcaggacatgagctcatcgacaactgagcagagccccatggccgcatcaagcctgataatgaacccttcatccaataacctagccctggccctgcaacaaggtcaccatcaccaagagccggaccaccagcagatgctgtccaacttcggcggctccgaggccgagctgctcctgtcgccgacgacctcaccctacgggttccagtcgtctctgctgagaagcttcatggagccgacagcggcggcggcgaagccggctttgccggggtaccggcagcagtatgaccagtaccagcagatgggcatgggccaggcgaggtttgcaccggccggcggagctgccagcagggaggcactccagttcaccaacgacgcgccgtcctggaacccttctgctgctgcggctgggttcggcgtgccgccggcgccggcgccggttgaccaagctagcagcagcgtacgttctgtgaaaccatcgccggcggcgcgtgctactgcaacccttgcattaaagactgcgttggaaggagtaggagagtctgctagctccatcatcaccaagaagaaggcaaacggagagctggcgccggccttcaagaaatcgaggctccagacgccgtcgccgttgccaacgttcaaggttaggaaggagaaggtaggggacagggtcactgcactccaacaactcgtcgccccttttggaaagacggatacagcatcggtgctccatgagaccatcgagtacatcaagttcctccacgaccaggtcggggtccttagtgctccatacttgaagaacaacggccatcaagtgccctacctgaagagatcaagtcctgacaggtccgaggacgacagcagccatgccggcgagagatcactcaagggccgggggctgtgcctggtcccgatatcgagcacgttcgcggtagccagcgaggtgcccgtcgatttcgggtggagtactgcatttgctgccagctttaggtagaagagaaggctgggaacgaagagcgcgccaaagctctgatcagaggcgtcgaacgagtatataactagctagctagccagctaccacagatcgatcgacctgccctgctgacgatattatatgcatatgtcgatgcgtttctgatctagtgagtctagcagtgtatggttatgcgtggttatctctctctcataactatagtacgtactaagcatgcatgcagcagctctggcaacgaaaaaggattgcagattgagcttgcattgcttgcttgctagctcgagatgaacctttggaatgagtcctgaagacttggattcattctccaggttcatctatccatcagggaataagctacttaagaggtggtcatctaataggtttgagaggacacacaacaagtctctactgatcgtcatcatcagcttctaactattacggttgttggttgttggattgcatcattgggtagttgtcgaaggatttgttaaatatgtgtaatgatttctagtttaatttagtatggatcaaagtgtgtagcaggtctctattgattgtactaccaaataaattaaagtgtcatctctttg

SEQ ID NO: 24582 - protein, 455 aa, Zea mays subsp. mays
  misc_feature (1)..(455): Ceres Seq. ID no. 12435949
MGDHAEMLHATPAIYNGAGAAPRGGWWSTAVPATTCSTELAGFTTWSSALAASYDLAAEGAKANKSATTASSESPGNNSSVTFQEPAGGVGTAVVQQPLAGCADWTHPYLSSGAATLHGFMQDGHQQDMSSSTTEQSPMAASSLIMNPSSNNLALALQQGHHHQEPDHQQMLSNFGGSEAELLLSPTTSPYGFQSSLLRSFMEPTAAAAKPALPGYRQQYDQYQQMGMGQARFAPAGGAASREALQFTNDAPSWNPSAAAAGFGVPPAPAPVDQASSSVRSVKPSPAARATATLALKTALEGVGESASSIITKKKANGELAPAFKKSRLQTPSPLPTFKVRKEKVGDRVTALQQLVAPFGKTDTASVLHETIEYIKFLHDQVGVLSAPYLKNNGHQVPYLKRSSPDRSEDDSSHAGERSLKGRGLCLVPISSTFAVASEVPVDFGWSTAFAASFR

SEQ ID NO: 24583 - protein, 449 aa, Zea mays subsp. mays
  misc_feature (1)..(449): Ceres Seq. ID no. 12435950
MLHATPAIYNGAGAAPRGGWWSTAVPATTCSTELAGFTTWSSALAASYDLAAEGAKANKSATTASSESPGNNSSVTFQEPAGGVGTAVVQQPLAGCADWTHPYLSSGAATLHGFMQDGHQQDMSSSTTEQSPMAASSLIMNPSSNNLALALQQGHHHQEPDHQQMLSNFGGSEAELLLSPTTSPYGFQSSLLRSFMEPTAAAAKPALPGYRQQYDQYQQMGMGQARFAPAGGAASREALQFTNDAPSWNPSAAAAGFGVPPAPAPVDQASSSVRSVKPSPAARATATLALKTALEGVGESASSIITKKKANGELAPAFKKSRLQTPSPLPTFKVRKEKVGDRVTALQQLVAPFGKTDTASVLHETIEYIKFLHDQVGVLSAPYLKNNGHQVPYLKRSSPDRSEDDSSHAGERSLKGRGLCLVPISSTFAVASEVPVDFGWSTAFAASFR

SEQ ID NO: 24584 - protein, 335 aa, Zea mays subsp. mays
  misc_feature (1)..(335): Ceres Seq. ID no. 12435951
MQDGHQQDMSSSTTEQSPMAASSLIMNPSSNNLALALQQGHHHQEPDHQQMLSNFGGSEAELLLSPTTSPYGFQSSLLRSFMEPTAAAAKPALPGYRQQYDQYQQMGMGQARFAPAGGAASREALQFTNDAPSWNPSAAAAGFGVPPAPAPVDQASSSVRSVKPSPAARATATLALKTALEGVGESASSIITKKKANGELAPAFKKSRLQTPSPLPTFKVRKEKVGDRVTALQQLVAPFGKTDTASVLHETIEYIKFLHDQVGVLSAPYLKNNGHQVPYLKRSSPDRSEDDSSHAGERSLKGRGLCLVPISSTFAVASEVPVDFGWSTAFAASFR

SEQ ID NO: 24585 - DNA, 2267 bp, Zea mays subsp. mays
  misc_feature (1)..(2267): Ceres Seq. ID no. 12435965
tagaaagcaatcgcccgcggtattatccatccaccacgctgcatctgcttctcacgccgcctcgccttcctcttccacccctcgccgtccgtcgtcctcagcgcttgtacgcttgcctcaaaacccctggcgccgtgctaaaaccctagccctcgaattccttcccctgcccgcgcggagcagacgagcctgagcccgtcctcctcgtccatggcgtcctcaggggccgccgctaacctctgggtactgcttggtctcggcatcgcgggcgttctcctggcggcgcggcgactgaggcgccctgcgcgccccgatcacggcgccttcgtcgcccgcctcgagctcctcccgccgccccagcctccgccgccgcaggcgccccacccgctcaccggactctgcttcgccatcgctgacgcattgcatgtcagtggttatattacaagtttcggcagtcttgaatgggcaaagacacacaatgcagaagtgctaacatcttcagtggtttcagctcttgttgatggtggtgctatttgtgttgggaaaactgttattgatgagatggcatacagtatccatggtgagaatagatattttgatacaccaacaaatcctgccgctccagatcgagtaccaggaggatgttcaagtggatcagctgttgcagttgctggtggaatggtagattttgccctgggtattgactcgattggaggtgtaaggatacctggtgcttattgtggtgtcttagcattcaggccttcgcatgctgtggtttccaatagtggtgtcattcctgttgcacctagcctggacactataggttggtttgcaaaggatccaagtgttttgcatcgtgttgggcatcttcttcttagacttccttatgctggtattcgccaaccgagaattttttacatagcagatgattgctttgaactttcaaagatacctgctaggagacttactcaggtggtgacaaaatctgtggagaagctctttggaagacaagtccggcatgtgaatctcgaaaattatttgagttcaagaatatccagcctgggtaactattcaaatgggcataagaatggggattcaaagttccctctgttgctagcactttgtaactccatgatatcacttcacaagcaggaattcaaagataagcatatggagtggataaattcagttaagcctgctgtggatgcacgcatagtcagtgatttgtctgaggatggtgattcagatattgatggctgccaaaatgtgaggaaagaagcgcgctctgctctaagtggacttcttaaggatgatgggattctggtgattccaactgctttggggtgccccccgaagcttaacgctaaggaactctcgtctgaaagctacaattctcagacactacgccttttgtctttagctagcatgtcagggtgttgccaggtttccattcctttgggtacacatgataagtgccccatttcagtttcgttgattgctaggcatggtggtgatcggtttttgttggacaccacacaaaccatgtatacaaccatccaagagcaagtggagatactagcgaaatctagtgtttcaagtaaacaggcgatgaatgaagaagcagctgaagctgctaaagagaaaggtaatgctgcatttaaggaaaaacaatggcaaaaggcagtaaatttctacactgaagcaataaagttaaatggaaaagtggctacatactacagcaacagagctgctgcctttctagaactaactagctaccgtcaggctgaggcagattgcacaagtgccatcgaacttgattccaagagcgtgaaagcttatttacggagaggcactgcaagggagatgctaggttattataaggaggccgttgatgatttcaaccacgcccttgttctagaaccaatgaacaagacggctggtgttgccatcaacaggttaaagaagctgtttccttgaatatgaagctgcatgaagatatgataacctcatattttgtgcacacacaaggggtgggattgaagtacctgagttcaaccgacggatgctgatcacagtttgagctagtgggaacggatttcaacactgagatcaggttaagggtcaatttagcggtttctctccccacccaaagttttggaaaagcaaaataaagaaggttttttgggaaccggaaagcagtttacgggtgtccgccatccccaccatgtataatatagtttcgccaattatttgttcagacgctttgc

SEQ ID NO: 24586 - protein, 588 aa, Zea mays subsp. mays
  misc_feature (1)..(588): Ceres Seq. ID no. 12435966
MASSGAAANLWVLLGLGIAGVLLAARRLRRPARPDHGAFVARLELLPPPQPPPPQAPHPLTGLCFAIADALHVSGYITSFGSLEWAKTHNAEVLTSSVVSALVDGGAICVGKTVIDEMAYSIHGENRYFDTPTNPAAPDRVPGGCSSGSAVAVAGGMVDFALGIDSIGGVRIPGAYCGVLAFRPSHAVVSNSGVIPVAPSLDTIGWFAKDPSVLHRVGHLLLRLPYAGIRQPRIFYIADDCFELSKIPARRLTQVVTKSVEKLFGRQVRHVNLENYLSSRISSLGNYSNGHKNGDSKFPLLLALCNSMISLHKQEFKDKHMEWINSVKPAVDARIVSDLSEDGDSDIDGCQNVRKEARSALSGLLKDDGILVIPTALGCPPKLNAKELSSESYNSQTLRLLSLASMSGCCQVSIPLGTHDKCPISVSLIARHGGDRFLLDTTQTMYTTIQEQVEILAKSSVSSKQAMNEEAAEAAKEKGNAAFKEKQWQKAVNFYTEAIKLNGKVATYYSNRAAAFLELTSYRQAEADCTSAIELDSKSVKAYLRRGTAREMLGYYKEAVDDFNHALVLEPMNKTAGVAINRLKKLFP

SEQ ID NO: 24587 - protein, 471 aa, Zea mays subsp. mays
  misc_feature (1)..(471): Ceres Seq. ID no. 12435967
MAYSIHGENRYFDTPTNPAAPDRVPGGCSSGSAVAVAGGMVDFALGIDSIGGVRIPGAYCGVLAFRPSHAVVSNSGVIPVAPSLDTIGWFAKDPSVLHRVGHLLLRLPYAGIRQPRIFYIADDCFELSKIPARRLTQVVTKSVEKLFGRQVRHVNLENYLSSRISSLGNYSNGHKNGDSKFPLLLALCNSMISLHKQEFKDKHMEWINSVKPAVDARIVSDLSEDGDSDIDGCQNVRKEARSALSGLLKDDGILVIPTALGCPPKLNAKELSSESYNSQTLRLLSLASMSGCCQVSIPLGTHDKCPISVSLIARHGGDRFLLDTTQTMYTTIQEQVEILAKSSVSSKQAMNEEAAEAAKEKGNAAFKEKQWQKAVNFYTEAIKLNGKVATYYSNRAAAFLELTSYRQAEADCTSAIELDSKSVKAYLRRGTAREMLGYYKEAVDDFNHALVLEPMNKTAGVAINRLKKLFP

SEQ ID NO: 24588 - protein, 432 aa, Zea mays subsp. mays
  misc_feature (1)..(432): Ceres Seq. ID no. 12435968
MVDFALGIDSIGGVRIPGAYCGVLAFRPSHAVVSNSGVIPVAPSLDTIGWFAKDPSVLHRVGHLLLRLPYAGIRQPRIFYIADDCFELSKIPARRLTQVVTKSVEKLFGRQVRHVNLENYLSSRISSLGNYSNGHKNGDSKFPLLLALCNSMISLHKQEFKDKHMEWINSVKPAVDARIVSDLSEDGDSDIDGCQNVRKEARSALSGLLKDDGILVIPTALGCPPKLNAKELSSESYNSQTLRLLSLASMSGCCQVSIPLGTHDKCPISVSLIARHGGDRFLLDTTQTMYTTIQEQVEILAKSSVSSKQAMNEEAAEAAKEKGNAAFKEKQWQKAVNFYTEAIKLNGKVATYYSNRAAAFLELTSYRQAEADCTSAIELDSKSVKAYLRRGTAREMLGYYKEAVDDFNHALVLEPMNKTAGVAINRLKKLFP

SEQ ID NO: 24589 - DNA, 1384 bp, Zea mays subsp. mays
  misc_feature (1)..(1384): Ceres Seq. ID no. 12435980
aaggaaacgtcacgtcaccaccacacacctcttcggctcttcctcttctcctccgtatagcggcgggcctccgtcgccccccttccaccccgttttgccgccccgcaggccacagcccaaaatcctcctcgtcgctggtgccctctccgcggcctcctccgccagccatggccgccgctgggcccgggctctactccgacatcgggaagaaggcaagaggtctcctgtacaaggactaccacactgaccggaagttcacgctcaccacttacgccgccaacggagctttcaaggcgcgtgtcaccatggacatgaagcaccgcgtcgtccgcgccatgatcgcgggtagcatgggagacggtgatggcgcacccgtgcatgtccaggataagaccgagtcggccattactgctgcaagcacaaggaaagatgaagctatctttaataaaatccagggccagctgaagcacaacaatgtgactgtggatgtgaaagcaacttcagaatcaaaagtgacaactacaatcacagttcacgagctagccacaccaggcctgaaggcatttttatgcattcctttcccgtacaagaaatctgcaaaggctgaactccagtacttgcaccaccatgctggtgttgctgcaagtgttggcctaaatgcaaaccctgtcgttaagctttctggtgtattcggaactaaaactgtttctgttggtgctgatgttgcatttgatacttcatccgggaacttaaccaaatacaatgctggactgagctactccacgtctgacttcgttgctgcagctactttgaacaacaaaggagacaagatcgccgcttcctactaccattcggtaagtccaaccacagctgttggaggagagctgagccacagcttctcgaccaacgggagcaccatcaccttcgggacgcagcatgccctggaccgtctgaccactgtgaaggcacgattcaacaactgcggcatggcaagcgcactgatccaacacaagtggaggcccaagtctttggtcaccatctccatggaggtggacaccaaggccatcgagaagagctccaagattgagctctccctcgtcctgaagccctgaggtcaccgccagcttctagttttgggatatactaggtctattttttttatctgcagctgaagtctccagcaaacaagtaaacctgtcaactttggtgccgatcccacaaactcaagttcacggtctctttggtggaaaactatgcggttttgtataccactggttgatgatgtttggagaaagttcagtatggctcaccagtcaccactgtctctcagattttaactgtttgatttgtcgattctttattcatacagatcgcaatttttttc

SEQ ID NO: 24590 - protein, 369 aa, Zea mays subsp. mays
  misc_feature (1)..(369): Ceres Seq. ID no. 12435981
GNVTSPPHTSSALPLLLRIAAGLRRPPSTPFCRPAGHSPKSSSSLVPSPRPPPPAMAAAGPGLYSDIGKKARGLLYKDYHTDRKFTLTTYAANGAFKARVTMDMKHRVVRAMIAGSMGDGDGAPVHVQDKTESAITAASTRKDEAIFNKIQGQLKHNNVTVDVKATSESKVTTTITVHELATPGLKAFLCIPFPYKKSAKAELQYLHHHAGVAASVGLNANPVVKLSGVFGTKTVSVGADVAFDTSSGNLTKYNAGLSYSTSDFVAAATLNNKGDKIAASYYHSVSPTTAVGGELSHSFSTNGSTITFGTQHALDRLTTVKARFNNCGMASALIQHKWRPKSLVTISMEVDTKAIEKSSKIELSLVLKP

SEQ ID NO: 24591 - protein, 314 aa, Zea mays subsp. mays
  misc_feature (1)..(314): Ceres Seq. ID no. 12435982
MAAAGPGLYSDIGKKARGLLYKDYHTDRKFTLTTYAANGAFKARVTMDMKHRVVRAMIAGSMGDGDGAPVHVQDKTESAITAASTRKDEAIFNKIQGQLKHNNVTVDVKATSESKVTTTITVHELATPGLKAFLCIPFPYKKSAKAELQYLHHHAGVAASVGLNANPVVKLSGVFGTKTVSVGADVAFDTSSGNLTKYNAGLSYSTSDFVAAATLNNKGDKIAASYYHSVSPTTAVGGELSHSFSTNGSTITFGTQHALDRLTTVKARFNNCGMASALIQHKWRPKSLVTISMEVDTKAIEKSSKIELSLVLKP

SEQ ID NO: 24592 - protein, 268 aa, Zea mays subsp. mays
  misc_feature (1)..(268): Ceres Seq. ID no. 12435983
MDMKHRVVRAMIAGSMGDGDGAPVHVQDKTESAITAASTRKDEAIFNKIQGQLKHNNVTVDVKATSESKVTTTITVHELATPGLKAFLCIPFPYKKSAKAELQYLHHHAGVAASVGLNANPVVKLSGVFGTKTVSVGADVAFDTSSGNLTKYNAGLSYSTSDFVAAATLNNKGDKIAASYYHSVSPTTAVGGELSHSFSTNGSTITFGTQHALDRLTTVKARFNNCGMASALIQHKWRPKSLVTISMEVDTKAIEKSSKIELSLVLKP

SEQ ID NO: 24593 - DNA, 1298 bp, Zea mays subsp. mays
  misc_feature (1)..(1298): Ceres Seq. ID no. 12436055
aaaactgggaaagccacacgtaacctctccccgccgatcccttccttccatccttccgccacgcgcggcagcggttcgtcacactcacacgcacacaccatggcgtccacgccacggacgccggcgccggagcggtctccgccgcccgtgcccactcctcctccgcctctggaggacgagccgccgccgtatctggccgacgggtcgccgcgggaggaggccagcttctccagcgacgggagggaaggagcgccccccaagaacccgcagctctcgcccacgcaccacgctgcgccacgcctcgtgccgccgcccagcagcccagccaggcaagacgggcaagaacaagaagggagcgctaataaggccgccgcggccacggcggagccggcccgcgagccgctccgccagatggcgacgggcctcgcccggccactgtcgtcgcagacgtcgcccgccaccaccaactctcctactccgtcggcgtctccgacgccgtcgagtcccgcgcccgtggccaacaacagcaagaggagcggccagagcacgcccaagcgcgcggagacgaagctgccgctgtcgtcgccggccgtcgcggtgcacttcgacccagtcgaggaggccgtcacgtcgccgctgcgcctcggcaaggcgcgcctcgaccagcagcagcagcagcagcacgcggcgggggcggcggagagcggggcatccgtggtccccggtgtggcggcggccgtggccgcggtcgccgagcggagggagctgttgctggcgctgcgcctggccacggcggtgctcagcctcgcggccttctcggtgatcgccagtgcccggacgtccggatgggccggcgactactacgcccgccacctgcagtacaggtacgccgtcgcagtgaacgtgatcgtgttcgcctactcggtcgcgcagtcattgggcaaaatccgccacctggtctcacccaggtttacgttccggaccatgtcgagctactactgcagcctgttcctggaccaggttctggcgtacctcctcatgtcggcgtcgtcggcggccgcgtcgcgcaacgacctgtgggtgtccaggttcggcacggacgccttcgtcaggaagatcaccggcgccctgtggctgtccttcgtcgcgttcctggtgctcgctctgaacgcggtcatctccacggctaatctcttcagcatggtctgacacgactcgtcctgctctggcgttgttggaatcaagtactaattgtagattctggaaataaatgtaaccgcgcgttaattagctgttgc

SEQ ID NO: 24594 - protein, 402 aa, Zea mays subsp. mays
  misc_feature (1)..(402): Ceres Seq. ID no. 12436056
KTGKATRNLSPPIPSFHPSATRGSGSSHSHAHTMASTPRTPAPERSPPPVPTPPPPLEDEPPPYLADGSPREEASFSSDGREGAPPKNPQLSPTHHAAPRLVPPPSSPARQDGQEQEGSANKAAAATAEPAREPLRQMATGLARPLSSQTSPATTNSPTPSASPTPSSPAPVANNSKRSGQSTPKRAETKLPLSSPAVAVHFDPVEEAVTSPLRLGKARLDQQQQQQHAAGAAESGASVVPGVAAAVAAVAERRELLLALRLATAVLSLAAFSVIASARTSGWAGDYYARHLQYRYAVAVNVIVFAYSVAQSLGKIRHLVSPRFTFRTMSSYYCSLFLDQVLAYLLMSASSAAASRNDLWVSRFGTDAFVRKITGALWLSFVAFLVLALNAVISTANLFSMV

SEQ ID NO: 24595 - protein, 369 aa, Zea mays subsp. mays
  misc_feature (1)..(369): Ceres Seq. ID no. 12436057
MASTPRTPAPERSPPPVPTPPPPLEDEPPPYLADGSPREEASFSSDGREGAPPKNPQLSPTHHAAPRLVPPPSSPARQDGQEQEGSANKAAAATAEPAREPLRQMATGLARPLSSQTSPATTNSPTPSASPTPSSPAPVANNSKRSGQSTPKRAETKLPLSSPAVAVHFDPVEEAVTSPLRLGKARLDQQQQQQHAAGAAESGASVVPGVAAAVAAVAERRELLLALRLATAVLSLAAFSVIASARTSGWAGDYYARHLQYRYAVAVNVIVFAYSVAQSLGKIRHLVSPRFTFRTMSSYYCSLFLDQVLAYLLMSASSAAASRNDLWVSRFGTDAFVRKITGALWLSFVAFLVLALNAVISTANLFSMV

SEQ ID NO: 24596 - protein, 273 aa, Zea mays subsp. mays
  misc_feature (1)..(273): Ceres Seq. ID no. 12436058
KLGKPHVTSPRRSLPSILPPRAAAVRHTHTHTPWRPRHGRRRRSGLRRPCPLLLRLWRTSRRRIWPTGRRGRRPASPATGGKERPPRTRSSRPRTTLRHASCRRPAAQPGKTGKNKKGALIRPPRPRRSRPASRSARWRRASPGHCRRRRRPPPPTLLLRRRLRRRRVPRPWPTTARGAARARPSARRRSCRCRRRPSRCTSTQSRRPSRRRCASARRASTSSSSSSTRRGRRRAGHPWSPVWRRPWPRSPSGGSCCWRCAWPRRCSASRPSR

SEQ ID NO: 24597 - DNA, 2535 bp, Zea mays subsp. mays
  misc_feature (1)..(2535): Ceres Seq. ID no. 12436063
ataagacgtcgcgctgctgctgccaccgcagtcgccgactcgtccgcagtgcaatgccgggggcctgccaggacctcagcaccatcacgcccacaccacggcggcagagtatggcgcagctccagcgcgggtccgtgctggttggtgggcgcgagctcctcgtccgcgccccgcccaacgtcaacctacggcccgccggtgccggcgtcgccgacggcggggccgcctcgggcgccgcgttcctcggagccagggctccggccgcgtccagccgccacgtgttctccgtcggaaacctggctagtgggtggaggtggttgtcgttgttcaggttcaagatctggtggatgatcccggccacgggcgtcggcgcggcggctgtgccggcggagacgcagatgctgcttctggagtacaggagcgaggcgggtcctgcggccgcgacggagcgtggctcactgtacgcgctggtgctgccagttcttgacggcggcttccgagccagcctccaggggagccccgaggacgagctacagttctgcttcgagagcggtgatcctgatgtccagacgatggaagcagttgatgcagtgttcgtcaactcaggggacaaccccttcaagcttctgaaagaatccatcaagatgttgtccaagatcaaaggaactttcagtcatatagaggacaaggagatcccttcaaatttggactggtttgggtggtgcacttgggatgcattttacaaagctgttaacccaagtgggattgaggagggccttcaaagtctgcgtgaaggtggtgtgccgccaaggtttctgattatagatgatggttggcaagaaacagttgacgaaatcaaggaagtgaatgaagccctccgtgagcagactgtatttgcgcagaggctggctgatctgaaggagaatcataagttcagaggggaaacctgcaagaatcttgaggaccttgttaaaacgataaaaggaaaacatggagtcaagtgtgtctacatgtggcatgctttacttggatattggggaggtaccttagcaacatccgaagtgatgaagaagtataatccaaagcttgtttatccagtccaatcgcggggtaatgttgcgaatctgagggatattgccatggacagcttggagaaatttggagtgggcatcgttgatcctgacaagatatatgagttctacaatgatcagcacagctacctttctagtgtgggtgtggatggcgtgaaggttgatgttcagaacgtgttggaaacccttggacgcggatttggtggtcgtgttgcagtaactcgaaagtaccagcaggctcttgaggaatcaattgcccagaacttcaaaacaaacaacctaatctgctgcatgagtcacaattcagacagcatctttagtgccttgaagggtgcagttgctagagcctcagaagatttcatgcctcgggaaccaacactgcaaactctgcacattgcgtctgtggcattcaatagcctattgttgggagaaatcttcatacctgactgggatatgttccatagcaagcatgaatcagcggaattccacggagcagctagagccctgagtggaggtggtgtttatgtcagtgacaaacctggggtgcatgatttcagtgttctaaaaaagcttgttctaccagatggttcgattctaagagcaaggtatgctggtcgtcctacacgcgattgtctgttcactgacccagtcatggatggcaaaagtctgatgaagatatggaacttgaacaatttcactggtgtcattggagtgttcaattgtcagggagctggacagtgggtttggccagttaaacaaactgcttatgttcctaccaacataaacatcactggtcagctctcaccgtctgacgtagaatctctcgaggagatagctggtgatgactggaatggggagactgcagtatatgctttcggttcatgttctctttcaaggcttcagaaacaccaaagtttggaggtgtcactgtctactatgacatgtgagatctacagcatttcaccaataaagattttcagcgaagtcgtccagtttacgcctcttggactgatcgacatgttcaactccggtggtgcacttgacaatatttcaagcgttgcagattcttcagctacgacagttcatataagatgccgaggaccagggcggtttggggcgtattcagacaccaggccagagctttgcagagttgatgaacacgaagtggagttcactcttgcagaggatggcctcctgaccttttaccttcccccttcttcctcccaggacaacctgagacacgttgagattgtctacaaagcatcatgaacgacatttacccttatgattcttacgctccagcatgcaatttctggcgtgctcttcagtaaccaccacacatgcacattgacatgatgtaacaaggaacccattttgttggatttgactgtgtatgctgtgctgcaaatacctgttttatacgattgttctgcacctggactgc

SEQ ID NO: 24598 - protein, 785 aa, Zea mays subsp. mays
  misc_feature (1)..(785): Ceres Seq. ID no. 12436064
KTSRCCCHRSRRLVRSAMPGACQDLSTITPTPRRQSMAQLQRGSVLVGGRELLVRAPPNVNLRPAGAGVADGGAASGAAFLGARAPAASSRHVFSVGNLASGWRWLSLFRFKIWWMIPATGVGAAAVPAETQMLLLEYRSEAGPAAATERGSLYALVLPVLDGGFRASLQGSPEDELQFCFESGDPDVQTMEAVDAVFVNSGDNPFKLLKESIKMLSKIKGTFSHIEDKEIPSNLDWFGWCTWDAFYKAVNPSGIEEGLQSLREGGVPPRFLIIDDGWQETVDEIKEVNEALREQTVFAQRLADLKENHKFRGETCKNLEDLVKTIKGKHGVKCVYMWHALLGYWGGTLATSEVMKKYNPKLVYPVQSRGNVANLRDIAMDSLEKFGVGIVDPDKIYEFYNDQHSYLSSVGVDGVKVDVQNVLETLGRGFGGRVAVTRKYQQALEESIAQNFKTNNLICCMSHNSDSIFSALKGAVARASEDFMPREPTLQTLHIASVAFNSLLLGEIFIPDWDMFHSKHESAEFHGAARALSGGGVYVSDKPGVHDFSVLKKLVLPDGSILRARYAGRPTRDCLFTDPVMDGKSLMKIWNLNNFTGVIGVFNCQGAGQWVWPVKQTAYVPTNINITGQLSPSDVESLEEIAGDDWNGETAVYAFGSCSLSRLQKHQSLEVSLSTMTCEIYSISPIKIFSEVVQFTPLGLIDMFNSGGALDNISSVADSSATTVHIRCRGPGRFGAYSDTRPELCRVDEHEVEFTLAEDGLLTFYLPPSSSQDNLRHVEIVYKAS

SEQ ID NO: 24599 - protein, 768 aa, Zea mays subsp. mays
  misc_feature (1)..(768): Ceres Seq. ID no. 12436065
MPGACQDLSTITPTPRRQSMAQLQRGSVLVGGRELLVRAPPNVNLRPAGAGVADGGAASGAAFLGARAPAASSRHVFSVGNLASGWRWLSLFRFKIWWMIPATGVGAAAVPAETQMLLLEYRSEAGPAAATERGSLYALVLPVLDGGFRASLQGSPEDELQFCFESGDPDVQTMEAVDAVFVNSGDNPFKLLKESIKMLSKIKGTFSHIEDKEIPSNLDWFGWCTWDAFYKAVNPSGIEEGLQSLREGGVPPRFLIIDDGWQETVDEIKEVNEALREQTVFAQRLADLKENHKFRGETCKNLEDLVKTIKGKHGVKCVYMWHALLGYWGGTLATSEVMKKYNPKLVYPVQSRGNVANLRDIAMDSLEKFGVGIVDPDKIYEFYNDQHSYLSSVGVDGVKVDVQNVLETLGRGFGGRVAVTRKYQQALEESIAQNFKTNNLICCMSHNSDSIFSALKGAVARASEDFMPREPTLQTLHIASVAFNSLLLGEIFIPDWDMFHSKHESAEFHGAARALSGGGVYVSDKPGVHDFSVLKKLVLPDGSILRARYAGRPTRDCLFTDPVMDGKSLMKIWNLNNFTGVIGVFNCQGAGQWVWPVKQTAYVPTNINITGQLSPSDVESLEEIAGDDWNGETAVYAFGSCSLSRLQKHQSLEVSLSTMTCEIYSISPIKIFSEVVQFTPLGLIDMFNSGGALDNISSVADSSATTVHIRCRGPGRFGAYSDTRPELCRVDEHEVEFTLAEDGLLTFYLPPSSSQDNLRHVEIVYKAS

SEQ ID NO: 24600 - protein, 749 aa, Zea mays subsp. mays
  misc_feature (1)..(749): Ceres Seq. ID no. 12436066
MAQLQRGSVLVGGRELLVRAPPNVNLRPAGAGVADGGAASGAAFLGARAPAASSRHVFSVGNLASGWRWLSLFRFKIWWMIPATGVGAAAVPAETQMLLLEYRSEAGPAAATERGSLYALVLPVLDGGFRASLQGSPEDELQFCFESGDPDVQTMEAVDAVFVNSGDNPFKLLKESIKMLSKIKGTFSHIEDKEIPSNLDWFGWCTWDAFYKAVNPSGIEEGLQSLREGGVPPRFLIIDDGWQETVDEIKEVNEALREQTVFAQRLADLKENHKFRGETCKNLEDLVKTIKGKHGVKCVYMWHALLGYWGGTLATSEVMKKYNPKLVYPVQSRGNVANLRDIAMDSLEKFGVGIVDPDKIYEFYNDQHSYLSSVGVDGVKVDVQNVLETLGRGFGGRVAVTRKYQQALEESIAQNFKTNNLICCMSHNSDSIFSALKGAVARASEDFMPREPTLQTLHIASVAFNSLLLGEIFIPDWDMFHSKHESAEFHGAARALSGGGVYVSDKPGVHDFSVLKKLVLPDGSILRARYAGRPTRDCLFTDPVMDGKSLMKIWNLNNFTGVIGVFNCQGAGQWVWPVKQTAYVPTNINITGQLSPSDVESLEEIAGDDWNGETAVYAFGSCSLSRLQKHQSLEVSLSTMTCEIYSISPIKIFSEVVQFTPLGLIDMFNSGGALDNISSVADSSATTVHIRCRGPGRFGAYSDTRPELCRVDEHEVEFTLAEDGLLTFYLPPSSSQDNLRHVEIVYKAS

SEQ ID NO: 24601 - DNA, 1731 bp, Zea mays subsp. mays
  misc_feature (1)..(1731): Ceres Seq. ID no. 12436071
aggcgcaggcgcgagcgcgacgtccggcgtccggcttcggcggcggagtggagcgatcccgatccccacaaggaattccatcgctgtcgtggcgtttggtggcgctcctcccggccggcaagcaggatcaggtaccctcccgtcccggatcctcccaaccgttccgtttcccgcggccgggctggcttagttctgcggcgctggttgccatttcgggccaaatttgttgcgtgaagcggaaggatttggattgaatggcacgcgttgtttccagtcgacgccctcttggcttgcctttggctgtaggaaatcgcacggaggtgaggatacacgggtgcggaacgagagctaggcgaacctgtctggtacctcgcggcggagatggacgagaaggcgacgatggagagcaagctgtcctcggcggcggccttcgtggaggggggcgtgcaggacgcctgcgacgacgcctgcagcatctgcctcgacgccttctgcgacagcaaccccttccacgatgaccaagtgcaagcatgactaccatcttcagtgcattcttgaatggtgtatattataattcatgtaataatttaggtgccagagaagctcccagtgccccatgtgttggcagcatatcagcatgaaagatcctatgagccaagagctactagaggctgttgaacaagagaggaacatccgagctaatccttcacgtaatactgctgttttccaccatcaaatgctgggtgattttgagatccctgtaggtgcagatgatgcagaacttgaagaacgcattattcagcacttggctgccgcagctgcagtgcgtaggtcacaccgtcatcataatagaagagatgggcaccagagcagatcagaagcaagtagccacccacagtttctggtgctctcagcagacgagcgcacaatctcaggtcaagaaggggactacgaacaagcatctgctgtagcttctggccgccctttacgtacacttgttgaacaagaacgcactcgagggttagcggatgcttccagtccatctctccgttgttctactcctgctgatagtactggtagatcaaacaataggatttctgggatcgaatctacacctgtggatcaagacggaactggaccatccgctttacaatcaatggtacagggatttcataatcaaagtgcaagtggatggagggagaggtggttttctcggagcaactctttactggatcttggttctgaggtgaggagggaggtcaacgcggggattgctgcggtgtctcgcatgatggaatggcacgatgcaagggacgggacgggagcggggccttctcctacctctgcatcaagatctggttctcagtgaaacactctgcacttgaaaggacctatgcaaatgtaaagattaaggtatgtgctcatgctgtgctaatgaaagccttaaattcagtgttttgttttttttctggtggcgtactgtcactgttgactggcctacggatctgagtttttgtgtaattgtttggaagcaattccattgtcgccgaaatggcgcggtagtttctctgactgctgctgctaaatactaggaactttagttttcttcaagtccaaagggtcagagttgagagcacctgagatccggcgatgcttcatggccacggtcccccagaggctattcgcaatagttgactctaaatttctctctatatatcagttttttgtgtc

SEQ ID NO: 24602 - protein, 250 aa, Zea mays subsp. mays
  misc_feature (1)..(250): Ceres Seq. ID no. 12436072
MCWQHISMKDPMSQELLEAVEQERNIRANPSRNTAVFHHQMLGDFEIPVGADDAELEERIIQHLAAAAAVRRSHRHHNRRDGHQSRSEASSHPQFLVLSADERTISGQEGDYEQASAVASGRPLRTLVEQERTRGLADASSPSLRCSTPADSTGRSNNRISGIESTPVDQDGTGPSALQSMVQGFHNQSASGWRERWFSRSNSLLDLGSEVRREVNAGIAAVSRMMEWHDARDGTGAGPSPTSASRSGSQ

SEQ ID NO: 24603 - protein, 243 aa, Zea mays subsp. mays
  misc_feature (1)..(243): Ceres Seq. ID no. 12436073
MKDPMSQELLEAVEQERNIRANPSRNTAVFHHQMLGDFEIPVGADDAELEERIIQHLAAAAAVRRSHRHHNRRDGHQSRSEASSHPQFLVLSADERTISGQEGDYEQASAVASGRPLRTLVEQERTRGLADASSPSLRCSTPADSTGRSNNRISGIESTPVDQDGTGPSALQSMVQGFHNQSASGWRERWFSRSNSLLDLGSEVRREVNAGIAAVSRMMEWHDARDGTGAGPSPTSASRSGSQ

SEQ ID NO: 24604 - protein, 239 aa, Zea mays subsp. mays
  misc_feature (1)..(239): Ceres Seq. ID no. 12436074
MSQELLEAVEQERNIRANPSRNTAVFHHQMLGDFEIPVGADDAELEERIIQHLAAAAAVRRSHRHHNRRDGHQSRSEASSHPQFLVLSADERTISGQEGDYEQASAVASGRPLRTLVEQERTRGLADASSPSLRCSTPADSTGRSNNRISGIESTPVDQDGTGPSALQSMVQGFHNQSASGWRERWFSRSNSLLDLGSEVRREVNAGIAAVSRMMEWHDARDGTGAGPSPTSASRSGSQ

SEQ ID NO: 24605 - DNA, 2126 bp, Zea mays subsp. mays
  misc_feature (1)..(2126): Ceres Seq. ID no. 12436083
aaagagccgacgtcactcctcccgatctgggcgcggacgccaacgacgcgacggcccaagtcgcgacgccaccagctccccatcccctcggacgccatggaggaagctcgcgaccacaggctctcctccaccgccggccgccccttcctctctggcttctgcgccgcggcgctccgacgtaagcccctcggcgcccgcgcctccgccgccgccgccgccaccggcgagggccttgtgcggcagctcggcgtcctcgacctcgtgctgctcgggatcggtgcgtccatcggcgccggcatattcgtcgtcactggcaccgtcgcccgcgacgccggcccaggtgtcacgatcagttttgttcttgctggagctgcgtgcgtgctcaatgccctgtgctatgctgaactggcgtctcggttccctgctgtggttgggggagcatacttgtacacgtacgcagcgttcaatgagatcaccgccttcttggtcttcactcagttgatggtggattaccatatcggcgcagcaagcattgctcgcagcttagcaagctactttatcgagttcttggagctaatcccgctcttgaagggccaaattccaagctgggtaggccatggggaggagttttttggtggtgttgtatcaattaacatactggcccccgttcttctcatcatcttaactgcgattctctgctatggtgtcaaagaatcatcagcagtgaacacgtttatgacaacattgaagataatcattgttatagtcattgtatttgctggtgtgtttgaggtggatgtatcaaactggtctccgtttatgccaaatggtttcaaatctgtagtgactggagccacagtagtcttttttgcatatgttggatttgatgcggttgctaattctgctgaggaagccaaaaggccacagagagacctacccattggtatactaggaagccttatagcatgtgtgttgttatacgttgctgtatgcttggtcattactggaatggttccatatacattactcggtgaagatgctcctttggctgaggcttttgctgctaagggcctgaaatttattactgtattgattagtattggagctgttgctggacttacaacaacacttcttgttggcttgtatgttcagtcacgtttgtactttggacttggaagggatgggcttttaccttcagtatttgctgaagtacacccaacaaggcatactcctgtacagtctcagatttgggtcggttgtgttgcagcagtcatggcaggcctctttaatgtgcgtatgctctcacatattctttccgttggcactctgaccggttattcagttgtatcagcttgtgtgatcacactaagatggaatgacaaaggaactagtcgtcgctcccttggaagtatgtcaatttggcaagagggtgttcttagtcttgtcatagttgctctttgtggttttatagtgggactttgctatcgctttaactatgctatagcctttatggttgtagcttttctgatagctgttgctgccagtttcgctctccagtttcgtcaggtctatgtggatccacctggcttttcttgtcctggggtaccgttggttcccattatttctgttttcttcaacatggtcctgtttgctcagctacatgaagaagcgtggtatagatttgtcattcttagtctcatcgctgtgggagtttatgccggctatggtcagtacaatgctgttccttccagctcagaacactctactattggttaccatggcattccttctgaagccgcatgagctatgttcatccccggagttcttcgaacatactgtatggtaccaacatacaccatcgtcaccgaagtttgaacctgttgcttttttttttgatgttttgcacagtgcatactcttgtagttacgcttagtactcctatacctatatctagacagtgaatttcacagcctgtgttgtgcccaccacaccattcgtcaggaagcttgccaagtgcatagaccttgtaaaaatgcaaatgaaaataaagaactgcagctgcattgtttgtaggaactcattgtcatgcactatgtataattctgtgtatattgtgaagagttcat

SEQ ID NO: 24606 - protein, 600 aa, Zea mays subsp. mays
  misc_feature (1)..(600): Ceres Seq. ID no. 12436084
KEPTSLLPIWARTPTTRRPKSRRHQLPIPSDAMEEARDHRLSSTAGRPFLSGFCAAALRRKPLGARASAAAAATGEGLVRQLGVLDLVLLGIGASIGAGIFVVTGTVARDAGPGVTISFVLAGAACVLNALCYAELASRFPAVVGGAYLYTYAAFNEITAFLVFTQLMVDYHIGAASIARSLASYFIEFLELIPLLKGQIPSWVGHGEEFFGGVVSINILAPVLLIILTAILCYGVKESSAVNTFMTTLKIIIVIVIVFAGVFEVDVSNWSPFMPNGFKSVVTGATVVFFAYVGFDAVANSAEEAKRPQRDLPIGILGSLIACVLLYVAVCLVITGMVPYTLLGEDAPLAEAFAAKGLKFITVLISIGAVAGLTTTLLVGLYVQSRLYFGLGRDGLLPSVFAEVHPTRHTPVQSQIWVGCVAAVMAGLFNVRMLSHILSVGTLTGYSVVSACVITLRWNDKGTSRRSLGSMSIWQEGVLSLVIVALCGFIVGLCYRFNYAIAFMVVAFLIAVAASFALQFRQVYVDPPGFSCPGVPLVPIISVFFNMVLFAQLHEEAWYRFVILSLIAVGVYAGYGQYNAVPSSSEHSTIGYHGIPSEAA

SEQ ID NO: 24607 - protein, 568 aa, Zea mays subsp. mays
  misc_feature (1)..(568): Ceres Seq. ID no. 12436085
MEEARDHRLSSTAGRPFLSGFCAAALRRKPLGARASAAAAATGEGLVRQLGVLDLVLLGIGASIGAGIFVVTGTVARDAGPGVTISFVLAGAACVLNALCYAELASRFPAVVGGAYLYTYAAFNEITAFLVFTQLMVDYHIGAASIARSLASYFIEFLELIPLLKGQIPSWVGHGEEFFGGVVSINILAPVLLIILTAILCYGVKESSAVNTFMTTLKIIIVIVIVFAGVFEVDVSNWSPFMPNGFKSVVTGATVVFFAYVGFDAVANSAEEAKRPQRDLPIGILGSLIACVLLYVAVCLVITGMVPYTLLGEDAPLAEAFAAKGLKFITVLISIGAVAGLTTTLLVGLYVQSRLYFGLGRDGLLPSVFAEVHPTRHTPVQSQIWVGCVAAVMAGLFNVRMLSHILSVGTLTGYSVVSACVITLRWNDKGTSRRSLGSMSIWQEGVLSLVIVALCGFIVGLCYRFNYAIAFMVVAFLIAVAASFALQFRQVYVDPPGFSCPGVPLVPIISVFFNMVLFAQLHEEAWYRFVILSLIAVGVYAGYGQYNAVPSSSEHSTIGYHGIPSEAA

SEQ ID NO: 24608 - protein, 433 aa, Zea mays subsp. mays
  misc_feature (1)..(433): Ceres Seq. ID no. 12436086
MVDYHIGAASIARSLASYFIEFLELIPLLKGQIPSWVGHGEEFFGGVVSINILAPVLLIILTAILCYGVKESSAVNTFMTTLKIIIVIVIVFAGVFEVDVSNWSPFMPNGFKSVVTGATVVFFAYVGFDAVANSAEEAKRPQRDLPIGILGSLIACVLLYVAVCLVITGMVPYTLLGEDAPLAEAFAAKGLKFITVLISIGAVAGLTTTLLVGLYVQSRLYFGLGRDGLLPSVFAEVHPTRHTPVQSQIWVGCVAAVMAGLFNVRMLSHILSVGTLTGYSVVSACVITLRWNDKGTSRRSLGSMSIWQEGVLSLVIVALCGFIVGLCYRFNYAIAFMVVAFLIAVAASFALQFRQVYVDPPGFSCPGVPLVPIISVFFNMVLFAQLHEEAWYRFVILSLIAVGVYAGYGQYNAVPSSSEHSTIGYHGIPSEAA

SEQ ID NO: 24609 - DNA, 2127 bp, Zea mays subsp. mays
  misc_feature (1)..(2127): Ceres Seq. ID no. 12436087
accacgtctcccctcacctggctctccccctgccacctcacgcgcgcccctgctctgtctcttttggctccgctgaggccgagcacacacaacaaattctctctctcctctctcactctctctctctctcacacacactctgctccctgtgcggaggacgggccggccgcatggggtgggggtggacggcgctggcggcggccgcgatggcgtacgtggcggtgaagctgatggaggtgctgtggtggcggccgcggcggctggagcagcacttcgcgcggcaggggatcaggggcccccgctaccgcttcttcgtcggctgcgtccgcgagatggtggcgctcatggtggccgcctccgccaagccaatgccgcgtccctaccgctcccacaacgtcctcccgcgcgtcctcgccttctaccaccactggaagaaaatctacggttccacgttcctgatatggttcggcccgacgccgaggctcgccgtcgccgacccggacctcatccgggagatcctcctgtcccgcgccgaccaattcgaccgctacgagtcgcacccgatggtgcgccagctcgagggcgaggggctcgtcagcctgcgcggcgacaagtgggcgcaccgccgcaaggtgctcacgccggcgttccacatggagaacctcaagctgctgctgccgttcgtcgggaggacggtggtcgacgtggtggacaagtggcacgacatggccgccgcggcgtccggcgaggtcgagatcgacgtgtccgagtggttccaggtggtgacggaggacgccatcacccgtacggcgttcggccggagctacgaggacggcaaggccgttttcaagctccagacccagctcatggccttcgcctccgaggcgtttcgcaaggtcttcatccctggatacaggttcctgccgaccaagaagaacacgacctcgtggaagctggacaaggagatcaggaagaacctggcgacgctgatcggccggcggcaggaagccgcggacgacgagaagctcagcggctgtgccaaggacctccncggcctcctgatcaacgcgggcagcaacggcggcaaggtgagccccatcaccgngaacgacatagtggaggagtgcaagacgttcttcttcgcgggcaagcagaccacgtcgaacctcctgacatggaccacagtcctgctcgccatgcaccccgagtggcaggagctcgcccgtcaggaggtgctccaagtctgcggggcgcgtgacatcccttcccgcgagcagctcaccaagctcaagacactcgggatgatcctgaacgagacgctgcggctgtacccgccggcggtggcgacggtgcgtcgcgccaaggcggacgtggagctgggcgggtgcctgatcccgcgcggcacggagctgctgatcccgatcatggccatgcaccacgacgcgcggctgtgggggccggacgccacgcagttcaacccggcgcggttcgccaggggcgcggcgcangcggccaggcaccccacggcgttcatcccgttcgggctgggcgcgcggatgtgcatcggccagaacctggcgctcctggagtccaagctcacgctggccatcgtcctccagcggttcgacttccggctgtcgcccagctacctccacgcgccgacggtgctgatgctcctccacccgcagtacggggcgcccgtggtcttccggccgcgaccgtctgagccgtccgattccgattgcgacagtagggatgtgtgaggagatgacggagctcgtactaaccttgtcagtgtcaattgcgcctggcatgatgaccaataaccacctccgcagcatgctgctttgccctcaagggcaaacgagcagagcagccgccgccacgccgccaccgccaccgcccagcaccaccggaggaacaagtgactagaaggagcaccaccgtaccgtactaagtactaacaaatatatcctgctgaaggtgccagcagcagcttagactagtagagcagagtagaaggcttgaccagtgcctcccaatttttcagtcatttgggttgatgatttccttccttccatgaggttttgccaggtgtggttggtgtatgaaggattgcaaaattgt

SEQ ID NO: 24610 - protein, 586 aa, Zea mays subsp. mays
  misc_feature (1)..(586): Ceres Seq. ID no. 12436088
  misc_feature (350)..(350): Xaa is any aa, unknown or other
  misc_feature (368)..(368): Xaa is any aa, unknown or other
  misc_feature (502)..(502): Xaa is any aa, unknown or other
HVSPHLALPLPPHARPCSVSFGSAEAEHTQQILSLLSHSLSLSHTLCSLCGGRAGRMGWGWTALAAAAMAYVAVKLMEVLWWRPRRLEQHFARQGIRGPRYRFFVGCVREMVALMVAASAKPMPRPYRSHNVLPRVLAFYHHWKKIYGSTFLIWFGPTPRLAVADPDLIREILLSRADQFDRYESHPMVRQLEGEGLVSLRGDKWAHRRKVLTPAFHMENLKLLLPFVGRTVVDVVDKWHDMAAAASGEVEIDVSEWFQVVTEDAITRTAFGRSYEDGKAVFKLQTQLMAFASEAFRKVFIPGYRFLPTKKNTTSWKLDKEIRKNLATLIGRRQEAADDEKLSGCAKDLXGLLINAGSNGGKVSPITXNDIVEECKTFFFAGKQTTSNLLTWTTVLLAMHPEWQELARQEVLQVCGARDIPSREQLTKLKTLGMILNETLRLYPPAVATVRRAKADVELGGCLIPRGTELLIPIMAMHHDARLWGPDATQFNPARFARGAAXAARHPTAFIPFGLGARMCIGQNLALLESKLTLAIVLQRFDFRLSPSYLHAPTVLMLLHPQYGAPVVFRPRPSEPSDSDCDSRDV

SEQ ID NO: 24611 - protein, 530 aa, Zea mays subsp. mays
  misc_feature (1)..(530): Ceres Seq. ID no. 12436089
  misc_feature (294)..(294): Xaa is any aa, unknown or other
  misc_feature (312)..(312): Xaa is any aa, unknown or other
  misc_feature (446)..(446): Xaa is any aa, unknown or other
MGWGWTALAAAAMAYVAVKLMEVLWWRPRRLEQHFARQGIRGPRYRFFVGCVREMVALMVAASAKPMPRPYRSHNVLPRVLAFYHHWKKIYGSTFLIWFGPTPRLAVADPDLIREILLSRADQFDRYESHPMVRQLEGEGLVSLRGDKWAHRRKVLTPAFHMENLKLLLPFVGRTVVDVVDKWHDMAAAASGEVEIDVSEWFQVVTEDAITRTAFGRSYEDGKAVFKLQTQLMAFASEAFRKVFIPGYRFLPTKKNTTSWKLDKEIRKNLATLIGRRQEAADDEKLSGCAKDLXGLLINAGSNGGKVSPITXNDIVEECKTFFFAGKQTTSNLLTWTTVLLAMHPEWQELARQEVLQVCGARDIPSREQLTKLKTLGMILNETLRLYPPAVATVRRAKADVELGGCLIPRGTELLIPIMAMHHDARLWGPDATQFNPARFARGAAXAARHPTAFIPFGLGARMCIGQNLALLESKLTLAIVLQRFDFRLSPSYLHAPTVLMLLHPQYGAPVVFRPRPSEPSDSDCDSRDV

SEQ ID NO: 24612 - protein, 518 aa, Zea mays subsp. mays
  misc_feature (1)..(518): Ceres Seq. ID no. 12436090
  misc_feature (282)..(282): Xaa is any aa, unknown or other
  misc_feature (300)..(300): Xaa is any aa, unknown or other
  misc_feature (434)..(434): Xaa is any aa, unknown or other
MAYVAVKLMEVLWWRPRRLEQHFARQGIRGPRYRFFVGCVREMVALMVAASAKPMPRPYRSHNVLPRVLAFYHHWKKIYGSTFLIWFGPTPRLAVADPDLIREILLSRADQFDRYESHPMVRQLEGEGLVSLRGDKWAHRRKVLTPAFHMENLKLLLPFVGRTVVDVVDKWHDMAAAASGEVEIDVSEWFQVVTEDAITRTAFGRSYEDGKAVFKLQTQLMAFASEAFRKVFIPGYRFLPTKKNTTSWKLDKEIRKNLATLIGRRQEAADDEKLSGCAKDLXGLLINAGSNGGKVSPITXNDIVEECKTFFFAGKQTTSNLLTWTTVLLAMHPEWQELARQEVLQVCGARDIPSREQLTKLKTLGMILNETLRLYPPAVATVRRAKADVELGGCLIPRGTELLIPIMAMHHDARLWGPDATQFNPARFARGAAXAARHPTAFIPFGLGARMCIGQNLALLESKLTLAIVLQRFDFRLSPSYLHAPTVLMLLHPQYGAPVVFRPRPSEPSDSDCDSRDV

SEQ ID NO: 24613 - DNA, 1435 bp, Zea mays subsp. mays
  misc_feature (1)..(1435): Ceres Seq. ID no. 12436094
aacattgcaccgcatcgtctaagctcgcctgccctttacagcagcttactactacaaagacgacaacacagcgcgcgcgcgccaagctgagctcagctcgtcacgacacgccagcatggtggtgccttccacgacgccggtggtgcgccaagaaacgccaccgccgtcccacgacggcataggcataccgacggtggacctgtcggcgccgggcggccgcggcgcgctgtcgcggcaggtggcgcgcgcgtgcgcgcagcacggcttcttccgggccgtgaaccacggcgtggcgccaggccccgccgcacggctggacgccgccgccaggacgttcttcgcgctggcgccgcacaacaagcagcgcgccggcccgcccagcccactcggatacggctgccgcagcatcggcttcaacggcgacgccggggagctcgagtacctgctgctccacgccaacccggccgccgtcgcgcacagggccagatccatcgacactgatgacccctcgcgcttcagcaatgtggtgaacgagtatgtgggagcgatgaggcagctcgcatgtgagatcctggacctgctcggagaggggctagggctcaaggaccccagatccttcagcaggctcatcgctgacacagacagcgactcactcctgcggataaaccactaccctccaccatgcgccattcacaagcttgaccacgacagtcagtgcaggatgaagaacagtttcaggatcgtggcaggcaatggcgcgaaccagtcggcaggtgcacggatcggattcggggagcactcagacccgcagatccttagcttgctccgatcaaacgatgttgacggccttcaggtgcttctgaacagcgacggcagagaggtgtgggttcaggtgccagccgatccatcagcgttctttgtcaatgttggtgatctcctccaggccttcacaaatgggaaggtgataagcgtccggcacagggtaattgcaagctcgagcagggcgaggctgtcaacgatctacttcgctgcgccgccactgcatgcacgaattttggccctcccagagacagtcacagccaactcacccaggcagtaccggcccttcacctgggccgagtacaagaagacaatgtactccctccgcctcagccacagccgcctcaacctcttccacatcggccatgatgaccacggcaaaggagaacaagaatagggagaaagtggctgaactgcaggcagagagtttatgttggaggcttaggtaggtagaattgtccccaaaattttggctctctggcctccacagccagataatgtctagcagtatgctggttctgccaagtgccaatgggtaatagtatttagcattgtacacaagtccttgttgtatggaactgatgtactattgcctgttttagcagtttgttgtctc

SEQ ID NO: 24614 - protein, 366 aa, Zea mays subsp. mays
  misc_feature (1)..(366): Ceres Seq. ID no. 12436095
MVVPSTTPVVRQETPPPSHDGIGIPTVDLSAPGGRGALSRQVARACAQHGFFRAVNHGVAPGPAARLDAAARTFFALAPHNKQRAGPPSPLGYGCRSIGFNGDAGELEYLLLHANPAAVAHRARSIDTDDPSRFSNVVNEYVGAMRQLACEILDLLGEGLGLKDPRSFSRLIADTDSDSLLRINHYPPPCAIHKLDHDSQCRMKNSFRIVAGNGANQSAGARIGFGEHSDPQILSLLRSNDVDGLQVLLNSDGREVWVQVPADPSAFFVNVGDLLQAFTNGKVISVRHRVIASSSRARLSTIYFAAPPLHARILALPETVTANSPRQYRPFTWAEYKKTMYSLRLSHSRLNLFHIGHDDHGKGEQE

SEQ ID NO: 24615 - protein, 222 aa, Zea mays subsp. mays
  misc_feature (1)..(222): Ceres Seq. ID no. 12436096
MRQLACEILDLLGEGLGLKDPRSFSRLIADTDSDSLLRINHYPPPCAIHKLDHDSQCRMKNSFRIVAGNGANQSAGARIGFGEHSDPQILSLLRSNDVDGLQVLLNSDGREVWVQVPADPSAFFVNVGDLLQAFTNGKVISVRHRVIASSSRARLSTIYFAAPPLHARILALPETVTANSPRQYRPFTWAEYKKTMYSLRLSHSRLNLFHIGHDDHGKGEQE

SEQ ID NO: 24616 - DNA, 2433 bp, Zea mays subsp. mays
  misc_feature (1)..(2433): Ceres Seq. ID no. 12436097
  misc_feature (2380)..(2380): n is a, c, t, g, unknown, or other
attgggactcctccgtgactccgtctccctggggtcacgggtccgcgccgcctcagatccgggcaacccgttgcgacaccgccttggtgcggctgcggtggtgggcagttccgtggtactgcggcaggcacgccaaagacagtttctcttttctttcttccctgctgcccatggcggcggcctggcggagaaagattgaactcttgactcttctcactgccatagcagatgtatgcacgcacgcaaacgttcctttcggttgcgtcagtagcctaacagggggttcagacttcttggtgagagcgatatgagtgtcccaggtcaatgctcatcccagccacaatttatcaccagcgttgggaggagtaaccgctccaatggccccggcactcctcttatcgaaagcatagatgttgatcaaattgttattccagagaaaaacagttggaagaacttattctcatacatagggcctggatttctcgtctcaattgcatatattgatcctggaaactttgagacggatctacaggctggagcacagtacaaatatgagcttctttggatcatacttgttgcatcctgtgctgctcttattattcaatcacttgcagccaggctaggggttgtgacagggaaacatcttgcagagcattgcagggctgagtatcccaaggtcacaaattttgtcttatggattcttgcagaacttgctgttgttgcatgtgacattcctgaagtaattggaactgcttttgctctaaacatgctgttcagaatcccagtatggtgtggtgttctaataactggactcagcactctaatgctcttattgctgcagcaatatggggtccgtaagctagaatttctgattgcatttctggtgttcttaatagcaacatgtttcttagttgaacttgggtattctaaaccaaatgctccagaagttgttaggggcctttttgttcctgaacttaaaggaaatggagctacaggccttgctatctcattacttggtgctatggtgatgccgcacaatctttttctgcactcagcattagtattgtcaagaaaagtgccacggtctgttcatgggattaaggaggcctgcagattctatacgattgaaagtgcatttgcccttacagttgcttttctcatcaacatatctatcatatctgtcagtggttctgtctgtggttcaggtaatttaaacccagaagatcaagcaaattgcagtgatctggacctaaataaggcttcatttttgttaaagaatgtccttggaaactggagctcaaagttgtttgcagttgctttgttggcatctggtcagagttctacaattacggggacatatgctggacaatatgtcatgcaggtttttggaacttataccttatttcagttctagttcgcaagttgaatggcaggttgttttatgatgcatattactcgaggcatttgatgttgatcagaagtaatcaagcatttgcttgcttgcaacattagtttgtttagctgttagatatgaaaagtacagaaaataaattagtacataactcttagatttgcaatgaacaagcttgggcttatgagtttcagtgccaacctccaaggttctcttggtcagctagattgcagagaaaaaggacagatacggggggtttttagatcttcggatgaaaccctggatacgcaatcttgtcacgaggtccttggctatcctgccaagtttgatcgtgtcaattattggtggttcttcagcagctggccagttgattatcattgcatcgatgatactgtcatttgaactcccttttgctttagttccactccttaaattcaccagcagcaaaacaaagatggggcagcatacaaattcaatattcactgctgtgctgacatggatgatcggctcgtttattgttgtcatcaacacctactttctgataacaagctttgtgaaattgctcgtccagagcgggctgaccaccatttctcaagtattttccggtattttcgggtttttgggcatgctgatttacatagttgcgatcctatacctcgtctttaggaggaacaggaagtccacccagccattgctggagagcgatgctgagcttgcagtatcgggtagcagtgctgatgccggagcagaatgctcgctgggccatttgccccgtgaggacatctccagcatgcaacttccgcagcagcgttcagcttctgatctanattagataacagctgccaggaaaataaatgttttttttgttttttatatagtatagtaattacagaatagggtacgtcaggtattggcttctgttcatcctactgatgatgcttaaggaatgtatacaagaggacggatatntatgctgccaaacaaaaaaatggggcacaaaagaatttagtgcctgtttttgg

SEQ ID NO: 24617 - protein, 368 aa, Zea mays subsp. mays
  misc_feature (1)..(368): Ceres Seq. ID no. 12436098
MSVPGQCSSQPQFITSVGRSNRSNGPGTPLIESIDVDQIVIPEKNSWKNLFSYIGPGFLVSIAYIDPGNFETDLQAGAQYKYELLWIILVASCAALIIQSLAARLGVVTGKHLAEHCRAEYPKVTNFVLWILAELAVVACDIPEVIGTAFALNMLFRIPVWCGVLITGLSTLMLLLLQQYGVRKLEFLIAFLVFLIATCFLVELGYSKPNAPEVVRGLFVPELKGNGATGLAISLLGAMVMPHNLFLHSALVLSRKVPRSVHGIKEACRFYTIESAFALTVAFLINISIISVSGSVCGSGNLNPEDQANCSDLDLNKASFLLKNVLGNWSSKLFAVALLASGQSSTITGTYAGQYVMQVFGTYTLFQF

SEQ ID NO: 24618 - protein, 215 aa, Zea mays subsp. mays
  misc_feature (1)..(215): Ceres Seq. ID no. 12436099
MLFRIPVWCGVLITGLSTLMLLLLQQYGVRKLEFLIAFLVFLIATCFLVELGYSKPNAPEVVRGLFVPELKGNGATGLAISLLGAMVMPHNLFLHSALVLSRKVPRSVHGIKEACRFYTIESAFALTVAFLINISIISVSGSVCGSGNLNPEDQANCSDLDLNKASFLLKNVLGNWSSKLFAVALLASGQSSTITGTYAGQYVMQVFGTYTLFQF

SEQ ID NO: 24619 - protein, 196 aa, Zea mays subsp. mays
  misc_feature (1)..(196): Ceres Seq. ID no. 12436100
MLLLLQQYGVRKLEFLIAFLVFLIATCFLVELGYSKPNAPEVVRGLFVPELKGNGATGLAISLLGAMVMPHNLFLHSALVLSRKVPRSVHGIKEACRFYTIESAFALTVAFLINISIISVSGSVCGSGNLNPEDQANCSDLDLNKASFLLKNVLGNWSSKLFAVALLASGQSSTITGTYAGQYVMQVFGTYTLFQF

SEQ ID NO: 24620 - DNA, 2440 bp, Zea mays subsp. mays
  misc_feature (1)..(2440): Ceres Seq. ID no. 12436117
gcacgagaccattacctagaacatcctaatcgaaaaagctactctgtagattgacagagagacaagagcgctcttgctaccaatctcctcctcgtcgccgccgcggccgctctcgctcccacgatccggcgctgccacgagcttccagatccgccgcccgggcaatgctgtagctgcccgcgccgagatgggcggcgtcggcgccggctctctcgccctgctgcggctgctcctcctcctgctcctccgctccgaggcctccgctctccacggttgttctagttatatctgcaccgagccactgactgcaacaccaattggttccccttgtggctgtgtcgagcctattagtgttatcgttgatctggacttagctccttatctactgttcatgagcatagctgagttagaagttgaggttgcagctgggacatttcttaaacaaagccaggtgaagatcatggctgcagttgcaagtatccaggatgaccagaagacacgggtgaccatttatttggtgccgctaagagaacagttcgatacttatacggcatccctaatatctgataggttcatggagaaaaaggttcagataaattcatctatatttggagattataaagttatcaatatcagctatcatggattgcaatccccgccatcatctctgcctggaggatcggatccttcaggaactgaagaatatcctataactgcagaggtgcctgatcagaagaaaaagcacaataaatcagatattttggtcatcgtggtagtgttagggtcttctcttggacttctgatgacatgtgctgttgtgctgatcttactagtaagatggaagaaacttggacggcttcatgaggctatgacccctgcaactatcccagcagttaatagaagatatggcaccaggccaactttgtcaaccagcatggtgagctctgcgtcagcatcagtgttttcaacagtggctacttgcacaacatctgtaaagacattttcactagcccaacttcagaaggccacagatggttttgattcaagaagagttttgggtcaagggggctttgggcgtgtctaccatgggacgatagaggatggaaacgaaattgctgttaaattgcttacaagggaggacaggagtggtgaccgtgagtttattgcagaagtggaaatgctcagtcgattgcaccaccggaatcttgtcaaattgattggtatttgcattgagcggagtaaaaggtgtcttgtgtatgagctcatacgaaacggaagtgtggaatcccatcttcatggcgctgacaaggctaagggtaagctgaactgggatgttaggatgaaaattgctcttggcgctgctcgaggcttagcatatctgcatgaagattcaaaccctcatgtcatacaccgtgacttcaaggccagtaatatattattagaggaagatttcactcctaaagtgaccgattttggtttagcaagggaagcatccaatgcgactcaacctatatctaccagggtaatgggtactttcggttatgttgctccagaatatgcaatgacgggccatcttcttgttaaaagcgatgtttacagttatggggttgtcttgctggaacttatatcaggaaggaagcctgtaaacatctctgagtccaaggatcctgagaaccttgtaacttgggcccgtcctctgctaagccataaggagggcctggagaagttaattgatccgtctctggatggaaattttaacttcgacaatgtagcgaaggtggcatccatcgcttccatgtgtgtgcacacagatccatcgcagaggccgtttatgggtgaagttgtccaggcactgaagctgatctacaatgatccagatgaggcttgcgacgattcctacagtccaaggaattcatctgatcaagacggtgactacgaaggagacctggtctttgagagtggaagctggggctttggggcctctgggtgtctagactaccggaattccttaccgtttgtcactatggactacagttctggccgaatagaagggccgcacgaccctcgcgcggcattgtcagcgggatcccatgcccagtcaccagtgctgctgaatagatcaggccccttgcggatgaagaagaagctggcctccttctaccgctctagaggcagcattagtgagcatgggcacctgccgcgccattgatcagtcagtgaactagtgttaggctgttagcttcggttgactctgggattgaggctggcgggggttgtcactacctgattcgtgcctcatgttagtgtacagttcgtggtgacccttcacccttgggtatgggtgttttttttctctctttgccttctgcttcttccccggaagcaatgaggatggggttggcaggtgctctctaattttcgcaaattgcggttcatttct

SEQ ID NO: 24621 - protein, 673 aa, Zea mays subsp. mays
  misc_feature (1)..(673): Ceres Seq. ID no. 12436118
MGGVGAGSLALLRLLLLLLLRSEASALHGCSSYICTEPLTATPIGSPCGCVEPISVIVDLDLAPYLLFMSIAELEVEVAAGTFLKQSQVKIMAAVASIQDDQKTRVTIYLVPLREQFDTYTASLISDRFMEKKVQINSSIFGDYKVINISYHGLQSPPSSLPGGSDPSGTEEYPITAEVPDQKKKHNKSDILVIVVVLGSSLGLLMTCAVVLILLVRWKKLGRLHEAMTPATIPAVNRRYGTRPTLSTSMVSSASASVFSTVATCTTSVKTFSLAQLQKATDGFDSRRVLGQGGFGRVYHGTIEDGNEIAVKLLTREDRSGDREFIAEVEMLSRLHHRNLVKLIGICIERSKRCLVYELIRNGSVESHLHGADKAKGKLNWDVRMKIALGAARGLAYLHEDSNPHVIHRDFKASNILLEEDFTPKVTDFGLAREASNATQPISTRVMGTFGYVAPEYAMTGHLLVKSDVYSYGVVLLELISGRKPVNISESKDPENLVTWARPLLSHKEGLEKLIDPSLDGNFNFDNVAKVASIASMCVHTDPSQRPFMGEVVQALKLIYNDPDEACDDSYSPRNSSDQDGDYEGDLVFESGSWGFGASGCLDYRNSLPFVTMDYSSGRIEGPHDPRAALSAGSHAQSPVLLNRSGPLRMKKKLASFYRSRGSISEHGHLPRH

SEQ ID NO: 24622 - protein, 605 aa, Zea mays subsp. mays
  misc_feature (1)..(605): Ceres Seq. ID no. 12436119
MSIAELEVEVAAGTFLKQSQVKIMAAVASIQDDQKTRVTIYLVPLREQFDTYTASLISDRFMEKKVQINSSIFGDYKVINISYHGLQSPPSSLPGGSDPSGTEEYPITAEVPDQKKKHNKSDILVIVVVLGSSLGLLMTCAVVLILLVRWKKLGRLHEAMTPATIPAVNRRYGTRPTLSTSMVSSASASVFSTVATCTTSVKTFSLAQLQKATDGFDSRRVLGQGGFGRVYHGTIEDGNEIAVKLLTREDRSGDREFIAEVEMLSRLHHRNLVKLIGICIERSKRCLVYELIRNGSVESHLHGADKAKGKLNWDVRMKIALGAARGLAYLHEDSNPHVIHRDFKASNILLEEDFTPKVTDFGLAREASNATQPISTRVMGTFGYVAPEYAMTGHLLVKSDVYSYGVVLLELISGRKPVNISESKDPENLVTWARPLLSHKEGLEKLIDPSLDGNFNFDNVAKVASIASMCVHTDPSQRPFMGEVVQALKLIYNDPDEACDDSYSPRNSSDQDGDYEGDLVFESGSWGFGASGCLDYRNSLPFVTMDYSSGRIEGPHDPRAALSAGSHAQSPVLLNRSGPLRMKKKLASFYRSRGSISEHGHLPRH

SEQ ID NO: 24623 - protein, 582 aa, Zea mays subsp. mays
  misc_feature (1)..(582): Ceres Seq. ID no. 12436120
MAAVASIQDDQKTRVTIYLVPLREQFDTYTASLISDRFMEKKVQINSSIFGDYKVINISYHGLQSPPSSLPGGSDPSGTEEYPITAEVPDQKKKHNKSDILVIVVVLGSSLGLLMTCAVVLILLVRWKKLGRLHEAMTPATIPAVNRRYGTRPTLSTSMVSSASASVFSTVATCTTSVKTFSLAQLQKATDGFDSRRVLGQGGFGRVYHGTIEDGNEIAVKLLTREDRSGDREFIAEVEMLSRLHHRNLVKLIGICIERSKRCLVYELIRNGSVESHLHGADKAKGKLNWDVRMKIALGAARGLAYLHEDSNPHVIHRDFKASNILLEEDFTPKVTDFGLAREASNATQPISTRVMGTFGYVAPEYAMTGHLLVKSDVYSYGVVLLELISGRKPVNISESKDPENLVTWARPLLSHKEGLEKLIDPSLDGNFNFDNVAKVASIASMCVHTDPSQRPFMGEVVQALKLIYNDPDEACDDSYSPRNSSDQDGDYEGDLVFESGSWGFGASGCLDYRNSLPFVTMDYSSGRIEGPHDPRAALSAGSHAQSPVLLNRSGPLRMKKKLASFYRSRGSISEHGHLPRH

SEQ ID NO: 24624 - DNA, 901 bp, Zea mays subsp. mays
  misc_feature (1)..(901): Ceres Seq. ID no. 12436121
aaaacaaaccctagccgccaggcgcaggcggtcagggagcgagtaccgagcgccccagttcacacggtttatatcctaatctacgcagtcaatcctccttagcggtttcgttaatttgtttgtttccagcggccgttgcttcggtgattttgcttagctacgctttggaccggcgttccttcgctgctagctagtaccttttggaagtcaaggagtgctgtctttcgcctgatctacctagacgccttttcttgaatcagcgacttctattttggttaattagcaccggtagcccccctgctctcttgagtgagatgtcagaatacaagaacgtcgttggggggaggctaaagctgaagggtaaggcactggatgtgaaggaaggtggagtcaagaagaaaaaaaagaagcatcagcttgaagagtcgtctcagattgagcacgatgagctccacaaaggtagctgtccgtgtggagctcggttcatctttcgaacaacatgtttcgttttacatataaattggaccacttttgtgtgtggggaaactctggcttaccagctgatcacaacaatgagcttattgaagctggcaaggtgggagatgaagaaaggaatctacatccagactacgaccacctcacaccggcggagcgacgctatatagatcagaagcagaagatcgacatgcaaaagctggccaaagttgctaacaagtcacacagggaccgtatccaggacttcaaccagtatctggcgaacctcagcgagcactatgacatccctaaagttggccctggctaacaaacatagccaaactgctgtgtacgcacaaacaattgtatgctcggtgggcttcaagaacattaaaaatatataaatgtatgttgggtgattgggtct

SEQ ID NO: 24625 - protein, 116 aa, Zea mays subsp. mays
  misc_feature (1)..(116): Ceres Seq. ID no. 12436122
MSEYKNVVGGRLKLKGKALDVKEGGVKKKKKKHQLEESSQIEHDELHKGSCPCGARFIFRTTCFVLHINWTTFVCGETLAYQLITTMSLLKLARWEMKKGIYIQTTTTSHRRSDAI

SEQ ID NO: 24626 - protein, 100 aa, Zea mays subsp. mays
  misc_feature (1)..(100): Ceres Seq. ID no. 12436123
MFRFTYKLDHFCVWGNSGLPADHNNELIEAGKVGDEERNLHPDYDHLTPAERRYIDQKQKIDMQKLAKVANKSHRDRIQDFNQYLANLSEHYDIPKVGPG

SEQ ID NO: 24627 - DNA, 920 bp, Zea mays subsp. mays
  misc_feature (1)..(920): Ceres Seq. ID no. 12436141
acagacaactcagatcgtttctaatcattccatctcaaagacaggagttcgtctccttgttaggcaaagaccggtagcaaaatgatcagctccaagaagctagctcagttgtccaagaagatgcagggaatgggtgcagttgggcgaagaagggtcacagtagtgagaaaggaaatcaacccatcttgcagcagcatagttgcagggaagggcaactgcatcgtctactcttctgatgggaagcggtttgagatccccctttcttacctccacacggcagtgtttgtagagctcctgaagctgtcgcaggaagagtttgggttcacaagtgatgggaggatcacactgccttgcgataaagcagtgatggagtatgtgatgtgtttgctaaggagagaagcctccgaggatgttgagaaggcgctcctcagttccatagtgatgtcttgccaccacacaaacaggatggtgcaaccaccaagtggagtgaaccaccacttcgctgtgtgcagctcctgaagatgaagatatccatggcttggagcttgtttcagcacttccctgtgtgcagctcctgaagatgaagatatccatgtcctggagcttgtttcccttctttttttcgcttccatcttttttcccagaagtaccttggagcacggtttttgtgcgatgtttttccaatggtacactgaggatgtacagatggatgcgtgattagaaaagaaggaatcaagattgccactgagacaataaagtagtgttgatttagaacctacgaaagaagataccatgatgtttgcactgtaaaaccagagctgccaaatggtctagtactgtagcgaatagcatctttcctttttccttagccctctacatgcaagggcaacagtaaattaaactatttacatggggtgctc

SEQ ID NO: 24628 - protein, 145 aa, Zea mays subsp. mays
  misc_feature (1)..(145): Ceres Seq. ID no. 12436142
MISSKKLAQLSKKMQGMGAVGRRRVTVVRKEINPSCSSIVAGKGNCIVYSSDGKRFEIPLSYLHTAVFVELLKLSQEEFGFTSDGRITLPCDKAVMEYVMCLLRREASEDVEKALLSSIVMSCHHTNRMVQPPSGVNHHFAVCSS

SEQ ID NO: 24629 - protein, 132 aa, Zea mays subsp. mays
  misc_feature (1)..(132): Ceres Seq. ID no. 12436143
MQGMGAVGRRRVTVVRKEINPSCSSIVAGKGNCIVYSSDGKRFEIPLSYLHTAVFVELLKLSQEEFGFTSDGRITLPCDKAVMEYVMCLLRREASEDVEKALLSSIVMSCHHTNRMVQPPSGVNHHFAVCSS

SEQ ID NO: 24630 - protein, 129 aa, Zea mays subsp. mays
  misc_feature (1)..(129): Ceres Seq. ID no. 12436144
MGAVGRRRVTVVRKEINPSCSSIVAGKGNCIVYSSDGKRFEIPLSYLHTAVFVELLKLSQEEFGFTSDGRITLPCDKAVMEYVMCLLRREASEDVEKALLSSIVMSCHHTNRMVQPPSGVNHHFAVCSS

SEQ ID NO: 24631 - DNA, 1417 bp, Zea mays subsp. mays
  misc_feature (1)..(1417): Ceres Seq. ID no. 12436145
aaacggaggctggactggattcttgaagaggcttccattccatgggggtaaagcgatcccatttccactcctgcctgttgtctgcctccaaggcaacagttttttagtttgcttgcgctctcctgccttcggttcaccgcctctccatgaatgcaagcaagccgccttttaaatacgaggctctcgcttgttactgaagctgcgcggcgtcttgtgcctcggaacctgccaactgccattggaagtgtttctctacagtctacaaatacgtcgcgcgccatggacggcgactcgaagaagctgagggtgtggttttctggagtaggaaagggaggtggaggtggacgccagtcttcagcggcaccaccgcaagaaagcgcgcctattggaagagcggaaatgaacagcagcggggaatttgatgctgcattcgcagccacaattgcagcagcagcatttgcaattgctgcccgtgaagagaagcttgcagctcagaagaagtctgtccccatcgaggaggtgccacgagccctgtcgctagtcaagagagctggaagcaccaaaaaacctgcgggaggcaacaaaatctcaagatggtttagcggcaaggagcctctagaacacgacgacgacggtccagtgagcaggccactgaaaccagcacctggaaagcccgagggtatgcctgcagatcacaaggtggcacccaagattcttgagacttctctgagtgtgaggaagggttcagggtcctccggcaagacaacagacaggaaagggagcaagaagtttgagcaagaacatgttcagaaagcgccatcgatcatcaggccatctacatcataccattctagacggaatggagaagacgcagcaggagtagctgctattggcggcacgagatctaaggctgatgagtgggagaaggcaaagcttgcaaaagttagagaggagtacgaaaagatgatggagaccatagctgaatgggaaactgagaagaaggtgaaggcgagacgccataaagaacagagagagactgtgctggacagaaagagagcaaaagcactagaagaatacaaccaggagatgacaaggatcagcaagattgctggaggagcaaggtcgatggcagaggaacgaaaatacaacgacgagaataagatcaaagagaaggcgcacaagatacgatccacaagaaagcctccccgcacatgtgcttgcttttgagaatagttctatacactgaaatttggaaccgtatgaaagaagtgtgatttgaagtcactattgtaaaagtcacacaatagtgacgtactgtattgtaatatgtatttggctttgacaagatattagtgtagagttgtatcccccttcaaaaagagagttgtatccaacacgcaacatattgacgctttcc

SEQ ID NO: 24632 - protein, 358 aa, Zea mays subsp. mays
  misc_feature (1)..(358): Ceres Seq. ID no. 12436146
MQASRLLNTRLSLVTEAARRLVPRNLPTAIGSVSLQSTNTSRAMDGDSKKLRVWFSGVGKGGGGGRQSSAAPPQESAPIGRAEMNSSGEFDAAFAATIAAAAFAIAAREEKLAAQKKSVPIEEVPRALSLVKRAGSTKKPAGGNKISRWFSGKEPLEHDDDGPVSRPLKPAPGKPEGMPADHKVAPKILETSLSVRKGSGSSGKTTDRKGSKKFEQEHVQKAPSIIRPSTSYHSRRNGEDAAGVAAIGGTRSKADEWEKAKLAKVREEYEKMMETIAEWETEKKVKARRHKEQRETVLDRKRAKALEEYNQEMTRISKIAGGARSMAEERKYNDENKIKEKAHKIRSTRKPPRTCACF

SEQ ID NO: 24633 - protein, 315 aa, Zea mays subsp. mays
  misc_feature (1)..(315): Ceres Seq. ID no. 12436147
MDGDSKKLRVWFSGVGKGGGGGRQSSAAPPQESAPIGRAEMNSSGEFDAAFAATIAAAAFAIAAREEKLAAQKKSVPIEEVPRALSLVKRAGSTKKPAGGNKISRWFSGKEPLEHDDDGPVSRPLKPAPGKPEGMPADHKVAPKILETSLSVRKGSGSSGKTTDRKGSKKFEQEHVQKAPSIIRPSTSYHSRRNGEDAAGVAAIGGTRSKADEWEKAKLAKVREEYEKMMETIAEWETEKKVKARRHKEQRETVLDRKRAKALEEYNQEMTRISKIAGGARSMAEERKYNDENKIKEKAHKIRSTRKPPRTCACF

SEQ ID NO: 24634 - protein, 275 aa, Zea mays subsp. mays
  misc_feature (1)..(275): Ceres Seq. ID no. 12436148
MNSSGEFDAAFAATIAAAAFAIAAREEKLAAQKKSVPIEEVPRALSLVKRAGSTKKPAGGNKISRWFSGKEPLEHDDDGPVSRPLKPAPGKPEGMPADHKVAPKILETSLSVRKGSGSSGKTTDRKGSKKFEQEHVQKAPSIIRPSTSYHSRRNGEDAAGVAAIGGTRSKADEWEKAKLAKVREEYEKMMETIAEWETEKKVKARRHKEQRETVLDRKRAKALEEYNQEMTRISKIAGGARSMAEERKYNDENKIKEKAHKIRSTRKPPRTCACF

SEQ ID NO: 24635 - DNA, 1117 bp, Zea mays subsp. mays
  misc_feature (1)..(1117): Ceres Seq. ID no. 12436168
gcatttgatttctttgcaggtgcagccgtgcaggtgaggtgatcgcgcgtggatgggagttcagacaatgtcgtcccactcccacggcgacgacggccgccgcggcctcccgcggcagggctcggtctacggcctcacgctgaccgaggtggagacgcagctgggcgagccgctgcggaccatgaacctggacgacctcctgcgcaccgttctcccggcctccgccgccgccgccgccgcaggcccgcccccgcccccggccccggcggccaagaagacggtggacgaggtgtggcgcgacatccagagcgccggcggcggcggcggcggccgtcagccctccatgggcgagatgacgctggaggacttcctctcccgcgccggcgtcgccgtcgatgccgccccgcattggatgcaccagtacccgcagcagcagcagcagtacgcgctgccgcggcccctgccgcttcccggcccggctctggacgccgcgtaccacggcgaccggcccggtgttttcctctcgcactcgcaggtggccgggcggaagcgcgccgccacggcggccgtggccggggacggcgtcgtggagaggacggtggagcggcggcagaagcgcatgatcaagaaccgcgagtccgcggcgaggtcccgggccaggaagcaggcgtacaccaacgagctggagaacaaggtggcccggctggaggaggagaacaagcgtctcattgagctcaaggtgctgaaaccactggagccactggagccgccaccggcggagcagaacaagaagcagccgccgccgcaaccgaagaggaagcagccgcagccaccgccaccgccgccgccgccgattcagcagctgccgccgaagcaccgccacgacctccggcgaacgaattccgccactttctgatgacgagggcacgggggggggggggggctctctgcctctctctagggcgtctacggggggtactgtactgtactgtactgtacttgggatgctttgagatgtgaatgaacaaaaccctgctctgcttgcagagactctggtggtctgtggatgggtgcgtgcgtgccgccgttgcagtgaaagctagcagtgttgatgtgc

SEQ ID NO: 24636 - protein, 287 aa, Zea mays subsp. mays
  misc_feature (1)..(287): Ceres Seq. ID no. 12436169
MGVQTMSSHSHGDDGRRGLPRQGSVYGLTLTEVETQLGEPLRTMNLDDLLRTVLPASAAAAAAGPPPPPAPAAKKTVDEVWRDIQSAGGGGGGRQPSMGEMTLEDFLSRAGVAVDAAPHWMHQYPQQQQQYALPRPLPLPGPALDAAYHGDRPGVFLSHSQVAGRKRAATAAVAGDGVVERTVERRQKRMIKNRESAARSRARKQAYTNELENKVARLEEENKRLIELKVLKPLEPLEPPPAEQNKKQPPPQPKRKQPQPPPPPPPPIQQLPPKHRHDLRRTNSATF

SEQ ID NO: 24637 - protein, 282 aa, Zea mays subsp. mays
  misc_feature (1)..(282): Ceres Seq. ID no. 12436170
MSSHSHGDDGRRGLPRQGSVYGLTLTEVETQLGEPLRTMNLDDLLRTVLPASAAAAAAGPPPPPAPAAKKTVDEVWRDIQSAGGGGGGRQPSMGEMTLEDFLSRAGVAVDAAPHWMHQYPQQQQQYALPRPLPLPGPALDAAYHGDRPGVFLSHSQVAGRKRAATAAVAGDGVVERTVERRQKRMIKNRESAARSRARKQAYTNELENKVARLEEENKRLIELKVLKPLEPLEPPPAEQNKKQPPPQPKRKQPQPPPPPPPPIQQLPPKHRHDLRRTNSATF

SEQ ID NO: 24638 - protein, 244 aa, Zea mays subsp. mays
  misc_feature (1)..(244): Ceres Seq. ID no. 12436171
MNLDDLLRTVLPASAAAAAAGPPPPPAPAAKKTVDEVWRDIQSAGGGGGGRQPSMGEMTLEDFLSRAGVAVDAAPHWMHQYPQQQQQYALPRPLPLPGPALDAAYHGDRPGVFLSHSQVAGRKRAATAAVAGDGVVERTVERRQKRMIKNRESAARSRARKQAYTNELENKVARLEEENKRLIELKVLKPLEPLEPPPAEQNKKQPPPQPKRKQPQPPPPPPPPIQQLPPKHRHDLRRTNSATF

SEQ ID NO: 24639 - DNA, 2725 bp, Zea mays subsp. mays
  misc_feature (1)..(2725): Ceres Seq. ID no. 12436176
aaacaaaaaaaatctcagaacacacacacacacacacacctctatcgccccgacctcgacgcgacccctctcgcttggatccggacggcccggtccctccgccctcccatgcgcacggcgccgccgccgccgacatgacgctcgcctccctcgcccgcgccctcggccggtccgcgcgctcctcccgcccgcgccagggtttccagctcgggggcctccggcagccgcccgcgccaccgctaccgccgcctgtccacggcggtgagggtggggcggcaggatttgttcgcagctacctgactgcggtctcgtcggcagctcttcggaagccatccgcgggcaagaccgtggattggagatatgtcctcgccagcccacatttccgacgcctcttctcggacgggtccaagaagaactacgagaactattaccccaagggtaagaaggaggtgcctaaaggagatggtacaaacaagtctgaatctaagcaggaatccaatacagatgaaggatggaattttcaggataatgctatgaaacacatgcagaatttccttgcgcctttattgattcttggcctgatgctatcatccatgtcatctagctctgcagaccagaaggagataagcttccaagagttcaagaacaagttactagaacctggtttagttgatcgcattgttgtttcaaataaatcagtagcgaaggtctacatcaggaattcacctcatccaaagagccaaggccaagatagtgatatccatattactaccactgatgctccaggcaagcctgctcccagcagatgcaagtattacttcaatattggtagtgttgatttgtttgaagagaagttagaggaagcccaggaagctttgggaatagatccacatgattttgtcccagtaacttatgttgctgaagtaaattggttccaagaagttatgaggtttgccccaacagcattgattattggtctattatatttcacgggaaaaaggatgcagagtggtttcaatattggaggtggtgctggcaaaggaagaggaggtattttcaacattggaaaagctacagtgatgaagatggacaagaactccaaaaataaggtgtttttttaaggatgtagccggttgtgacgaagcaaaacaagaaataatggagtttgtgcatttccttaaaaaccctaagaagtatgaagatttgggagctaaaatacccaaaggtgctctacttgtaggccctcctgggacagggaagactttgctcgccaaagctacagcaggagagtctggtgtgccatttttgtctatttctggttcagatttcatggaaatgtttgttggtgttggaccgtccagggtacggaacttgttccaagaagctaggcagtgtgctcctagtattgtattcattgacgaaatcgatgctattggtcgtgcaagaggacgtggaggtttttcaggttcaaatgatgaacgtgagagtactttgaaccagctgcttgtagagatggatggatttggaacaacttctggtgttgttgttcttgctgggacaaatagacctgacatcctggataaggcattattaaggccaggaagatttgatcgccagatagcaattgacaaaccagatataaagggccgtgatcaaatattccgcatatatcttaaaaagcttaagttggacaacaaaccatcattttattcgcaaaggctagctgccttgacacctgggttcgcaggagctgacattgccaatgtttgtaatgaagctgctttaattgctgcgagaagtgaggaaactcagattaccatgcagcattttgagtccgcaattgataggattatcggtggtttggagaagaaaaatagggtcattagcaaactggagcgccgtactgttgcttaccatgaatctggacatgcagttgctggatggttcttggaacatgctgagcctcttctaaaagttacaattgttcctcgtggaacagctgctttaggctttgcacaatacgtcccaaatgaaaatcttttgatgacaaaagagcagctttttgatatgacatgcatgacattaggtggccgtgctgcagaggaggttttgattggcaaaatctcaactggtgctcagaatgacctggagaaagttaccaaaatgacatatgcacaggtcgccgtgtatggttttagtgaaaaggttgggcttctgtccttcccccagaaagatggtggtttcgaattgagcaagccttacagtaatcagacagcatccatcatcgacgatgaggtccgggaatgggttggcaaggcctacaagaaaacagttgaattgataacagagcacaaggagcaagttgcacagatcgcagaattgctgctcgagaaggaagtcctacaccaggacgatctaaccagggtactaggagaacgtccattcaaggcactggaccaaccaactacgacctctttaagaaaggtttcgaggatggtggtgacaacagccaagcaccagcagagaacgccgagctgcctgatgattcatctcccccagttggtgacgttgtacccacgtagtgtttctctcctcaacgtcagagctgtacattgagcgctcattctcgatagattcttgtttgttggttgcatcataaaaaagatctgtataaattcgcgcccaagctgattatgccactgtggaaatgcatttggatttccgt

SEQ ID NO: 24640 - protein, 485 aa, Zea mays subsp. mays
  misc_feature (1)..(485): Ceres Seq. ID no. 12436177
MEFVHFLKNPKKYEDLGAKIPKGALLVGPPGTGKTLLAKATAGESGVPFLSISGSDFMEMFVGVGPSRVRNLFQEARQCAPSIVFIDEIDAIGRARGRGGFSGSNDERESTLNQLLVEMDGFGTTSGVVVLAGTNRPDILDKALLRPGRFDRQIAIDKPDIKGRDQIFRIYLKKLKLDNKPSFYSQRLAALTPGFAGADIANVCNEAALIAARSEETQITMQHFESAIDRIIGGLEKKNRVISKLERRTVAYHESGHAVAGWFLEHAEPLLKVTIVPRGTAALGFAQYVPNENLLMTKEQLFDMTCMTLGGRAAEEVLIGKISTGAQNDLEKVTKMTYAQVAVYGFSEKVGLLSFPQKDGGFELSKPYSNQTASIIDDEVREWVGKAYKKTVELITEHKEQVAQIAELLLEKEVLHQDDLTRVLGERPFKALDQPTTTSLRKVSRMVVTTAKHQQRTPSCLMIHLPQLVTLYPRSVSLLNVRAVH

SEQ ID NO: 24641 - protein, 428 aa, Zea mays subsp. mays
  misc_feature (1)..(428): Ceres Seq. ID no. 12436178
MEMFVGVGPSRVRNLFQEARQCAPSIVFIDEIDAIGRARGRGGFSGSNDERESTLNQLLVEMDGFGTTSGVVVLAGTNRPDILDKALLRPGRFDRQIAIDKPDIKGRDQIFRIYLKKLKLDNKPSFYSQRLAALTPGFAGADIANVCNEAALIAARSEETQITMQHFESAIDRIIGGLEKKNRVISKLERRTVAYHESGHAVAGWFLEHAEPLLKVTIVPRGTAALGFAQYVPNENLLMTKEQLFDMTCMTLGGRAAEEVLIGKISTGAQNDLEKVTKMTYAQVAVYGFSEKVGLLSFPQKDGGFELSKPYSNQTASIIDDEVREWVGKAYKKTVELITEHKEQVAQIAELLLEKEVLHQDDLTRVLGERPFKALDQPTTTSLRKVSRMVVTTAKHQQRTPSCLMIHLPQLVTLYPRSVSLLNVRAVH

SEQ ID NO: 24642 - protein, 426 aa, Zea mays subsp. mays
  misc_feature (1)..(426): Ceres Seq. ID no. 12436179
MFVGVGPSRVRNLFQEARQCAPSIVFIDEIDAIGRARGRGGFSGSNDERESTLNQLLVEMDGFGTTSGVVVLAGTNRPDILDKALLRPGRFDRQIAIDKPDIKGRDQIFRIYLKKLKLDNKPSFYSQRLAALTPGFAGADIANVCNEAALIAARSEETQITMQHFESAIDRIIGGLEKKNRVISKLERRTVAYHESGHAVAGWFLEHAEPLLKVTIVPRGTAALGFAQYVPNENLLMTKEQLFDMTCMTLGGRAAEEVLIGKISTGAQNDLEKVTKMTYAQVAVYGFSEKVGLLSFPQKDGGFELSKPYSNQTASIIDDEVREWVGKAYKKTVELITEHKEQVAQIAELLLEKEVLHQDDLTRVLGERPFKALDQPTTTSLRKVSRMVVTTAKHQQRTPSCLMIHLPQLVTLYPRSVSLLNVRAVH

SEQ ID NO: 24643 - DNA, 1836 bp, Zea mays subsp. mays
  misc_feature (1)..(1836): Ceres Seq. ID no. 12436188
agcaaccaaagcacacccctcctccttgctctgccgtgctcggagttgggagttggagcaccaccaccaccactcttcccctctcctctccctcctcgctcgtcctgttggaagcagcacacacacgagagagaaagagagacacaaggagatggcgctgctgttgctcctgctggccgtgctcggcgtggtgctggcgagcagcctgctgctgcggtggaacgagctgcggtacagccgccgccggggcctgccgccgggcacaatggggtggccgctcttcggcgagaccaccgagttcctcaagcaggggcctagcttcatgaagcagaggaggctcaggtacgggagcctgttccggacgcacatcctgggctgccccacggtggtgtgcatggagcccggagctgaaccggcgggcgctggccagcgagggcgccggcttcgtcccgggctacccgcagtccatgctcgacatcctggggcccaacaacatcgccgccgtgcacggcccgctccaccgcgccatgcggggcgccatgctcgcgctcacgcggccacacatgatccgcgccgcgctcctccccaagatcgacgccttcatgcgcgcccacctccacggctgggccggacgccgcgtcgacatccaggagatgaccaaggagatggctttgctctcgggctctcaggcagatcgctggcatctctgcgggcccacactccgacgccctaaaggcagagctgtacacccttgtacttggcaccttctccctgccaatcaacgtcccaggaaccaactacagcaaagggctccaggcaaggaagaagctcgtggcaatgctgcggcagatgatcgctgaccggaggtcctctggctgcgcccgagacgacatgctggacgcgctgctcagcggcaacgagggtaccagggcgaagctcagcgacgaccagatcatcgaccttctcatcaccctcatatactctgggtacgagactgtgtcgaccacctcgatgatggcggtgaagtacctgtcggacaaccccaaagctctcggacagatcaggaaagagcaccttgacatcaggaaggctaagtcaccggaggatccccttgactggaacgactacaagtccatgaccttcaccaaagctgtcatttatgagactctaaggctagctacagtagtcaacgggctgctgaggaaaactacccatgacgtagaaatgaatgggtatgttattccaaaaggctggagaatttatgtatacacaagggagataaactacgacccgttcctgtacccggaacccatggttttcaacccatggagatggatggagacgaacctggaatcacatccgcacttcatgctgttcggaggaggtgcccgcatgtgcccagggaaggaagtaggaacagttgaaatcgcaacgttccttcactatttcgtgacgcgttacagatgggaggaggagggaaacaacacaatatcgaagttccccagagtggcggctcccaatgggctacatatccgagttcaagattactgaacttcgtgaggcgttttgtgaagtttaggtagggattcagacagatagaaataacccatgcgatgctgatgctgctggcctcttcgaaaggactagaacagccattagtgcctgtaaaatgtgtccatgccgatagtaatgttattatagggaggatataggtatcataggtttattagaaatttgatgtagaaagccaacagatgctcctgtattcttttgctccatcaaaacagaggtatcatttggcttctatgcttttgaatcgaacatggtacagaaccc

SEQ ID NO: 24644 - protein, 243 aa, Zea mays subsp. mays
  misc_feature (1)..(243): Ceres Seq. ID no. 12436189
ATKAHPSSLLCRARSWELEHHHHHSSPLLSLLARPVGSSTHTREKERHKEMALLLLLLAVLGVVLASSLLLRWNELRYSRRRGLPPGTMGWPLFGETTEFLKQGPSFMKQRRLRYGSLFRTHILGCPTVVCMEPGAEPAGAGQRGRRLRPGLPAVHARHPGAQQHRRRARPAPPRHAGRHARAHAATHDPRRAPPQDRRLHARPPPRLGRTPRRHPGDDQGDGFALGLSGRSLASLRAHTPTP

SEQ ID NO: 24645 - protein, 237 aa, Zea mays subsp. mays
  misc_feature (1)..(237): Ceres Seq. ID no. 12436190
MLRQMIADRRSSGCARDDMLDALLSGNEGTRAKLSDDQIIDLLITLIYSGYETVSTTSMMAVKYLSDNPKALGQIRKEHLDIRKAKSPEDPLDWNDYKSMTFTKAVIYETLRLATVVNGLLRKTTHDVEMNGYVIPKGWRIYVYTREINYDPFLYPEPMVFNPWRWMETNLESHPHFMLFGGGARMCPGKEVGTVEIATFLHYFVTRYRWEEEGNNTISKFPRVAAPNGLHIRVQDY

SEQ ID NO: 24646 - protein, 233 aa, Zea mays subsp. mays
  misc_feature (1)..(233): Ceres Seq. ID no. 12436191
MIADRRSSGCARDDMLDALLSGNEGTRAKLSDDQIIDLLITLIYSGYETVSTTSMMAVKYLSDNPKALGQIRKEHLDIRKAKSPEDPLDWNDYKSMTFTKAVIYETLRLATVVNGLLRKTTHDVEMNGYVIPKGWRIYVYTREINYDPFLYPEPMVFNPWRWMETNLESHPHFMLFGGGARMCPGKEVGTVEIATFLHYFVTRYRWEEEGNNTISKFPRVAAPNGLHIRVQDY

SEQ ID NO: 24647 - protein, 193 aa, Zea mays subsp. mays
  misc_feature (1)..(193): Ceres Seq. ID no. 12436192
MALLLLLLAVLGVVLASSLLLRWNELRYSRRRGLPPGTMGWPLFGETTEFLKQGPSFMKQRRLRYGSLFRTHILGCPTVVCMEPGAEPAGAGQRGRRLRPGLPAVHARHPGAQQHRRRARPAPPRHAGRHARAHAATHDPRRAPPQDRRLHARPPPRLGRTPRRHPGDDQGDGFALGLSGRSLASLRAHTPTP

SEQ ID NO: 24648 - DNA, 651 bp, Zea mays subsp. mays
  misc_feature (1)..(651): Ceres Seq. ID no. 12436230
aacaaacatttcaacgtctcctaaagcagcatcggctaataccaccgactcttgctcacacagctcgttctctgcagctgccgcacatagctagtgaacgaccatggcgtcccaggccatcgagagccaccgtgccggtgctgaggtcgtcaccggaggagacgccatctgcaggaagaagtcaatcgagctgctggaggagctcggcctccccaaaggcttcctgccccttgaggacatccaggagttcgggtacaaccgcgagacagggtttatgtggctggtgcaggggaagaagaaggtggagcacaccttcaaaaagatcaagcagactgtgtcgtacgccactgaggtgacggcattcgccgagaagggcaagctgaggaagatcaccggcgtgaagacaaaggagctgatgctctggctcagcgtcgtcgaggtctacgtgcctgaggcctcaccggagaaggttaccttcaagactggcactggcctatccgacacctttgatgcctctgcctttgcgctgggagagtaattaccaaccacaaaaatggttggcttcaaaagacatgcataatctatcttttgtattttaaacttccatatatcttgtgatgagtttatgacccatactcaagggccgtgccc

SEQ ID NO: 24649 - protein, 144 aa, Zea mays subsp. mays
  misc_feature (1)..(144): Ceres Seq. ID no. 12436231
MASQAIESHRAGAEVVTGGDAICRKKSIELLEELGLPKGFLPLEDIQEFGYNRETGFMWLVQGKKKVEHTFKKIKQTVSYATEVTAFAEKGKLRKITGVKTKELMLWLSVVEVYVPEASPEKVTFKTGTGLSDTFDASAFALGE

SEQ ID NO: 24650 - protein, 117 aa, Zea mays subsp. mays
  misc_feature (1)..(117): Ceres Seq. ID no. 12436232
QTFQRLLKQHRLIPPTLAHTARSLQLPHIASERPWRPRPSRATVPVLRSSPEETPSAGRSQSSCWRSSASPKASCPLRTSRSSGTTARQGLCGWCRGRRRWSTPSKRSSRLCRTPLR

SEQ ID NO: 24651 - protein, 87 aa, Zea mays subsp. mays
  misc_feature (1)..(87): Ceres Seq. ID no. 12436233
MWLVQGKKKVEHTFKKIKQTVSYATEVTAFAEKGKLRKITGVKTKELMLWLSVVEVYVPEASPEKVTFKTGTGLSDTFDASAFALGE

SEQ ID NO: 24652 - DNA, 1141 bp, Zea mays subsp. mays
  misc_feature (1)..(1141): Ceres Seq. ID no. 12436346
caactgaaggtgccggactagtagctccgtgtcaccaaccagagccagagccatgggggccagcctgagcctggtgccggtgctcgactacttcgcccgccgcgagtgcctgcgcgccggcctccaccagaacgccgtcacgctcccgtaccccgacggcggcggcggggcgacctgcaccgtccagtactgggctccgcagggggagcctgagctcccgccgctcctgctggtccacggcttcgggccccgggccgactggcagtggcgctgccaggtggggccgctctcgcgccacttccacgtcatcatccccgacctcctgggcttcggcggcagcgcgtacccgtccgagacggcgccgccgccgacggaggcgacgcaggccgcggtgctggcggcgctgctgggcgcgctgcccgggatggagcgccggcgcgtggccgtggcgggcaccagctacggcgggttcgtggcgtactggctggcccgcgaggcggggcccgccagggtcggccccgtggtgatcgccagctccgacctgctcaagacggctgccgacgacagggcgttcctgaagcgcgccggcgaagggtggggcggcgtggacgagatcctcctccccgccgagcccgccgcgctgcggaagctcctggagctggcctcctgccgcccgccgccgcggctggtgacgccggacttcctgctccgtgacttcatccagaaactcttcacgcagaacagggagcggcttgtccatctgctgaaggggattacggtcgggacagagaagttccaagtgacgccaatatctcaggaagtgctgattgtatggggagaccacgaccagctgttcccggtggagaaggcgtttgcggttcagagggctctgaacgggaccgctaggctggaggtgataccgaagacaggccacgctcctcagctggaggatccggctcgcttcaacaaggtcatgctggacttcttgctggcttctcacaagcctgacccctcggttagtggtagcgcgcaataatttaccaaggtgcattggcgattggtcagtggtagccgactcgattgtttgtaataagatcgctggacaggttcagttcattccattaaatcaatggtaaatttc

SEQ ID NO: 24653 - protein, 327 aa, Zea mays subsp. mays
  misc_feature (1)..(327): Ceres Seq. ID no. 12436347
MGASLSLVPVLDYFARRECLRAGLHQNAVTLPYPDGGGGATCTVQYWAPQGEPELPPLLLVHGFGPRADWQWRCQVGPLSRHFHVIIPDLLGFGGSAYPSETAPPPTEATQAAVLAALLGALPGMERRRVAVAGTSYGGFVAYWLAREAGPARVGPVVIASSDLLKTAADDRAFLKRAGEGWGGVDEILLPAEPAALRKLLELASCRPPPRLVTPDFLLRDFIQKLFTQNRERLVHLLKGITVGTEKFQVTPISQEVLIVWGDHDQLFPVEKAFAVQRALNGTARLEVIPKTGHAPQLEDPARFNKVMLDFLLASHKPDPSVSGSAQ

SEQ ID NO: 24654 - protein, 203 aa, Zea mays subsp. mays
  misc_feature (1)..(203): Ceres Seq. ID no. 12436348
MERRRVAVAGTSYGGFVAYWLAREAGPARVGPVVIASSDLLKTAADDRAFLKRAGEGWGGVDEILLPAEPAALRKLLELASCRPPPRLVTPDFLLRDFIQKLFTQNRERLVHLLKGITVGTEKFQVTPISQEVLIVWGDHDQLFPVEKAFAVQRALNGTARLEVIPKTGHAPQLEDPARFNKVMLDFLLASHKPDPSVSGSAQ

SEQ ID NO: 24655 - DNA, 2385 bp, Zea mays subsp. mays
  misc_feature (1)..(2385): Ceres Seq. ID no. 12436349
aaaacattgcctccaaaaaaaatataaaaaaaacggagccagcccaaaccgcgcgccagaaatccccgagagctgaacagagctcagagctgccatgcgttccccgagccaccacgaccgagacctcctcctcctcctcctcgtactcgcggcggccgtcggttcccgcagcgacgatacgcacgcgtgccggtcgcggccgtacctctgcggcggcgtgaacatcagctacccgttccacctcgccagcgacgccacggcggtcccgggccacgatggcgagtcctactgcggctacccgggcctcgccgtcagctgcgacggcggcaacaaggccgtcctgaacctcggcgaccacgactacacagtctcgcgcatagactacgccaaccagaccgtctcgctcgccgacgcgggggccagcagcggatgccccgtcgtggaccacaacgtgacgatcccgcaggacgtccggctgtccctcctccacagcatcgactacctcctcttcttcgccggctgctccttcggcccgggcgccggccccgaccccaggccgccgaagccgccgtccatcgagcccgtcacctgcggcgagtctggcgacctgggcaagccggccgccgccatgacgttcgtgctcccgcgcgccgaggtgcctccgggcgactgggcgagcgcgtgccggaaggtcttccaggtgccggtgctcaagggctccgtcccgcccgacgcccagcacgacccgctgtggacgagcggcggcgggtacggcgaggcgctccgcgcggggttccagctcggctgggaccgcggctctggcccgtgcgcccgatgcgagcagtccggcggcaagtgcgggtacggccgcgccggcgagttcctgggatgcctctgcgccggcagccgcgtggacggcggcggcgactgcagtaagatgtcagccggctcctccgatctgccttggttcgggccaaaaagtaaaacagcagttattgccggtgtcgcggctggcgctggtgttgcaatacttgctgctgccatttttttgttcgtgaggcgcaagagaaagcagaagagagtggtcaactcgtcttcgaagctcctcaagtacagcggctctggcgggaccccgcgttcacgggtcggtgacatggagtccggcagcatcgaggacccgcctacgcatctcttcacctacgaggagcttgaggaggcgaccagttgcttcgacgaaaacagagagctcggtgacggtggcttcggcaccgtctacaaagggtacctcaaggacgggcgcgtggtggcggtgaaacggctgtacaacaacagctaccggcgcgtggagcagttccagaacgaggcggccatcctgtcggggctacgccaccccaacctcgtcatgttctacggctgcacgtccagccagagccgcgagctgctgctggtgtacgagttcgtggccaacggcacggtcgccgaccacctgcacgggcagcgggccgccgagcgcgccctcccgtggccgctccgcctcggcgtcgccgtggagtccgccgcggcgctcacctacctgcacgccatcgagccgcccgtggtgcaccgcgacgtcaagaccaccaacatcctcctggacgccgactaccacgtcaaggtcgccgacttcggcctctcccgcctcttccccctcgacgtcacgcacgtctccaccgctccccagggcacgccagggtatgtagatccagagtaccaccagtgctaccagctgacggacaagagcgacgtgtacagtttcggagtggtcctggtggagctcatctcgtccaagcccgccgtcgacgtcacccggcaccgcaacgagatcaacctggccggcatggccatcagcaagatccagaagtgccagctggaggagctcgtcgacatcgacctgggctacgagtccgacccggccaccaagaaggcgatgacggcggtcgccgagctggccttccgttgcctgcagcagaacggcgagatgcgcccgccgatcaaggaggtgctcgaggtgctcaggagcattcagggcgaataccagacggggaaggacggagacaaaaacaagggacggacccctctctcccaccacggttcatgctccgtgggagagcagggccacgacgcccaacaccagcagggactagaccagtcggtcagtgtcaaggactggagaccggagaagttgctgctgctgtgtgactgtgaggcatgccagattgcctgtcatttgttttcaggcttcgcggtccggttcctgctgatgtatatatttgttttgttgggtctgtcagagctgagggaatgtacatatatgtgaaagagtggtgaatgatatatataatacac

SEQ ID NO: 24656 - protein, 753 aa, Zea mays subsp. mays
  misc_feature (1)..(753): Ceres Seq. ID no. 12436350
MRSPSHHDRDLLLLLLVLAAAVGSRSDDTHACRSRPYLCGGVNISYPFHLASDATAVPGHDGESYCGYPGLAVSCDGGNKAVLNLGDHDYTVSRIDYANQTVSLADAGASSGCPVVDHNVTIPQDVRLSLLHSIDYLLFFAGCSFGPGAGPDPRPPKPPSIEPVTCGESGDLGKPAAAMTFVLPRAEVPPGDWASACRKVFQVPVLKGSVPPDAQHDPLWTSGGGYGEALRAGFQLGWDRGSGPCARCEQSGGKCGYGRAGEFLGCLCAGSRVDGGGDCSKMSAGSSDLPWFGPKSKTAVIAGVAAGAGVAILAAAIFLFVRRKRKQKRVVNSSSKLLKYSGSGGTPRSRVGDMESGSIEDPPTHLFTYEELEEATSCFDENRELGDGGFGTVYKGYLKDGRVVAVKRLYNNSYRRVEQFQNEAAILSGLRHPNLVMFYGCTSSQSRELLLVYEFVANGTVADHLHGQRAAERALPWPLRLGVAVESAAALTYLHAIEPPVVHRDVKTTNILLDADYHVKVADFGLSRLFPLDVTHVSTAPQGTPGYVDPEYHQCYQLTDKSDVYSFGVVLVELISSKPAVDVTRHRNEINLAGMAISKIQKCQLEELVDIDLGYESDPATKKAMTAVAELAFRCLQQNGEMRPPIKEVLEVLRSIQGEYQTGKDGDKNKGRTPLSHHGSCSVGEQGHDAQHQQGLDQSVSVKDWRPEKLLLLCDCEACQIACHLFSGFAVRFLLMYIFVLLGLSELRECTYM

SEQ ID NO: 24657 - protein, 575 aa, Zea mays subsp. mays
  misc_feature (1)..(575): Ceres Seq. ID no. 12436351
MTFVLPRAEVPPGDWASACRKVFQVPVLKGSVPPDAQHDPLWTSGGGYGEALRAGFQLGWDRGSGPCARCEQSGGKCGYGRAGEFLGCLCAGSRVDGGGDCSKMSAGSSDLPWFGPKSKTAVIAGVAAGAGVAILAAAIFLFVRRKRKQKRVVNSSSKLLKYSGSGGTPRSRVGDMESGSIEDPPTHLFTYEELEEATSCFDENRELGDGGFGTVYKGYLKDGRVVAVKRLYNNSYRRVEQFQNEAAILSGLRHPNLVMFYGCTSSQSRELLLVYEFVANGTVADHLHGQRAAERALPWPLRLGVAVESAAALTYLHAIEPPVVHRDVKTTNILLDADYHVKVADFGLSRLFPLDVTHVSTAPQGTPGYVDPEYHQCYQLTDKSDVYSFGVVLVELISSKPAVDVTRHRNEINLAGMAISKIQKCQLEELVDIDLGYESDPATKKAMTAVAELAFRCLQQNGEMRPPIKEVLEVLRSIQGEYQTGKDGDKNKGRTPLSHHGSCSVGEQGHDAQHQQGLDQSVSVKDWRPEKLLLLCDCEACQIACHLFSGFAVRFLLMYIFVLLGLSELRECTYM

SEQ ID NO: 24658 - protein, 472 aa, Zea mays subsp. mays
  misc_feature (1)..(472): Ceres Seq. ID no. 12436352
MSAGSSDLPWFGPKSKTAVIAGVAAGAGVAILAAAIFLFVRRKRKQKRVVNSSSKLLKYSGSGGTPRSRVGDMESGSIEDPPTHLFTYEELEEATSCFDENRELGDGGFGTVYKGYLKDGRVVAVKRLYNNSYRRVEQFQNEAAILSGLRHPNLVMFYGCTSSQSRELLLVYEFVANGTVADHLHGQRAAERALPWPLRLGVAVESAAALTYLHAIEPPVVHRDVKTTNILLDADYHVKVADFGLSRLFPLDVTHVSTAPQGTPGYVDPEYHQCYQLTDKSDVYSFGVVLVELISSKPAVDVTRHRNEINLAGMAISKIQKCQLEELVDIDLGYESDPATKKAMTAVAELAFRCLQQNGEMRPPIKEVLEVLRSIQGEYQTGKDGDKNKGRTPLSHHGSCSVGEQGHDAQHQQGLDQSVSVKDWRPEKLLLLCDCEACQIACHLFSGFAVRFLLMYIFVLLGLSELRECTYM

SEQ ID NO: 24659 - DNA, 1942 bp, Zea mays subsp. mays
  misc_feature (1)..(1942): Ceres Seq. ID no. 12436371
gcacgagaccattacctagaacatcctaatcgaaaaagggcgctaatttcagccgtgttctcttctctctcgttcgagagatttatactacgtgtataaaaagcatcgtccaacagaggtacctttgctgcgcctctcgatctctagctatagcccgtagctagctagccctcccggcgaatcggccgatcagccggtcgggaacgatgaagaaagatgatgacctcgagtcggcgctgctggccgccaaagagccggcgccggcgcccgccaagggctacgcgtacgcgctcacctgcgcgctcctggcttccctcacctccatcatctacggctacaaccgcggggtgatgagcggggcgcagaagttcgtgcaggccgacctcggcgtcacggacgcgcagctggaggtgctcatcggcgccaccagcgtctactccctcgtcggctcgctggcggcgggctgggcgtgcgaccgcgcgggccggcgccgcaccatcgcgctgtcggcggccttgttcctcgccggctcagccgtcaccgccgccgccgacggctacgccgcgctcatggcgggccagttcgtcgccggcgtggcctgcggattcggcctcgtcgtcgctcccgtctacatcgcggagatctcgccggccaacgctcggggcttcctctcctccatccccgagatcgccggcaactcgggcatcctgctgagctacatcgccgacttcgcgctcgccggcctcccgacgccactcaactggcgcctgatgatcggcatcggcgccgtccctcctctattcctagcggccgcggccgcgcttgccatgccggagaccccgcgctggctcgtcctccacggccaccgcgacgaggcgcgccgcgtgctggcgcgcacggtgggggacgcggaccgccggctccaggagatcgtgacgtccgtgcaggaggccacgaagcaggcgggctccggcggcggcgacgcgccgtcgtcggcgagcgtgcggcgcgngatcctgctccggccgacgcccgccgtccgccgcgtgatgctggccatcctggggctgcaggtgttccagcaggcgtgcggcgtggcggccatggtgctgtacgccccgcgcgtgttcagccacgtcgggatcacctccgagcgcgacgtgctcggcgccaccgtcctcctcggcgccgccaagacggtggcgatcgtcgtccctctgttcctcgccgacagcctcggccgccggcccatgctgctcaccagcgcgggtggcatggccgcgtcgcttctggtcctcggcctgtccatacgcgcgacgtcggccgcgacgtgcgtcgccgccgccgtggcgttcatggcgaccttctcgctggggttcggacccgtgatctggatgtacgggtcggagatcctgccgctgcggctgcgcgcgcaggggactggcgtcgggacggcggtcaaccgggtgatgagcgccatcgtggggatgaccttcatcccgatgtacgaggcggtgggcatggccgggaccttctacatcttcgcggcgatgtccgcggcagcgtgggtgttcgtctacgcgtgcctgcctgagaccaaggggaggagcctcgaggagatggaggcactcttcgacgccggtgccggtgccgatgctgcaccgtcgccacgggcggcgttgtcgtgacgttccagacactgagtacacatgcatcatgtccacgcaaggaacaaacacgtgatgacatgaagttgtcaggtgtgcagtgtagcaaggttagacaggtgctagtgtatttgtaagcagccaagatgccgtcgacgaatagttttgtactcttgtcattttgaatgggttgattatatggtagctgtttctagcaacgcgtctcttaaatttcattctctaaagcaatatgtaccgttctttacatttacaat

SEQ ID NO: 24660 - protein, 493 aa, Zea mays subsp. mays
  misc_feature (1)..(493): Ceres Seq. ID no. 12436372
  misc_feature (269)..(269): Xaa is any aa, unknown or other
MKKDDDLESALLAAKEPAPAPAKGYAYALTCALLASLTSIIYGYNRGVMSGAQKFVQADLGVTDAQLEVLIGATSVYSLVGSLAAGWACDRAGRRRTIALSAALFLAGSAVTAAADGYAALMAGQFVAGVACGFGLVVAPVYIAEISPANARGFLSSIPEIAGNSGILLSYIADFALAGLPTPLNWRLMIGIGAVPPLFLAAAAALAMPETPRWLVLHGHRDEARRVLARTVGDADRRLQEIVTSVQEATKQAGSGGGDAPSSASVRRXILLRPTPAVRRVMLAILGLQVFQQACGVAAMVLYAPRVFSHVGITSERDVLGATVLLGAAKTVAIVVPLFLADSLGRRPMLLTSAGGMAASLLVLGLSIRATSAATCVAAAVAFMATFSLGFGPVIWMYGSEILPLRLRAQGTGVGTAVNRVMSAIVGMTFIPMYEAVGMAGTFYIFAAMSAAAWVFVYACLPETKGRSLEEMEALFDAGAGADAAPSPRAALS

SEQ ID NO: 24661 - protein, 445 aa, Zea mays subsp. mays
  misc_feature (1)..(445): Ceres Seq. ID no. 12436373
  misc_feature (221)..(221): Xaa is any aa, unknown or other
MSGAQKFVQADLGVTDAQLEVLIGATSVYSLVGSLAAGWACDRAGRRRTIALSAALFLAGSAVTAAADGYAALMAGQFVAGVACGFGLVVAPVYIAEISPANARGFLSSIPEIAGNSGILLSYIADFALAGLPTPLNWRLMIGIGAVPPLFLAAAAALAMPETPRWLVLHGHRDEARRVLARTVGDADRRLQEIVTSVQEATKQAGSGGGDAPSSASVRRXILLRPTPAVRRVMLAILGLQVFQQACGVAAMVLYAPRVFSHVGITSERDVLGATVLLGAAKTVAIVVPLFLADSLGRRPMLLTSAGGMAASLLVLGLSIRATSAATCVAAAVAFMATFSLGFGPVIWMYGSEILPLRLRAQGTGVGTAVNRVMSAIVGMTFIPMYEAVGMAGTFYIFAAMSAAAWVFVYACLPETKGRSLEEMEALFDAGAGADAAPSPRAALS

SEQ ID NO: 24662 - protein, 372 aa, Zea mays subsp. mays
  misc_feature (1)..(372): Ceres Seq. ID no. 12436374
  misc_feature (148)..(148): Xaa is any aa, unknown or other
MAGQFVAGVACGFGLVVAPVYIAEISPANARGFLSSIPEIAGNSGILLSYIADFALAGLPTPLNWRLMIGIGAVPPLFLAAAAALAMPETPRWLVLHGHRDEARRVLARTVGDADRRLQEIVTSVQEATKQAGSGGGDAPSSASVRRXILLRPTPAVRRVMLAILGLQVFQQACGVAAMVLYAPRVFSHVGITSERDVLGATVLLGAAKTVAIVVPLFLADSLGRRPMLLTSAGGMAASLLVLGLSIRATSAATCVAAAVAFMATFSLGFGPVIWMYGSEILPLRLRAQGTGVGTAVNRVMSAIVGMTFIPMYEAVGMAGTFYIFAAMSAAAWVFVYACLPETKGRSLEEMEALFDAGAGADAAPSPRAALS

SEQ ID NO: 24663 - DNA, 2238 bp, Zea mays subsp. mays
  misc_feature (1)..(2238): Ceres Seq. ID no. 12436409
aaaaataatcatacctggtatgctaaatcgaaacaggagggagtctgtagtagtccagttcacaagtagcggcagctagctgctgttggctgttgcccttctccgaaagaaaactactcgagctgaggcggagtagccaaggagaagtcaatgccgttctagcagtccagctttcacatggagcaggtcaaacaccttattacgcttgacgctttgcagcagcgatctcgatctgtggaggattgcatcaacctgacaatctctcgagttcttcacctcctctctcccaacggcatccattcagcccttggatgaccaggcatggccgtgggaggcccctcctggcccaatttgcagtgcctggtgcggcggaagccggcgaccgctggctgggccgaagacgctgacaggggaggtgtccagcgcctcgccaagacgctatctattccccacctcgtcgccatcggtgtcggctcgacgattggcgccggcatctatgtcctggttggaaccgtggctcgtgagcacaccgggccgggactgacgctctcctttctgatagccggcgtcgccgcggctctttcagcattgtgctatgccgagctctcctgccgtttcccttcggcagggagtgcctatcactactcctacatctgcattggggagagtgttgcttggctgattgggtgggccttgatccttgagtacaccattggggggtcatcagtggcacgtggcatgtcaccaaacttggctctatttttcggtggccaagataagttgccattctttctagcacaggtgcatgtcaaaggcctcgacaccccagttgatccatgtgctgctattcttgtcctgatagttactgcattactctgtctgggaattaaagagagctcatctgtggaaggcatcatcaccactgcaaatatcatagtgatgctctttgtcatctgcgctggtggatggctaggattcaggaatggctgggttggttataaagtgccagaaggttatttccctaatggtatcagcggagttctctctggatcagcaacccctcttcttcgcattcattggcttcgacacagttgctagtacggccgaggaggtgaagaatcctcgacgcgatcttccattgggtatgggcctgaccttatccctgtgttgcttcctatatatgatggtttctgctgttgtggtcggtttggtgccgtaccacgcgatggatccggacacccctatttnttctgtgtttgcgcgatatgggatgcagtgggccgagtatgttgtttccagtggagctgttcttgctcttgtggcatccttgataggtggtattcttccccagccaagaattataatggccatggctagagatggattgctcccgccactgttctcagatgttaatcgaaaaactcaagtgccaatcttgagcacagtcttaattggcacatgtgcttctgtcctggcctttttcatggatgtctcccaattggcagggatggtaagcgtgggaaccttattggcatttactgcggttgccatttctgttttagtagtaagatatgctcctccgtatgagatgccaatggaagtggcccttgcagtagcttcattctctgggcacttagagcatgatgagcaaaattcagaagatccttttagcaatgttcaagaagcgcttgatgtcagtgaggtagccagagaagtaaggcgacagaaagccattggaagcatagtgttgatatgcgttggagccatcatcttgatttctgcggtttctgtctcctttttgccattttatgtgcaaaggatcgcatgcactgtaggcgggctggcagtgttgggttcttctattgtgcttttgtgcattggacaagacaagaagttcttgggacaaactggaggtttcatgtgcccgttggtcccatttcttccagtctgttgcatcatggtcaacttatacctgcttatgaacgtcgggagtcacacgtggattcgtgtttccatatggctggtggctggggccctcatatacatcttctatggcatgaagcatagttcactggcaagcatggcctaccatcgcatatcacctttgtagttcaacgtttggctagaggtcttttgcattttgatagcagaaaatgagaacacgtggcggctacagaagctgtttctcaaaggtgtcgggggcgggggtttcttaggctatccgcaagcgttaacccc

SEQ ID NO: 24664 - protein, 375 aa, Zea mays subsp. mays
  misc_feature (1)..(375): Ceres Seq. ID no. 12436410
  misc_feature (89)..(89): Xaa is any aa, unknown or other
MAGLVIKCQKVISLMVSAEFSLDQQPLFFAFIGFDTVASTAEEVKNPRRDLPLGMGLTLSLCCFLYMMVSAVVVGLVPYHAMDPDTPIXSVFARYGMQWAEYVVSSGAVLALVASLIGGILPQPRIIMAMARDGLLPPLFSDVNRKTQVPILSTVLIGTCASVLAFFMDVSQLAGMVSVGTLLAFTAVAISVLVVRYAPPYEMPMEVALAVASFSGHLEHDEQNSEDPFSNVQEALDVSEVAREVRRQKAIGSIVLICVGAIILISAVSVSFLPFYVQRIACTVGGLAVLGSSIVLLCIGQDKKFLGQTGGFMCPLVPFLPVCCIMVNLYLLMNVGSHTWIRVSIWLVAGALIYIFYGMKHSSLASMAYHRISPL

SEQ ID NO: 24665 - protein, 361 aa, Zea mays subsp. mays
  misc_feature (1)..(361): Ceres Seq. ID no. 12436411
  misc_feature (75)..(75): Xaa is any aa, unknown or other
MVSAEFSLDQQPLFFAFIGFDTVASTAEEVKNPRRDLPLGMGLTLSLCCFLYMMVSAVVVGLVPYHAMDPDTPIXSVFARYGMQWAEYVVSSGAVLALVASLIGGILPQPRIIMAMARDGLLPPLFSDVNRKTQVPILSTVLIGTCASVLAFFMDVSQLAGMVSVGTLLAFTAVAISVLVVRYAPPYEMPMEVALAVASFSGHLEHDEQNSEDPFSNVQEALDVSEVAREVRRQKAIGSIVLICVGAIILISAVSVSFLPFYVQRIACTVGGLAVLGSSIVLLCIGQDKKFLGQTGGFMCPLVPFLPVCCIMVNLYLLMNVGSHTWIRVSIWLVAGALIYIFYGMKHSSLASMAYHRISPL

SEQ ID NO: 24666 - protein, 321 aa, Zea mays subsp. mays
  misc_feature (1)..(321): Ceres Seq. ID no. 12436412
  misc_feature (35)..(35): Xaa is any aa, unknown or other
MGLTLSLCCFLYMMVSAVVVGLVPYHAMDPDTPIXSVFARYGMQWAEYVVSSGAVLALVASLIGGILPQPRIIMAMARDGLLPPLFSDVNRKTQVPILSTVLIGTCASVLAFFMDVSQLAGMVSVGTLLAFTAVAISVLVVRYAPPYEMPMEVALAVASFSGHLEHDEQNSEDPFSNVQEALDVSEVAREVRRQKAIGSIVLICVGAIILISAVSVSFLPFYVQRIACTVGGLAVLGSSIVLLCIGQDKKFLGQTGGFMCPLVPFLPVCCIMVNLYLLMNVGSHTWIRVSIWLVAGALIYIFYGMKHSSLASMAYHRISPL

SEQ ID NO: 24667 - DNA, 1187 bp, Zea mays subsp. mays
  misc_feature (1)..(1187): Ceres Seq. ID no. 12436465
ggctggctgcccccgctgctctcctctcctccgagatcccggcaccgtcctgtcccgccgcgccgacagctccccgcctagactgctgcacgcgcggatctcgcgtcgccttccgcccagctgcgatgcatattcgcgccgccgccgccgccgccgccgcacttgtcctcctcctcgcgctctccgtccccgtctccgccgccgaccaggatgctaatggcgctgccgggaatggcactggagtcggcgccgaccgcctggaccgccgcaccaagatgttcctccaccacacggtgcgcgcggccgcggccggggcgcacgacacggggctggggctcctcgacgccttcttcgccagcctgtccatgatcgtcgtcagcgagattggcgatgagacgttcatcatcgcggcgctgatggcgatgcggcaccccaagtcgacggtgctctcgggcgcactgtcggcgcttgtagttatgacggtgctgtctactggactaggcaggattgttccgaatttgatatcgaggaagcacactaacagcgcggcgacagtcctctatgcattttttgggctacggctcctgtacatcgcttggaggtcagattccaaggcatcacagaagaaggaaatagaagaggtagaggaaaagctggaagcaggccaagggaagtcaacatttagacgtgttttctcgagattctgcactcctattttcctggagtcatttgtgttgaccttcttggcggagtggggcgaccgaagtcagatagctacaatagcgctggcgacccacaagaacgcggtcggagtcgctacgggagcgaccttggggcacaccatctgcacgtcgatcgcggtggtgggcggcagcatgctggcctccaagatatctcagggcacggtcgccaccgtcggaggcctcctcttccttgggttctctctttcgtcgtatttctacccgccattgtagtaccaccctgtcatgcgagccccctatttgtttcttggccagcttcctcattgatccagtgacccttgtcctgcggcattttttttcctgtactagtaaagcatacatggatatgtgtagtaggtagggatatatacgatcattgccaatgtataccatacaagtcatgtcatggattcaaaaacagacggaagagctttttgtcncgaattc

SEQ ID NO: 24668 - protein, 323 aa, Zea mays subsp. mays
  misc_feature (1)..(323): Ceres Seq. ID no. 12436466
LAAPAALLSSEIPAPSCPAAPTAPRLDCCTRGSRVAFRPAAMHIRAAAAAAAALVLLLALSVPVSAADQDANGAAGNGTGVGADRLDRRTKMFLHHTVRAAAAGAHDTGLGLLDAFFASLSMIVVSEIGDETFIIAALMAMRHPKSTVLSGALSALVVMTVLSTGLGRIVPNLISRKHTNSAATVLYAFFGLRLLYIAWRSDSKASQKKEIEEVEEKLEAGQGKSTFRRVFSRFCTPIFLESFVLTFLAEWGDRSQIATIALATHKNAVGVATGATLGHTICTSIAVVGGSMLASKISQGTVATVGGLLFLGFSLSSYFYPPL

SEQ ID NO: 24669 - protein, 282 aa, Zea mays subsp. mays
  misc_feature (1)..(282): Ceres Seq. ID no. 12436467
MHIRAAAAAAAALVLLLALSVPVSAADQDANGAAGNGTGVGADRLDRRTKMFLHHTVRAAAAGAHDTGLGLLDAFFASLSMIVVSEIGDETFIIAALMAMRHPKSTVLSGALSALVVMTVLSTGLGRIVPNLISRKHTNSAATVLYAFFGLRLLYIAWRSDSKASQKKEIEEVEEKLEAGQGKSTFRRVFSRFCTPIFLESFVLTFLAEWGDRSQIATIALATHKNAVGVATGATLGHTICTSIAVVGGSMLASKISQGTVATVGGLLFLGFSLSSYFYPPL

SEQ ID NO: 24670 - protein, 232 aa, Zea mays subsp. mays
  misc_feature (1)..(232): Ceres Seq. ID no. 12436468
MFLHHTVRAAAAGAHDTGLGLLDAFFASLSMIVVSEIGDETFIIAALMAMRHPKSTVLSGALSALVVMTVLSTGLGRIVPNLISRKHTNSAATVLYAFFGLRLLYIAWRSDSKASQKKEIEEVEEKLEAGQGKSTFRRVFSRFCTPIFLESFVLTFLAEWGDRSQIATIALATHKNAVGVATGATLGHTICTSIAVVGGSMLASKISQGTVATVGGLLFLGFSLSSYFYPPL

SEQ ID NO: 24671 - DNA, 1152 bp, Zea mays subsp. mays
  misc_feature (1)..(1152): Ceres Seq. ID no. 12436476
aggctccactgctaaacgccggtaatggcccaggctccggcgcgcgccgcttccgccgtacgtctcttcgacgcgcactgccacctgcaagacccccgcatcgcggccgtcgcccctgcccttatacgagccgccggcgcatccggcgtcgcacgcttcgctgtcaacggcacctccgagaaggactggcacctggtgaagcagatggccgaggatcacccagccgtcgtcccctgcttcggcctgcacccttggtgggtacccgagaggtcgccggattggatgaatttgctccggcggttcttcgccgaaaccccggaggcggctgttggggagattggtctggacaaaggttcacatggaaaaaccatcaacttcggagaacaggttgaagtgttccagcgacagctcgaactagctaaggaattggagagacctgtttctgttcattgtgtgcgggcatttggtgatcttctggaagtattgaagcaaactggacctttcccagcaggcgtgttgttacattcttatatgggatctgcagaaatggtgtctgcccttgcaaatttaggctgttacttttcactatctggcttcttgacaggcatgaaatccactaaagctaagcacatgctgaagtcgattcccctggataggattcttttagagacagatgcacctgatgcattaccaagattggacaatgtttctgtatcaccagtccatgttcacagttcagatgcagatactgaaaagcgtcacatggattcagagtcacaggctgctaatgcatcaaatgagtccttgaaccatccagaaaatatccatattgttttggagtatgtcgcatcactccttgaaatgacagagtcagaattggcggagttgagttacaagaatgctaccaagctgttttcttatcctggctccaaagttcaacatgaacctgaagacatctaaatcgggttcaacactaccttactcactggtcagcaaatctgaaacctgttctttttagttttgactcctggtttttctcctcttcttaatgctgtttgtgtaccggattgtagggtcctcccagacacaatgtttgagaaactgaaatggctgtacatcactgttaatattggtgaaataaaacagataccg

SEQ ID NO: 24672 - protein, 311 aa, Zea mays subsp. mays
  misc_feature (1)..(311): Ceres Seq. ID no. 12436477
MAQAPARAASAVRLFDAHCHLQDPRIAAVAPALIRAAGASGVARFAVNGTSEKDWHLVKQMAEDHPAVVPCFGLHPWWVPERSPDWMNLLRRFFAETPEAAVGEIGLDKGSHGKTINFGEQVEVFQRQLELAKELERPVSVHCVRAFGDLLEVLKQTGPFPAGVLLHSYMGSAEMVSALANLGCYFSLSGFLTGMKSTKAKHMLKSIPLDRILLETDAPDALPRLDNVSVSPVHVHSSDADTEKRHMDSESQAANASNESLNHPENIHIVLEYVASLLEMTESELAELSYKNATKLFSYPGSKVQHEPEDI

SEQ ID NO: 24673 - protein, 251 aa, Zea mays subsp. mays
  misc_feature (1)..(251): Ceres Seq. ID no. 12436478
MAEDHPAVVPCFGLHPWWVPERSPDWMNLLRRFFAETPEAAVGEIGLDKGSHGKTINFGEQVEVFQRQLELAKELERPVSVHCVRAFGDLLEVLKQTGPFPAGVLLHSYMGSAEMVSALANLGCYFSLSGFLTGMKSTKAKHMLKSIPLDRILLETDAPDALPRLDNVSVSPVHVHSSDADTEKRHMDSESQAANASNESLNHPENIHIVLEYVASLLEMTESELAELSYKNATKLFSYPGSKVQHEPEDI

SEQ ID NO: 24674 - protein, 225 aa, Zea mays subsp. mays
  misc_feature (1)..(225): Ceres Seq. ID no. 12436479
MNLLRRFFAETPEAAVGEIGLDKGSHGKTINFGEQVEVFQRQLELAKELERPVSVHCVRAFGDLLEVLKQTGPFPAGVLLHSYMGSAEMVSALANLGCYFSLSGFLTGMKSTKAKHMLKSIPLDRILLETDAPDALPRLDNVSVSPVHVHSSDADTEKRHMDSESQAANASNESLNHPENIHIVLEYVASLLEMTESELAELSYKNATKLFSYPGSKVQHEPEDI

SEQ ID NO: 24675 - DNA, 996 bp, Zea mays subsp. mays
  misc_feature (1)..(996): Ceres Seq. ID no. 12436522
ggacccaggtcgttgccgcctacgccaggtgcccaaatcttcttagggcccttcgccggcgacgagcacacaagcttggttgacccccaacaaattgcaaaatgtcagccaatgtcggtgaatcaaccagcggtggcagcagcaacgatgcagctggggggagctttgaatgtaacatatgctttgagctgcctcaagagccaatagtgactctttgtggccacctcttctgctggccatgcctttaccggtggctgcacatccatgcacattcgccagagtgcccagtgtgcaaggctcttgtggaggaagacaagcttgttcccctttatggagcgcggcaaggatcgtgttgacccaaggtcaaagaacatgcccgagggtgagattcctcaccgcccaactggtcagaggcctgccccagccccccaggccgatgctaacaacaactttgccaatgccaatccaaatgcgaatccatggttcatgggcacaggagtccctttggctaatgcgcgctgggggaactacgcattctcagctgctttcgggggactattccctatgcttagcttccaagttcatgggtttccagatgctgctgcttatgcgcagcctgctgggttccactatgggtatggccatgggcatggattccatggcggccatatgggacacgcccatggcgtccaccgacaagcaccattggggcaacagcagcaggcagatatctacttgaaggccctgctcttcatgattggaattctagtgattgcaagcctcattgcgttttaaaatttgttggcaacgtctaccaggaggcctgctcgtcacggctgggacgtggaattctgggaatgcaatcctcctgacatgtcagagtccgttgatagcttgacatttgtgatggcatattggcccatgaaccgccagaatttcagtgtgtttgtactatagcttggcgctgaatgttgcataagttattattctgtttgc

SEQ ID NO: 24676 - protein, 176 aa, Zea mays subsp. mays
  misc_feature (1)..(176): Ceres Seq. ID no. 12436523
MHIRQSAQCARLLWRKTSLFPFMERGKDRVDPRSKNMPEGEIPHRPTGQRPAPAPQADANNNFANANPNANPWFMGTGVPLANARWGNYAFSAAFGGLFPMLSFQVHGFPDAAAYAQPAGFHYGYGHGHGFHGGHMGHAHGVHRQAPLGQQQQADIYLKALLFMIGILVIASLIAF

SEQ ID NO: 24677 - protein, 166 aa, Zea mays subsp. mays
  misc_feature (1)..(166): Ceres Seq. ID no. 12436524
MPLPVAAHPCTFARVPSVQGSCGGRQACSPLWSAARIVLTQGQRTCPRVRFLTAQLVRGLPQPPRPMLTTTLPMPIQMRIHGSWAQESLWLMRAGGTTHSQLLSGDYSLCLASKFMGFQMLLLMRSLLGSTMGMAMGMDSMAAIWDTPMASTDKHHWGNSSRQIST

SEQ ID NO: 24678 - protein, 154 aa, Zea mays subsp. mays
  misc_feature (1)..(154): Ceres Seq. ID no. 12436525
MERGKDRVDPRSKNMPEGEIPHRPTGQRPAPAPQADANNNFANANPNANPWFMGTGVPLANARWGNYAFSAAFGGLFPMLSFQVHGFPDAAAYAQPAGFHYGYGHGHGFHGGHMGHAHGVHRQAPLGQQQQADIYLKALLFMIGILVIASLIAF

SEQ ID NO: 24679 - DNA, 695 bp, Zea mays subsp. mays
  misc_feature (1)..(695): Ceres Seq. ID no. 12436617
tgatccatgtctgcgcagtgtttcttttcacagtttgcgcttgcgaacatccgaaccccgttttcatcttgaattcaacttatgatgtatatcggacagttccaccacattctggcgccgccttcgtctgatcctggaggcaattggagccgctgcaagtcggatcctggtggatgcagcgcaacacagatcgcaaccctccaaggactgagaagtggaatgttgacatctctgagacagtctgaaagcaaaccgaaggcaggggtgttcatcaactcctgcttcgcgcattgctagagtgagctacaggacacatggttcgcaccaaattctccatccatatataacaagaaaattgcagaggtggtaggtgattggtactttgaaagaggagctgacgtggagattgactgcgcctatccctgtgattcacagtcttgtcgcaaccttataccaattgataaggaactgaggatgtattaggagttcggcagacgattatactcaattatcatcataataaaaaacactcttctaattgttgatgatgttatgttacttgcatcagatagcaaaccaccctattgtacaatctgttggtggaaacatgtttgtgttgtgtgttccaggttgtctgtttcttggtagccttttttggctgaattggtgatatacacaaaatctatttacttgtt

SEQ ID NO: 24680 - protein, 71 aa, Zea mays subsp. mays
  misc_feature (1)..(71): Ceres Seq. ID no. 12436618
MMYIGQFHHILAPPSSDPGGNWSRCKSDPGGCSATQIATLQGLRSGMLTSLRQSESKPKAGVFINSCFAHC

SEQ ID NO: 24681 - protein, 70 aa, Zea mays subsp. mays
  misc_feature (1)..(70): Ceres Seq. ID no. 12436619
MYIGQFHHILAPPSSDPGGNWSRCKSDPGGCSATQIATLQGLRSGMLTSLRQSESKPKAGVFINSCFAHC

SEQ ID NO: 24682 - protein, 42 aa, Zea mays subsp. mays
  misc_feature (1)..(42): Ceres Seq. ID no. 12436620
IHVCAVFLFTVCACEHPNPVFILNSTYDVYRTVPPHSGAAFV

SEQ ID NO: 24683 - DNA, 707 bp, Zea mays subsp. mays
  misc_feature (1)..(707): Ceres Seq. ID no. 12441460
taatcgaaaaatcaccaccaccccgcggctgcagctcagcagctccagacctcaccagaggcacctaccacaccgcccgccgccgatcccgtcacccgtctcctccccgctgcggagcgtctccagccctgcccggtgcccgcccagatggcaaacgcggcgtcagggatggccgtggacgacgactgcaagcgccggttcctggagctcaaggccaagaggacgcaccgcttcatcatctacaggatcgacgagaagaagaagatggtggtggtggagcaggtgggcaagcccgtgctcggctacgacgacttcgccgccagcctccccgccaacgagtgcaggtacgccatcttcgactacgacttcgtcaccgaggagaactgccagaagagcaagatcttcttcatcgcctggtctcctgacacggcgcgcgtgaggagcaagatgatctacgccagctccaaggagaggttcaagcgggagctggacggcattcaggtggatctccaggccaccgactccgccgaggttggccttgacgtcatccagggccgtgcaagctgaggatgcccagcgatgaactgcccatgccagaggatgtatgagcatcatcagttcagatgagaacttgactgggcgggctatgtaaaaactgcatccaccgcagtgatgaaatcaatctaatcaatctaccacccccttct

SEQ ID NO: 24684 - protein, 145 aa, Zea mays subsp. mays
  misc_feature (1)..(145): Ceres Seq. ID no. 12441461
NRKITTTPRLQLSSSRPHQRHLPHRPPPIPSPVSSPLRSVSSPARCPPRWQTRRQGWPWTTTASAGSWSSRPRGRTASSSTGSTRRRRWWWWSRWASPCSATTTSPPASPPTSAGTPSSTTTSSPRRTARRARSSSSPGLLTRRA

SEQ ID NO: 24685 - protein, 140 aa, Zea mays subsp. mays
  misc_feature (1)..(140): Ceres Seq. ID no. 12441462
IEKSPPPRGCSSAAPDLTRGTYHTARRRSRHPSPPRCGASPALPGARPDGKRGVRDGRGRRLQAPVPGAQGQEDAPLHHLQDRREEEDGGGGAGGQARARLRRLRRQPPRQRVQVRHLRLRLRHRGELPEEQDLLHRLVS

SEQ ID NO: 24686 - protein, 139 aa, Zea mays subsp. mays; identical to SEQ ID NO: 21318
  misc_feature (1)..(139): Ceres Seq. ID no. 12441463

SEQ ID NO: 24687 - DNA, 1426 bp, Zea mays subsp. mays
  misc_feature (1)..(1426): Ceres Seq. ID no. 12441479
gcacgagaccattacctagaacatcctaatcgaaaacacaccttccctcggtcccttccatctcctagccgccgccgccgccgccgctgcccaaaaccctacctaccctcttcttcccctcactctcctttcatctccattctaatggcggcccaacccgtccggcggcggctgctgctcagaaagccgagacgaagaagtccgccgtggcgcctgctgggaaggctgcccagcctgcggcgaccaccaagttcccgaccaagcccgctcctccctcgcagacggttcgggatgcacgcggcggtggctcatcagctcgtggaggctttggccgtggtgaacgtggccgtggcagaggtggacggggatatggccagaaccgtggcttcagtggtgacaatggcaatgacttccagggaggttatggtggcggaggctatggggatggtgctgtaactggtggatctgaaggagaaagggagagagacactcgtcccccgtaccgtggcggaggcagacgtggtggttacaggaatgttgagtttgctgatgactctgagaggccaccacggagaaactatgagcgccacagcgggactggccatggctatgagatgaagcgtgatggcgcagggcgagggaactggggcactgccactgatgaacttattgcccaggatgcagaggactctccgaagatggaggaggctgctcctgttgctgagaaacaaggtgagcagaatgatgccccagcagcagatgagaacaaaggtaacaaggatgctactgcaaatgaggaggaagaaaaggaagaggacaaggagatgactctggaggaatttgagaaaataagagaggagaagaggaaagcactacttgcattgaaggctgaggagaggaaagttgaagttgacaaggatttgcagtctctgcagccactttcaaacaagaaagaaaatgatgaagttttcattaagctgggttctgacaaggataagaagaaggaaaatgctgagcgtgatgagcgtgccaagaagtcggtgagcatcaacgagttcctgaaacctgctgaaggagaaaggtactatggcggccgtggccgtggaaggggccgtggggagcgtggtggttttagaggcggatacggagggggatacagtcgtggcccagctgctgctgctccatccattgaagatcaagctcagttcccaagccttggtgggaagtgaagggcgcccagctgctgctgtcaccgagcgttgtgttgtctgctgttgtcatatttaaattttgtccgacgttaaatttctgtgccacggtttaaacggaacaaataatgatgttgcatgtggctatctttagttatgtggtacttgacgttgaataccggagttgttgtttatcagaattaacctccaatttttgt

SEQ ID NO: 24688 - protein, 204 aa, Zea mays subsp. mays
  misc_feature (1)..(204): Ceres Seq. ID no. 12441480
MKRDGAGRGNWGTATDELIAQDAEDSPKMEEAAPVAEKQGEQNDAPAADENKGNKDATANEEEEKEEDKEMTLEEFEKIREEKRKALLALKAEERKVEVDKDLQSLQPLSNKKENDEVFIKLGSDKDKKKENAERDERAKKSVSINEFLKPAEGERYYGGRGRGRGRGERGGFRGGYGGGYSRGPAAAAPSIEDQAQFPSLGGK

SEQ ID NO: 24689 - protein, 176 aa, Zea mays subsp. mays
  misc_feature (1)..(176): Ceres Seq. ID no. 12441481
MEEAAPVAEKQGEQNDAPAADENKGNKDATANEEEEKEEDKEMTLEEFEKIREEKRKALLALKAEERKVEVDKDLQSLQPLSNKKENDEVFIKLGSDKDKKKENAERDERAKKSVSINEFLKPAEGERYYGGRGRGRGRGERGGFRGGYGGGYSRGPAAAAPSIEDQAQFPSLGGK

SEQ ID NO: 24690 - protein, 151 aa, Zea mays subsp. mays
  misc_feature (1)..(151): Ceres Seq. ID no. 12441482
ARDHYLEHPNRKHTFPRSLPSPSRRRRRRCPKPYLPSSSPHSPFISILMAAQPVRRRLLLRKPRRRSPPWRLLGRLPSLRRPPSSRPSPLLPRRRFGMHAAVAHQLVEALAVVNVAVAEVDGDMARTVASVVTMAMTSREVMVAEAMGMVL

SEQ ID NO: 24691 - DNA, 1814 bp, Zea mays subsp. mays
  misc_feature (1)..(1814): Ceres Seq. ID no. 12443273
aggacccctattcttggctcagcaaatcctctcctcggcgcaaaggcatggagcgaatgctcatcccacctgaccacattttcccccacagagatcacatttaccgcgcacaaagcaccaacaacgatccacagcctgtttgcgagatctttagcacaaggagggaggcaggcatatagactcccacccgtgctctcattgtcagcacaacgaggcctgcggatcggtctgtgcgttctagagagaggggacgaggtttacccactgcgagagcggagaggggcagagaagagatccaaggttctggtacgtacagctgggagaagatgagctgcttcggatgcttcaagcccgacaagaaggtgccacccaggaggacggaatccagggaggtcacggtcgtcaacaaggcccccagccagaacgaagcgcctcccagggaatctgggtccatcaggccaccaccagttgcttcgaagcacaagcacagggccatcatctgaaacagcagcaagcatcgaacctcctaaaggaagttgttctgttgccaaaaccgcaaaagcattcacgttccgtgagctagccacggccacgaaaaacttccgctctgactgccttctcggagaagggggattcggcagggtatacaagggcaggcttgaaaacggacagcttgttgctgtcaagcaactagacctgaatgggtatcaaggcaacagagagttcctagttgaggtcctgatgctcagcctattgcaccatccaaacctagtcaatttggtgggctattgtgcagatggagatcaaaggcttctggtttatgagtacatggcacttggctcacttgcagatcacctgcttgatagcactcctgatcaagtgccactgagttggtatctcaggatgaagatagcttatggaactgcaaaagggcttgaatacctccatgagaaggcgaacccacctgtcatttaccgggatctcaagtcccccaacatccttctcgatgagaagtacaaccctaagctctcagattttgggctcgcaaagcttggcccagttgagggaaagacacacatctccactcgggtgatgggaacgtatgggtactgcgctccggaatacataagaacaggccagctaactgttaagaccgacgtgtacagttttggggttttcctactggagttgatcacaggaagaagagcagtggatacctccaggccagcaagtgaacagatcctggttaactgggtcaagcccatgctgagagacaggaagcgatacaatgagctagtagaccctcatcttagaggtgagtacccagaaaaagacttgagccaggctgtgggtgtggcagcaatgtgcctacaagaggaagcctcagtccggccttacatgagtgatgctgttgtggcactgggattccttgcagaaatgcctgctggctataaacacaaatctggacccatactccaaatgaaacaagttggagatccctcacgaactggtagcactaagcaagataaggatgcgtacaatcgtcaaaaagctgtagctgaggccattgagtggggctcactgaggcagaaacagaaggctcaaaatccagaaaagaaagctctaagtcaaggtatatcccctccagaagccagcagactgtgaaacacctctgctgtgcactaggttaccttctgacttgtaaccctccaattttgtgtaagacttagggccaaattgtcccacatagctgagagtttgtaaatgaaattcgtctctcataaagatgtaaggggtatatagtatttgctgtt

SEQ ID NO: 24692 - protein, 307 aa, Zea mays subsp. mays
  misc_feature (1)..(307): Ceres Seq. ID no. 12443274
MLSLLHHPNLVNLVGYCADGDQRLLVYEYMALGSLADHLLDSTPDQVPLSWYLRMKIAYGTAKGLEYLHEKANPPVIYRDLKSPNILLDEKYNPKLSDFGLAKLGPVEGKTHISTRVMGTYGYCAPEYIRTGQLTVKTDVYSFGVFLLELITGRRAVDTSRPASEQILVNWVKPMLRDRKRYNELVDPHLRGEYPEKDLSQAVGVAAMCLQEEASVRPYMSDAVVALGFLAEMPAGYKHKSGPILQMKQVGDPSRTGSTKQDKDAYNRQKAVAEAIEWGSLRQKQKAQNPEKKALSQGISPPEASRL

SEQ ID NO: 24693 - protein, 278 aa, Zea mays subsp. mays
  misc_feature (1)..(278): Ceres Seq. ID no. 12443275
MALGSLADHLLDSTPDQVPLSWYLRMKIAYGTAKGLEYLHEKANPPVIYRDLKSPNILLDEKYNPKLSDFGLAKLGPVEGKTHISTRVMGTYGYCAPEYIRTGQLTVKTDVYSFGVFLLELITGRRAVDTSRPASEQILVNWVKPMLRDRKRYNELVDPHLRGEYPEKDLSQAVGVAAMCLQEEASVRPYMSDAVVALGFLAEMPAGYKHKSGPILQMKQVGDPSRTGSTKQDKDAYNRQKAVAEAIEWGSLRQKQKAQNPEKKALSQGISPPEASRL

SEQ ID NO: 24694 - protein, 253 aa, Zea mays subsp. mays
  misc_feature (1)..(253): Ceres Seq. ID no. 12443276
MKIAYGTAKGLEYLHEKANPPVIYRDLKSPNILLDEKYNPKLSDFGLAKLGPVEGKTHISTRVMGTYGYCAPEYIRTGQLTVKTDVYSFGVFLLELITGRRAVDTSRPASEQILVNWVKPMLRDRKRYNELVDPHLRGEYPEKDLSQAVGVAAMCLQEEASVRPYMSDAVVALGFLAEMPAGYKHKSGPILQMKQVGDPSRTGSTKQDKDAYNRQKAVAEAIEWGSLRQKQKAQNPEKKALSQGISPPEASRL

SEQ ID NO: 24695 - DNA, 1864 bp, Zea mays subsp. mays
  misc_feature (1)..(1864): Ceres Seq. ID no. 12443277
actcgtgctcgggctcggctccgtccgcgactccgccccacccctttccgtcagcggccgcaaccaccacaccaccacccaatggaggccggggaaatcggcggggcccttgtcttcatcctcgccgccgccgccgtcgtcgcggccgccgtgtccgtcggcgcggtcgacttcagccgcccgctcaccgcgggggcgccgttcgacttccaggcggcggtgtcctggctcatcggcatcctcgacggcacgtcctcggcagcggcggacgtggacggggcgtgggtggcggtgcgggccggggtgatcgcgccggtgctgcaggtggcggtgtgggcgtgcatggtgatgtcggtgatgctggtggtggaggccgtggtacaacagcgtcatcagcctcggcgtcaaggccattgggtggaggcctgagtggaggttcaagtggaagcccctcgacagcgccgacgaggagaaggggaccgcccacttccctatggtcctggttcagatacccatgtacaacgagctggaggtgtacaagctgtcaatagcggcagcatgtgagctgcagtggccaaaggacaggatagtaattcaagtgttggacgattctactgacccctttatcaagaatttggtggagcttgaatgtgagcactgggtgaacaaaggtgtcaatattaagtatgccacaagaaccagccgcaagggattcaaggcaggagctctgaagaaaggaatggaatgtgactatgcatggcaaagcgaatacattgctatatttgatgctgatttccaacctgaaccagattttctgctccaaactgtcccattccttctgcacaatccagaagttgcacttgttcaagctcggtggtccttcgtgaatgacacgacaagcctgctgacaagggtacaaaagatgttttacgactaccacttcaaagttgaacaagaagcaggatcagcgacctttgccttcttcagtttcaacggaactgctggagtgtggcgtacaggagccataagagatgcaggaggttggaaggaccgaactacagttgaagacatggacttggcggttcgagcaacactaaagggctggaaattcgtatatgttggagacgttagagtcaagagtgaactgccgtccacttacaaggcctactgtcggcagcaattccggtggtctagttggtggtgcaaacttattccgtaagatggcaaaggatgttttgtttgccaaggatatatcactcgtcaagaagttctatatgctctatagcttcttctttgtgaggagagttgtagcgccgacggctgcctgtattctctacaatgtcatcatccccatctcagtcacaatcccggagctttacctaccagtgtggggtgttgcctatattcccatggtgcttaccgtggtcacagctataagacatccaaaaaatctacacatactgccattttggattttgtttgagagtgtgatgacattgcatcggatgagggctgcgatgactggactgctggagctagaaggattcaaccagtggattgtgacaaagaaggtggggaatgatctcgaggacactgaagttcctttgcttcagaaaacccggaaaaggctgagagacagagtcaatctccccgagattggattttcggtgtttctcttcctctgtgcatcatacaacctggtgttccatgggaaaacaagctactacttatatatgtaccttcaggggttagcatttctgttactagggtttaacttcactggcaattgttcttgctaccaatgatagcatgtcaaagctgtacgaattgctgattgatattcattttctggtcatgcgttcgt

SEQ ID NO: 24696 - protein, 241 aa, Zea mays subsp. mays
  misc_feature (1)..(241): Ceres Seq. ID no. 12443278
MVLVQIPMYNELEVYKLSIAAACELQWPKDRIVIQVLDDSTDPFIKNLVELECEHWVNKGVNIKYATRTSRKGFKAGALKKGMECDYAWQSEYIAIFDADFQPEPDFLLQTVPFLLHNPEVALVQARWSFVNDTTSLLTRVQKMFYDYHFKVEQEAGSATFAFFSFNGTAGVWRTGAIRDAGGWKDRTTVEDMDLAVRATLKGWKFVYVGDVRVKSELPSTYKAYCRQQFRWSSWWCKLIP

SEQ ID NO: 24697 - protein, 234 aa, Zea mays subsp. mays
  misc_feature (1)..(234): Ceres Seq. ID no. 12443279
MYNELEVYKLSIAAACELQWPKDRIVIQVLDDSTDPFIKNLVELECEHWVNKGVNIKYATRTSRKGFKAGALKKGMECDYAWQSEYIAIFDADFQPEPDFLLQTVPFLLHNPEVALVQARWSFVNDTTSLLTRVQKMFYDYHFKVEQEAGSATFAFFSFNGTAGVWRTGAIRDAGGWKDRTTVEDMDLAVRATLKGWKFVYVGDVRVKSELPSTYKAYCRQQFRWSSWWCKLIP

SEQ ID NO: 24698 - protein, 229 aa, Zea mays subsp. mays
  misc_feature (1)..(229): Ceres Seq. ID no. 12443280
MLETLESRVNCRPLTRPTVGSNSGGLVGGANLFRKMAKDVLFAKDISLVKKFYMLYSFFFVRRVVAPTAACILYNVIIPISVTIPELYLPVWGVAYIPMVLTVVTAIRHPKNLHILPFWILFESVMTLHRMRAAMTGLLELEGFNQWIVTKKVGNDLEDTEVPLLQKTRKRLRDRVNLPEIGFSVFLFLCASYNLVFHGKTSYYLYMYLQGLAFLLLGFNFTGNCSCYQ

SEQ ID NO: 24699 - DNA, 1564 bp, Zea mays subsp. mays
  misc_feature (1)..(1564): Ceres Seq. ID no. 12443313
ataaatgcacccccacttgtcccttttccctcctcctccagctcctctctgggctgtggtggctgtggctcccaagcacacggcccgcacgagcagttggaacagattcctcgaccgcgtcgccccggaacccagttcttggcatccggtgcctagcttcgtcgcccctccggcaaagaccacctccagccctccacctcccgcggtagcgcttgctgctagtgagctagtatatttctgaaaccggaaacccgcgacacgggaccgagttcttgggagcggattcggctcgctgcaggctgaggctaccggcgcgctcttctccacggcggcggagagccagccagtagttgcgaccggaggcgggcatgggcgcgggcgtgtcgggcctgccgggcgcggagcccggcggcaaggtggcgcgcggcgccgggctgggcgacctcccggagctgtgcaccgcggaggtgctgctccgcctcggcgcgccggacatatgccggctcgcgcggctcaacctagcgttccgcggcgccgcgggcgcggacttcgtgtgggaggccaagctgccggggaactacgcccggctcctgcgcttcgtggacgaggccgaggaggagggagggagtgggcgggattggagcgcggtggggaggaaagacgtctttgcgaggctcgccagacctgtgccgttcgacggtggcaaaagggaattctggctggagaagaacgaaggtgggatctgcatggccttgtcgtcgaaagcgctggtcattactgggattgacgatagaagatactggattaacatgccaacatctgaatctaggttccactccactgcatacctgcagcaaatctggtggttcgaggtggtgggagaggtggacttctgcttcccggctgggacggcctacagcctctacttcaggctccacctcggcaagtcctccacgcgcttcggccgccgggtctgcagctcggagcaggtccacggctgggacaagaagcccgtgcggttccagctctccacgtcggacggccagcacgccgtgtcccagtgctacctggacgagcctggacgctggatcctgtaccacgtcggcgatttcgacgcgccgccgagctctggtcagccgaccaggctcaagttttcgttagcgcagatcgactgcacccacacgaaaggtggcctctgtgtcgattcggtgctcgtgtatcccaaggggtttcagccggaacgggtggtcagggctcggaaatgaccgtgtgtcggcatttggtagctatagaggcactgcgcattagagcgagctgtcgagagatatgagtagcctgccatttttttttagcttgggctaattgtattctgaaagcgtttatacatagcatagtagcacactggacttttttttttgtttgatagcattagtgtgtgcgcgttactttgccatttctcatgaaggccatggcaaataaggaacctttgtacgtgtacctagctccggtacatcgcgtttgcatcggcacacaatgaagccaggaaggtctcctgttttatttc

SEQ ID NO: 24700 - protein, 298 aa, Zea mays subsp. mays
  misc_feature (1)..(298): Ceres Seq. ID no. 12443314
MGAGVSGLPGAEPGGKVARGAGLGDLPELCTAEVLLRLGAPDICRLARLNLAFRGAAGADFVWEAKLPGNYARLLRFVDEAEEEGGSGRDWSAVGRKDVFARLARPVPFDGGKREFWLEKNEGGICMALSSKALVITGIDDRRYWINMPTSESRFHSTAYLQQIWWFEVVGEVDFCFPAGTAYSLYFRLHLGKSSTRFGRRVCSSEQVHGWDKKPVRFQLSTSDGQHAVSQCYLDEPGRWILYHVGDFDAPPSSGQPTRLKFSLAQIDCTHTKGGLCVDSVLVYPKGFQPERVVRARK

SEQ ID NO: 24701 - protein, 172 aa, Zea mays subsp. mays
  misc_feature (1)..(172): Ceres Seq. ID no. 12443315
MALSSKALVITGIDDRRYWINMPTSESRFHSTAYLQQIWWFEVVGEVDFCFPAGTAYSLYFRLHLGKSSTRFGRRVCSSEQVHGWDKKPVRFQLSTSDGQHAVSQCYLDEPGRWILYHVGDFDAPPSSGQPTRLKFSLAQIDCTHTKGGLCVDSVLVYPKGFQPERVVRARK

SEQ ID NO: 24702 - protein, 151 aa, Zea mays subsp. mays
  misc_feature (1)..(151): Ceres Seq. ID no. 12443316
MPTSESRFHSTAYLQQIWWFEVVGEVDFCFPAGTAYSLYFRLHLGKSSTRFGRRVCSSEQVHGWDKKPVRFQLSTSDGQHAVSQCYLDEPGRWILYHVGDFDAPPSSGQPTRLKFSLAQIDCTHTKGGLCVDSVLVYPKGFQPERVVRARK

SEQ ID NO: 24703 - DNA, 1690 bp, Zea mays subsp. mays
  misc_feature (1)..(1690): Ceres Seq. ID no. 12450440
aaagccaagcggtcagcgtcagaatagcatggcggtgtccgcggccaggatggccgtcgccacggccgtctccttagccgtgcactggctcctccggtccttcctccaggcgcagcaccccgcgctgggcctgctcttcccgaccgccgtcttcatcggcattgccgcgtctggcaacgtcgcaggcgctgccaacgacgcgccgccggggccgccggccgtgccggtgttcggcaactggctgcaggtgggcaacgacctgaaccaccgcttcctggcgcgcctgtccgcgcggtacgggcccgtcttccgcctccgcctcggcgtgcgcaacctggtggtcgtctccgacccgcgcctcgccacggaggtgctgcacacgcagggggtggagttcggctcccgcccccgcaacgtcgtattcgacatcttcaccgccaacggcgccgacatggtgttcaccgagtacggcgaccactggcgccgcatgcgccgcgtcatgacgctgcccttcttcaccgcgcgcgtcgtgcagcagtacaggggcatgtgggaggccgagatggacgccgccgtctccgacgtcgcctccgcggcccagcgcgccgccggcctcgtcgtgcggcgcaggctgcagctcatgctctacaacatcatgtacgggatgatgttcgacgcgcgcttcggctccgtcgacgaccccatgttcgtggaggccaccaggttcaactccgagcgcagccgcctcgcgcagagcttcgactacaactacggcgacttcatccccgtcctgcgcccattcctgcgcggctacctcgccagatgcaaggacctgcaggccaggcggctcgccttcttcaacagcaactacgtcgagaagaggaggaaggtcatggacgcgccgggggacaagggcaagctcaggtgcgccatcgaccacgtcctccaggcggagaagagcggcgagatcaccccggagaacgtcatctacatcgtcgagaacatcaacgtcgccgccatcgagaccacgctctggtccatcgagtgggcgctcgcggaggtcgtcaaccacccggcggtgcagcgcaaggtccgcgacgagatcaaggccgtcgtcgccgaccacgagcccatcacggagtccaccatccaccgcctcccctacctgcaggccgtcatcaaggagacgctgcgcctccactccccgatcccgctcctcgtcccgcacatgaacctcgaggaggccaagctcggcggctacaccatccccaagggctccaaggtggtggtcaacgcgtggtggctggccaacaatccggagctgtgggacaagcccgaggagtttcggccggagcggttcctaggcgaggagaagagcgtggacgccaccgtcggcgggaaggtggacttccgcttcctgccgttcggcgtgggccgccgcagctgccccgggatcatcctcgcgctgcccatcctcgcgctcatcgtcggcaagctcgtgcgcagcttcgagatggtaccaccgcccggcgtggagaagctcgacgtcagcgagaaaggaggacagttcagcctgcacattgccaaccactccgtcatcgccttccaccccgtctctgcataatagattgattgatagccaaccacgaatgctgcgcgtcgttttctgcatatcaatgttatcctaccc

SEQ ID NO: 24704 - protein, 540 aa, Zea mays subsp. mays
  misc_feature (1)..(540): Ceres Seq. ID no. 12450441
KPSGQRQNSMAVSAARMAVATAVSLAVHWLLRSFLQAQHPALGLLFPTAVFIGIAASGNVAGAANDAPPGPPAVPVFGNWLQVGNDLNHRFLARLSARYGPVFRLRLGVRNLVVVSDPRLATEVLHTQGVEFGSRPRNVVFDIFTANGADMVFTEYGDHWRRMRRVMTLPFFTARVVQQYRGMWEAEMDAAVSDVASAAQRAAGLVVRRRLQLMLYNIMYGMMFDARFGSVDDPMFVEATRFNSERSRLAQSFDYNYGDFIPVLRPFLRGYLARCKDLQARRLAFFNSNYVEKRRKVMDAPGDKGKLRCAIDHVLQAEKSGEITPENVIYIVENINVAAIETTLWSIEWALAEVVNHPAVQRKVRDEIKAVVADHEPITESTIHRLPYLQAVIKETLRLHSPIPLLVPHMNLEEAKLGGYTIPKGSKVVVNAWWLANNPELWDKPEEFRPERFLGEEKSVDATVGGKVDFRFLPFGVGRRSCPGIILALPILALIVGKLVRSFEMVPPPGVEKLDVSEKGGQFSLHIANHSVIAFHPVSA

SEQ ID NO: 24705 - protein, 531 aa, Zea mays subsp. mays
  misc_feature (1)..(531): Ceres Seq. ID no. 12450442
MAVSAARMAVATAVSLAVHWLLRSFLQAQHPALGLLFPTAVFIGIAASGNVAGAANDAPPGPPAVPVFGNWLQVGNDLNHRFLARLSARYGPVFRLRLGVRNLVVVSDPRLATEVLHTQGVEFGSRPRNVVFDIFTANGADMVFTEYGDHWRRMRRVMTLPFFTARVVQQYRGMWEAEMDAAVSDVASAAQRAAGLVVRRRLQLMLYNIMYGMMFDARFGSVDDPMFVEATRFNSERSRLAQSFDYNYGDFIPVLRPFLRGYLARCKDLQARRLAFFNSNYVEKRRKVMDAPGDKGKLRCAIDHVLQAEKSGEITPENVIYIVENINVAAIETTLWSIEWALAEVVNHPAVQRKVRDEIKAVVADHEPITESTIHRLPYLQAVIKETLRLHSPIPLLVPHMNLEEAKLGGYTIPKGSKVVVNAWWLANNPELWDKPEEFRPERFLGEEKSVDATVGGKVDFRFLPFGVGRRSCPGIILALPILALIVGKLVRSFEMVPPPGVEKLDVSEKGGQFSLHIANHSVIAFHPVSA

SEQ ID NO: 24706 - protein, 524 aa, Zea mays subsp. mays
  misc_feature (1)..(524): Ceres Seq. ID no. 12450443
MAVATAVSLAVHWLLRSFLQAQHPALGLLFPTAVFIGIAASGNVAGAANDAPPGPPAVPVFGNWLQVGNDLNHRFLARLSARYGPVFRLRLGVRNLVVVSDPRLATEVLHTQGVEFGSRPRNVVFDIFTANGADMVFTEYGDHWRRMRRVMTLPFFTARVVQQYRGMWEAEMDAAVSDVASAAQRAAGLVVRRRLQLMLYNIMYGMMFDARFGSVDDPMFVEATRFNSERSRLAQSFDYNYGDFIPVLRPFLRGYLARCKDLQARRLAFFNSNYVEKRRKVMDAPGDKGKLRCAIDHVLQAEKSGEITPENVIYIVENINVAAIETTLWSIEWALAEVVNHPAVQRKVRDEIKAVVADHEPITESTIHRLPYLQAVIKETLRLHSPIPLLVPHMNLEEAKLGGYTIPKGSKVVVNAWWLANNPELWDKPEEFRPERFLGEEKSVDATVGGKVDFRFLPFGVGRRSCPGIILALPILALIVGKLVRSFEMVPPPGVEKLDVSEKGGQFSLHIANHSVIAFHPVSA

SEQ ID NO: 24707 - DNA, 2279 bp, Zea mays subsp. mays
  misc_feature (1)..(2279): Ceres Seq. ID no. 12450444
ctcccgccccgcggctcgtctccctctcacggcctcacctcacaacctcacggtcctcacctcactccaccacgttcgccgcctcgctgccgcgtcgggccagtgcgtgcgggcgggcgtgagtgactggctctcctcggcgcgcggacccaggggcggcggcgatggggaagaatatgcgcatcaagacggcgcccaaggcgaaccgtgtccccctcctcggcgacggggagacgtcaagggcgctctcggacctggaagagggcagcgacgtccagccagcgaacgtcggcttctgtcgggtcatcaaacttgcgaagcatgacgccggaaagctggtcctcgccaccgcggcgctgctcgtcgcctccctcagtaaccttctcgttcccaaatatggtggcaagataattgacattgtgtcaagagatgttcggcgcccagaagataaggcgcaagccctggaggatgtcaagggcacaattttgtacattgtgacaatcgtcttagtcggttcagtttgcacggctcttcgggcatggctattcaattctgctagtgagagagtagtcgctcgactaaggaaagacttgttcagccatctcataaaccaggaaatagcgttttttgatgtgactagaacaggagagctcttaagcaggctttctgaagatacacaaataataaagaatgctgctacaaccaacctatcagaggcactgcgcaatgtaactactacagctattggtcttggtttcatgttttcaacttcatggaagttaacattgctggcacttgtaattgtcccggttatatcagttgctgtgcgtagatttggacgttttcttcgtgagctttcacatcaaacacaagctgctgcagctgtagcttcatccatagctgaggaatctttcggtgccatccgcacagtaagatcctttgctcaggaatatcatgagatttcacgctatggtgaaaaagtagaggagacacttaaacttggtctcaaacaagctaaagttgttggcttgttttctggagggcttaatgctgcatcaaccatgtctgtggttattgttgttatttatggcgccaacttaaccatcaatggttacatgacaactggctctcttacatcattcatcttatacagccttacagttggttcgtcagtatctgccttgtcaggactatacacaactgtaatgaaagcctctggtgcaagccgtagggtttttcaacttttggaccgtgtttcgtcaatgacaaactctggggacaaatgtccaataaatgaaaaggatggggaagttgagcttgatgatgtctggtttgcatatccttctcgcccatctcatatgattcttaagggaataactctgaagctagcaccaggttcaaaggttgcacttgttgggccaagtggtggtggtaaaaccacaatagcaaatttgattgagcggttttatgaccctctaaagggaaggatcttgcttaatggagtaccgctggcagaaatttcacatcaatatcttcacagcaaggtaagcattgtcagccaggagcctacgctcttcaactgcaccatcgaagagaatattgcttatggactagagggcacaacgaactttgctgacgttgagagtgcagctgaaatggcgaatgcacacaacttcatatgcggctttcccgaccaatataagactgtcgtcggcgagcgggggatcaggttatccggcgggcagaagcagaggatcgccattgcgagagctttgcttatgaacccacgagtgcttctcctggacgaagctaccagtgccctggatgctgaaagcgaatatcttgtacaggatgcaatggactccttgatgaaagggaggactgtccttgtgatagcccacaggctctcgaccgtcaagagcgccgacaccgtcgccgtcatctccgacggcctaatcgtggagagcggcacgcacgacgaactcctggaccgcgacggcatatacacggccttggtgaagaggcagctgcaggggccgaagtttgaggccaccagcagcatcagcgaggcctccgaaattgaagcggaacccagcagtaatgggcaatagcggccccgattattaggaagaccacagttgatttgaatccacacaagtgtatgtaaccctgatgttgacgtatgccactgcaaatcacgcgaaaccattggatatcacatgatgctacggttgttgtacgagtaatttcccacttggttaatcctacacatatggtcc

SEQ ID NO: 24708 - protein, 648 aa, Zea mays subsp. mays
  misc_feature (1)..(648): Ceres Seq. ID no. 12450445
MGKNMRIKTAPKANRVPLLGDGETSRALSDLEEGSDVQPANVGFCRVIKLAKHDAGKLVLATAALLVASLSNLLVPKYGGKIIDIVSRDVRRPEDKAQALEDVKGTILYIVTIVLVGSVCTALRAWLFNSASERVVARLRKDLFSHLINQEIAFFDVTRTGELLSRLSEDTQIIKNAATTNLSEALRNVTTTAIGLGFMFSTSWKLTLLALVIVPVISVAVRRFGRFLRELSHQTQAAAAVASSIAEESFGAIRTVRSFAQEYHEISRYGEKVEETLKLGLKQAKVVGLFSGGLNAASTMSVVIVVIYGANLTINGYMTTGSLTSFILYSLTVGSSVSALSGLYTTVMKASGASRRVFQLLDRVSSMTNSGDKCPINEKDGEVELDDVWFAYPSRPSHMILKGITLKLAPGSKVALVGPSGGGKTTIANLIERFYDPLKGRILLNGVPLAEISHQYLHSKVSIVSQEPTLFNCTIEENIAYGLEGTTNFADVESAAEMANAHNFICGFPDQYKTVVGERGIRLSGGQKQRIAIARALLMNPRVLLLDEATSALDAESEYLVQDAMDSLMKGRTVLVIAHRLSTVKSADTVAVISDGLIVESGTHDELLDRDGIYTALVKRQLQGPKFEATSSISEASEIEAEPSSNGQ

SEQ ID NO: 24709 - protein, 644 aa, Zea mays subsp. mays
  misc_feature (1)..(644): Ceres Seq. ID no. 12450446
MRIKTAPKANRVPLLGDGETSRALSDLEEGSDVQPANVGFCRVIKLAKHDAGKLVLATAALLVASLSNLLVPKYGGKIIDIVSRDVRRPEDKAQALEDVKGTILYIVTIVLVGSVCTALRAWLFNSASERVVARLRKDLFSHLINQEIAFFDVTRTGELLSRLSEDTQIIKNAATTNLSEALRNVTTTAIGLGFMFSTSWKLTLLALVIVPVISVAVRRFGRFLRELSHQTQAAAAVASSIAEESFGAIRTVRSFAQEYHEISRYGEKVEETLKLGLKQAKVVGLFSGGLNAASTMSVVIVVIYGANLTINGYMTTGSLTSFILYSLTVGSSVSALSGLYTTVMKASGASRRVFQLLDRVSSMTNSGDKCPINEKDGEVELDDVWFAYPSRPSHMILKGITLKLAPGSKVALVGPSGGGKTTIANLIERFYDPLKGRILLNGVPLAEISHQYLHSKVSIVSQEPTLFNCTIEENIAYGLEGTTNFADVESAAEMANAHNFICGFPDQYKTVVGERGIRLSGGQKQRIAIARALLMNPRVLLLDEATSALDAESEYLVQDAMDSLMKGRTVLVIAHRLSTVKSADTVAVISDGLIVESGTHDELLDRDGIYTALVKRQLQGPKFEATSSISEASEIEAEPSSNGQ

SEQ ID NO: 24710 - protein, 450 aa, Zea mays subsp. mays
  misc_feature (1)..(450): Ceres Seq. ID no. 12450447
MFSTSWKLTLLALVIVPVISVAVRRFGRFLRELSHQTQAAAAVASSIAEESFGAIRTVRSFAQEYHEISRYGEKVEETLKLGLKQAKVVGLFSGGLNAASTMSVVIVVIYGANLTINGYMTTGSLTSFILYSLTVGSSVSALSGLYTTVMKASGASRRVFQLLDRVSSMTNSGDKCPINEKDGEVELDDVWFAYPSRPSHMILKGITLKLAPGSKVALVGPSGGGKTTIANLIERFYDPLKGRILLNGVPLAEISHQYLHSKVSIVSQEPTLFNCTIEENIAYGLEGTTNFADVESAAEMANAHNFICGFPDQYKTVVGERGIRLSGGQKQRIAIARALLMNPRVLLLDEATSALDAESEYLVQDAMDSLMKGRTVLVIAHRLSTVKSADTVAVISDGLIVESGTHDELLDRDGIYTALVKRQLQGPKFEATSSISEASEIEAEPSSNGQ

SEQ ID NO: 24711 - DNA, 2566 bp, Zea mays subsp. mays
  misc_feature (1)..(2566): Ceres Seq. ID no. 12450470
acctctgtccatccatcacagcttcgagactcgtcctccatgggttctggcggcgtcagatggaaggctctgccgctgtgcctagctctcgtggctctgcaagcatgcctccctgctcgcggggcagctcccaagacttacatcgttcagatggccgcgtctgagatgccgagctcgttcgatttccaccacgaatggtacgcatccactgtgaaatccgtgagctctgtgcagctggaaggagacgcggacgaccattacgccgcgaggatcgtctacaactacgagacggcgttccacggcttcgcggcgaagctggacgaggacgaggccgagcggatggccgaggcggacggcgtggtggccgtgctcccggagacggtcctgcagctgcacaccaccaggagcccggacttcctgggcatcagcccggagatcagcgacagcatatggtccgccggcctggccgaccacgacgtcgtcgtcggcgtgctcgacaccggcatctggcccgagagccccagctttagcgacaagggcctcggccctgtcccggccaggtggaagggcctgtgccagaccggccgcggcttcaccgtagccagctgcaaccgcaagatcatcggcgcgcgcatcttctacaacggctacgaggcctcgtcgggccccatcaacgagacggccgagctcaaatctccgcgggaccaggacggccacggcacgcacaccgcggccaccgccgcgggcgcgcccgtgccggacgccagcctcttcggctacgccagcggcgtcgcccgtggcatggcgccccgcgcccgcgtcgcggcgtacaaggtgtgctggacggggggctgcttcagctccgacatcctggcggccgtcgaccgcgccgtggcggacggcgtcgacgtgctctccatctcgctcggcggcggctcgtccccctacttccgcgacagcctggccatcgcgtcgttcggtgccatgcagatgggcgtgttcgtcgcctgctcgggcggcaacggcggcccggaccccataagcctcaccaacctgtcgccgtggataaccacggtgggcgcgagcaccatggaccgggacttcccggccacggtgacgctcggcaatggcgcaaacctcaccggggtttcgctctacaaaggccggcgaggtctttcgtccaaggagcagtacccgttagtctacatgggcggcaactcgagcatccctgaccccaggtccctgtgcctggaggggacactccagccccacgaggtcgctggaaagattgtgatctgcgaccgcggcattagtcctcgggtgcagaagggtcaggttgtcaagaacgccggtgccgcgggcatgatactcgccaacacaccggcaaacggcgaggagcttgtcgccgacagccacctcctgccagcagtggccgttgggcagtctgaaggcattgccgccaagaagtacagcaaaaccgccccgaaaccaacggccacgctcagcttcgacgggacgaagctcgggatccgcccatcgccagtcgtagccgcgttctcgtcccggggaccaaacttcctgaccctggagatcctcaagccggatgtcatcgcgcccggcgtgaacatcttggcggcatggagcggcgacgccagcccgtcgagcttgtccagcgaccgccggcgggtcggcttcaacatcctgtcggggacgtccatgtcgtgcccgcacgtcgccggcgtggctgcgctgatcaaggccagccacccggactggagccccgcgaagatcaagtccgcgctgatgaccaccgcgtacgtccacgacaacacgtaccggtcgctgaaggacgcggccaccggcaaggcgtccacgccgttcgatcacggagctgggcacatacacccgctgcgtgccctcaaccctggcctggtctacgacatcggccaggacgactacctggagttcctctgcgtggagaacctgacgccgttgcagctcaggtccttcaccaagaactcgagcaagacatgcaagcacaccttcagctcgccgggtgacttgaattattcggccatctccgcggtcttcgcggagcagccatctgctgcgcttacggtgcgtcgcaccgtgacgaacgtcggcccgccgtcttcgacttaccatgtcaaggttacagagttcaaaggcgcagacattgtcgtcgaaccaagcaccctgcacttcacaagttcgaaccagaagctaacctacaaggtgacgatgacaaccaaggctgcccagaagacaccggagttcggagcgctgtcttggagcgacggcgtccacatcgtccggagcccccttgtcctcacatggctgccaccgatgtgagcttcgtttatttaccgtgcgtttagagcaagcaatggagcaggaacctctgggcctgggtaatcaagccagagatccgttgtgtcgcagcggcagcggcagcggcagaacaggttcactaaccaacggaaaaatactgtcaaagctccacatgagaaccgcctttattcttcaatgtattcatgcttattcc

SEQ ID NO: 24712 - protein, 790 aa, Zea mays subsp. mays
  misc_feature (1)..(790): Ceres Seq. ID no. 12450471
TSVHPSQLRDSSSMGSGGVRWKALPLCLALVALQACLPARGAAPKTYIVQMAASEMPSSFDFHHEWYASTVKSVSSVQLEGDADDHYAARIVYNYETAFHGFAAKLDEDEAERMAEADGVVAVLPETVLQLHTTRSPDFLGISPEISDSIWSAGLADHDVVVGVLDTGIWPESPSFSDKGLGPVPARWKGLCQTGRGFTVASCNRKIIGARIFYNGYEASSGPINETAELKSPRDQDGHGTHTAATAAGAPVPDASLFGYASGVARGMAPRARVAAYKVCWTGGCFSSDILAAVDRAVADGVDVLSISLGGGSSPYFRDSLAIASFGAMQMGVFVACSGGNGGPDPISLTNLSPWITTVGASTMDRDFPATVTLGNGANLTGVSLYKGRRGLSSKEQYPLVYMGGNSSIPDPRSLCLEGTLQPHEVAGKIVICDRGISPRVQKGQVVKNAGAAGMILANTPANGEELVADSHLLPAVAVGQSEGIAAKKYSKTAPKPTATLSFDGTKLGIRPSPVVAAFSSRGPNFLTLEILKPDVIAPGVNILAAWSGDASPSSLSSDRRRVGFNILSGTSMSCPHVAGVAALIKASHPDWSPAKIKSALMTTAYVHDNTYRSLKDAATGKASTPFDHGAGHIHPLRALNPGLVYDIGQDDYLEFLCVENLTPLQLRSFTKNSSKTCKHTFSSPGDLNYSAISAVFAEQPSAALTVRRTVTNVGPPSSTYHVKVTEFKGADIVVEPSTLHFTSSNQKLTYKVTMTTKAAQKTPEFGALSWSDGVHIVRSPLVLTWLPPM

SEQ ID NO: 24713 - protein, 777 aa, Zea mays subsp. mays
  misc_feature (1)..(777): Ceres Seq. ID no. 12450472
MGSGGVRWKALPLCLALVALQACLPARGAAPKTYIVQMAASEMPSSFDFHHEWYASTVKSVSSVQLEGDADDHYAARIVYNYETAFHGFAAKLDEDEAERMAEADGVVAVLPETVLQLHTTRSPDFLGISPEISDSIWSAGLADHDVVVGVLDTGIWPESPSFSDKGLGPVPARWKGLCQTGRGFTVASCNRKIIGARIFYNGYEASSGPINETAELKSPRDQDGHGTHTAATAAGAPVPDASLFGYASGVARGMAPRARVAAYKVCWTGGCFSSDILAAVDRAVADGVDVLSISLGGGSSPYFRDSLAIASFGAMQMGVFVACSGGNGGPDPISLTNLSPWITTVGASTMDRDFPATVTLGNGANLTGVSLYKGRRGLSSKEQYPLVYMGGNSSIPDPRSLCLEGTLQPHEVAGKIVICDRGISPRVQKGQVVKNAGAAGMILANTPANGEELVADSHLLPAVAVGQSEGIAAKKYSKTAPKPTATLSFDGTKLGIRPSPVVAAFSSRGPNFLTLEILKPDVIAPGVNILAAWSGDASPSSLSSDRRRVGFNILSGTSMSCPHVAGVAALIKASHPDWSPAKIKSALMTTAYVHDNTYRSLKDAATGKASTPFDHGAGHIHPLRALNPGLVYDIGQDDYLEFLCVENLTPLQLRSFTKNSSKTCKHTFSSPGDLNYSAISAVFAEQPSAALTVRRTVTNVGPPSSTYHVKVTEFKGADIVVEPSTLHFTSSNQKLTYKVTMTTKAAQKTPEFGALSWSDGVHIVRSPLVLTWLPPM

SEQ ID NO: 24714 - protein, 740 aa, Zea mays subsp. mays
  misc_feature (1)..(740): Ceres Seq. ID no. 12450473
MAASEMPSSFDFHHEWYASTVKSVSSVQLEGDADDHYAARIVYNYETAFHGFAAKLDEDEAERMAEADGVVAVLPETVLQLHTTRSPDFLGISPEISDSIWSAGLADHDVVVGVLDTGIWPESPSFSDKGLGPVPARWKGLCQTGRGFTVASCNRKIIGARIFYNGYEASSGPINETAELKSPRDQDGHGTHTAATAAGAPVPDASLFGYASGVARGMAPRARVAAYKVCWTGGCFSSDILAAVDRAVADGVDVLSISLGGGSSPYFRDSLAIASFGAMQMGVFVACSGGNGGPDPISLTNLSPWITTVGASTMDRDFPATVTLGNGANLTGVSLYKGRRGLSSKEQYPLVYMGGNSSIPDPRSLCLEGTLQPHEVAGKIVICDRGISPRVQKGQVVKNAGAAGMILANTPANGEELVADSHLLPAVAVGQSEGIAAKKYSKTAPKPTATLSFDGTKLGIRPSPVVAAFSSRGPNFLTLEILKPDVIAPGVNILAAWSGDASPSSLSSDRRRVGFNILSGTSMSCPHVAGVAALIKASHPDWSPAKIKSALMTTAYVHDNTYRSLKDAATGKASTPFDHGAGHIHPLRALNPGLVYDIGQDDYLEFLCVENLTPLQLRSFTKNSSKTCKHTFSSPGDLNYSAISAVFAEQPSAALTVRRTVTNVGPPSSTYHVKVTEFKGADIVVEPSTLHFTSSNQKLTYKVTMTTKAAQKTPEFGALSWSDGVHIVRSPLVLTWLPPM

SEQ ID NO: 24715 - DNA, 1676 bp, Zea mays subsp. mays
  misc_feature (1)..(1676): Ceres Seq. ID no. 12450484
atctccatgagttgagcagcctgagcagatgaggtgaagtgagttggctgccagcgcgtgctgtatcttgtatggctgtactgtatcccccctcctctcgctaaccctttgtctccttcccccacaaaaccacctccgccccctcctcccaccagtacctgtgagttgtgagctccttgctgcggctgcttgctcccctcatctctagcctgtacactggttggagtggttgccagtgttctccccacctgctcctctcgatccactccatcccctttggccatgggtgtgcaagcatacatctacggtaattgcatgcttctcctgccttgaagcggaagccttagccttagcctgccgcctgggggaaaccttctgtttcgccgctgccgctgctgtggtataaaggtggaaggctgatccgtcgacggacggagtcccggcggagggaagattgctccgtcgccgcggtttcgcggccaagaaggtggcctacgcggtggaaaggggcggggcggggccgtgaaggaatcttgctccgacgccaatccctcctctgcccctcgattttcgggcggttgtcggtgctgcctttcgcagtaagaggtgggatctcgcgtccggcggcggcggcggcggcgttgctggatcgagcaacctccggcggtggcctgcgtacctgcgtggccgatctgtgcgtggctgttcatctcttcgccggcattgcgaggcgggctcgccgggcggtgtggattgcttgcggtgaggagtgcggaggagaggtgctgatccaagcggcgggcgggcgggcggctgcacgccaggtgttcgacgaaggaccccgaccgggccagccagccatgagggacttcccttcctgcttcggcgagagcggcgtccagatcgcggacgcgtcgtcgtcgtcgtccagcgccggcaagggcgcggcgcagaacctggtgacctgcctctaccagacgcagttctcgggccggccctgcgtgatctcgctcacgtggagcaggagcctcatggggcagggcctcagcgtcggcgtcgacgacctgtccggccactgcctctgcaaggcggacatcaagccgtggctcttctccaagaagaaggggtccaagagcctcgacgtcgaggacggcaagatcgacatcttctgggacctgtcgggcgccaagttcggcgctgggccagagccggtggaggggttctatgtcgcagtggtgttcgaccttgagctcgtgctcttgctcggcgacatgaagaaggatgcctacaggaagactggagccaaccggtcgatgctgaacgccgcgtttgtggcgaggagggagcacatatacggcaagaagacctactccgccaaggcgcagttctgcgacaatggccagttccatgacattgtcatagactgcgacaccgtcgacctgaaggatccgtgtcttgaaataagagttgacaagaagcccgtgatgctttaaagacccaccggcactggcagtgagtgttgctgcttgtgtaggctttggtacgtatgggctttatttgcttctggatgttgtgtactacttgggtttgttgaattattatgagcagttgcgtattgtaattcagctgggctacctggacattgttatgtattaataaatgctttgctttcttct

SEQ ID NO: 24716 - protein, 210 aa, Zea mays subsp. mays
  misc_feature (1)..(210): Ceres Seq. ID no. 12450485
MRDFPSCFGESGVQIADASSSSSSAGKGAAQNLVTCLYQTQFSGRPCVISLTWSRSLMGQGLSVGVDDLSGHCLCKADIKPWLFSKKKGSKSLDVEDGKIDIFWDLSGAKFGAGPEPVEGFYVAVVFDLELVLLLGDMKKDAYRKTGANRSMLNAAFVARREHIYGKKTYSAKAQFCDNGQFHDIVIDCDTVDLKDPCLEIRVDKKPVML

SEQ ID NO: 24717 - protein, 153 aa, Zea mays subsp. mays
  misc_feature (1)..(153): Ceres Seq. ID no. 12450486
MGQGLSVGVDDLSGHCLCKADIKPWLFSKKKGSKSLDVEDGKIDIFWDLSGAKFGAGPEPVEGFYVAVVFDLELVLLLGDMKKDAYRKTGANRSMLNAAFVARREHIYGKKTYSAKAQFCDNGQFHDIVIDCDTVDLKDPCLEIRVDKKPVML

SEQ ID NO: 24718 - DNA, 2372 bp, Zea mays subsp. mays
  misc_feature (1)..(2372): Ceres Seq. ID no. 12450487
aacgaattcctcctcgggctcccacctaatcgtgttcgccgcctgcctctcccaaaccctagcaacccacgatcgaacccaaatccgctcctcccacccgaggggattatgcgaaattccccgagattctagcccagcactagcagatcgatccatcgcttgcccacctgccggccaccaacccttgtagtctcagtcaatctgtagattgagactacgatgagcctgtcaccgctcgactcctcctccccgccggccgcggctgcggctgctgctacggaggtgcccctcgccccgggcttccgcttccaccccaccgacgaggagctcgtctcctactacctccgccgccgcgtcctcggccgccgcctccgcgtcgacgccatcgccgagatcgacctctaccgcctcgagccctgggacctcccctccctctcccgcatccgcagccgcgacgcccagtggtacttcttcgcccgtctcgaccgcaaggtcgccggcgctggcgccgggggccggggcggtcccggcaacaggaccaaccgcgctacgccgagggggtactggaagaccacgggcaaggaccgcgaggtgcaccaccgcggcaagcccgtcgggatgaagaagacgctcgtcttccacgccgggagggcgcctaagggcgagaggaccaactgggtcatgcacgagtaccgcctcctcgatgcagacggacctcaggatctgcatgtggtttgtagaatcttccagaagcatgggtctggaccacagaacggtgcgcagtatggtgcaccatacatggaagaggaatgggaagaggatgatgatgctattgagaatggttctacccacgatgcatctggtcaaattgctgcaaccacctgtgctgtagatgaggagtcaaatgaggacgatgagaatgcatattgtgaaacaaacagacctgctcgagtagaaccatctcatctgccttcggttcatgaaatgctcaatccaccagagatggctcctctccaaggtcaatattctaaagagacaagcgatggaagttgttctgatgttgctatttctctggaagagattttgcaggaacctttgtcaaatattagtgtggagaatatgcatagacttgaagggcagaatgccactgatgataacatcagtgttgataacttgttatcagcatatcccacgaaagataatggctacgtaggccagtataacactatgaatgggagtgctccagcagatgaagctcacgcacgctggcctttgagaacatatagtaatcagaattatgtcaatggccctcttgctgatgagttctttgacacagggaatgataccaatggggttgcatattccaggcagcagcaagctgatggctttccagcacctcgccaagttgatgaaagtatggtattttatgatgccccatctgattacaacttggtggatggaaaagatgacttcgtatatctgaacgacattctgaatgagccacttggaaatgaatcgctctttgatggagatgatatgatggcttactttgatgccacagagaatgatttcaagtatgacattttgggctctggtcagggtttggattatccacttgcagacatgccgttgaactttgcccaaaagagtgacaaggaagacaagtttacattcgaagggatctctgaggttccggaagcaaatcctcagtacggtgcatcctcatctggttcacatgaagatctgtatactgatactgaatttctaggtgtgccaacagatgacactgctgataaaacttacggaaatcgcctggccagcatgttaggctctatcccagctccacctgcaatggcctcagaattcccgccgtcaacagggaaatctgctgggatgctttcggctgtcagctcgagctcaattcgttttactgctggtatcatccaacttgatggcctcactttcagcagcggctccggtcagtggcccttgcagaagaatggagacttgagtttgcttgtctcttttgctgtggagggcgacgtggcatccaagctccctgttggtcttgggcgtgctactcggattagcaccgttcccatggtgctgcgcagtggtttttaccttttctttatgtcggccatgattctcttgtttagctacaaagtagggtcgtgtatctacagcaggtaagttgaagttgatggcgcctcttgtccggccagacctgtgggctgtttattttagttcaacacgtggatcattccctcagtgatgggggtatagcagtcgttcgacaccttttttacacatttaccattttgacctgtcaaaacatacagcaataaactttcgaactggtggtggtgatc

SEQ ID NO: 24719 - protein, 657 aa, Zea mays subsp. mays
  misc_feature (1)..(657): Ceres Seq. ID no. 12450488
MSLSPLDSSSPPAAAAAAATEVPLAPGFRFHPTDEELVSYYLRRRVLGRRLRVDAIAEIDLYRLEPWDLPSLSRIRSRDAQWYFFARLDRKVAGAGAGGRGGPGNRTNRATPRGYWKTTGKDREVHHRGKPVGMKKTLVFHAGRAPKGERTNWVMHEYRLLDADGPQDLHVVCRIFQKHGSGPQNGAQYGAPYMEEEWEEDDDAIENGSTHDASGQIAATTCAVDEESNEDDENAYCETNRPARVEPSHLPSVHEMLNPPEMAPLQGQYSKETSDGSCSDVAISLEEILQEPLSNISVENMHRLEGQNATDDNISVDNLLSAYPTKDNGYVGQYNTMNGSAPADEAHARWPLRTYSNQNYVNGPLADEFFDTGNDTNGVAYSRQQQADGFPAPRQVDESMVFYDAPSDYNLVDGKDDFVYLNDILNEPLGNESLFDGDDMMAYFDATENDFKYDILGSGQGLDYPLADMPLNFAQKSDKEDKFTFEGISEVPEANPQYGASSSGSHEDLYTDTEFLGVPTDDTADKTYGNRLASMLGSIPAPPAMASEFPPSTGKSAGMLSAVSSSSIRFTAGIIQLDGLTFSSGSGQWPLQKNGDLSLLVSFAVEGDVASKLPVGLGRATRISTVPMVLRSGFYLFFMSAMILLFSYKVGSCIYSR

SEQ ID NO: 24720 - protein, 524 aa, Zea mays subsp. mays
  misc_feature (1)..(524): Ceres Seq. ID no. 12450489
MKKTLVFHAGRAPKGERTNWVMHEYRLLDADGPQDLHVVCRIFQKHGSGPQNGAQYGAPYMEEEWEEDDDAIENGSTHDASGQIAATTCAVDEESNEDDENAYCETNRPARVEPSHLPSVHEMLNPPEMAPLQGQYSKETSDGSCSDVAISLEEILQEPLSNISVENMHRLEGQNATDDNISVDNLLSAYPTKDNGYVGQYNTMNGSAPADEAHARWPLRTYSNQNYVNGPLADEFFDTGNDTNGVAYSRQQQADGFPAPRQVDESMVFYDAPSDYNLVDGKDDFVYLNDILNEPLGNESLFDGDDMMAYFDATENDFKYDILGSGQGLDYPLADMPLNFAQKSDKEDKFTFEGISEVPEANPQYGASSSGSHEDLYTDTEFLGVPTDDTADKTYGNRLASMLGSIPAPPAMASEFPPSTGKSAGMLSAVSSSSIRFTAGIIQLDGLTFSSGSGQWPLQKNGDLSLLVSFAVEGDVASKLPVGLGRATRISTVPMVLRSGFYLFFMSAMILLFSYKVGSCIYSR

SEQ ID NO: 24721 - protein, 503 aa, Zea mays subsp. mays
  misc_feature (1)..(503): Ceres Seq. ID no. 12450490
MHEYRLLDADGPQDLHVVCRIFQKHGSGPQNGAQYGAPYMEEEWEEDDDAIENGSTHDASGQIAATTCAVDEESNEDDENAYCETNRPARVEPSHLPSVHEMLNPPEMAPLQGQYSKETSDGSCSDVAISLEEILQEPLSNISVENMHRLEGQNATDDNISVDNLLSAYPTKDNGYVGQYNTMNGSAPADEAHARWPLRTYSNQNYVNGPLADEFFDTGNDTNGVAYSRQQQADGFPAPRQVDESMVFYDAPSDYNLVDGKDDFVYLNDILNEPLGNESLFDGDDMMAYFDATENDFKYDILGSGQGLDYPLADMPLNFAQKSDKEDKFTFEGISEVPEANPQYGASSSGSHEDLYTDTEFLGVPTDDTADKTYGNRLASMLGSIPAPPAMASEFPPSTGKSAGMLSAVSSSSIRFTAGIIQLDGLTFSSGSGQWPLQKNGDLSLLVSFAVEGDVASKLPVGLGRATRISTVPMVLRSGFYLFFMSAMILLFSYKVGSCIYSR

SEQ ID NO: 24722 - DNA, 1980 bp, Zea mays subsp. mays
  misc_feature (1)..(1980): Ceres Seq. ID no. 12450491
aaaccttctcccctttcctcagaccccaggccccagcccggcaagcagacatgggcaaccgtgcgtcgcgccaccaccgccaagccgccgagcagcaaccggcgacgccgaccctgccgaagccccagccccagatccagccgccgcctccgcctccgccgacgcagacgcagcagtaccagcaggcgccgccgcagtcgcagcagaagccgaagccggcggcggacgtgggggcggtggggcgcgtgctggggcggcccatggaggacgtgcgcgcgacctacactttcggccgcgagctcgggcggggccagttcggggtcacctacctcgtcacgcactcggagaccgggcagcgcttcgcctgcaagtccatcgccacgcggaagctcgtccaccgcgacgacattgaggacgtgcgccgggaggtgcagatcatgcaccacctcacgggccaccgcaacatcgtcgagctccggggagcatacgaggacaggcactcggtcaaccttgttatggagctctgcgagggcggggagctcttcgaccgcatcatagccaagggccactacaccgagcgagccgccgcctcgctctgccgcgagatcgtcgccgtcgtccacagctgccactccatgggggtcttccatcgggatctcaagcccgagaacttcctgttcctcaataacaaggaggactccccgctcaaggccacggacttcggtctctccgtcttcttcaagcacggggagacgtttaaggatcttgtgggaagtgcatattatgttgctcctgaggtactgaaacggaaatatggggcagaggctgacatatggagtgctggggtcattctttacatccttctgtctggtgttcctcctttttgggcagagaatgaggatggcatatttgatgctgtcttgcgcggtcacatcgatttctcttctgacccttggccttcaatatccaatggtgcaaaggatttggttaagaagatgctgcgacaagacccaaaagaacgcctgactgctgctgaaattttgaaccacccatggattagagaggatggagaggccccagataagccacttgacattactgtcattggtagaatgaaacagttcagggcaatgaacaagctcaagaaagttgcattgaaggttgtggctgagaacttatcagatgaagagattatgggcctaaaagaaatgttcagatccctggatacagataacagtgggacaattactcttgaagagctaagatctggtttaccaaaacttggtacaaaaatttctgaatcagaaattaaacaattgatggaggcggctgatgttgatggaaatggtaccattgattatgcggagtttatatcagccacaatgcatttgaatagattggagaaggaagaccacatactcaaagcttttgaatatttcgataaggatcacagcggatacataaccgtagatgagttggaagaagctttgaagaagtatgatatgggagatgacaaaactataaaagaaatcattgctgaagtagatacagatcatgatggaagaattaattaccaggagtttgttgccatgatgaggaacaacagccctgagattgttccaaatcggaggcgcatgttctaactgtcatggacaatcacattgaatactttcaagaacaatctgcccttagacataatctttgtcccattttctttttggaacagccgttaagaagactccttaatttgagatccatgtctctgctgcccggacctgtttgtcccaaaatagggtggtgttatagtgattcgtacttgatgctttgagcttcatggactcttgcgtggcaatgtttatccccattgtacgtctggttgttctgctgcttcgatctgaggctttctttaggtgtaaacggatatctgaattattaggataaatttaatattttaaaatagatatgtataaaatttgatgc

SEQ ID NO: 24723 - protein, 546 aa, Zea mays subsp. mays
  misc_feature (1)..(546): Ceres Seq. ID no. 12450492
TFSPFLRPQAPARQADMGNRASRHHRQAAEQQPATPTLPKPQPQIQPPPPPPPTQTQQYQQAPPQSQQKPKPAADVGAVGRVLGRPMEDVRATYTFGRELGRGQFGVTYLVTHSETGQRFACKSIATRKLVHRDDIEDVRREVQIMHHLTGHRNIVELRGAYEDRHSVNLVMELCEGGELFDRIIAKGHYTERAAASLCREIVAVVHSCHSMGVFHRDLKPENFLFLNNKEDSPLKATDFGLSVFFKHGETFKDLVGSAYYVAPEVLKRKYGAEADIWSAGVILYILLSGVPPFWAENEDGIFDAVLRGHIDFSSDPWPSISNGAKDLVKKMLRQDPKERLTAAEILNHPWIREDGEAPDKPLDITVIGRMKQFRAMNKLKKVALKVVAENLSDEEIMGLKEMFRSLDTDNSGTITLEELRSGLPKLGTKISESEIKQLMEAADVDGNGTIDYAEFISATMHLNRLEKEDHILKAFEYFDKDHSGYITVDELEEALKKYDMGDDKTIKEIIAEVDTDHDGRINYQEFVAMMRNNSPEIVPNRRRMF

SEQ ID NO: 24724 - protein, 530 aa, Zea mays subsp. mays
  misc_feature (1)..(530): Ceres Seq. ID no. 12450493
MGNRASRHHRQAAEQQPATPTLPKPQPQIQPPPPPPPTQTQQYQQAPPQSQQKPKPAADVGAVGRVLGRPMEDVRATYTFGRELGRGQFGVTYLVTHSETGQRFACKSIATRKLVHRDDIEDVRREVQIMHHLTGHRNIVELRGAYEDRHSVNLVMELCEGGELFDRIIAKGHYTERAAASLCREIVAVVHSCHSMGVFHRDLKPENFLFLNNKEDSPLKATDFGLSVFFKHGETFKDLVGSAYYVAPEVLKRKYGAEADIWSAGVILYILLSGVPPFWAENEDGIFDAVLRGHIDFSSDPWPSISNGAKDLVKKMLRQDPKERLTAAEILNHPWIREDGEAPDKPLDITVIGRMKQFRAMNKLKKVALKVVAENLSDEEIMGLKEMFRSLDTDNSGTITLEELRSGLPKLGTKISESEIKQLMEAADVDGNGTIDYAEFISATMHLNRLEKEDHILKAFEYFDKDHSGYITVDELEEALKKYDMGDDKTIKEIIAEVDTDHDGRINYQEFVAMMRNNSPEIVPNRRRMF

SEQ ID NO: 24725 - protein, 460 aa, Zea mays subsp. mays
  misc_feature (1)..(460): Ceres Seq. ID no. 12450494
MEDVRATYTFGRELGRGQFGVTYLVTHSETGQRFACKSIATRKLVHRDDIEDVRREVQIMHHLTGHRNIVELRGAYEDRHSVNLVMELCEGGELFDRIIAKGHYTERAAASLCREIVAVVHSCHSMGVFHRDLKPENFLFLNNKEDSPLKATDFGLSVFFKHGETFKDLVGSAYYVAPEVLKRKYGAEADIWSAGVILYILLSGVPPFWAENEDGIFDAVLRGHIDFSSDPWPSISNGAKDLVKKMLRQDPKERLTAAEILNHPWIREDGEAPDKPLDITVIGRMKQFRAMNKLKKVALKVVAENLSDEEIMGLKEMFRSLDTDNSGTITLEELRSGLPKLGTKISESEIKQLMEAADVDGNGTIDYAEFISATMHLNRLEKEDHILKAFEYFDKDHSGYITVDELEEALKKYDMGDDKTIKEIIAEVDTDHDGRINYQEFVAMMRNNSPEIVPNRRRMF

SEQ ID NO: 24726 - DNA, 2347 bp, Zea mays subsp. mays
  misc_feature (1)..(2347): Ceres Seq. ID no. 12450495
ataattggtgcctttcttgataagttgatatacaaccgtggatccttggaacttcgatttagttagtgactccgtaggtatcagataaccaaaaaaagaggaatcacgtgaactaccggttatatttcccctggatttcgacaaagctttttaggaaatttcgtactttttttcatggagaaatttcgaagacaccaatgaagttctcgcataaaataataaaaaaaccctaagcatgctcgattttcatttttttttttgccatgaacaactgctagtcaagcacaaaacaaggatttcctaattctccacactcgacaaccattattttcacagcttcaagaactctcaacttcccctcaccccaacccaaaagaagtgaatacaaccataaccttcacagcttcaagaacttttcaacttcaaggaaatttctaaacagtaattcttttttaagctggtgaggtgtcccggccctcctgtttcctgaaaaaaaagcacgactgaactagatgttattaggtccgcacatgaattgcatacgaaatgttttcctgactggggctaaattgctagtttagccatggggcagacgcatcttttgttgctcgcttgtttctgggtcctgtcaacatgctccttgctacttgatgcttcctccgatggactgttaagaatcaacctgaacaagaagagactggacaaggaagctttgactgctgcgaaattggcgaagaaggagagcaaccttcgaaggtctgtgggtgctgaccagtatctcagtgcctcaactgatgacatagtccctttggacaactacctggacacccagtactttggacagatcagcatcggcacgccaccacagaacttcacagtgatattcgacactggaagctccaacttgtgggttccctcatccaagtgctacttttcgatagcatgctacttacaccacagatacaagtcaaccaagtcgaagacttacacaaagaatggagaatcttgtacgataacatatggttctgggcaaatcgctggcttcttcagtgaggacaatgtgttggttggcaaccttgttgtgcaaaatcagaaatttattgagacaactcgagaaaccagccctactttcatcattgggaagtttgatggaattcttggtctcggatttcctgaaatttctgtaggaggagcccctccaatttggcagagcatgaaacagcagaaactggtcgcaaaggatgtcttctctttctggcttaatcgtgaccctgatgcatcttctggaggaggcgagcttgtctttggtggtgttgacccaaaacactacaaaggggaccatacatatgttcccgttacacgcaaaggctactggcagtttgacatgggagatcttattattggtggccactcaactggtttctgtgctggtggctgtgctgctattgtggactcagggacttcattgcttgctggtccaactaccatagtggctcaagtcaatcatgcaattggggctgagggaatcatcagtacagaatgcaaagaagtggtgagcgagtatggagagatgatccttgagttgctcatatcgcagacaagcccacagaaagtgtgcactcagattggtctctgtgtatttgatggtgcccattctgtcagcaatccaattgaatctgttgttgagaaacagaagcgtggttctgatcttttctgtactgcttgtgagatggctgttgtctggatacagaatcagctccgtgaaaacaagacaaaagaactcattttgaattatgctaatcagctctgtgagcgtctccctagccccaatggcgagtcaactgttgattgccatcagatctcaaagatgccaaatcttgcattcaccatagcaaacaagactttcaccttaacaccagagcagtacatagtgaagctggagcaagcaggacaaactatctgcatcagtgggtttatggcatttgacgtaccgcctcctcgtggtcctctctggatacttggtgatgtttttatgggtgcctaccacactgtttttgacttcggtgagaacaggattgggtttgccaaatctgcatgaggactggagttctgcgctttagtagcatgtccagtttgttatccgggtattgtacatatatatgttgccaactggtgtaatccgcagtgtttaatagtatatattcatgcagaaatctagaagattgtggcatgatatgtgtttgcaaatggagctatgctatgtatggagctccaggacctagagttttatgtaaagggagacgatgaggattagggcttttaacctattctcatcacgttattgtcc

SEQ ID NO: 24727 - protein, 504 aa, Zea mays subsp. mays
  misc_feature (1)..(504): Ceres Seq. ID no. 12450496
MGQTHLLLLACFWVLSTCSLLLDASSDGLLRINLNKKRLDKEALTAAKLAKKESNLRRSVGADQYLSASTDDIVPLDNYLDTQYFGQISIGTPPQNFTVIFDTGSSNLWVPSSKCYFSIACYLHHRYKSTKSKTYTKNGESCTITYGSGQIAGFFSEDNVLVGNLVVQNQKFIETTRETSPTFIIGKFDGILGLGFPEISVGGAPPIWQSMKQQKLVAKDVFSFWLNRDPDASSGGGELVFGGVDPKHYKGDHTYVPVTRKGYWQFDMGDLIIGGHSTGFCAGGCAAIVDSGTSLLAGPTTIVAQVNHAIGAEGIISTECKEVVSEYGEMILELLISQTSPQKVCTQIGLCVFDGAHSVSNPIESVVEKQKRGSDLFCTACEMAVVWIQNQLRENKTKELILNYANQLCERLPSPNGESTVDCHQISKMPNLAFTIANKTFTLTPEQYIVKLEQAGQTICISGFMAFDVPPPRGPLWILGDVFMGAYHTVFDFGENRIGFAKSA

SEQ ID NO: 24728 - protein, 294 aa, Zea mays subsp. mays; identical to SEQ ID NO: 15481
  misc_feature (1)..(294): Ceres Seq. ID no. 12450497

SEQ ID NO: 24729 - DNA, 2991 bp, Zea mays subsp. mays
  misc_feature (1)..(2991): Ceres Seq. ID no. 12450498
gtctggattcattctgcgagagatctgctggggcattgattcgtcatcaggctcagctctgatcagcttcaaccatcatggggagtcaggagtcggagcaggccaaggtgctcccggcaaccgactgcccgcagcagccaccggcgagcaggacctggcagaggaggttcgacgatgaaggcaagaaggtcgccatgttcagcatgaccatgaccgacctggtggaccttatgcccttgatggtcaaaatactcaagctgcaggtggaagaacacgccgaaggccgagttgcggtctatgatcttctgaggaaatggatggacaactgctaccgtggcgtaccggtgggtgggatagggaagcatagggagaagctacagagggtacttccagcagttccagatattccccgtgaccaacgaagagaaacctgtcctagcaaaccagttctcggcatttgtttcgcgcccgaacgggaacaagtactccacggtgctgtcggcgccaaccactgaccttctcaagggagtcggcaaagccggcattggatcttgggactggaggttgaaggaggacaaatgcacttaccacgccctgttcccaaggtcatggacggtatatgatggtgaacctgaccctgagatcaagatcacctgccgtcagatatcgcccttcataccgcacaactacagagagagcagcttcccggctgcagttttcacattcacggtgaacaactctgggagctcacctgcagatgtgaccctgctcttcacctgggcaaattcagttggcgggaagtcggaactgacaggaaaccacgtgaattccaaaatgacggagcacgacggcgtccgtggcgttctcctccatcacaggacggcgggagggcaccctccggtgacgttcgcgatcgcgtcccgagagaccgaccgtgtccgcgtcagcgtctgcccgtccttcacgatcgcgtcgggcggcccgtccagctccggcgagcccacggcggcggccatgtgggacgagatcaagaagcacggcgcgttcgggcacgccggcaacggcaacggcaacggcaacgcggcgagggcggcggcttctaaggccgggtcgtccgtgggcgcggcggtggcggcgtcgacggccgtgccggcgggggcgacgcgggtggtgtccttctcgctggcctgggcgtgccccgaagttaagttccccgccgggagcacgtaccacaggaggtacaccaggttctacggcactgatgccgacgcagctgcagagcacctagctcatgatgcccttcttgagcatatgaactgggagtcccagatcgaggagtggcagaagccaatcttgcatgaccaaaggctgcctgaatggtatccagttgctctgttcaacgagctctactacctcaacgctggaggcaccatctggacagacgggcaggctccgaagagggccggcttcgcttcgtcgttgacgggcaccgagccgttctccatcgacacgctcctcccagtcgcagcgggcggcagcgcggtagacggcgtcgtgcgcgcggtggcgtcggcgacggagcggtcccactccgcggcggcgttcggcgcggcgctgctgtgcggcggcgaggacaacgtggggcagttcctgtacctggaaggcatggagtacaacatgtacaacacctacgacgtgcacttctacgcctccttcgcgctgctgtccctcttcccccggctggagctgagcctgcagcgggacttcgcgcgcgccgtgctcctccacgaccctcgcccccggcgcaccctggacggcaggaccgtggcgcgcaaggtgctgggcgccgtgccgcacgacgtcgggctcaacgacccatgggtggagctgaacgcgtacatgctgcacgacgcggcgcggtggaaggacctcaaccccaagttcgtcctgcaggtgtaccgcgacgcggtggccacgggcgacgccgcgttcgcggaggcggtgtggcccgccgtgtacgtggccatggcgtacatggaccagttcgaccgcgacggcgacgggatggtggagaacgagggggtacccgaccagacgtacgacatgtggtcggtctccggtgtcagcgcctacacgggcggggtttgggtggcggcgctgcaggcggcggcgggcatggcgcgcgtcgtcggggaccgccccgccgaggcctacttcctcgcgaggcgggacagggcggcgcgcgtgtacgatgccgagctctggaccggcgcctacttccgctacgacaacagcggcggcggcggcgccagcgagtccatcatggcggaccaactggcggggcagtggtacgcgcgggcgtgcgggctggagccggtggtggaggacgccaaggcacggagcgcgctggcgaccgtgctggactacaacgtcatgcgggtcaagggcggcgccatcggggccgtgaacgggatgcgccccgacggcgccgtcgacgcatcgtccacgcagtccaaggaggtgtggcccggggtcacgtacgccgttgcggcggccatggtccacgagggcatgacggaggccgcgttccggacggccaagggcgcccacgacgccgcctggggcaacgacggcttcgggtacgcgttccagacgcccgaggcttggacggaggacggcggctatcggtcgctgcactacatgcggccgctcggcatctgggcgatgcagtgggcgctgtcgccacccgagctccacagggatctcaggacacccgaggcgcgatcctcggaggagccgtcgccggcggacgctgccctcgggcaggcgcagttcgacaaggtggcgagcatgttgaggctgccggaggagcagcagcccaagggatacctttgggccatctacaacctcgttaggcaaattgtgctccccgcatgaggattctcttgctccaagcagccgcactcatgaatgcaaattgagcccgttatt

SEQ ID NO: 24730 - protein, 700 aa, Zea mays subsp. mays
  misc_feature (1)..(700): Ceres Seq. ID no. 12450499
MTEHDGVRGVLLHHRTAGGHPPVTFAIASRETDRVRVSVCPSFTIASGGPSSSGEPTAAAMWDEIKKHGAFGHAGNGNGNGNAARAAASKAGSSVGAAVAASTAVPAGATRVVSFSLAWACPEVKFPAGSTYHRRYTRFYGTDADAAAEHLAHDALLEHMNWESQIEEWQKPILHDQRLPEWYPVALFNELYYLNAGGTIWTDGQAPKRAGFASSLTGTEPFSIDTLLPVAAGGSAVDGVVRAVASATERSHSAAAFGAALLCGGEDNVGQFLYLEGMEYNMYNTYDVHFYASFALLSLFPRLELSLQRDFARAVLLHDPRPRRTLDGRTVARKVLGAVPHDVGLNDPWVELNAYMLHDAARWKDLNPKFVLQVYRDAVATGDAAFAEAVWPAVYVAMAYMDQFDRDGDGMVENEGVPDQTYDMWSVSGVSAYTGGVWVAALQAAAGMARVVGDRPAEAYFLARRDRAARVYDAELWTGAYFRYDNSGGGGASESIMADQLAGQWYARACGLEPVVEDAKARSALATVLDYNVMRVKGGAIGAVNGMRPDGAVDASSTQSKEVWPGVTYAVAAAMVHEGMTEAAFRTAKGAHDAAWGNDGFGYAFQTPEAWTEDGGYRSLHYMRPLGIWAMQWALSPPELHRDLRTPEARSSEEPSPADAALGQAQFDKVASMLRLPEEQQPKGYLWAIYNLVRQIVLPA

SEQ ID NO: 24731 - protein, 640 aa, Zea mays subsp. mays
  misc_feature (1)..(640): Ceres Seq. ID no. 12450500
MWDEIKKHGAFGHAGNGNGNGNAARAAASKAGSSVGAAVAASTAVPAGATRVVSFSLAWACPEVKFPAGSTYHRRYTRFYGTDADAAAEHLAHDALLEHMNWESQIEEWQKPILHDQRLPEWYPVALFNELYYLNAGGTIWTDGQAPKRAGFASSLTGTEPFSIDTLLPVAAGGSAVDGVVRAVASATERSHSAAAFGAALLCGGEDNVGQFLYLEGMEYNMYNTYDVHFYASFALLSLFPRLELSLQRDFARAVLLHDPRPRRTLDGRTVARKVLGAVPHDVGLNDPWVELNAYMLHDAARWKDLNPKFVLQVYRDAVATGDAAFAEAVWPAVYVAMAYMDQFDRDGDGMVENEGVPDQTYDMWSVSGVSAYTGGVWVAALQAAAGMARVVGDRPAEAYFLARRDRAARVYDAELWTGAYFRYDNSGGGGASESIMADQLAGQWYARACGLEPVVEDAKARSALATVLDYNVMRVKGGAIGAVNGMRPDGAVDASSTQSKEVWPGVTYAVAAAMVHEGMTEAAFRTAKGAHDAAWGNDGFGYAFQTPEAWTEDGGYRSLHYMRPLGIWAMQWALSPPELHRDLRTPEARSSEEPSPADAALGQAQFDKVASMLRLPEEQQPKGYLWAIYNLVRQIVLPA

SEQ ID NO: 24732 - protein, 541 aa, Zea mays subsp. mays
  misc_feature (1)..(541): Ceres Seq. ID no. 12450501
MNWESQIEEWQKPILHDQRLPEWYPVALFNELYYLNAGGTIWTDGQAPKRAGFASSLTGTEPFSIDTLLPVAAGGSAVDGVVRAVASATERSHSAAAFGAALLCGGEDNVGQFLYLEGMEYNMYNTYDVHFYASFALLSLFPRLELSLQRDFARAVLLHDPRPRRTLDGRTVARKVLGAVPHDVGLNDPWVELNAYMLHDAARWKDLNPKFVLQVYRDAVATGDAAFAEAVWPAVYVAMAYMDQFDRDGDGMVENEGVPDQTYDMWSVSGVSAYTGGVWVAALQAAAGMARVVGDRPAEAYFLARRDRAARVYDAELWTGAYFRYDNSGGGGASESIMADQLAGQWYARACGLEPVVEDAKARSALATVLDYNVMRVKGGAIGAVNGMRPDGAVDASSTQSKEVWPGVTYAVAAAMVHEGMTEAAFRTAKGAHDAAWGNDGFGYAFQTPEAWTEDGGYRSLHYMRPLGIWAMQWALSPPELHRDLRTPEARSSEEPSPADAALGQAQFDKVASMLRLPEEQQPKGYLWAIYNLVRQIVLPA

SEQ ID NO: 24733 - DNA, 1761 bp, Zea mays subsp. mays
  misc_feature (1)..(1761): Ceres Seq. ID no. 12450583
aaccagcacaacgaagtcccgcgcacgcaaagaagtcacgtccaaactgaaggtgacaacatggagtccgcgccgtcaacggcggcggtcatggagcgcgagcgcctcacggccgagctggccttcgcggaggccgacgcagagcctagcagcttcgtcgtcaagatccggtgtcggctgccggacttcgcgcgcagcgtcaacctcaagtacgtccgcctcggcctgcgctctggcgccatccctgcgccctcctcatgggtcccgctcgcgctcgcgccgtcgctcctcgtcgcggcggcatactcgctcgttggcgcggacaagttctactcactcgacctgctcacctgcatcgcgtggctcgccgcggcggtgctgctgctcaccgtgtatttcctcatgcgcccaaggccggtgtacctcgtggacttcgcgtgctacaggccgggcaacgagcacgccatctccaaggngggcttcctggacatgacagancagcacgggctgcttcaacgcggaggcactcgagttccagaccaagatcaccaagcgctccggactcggcgatcggacgtacctcccgccgggcatccaggcacggccgccgcggctgtctatggaggaggcgcgcgcggaggccgaggccgtcatgttcggctgcctcgactcgctattctcggccacgggcatcgacccacgccgcgatgtgcgcgtgctcatcgtcaactgcagcctcttcaacccgacgccgtcgctggcgtccatggtagtgcaccgctacaagatgcgggaggacgtcaagtcgttcaaccttggaggcatggggtgcagcgcagggctcatcgccgtggacctcgccagggacatgctgcaggcgaaccccgggtgctacgccgtcntggtgagcaccgagaacatcacgctgaactggtacttcggcaacgaccgctccatgctgctgtccaactgcatcttccgcatgggcggcgctgccgcgctgctgtccaaccgccgcgccgacgccgggcgcgccaagtacaggctgctacacacggtacgcacccacaagggcgccgcggacgagtgctacggctgcgtgtaccagcgcgaggacggcaccggccgcgtcggcgtgtcgctggcgcgcgagctcatggccgtcgccggggacgcgctcaagacgaacatcaccaccctgggcccgctggtgctcccgatatcggagcagctcaagttcctcaagtccctcgtgctccgccgcgccctccgctcccgcggtgtccgtccgtacatcccggacttccggcgcgcgtttgaacacttctgcgtgcacgccggcgggcgcgccgtgctggaggaggtgcagcgcagcctggggctcagggacgcggacatggagcccagcaggtgcaccctgcaccgcttnggcaacaccagcagcagctcgctctggtacgagctcgcctacgccgaggccaanggccgcgtccgccgcggccnccgcgtgtggcagatcggattcggatccggattcaagtgcaacagtgctgtctggcgcgcgctccgcgacgtgccgcccgtgcacgccgacggcgccggcggtggcagcaactgcaacccgtgggtggacagcattcagagctacccgccaaaagagtacatctgatcgccatcttctttgtggtgaattaatcacgtcctgttggatcanttgtactanccgcgacgcagtagtgcacganaactgtatgtatggtg

SEQ ID NO: 24734 - protein, 439 aa, Zea mays subsp. mays
  misc_feature (1)..(439): Ceres Seq. ID no. 12450584
  misc_feature (159)..(159): Xaa is any aa, unknown or other
  misc_feature (166)..(166): Xaa is any aa, unknown or other
  misc_feature (301)..(301): Xaa is any aa, unknown or other
NQHNEVPRTQRSHVQTEGDNMESAPSTAAVMERERLTAELAFAEADAEPSSFVVKIRCRLPDFARSVNLKYVRLGLRSGAIPAPSSWVPLALAPSLLVAAAYSLVGADKFYSLDLLTCIAWLAAAVLLLTVYFLMRPRPVYLVDFACYRPGNEHAISKXGFLDMTXQHGLLQRGGTRVPDQDHQALRTRRSDVPPAGHPGTAAAAVYGGGARGGRGRHVRLPRLAILGHGHRPTPRCARAHRQLQPLQPDAVAGVHGSAPLQDAGGRQVVQPWRHGVQRRAHRRGPRQGHAAGEPRVLRRXGEHREHHAELVLRQRPLHAAVQLHLPHGRRCRAAVQPPRRRRARQVQAATHGTHPQGRRGRVLRLRVPARGRHRPRRRVAGARAHGRRRGRAQDEHHHPGPAGAPDIGAAQVPQVPRAPPRPPLPRCPSVHPGLPARV

SEQ ID NO: 24735 - protein, 419 aa, Zea mays subsp. mays
  misc_feature (1)..(419): Ceres Seq. ID no. 12450585
  misc_feature (139)..(139): Xaa is any aa, unknown or other
  misc_feature (146)..(146): Xaa is any aa, unknown or other
  misc_feature (281)..(281): Xaa is any aa, unknown or other
MESAPSTAAVMERERLTAELAFAEADAEPSSFVVKIRCRLPDFARSVNLKYVRLGLRSGAIPAPSSWVPLALAPSLLVAAAYSLVGADKFYSLDLLTCIAWLAAAVLLLTVYFLMRPRPVYLVDFACYRPGNEHAISKXGFLDMTXQHGLLQRGGTRVPDQDHQALRTRRSDVPPAGHPGTAAAAVYGGGARGGRGRHVRLPRLAILGHGHRPTPRCARAHRQLQPLQPDAVAGVHGSAPLQDAGGRQVVQPWRHGVQRRAHRRGPRQGHAAGEPRVLRRXGEHREHHAELVLRQRPLHAAVQLHLPHGRRCRAAVQPPRRRRARQVQAATHGTHPQGRRGRVLRLRVPARGRHRPRRRVAGARAHGRRRGRAQDEHHHPGPAGAPDIGAAQVPQVPRAPPRPPLPRCPSVHPGLPARV

SEQ ID NO: 24736 - protein, 409 aa, Zea mays subsp. mays
  misc_feature (1)..(409): Ceres Seq. ID no. 12450586
  misc_feature (129)..(129): Xaa is any aa, unknown or other
  misc_feature (136)..(136): Xaa is any aa, unknown or other
  misc_feature (271)..(271): Xaa is any aa, unknown or other
MERERLTAELAFAEADAEPSSFVVKIRCRLPDFARSVNLKYVRLGLRSGAIPAPSSWVPLALAPSLLVAAAYSLVGADKFYSLDLLTCIAWLAAAVLLLTVYFLMRPRPVYLVDFACYRPGNEHAISKXGFLDMTXQHGLLQRGGTRVPDQDHQALRTRRSDVPPAGHPGTAAAAVYGGGARGGRGRHVRLPRLAILGHGHRPTPRCARAHRQLQPLQPDAVAGVHGSAPLQDAGGRQVVQPWRHGVQRRAHRRGPRQGHAAGEPRVLRRXGEHREHHAELVLRQRPLHAAVQLHLPHGRRCRAAVQPPRRRRARQVQAATHGTHPQGRRGRVLRLRVPARGRHRPRRRVAGARAHGRRRGRAQDEHHHPGPAGAPDIGAAQVPQVPRAPPRPPLPRCPSVHPGLPARV

SEQ ID NO: 24737 - protein, 349 aa, Zea mays subsp. mays
  misc_feature (1)..(349): Ceres Seq. ID no. 12450587
  misc_feature (95)..(95): Xaa is any aa, unknown or other
  misc_feature (270)..(270): Xaa is any aa, unknown or other
  misc_feature (288)..(288): Xaa is any aa, unknown or other
  misc_feature (295)..(295): Xaa is any aa, unknown or other
MEEARAEAEAVMFGCLDSLFSATGIDPRRDVRVLIVNCSLFNPTPSLASMVVHRYKMREDVKSFNLGGMGCSAGLIAVDLARDMLQANPGCYAVXVSTENITLNWYFGNDRSMLLSNCIFRMGGAAALLSNRRADAGRAKYRLLHTVRTHKGAADECYGCVYQREDGTGRVGVSLARELMAVAGDALKTNITTLGPLVLPISEQLKFLKSLVLRRALRSRGVRPYIPDFRRAFEHFCVHAGGRAVLEEVQRSLGLRDADMEPSRCTLHRXGNTSSSSLWYELAYAEAXGRVRRGXRVWQIGFGSGFKCNSAVWRALRDVPPVHADGAGGGSNCNPWVDSIQSYPPKEYI

SEQ ID NO: 24738 - DNA, 1010 bp, Zea mays subsp. mays
  misc_feature (1)..(1010): Ceres Seq. ID no. 12450604
acgagtgcactgcgcacaacgctgtgcgtgtgcggtgtgcgctcgacgattccagacattgcccacgggccacggccgccaaacacagctgccggaactgcacgccctcctcgctccactgatccaaagctgcgcctgcgctcgctccaaggtacccatgggatcccaccaccactacacctccgcctcgcaattcgtcttcgccgccgtcgattccaaccccaaccccaggcccagctacagccacaagcccaagaccaccgtgcaaatccccatcacgtctctaccagaacgggctcgggcgggaccgcccgacgcggcggccgccgccaagatccaggcggccttgcggggctacctggtcatgcggcacgccgcggccgtgcgcggggccgacgccgaggcgacgcggctcgagcggctgctccggcggcaggagaccgtggacgccgtccgcggcgacgagcgcgagcgggcccggttctccgaggcgctcatggccgtgctgctccgcctggacgccgtgccgggacgctacccggccgtgcgggacgcgcggcgcgccgtgagccgccgcgtcgtcggcctgcaggaagtgttcgacgctgttgtcncggcncctgcagngcagacttgcggggttccggctagcctggagcaggtcctngaagggatntggggcatcgganaggcgcctgttccggtgccgccggcgcaggcgatggccgcggtggaggaggaagtnaggaggggcggatcatactgggcaaggttttttggtggagtgggctggccgtgactgtgactctgtgagtgtgtagcgaggagggtacctgggtactagaatggctatagnctactgctgtgccgtactcggctgcacatgtattttgagatgtgtcgtattgtataccaaagtgccatgttgctgttaatgacgtgagagaaaaactgtaagtcaccatttggatcctttatttcagggctcgtttgtcggcaatgttttaccg

SEQ ID NO: 24739 - protein, 265 aa, Zea mays subsp. mays
  misc_feature (1)..(265): Ceres Seq. ID no. 12450605
  misc_feature (205)..(205): Xaa is any aa, unknown or other
  misc_feature (206)..(206): Xaa is any aa, unknown or other
  misc_feature (209)..(209): Xaa is any aa, unknown or other
  misc_feature (222)..(222): Xaa is any aa, unknown or other
  misc_feature (225)..(225): Xaa is any aa, unknown or other
  misc_feature (230)..(230): Xaa is any aa, unknown or other
  misc_feature (248)..(248): Xaa is any aa, unknown or other
RVHCAQRCACAVCARRFQTLPTGHGRQTQLPELHALLAPLIQSCACARSKVPMGSHHHYTSASQFVFAAVDSNPNPRPSYSHKPKTTVQIPITSLPERARAGPPDAAAAAKIQAALRGYLVMRHAAAVRGADAEATRLERLLRRQETVDAVRGDERERARFSEALMAVLLRLDAVPGRYPAVRDARRAVSRRVVGLQEVFDAVVXXPAXQTCGVPASLEQVXEGXWGIGXAPVPVPPAQAMAAVEEEXRRGGSYWARFFGGVGWP

SEQ ID NO: 24740 - protein, 216 aa, Zea mays subsp. mays
  misc_feature (1)..(216): Ceres Seq. ID no. 12450606
  misc_feature (205)..(205): Xaa is any aa, unknown or other
  misc_feature (207)..(207): Xaa is any aa, unknown or other
  misc_feature (209)..(209): Xaa is any aa, unknown or other
TSALRTTLCVCGVRSTIPDIAHGPRPPNTAAGTARPPRSTDPKLRLRSLQGTHGIPPPLHLRLAIRLRRRRFQPQPQAQLQPQAQDHRANPHHVSTRTGSGGTARRGGRRQDPGGLAGLPGHAARRGRARGRRRGDAARAAAPAAGDRGRRPRRRARAGPVLRGAHGRAAPPGRRAGTLPGRAGRAARREPPRRRPAGSVRRCCXGXCXADLRGSG

SEQ ID NO: 24741 - protein, 213 aa, Zea mays subsp. mays
  misc_feature (1)..(213): Ceres Seq. ID no. 12450607
  misc_feature (153)..(153): Xaa is any aa, unknown or other
  misc_feature (154)..(154): Xaa is any aa, unknown or other
  misc_feature (157)..(157): Xaa is any aa, unknown or other
  misc_feature (170)..(170): Xaa is any aa, unknown or other
  misc_feature (173)..(173): Xaa is any aa, unknown or other
  misc_feature (178)..(178): Xaa is any aa, unknown or other
  misc_feature (196)..(196): Xaa is any aa, unknown or other
MGSHHHYTSASQFVFAAVDSNPNPRPSYSHKPKTTVQIPITSLPERARAGPPDAAAAAKIQAALRGYLVMRHAAAVRGADAEATRLERLLRRQETVDAVRGDERERARFSEALMAVLLRLDAVPGRYPAVRDARRAVSRRVVGLQEVFDAVVXXPAXQTCGVPASLEQVXEGXWGIGXAPVPVPPAQAMAAVEEEXRRGGSYWARFFGGVGWP

SEQ ID NO: 24742 - DNA, 1830 bp, Zea mays subsp. mays
  misc_feature (1)..(1830): Ceres Seq. ID no. 12450616
aaacaatcattcgactatcatggtatcacagaggttcgttccgaaccatcgcttccgcctttcctaaccacgccatctcgctgccatggccgacgacgaagtcgcagctgctgctgctcgccgtgctttggagcagcgcgtcgccgcctttactgctgaagaacgccgcgaggctgctcgccaagaagctgcgcacctggaggctgcgcgcatcgaggccgagcgtcgcgaagccgcgcgcttggagcaggaacgtcgcgacgccgatgcccatgccctggtcatcgccggtgaggtcgctgcggctactgccgctcttcatgctcaagcagcagcgatcctcaacgtcaagtctctcgttcccatcgtcctcgacttcacgtcgccccactacaatcgatggcgtggcctcttcctcaacactctcgagcgctatgcgcttgttgatcatgtgctttccgacgacgaccgctccgccgacgccatgtggaagcgcatggactgcactgtcttgtcctggctctacggcaccaccaatcccgagctcctcgaggttgtcatgaaccgggacgatggccctcccactgctcgtcgcgtgtggctcggtctcgagcagcagttcattgggaacaaggagagtcgcgctcttctcctcgacgccgagttccgcaccttcgtccaaggcggtctgtccatctccgactactgccaccggctcaagtccatggctgaccagcttgcggatctcggcgaacccgttcgcgaccgtacgttggtgctcaacgtcattcggggcctcaacgacaggttctcctacctcggcgcgctgatccagcgtcaacgtccgttcccgacgttcgccgaagttaagtccgatcttcgcctcgccgaaatcaacatggttgccaagtctgcccagccgcctcaggccttcgctgccttggcctctccttctccgcacaacagcgacggactcggcggcggtggacgcaagcagacaaggcgtggcggcggcggtaagaaaacctctggaggtcgcggtcctggttccgtgccccctaccgcgacttgggctggccagccgccacggcccacaccctggcaacctgcatttggcactttccaggcgtattgggccggcccgcccggaccaccaggcgtcccgccacgtgcacctggcccacctccgcagactttctacgccggcccatccgtgctacctaggccgcctccgacggctgcttcaccaggcctcctggcgtccccgcctgggccatcccagccggctccaccaggcttcatcggcgccaacacgccaccaccaggatggctgcaacatcctggcgccttctcctgggacggccaacatgttggctgcaaatttcaacacgatgacgcttcagccaccgccaacaaatgaatggtatatggatataggcgctgaaactcacatgacatccaactccggacctcaaaacccggaacgtgatcgtcaggtgcaatagttccggtccgctatactcgcttctatcatcagttttttagcccttagcactcactgccggcgtctcttcatccactctttggcatcggcgtcttggacatctcggtcatgaggccttgtctagtctcgtgtcatcatgtgctatttcttgcaataagagtgattccaaacacttgtgtcatgcttgtcaattaggtcgtcatgtacgtctcccctttcccacctccagttcgcgagcaatcaataattttgatttaatccattgtgatctttggacatcccctgttcctagtatttctggctacaaatattatttattcattctt

SEQ ID NO: 24743 - protein, 444 aa, Zea mays subsp. mays
  misc_feature (1)..(444): Ceres Seq. ID no. 12450617
MADDEVAAAAARRALEQRVAAFTAEERREAARQEAAHLEAARIEAERREAARLEQERRDADAHALVIAGEVAAATAALHAQAAAILNVKSLVPIVLDFTSPHYNRWRGLFLNTLERYALVDHVLSDDDRSADAMWKRMDCTVLSWLYGTTNPELLEVVMNRDDGPPTARRVWLGLEQQFIGNKESRALLLDAEFRTFVQGGLSISDYCHRLKSMADQLADLGEPVRDRTLVLNVIRGLNDRFSYLGALIQRQRPFPTFAEVKSDLRLAEINMVAKSAQPPQAFAALASPSPHNSDGLGGGGRKQTRRGGGGKKTSGGRGPGSVPPTATWAGQPPRPTPWQPAFGTFQAYWAGPPGPPGVPPRAPGPPPQTFYAGPSVLPRPPPTAASPGLLASPPGPSQPAPPGFIGANTPPPGWLQHPGAFSWDGQHVGCKFQHDDASATANK

SEQ ID NO: 24744 - protein, 311 aa, Zea mays subsp. mays
  misc_feature (1)..(311): Ceres Seq. ID no. 12450618
MWKRMDCTVLSWLYGTTNPELLEVVMNRDDGPPTARRVWLGLEQQFIGNKESRALLLDAEFRTFVQGGLSISDYCHRLKSMADQLADLGEPVRDRTLVLNVIRGLNDRFSYLGALIQRQRPFPTFAEVKSDLRLAEINMVAKSAQPPQAFAALASPSPHNSDGLGGGGRKQTRRGGGGKKTSGGRGPGSVPPTATWAGQPPRPTPWQPAFGTFQAYWAGPPGPPGVPPRAPGPPPQTFYAGPSVLPRPPPTAASPGLLASPPGPSQPAPPGFIGANTPPPGWLQHPGAFSWDGQHVGCKFQHDDASATANK

SEQ ID NO: 24745 - protein, 307 aa, Zea mays subsp. mays
  misc_feature (1)..(307): Ceres Seq. ID no. 12450619
MDCTVLSWLYGTTNPELLEVVMNRDDGPPTARRVWLGLEQQFIGNKESRALLLDAEFRTFVQGGLSISDYCHRLKSMADQLADLGEPVRDRTLVLNVIRGLNDRFSYLGALIQRQRPFPTFAEVKSDLRLAEINMVAKSAQPPQAFAALASPSPHNSDGLGGGGRKQTRRGGGGKKTSGGRGPGSVPPTATWAGQPPRPTPWQPAFGTFQAYWAGPPGPPGVPPRAPGPPPQTFYAGPSVLPRPPPTAASPGLLASPPGPSQPAPPGFIGANTPPPGWLQHPGAFSWDGQHVGCKFQHDDASATANK

SEQ ID NO: 24746 - DNA, 1261 bp, Zea mays subsp. mays
  misc_feature (1)..(1261): Ceres Seq. ID no. 12450620
agttcattcccatttcccaacccaaaccagcggctggcacggacgccggcgagccgcgcggcccggaggaccactgcctcctgcatatagccggcttccgcggccatgtcatccgtacacttctttcctgcctcctcccagaccccggtccccgcctgccttctcaaaacctctccaaagtcacccctcccgtgcccccgcacccttgccaccaccgctctccagagtgttggcggcaattgcaatgcgtggcaccgcccgcacctacggctgcagcggagggtccgcacccctgcagcaccgtccgacgcgccgcctgtgggccccgatggcgggagcgggggcggcggcgcggggggagggagtggaggggaggatgaggaggaggagggggagaagaagaagggactgttgcccgagtggatgaacttgacaacagaggacgccaagacggtgctggccgcggtagctatctcgctcgctttccgaaccttcgtcgccgagccgcgcttcatcccctcgctctccatgttccccaccttcgacgtcggtgaccgcatcgtcgccgagaaggttacttactactttaggaagccatgtgttaatgatataataattttcaaaagccctccagtgctgcaggaggttgggtatactgataatgatgttttcattaaaagagtagttgccagggagggagatgttgttgaggttcatgaaggaaaactcgttgtgaatgcaagtaccagaaaactctgtttttgtgatgggagataaccgaaacaacagctacgattcacatgtgtggggccctcttccagcaaaaaacatattggggagatcaatttttcggtattggcctcctggtcgaatagggggtactaccaagggttgcttcagccctgaattaagccctggagcaaagccagaatcacttactgatgtcaaatcgacaaagtaggagattgagaagttagttttggtggtgcctgatgtgcaggggaagcttcggttattcttcgtggtagaatgtcacagaggaatcctgtgttgtgtggcaggtagttctattagaacccagagagaggaagacaatttgattctcattgagtcattgattggattggccaaaaggcacagaaaccattttgtctcagggtttcttgtccttttgccttgctgtatacgtacgtattagggaaacttgataccatgatggctgacctagttaagctgcaaaaaagtatggttccactgttgc

SEQ ID NO: 24747 - protein, 223 aa, Zea mays subsp. mays
  misc_feature (1)..(223): Ceres Seq. ID no. 12450621
MSSVHFFPASSQTPVPACLLKTSPKSPLPCPRTLATTALQSVGGNCNAWHRPHLRLQRRVRTPAAPSDAPPVGPDGGSGGGGAGGGSGGEDEEEEGEKKKGLLPEWMNLTTEDAKTVLAAVAISLAFRTFVAEPRFIPSLSMFPTFDVGDRIVAEKVTYYFRKPCVNDIIIFKSPPVLQEVGYTDNDVFIKRVVAREGDVVEVHEGKLVVNASTRKLCFCDGR

SEQ ID NO: 24748 - protein, 141 aa, Zea mays subsp. mays
  misc_feature (1)..(141): Ceres Seq. ID no. 12450622
VHSHFPTQTSGWHGRRRAARPGGPLPPAYSRLPRPCHPYTSFLPPPRPRSPPAFSKPLQSHPSRAPAPLPPPLSRVLAAIAMRGTARTYGCSGGSAPLQHRPTRRLWAPMAGAGAAARGEGVEGRMRRRRGRRRRDCCPSG

SEQ ID NO: 24749 - protein, 125 aa, Zea mays subsp. mays
  misc_feature (1)..(125): Ceres Seq. ID no. 12450623
FIPISQPKPAAGTDAGEPRGPEDHCLLHIAGFRGHVIRTLLSCLLPDPGPRLPSQNLSKVTPPVPPHPCHHRSPECWRQLQCVAPPAPTAAAEGPHPCSTVRRAACGPRWRERGRRRGGREWRGG

SEQ ID NO: 24750 - DNA, 1012 bp, Zea mays subsp. mays
  misc_feature (1)..(1012): Ceres Seq. ID no. 12450646
aggagtaggtgtagccgcgtaagcggcgtaggcctcagctcggctcagcagccgcctcgctcgaaccagaggagccaagcagaggaagcgaggcggcgggggcggagatgtcggcgggactggtgaccgacgaggccaccgtggggcggctgtaccggatccggcgcacggtgatgcagatgctccgtgaccgtggctacctggtggtggaccacgagctcgccaccagccgccgcgacttcctccgcaagttcggcgagtccttccaccgcgaggacctcctcatcaacaagtacaagaagaacgacccatccgaccagatatatgtcttcttccccaacgatgacaaggtagggatgaagcacatcaagaagtacgtcgaaatgatgacgcacgagaacgtctccagagctgtgctggttctccagcagaacctaactccgtttgcgaagtcgtttctcatagagctggagccgaagatccatctggaaattttccaggaggccgagatgcttataaacatcaaggaacatgtccttgttcctgagcatcaggtgctcacaaacgaggagaagaagacgcttctggagcggtacaccttgaaggaaactcagcttccaagaatacagatcacggatcctattgctaggtactacggcctgaggcgaggccaggtcgtgaagatcatcaggcccagcgagacggcgggcagatacgttacataccgctacgttgtatgacagaacgtcagaacactgaagaagaagaagagaaccacagatatgtcaaaaaaaattcaagctacacataccccacgtgcttgcagacatcagtatcgcttttgtagcagcagccactggtaacgatctgtggctgatgtgtaagtggattgaataagctgagtcagagcatacgagaattctcatgttgtacacttgtgttttatgaaccgcataaacactcacgacgataaaagaagcctgttttcggagcgacagaagctcctgcgatc

SEQ ID NO: 24751 - protein, 210 aa, Zea mays subsp. mays
  misc_feature (1)..(210): Ceres Seq. ID no. 12450647
MSAGLVTDEATVGRLYRIRRTVMQMLRDRGYLVVDHELATSRRDFLRKFGESFHREDLLINKYKKNDPSDQIYVFFPNDDKVGMKHIKKYVEMMTHENVSRAVLVLQQNLTPFAKSFLIELEPKIHLEIFQEAEMLINIKEHVLVPEHQVLTNEEKKTLLERYTLKETQLPRIQITDPIARYYGLRRGQVVKIIRPSETAGRYVTYRYVV

SEQ ID NO: 24752 - protein, 188 aa, Zea mays subsp. mays
  misc_feature (1)..(188): Ceres Seq. ID no. 12450648
MQMLRDRGYLVVDHELATSRRDFLRKFGESFHREDLLINKYKKNDPSDQIYVFFPNDDKVGMKHIKKYVEMMTHENVSRAVLVLQQNLTPFAKSFLIELEPKIHLEIFQEAEMLINIKEHVLVPEHQVLTNEEKKTLLERYTLKETQLPRIQITDPIARYYGLRRGQVVKIIRPSETAGRYVTYRYVV

SEQ ID NO: 24753 - protein, 186 aa, Zea mays subsp. mays
  misc_feature (1)..(186): Ceres Seq. ID no. 12450649
MLRDRGYLVVDHELATSRRDFLRKFGESFHREDLLINKYKKNDPSDQIYVFFPNDDKVGMKHIKKYVEMMTHENVSRAVLVLQQNLTPFAKSFLIELEPKIHLEIFQEAEMLINIKEHVLVPEHQVLTNEEKKTLLERYTLKETQLPRIQITDPIARYYGLRRGQVVKIIRPSETAGRYVTYRYVV

SEQ ID NO: 24754 - DNA, 575 bp, Zea mays subsp. mays
  misc_feature (1)..(575): Ceres Seq. ID no. 12450744
aatacccgaccttgatgatccgatggaagaactgtcaatcgatgacatagagattgacgatgaagtagcagtagccctggcacaagcagcatcgtccacatcccaagggaataagagaacagcagtggaggaggagagagcgaagctgtttgaagggtcaaacagtgcggataaaccgagaatgagaacgcagcaggagattctaaccaaatataggtttggcggggacgccgccgccgcagctgctcatgcgaaggataagctgatgcagaggcaggagaaactggagagaattagccaacaaaccgcggagcttcagaatggagcggagaattttgcttccctggcgcaggagctcgcgaaaacaatggagaacaagaagtggtggaagctataaactgggtttgtttgtacgtatgtgtgttgttggatgacacccgtcgttgcgaattggggcacataccagcattaccattttttgtgtccgtattaaacactttggatattctttttgtgttttggtgatgtacgtgtaaagataaaaaagagagaatgaatgggaacccttttttcct

SEQ ID NO: 24755 - protein, 131 aa, Zea mays subsp. mays
  misc_feature (1)..(131): Ceres Seq. ID no. 12450745
IPDLDDPMEELSIDDIEIDDEVAVALAQAASSTSQGNKRTAVEEERAKLFEGSNSADKPRMRTQQEILTKYRFGGDAAAAAAHAKDKLMQRQEKLERISQQTAELQNGAENFASLAQELAKTMENKKWWKL

SEQ ID NO: 24756 - protein, 124 aa, Zea mays subsp. mays
  misc_feature (1)..(124): Ceres Seq. ID no. 12450746
MEELSIDDIEIDDEVAVALAQAASSTSQGNKRTAVEEERAKLFEGSNSADKPRMRTQQEILTKYRFGGDAAAAAAHAKDKLMQRQEKLERISQQTAELQNGAENFASLAQELAKTMENKKWWKL

SEQ ID NO: 24757 - protein, 71 aa, Zea mays subsp. mays
  misc_feature (1)..(71): Ceres Seq. ID no. 12450747
MRTQQEILTKYRFGGDAAAAAAHAKDKLMQRQEKLERISQQTAELQNGAENFASLAQELAKTMENKKWWKL

SEQ ID NO: 24758 - DNA, 1416 bp, Zea mays subsp. mays
  misc_feature (1)..(1416): Ceres Seq. ID no. 12454754
aaaagccaggattcctctgctcttcctgtttagggtttccccctctctctgctcctgccggatgcgatggcgattccgccgcggactccttccccgccgccatcgtggtcgcgctctgtaaccgagaccgttcgggggtcccaccagttcaccgtacggggctactccctcgccaagggcatgggccccggccgctacctcgccagcgacgtcttcgccgtcggaggataccactgggccgtctacctctaccccgacggcaagaacgccgaggacaactccaactacgtctccgttttcgtcgccctcgcttccgacggcatcgacgtccgagccctcttcgagctcaccctcctcgaccagtccggccgcggctgccacaaggttcactcgcactttgaccgctcgctcaagttcggcccatacaccctcaagtacaggggatccatgtggggttacaagcgcttctacaaaagaacactcttggaagaatctgatttcttaaagaatgattgcctagtgatgaactgcacagtaggtgttgtcaagaaccgtatagaaacaccaaaggacatccagattcatgttccacgatcagacatgggccgctgcttcaaggagctcctcagccgctgcattggatgtgacataacattcgaagtgcgagatgagaaagtcagggcacacaagtggattcttgctgctcgctccccagtatttaaagcccagttctttggtcctattggaaagcctgacctgcacacggttgttgtggaggatgtggaacctgttgtcttcaaggcaatggtgaacttcatttacgctgatgaactccccagcattcctgagctagctgggtctgcctcaacgtggacatcaacagtagtagtacagcatttgttggcagcagctgatagatatggactggtccgtctgcgtatcctgtgtgaatcaaagctctgtgatgaactgactcctgaaactgtcgcaacaactttagcccttgctgaacagcaccattgtgctgagctgaagtctgcatgtctaaagttcattgctttgcgaggaaatttgggagctgttatggagacggaaggctttgattacctggaggatacatgcccgtccctactatctgacttgttagctactgtggcagtcgtggacgacgatcttgcatcccttaaccgaaaaaggggagtcagcgggaaccaagtcatggctctagtgggaagcgttgaaaggcgcacccggaggaagctttagtagctggcttccctagagggagactgtagttgacaacgatttgatttggacgctggtagctgtgaataatatcgtatccagatgattttttttttttttttgcagaagcagaagttgtaaattttttgaattgaatgcctttttttttcc

SEQ ID NO: 24759 - protein, 399 aa, Zea mays subsp. mays
  misc_feature (1)..(399): Ceres Seq. ID no. 12454755
MAIPPRTPSPPPSWSRSVTETVRGSHQFTVRGYSLAKGMGPGRYLASDVFAVGGYHWAVYLYPDGKNAEDNSNYVSVFVALASDGIDVRALFELTLLDQSGRGCHKVHSHFDRSLKFGPYTLKYRGSMWGYKRFYKRTLLEESDFLKNDCLVMNCTVGVVKNRIETPKDIQIHVPRSDMGRCFKELLSRCIGCDITFEVRDEKVRAHKWILAARSPVFKAQFFGPIGKPDLHTVVVEDVEPVVFKAMVNFIYADELPSIPELAGSASTWTSTVVVQHLLAAADRYGLVRLRILCESKLCDELTPETVATTLALAEQHHCAELKSACLKFIALRGNLGAVMETEGFDYLEDTCPSLLSDLLATVAVVDDDLASLNRKRGVSGNQVMALVGSVERRTRRKL

SEQ ID NO: 24760 - protein, 361 aa, Zea mays subsp. mays
  misc_feature (1)..(361): Ceres Seq. ID no. 12454756
MGPGRYLASDVFAVGGYHWAVYLYPDGKNAEDNSNYVSVFVALASDGIDVRALFELTLLDQSGRGCHKVHSHFDRSLKFGPYTLKYRGSMWGYKRFYKRTLLEESDFLKNDCLVMNCTVGVVKNRIETPKDIQIHVPRSDMGRCFKELLSRCIGCDITFEVRDEKVRAHKWILAARSPVFKAQFFGPIGKPDLHTVVVEDVEPVVFKAMVNFIYADELPSIPELAGSASTWTSTVVVQHLLAAADRYGLVRLRILCESKLCDELTPETVATTLALAEQHHCAELKSACLKFIALRGNLGAVMETEGFDYLEDTCPSLLSDLLATVAVVDDDLASLNRKRGVSGNQVMALVGSVERRTRRKL

SEQ ID NO: 24761 - protein, 272 aa, Zea mays subsp. mays
  misc_feature (1)..(272): Ceres Seq. ID no. 12454757
MWGYKRFYKRTLLEESDFLKNDCLVMNCTVGVVKNRIETPKDIQIHVPRSDMGRCFKELLSRCIGCDITFEVRDEKVRAHKWILAARSPVFKAQFFGPIGKPDLHTVVVEDVEPVVFKAMVNFIYADELPSIPELAGSASTWTSTVVVQHLLAAADRYGLVRLRILCESKLCDELTPETVATTLALAEQHHCAELKSACLKFIALRGNLGAVMETEGFDYLEDTCPSLLSDLLATVAVVDDDLASLNRKRGVSGNQVMALVGSVERRTRRKL

SEQ ID NO: 24762 - DNA, 1459 bp, Zea mays subsp. mays
  misc_feature (1)..(1459): Ceres Seq. ID no. 12454773
aaaacgtgtggcgtcggcagccgggcaggtaggaaaaggtatcagcgtcgccaatctccatggagctcacaggcgccgcgctccggcgatacgcgctgccgtcggcgtccccggtggccgcgagggtggggaggaggaggcgaccagccagggtggcctgcgtcgggggcggggggttcgcggaggaggggcacctcaggtactacgaggcggccccgcggaggaaggcggtggaggcggtggcgagggacctgggaaagctccgggccatggggctcgtcgcgggggacgcagccaaggagaaggtcctctcggaagccacggatcttctgctgcaggagctgagccagatgaaggatgcggaatacaagataaacaagatggagaaagaacagaatgctgctatgaaagcactgaagaagcaggagaggcgcaccaagaagactgccatcatgatgatgaagtgtgaagaagatgagtcatctgagtcgagcgagagcgattgtgaggacgaggcaaccatgaatgccgagcaggacatggtgatgtcaacagcggttcccgaggttgttgcatcaagcatctcagctgtcctcgcgatggagtgtgataaggctgcagtgaaggccatgaagaaaatggagaaggaacaaatgaaggccatgaagaagatggagaaggaacagaagaaggctgcgaagaaggccatgaagatggagaaggaagcaaagaagatggcaatggctacactgaatggctgcagggatgaagacgattcctcatgctcatcagagtcgagtgaaagtgaatgcgagggccaagttatgaggatgagccgctgcggctacaatcaccgcaccggaaatgccacctccaagcacgggtcttccaatcatagttcctcaaattccagcacctttggcaccacagccgtctcaatctcaaccttcagagccagcaaccgcagtgcaagccaccagagtcagcagcgttgcagtaactgagacatccacaaccagcagaattgaggtctgcatggggggcaaatgcaagaagtcaggcgcgcttgctctcctgcaggagttcgagaaggctgtgggcaccggtggcgcggtcgtcggctgcaagtgcctggggaagtgcggcctaggtcccaacgtgaggctgaggagcggtgcctctgcggaaggttctgcaaaggggaacccactctgcatcggtgtaggctttgaagatgttgacaccatcgtggctggtctctttggaggcgctgatctgggcatgacacccacctagacctggtggtactacctcgacctagtcgtacttcaagaaatcaagagcacaacttgtaatcacagatgttgcattgaacaaatgtatagtgcagctacggccttgctagtgctaagtttatgtactctatgtctatatagaacacgtatggtaatcttgttcc

SEQ ID NO: 24763 - protein, 314 aa, Zea mays subsp. mays
  misc_feature (1)..(314): Ceres Seq. ID no. 12454774
MELTGAALRRYALPSASPVAARVGRRRRPARVACVGGGGFAEEGHLRYYEAAPRRKAVEAVARDLGKLRAMGLVAGDAAKEKVLSEATDLLLQELSQMKDAEYKINKMEKEQNAAMKALKKQERRTKKTAIMMMKCEEDESSESSESDCEDEATMNAEQDMVMSTAVPEVVASSISAVLAMECDKAAVKAMKKMEKEQMKAMKKMEKEQKKAAKKAMKMEKEAKKMAMATLNGCRDEDDSSCSSESSESECEGQVMRMSRCGYNHRTGNATSKHGSSNHSSSNSSTFGTTAVSISTFRASNRSASHQSQQRCSN

SEQ ID NO: 24764 - protein, 244 aa, Zea mays subsp. mays
  misc_feature (1)..(244): Ceres Seq. ID no. 12454775
MGLVAGDAAKEKVLSEATDLLLQELSQMKDAEYKINKMEKEQNAAMKALKKQERRTKKTAIMMMKCEEDESSESSESDCEDEATMNAEQDMVMSTAVPEVVASSISAVLAMECDKAAVKAMKKMEKEQMKAMKKMEKEQKKAAKKAMKMEKEAKKMAMATLNGCRDEDDSSCSSESSESECEGQVMRMSRCGYNHRTGNATSKHGSSNHSSSNSSTFGTTAVSISTFRASNRSASHQSQQRCSN

SEQ ID NO: 24765 - protein, 217 aa, Zea mays subsp. mays
  misc_feature (1)..(217): Ceres Seq. ID no. 12454776
MKDAEYKINKMEKEQNAAMKALKKQERRTKKTAIMMMKCEEDESSESSESDCEDEATMNAEQDMVMSTAVPEVVASSISAVLAMECDKAAVKAMKKMEKEQMKAMKKMEKEQKKAAKKAMKMEKEAKKMAMATLNGCRDEDDSSCSSESSESECEGQVMRMSRCGYNHRTGNATSKHGSSNHSSSNSSTFGTTAVSISTFRASNRSASHQSQQRCSN

SEQ ID NO: 24766 - DNA, 796 bp, Zea mays subsp. mays
  misc_feature (1)..(796): Ceres Seq. ID no. 12454792
aacatcaacaccagacagcactacagtctacagcagcagggcaccaccaccacagcaatgcagcagaacgccgcccgcctgctggccgccgccgtggcctgcctggcgctggcgctggcgccatcctcggacgcgcaggggacggcggtgccgtcgtgcgcggcgaagcttgtgccgtgcacggggtacctcaactccacgtccacggcggcgcccgcggcggcctgctgcgggccgctcagggaggcagcggccaacgagacggcgtgcctctgcgccatgctgctcaacagggccgcgctgcgggcgttcggcgtggcgcccgagcagggcctggtcctcgcccggcggtgcaacgtcaccaccgacgcctccgcctgcgccgccgccggaggctcagccacgggcggcagtactgctgcatcttcagcttccaccggcagcgcttcctcctcctcctctttcttcttcagtggccaaaccaacagccaacggaggcggcgtggcgcgtcgcctgagcatgactggcgcgtcctcattgctaggcttcagtttcatctggtggtgggcggtcatggcgtaggagtatctgccgtggcaccggcgattttcctggctggatccagaattccagacttatatgtactactgttgagtagcaggtttcattgcttctttttatatataatatgccctgttgtaccactaccattgatgccgtgagcagaacaagagaaaaaaattgtcaagaacgatgcaaacaaccagaaggaaagaacgtactctcattttaaat

SEQ ID NO: 24767 - protein, 240 aa, Zea mays subsp. mays
  misc_feature (1)..(240): Ceres Seq. ID no. 12454793
NINTRQHYSLQQQGTTTTAMQQNAARLLAAAVACLALALAPSSDAQGTAVPSCAAKLVPCTGYLNSTSTAAPAAACCGPLREAAANETACLCAMLLNRAALRAFGVAPEQGLVLARRCNVTTDASACAAAGGSATGGSTAASSASTGSASSSSSFFFSGQTNSQRRRRGASPEHDWRVLIARLQFHLVVGGHGVGVSAVAPAIFLAGSRIPDLYVLLLSSRFHCFFLYIICPVVPLPLMP

SEQ ID NO: 24768 - protein, 221 aa, Zea mays subsp. mays
  misc_feature (1)..(221): Ceres Seq. ID no. 12454794
MQQNAARLLAAAVACLALALAPSSDAQGTAVPSCAAKLVPCTGYLNSTSTAAPAAACCGPLREAAANETACLCAMLLNRAALRAFGVAPEQGLVLARRCNVTTDASACAAAGGSATGGSTAASSASTGSASSSSSFFFSGQTNSQRRRRGASPEHDWRVLIARLQFHLVVGGHGVGVSAVAPAIFLAGSRIPDLYVLLLSSRFHCFFLYIICPVVPLPLMP

SEQ ID NO: 24769 - protein, 193 aa, Zea mays subsp. mays
  misc_feature (1)..(193): Ceres Seq. ID no. 12454795
TSTPDSTTVYSSRAPPPQQCSRTPPACWPPPWPAWRWRWRHPRTRRGRRCRRARRSLCRARGTSTPRPRRRPRRPAAGRSGRQRPTRRRASAPCCSTGPRCGRSAWRPSRAWSSPGGATSPPTPPPAPPPEAQPRAAVLLHLQLPPAALPPPPLSSSVAKPTANGGGVARRLSMTGASSLLGFSFIWWWAVMA

SEQ ID NO: 24770 - DNA, 1318 bp, Zea mays subsp. mays
  misc_feature (1)..(1318): Ceres Seq. ID no. 12454822
gcacgagaccattacctagaacatcctaatcgaaaaagacacagatagctagaacacgagcagaggatggctaggcctaggccgtcggtcgtcgtcctcgcggtggccgtcgccgtcgccgtggcgtccctcgcgcagcccggcgcggccgacctgaagctggactactacgcgagcacctgccccaacgcggaggccatcgtgcgcggcgtggtgcagcagcgactgcaggccaccatccgggccgtcggctccaccgtccgcctcttcttccacgactgcttcgtcgagggttgcgacggctcggtgctgatcgaatccacgcccggcaaccaggccgagaaggacgcctccgacaacaagtccctcgcgtccgaaggcttcgacaccgtgcggagcgccaaggccgccgtcgaggccgcctgcccggacacggtctcctgcgccgacgtgctcgccattgccgctcgggacgccatctccatgagtggcgggcctttcttcccagtggagctgggcaggctggacggcctgagctccaccgccagcagcgtgccaggccagctgcccgaggccaaccagaccatggaccagctgctggcagtcttcaaggcacacgggctcaacatgtcacgacctcgtcgcgctctcagcggcgcacagcgtggggctggcgcactgcagcaagttcgcgagccggctgtacagctaccagctgccggggcagccgacggacccgacgctgaaccccaagtacgcgcggttcctggagagcaagtgccccgacggcgggcccgacaacctggtgctcatggaccaggcctcgccggcgcagttcgacaaccagtactaccgcaacctccaggacggcggcgggctgctgggctccgaccagctgctctacaccgacaaccggacgcgccccatggtggactcgctggccaacagcaccgccgccttctaccgcgccttagccgacgccgtcgtccggctcggccgcgtcggggtcaagtccggcaggcggggcaacgtccgcaagcagtgcgacgtgttcaactgacagggaaatcgtgttcaacctccggaagattcatttgatttgggtgttttgcttgtaatgcagctgttctctttgattcgttgcatagcacgcggttgctgattcttaaacttgtgtgtggtaattattcagcaattagttgttctacaaagtggtgaataatggttctgcctgctttgtcatagagtaaaaccccaaatagcagccaaaattagatcatacatagatacagttgatttcactgtaatttgaatactc

SEQ ID NO: 24771 - protein, 343 aa, Zea mays subsp. mays
  misc_feature (1)..(343): Ceres Seq. ID no. 12454823
MARPRPSVVVLAVAVAVAVASLAQPGAADLKLDYYASTCPNAEAIVRGVVQQRLQATIRAVGSTVRLFFHDCFVEGCDGSVLIESTPGNQAEKDASDNKSLASEGFDTVRSAKAAVEAACPDTVSCADVLAIAARDAISMSGGPFFPVELGRLDGLSSTASSVPGQLPEANQTMDQLLAVFKAHGLNMSRPRRALSGAQRGAGALQQVREPAVQLPAAGAADGPDAEPQVRAVPGEQVPRRRARQPGAHGPGLAGAVRQPVLPQPPGRRRAAGLRPAALHRQPDAPHGGLAGQQHRRLLPRLSRRRRPARPRRGQVRQAGQRPQAVRRVQLTGKSCSTSGRFI

SEQ ID NO: 24772 - protein, 204 aa, Zea mays subsp. mays
  misc_feature (1)..(204): Ceres Seq. ID no. 12454824
MSGGPFFPVELGRLDGLSSTASSVPGQLPEANQTMDQLLAVFKAHGLNMSRPRRALSGAQRGAGALQQVREPAVQLPAAGAADGPDAEPQVRAVPGEQVPRRRARQPGAHGPGLAGAVRQPVLPQPPGRRRAAGLRPAALHRQPDAPHGGLAGQQHRRLLPRLSRRRRPARPRRGQVRQAGQRPQAVRRVQLTGKSCSTSGRFI

SEQ ID NO: 24773 - DNA, 1287 bp, Zea mays subsp. mays
  misc_feature (1)..(1287): Ceres Seq. ID no. 12454845
actttctcttcagttcaacttccgactttccgagtcgtcacctcacctaccggctaccgaggaagcagaagcgcacgagcgagacgcagccaccgcccgggaggaggaggaagccaagagcaatcggactttgaatggctcgcgacggcggcagcagagggtcaccgggggcggagcggcggcgggtggcgctgcgtgccctcctcgcgtcgggtggcgcggaggcggaggccgcgaggacgtcgagcaagggcctgctacgcggccttcggtgcacgtccgcggccgcatcgcaggctatcgcgccggagatcccgcggcctccggcggactggcgcggactcggttgcgccgcggcggcccaggcgcacgcgccggctgccgcggtggaagcggcccggcccacggcggactggcgcaggcttgggtgcgcggctggagcggcaccggcggtccaggctcaagcgccccggcgttccgaggagtggcgcgtgaggcggcggaggaacgagagggagaggcggaaggcgagggctggcggcgtcagtggtggtggtggggccagtgccgggatgggcgtcggcggggacgtctggtgcacgccgggcataccgttcgccgccgaggcctcttcggtggactgcgtggtggcgccgcaccatacggtggccgcgcgccgccgcgccgaggccgacaggccgcggagagagatgatgttccagacaaggatgttattgggaagaatgggtatttatgatcagtatcaggattggcgcctcgatgtcgacaacatgacatatgaggagttgctcgatcttgaggaccggattggatatgtaagtacagggcttcgtgaggacgagatcattcaaagccttaggatggtaaagtactccgcgttcaaccccagacatttttctacggaaatggacaggagatgtagcatctgtcaagaagagttcgaagtacacgaggaaactgggaagctgagctgtggccacagctatcacgtgcactgcataaagcagtggctttctcggaagaacgcttgtccggtttgcaagaccactgtctcgaagacctgaagtccctattctttctagtgtctgaaccacactttcattaagtataatccaattgaaatgcaaaagattagttctattgttgctgtacagtccagcagccgtctgcacgcacgcttgttgagtacagtatctagtacacgcacgcttgctgtacacacatgatcctagtatttatttgcatatggaacttacaatttttttc

SEQ ID NO: 24774 - protein, 316 aa, Zea mays subsp. mays
  misc_feature (1)..(316): Ceres Seq. ID no. 12454846
MARDGGSRGSPGAERRRVALRALLASGGAEAEAARTSSKGLLRGLRCTSAAASQAIAPEIPRPPADWRGLGCAAAAQAHAPAAAVEAARPTADWRRLGCAAGAAPAVQAQAPRRSEEWRVRRRRNERERRKARAGGVSGGGGASAGMGVGGDVWCTPGIPFAAEASSVDCVVAPHHTVAARRRAEADRPRREMMFQTRMLLGRMGIYDQYQDWRLDVDNMTYEELLDLEDRIGYVSTGLREDEIIQSLRMVKYSAFNPRHFSTEMDRRCSICQEEFEVHEETGKLSCGHSYHVHCIKQWLSRKNACPVCKTTVSKT

SEQ ID NO: 24775 - protein, 251 aa, Zea mays subsp. mays
  misc_feature (1)..(251): Ceres Seq. ID no. 12454847
LSLQFNFRLSESSPHLPATEEAEAHERDAATAREEEEAKSNRTLNGSRRRQQRVTGGGAAAGGAACPPRVGWRGGGGREDVEQGPATRPSVHVRGRIAGYRAGDPAASGGLARTRLRRGGPGARAGCRGGSGPAHGGLAQAWVRGWSGTGGPGSSAPAFRGVAREAAEEREGEAEGEGWRRQWWWWGQCRDGRRRGRLVHAGHTVRRRGLFGGLRGGAAPYGGRAPPRRGRQAAERDDVPDKDVIGKNGYL

SEQ ID NO: 24776 - protein, 170 aa, Zea mays subsp. mays
  misc_feature (1)..(170): Ceres Seq. ID no. 12454848
MGVGGDVWCTPGIPFAAEASSVDCVVAPHHTVAARRRAEADRPRREMMFQTRMLLGRMGIYDQYQDWRLDVDNMTYEELLDLEDRIGYVSTGLREDEIIQSLRMVKYSAFNPRHFSTEMDRRCSICQEEFEVHEETGKLSCGHSYHVHCIKQWLSRKNACPVCKTTVSKT

SEQ ID NO: 24777 - DNA, 1463 bp, Zea mays subsp. mays
  misc_feature (1)..(1463): Ceres Seq. ID no. 12454872
aggtgcagtcagtcagtcaggcagagaaacgtgcggaggtggaagccacaacgggagcgcctaccctcgcagtccgcccctcgacctcggagccgcagcccgcgaggagcgttcacaatcacaccggccaccgcggaccctagcgctttagccttatccgtccgagcgcgcgcccgatgcagacggaggcgcgcgtgggcgtcgtcgtcgacggcggcgccgccgtgggccggtgccaggagcagcgccacatcggcacggcggcgcacctcgccgccggaggcttcgcgggcgccgtcagcaagacgtgcaccgcccccctcgcgcggctcaccatcctcttccaggtagctggtatgcattcagatgttgcgactctaaggaagtgtagcatatggcatgaggcttcacgaatttttcgagaagaagggattgaagccttttggaaaggaaatctagtgacaattgtacatcgcttgccttattctgccatcagcttctattcgtatgagcgctacaaaaatcttctccaaacggttcctggcctggatagagactcaaataatgttggtgttgtacgtttgcttggtggtggtttggcgggaataactgctgcatctttaacttacccgttggatgttgttcgtactcgcttggcgacgcagaaaaccactaggtattacaagggcatcttccatgcggtgtccacaatttgtagagacgagggtgtcaaaggattgtataaaggccttggggccacgttattgggagttggacctagtatagcaatcagcttttctgtctatgaatcactaaggtcttattggcaaatggaaaggccccatgattcaactgcagttgttagcttgttttctgggagtctatctggtattgcatcatctacagccacatttccccttgatcttgtaaagcgacggatgcaacttcaaggagcagctgggacagcgtccgtccagaaatcaaccatatctggaactgtccgtgatatcttgcagagagaaggtctccgtggcttctacagaggtatcgcccctgagtacctcaaggtcgttcctagtgttggaatcgccttcatgacatacgagacactgaagggcttgctctccagcattgacatagacgatgagagctgaggtttcccattatacgaagaggttaaacttcaccggattttttggccataggttaccatcagaatgtatgtaagtgcatcagagtggttacacgaacggcattgtggcagttttgtagttgacggtaggtcaaagcttacctgaggtgtacaactagtcttgtgttgtaccataggctaaacagagcaaataagcgcttcatgatggagtcttcatcttgtgttcctttgtacattatgctccatcaaggaagagcaaaaaaaaaaaaaaaagaagaagaagaaggtgaaagtcaatgattttataggt

SEQ ID NO: 24778 - protein, 325 aa, Zea mays subsp. mays
  misc_feature (1)..(325): Ceres Seq. ID no. 12454873
MQTEARVGVVVDGGAAVGRCQEQRHIGTAAHLAAGGFAGAVSKTCTAPLARLTILFQVAGMHSDVATLRKCSIWHEASRIFREEGIEAFWKGNLVTIVHRLPYSAISFYSYERYKNLLQTVPGLDRDSNNVGVVRLLGGGLAGITAASLTYPLDVVRTRLATQKTTRYYKGIFHAVSTICRDEGVKGLYKGLGATLLGVGPSIAISFSVYESLRSYWQMERPHDSTAVVSLFSGSLSGIASSTATFPLDLVKRRMQLQGAAGTASVQKSTISGTVRDILQREGLRGFYRGIAPEYLKVVPSVGIAFMTYETLKGLLSSIDIDDES

SEQ ID NO: 24779 - protein, 265 aa, Zea mays subsp. mays
  misc_feature (1)..(265): Ceres Seq. ID no. 12454874
MHSDVATLRKCSIWHEASRIFREEGIEAFWKGNLVTIVHRLPYSAISFYSYERYKNLLQTVPGLDRDSNNVGVVRLLGGGLAGITAASLTYPLDVVRTRLATQKTTRYYKGIFHAVSTICRDEGVKGLYKGLGATLLGVGPSIAISFSVYESLRSYWQMERPHDSTAVVSLFSGSLSGIASSTATFPLDLVKRRMQLQGAAGTASVQKSTISGTVRDILQREGLRGFYRGIAPEYLKVVPSVGIAFMTYETLKGLLSSIDIDDES

SEQ ID NO: 24780 - DNA, 1656 bp, Zea mays subsp. mays
  misc_feature (1)..(1656): Ceres Seq. ID no. 12454875
atctcctctcctgccaggtcacggcctaattcgtggaattttgtttggtggtgcatatctccagtcaagtcttggccaagattttagctatctccggtcaaaaggctttaccgattcttggattggtggcttcttgggggcgagaagccggttcctgtttcgtctcttgtgctccagcatgttctgtagcacaccggttccccatctccagtgaaggtgttcgtgtgctcttggttttgtgcctcccggaatcgttcccggaaagctacttttggccgctgcggcgatggcgtcgagcaccagcgagatggccgaggggaaggagaagctgaagaggtccggcagcttgggaagcaacgatacgtatgtgcgtgcagacaagattgatcttacgagcctcgacatccagctggagaaccagctcaccaagacctggggcaaagccaatctcaaatcccaggggccaaaggaggagtgggagatcgaccttgcaaagctggagatccgctatgtcatcgctcaggggacgtatggcacggtctaccggggcacctacgatggacaggacgtcgcagtgaagcttttggattggggagaagatggttttgccacagaggctgaaactgctgctttacgaacatcatttaagacggaggttgctgtttggcataagctcagccaccctaatgttacaaagtttgttggtgcatctatggggaccacagaccttaagattccatcaaacaattccaatggtgctgcacgtacaaatttgccagcaagagcatgttgtgttgtggtagagtatcttgctggaggaactttgaagcaatatttgataaagaatagccgacggaagcttgcttataaagttgtggtccagcttgcattggatttggccagaggattgagctatctgcactccagaaagattgtacatcgggatgtgaaaagcgaaaacatgctgcttactccacagagaaaccttaagattgccgatttcggtgttgctcgtgttgaggctcagaatccaaaggacatgactggtgcaacaggcacacttggttatatggctccagaggttcttgatggtaagccatacaacaggaagtgtgatgtttatagttttggcatttgtttatgggaaatctattgctgtgacatgccttacccagacctaagttttgccgatgtctcatctgccgttgttcaccagaatttgcgcccagacattcctcgctgctgcccaagcgcatttgcgaatgttatgcggaaatgctgggatgcaaaccctgataaacgccctgatatggatgaagtggtgcagcttttagaggctctggacacgagcaaaggcggtggcatgatacctgatggccaatcatcaggatgcttatgcttcacaaaggctcgtggtccatagatacttttcatggtactcccttcccttggcaacactttccccgtgtaaatgactgggccacagcatgcttctctttgcacgacctgtgcagtcgtcgcttacagttctccatagctgccttgcgatcattgcgtgtcaacctgtagctctcatacgatttttgctgtcctctgtcgacaatcttttcatatactagtgtgctgctgtaattgtggttctaaaagagatttggc

SEQ ID NO: 24781 - protein, 378 aa, Zea mays subsp. mays
  misc_feature (1)..(378): Ceres Seq. ID no. 12454876
MASSTSEMAEGKEKLKRSGSLGSNDTYVRADKIDLTSLDIQLENQLTKTWGKANLKSQGPKEEWEIDLAKLEIRYVIAQGTYGTVYRGTYDGQDVAVKLLDWGEDGFATEAETAALRTSFKTEVAVWHKLSHPNVTKFVGASMGTTDLKIPSNNSNGAARTNLPARACCVVVEYLAGGTLKQYLIKNSRRKLAYKVVVQLALDLARGLSYLHSRKIVHRDVKSENMLLTPQRNLKIADFGVARVEAQNPKDMTGATGTLGYMAPEVLDGKPYNRKCDVYSFGICLWEIYCCDMPYPDLSFADVSSAVVHQNLRPDIPRCCPSAFANVMRKCWDANPDKRPDMDEVVQLLEALDTSKGGGMIPDGQSSGCLCFTKARGP

SEQ ID NO: 24782 - protein, 371 aa, Zea mays subsp. mays
  misc_feature (1)..(371): Ceres Seq. ID no. 12454877
MAEGKEKLKRSGSLGSNDTYVRADKIDLTSLDIQLENQLTKTWGKANLKSQGPKEEWEIDLAKLEIRYVIAQGTYGTVYRGTYDGQDVAVKLLDWGEDGFATEAETAALRTSFKTEVAVWHKLSHPNVTKFVGASMGTTDLKIPSNNSNGAARTNLPARACCVVVEYLAGGTLKQYLIKNSRRKLAYKVVVQLALDLARGLSYLHSRKIVHRDVKSENMLLTPQRNLKIADFGVARVEAQNPKDMTGATGTLGYMAPEVLDGKPYNRKCDVYSFGICLWEIYCCDMPYPDLSFADVSSAVVHQNLRPDIPRCCPSAFANVMRKCWDANPDKRPDMDEVVQLLEALDTSKGGGMIPDGQSSGCLCFTKARGP

SEQ ID NO: 24783 - protein, 236 aa, Zea mays subsp. mays
  misc_feature (1)..(236): Ceres Seq. ID no. 12454878
MGTTDLKIPSNNSNGAARTNLPARACCVVVEYLAGGTLKQYLIKNSRRKLAYKVVVQLALDLARGLSYLHSRKIVHRDVKSENMLLTPQRNLKIADFGVARVEAQNPKDMTGATGTLGYMAPEVLDGKPYNRKCDVYSFGICLWEIYCCDMPYPDLSFADVSSAVVHQNLRPDIPRCCPSAFANVMRKCWDANPDKRPDMDEVVQLLEALDTSKGGGMIPDGQSSGCLCFTKARGP

SEQ ID NO: 24784 - DNA, 2509 bp, Zea mays subsp. mays
  misc_feature (1)..(2509): Ceres Seq. ID no. 12454879
ctacaaatccatagcgacactattattatctcaccttccttcagttacctggcagctcgggcagcgcagggaaccaattgcagagagcaagcatatccaacgcaattaaatgagtgtgctaaactcgctggggatcctactcctgctcacggcgccggcgtttgcggcggcactgtcggcggatgggctttcgctactggccttcaagtcggcggtgaccgacgatccgtccatggctctctcgtcgtggtccgacgctgatgcggacccgtgccgctggctgggcgtcacctgcgtcaacacctcgtccagcgacggactgcgcgtcgtaggggtggccgtcgccggcaagaacctgtccggctacatccccgccgagcttgggtcgctcgcgtttctacgccggctcaacctccacgggaaccgcctgtcaggaaccgtccccgccgcgctcgccaacgccaccggcctgcactccctctttctctacgataaccgactcacggggccgttcccggccgcgctgtgtgggataccgaagctgcagaacctggacctgtcgcagaacgccttgacgggcgcgctgccgctggagcttggacgctgcaagcagctggagagattgcttctcgccgagaatgcgttatccggcaacataccggcggctgtctggcaggacatggtgggcctgcagatgctggacctatcgtccaacaacctcaccggagccataccagcagaactcggcaagctcgccgcgctcgccggcacgcttaacctctcccacaaccacctctccggcggggtgcccctcgagctcggtcggctcccggccaccgtcacgctcgacctccgcttcaacaacctctccggcgagattccgcagtccggctccctcgccagccagggccccaccgcgttcctcaacaacccggggatctgcggcttcccgctgcaggtcccctgccgcgtcgctccaccgtcgtcgtcgtcgtcgttgcccccaccgcctccgtcgtcctctgccactaccaacggcggcgcgggcggtgcacggctgccgatcaagaccagcctcatcgtgctaatctcggtggccgacgcggtggccgtcgcgttggtcggtgtcatcgtggtctgcgtgtactggaaggtctgcgaccggcgccgcgccgcgaaagacaaaggcgacgacagcgagtacgaggaagggtgcggcctgttcccttgcccgtgctgcatgcgcgccgacgcgtgcggcgactcgtcctcggaatgctccgaggtcgacggcaagtgcaacggtggcggagggaccggggagggcggctatctggtggcgatcgacaaggggttcaggatggaactggacgagctgctgaggtcgtcggcgtacgtgctgggcaagggcggtaaggggatcgtgtacaaggtggtggtgggcaacggcacgacgcccgtggctgtgcgccggctcggcggtggcaccgcggcgcccgagcgataccgggagttcgccgcggaggcgggcgccatcgggcgcgtgcgccaccccaacatcgtgaggctgcgcgcctactactggtccgccgacgagaagctcgttatcacggatttcgtcaacaacggcaacctcgcgacggcgttgcgcggccggtccggtcagccaagcctatcatggaccctacggctgcggatcgccaagggtgcggcacgcgggctagcgcaccttcacgagtgcagcccacgccggtttgtccatggcgaggtcaagccctccaacatcctgctggatgccgactacaacgcgctcgtcgccgacttcggcctcgcccgcctcctcaccatcgtcggttgcaccgacgtctactctgtggcaggctccggcggcatcatgggcagcgggctcccgtatgccagacctgccgctctaacggacagatcctgcagtgcgtatcgcgcccctgaggcacgcgcgccggggggtgcacagccgccgagccagaagtccgacgtgtactcgttcggcgtcctgttgctcgagctactcacggggaagccgccggagcatgcctcgccgtccgcgtcgtcctngtccatgccgggtcacaatgggcaacgggagctagagcaacaggctccggagctcgtgaggtgggtgcggcaggggttcgaagactcgcggccnctgtcggagttggctgatgccgccctcctgcgggacgctgccgcacggaaggaggttgttgcggcattccatctctcgctaaggtgcgtcgaggcggacccggagcgccgaccgcggatgaaggccgtgtcagatagcctggacaagatcggggcttgacttgtcaccgtcgacccaaaaatggttatgatgtggagttgtatattgttcgtaattatacttatcattattattgcttttctttctttatttttatgtcctatccttggatgcatggattgtagaaatatacactacgcgagctggcaccgaatttgctcc

SEQ ID NO: 24785 - protein, 745 aa, Zea mays subsp. mays
  misc_feature (1)..(745): Ceres Seq. ID no. 12454880
  misc_feature (662)..(662): Xaa is any aa, unknown or other
  misc_feature (693)..(693): Xaa is any aa, unknown or other
MSVLNSLGILLLLTAPAFAAALSADGLSLLAFKSAVTDDPSMALSSWSDADADPCRWLGVTCVNTSSSDGLRVVGVAVAGKNLSGYIPAELGSLAFLRRLNLHGNRLSGTVPAALANATGLHSLFLYDNRLTGPFPAALCGIPKLQNLDLSQNALTGALPLELGRCKQLERLLLAENALSGNIPAAVWQDMVGLQMLDLSSNNLTGAIPAELGKLAALAGTLNLSHNHLSGGVPLELGRLPATVTLDLRFNNLSGEIPQSGSLASQGPTAFLNNPGICGFPLQVPCRVAPPSSSSSLPPPPPSSSATTNGGAGGARLPIKTSLIVLISVADAVAVALVGVIVVCVYWKVCDRRRAAKDKGDDSEYEEGCGLFPCPCCMRADACGDSSSECSEVDGKCNGGGGTGEGGYLVAIDKGFRMELDELLRSSAYVLGKGGKGIVYKVVVGNGTTPVAVRRLGGGTAAPERYREFAAEAGAIGRVRHPNIVRLRAYYWSADEKLVITDFVNNGNLATALRGRSGQPSLSWTLRLRIAKGAARGLAHLHECSPRRFVHGEVKPSNILLDADYNALVADFGLARLLTIVGCTDVYSVAGSGGIMGSGLPYARPAALTDRSCSAYRAPEARAPGGAQPPSQKSDVYSFGVLLLELLTGKPPEHASPSASSXSMPGHNGQRELEQQAPELVRWVRQGFEDSRXLSELADAALLRDAAARKEVVAAFHLSLRCVEADPERRPRMKAVSDSLDKIGA

SEQ ID NO: 24786 - protein, 704 aa, Zea mays subsp. mays
  misc_feature (1)..(704): Ceres Seq. ID no. 12454881
  misc_feature (621)..(621): Xaa is any aa, unknown or other
  misc_feature (652)..(652): Xaa is any aa, unknown or other
MALSSWSDADADPCRWLGVTCVNTSSSDGLRVVGVAVAGKNLSGYIPAELGSLAFLRRLNLHGNRLSGTVPAALANATGLHSLFLYDNRLTGPFPAALCGIPKLQNLDLSQNALTGALPLELGRCKQLERLLLAENALSGNIPAAVWQDMVGLQMLDLSSNNLTGAIPAELGKLAALAGTLNLSHNHLSGGVPLELGRLPATVTLDLRFNNLSGEIPQSGSLASQGPTAFLNNPGICGFPLQVPCRVAPPSSSSSLPPPPPSSSATTNGGAGGARLPIKTSLIVLISVADAVAVALVGVIVVCVYWKVCDRRRAAKDKGDDSEYEEGCGLFPCPCCMRADACGDSSSECSEVDGKCNGGGGTGEGGYLVAIDKGFRMELDELLRSSAYVLGKGGKGIVYKVVVGNGTTPVAVRRLGGGTAAPERYREFAAEAGAIGRVRHPNIVRLRAYYWSADEKLVITDFVNNGNLATALRGRSGQPSLSWTLRLRIAKGAARGLAHLHECSPRRFVHGEVKPSNILLDADYNALVADFGLARLLTIVGCTDVYSVAGSGGIMGSGLPYARPAALTDRSCSAYRAPEARAPGGAQPPSQKSDVYSFGVLLLELLTGKPPEHASPSASSXSMPGHNGQRELEQQAPELVRWVRQGFEDSRXLSELADAALLRDAAARKEVVAAFHLSLRCVEADPERRPRMKAVSDSLDKIGA

SEQ ID NO: 24787 - protein, 555 aa, Zea mays subsp. mays
  misc_feature (1)..(555): Ceres Seq. ID no. 12454882
  misc_feature (472)..(472): Xaa is any aa, unknown or other
  misc_feature (503)..(503): Xaa is any aa, unknown or other
MVGLQMLDLSSNNLTGAIPAELGKLAALAGTLNLSHNHLSGGVPLELGRLPATVTLDLRFNNLSGEIPQSGSLASQGPTAFLNNPGICGFPLQVPCRVAPPSSSSSLPPPPPSSSATTNGGAGGARLPIKTSLIVLISVADAVAVALVGVIVVCVYWKVCDRRRAAKDKGDDSEYEEGCGLFPCPCCMRADACGDSSSECSEVDGKCNGGGGTGEGGYLVAIDKGFRMELDELLRSSAYVLGKGGKGIVYKVVVGNGTTPVAVRRLGGGTAAPERYREFAAEAGAIGRVRHPNIVRLRAYYWSADEKLVITDFVNNGNLATALRGRSGQPSLSWTLRLRIAKGAARGLAHLHECSPRRFVHGEVKPSNILLDADYNALVADFGLARLLTIVGCTDVYSVAGSGGIMGSGLPYARPAALTDRSCSAYRAPEARAPGGAQPPSQKSDVYSFGVLLLELLTGKPPEHASPSASSXSMPGHNGQRELEQQAPELVRWVRQGFEDSRXLSELADAALLRDAAARKEVVAAFHLSLRCVEADPERRPRMKAVSDSLDKIGA

SEQ ID NO: 24788 - DNA, 2189 bp, Zea mays subsp. mays
  misc_feature (1)..(2189): Ceres Seq. ID no. 12454883
ggtggcttctcattcattgttgattgattgatcctccccgcctcactcctttgtctcctcgcctcgtgctcgctcgctcccctcgccctggcgaggagggcagcagaaaccctagcggctcaggccgggcgggggttagatgctccaaggttcgagagggaagggtaggttagtggtgcgccatcgactatgggctgcgtcttcggccgggcggctgcgtcgtcctctgcagcgccgaagaagaagtggggcaaggggaggtcgtccccgcagcccgaagcggggtcgccctccgcagtcgccgccaccgacggggacgggaggccgcggcggcggctcgggggccgcagggcgtcgggacccaggcagggttgcgtccccgcggctgccgcggcggagcagctcgccgccggttggccaccgtggctcgttgcagtcgctggggaggccctccgcggctgggcgccgcgccgcgccgacacgttcgagaagcttaataagataggatcgggcacgtacagcaacgtgtaccgggcgagggacaccgtctctggccggatcgtcgctcttaaaaaggtccgcttcgataacctcgagccagaaagcgtcaagtttatggcccgggaaatactgatcctaaggagactcgaccaccccaacatcatcaaattagagggcttggtcacctccaggatgtcatgcagcctttaccttgtcttcgagtacatggagcatgatcttgctggtcttgcggcaagttgtgatgtcaagttcacgttgcctcagataaaatgttacatacagcagctgttgtcagggcttgagcattgtcatgacaataatgtattgcaccgggatatcaaggggtcaaacttgttgttggataataatgggattcttaagattgcggattttgggctggcaacattctttgatccacgacataaacgaccaatgacgagccgagtggtcacgctatggtaccgtccaccagaattgttacttggtgccactgagtatagtgtaggtgttgatttgtggagtgctggatgcattcttgcagagctcctgtatggaaagcccataatgcctgggcgcactgaggtggaacagttgcacaagattttcaagctatgtggttccccttctgaggagtactggaagaagtctaaattgccacacgcaacaatattcaaacctcaacaaccctataaacgttgcatcagggagacatttaaagattttcctacatcggctctgccattggttgaaactctgcttgcaattgatccagctgagcgacaaactgcctcagctgcattacacagtgattttttttcaaccgagccttatgcttgtaacccttcaagtctgccaacatatccaccaagcaaggagatggatgccaagttaagagacgaggaggctagaagactacgagcggctgcaaaggccaagggagaacagaaaaggactcgaccacgtgatcgatctcggagggctggaccagcaccagaagctaatgcagagattcaagcaaacttagaccagaggcgacgaatgataactcatgcaaatgcaaagagtaaaagtgagaagtttcctcctccgcatcaggatggaggtacgggtaatccgcttggatcctatcatcatatggagcctatgttcgagcaccaggatgcttccttcagtacagtagtccccatagagaaggggacctcacaaacatggtccgggccgttgtttgatccagcagctctcgggcagtcgaggcggaagaagcaaactaccctagatgctaaggctgctgcttactcaaagcagctccaaaaggaaaagggagggatacgagcccgataacaaaatgtcgttttcatggcctacagatgaattttcttgttttgttcctctggtggttggaaacaggcaacaatgcgctgctgtagggtgaagtctcccggattgtgtacatgtcatgtggtagcgtttccaagtactgtttagatgcttctgaacaagctgccgtcacccggacgggactttaggggtttgagactcgtatttgtgctctttatggcaattcagttgcccatgtgtatatatggagcaattctttcttgtgtatgtaaagagacggcggtagctttgatttcttaataatgaatcaagtgtgatggcgaccttcc

SEQ ID NO: 24789 - protein, 557 aa, Zea mays subsp. mays
  misc_feature (1)..(557): Ceres Seq. ID no. 12454884
MGCVFGRAAASSSAAPKKKWGKGRSSPQPEAGSPSAVAATDGDGRPRRRLGGRRASGPRQGCVPAAAAAEQLAAGWPPWLVAVAGEALRGWAPRRADTFEKLNKIGSGTYSNVYRARDTVSGRIVALKKVRFDNLEPESVKFMAREILILRRLDHPNIIKLEGLVTSRMSCSLYLVFEYMEHDLAGLAASCDVKFTLPQIKCYIQQLLSGLEHCHDNNVLHRDIKGSNLLLDNNGILKIADFGLATFFDPRHKRPMTSRVVTLWYRPPELLLGATEYSVGVDLWSAGCILAELLYGKPIMPGRTEVEQLHKIFKLCGSPSEEYWKKSKLPHATIFKPQQPYKRCIRETFKDFPTSALPLVETLLAIDPAERQTASAALHSDFFSTEPYACNPSSLPTYPPSKEMDAKLRDEEARRLRAAAKAKGEQKRTRPRDRSRRAGPAPEANAEIQANLDQRRRMITHANAKSKSEKFPPPHQDGGTGNPLGSYHHMEPMFEHQDASFSTVVPIEKGTSQTWSGPLFDPAALGQSRRKKQTTLDAKAAAYSKQLQKEKGGIRAR

SEQ ID NO: 24790 - protein, 415 aa, Zea mays subsp. mays
  misc_feature (1)..(415): Ceres Seq. ID no. 12454885
MAREILILRRLDHPNIIKLEGLVTSRMSCSLYLVFEYMEHDLAGLAASCDVKFTLPQIKCYIQQLLSGLEHCHDNNVLHRDIKGSNLLLDNNGILKIADFGLATFFDPRHKRPMTSRVVTLWYRPPELLLGATEYSVGVDLWSAGCILAELLYGKPIMPGRTEVEQLHKIFKLCGSPSEEYWKKSKLPHATIFKPQQPYKRCIRETFKDFPTSALPLVETLLAIDPAERQTASAALHSDFFSTEPYACNPSSLPTYPPSKEMDAKLRDEEARRLRAAAKAKGEQKRTRPRDRSRRAGPAPEANAEIQANLDQRRRMITHANAKSKSEKFPPPHQDGGTGNPLGSYHHMEPMFEHQDASFSTVVPIEKGTSQTWSGPLFDPAALGQSRRKKQTTLDAKAAAYSKQLQKEKGGIRAR

SEQ ID NO: 24791 - protein, 389 aa, Zea mays subsp. mays
  misc_feature (1)..(389): Ceres Seq. ID no. 12454886
MSCSLYLVFEYMEHDLAGLAASCDVKFTLPQIKCYIQQLLSGLEHCHDNNVLHRDIKGSNLLLDNNGILKIADFGLATFFDPRHKRPMTSRVVTLWYRPPELLLGATEYSVGVDLWSAGCILAELLYGKPIMPGRTEVEQLHKIFKLCGSPSEEYWKKSKLPHATIFKPQQPYKRCIRETFKDFPTSALPLVETLLAIDPAERQTASAALHSDFFSTEPYACNPSSLPTYPPSKEMDAKLRDEEARRLRAAAKAKGEQKRTRPRDRSRRAGPAPEANAEIQANLDQRRRMITHANAKSKSEKFPPPHQDGGTGNPLGSYHHMEPMFEHQDASFSTVVPIEKGTSQTWSGPLFDPAALGQSRRKKQTTLDAKAAAYSKQLQKEKGGIRAR

SEQ ID NO: 24792 - DNA, 1888 bp, Zea mays subsp. mays
  misc_feature (1)..(1888): Ceres Seq. ID no. 12454903
acactggcacgtactccagagacgagcgcgcgcgcgcggagcaggccgggtccataaattatgagctcgccctttggaaccgagaggcgtttcctacccaccttaccttatcattattagctccaagcaagtcgcacacgacacagacacacacacatcatcatcatcaacaacctgacatggccggcgacggggcggacgccgcgcacggcgcgtcggcgcggctggagggcgtgctgacggatgcgtcgaccccgtgggcgcggcgcgcgtggggcgcggccgccatcgagctgccgctgctgacgcggctggcggcgccggcggttgtgatgtacatgatcaactacctcatgtccatgtcgacgcagatcttctcgggccacctcggcaacctggagctcgccgccgcctcgctcggcaacaccggcgtgcagatgttcgcctacggactcatgctgggcatgggcagcgcggtggagacgctgtgcgggcaggcgtacggcgcccacaagtacgagatgctgggcatctacctgcagcggtcggccgtgctgctgtgcgcgacgggcgtgccgctggccgtgatctacggcttctcggagccgatcctggtgttcctggggcagtcgccggagatcgcccgcgcggcggccatcttcgtgtacggcctgatcccgcagatcttcgcgtacgccatcaacttcccgatccagaagttcatgcaggcagcagagcatcgtgctcccgagcgcgtacatctccaccgcgtcgctggcgctgcacctgctgctgagctgggtggtggtctacaaggtggggctgggcctgctgggggcctccctggtgctgagcctcagctggtggctcctcgtcgcggcgcagttcgcgtacatcgtgatgagccccaggtgccgccacacctggaccggcttcacctggcaggccttctcgggcctctgggacttcctcaagctctccgccgcgtccgccgtcatgctctgcctcgagacctggtactatcaggtcctggtgctcatcgccggcttgctccccaaccctgaacttgcattggacgcgctgtctgtatgcatgactgttaatgggtgggtgttcatgatcgcagtagggttcaacgccgctgccagcgtgagagtgagcaatgagctcggcgccggccaccccaagtccgcgtatttctcggtgtgggtagtgaccgcgctgtcgacgctcatatctatcatgctcggcgttctggtcctctgcctgcgcaactacatcagctacttgttcacggagggcgaggtggtgtccaacgcggtggccgatctctgcccgctgcttgccgtcacgctcgttctcaacggcatccagcctgtgctgtcaggtgtcgccgttgggtgcgggtggcagcagttcgtggcctacgtgaacattggctgctactacatagtcggcgtccccctcggcgccgtgctcgggttcgtcttcaagctcggtgtgaagggcatttgggctgggatgatcggagggacttgcatgcagacggctattctagtgtgggtcaccttgagaactgactggaacaaggaggtagaggaagcacatgaatangttgcacaagtgggaggctaacaagacgacggagccccttcttgcgggggtcagcaatgacaaataaataacgtaactgcgcgcggatgatcgatcgatccacaatatcaatcaatctccggccttcaccagtactagttcccttcatgcataatgttgggaactggcgtctttagattttctgtgcagtaaattaaatgaaccacggtaacgtcaatgtaaacgaatcacgcatgtttggtttgcttatttcttccgttttaatgcttaacgt

SEQ ID NO: 24793 - protein, 353 aa, Zea mays subsp. mays
  misc_feature (1)..(353): Ceres Seq. ID no. 12454904
TGTYSRDERARAEQAGSINYELALWNREAFPTHLTLSLLAPSKSHTTQTHTHHHHQQPDMAGDGADAAHGASARLEGVLTDASTPWARRAWGAAAIELPLLTRLAAPAVVMYMINYLMSMSTQIFSGHLGNLELAAASLGNTGVQMFAYGLMLGMGSAVETLCGQAYGAHKYEMLGIYLQRSAVLLCATGVPLAVIYGFSEPILVFLGQSPEIARAAAIFVYGLIPQIFAYAINFPIQKFMQAAEHRAPERVHLHRVAGAAPAAELGGGLQGGAGPAGGLPGAEPQLVAPRRGAVRVHRDEPQVPPHLDRLHLAGLLGPLGLPQALRRVRRHALPRDLVLSGPGAHRRLAPQP

SEQ ID NO: 24794 - protein, 294 aa, Zea mays subsp. mays
  misc_feature (1)..(294): Ceres Seq. ID no. 12454905
MAGDGADAAHGASARLEGVLTDASTPWARRAWGAAAIELPLLTRLAAPAVVMYMINYLMSMSTQIFSGHLGNLELAAASLGNTGVQMFAYGLMLGMGSAVETLCGQAYGAHKYEMLGIYLQRSAVLLCATGVPLAVIYGFSEPILVFLGQSPEIARAAAIFVYGLIPQIFAYAINFPIQKFMQAAEHRAPERVHLHRVAGAAPAAELGGGLQGGAGPAGGLPGAEPQLVAPRRGAVRVHRDEPQVPPHLDRLHLAGLLGPLGLPQALRRVRRHALPRDLVLSGPGAHRRLAPQP

SEQ ID NO: 24795 - protein, 244 aa, Zea mays subsp. mays
  misc_feature (1)..(244): Ceres Seq. ID no. 12454906
  misc_feature (238)..(238): Xaa is any aa, unknown or other
MSPRCRHTWTGFTWQAFSGLWDFLKLSAASAVMLCLETWYYQVLVLIAGLLPNPELALDALSVCMTVNGWVFMIAVGFNAAASVRVSNELGAGHPKSAYFSVWVVTALSTLISIMLGVLVLCLRNYISYLFTEGEVVSNAVADLCPLLAVTLVLNGIQPVLSGVAVGCGWQQFVAYVNIGCYYIVGVPLGAVLGFVFKLGVKGIWAGMIGGTCMQTAILVWVTLRTDWNKEVEEAHEXVAQVGG

SEQ ID NO: 24796 - DNA, 1914 bp, Zea mays subsp. mays
  misc_feature (1)..(1914): Ceres Seq. ID no. 12454931
aaggcccaactccactcatcgccactgcgccgaaacccaaagcggggaggaggagcggaaaagaaaaggaaaatgggaggagcggaagcaagtccgagcaagtcagaggatccgccggcctatctccgcctataaaatgccgtcccaccccccaccttcctagcagctgctctccaccaagagctgctggcaccaccaaaccaatcgctggatttgtccagagtatttccggtttcaccgccctagatctgacccgagacgccgcgtcttcgctgagatggcgattactgtgaggcggtcgacgatggtgcgcccggcgcgggagacgccgcggcagcggctgtggaactccaacctcgacctcgtggtgccgcgcttccacacgcccagtgtctacttctaccgccgcgacggccccgtgccggatgcggaggggttcttcgacggcgagcggatgcggcgcgcgctggcagaggcgctcgtgccgttctatccaatggcgggccgcctcgcgcgggacgaggacggtagggtcgagatcgactgcaatggcgagggagtgctcttcgtcgaggccgacgcgcccgatgcctctgtcgatgactacggtgacttcgcgcccaccatggagctcaagcgcctcatcccgaccgtcgattacaccgacgacatctcggccttctcgctactcgtgctccaggtgacttatttcaaatgtggaggcgtctcccttggtgttggcatgcaacaccatgcagcggatggcatgtctggcttgcacttcattaactcatggtctgacctctgccgtggagctcaaatttctgtcatgcccttcattgaccgcacccttcttcgtgctcgtgatccaccaactccatcttttcaacatatcgagtaccagcctgccccagctatgttgtcctccacaacccagttccttgcttccaagtcaaagccacctgccactgctgtggacattttcaagctcactcgctcagaccttggccggctgcgctcacagcttcctgcaggggaaggtgcaccccggttcagcacatatgcagtgctagcggcacatgtctggaaatgtgtctcccttgcacgcagcctacctcctgaacaacccaccaagttgtattgcgccactgatggccgtcaacggctacagcctccactaccagatgggtactttggcaatgtcatcttcaccgcgacaccacttgctgaggcgggcaaggtgaccagtgagctggcagaaggagcagcagtcatccagggagcactggataggatggacaacgactactgccgctcagcgttagactacctggatcttcaaccggatctgtcagcacttgtgcgtggagcgcataccttccgctgcccgaacctagggctcaccagctgggtgcgccttcctatccatgatgctgacttcggatggggccggcctgtgttcatggggccaggtggcattgcgtatgaaggtctggcgtttgtcctcccaagtgcaaatggcgacggcagcctgtccattgctatctcgttgcaggctgagcacatggagaagttccggaagctaatcggcggtgccaactgttgaaggaggatgtcatagggcgagagggattatgctccgcccaaattctcagataaaatactgaagtttcaagtgaacccagtggctgcactttcactttgaagacttgcagaggaaattcatggtcacttcattttgtgaggttaattatagagaaagggtagaaattatatgaagaaacatagtaaaaaatcattgttaggaacaaactccaatagcaggctctacttgtacgtcgcagacataagctgagactgatctgcgattgcaacagattatactcttctatcaggttgactgaagttccctcg

SEQ ID NO: 24797 - protein, 442 aa, Zea mays subsp. mays
  misc_feature (1)..(442): Ceres Seq. ID no. 12454932
MAITVRRSTMVRPARETPRQRLWNSNLDLVVPRFHTPSVYFYRRDGPVPDAEGFFDGERMRRALAEALVPFYPMAGRLARDEDGRVEIDCNGEGVLFVEADAPDASVDDYGDFAPTMELKRLIPTVDYTDDISAFSLLVLQVTYFKCGGVSLGVGMQHHAADGMSGLHFINSWSDLCRGAQISVMPFIDRTLLRARDPPTPSFQHIEYQPAPAMLSSTTQFLASKSKPPATAVDIFKLTRSDLGRLRSQLPAGEGAPRFSTYAVLAAHVWKCVSLARSLPPEQPTKLYCATDGRQRLQPPLPDGYFGNVIFTATPLAEAGKVTSELAEGAAVIQGALDRMDNDYCRSALDYLDLQPDLSALVRGAHTFRCPNLGLTSWVRLPIHDADFGWGRPVFMGPGGIAYEGLAFVLPSANGDGSLSIAISLQAEHMEKFRKLIGGANC

SEQ ID NO: 24798 - protein, 433 aa, Zea mays subsp. mays
  misc_feature (1)..(433): Ceres Seq. ID no. 12454933
MVRPARETPRQRLWNSNLDLVVPRFHTPSVYFYRRDGPVPDAEGFFDGERMRRALAEALVPFYPMAGRLARDEDGRVEIDCNGEGVLFVEADAPDASVDDYGDFAPTMELKRLIPTVDYTDDISAFSLLVLQVTYFKCGGVSLGVGMQHHAADGMSGLHFINSWSDLCRGAQISVMPFIDRTLLRARDPPTPSFQHIEYQPAPAMLSSTTQFLASKSKPPATAVDIFKLTRSDLGRLRSQLPAGEGAPRFSTYAVLAAHVWKCVSLARSLPPEQPTKLYCATDGRQRLQPPLPDGYFGNVIFTATPLAEAGKVTSELAEGAAVIQGALDRMDNDYCRSALDYLDLQPDLSALVRGAHTFRCPNLGLTSWVRLPIHDADFGWGRPVFMGPGGIAYEGLAFVLPSANGDGSLSIAISLQAEHMEKFRKLIGGANC

SEQ ID NO: 24799 - protein, 383 aa, Zea mays subsp. mays
  misc_feature (1)..(383): Ceres Seq. ID no. 12454934
MRRALAEALVPFYPMAGRLARDEDGRVEIDCNGEGVLFVEADAPDASVDDYGDFAPTMELKRLIPTVDYTDDISAFSLLVLQVTYFKCGGVSLGVGMQHHAADGMSGLHFINSWSDLCRGAQISVMPFIDRTLLRARDPPTPSFQHIEYQPAPAMLSSTTQFLASKSKPPATAVDIFKLTRSDLGRLRSQLPAGEGAPRFSTYAVLAAHVWKCVSLARSLPPEQPTKLYCATDGRQRLQPPLPDGYFGNVIFTATPLAEAGKVTSELAEGAAVIQGALDRMDNDYCRSALDYLDLQPDLSALVRGAHTFRCPNLGLTSWVRLPIHDADFGWGRPVFMGPGGIAYEGLAFVLPSANGDGSLSIAISLQAEHMEKFRKLIGGANC

SEQ ID NO: 24800 - DNA, 2270 bp, Zea mays subsp. mays
  misc_feature (1)..(2270): Ceres Seq. ID no. 12454959
ccatcgccagggcgtcggatcggagcgagctcattctcaactcgactcaagagctctgcctcctccatctccccttctctggcctccggagccacgctgagagatggaggcgaatcccaagaacaccttcacgatcaaagtggaggacgggaagcccgggaaggacggccggctggcggtcggaccggtgttccggagcgttctggccaaggatgggttcccgcagcttgagcctgacatgaagacatcatgggacgtgttcagggtagcagcagtcaagtatgccgacaaccggatgctcggatggcgtccgttcaaagatggagtgccagggccctacttgtggaaatcatacaaggagatctacgacgaggtgctgcaagcaggctctgcgttgcagaagctgggagtgcagccaggttcccgggtggggatctacggagcgaactgtcctcagtggatagtggcaatgcaggcttgcaatggctatagtctagtctgtgtcccactgtacgatactttaggtgcgggagctgtcgactacatcatcgatcatgccgagatcgatgttgtcttcatacaggacaagaaaataaaagagatactgtccccaaactgcaagtctgccaagagactgaaagcattggtggcgttcacttcggcgacaactgaacagaacaaagaagcggatcaaattgggatcaaaatgtatgcctgggacgatttcttgaaagtggggaaggataatcctcgtcaaccttgccctccgcaagcaagtgacatctgcactgtcatgtacacgagtgggacaagcggacagcccaaaggtgtgatgctgacccatgaaagccacgccatgtatgtgaaaggggtggacctcttcatggaccagtttgatgataagatgacaacagatgatgtcttcctgtcgtttctcccgcttgctcacatccttgaccgcatgatcgaagagtatttctttcacaaaggggcctcaattggctactaccacggagatctgaatgccttgagggacgacattgtggagctgaagccgactttactggttggggtgccccgagtgtacgaaaggatttatgaaggtatcttgaaggccattgcggaactcagacctctaagaagggtcatctttaatgctttgtacaaccgcaaactggcaagcatgaaagcaggctactcgcacaaaaccgcttcacctttcgcggacatgctggtttttcgcaaggtcaaggcaaggcttggaggtcgtcttcgcttactgatttcaggaggggctccgttgagtaatgagatcgaggagttcatgagagtgaccacctgtgcatacttcatccaaggctatggtttaacagaaacactgggacctagcactgtctgctacatcgacgacatggccctggtcggaagcgctggtgtgcctgccacctacaccgaaattcggctggaagaagtgcccgagatgggctatgatccactcggcgtcccttcgcgtggtgaaatctgcatccgggggaaatccctcttcgctgggtactacaaaagtccagaactcacaaacgaagccatcgttgatgggtggtttcatacaggtgacattggagagatgaccccagacgggatcttgaaggtttgacagaaaaaagaacatatttaagctgtcacaaggggagtatgttgcggttgagtacctggagaaagtatatggcttccctccactcgttgaagatatctgggtatacggggacagtttcagatcaagtttagttgcagtagtcaatccacaccaagaaaacacaatgaagtgggcagagtccaatggctacaagggttcttttgatgaaatctgcaaacttgaaggactcaaagagtacatcctgaaagagctggcagccgttgcgcagaagaacaagctacgaggcttcgagtacatcaaaggcgtagtgttggatcctgtgccttttgacatcgagagggatttggtgactgcaacaatgaagaagaagagaaagaatatgctgaactattaccagtctgagattgacacaatatacaaaaagctggaggcgcagaagagtgctgccagagctaagtgaagagatgtgccctattcgaccatcagctgaaaacaagggaaacgacaccgttgtaaatttcacattaatattgcgaagtaacaactcagggctatgagtaaggaataaaatgtatattgtgcctttgtctatagtatcggatgattcccaaatctc

SEQ ID NO: 24801 - protein, 516 aa, Zea mays subsp. mays
  misc_feature (1)..(516): Ceres Seq. ID no. 12454960
MEANPKNTFTIKVEDGKPGKDGRLAVGPVFRSVLAKDGFPQLEPDMKTSWDVFRVAAVKYADNRMLGWRPFKDGVPGPYLWKSYKEIYDEVLQAGSALQKLGVQPGSRVGIYGANCPQWIVAMQACNGYSLVCVPLYDTLGAGAVDYIIDHAEIDVVFIQDKKIKEILSPNCKSAKRLKALVAFTSATTEQNKEADQIGIKMYAWDDFLKVGKDNPRQPCPPQASDICTVMYTSGTSGQPKGVMLTHESHAMYVKGVDLFMDQFDDKMTTDDVFLSFLPLAHILDRMIEEYFFHKGASIGYYHGDLNALRDDIVELKPTLLVGVPRVYERIYEGILKAIAELRPLRRVIFNALYNRKLASMKAGYSHKTASPFADMLVFRKVKARLGGRLRLLISGGAPLSNEIEEFMRVTTCAYFIQGYGLTETLGPSTVCYIDDMALVGSAGVPATYTEIRLEEVPEMGYDPLGVPSRGEICIRGKSLFAGYYKSPELTNEAIVDGWFHTGDIGEMTPDGILKV

SEQ ID NO: 24802 - protein, 471 aa, Zea mays subsp. mays
  misc_feature (1)..(471): Ceres Seq. ID no. 12454961
MKTSWDVFRVAAVKYADNRMLGWRPFKDGVPGPYLWKSYKEIYDEVLQAGSALQKLGVQPGSRVGIYGANCPQWIVAMQACNGYSLVCVPLYDTLGAGAVDYIIDHAEIDVVFIQDKKIKEILSPNCKSAKRLKALVAFTSATTEQNKEADQIGIKMYAWDDFLKVGKDNPRQPCPPQASDICTVMYTSGTSGQPKGVMLTHESHAMYVKGVDLFMDQFDDKMTTDDVFLSFLPLAHILDRMIEEYFFHKGASIGYYHGDLNALRDDIVELKPTLLVGVPRVYERIYEGILKAIAELRPLRRVIFNALYNRKLASMKAGYSHKTASPFADMLVFRKVKARLGGRLRLLISGGAPLSNEIEEFMRVTTCAYFIQGYGLTETLGPSTVCYIDDMALVGSAGVPATYTEIRLEEVPEMGYDPLGVPSRGEICIRGKSLFAGYYKSPELTNEAIVDGWFHTGDIGEMTPDGILKV

SEQ ID NO: 24803 - protein, 452 aa, Zea mays subsp. mays
  misc_feature (1)..(452): Ceres Seq. ID no. 12454962
MLGWRPFKDGVPGPYLWKSYKEIYDEVLQAGSALQKLGVQPGSRVGIYGANCPQWIVAMQACNGYSLVCVPLYDTLGAGAVDYIIDHAEIDVVFIQDKKIKEILSPNCKSAKRLKALVAFTSATTEQNKEADQIGIKMYAWDDFLKVGKDNPRQPCPPQASDICTVMYTSGTSGQPKGVMLTHESHAMYVKGVDLFMDQFDDKMTTDDVFLSFLPLAHILDRMIEEYFFHKGASIGYYHGDLNALRDDIVELKPTLLVGVPRVYERIYEGILKAIAELRPLRRVIFNALYNRKLASMKAGYSHKTASPFADMLVFRKVKARLGGRLRLLISGGAPLSNEIEEFMRVTTCAYFIQGYGLTETLGPSTVCYIDDMALVGSAGVPATYTEIRLEEVPEMGYDPLGVPSRGEICIRGKSLFAGYYKSPELTNEAIVDGWFHTGDIGEMTPDGILKV

SEQ ID NO: 24804 - DNA, 2494 bp, Zea mays subsp. mays
  misc_feature (1)..(2494): Ceres Seq. ID no. 12454970
actccaccccctcccccgctgctccaaaaggcgggcaccaaacaccaacccgagccccgagcacgagcgcccaaccaaatggcgccgcacaccaccgctggaggcgggggcggagccgaggatgaggtgtccgaggcggcggctgcatcccccgccctgcggcaccgccacgcgggcaagggcgaggggctgggcggcaatggcggcgctggggccgacggccaggcgtccgtggagcgggtgttcgcggacaaggcggtgccgtcgtggcgggagcagctcacgctgcgggcattcgtcgtcagcgcgctgctggccgtcatgttcagcgtcatagtcatgaagctcaatctcaccacggggatcatcccctccctcaatgtctccgcggggctgctcggcttcttcttcgtccgcatgtggaccgccgccgccgagaggatgggcttcctccgccagcccttcaccaggcaggagaacaccgtcatccagacctgcgttgtctctgcctacggcatcgccttcagcggtggctttggcagttatctatttggaatgagtgacaaaatagctaaacaagcaacagaggctaaagatgctaataacataaaggatcctcaccttggatggatgatagggttcctattccttgtcagttttattggtctctttgcacttgtacccctaagaaagattatgattgttgactacaagttgacctatccaagtggcacagccactgcatatctcatcaacggttttcacacacctgagggagccaagcttgcaaagaagcaagtaaagacgttgggcaagtactttgtgtttagctttttctggggcttttttcagtggttctacactgcaggggatgagtgtggattcaaaaattttccaacattgggccttgaagcttataacaataggttcttctttgacttctctcctacatacgttggagttggcatgatctgcccatacatcgtgaatgtgtctgttctgctgggtggtttcctctcatggggtttaatgtggcctctcattgccaagaagaaggggagttggtacccagctaacctggaagactcaagtttacatgggttgcaggcttacagggttttcatttccatcgctttgatccttggggacggtttatacaacttcattaaggtgctgatccgcacaattgcgggtttcatatcaatggtgcagcaaaattcaaaaagcatgcttcctgtttcggacaatggcagttccatgtccagtatggaggctgtatcctttgacgatgaacgtcgcattgagaattttctgaaagatcagattcccaagtcagttgcatacgggggctatgttgcagttgctgctatatctattggcacccttcctcagatcttcccgcagctcaagtggtactacattttagtagcctacgtcgtggcacctgtgctggccttctgcaatgcttatggaagtggcctcactgactggtctctcgcctccacctacggcaagctcgctatcttcgtgttcggtgcatgggctggcctctcacacggtggcgtgctcgttgggctcgcagcttgtggtgtcatgatgagcatcgtgtcgaccgcctcagacctgatgcaagacttcaagaccgggtacctgacgctggcgtcaccgaggtctatgttcatcagccaggtgattggcaccggaatggggtgtgtcatcgggccctgcatcttctggctcttctacaaggcgttcggtgacattggcgagagcggcaccgagtacccggcgccctatgccatcgtgtaccgcaacatggccatcctcggcgtggatggcttcggctcgctcccgaaaaactgcctcatcctctgctacattttctttgcggcagcgatcactatcaaccttgtcagggacctgaccccctacaaggtgtcgaggttcatcccgctgccaatggcaatggcgattccgttctacatcgggtcctacttcgccattgacatgtttctgggcagcgcgatcctcttcgtgtgggagcggctgaacaaggcgaaagcggacgcattcggacctgcggtcgcgtcggggctgatctgcggagacggcatctggaccctgccgcagtccattctggccctcgccaaggtgcagccccccatttgcatgaagtttttgtccagatcgaccaatgccaaggtggacagcttcctcggcttgtcatgattttacacagaatggcaagtagacacgccctcatcctgtaattattggtgcaagatgcaatcaccaggctacagctctgtaaaagagaagaggttttgctgtggagtgaccaaagctttgtccgtgtagtctgtgtcaagaggaaaatactcaatggccctctgcctttttttgtgcaattattaactagcgtattcacagttataggtatttttgaaatgtgaaacgttcactacaaatttttttttaacgaatggagcttttg

SEQ ID NO: 24805 - protein, 742 aa, Zea mays subsp. mays
  misc_feature (1)..(742): Ceres Seq. ID no. 12454971
TPPPPPLLQKAGTKHQPEPRARAPNQMAPHTTAGGGGGAEDEVSEAAAASPALRHRHAGKGEGLGGNGGAGADGQASVERVFADKAVPSWREQLTLRAFVVSALLAVMFSVIVMKLNLTTGIIPSLNVSAGLLGFFFVRMWTAAAERMGFLRQPFTRQENTVIQTCVVSAYGIAFSGGFGSYLFGMSDKIAKQATEAKDANNIKDPHLGWMIGFLFLVSFIGLFALVPLRKIMIVDYKLTYPSGTATAYLINGFHTPEGAKLAKKQVKTLGKYFVFSFFWGFFQWFYTAGDECGFKNFPTLGLEAYNNRFFFDFSPTYVGVGMICPYIVNVSVLLGGFLSWGLMWPLIAKKKGSWYPANLEDSSLHGLQAYRVFISIALILGDGLYNFIKVLIRTIAGFISMVQQNSKSMLPVSDNGSSMSSMEAVSFDDERRIENFLKDQIPKSVAYGGYVAVAAISIGTLPQIFPQLKWYYILVAYVVAPVLAFCNAYGSGLTDWSLASTYGKLAIFVFGAWAGLSHGGVLVGLAACGVMMSIVSTASDLMQDFKTGYLTLASPRSMFISQVIGTGMGCVIGPCIFWLFYKAFGDIGESGTEYPAPYAIVYRNMAILGVDGFGSLPKNCLILCYIFFAAAITINLVRDLTPYKVSRFIPLPMAMAIPFYIGSYFAIDMFLGSAILFVWERLNKAKADAFGPAVASGLICGDGIWTLPQSILALAKVQPPICMKFLSRSTNAKVDSFLGLS

SEQ ID NO: 24806 - protein, 716 aa, Zea mays subsp. mays
  misc_feature (1)..(716): Ceres Seq. ID no. 12454972
MAPHTTAGGGGGAEDEVSEAAAASPALRHRHAGKGEGLGGNGGAGADGQASVERVFADKAVPSWREQLTLRAFVVSALLAVMFSVIVMKLNLTTGIIPSLNVSAGLLGFFFVRMWTAAAERMGFLRQPFTRQENTVIQTCVVSAYGIAFSGGFGSYLFGMSDKIAKQATEAKDANNIKDPHLGWMIGFLFLVSFIGLFALVPLRKIMIVDYKLTYPSGTATAYLINGFHTPEGAKLAKKQVKTLGKYFVFSFFWGFFQWFYTAGDECGFKNFPTLGLEAYNNRFFFDFSPTYVGVGMICPYIVNVSVLLGGFLSWGLMWPLIAKKKGSWYPANLEDSSLHGLQAYRVFISIALILGDGLYNFIKVLIRTIAGFISMVQQNSKSMLPVSDNGSSMSSMEAVSFDDERRIENFLKDQIPKSVAYGGYVAVAAISIGTLPQIFPQLKWYYILVAYVVAPVLAFCNAYGSGLTDWSLASTYGKLAIFVFGAWAGLSHGGVLVGLAACGVMMSIVSTASDLMQDFKTGYLTLASPRSMFISQVIGTGMGCVIGPCIFWLFYKAFGDIGESGTEYPAPYAIVYRNMAILGVDGFGSLPKNCLILCYIFFAAAITINLVRDLTPYKVSRFIPLPMAMAIPFYIGSYFAIDMFLGSAILFVWERLNKAKADAFGPAVASGLICGDGIWTLPQSILALAKVQPPICMKFLSRSTNAKVDSFLGLS

SEQ ID NO: 24807 - protein, 635 aa, Zea mays subsp. mays
  misc_feature (1)..(635): Ceres Seq. ID no. 12454973
MFSVIVMKLNLTTGIIPSLNVSAGLLGFFFVRMWTAAAERMGFLRQPFTRQENTVIQTCVVSAYGIAFSGGFGSYLFGMSDKIAKQATEAKDANNIKDPHLGWMIGFLFLVSFIGLFALVPLRKIMIVDYKLTYPSGTATAYLINGFHTPEGAKLAKKQVKTLGKYFVFSFFWGFFQWFYTAGDECGFKNFPTLGLEAYNNRFFFDFSPTYVGVGMICPYIVNVSVLLGGFLSWGLMWPLIAKKKGSWYPANLEDSSLHGLQAYRVFISIALILGDGLYNFIKVLIRTIAGFISMVQQNSKSMLPVSDNGSSMSSMEAVSFDDERRIENFLKDQIPKSVAYGGYVAVAAISIGTLPQIFPQLKWYYILVAYVVAPVLAFCNAYGSGLTDWSLASTYGKLAIFVFGAWAGLSHGGVLVGLAACGVMMSIVSTASDLMQDFKTGYLTLASPRSMFISQVIGTGMGCVIGPCIFWLFYKAFGDIGESGTEYPAPYAIVYRNMAILGVDGFGSLPKNCLILCYIFFAAAITINLVRDLTPYKVSRFIPLPMAMAIPFYIGSYFAIDMFLGSAILFVWERLNKAKADAFGPAVASGLICGDGIWTLPQSILALAKVQPPICMKFLSRSTNAKVDSFLGLS

SEQ ID NO: 24808 - DNA, 1894 bp, Zea mays subsp. mays
  misc_feature (1)..(1894): Ceres Seq. ID no. 12455023
atgcaccagtcgactctccatattcgccacatcttcttacgtagctctctctctctctctcgctaatacaaggaggagacggagtagaagaaagggtgcagcaaattaatcgggggcactagttcaccttcatcctcaatccattcattcatcagtactcccagccttttccggcacacgcatctatggccccgccatcacacttctacaacaacaatggcgccccgcaggacgccgccagctacctccatgcgggaccaggaaatgcacctccacaggactcctgcttgctcgacgcagacgagttccgccggcagggccaccaagtcatcgacttcatcgccgactactacggccgcatggacgactaccccgtgcaccccagcgtcaaccccggcttcctgcgccgccagctccccgacaaggcgccgtcgcgtccggagtcgtccgacgcgttcggtgccgcgctgcgggacgtccgtgacctcatcctgccaggcatgacgcactggcagagcgcccgccacttcgcgcacttcccggcgtccancaacaccgtcggcgccctcggcgaggccctcacggccggcatcaactccgtcccgttcacgtgggccgcctcgccggccgccacggagctcgagatggtcgtcgtggactggctcggcaaggcgctccacctgcccgagagcctaatgttctgcggcggcggcggaggcacgcttctcggcaccacgtgcgaggccatcctctgcgccctcgtcgccgcgagggaccgcaagctcgtggacatcggcagcgggaggatcggagacctcgtcgtctactgttccgaccagacgcactttgccttccgcaaggcagcgcatattgccgggatccaccgcgacaactgccgcgagatcgccacgtaccgtgacgacatgttcgcgctctcgccagccgagctgcaggccgccatgcaggcggacgtggacgccgggctggtcccgctcttcctgtgcgcgacggtcggaaccactcagacgacggccgtcgaccctatcagagggctctgcgccgtcgcagcgacacacggtgtctgggtgcacgtggatgcggcctacgcgggctcggcgctcgtctgcccagagttccggcacctgatcgacggcgccgaagccgtggactccttcagcatgaatgctcacaagtggctgctggccaacaacgactgctgcgctctgtgggtgaagaagccagctctgctcgtcgcggctctcggcacggagcaggagtacatcctcaaagacgcggcctctgaggggcacgacgtcgtggactacaaggactggtccgtgacgctgacccgccggttccgcgcgctcaagctatggctcgtgctccgctgctatggcgtcgagggcctgcgcgaccacatccgcggccatgtgcgcatggccgcgtcgttcgaggacatggtcaaggccgacccacgcttccaagtcgtggcaaagaggcaattcgcactcgtttgctttaggctccgggcgcccgaggagttgggcggccccaaggcagccaacgcgctcaaccgaaggctgctagaggaggtgaatgcggcttgctccgggccctacatgagctccgctaatgtcggtggcgtctacatgctcagatgcgctatcgggagcacgcttacggaggagcgacacgtccgcgaggcatggacagttgtgcagaacgtagcttcttccctcctcactaaaatggagatgcatgaagattattgaaagcgcctttgcctaataagctcaactcattccactttgttgttgtttattagtttattctattattaagcatcgagttgtgtaacctattatatatacattatggaatgcattatacgact

SEQ ID NO: 24809 - protein, 528 aa, Zea mays subsp. mays
  misc_feature (1)..(528): Ceres Seq. ID no. 12455024
  misc_feature (122)..(122): Xaa is any aa, unknown or other
MAPPSHFYNNNGAPQDAASYLHAGPGNAPPQDSCLLDADEFRRQGHQVIDFIADYYGRMDDYPVHPSVNPGFLRRQLPDKAPSRPESSDAFGAALRDVRDLILPGMTHWQSARHFAHFPASXNTVGALGEALTAGINSVPFTWAASPAATELEMVVVDWLGKALHLPESLMFCGGGGGTLLGTTCEAILCALVAARDRKLVDIGSGRIGDLVVYCSDQTHFAFRKAAHIAGIHRDNCREIATYRDDMFALSPAELQAAMQADVDAGLVPLFLCATVGTTQTTAVDPIRGLCAVAATHGVWVHVDAAYAGSALVCPEFRHLIDGAEAVDSFSMNAHKWLLANNDCCALWVKKPALLVAALGTEQEYILKDAASEGHDVVDYKDWSVTLTRRFRALKLWLVLRCYGVEGLRDHIRGHVRMAASFEDMVKADPRFQVVAKRQFALVCFRLRAPEELGGPKAANALNRRLLEEVNAACSGPYMSSANVGGVYMLRCAIGSTLTEERHVREAWTVVQNVASSLLTKMEMHEDY

SEQ ID NO: 24810 - protein, 470 aa, Zea mays subsp. mays
  misc_feature (1)..(470): Ceres Seq. ID no. 12455025
  misc_feature (64)..(64): Xaa is any aa, unknown or other
MDDYPVHPSVNPGFLRRQLPDKAPSRPESSDAFGAALRDVRDLILPGMTHWQSARHFAHFPASXNTVGALGEALTAGINSVPFTWAASPAATELEMVVVDWLGKALHLPESLMFCGGGGGTLLGTTCEAILCALVAARDRKLVDIGSGRIGDLVVYCSDQTHFAFRKAAHIAGIHRDNCREIATYRDDMFALSPAELQAAMQADVDAGLVPLFLCATVGTTQTTAVDPIRGLCAVAATHGVWVHVDAAYAGSALVCPEFRHLIDGAEAVDSFSMNAHKWLLANNDCCALWVKKPALLVAALGTEQEYILKDAASEGHDVVDYKDWSVTLTRRFRALKLWLVLRCYGVEGLRDHIRGHVRMAASFEDMVKADPRFQVVAKRQFALVCFRLRAPEELGGPKAANALNRRLLEEVNAACSGPYMSSANVGGVYMLRCAIGSTLTEERHVREAWTVVQNVASSLLTKMEMHEDY

SEQ ID NO: 24811 - protein, 423 aa, Zea mays subsp. mays
  misc_feature (1)..(423): Ceres Seq. ID no. 12455026
  misc_feature (17)..(17): Xaa is any aa, unknown or other
MTHWQSARHFAHFPASXNTVGALGEALTAGINSVPFTWAASPAATELEMVVVDWLGKALHLPESLMFCGGGGGTLLGTTCEAILCALVAARDRKLVDIGSGRIGDLVVYCSDQTHFAFRKAAHIAGIHRDNCREIATYRDDMFALSPAELQAAMQADVDAGLVPLFLCATVGTTQTTAVDPIRGLCAVAATHGVWVHVDAAYAGSALVCPEFRHLIDGAEAVDSFSMNAHKWLLANNDCCALWVKKPALLVAALGTEQEYILKDAASEGHDVVDYKDWSVTLTRRFRALKLWLVLRCYGVEGLRDHIRGHVRMAASFEDMVKADPRFQVVAKRQFALVCFRLRAPEELGGPKAANALNRRLLEEVNAACSGPYMSSANVGGVYMLRCAIGSTLTEERHVREAWTVVQNVASSLLTKMEMHEDY

SEQ ID NO: 24812 - DNA, 1083 bp, Zea mays subsp. mays
  misc_feature (1)..(1083): Ceres Seq. ID no. 12455027
attactctagcaaaccacgtcgtcgtaagatcagaacgtacgtgatgatggtgctacgttcgcagggaacgtgagaaggaacgagagggtccagctagactccaagatgccggccatcgacgcctccaagcttccctggaccagcctcggcaagagcccagagtcacggagagccatgatccagagcacgctcacgaccaacccgacactatcgctcgccgaaaccatcgtctgcaacacgttccaggaggtcgagtccgtggcgctggcccgcctccccgtaccggcggtcgccatcggcccgctggaggcgcccaagtcggtgtcgtcggcggcggcggccggccatttctgggcgcaagacgaggcctgcctccgctggctcgacgcgcaggctcccggctcggtcgtgtacgtggcgttcgggagcctgacgttgttcgacgcggaacggctccaggagctggcagacgggctggcgctcacggggcggccgttcctgtgggtggtccggccgaacttcgccgacggcgtcggcgagcgctggctcgacgggttccggcgccgcgttggagaaggcaggggcctggtcgtcggctgggctccccagcagcgcgtgctcgcgcacccctcggtggcgtgcttcgtcacgcactgcgggtggaactccaccatggaaggggtgcggcacggcgtcccgttcctttgctggccctacttcgccgaccagttcctgaaccagagctacatctgcgacctgtggggcgtcgggttgaaggtgtgcgccgacgccgacgagaggggcgttgtcnccaaggaggagatcagggacaaggtggcgcggctgcttggggacgaggcgatcaaggcgaggacggtggccttgaagagcgcagcgtgcgccagcgtcgcggacggagggtcctcgcaccaggatttgctcaagttagtgaatctgctgagagagaaatagcctacagcatgtcagaaatgtttttcagaagttgagtggttatatattcatcagtagcacagacgtgaagaaaataaaagtagatgtgcagacatgcattgtttcaggcg

SEQ ID NO: 24813 - protein, 288 aa, Zea mays subsp. mays
  misc_feature (1)..(288): Ceres Seq. ID no. 12455028
  misc_feature (236)..(236): Xaa is any aa, unknown or other
MPAIDASKLPWTSLGKSPESRRAMIQSTLTTNPTLSLAETIVCNTFQEVESVALARLPVPAVAIGPLEAPKSVSSAAAAGHFWAQDEACLRWLDAQAPGSVVYVAFGSLTLFDAERLQELADGLALTGRPFLWVVRPNFADGVGERWLDGFRRRVGEGRGLVVGWAPQQRVLAHPSVACFVTHCGWNSTMEGVRHGVPFLCWPYFADQFLNQSYICDLWGVGLKVCADADERGVVXKEEIRDKVARLLGDEAIKARTVALKSAACASVADGGSSHQDLLKLVNLLREK

SEQ ID NO: 24814 - protein, 265 aa, Zea mays subsp. mays
  misc_feature (1)..(265): Ceres Seq. ID no. 12455029
  misc_feature (213)..(213): Xaa is any aa, unknown or other
MIQSTLTTNPTLSLAETIVCNTFQEVESVALARLPVPAVAIGPLEAPKSVSSAAAAGHFWAQDEACLRWLDAQAPGSVVYVAFGSLTLFDAERLQELADGLALTGRPFLWVVRPNFADGVGERWLDGFRRRVGEGRGLVVGWAPQQRVLAHPSVACFVTHCGWNSTMEGVRHGVPFLCWPYFADQFLNQSYICDLWGVGLKVCADADERGVVXKEEIRDKVARLLGDEAIKARTVALKSAACASVADGGSSHQDLLKLVNLLREK

SEQ ID NO: 24815 - DNA, 2245 bp, Zea mays subsp. mays
  misc_feature (1)..(2245): Ceres Seq. ID no. 12455032
actgccagtgccatcccattcccatccgagctgcagcgctcgacgacggggagaatagcgtggcgtgggcggcgccatgaagtacagcaaggaagataagcccgagagggcgggcggcgccggcgcagggtccagggcggtgccggtggcgctcgtcgtcgtcgtgctctgcgccttctccttctacctgggcggcatctacagcacgggacggagcctgctggactccatccagccggcgccgacggctctcctcgccctcggcgccgccacgacgacccgccgtccctccgacgacggccaggctcggccggcactggcgtccacggccgccgtggcgttccccgagtgccccgccgattaccaggactacaccccctgcaccgaccccaagcgctggcggaggtacggcaactaccgcctgagcttcatggagcggcactgcccgccgccgcccgaccggcagcagtgcctggtgccgccgcccaaggggtacaagccgcccatccggtggcccaagagcaaggaccagtgctggtaccggaacgtcccctacgactggatcaacagccagaagtccaaccagcactggctcgtcaaggagggcgaccgcttccggttccccggcggcggcaccatgttccccaacggcgtgggcgcgtacgtggacctgatgcagggcctggtcccgggcatgcgcgacggcaccgtccgcaccgcgctcgacaccggctgcggcgtcgccagctggggcggcgacctgctggggcggggcatcctcaccgtgtcgctggcgcccagggacaaccacgaggcccaggtgcagttcgcgctggagcgcggcatcccggccatcctcggcatcatctccacgcagcgcctgccgttcccgtccgccgccttcgacatggcgcactgctcgcgctgcctcatcccctggaccgagttcggcagcctctacctcctggagatccaccgcgtcctccgcccgggcggcttctgggtgctctccggcccgcccgtcaactacgagaaccgctggcacggctggaacaccaccgcgcaggcgcagaaggccgacctggacaggctcaagaagatgctggccagcatgtgcttcaagctctacagcatgaagggggacatagccgtgtggcagaagtccgccgacgcctgctacgacaagctcaccccggtcaccacgcccgccaagtgcgacgacagcgtcgaccccgacgccgcctggtacgtgcccatgcgctcctgcgtcacggctcccagccccaagtacaggaagctggggctcaacgccacgcccaagtggccacagaggctcagcgtcgccccggagcgcatcagcgtcgtcccgggcagcagcgccgccgccttcaagcaggacgacgcccggtggaagctcagggccaagcactacaagacgctgctgccggcgctggggagcgacaagatcaggaacgtcatggacatgaacaccgtgtacggaggattcgcaggcagcctcatcaaggaccccgtctgggtcatgaacgtcgtctcctcctacggcccaaactccctcggcgtcgtctacgacagagggctcatcggcgtcaaccacgactggtgtgaggcgttctcgacatatccacgcacctatgacctgttgcatcttgatggcctgttcacagcagagtctcacaggtgcgagatgaagtacgtgctccttgagatggaccgtatccttcgtcccacgggctacgccataatccgggagagcacctacttcctcgattctgtggcacccattgccaaagggatgcgatggagctgcgagaagcacagcagcgagaacaaggccgacaaggacaagatcctcgtctgccagaaaaagctttgggcaggaaagcagtgacgagagaggatcatccttcttccttccgagtataaaaaagtaggcatccagatcagttgctgctgtggtctcgatcggccaacaaggcaagaggcgcttcagtacacatggaagatgagcgagtactttctgatacaagagtgttcgcagttattatcaaaataaataagccgagtaaaactccatataggatccaacagttaccatttttcattaatcacagtttaattctttttctgtaccgacagtttgtaggcaaggaatgggtcgattcatataccatggtgagcaaatgtaagtttactccacactagatgtgtatagcttggttggtgc

SEQ ID NO: 24816 - protein, 610 aa, Zea mays subsp. mays
  misc_feature (1)..(610): Ceres Seq. ID no. 12455033
MKYSKEDKPERAGGAGAGSRAVPVALVVVVLCAFSFYLGGIYSTGRSLLDSIQPAPTALLALGAATTTRRPSDDGQARPALASTAAVAFPECPADYQDYTPCTDPKRWRRYGNYRLSFMERHCPPPPDRQQCLVPPPKGYKPPIRWPKSKDQCWYRNVPYDWINSQKSNQHWLVKEGDRFRFPGGGTMFPNGVGAYVDLMQGLVPGMRDGTVRTALDTGCGVASWGGDLLGRGILTVSLAPRDNHEAQVQFALERGIPAILGIISTQRLPFPSAAFDMAHCSRCLIPWTEFGSLYLLEIHRVLRPGGFWVLSGPPVNYENRWHGWNTTAQAQKADLDRLKKMLASMCFKLYSMKGDIAVWQKSADACYDKLTPVTTPAKCDDSVDPDAAWYVPMRSCVTAPSPKYRKLGLNATPKWPQRLSVAPERISVVPGSSAAAFKQDDARWKLRAKHYKTLLPALGSDKIRNVMDMNTVYGGFAGSLIKDPVWVMNVVSSYGPNSLGVVYDRGLIGVNHDWCEAFSTYPRTYDLLHLDGLFTAESHRCEMKYVLLEMDRILRPTGYAIIRESTYFLDSVAPIAKGMRWSCEKHSSENKADKDKILVCQKKLWAGKQ

SEQ ID NO: 24817 - protein, 492 aa, Zea mays subsp. mays
  misc_feature (1)..(492): Ceres Seq. ID no. 12455034
MERHCPPPPDRQQCLVPPPKGYKPPIRWPKSKDQCWYRNVPYDWINSQKSNQHWLVKEGDRFRFPGGGTMFPNGVGAYVDLMQGLVPGMRDGTVRTALDTGCGVASWGGDLLGRGILTVSLAPRDNHEAQVQFALERGIPAILGIISTQRLPFPSAAFDMAHCSRCLIPWTEFGSLYLLEIHRVLRPGGFWVLSGPPVNYENRWHGWNTTAQAQKADLDRLKKMLASMCFKLYSMKGDIAVWQKSADACYDKLTPVTTPAKCDDSVDPDAAWYVPMRSCVTAPSPKYRKLGLNATPKWPQRLSVAPERISVVPGSSAAAFKQDDARWKLRAKHYKTLLPALGSDKIRNVMDMNTVYGGFAGSLIKDPVWVMNVVSSYGPNSLGVVYDRGLIGVNHDWCEAFSTYPRTYDLLHLDGLFTAESHRCEMKYVLLEMDRILRPTGYAIIRESTYFLDSVAPIAKGMRWSCEKHSSENKADKDKILVCQKKLWAGKQ

SEQ ID NO: 24818 - protein, 423 aa, Zea mays subsp. mays
  misc_feature (1)..(423): Ceres Seq. ID no. 12455035
MFPNGVGAYVDLMQGLVPGMRDGTVRTALDTGCGVASWGGDLLGRGILTVSLAPRDNHEAQVQFALERGIPAILGIISTQRLPFPSAAFDMAHCSRCLIPWTEFGSLYLLEIHRVLRPGGFWVLSGPPVNYENRWHGWNTTAQAQKADLDRLKKMLASMCFKLYSMKGDIAVWQKSADACYDKLTPVTTPAKCDDSVDPDAAWYVPMRSCVTAPSPKYRKLGLNATPKWPQRLSVAPERISVVPGSSAAAFKQDDARWKLRAKHYKTLLPALGSDKIRNVMDMNTVYGGFAGSLIKDPVWVMNVVSSYGPNSLGVVYDRGLIGVNHDWCEAFSTYPRTYDLLHLDGLFTAESHRCEMKYVLLEMDRILRPTGYAIIRESTYFLDSVAPIAKGMRWSCEKHSSENKADKDKILVCQKKLWAGKQ

SEQ ID NO: 24819 - DNA, 1444 bp, Zea mays subsp. mays
  misc_feature (1)..(1444): Ceres Seq. ID no. 12455051
gtggattggggcgagtatcatgcaaatacaaacgatcgagaggttgaaactgcaaaatgacgcgtcgcatcgctgtcatcgtggtggcatcggtcttgtcggcaatggcggtcatgggcatagcgttcatctggacaaggatgaggtccagatcaagggacgatctcctccgtgcagacatgggcgacgacgggtcgtccggcgagatgatccgcgccatcgcggcgtcgcagctgagcttcaagtaccaggagctgcgcgcggcgacggacgagttcagccagacgaacaagctcgggcagggaggctacggctccgtgtacaggggcgtgctggcggacgggcgggaggtggcggtgaagcggctcttcttcaacacgcggcagtgggcggagcagttcttcaacgaggtgaagctggtgagccaggtgcagcacaagaacctggtcaagctgctgggctgcagcgtggaggggcccgagagcctgctcgtctacgagtacctctgcaacaccagcctcgaccactacctcttcgacgcgttcaagaagaacgcgctggactgggagcggaggttcgagatcgtgctgggcacggcggagggcctctcctacctgcacagcgcctcggaggtccggatcatacaccgcgacatcaaggccagcaacgtcctgctggacgacaggttcaggccgaagatcgccgacttcggcctcgccaggaacttcatggacgaccagagccacctcagcaccggcctcgccggaacttttgggtacatggctccggagtacatcgtccacgggcagctcaccgagaaggccgacatctacagctacggcgtgctggtcctcgagatcgtcaccggccggaagagccacaactcggtggcgtcatctgcagaaggcctctcactcatggcactgatatggagacactacaccgcgggcaccctgacggagctgctggacccgaacctccgcgagcagtgctcggaggaggacgccctccgggtgttccacgtcggcctgctgtgcgcccaggcgtcgccgaaccttcggccgcccatgtggaaggtggtggagatgctgagcggcagggatcacaaggcggtggcgcttccccggcccacccagcctcccttcatcaacgtcaaggggtccagcggcaagagcgacagctccggcgggtcggcgtccaactccgacaagtcgcccttctcgctgaaccagctgtcagtcagtggggtgcaggccaggtaaaagctagctagctagctgcggatatcatgtgtttgggctagcggcattttttttcaagttttgtaagtcgtggcgtggatatatcataggtttgacttcgattttctggcttcgttgatctggtaacatactctgattattgctagtatgtgcaagtctttggaagaaagattcatgtttgc

SEQ ID NO: 24820 - protein, 423 aa, Zea mays subsp. mays
  misc_feature (1)..(423): Ceres Seq. ID no. 12455052
WIGASIMQIQTIERLKLQNDASHRCHRGGIGLVGNGGHGHSVHLDKDEVQIKGRSPPCRHGRRRVVRRDDPRHRGVAAELQVPGAARGDGRVQPDEQARAGRLRLRVQGRAGGRAGGGGEAALLQHAAVGGAVLQRGEAGEPGAAQEPGQAAGLQRGGAREPARLRVPLQHQPRPLPLRRVQEERAGLGAEVRDRAGHGGGPLLPAQRLGGPDHTPRHQGQQRPAGRQVQAEDRRLRPRQELHGRPEPPQHRPRRNFWVHGSGVHRPRAAHREGRHLQLRRAGPRDRHRPEEPQLGGVICRRPLTHGTDMETLHRGHPDGAAGPEPPRAVLGGGRPPGVPRRPAVRPGVAEPSAAHVEGGGDAERQGSQGGGASPAHPASLHQRQGVQRQERQLRRVGVQLRQVALLAEPAVSQWGAGQVKAS

SEQ ID NO: 24821 - protein, 417 aa, Zea mays subsp. mays
  misc_feature (1)..(417): Ceres Seq. ID no. 12455053
MQIQTIERLKLQNDASHRCHRGGIGLVGNGGHGHSVHLDKDEVQIKGRSPPCRHGRRRVVRRDDPRHRGVAAELQVPGAARGDGRVQPDEQARAGRLRLRVQGRAGGRAGGGGEAALLQHAAVGGAVLQRGEAGEPGAAQEPGQAAGLQRGGAREPARLRVPLQHQPRPLPLRRVQEERAGLGAEVRDRAGHGGGPLLPAQRLGGPDHTPRHQGQQRPAGRQVQAEDRRLRPRQELHGRPEPPQHRPRRNFWVHGSGVHRPRAAHREGRHLQLRRAGPRDRHRPEEPQLGGVICRRPLTHGTDMETLHRGHPDGAAGPEPPRAVLGGGRPPGVPRRPAVRPGVAEPSAAHVEGGGDAERQGSQGGGASPAHPASLHQRQGVQRQERQLRRVGVQLRQVALLAEPAVSQWGAGQVKAS

SEQ ID NO: 24822 - protein, 401 aa, Zea mays subsp. mays
  misc_feature (1)..(401): Ceres Seq. ID no. 12455054
MTRRIAVIVVASVLSAMAVMGIAFIWTRMRSRSRDDLLRADMGDDGSSGEMIRAIAASQLSFKYQELRAATDEFSQTNKLGQGGYGSVYRGVLADGREVAVKRLFFNTRQWAEQFFNEVKLVSQVQHKNLVKLLGCSVEGPESLLVYEYLCNTSLDHYLFDAFKKNALDWERRFEIVLGTAEGLSYLHSASEVRIIHRDIKASNVLLDDRFRPKIADFGLARNFMDDQSHLSTGLAGTFGYMAPEYIVHGQLTEKADIYSYGVLVLEIVTGRKSHNSVASSAEGLSLMALIWRHYTAGTLTELLDPNLREQCSEEDALRVFHVGLLCAQASPNLRPPMWKVVEMLSGRDHKAVALPRPTQPPFINVKGSSGKSDSSGGSASNSDKSPFSLNQLSVSGVQAR

SEQ ID NO: 24823 - DNA, 993 bp, Zea mays subsp. mays
  misc_feature (1)..(993): Ceres Seq. ID no. 12455252
aaaactcatcgccctccccacagccagaaccctagcctcgtcgccatggcctcctccttgctccgctccggccaccgcctctttctccgacgccaccgcctacccgcggcattctccaccgctacggccgaggagctaatcgacgtacgcaagcttcccaccaactacgacccctccaccttcgacccgtcctccccgtcccgcccgctgccgtccgaccgcgtgtggcgcctcgtcgaggatgtctcctccctcaccctcgcggagaccgcggctctctcctctctcctcctccgccgcctcgacataccctccgcaccacccatcgccatcctcaactccgccgcggggctgggcggcgccgccacggccggcgcggcgggggagaaggcgggggcggcggcggcggcggcggccgagaagaccgtcttcgagctgcggctggagggctacgacgctgcgagcaagatcaaggtgatcaaggagatccggtcgttcaccgacctggggctgaaggaggccaaggagctggtggagaaggcgcctgcggtgatcaagggcggcctatccaaggacgaagccaaggcgatcatcgagcggatgaaggcagttggcgccaaggtcgtcatggactgatcagaacaagcctttttcaacggtgaaatcctgcaactgcgaatctatgcttcgtttcagatcaactttaagtgcaaggatggacgggtggattgtggacagttcctgtatgaacttgcggaaatttgatgtggcacagcgctaataggttttcaagcacgttaatcaaatgaacattgatcctgcaatgctatagggtattggcatcaaacgctcgtcattatgttcgaatttgtgacctttcaattgtgggaagttaaaatgacctagttagttattttgttcatcacagggtcttgtttgagactggatgtccatatggatacaataacattttgctcttgtttctgtgaattt

SEQ ID NO: 24824 - protein, 211 aa, Zea mays subsp. mays
  misc_feature (1)..(211): Ceres Seq. ID no. 12455253
KTHRPPHSQNPSLVAMASSLLRSGHRLFLRRHRLPAAFSTATAEELIDVRKLPTNYDPSTFDPSSPSRPLPSDRVWRLVEDVSSLTLAETAALSSLLLRRLDIPSAPPIAILNSAAGLGGAATAGAAGEKAGAAAAAAAEKTVFELRLEGYDAASKIKVIKEIRSFTDLGLKEAKELVEKAPAVIKGGLSKDEAKAIIERMKAVGAKVVMD

SEQ ID NO: 24825 - protein, 196 aa, Zea mays subsp. mays
  misc_feature (1)..(196): Ceres Seq. ID no. 12455254
MASSLLRSGHRLFLRRHRLPAAFSTATAEELIDVRKLPTNYDPSTFDPSSPSRPLPSDRVWRLVEDVSSLTLAETAALSSLLLRRLDIPSAPPIAILNSAAGLGGAATAGAAGEKAGAAAAAAAEKTVFELRLEGYDAASKIKVIKEIRSFTDLGLKEAKELVEKAPAVIKGGLSKDEAKAIIERMKAVGAKVVMD

SEQ ID NO: 24826 - DNA, 901 bp, Zea mays subsp. mays
  misc_feature (1)..(901): Ceres Seq. ID no. 12455262
ctcccctcctccgcacaaacgcgtcgcatccgctccacaggatcctcggcgccgagtccaagatcttctacctcaagatgaagggtgactaccacaggtaccttgctgagttcaagtcaggtgcagagaggaaggatgctgcggagagcaccatgaatgcctacaaagctgctcaggatattgctcttgctgatctggccccaacccaccccatcaggctcgggcttgctctcaacttctcagtgttctactacgagatcctcaactcccctgaccgtgcttgcaaccttgcaaagcaggcctttgatgaggcaatctccgaactagacagcctgggagaggagtcctacaaggacagcactctgatcatgcagctcctgcgtgacaacttgaccctatggacttccgacaccaacgaggacgccggagatgagatcaaggaagcagctgctgcccccaaagaatccgcccccgagggccagtaagacggatccgatctcccgacctgatgcgtgtctgctgatgtcggggagtttaccaggactgtgccgttcttgatttctgatagcttatcttctagtacacctcgtgttgttctcttcgtcacggcgccggtgcgtgtgcgctgaagctgcctgccattgccattgccgctgtttttaattaagcacacactctagatgttatgcccgcatgctatgtttcgattctcaaagttgataaatgatggctggatgctggttttcgtgctccaagcctgctgcttcttccagggaaaaaaagacctgcccttgttgcagcgttgttgtttagaatgacctatatttgactggtattctgttacggtggctttgcaaagctgtttgtttggtttaatgtctcggaataatatgaattggct

SEQ ID NO: 24827 - protein, 160 aa, Zea mays subsp. mays
  misc_feature (1)..(160): Ceres Seq. ID no. 12455263
PLLRTNASHPLHRILGAESKIFYLKMKGDYHRYLAEFKSGAERKDAAESTMNAYKAAQDIALADLAPTHPIRLGLALNFSVFYYEILNSPDRACNLAKQAFDEAISELDSLGEESYKDSTLIMQLLRDNLTLWTSDTNEDAGDEIKEAAAAPKESAPEGQ

SEQ ID NO: 24828 - protein, 135 aa, Zea mays subsp. mays
  misc_feature (1)..(135): Ceres Seq. ID no. 12455264
MKGDYHRYLAEFKSGAERKDAAESTMNAYKAAQDIALADLAPTHPIRLGLALNFSVFYYEILNSPDRACNLAKQAFDEAISELDSLGEESYKDSTLIMQLLRDNLTLWTSDTNEDAGDEIKEAAAAPKESAPEGQ

SEQ ID NO: 24829 - protein, 110 aa, Zea mays subsp. mays
  misc_feature (1)..(110): Ceres Seq. ID no. 12455265
MNAYKAAQDIALADLAPTHPIRLGLALNFSVFYYEILNSPDRACNLAKQAFDEAISELDSLGEESYKDSTLIMQLLRDNLTLWTSDTNEDAGDEIKEAAAAPKESAPEGQ

SEQ ID NO: 24830 - DNA, 1047 bp, Zea mays subsp. mays
  misc_feature (1)..(1047): Ceres Seq. ID no. 12455278
aaagaggggagaagaagccaaggatgtactggttccagttcaacctccctgagctgtgatgggaatcgcattccctctataattcctataaataggggccctcccgctcccatcacaatcacccatcactcgctctattcccattccaagtccccgctcttggattcccgacgacgagctcggagcttcttcttccctgctcggtgctcgtcgcaacagctgccgccatgtctgccgcgaaccagctcgccgctctggtcagcaacatgtacgccacgggtttgcttgacgatcagttccagcagctccagctgctccaggaccccagcgcccctgacttcgtctccgaggtcgtcacgctcttctgtcaggacggcgagcggatcatcgaagagctggccaaactgctggagaagcccaacgtggattttgacagggttgacgcctttgtgcatcagctcaagggaagcagtgcaaatattggtgctcagaaggttaagaacacttgcattcagttccgcgaattctgtcagcagaagagcagagatgggtgcctcaaggtactggagacaatgaggattaacttctatgagctgcgtggcaagtttcagaccatgcttcagctggagcgtcaggtcaatggctttccccccaacaagtaaaccagatggtggagtggaccttcatgttaggatgatgcttgcacctttcaagtttcagaacattctgaatgagctcctcaattggtttctgggaagtcttgtaatagcttagcagcaagattagcgttgacaccaccgtagcagtagtcattgtcgtcaagtagttgtcctaaatgtctgtgctgggttatggatctcctgcaagcagttgcaggcttgcagctgttctatttactctagtagtttattttggagtagtcgctctcaataaatctgtcctaggagtctattggtggattattagtcagtcagtttctgggattcctggtggtgaagcaaaacaatgttatggctatcggttaataataatagtttgctgtgtttg

SEQ ID NO: 24831 - protein, 191 aa, Zea mays subsp. mays
  misc_feature (1)..(191): Ceres Seq. ID no. 12455279
KEGRRSQGCTGSSSTSLSCDGNRIPSIIPINRGPPAPITITHHSLYSHSKSPLLDSRRRARSFFFPARCSSQQLPPCLPRTSSPLWSATCTPRVCLTISSSSSSCSRTPAPLTSSPRSSRSSVRTASGSSKSWPNCWRSPTWILTGLTPLCISSREAVQILVLRRLRTLAFSSANSVSRRAEMGASRYWRQ

SEQ ID NO: 24832 - protein, 144 aa, Zea mays subsp. mays
  misc_feature (1)..(144): Ceres Seq. ID no. 12455280
MSAANQLAALVSNMYATGLLDDQFQQLQLLQDPSAPDFVSEVVTLFCQDGERIIEELAKLLEKPNVDFDRVDAFVHQLKGSSANIGAQKVKNTCIQFREFCQQKSRDGCLKVLETMRINFYELRGKFQTMLQLERQVNGFPPNK

SEQ ID NO: 24833 - protein, 131 aa, Zea mays subsp. mays
  misc_feature (1)..(131): Ceres Seq. ID no. 12455281
MYATGLLDDQFQQLQLLQDPSAPDFVSEVVTLFCQDGERIIEELAKLLEKPNVDFDRVDAFVHQLKGSSANIGAQKVKNTCIQFREFCQQKSRDGCLKVLETMRINFYELRGKFQTMLQLERQVNGFPPNK

SEQ ID NO: 24834 - DNA, 1623 bp, Zea mays subsp. mays
  misc_feature (1)..(1623): Ceres Seq. ID no. 12462280
tgccttctgcgccctccatttcggcctctgtcccttgcaagttcaatctcacctccaaccatgggtaaagagaagtcccacatcaacattgtggttattggccacgttgactctggcaagtcgaccaccacaggacacctgatctacaagcttggaggcattgacaagcgtgtgatcgagaggttcgagaaggaggctgctgaaatgaacaagcggtccttcaagtacgcatgggtgctcgacaagctcaaggctgagcgtgagagaggtatcaccattgatatcgctctgtggaagtttgagaccaccaagtactactgcacggtcattgatgcccctggacaccgtgacttcatcaagaacatgatcactggtacctcccaggctgactgtgctgtccttatcattgactccaccactggtggttttgaggctggtatctccaaggatggccagacccgtgaacatgctctccttgcgttcacccttggtgtgaagcagatgatttgctgctgcaacaagatggatgcaaccactcccaaatactccaaggcacgttatgatgagattgtgaaggaagtctcatcctacctcaagaaagttgggtacaaccctgataagattgccttcgttcccatttctggttttgagggcgacaacatgattgagaggtccaccaaccttgactggtacaaaggcccaaccctgcttgaggctcttgaccagatcaccgagcccaagaggccttcagacaagcccctgcgtctagccctccaggatgtgtacaagattggtggtattggaactgtaccggttggtcgtgtggagactggtgtcatcaagcctggtatggtagtcacctttggtccaactggcctgactactgaggtgaagtctgttgagatgcaccatgaggcgcttcaggaggctcttccgggcgacaatgttggcttcaacgtgaagaacgttgctgtcaaggatctcaagcgtgggttcgtggcctccaactccaaggatgaccctgccaaggaggctgccagcttcacctcccaggtcatcatcatgaaccaccctgggcagattggcaacggctatgccccagtgctggactgccacacctcccacatcgccgtcaagtttgctgagctcattaccaagatcgacaggcgatctggcaaggagctcgagaaggagcccaagttcctgaagaacggtgatgctggtatggtgaagatgattcccaccaagcctatggtggtggagacattctccgcgtatcctcccctgggtaggtttgccgtccgcgacatgaggcagacggttgctgttggagtcatcaagagtgtggagaagaaggacccaaccggcgccaaggtgaccaaggcggccgccaagaagaaatgatcgatccgtgtctgctttgcagtgcctggataacttgccactaaagttgtgtatgcggttgttgctgttattgcgtggactgtttgctgcggtgtctcctgtttgtttgggtagcgcagcgtctggcctcttcaggtgtctgttgtctgttgtctttactatcagtaatgctcctgagacttctatttgtccttttggcgccgctaaatggaattttcg

SEQ ID NO: 24835 - protein, 467 aa, Zea mays subsp. mays
  misc_feature (1)..(467): Ceres Seq. ID no. 12462281
CLLRPPFRPLSLASSISPPTMGKEKSHINIVVIGHVDSGKSTTTGHLIYKLGGIDKRVIERFEKEAAEMNKRSFKYAWVLDKLKAERERGITIDIALWKFETTKYYCTVIDAPGHRDFIKNMITGTSQADCAVLIIDSTTGGFEAGISKDGQTREHALLAFTLGVKQMICCCNKMDATTPKYSKARYDEIVKEVSSYLKKVGYNPDKIAFVPISGFEGDNMIERSTNLDWYKGPTLLEALDQITEPKRPSDKPLRLALQDVYKIGGIGTVPVGRVETGVIKPGMVVTFGPTGLTTEVKSVEMHHEALQEALPGDNVGFNVKNVAVKDLKRGFVASNSKDDPAKEAASFTSQVIIMNHPGQIGNGYAPVLDCHTSHIAVKFAELITKIDRRSGKELEKEPKFLKNGDAGMVKMIPTKPMVVETFSAYPPLGRFAVRDMRQTVAVGVIKSVEKKDPTGAKVTKAAAKKK

SEQ ID NO: 24836 - protein, 447 aa, Zea mays subsp. mays
  misc_feature (1)..(447): Ceres Seq. ID no. 12462282
MGKEKSHINIVVIGHVDSGKSTTTGHLIYKLGGIDKRVIERFEKEAAEMNKRSFKYAWVLDKLKAERERGITIDIALWKFETTKYYCTVIDAPGHRDFIKNMITGTSQADCAVLIIDSTTGGFEAGISKDGQTREHALLAFTLGVKQMICCCNKMDATTPKYSKARYDEIVKEVSSYLKKVGYNPDKIAFVPISGFEGDNMIERSTNLDWYKGPTLLEALDQITEPKRPSDKPLRLALQDVYKIGGIGTVPVGRVETGVIKPGMVVTFGPTGLTTEVKSVEMHHEALQEALPGDNVGFNVKNVAVKDLKRGFVASNSKDDPAKEAASFTSQVIIMNHPGQIGNGYAPVLDCHTSHIAVKFAELITKIDRRSGKELEKEPKFLKNGDAGMVKMIPTKPMVVETFSAYPPLGRFAVRDMRQTVAVGVIKSVEKKDPTGAKVTKAAAKKK

SEQ ID NO: 24837 - protein, 399 aa, Zea mays subsp. mays
  misc_feature (1)..(399): Ceres Seq. ID no. 12462283
MNKRSFKYAWVLDKLKAERERGITIDIALWKFETTKYYCTVIDAPGHRDFIKNMITGTSQADCAVLIIDSTTGGFEAGISKDGQTREHALLAFTLGVKQMICCCNKMDATTPKYSKARYDEIVKEVSSYLKKVGYNPDKIAFVPISGFEGDNMIERSTNLDWYKGPTLLEALDQITEPKRPSDKPLRLALQDVYKIGGIGTVPVGRVETGVIKPGMVVTFGPTGLTTEVKSVEMHHEALQEALPGDNVGFNVKNVAVKDLKRGFVASNSKDDPAKEAASFTSQVIIMNHPGQIGNGYAPVLDCHTSHIAVKFAELITKIDRRSGKELEKEPKFLKNGDAGMVKMIPTKPMVVETFSAYPPLGRFAVRDMRQTVAVGVIKSVEKKDPTGAKVTKAAAKKK

SEQ ID NO: 24838 - DNA, 809 bp, Zea mays subsp. mays
  misc_feature (1)..(809): Ceres Seq. ID no. 12462322
acatatctccatctcacccgcgcgcccacgcgcctccaccacgccatccatcgcaatggccgccgccgccgcgctcctcctcctcctgtgcgccgcgtctctcgcgtccgcagccgccgacgacgggttgacgaccttcaaggtgtacttccacgacgtcgtggcggggacgaacccgacggcggtgcgcatcgcgcaggcggcgtcctccaacacgtcgtccaccaacttcggcgcggtggtggccatcgacgacccgctgacgacgggtcccacgcgcgccgcgggcacggaggtgggccgcgcccagggcacctacacgttcgcggaccagcagacgttcggcctcctcatggtcatgaacttcgtgttcacggccggcgagcacaacggcagcacgctctccatccttggccgcaacgaggtgctcagcgacgtccgcgagatgagcatngtcggcggcagcggcaagttccgcatggcgcgcgggtacgtgcaggcgcacaccatcgactccggcgccacctccgggaccaccgtcgtccagtacaccgtcaacgtcaaggcctagctacctgttacgtacccttgcttgcgactccgggccgtggcttntcgtacgtccatccatatctccggctgctttgtacacaccttgtctgtcgtctttgagcgggattcggatttgcagagccgaatttactactaaagtttcaaaatttcacagagttgtagggtcgagaattaaatgtgtcgaaaacacgttagcgaccattnttanatagtttttgttggaattttgttggccc

SEQ ID NO: 24839 - protein, 223 aa, Zea mays subsp. mays
  misc_feature (1)..(223): Ceres Seq. ID no. 12462323
  misc_feature (152)..(152): Xaa is any aa, unknown or other
  misc_feature (205)..(205): Xaa is any aa, unknown or other
TYLHLTRAPTRLHHAIHRNGRRRRAPPPPVRRVSRVRSRRRRVDDLQGVLPRRRGGDEPDGGAHRAGGVLQHVVHQLRRGGGHRRPADDGSHARRGHGGGPRPGHLHVRGPADVRPPHGHELRVHGRRAQRQHALHPWPQRGAQRRPRDEHXRRQRQVPHGARVRAGAHHRLRRHLRDHRRPVHRQRQGLATCYVPLLATPGRGXSYVHPYLRLLCTHLVCRL

SEQ ID NO: 24840 - protein, 189 aa, Zea mays subsp. mays
  misc_feature (1)..(189): Ceres Seq. ID no. 12462324
  misc_feature (151)..(151): Xaa is any aa, unknown or other
HISISPARPRASTTPSIAMAAAAALLLLLCAASLASAAADDGLTTFKVYFHDVVAGTNPTAVRIAQAASSNTSSTNFGAVVAIDDPLTTGPTRAAGTEVGRAQGTYTFADQQTFGLLMVMNFVFTAGEHNGSTLSILGRNEVLSDVREMSXVGGSGKFRMARGYVQAHTIDSGATSGTTVVQYTVNVKA

SEQ ID NO: 24841 - protein, 171 aa, Zea mays subsp. mays
  misc_feature (1)..(171): Ceres Seq. ID no. 12462325
  misc_feature (133)..(133): Xaa is any aa, unknown or other
MAAAAALLLLLCAASLASAAADDGLTTFKVYFHDVVAGTNPTAVRIAQAASSNTSSTNFGAVVAIDDPLTTGPTRAAGTEVGRAQGTYTFADQQTFGLLMVMNFVFTAGEHNGSTLSILGRNEVLSDVREMSXVGGSGKFRMARGYVQAHTIDSGATSGTTVVQYTVNVKA

SEQ ID NO: 24842 - DNA, 1024 bp, Zea mays subsp. mays
  misc_feature (1)..(1024): Ceres Seq. ID no. 12462326
gcttctagcaagagcacgaacgagggccaagcgctccaaaaccagcgacgtggaagcgcctgcgccgcgagcatccttcctgagcgcggggccaagcagagcagtgcaagcagcatatggcgcgccgtgccagcctgctcctcgccgcggcgctgctcgtcgccgtcgctgccgcggcggtgccgccgacgtgcgagcgcatcgagtgcccggcgtacgaggtggtggacagcgccaacgggttcgagatccggcggtacacggacgccatgtggatcaccacggcgcccatcgaggacatctccttcgtcgccgccacgcgcaccggcttcctacagctgttcgactacatccagggcaagaacgcgtacaaccagacgatcgagatgacggcgccggtgctgacgcgggtgtcgcccagcgacgggcccttctgcgcctccgccttcgccgtgagcttctacgtgccggccaagaaccaggcggacccgccgccggccgagggcctgcgcgtggaccgctgggccggggccaggtacgcggccgtgcgccgcttcgggggcttcgtggcggacgccgacgtcggggagcaggcggcgcggctcgaggccagcctccagggcacccggtgggccgccgccgtcaacgacgcgcgcagggccgacccggcctcgccctacaccgtcgcgcagtacaactcgcccttcgagttcaccggcagggtcaacgagatctggatgctcttcgacgcggacgacgacgccagtatgtgatgcgattccaagcgtgctctcggggcactgaggcgtttagggaaggacgcgcatgcacctgtgcagtgcagctgtgctaccatgaagtatttcgtgctcttgtgcgctagcttcgtttactttcgacttttcgagtaaggaataaggtgcctcttgttgcaataatgataaagctaatcctgcttgtaattacatttcgtggcatggccattccggcaacatgtccagtaaaaaaaaactttttagtttcg

SEQ ID NO: 24843 - protein, 293 aa, Zea mays subsp. mays
  misc_feature (1)..(293): Ceres Seq. ID no. 12462327
LLARARTRAKRSKTSDVEAPAPRASFLSAGPSRAVQAAYGAPCQPAPRRGAARRRRCRGGAADVRAHRVPGVRGGGQRQRVRDPAVHGRHVDHHGAHRGHLLRRRHAHRLPTAVRLHPGQERVQPDDRDDGAGADAGVAQRRALLRLRLRRELLRAGQEPGGPAAGRGPARGPLGRGQVRGRAPLRGLRGGRRRRGAGGAARGQPPGHPVGRRRQRRAQGRPGLALHRRAVQLALRVHRQGQRDLDALRRGRRRQYVMRFQACSRGTEAFREGRACTCAVQLCYHEVFRALVR

SEQ ID NO: 24844 - protein, 218 aa, Zea mays subsp. mays
  misc_feature (1)..(218): Ceres Seq. ID no. 12462328
MARRASLLLAAALLVAVAAAAVPPTCERIECPAYEVVDSANGFEIRRYTDAMWITTAPIEDISFVAATRTGFLQLFDYIQGKNAYNQTIEMTAPVLTRVSPSDGPFCASAFAVSFYVPAKNQADPPPAEGLRVDRWAGARYAAVRRFGGFVADADVGEQAARLEASLQGTRWAAAVNDARRADPASPYTVAQYNSPFEFTGRVNEIWMLFDADDDASM

SEQ ID NO: 24845 - protein, 167 aa, Zea mays subsp. mays
  misc_feature (1)..(167): Ceres Seq. ID no. 12462329
MWITTAPIEDISFVAATRTGFLQLFDYIQGKNAYNQTIEMTAPVLTRVSPSDGPFCASAFAVSFYVPAKNQADPPPAEGLRVDRWAGARYAAVRRFGGFVADADVGEQAARLEASLQGTRWAAAVNDARRADPASPYTVAQYNSPFEFTGRVNEIWMLFDADDDASM

SEQ ID NO: 24846 - DNA, 1679 bp, Zea mays subsp. mays
  misc_feature (1)..(1679): Ceres Seq. ID no. 12462479
actagcaaacattaataacgcaagcggcactgttgtcagtgtcagtgcacagtagatatactgctagctagcttacctggcagccagtgcaactgcactgcacgtctccaatgcgctgctattataacgacgcgaacgccgcgcaggccttccgtggtatacagcagcagaagcagcatcacgatcccggcccggcggcccgtacgtcgacgaggaggaggaggacgtacgtacgcagagcagctgctggcaccatggctcccgtgagcatcagcgctgttccgttcctcccgacggcggcggagggggagacgaacgtgcgcgcgtcgttcgtgcgcgaggaggacgagcgccccaaggtgccgcacgaccgcttcagcgacgaggtgccggtggtgtcgctcgagggcatcgacgggccgcgcaggcgggccgagatccgcggccgcgtggccgcggcctgcgaggactggggcatcttccaggtggtggaccacggcgtggacgccgcgctcgtggccgacatggcgcgcctcgcccgagacttcttcgcgctcccgcccgaggacaagctccgcttcgacatgtccggcgggaagaagggcggcttcatcgtctccagccacctccagggggaggcggtgcaggactggcgtgagatcgtgacctacttctcgtacccggtgaaggcccgcgactactcccggtggccggacaagccggcggcgtggcgggcggtggtggagcggtacagcgagcagctgatggcgctggcgtgcaggctcctgggcgtgctctccgaggccatgggcctggacacggaggcgctggccagggcctgcgtggacatggaccagaaggtggtggtcaacttctacccgaggtgcccgcagccggacctcacgctggggctcaagcgccacaccgaccccggcaccatcacgctgctgctgcaggacctggtcggcggcctccaggccacgcgcgacggcggccggacctggatcaccgtgcagcccgtggagggcgccttcgtcgtcaacctcggcgaccacggccacctcctgagcaacggcaggttcaagaacgcggaccaccaggcggtggtgaactcggagtgcagccgcctgtccatcgccacgttccagaacccggcgcccgacgcgacggtgtacccgctggccgtgcgcgacggggaggcgcccatactggaccatcccatcaccttcgccgagatgtaccgccgcaagatggcccgcgacatcgagctcgccaggctcaagaagcaggccaaggccgacaagaagcagcagcagcagagtgccaacaaggagttcgccgactccaagcctctcgacgccatttttgcctgatatggtagagggcgcgcgactaccgatccgttgttattgctgcgtgtgattaattttcatctataagaacatagctacgtgcgaccgcgcgtgtggtgattaattaaggtctgaataaaataatggctgcacaaaactaggaagcgatcgatcacccagataaatgtatgtgcgttcccttttcttctttcaagatgtgtaattttcaacgtgcggttccagatgcatggactggactggaccggagtgcattgtaattcttttgtttccccctgttgaatatgcgagaggtgtgcatgtctttgt

SEQ ID NO: 24847 - protein, 420 aa, Zea mays subsp. mays
  misc_feature (1)..(420): Ceres Seq. ID no. 12462480
MRCYYNDANAAQAFRGIQQQKQHHDPGPAARTSTRRRRTYVRRAAAGTMAPVSISAVPFLPTAAEGETNVRASFVREEDERPKVPHDRFSDEVPVVSLEGIDGPRRRAEIRGRVAAACEDWGIFQVVDHGVDAALVADMARLARDFFALPPEDKLRFDMSGGKKGGFIVSSHLQGEAVQDWREIVTYFSYPVKARDYSRWPDKPAAWRAVVERYSEQLMALACRLLGVLSEAMGLDTEALARACVDMDQKVVVNFYPRCPQPDLTLGLKRHTDPGTITLLLQDLVGGLQATRDGGRTWITVQPVEGAFVVNLGDHGHLLSNGRFKNADHQAVVNSECSRLSIATFQNPAPDATVYPLAVRDGEAPILDHPITFAEMYRRKMARDIELARLKKQAKADKKQQQQSANKEFADSKPLDAIFA

SEQ ID NO: 24848 - protein, 372 aa, Zea mays subsp. mays
  misc_feature (1)..(372): Ceres Seq. ID no. 12462481
MAPVSISAVPFLPTAAEGETNVRASFVREEDERPKVPHDRFSDEVPVVSLEGIDGPRRRAEIRGRVAAACEDWGIFQVVDHGVDAALVADMARLARDFFALPPEDKLRFDMSGGKKGGFIVSSHLQGEAVQDWREIVTYFSYPVKARDYSRWPDKPAAWRAVVERYSEQLMALACRLLGVLSEAMGLDTEALARACVDMDQKVVVNFYPRCPQPDLTLGLKRHTDPGTITLLLQDLVGGLQATRDGGRTWITVQPVEGAFVVNLGDHGHLLSNGRFKNADHQAVVNSECSRLSIATFQNPAPDATVYPLAVRDGEAPILDHPITFAEMYRRKMARDIELARLKKQAKADKKQQQQSANKEFADSKPLDAIFA

SEQ ID NO: 24849 - protein, 282 aa, Zea mays subsp. mays
  misc_feature (1)..(282): Ceres Seq. ID no. 12462482
MARLARDFFALPPEDKLRFDMSGGKKGGFIVSSHLQGEAVQDWREIVTYFSYPVKARDYSRWPDKPAAWRAVVERYSEQLMALACRLLGVLSEAMGLDTEALARACVDMDQKVVVNFYPRCPQPDLTLGLKRHTDPGTITLLLQDLVGGLQATRDGGRTWITVQPVEGAFVVNLGDHGHLLSNGRFKNADHQAVVNSECSRLSIATFQNPAPDATVYPLAVRDGEAPILDHPITFAEMYRRKMARDIELARLKKQAKADKKQQQQSANKEFADSKPLDAIFA

SEQ ID NO: 24850 - DNA, 693 bp, Zea mays subsp. mays
  misc_feature (1)..(693): Ceres Seq. ID no. 12462542
gctcgcctctgatctctgcgtcatcgaggagatcaggatacgcccgttcgaagctacttttcagcatggccatccgatttactcttcgaaggcggtgagaatccggctgggtcattccaagcttgaccctggaagagagacttttgtttcggatgaggatgagaacctgactgcgatcgctgatgagaactacatgtggacatacacgtcgccagagtttcctatgcttcaggaaaatgtgttgcaaaccttcaagcttccacgcccggctctttgcattggtggtatagtgaagattgaactactggggaggatacagaaacaatttacagatgataagtattacatatgtgtctgccatgtccaagtgacggggcgctcgctctcaccagatttaatgatagacctctccgatcctgctggttactcgaacctcaagtatctgccgggtgccggtaacttgcgcccagaagacctaatcagcattgacgccaaggactcaccggactggcgctcgcttgtttccaggtacaggcagatgaggcaactggctatggtgtacatgctgcttggacccgtgcagttgcagtttatggatgaagacgaagctgacttgcagatgtaggctttgttttccctgaatccgatnttgtgtatcctaattgaacagagcttgctntgataaatatagcg

SEQ ID NO: 24851 - protein, 207 aa, Zea mays subsp. mays
  misc_feature (1)..(207): Ceres Seq. ID no. 12462543
LASDLCVIEEIRIRPFEATFQHGHPIYSSKAVRIRLGHSKLDPGRETFVSDEDENLTAIADENYMWTYTSPEFPMLQENVLQTFKLPRPALCIGGIVKIELLGRIQKQFTDDKYYICVCHVQVTGRSLSPDLMIDLSDPAGYSNLKYLPGAGNLRPEDLISIDAKDSPDWRSLVSRYRQMRQLAMVYMLLGPVQLQFMDEDEADLQM

SEQ ID NO: 24852 - protein, 143 aa, Zea mays subsp. mays
  misc_feature (1)..(143): Ceres Seq. ID no. 12462544
MWTYTSPEFPMLQENVLQTFKLPRPALCIGGIVKIELLGRIQKQFTDDKYYICVCHVQVTGRSLSPDLMIDLSDPAGYSNLKYLPGAGNLRPEDLISIDAKDSPDWRSLVSRYRQMRQLAMVYMLLGPVQLQFMDEDEADLQM

SEQ ID NO: 24853 - protein, 133 aa, Zea mays subsp. mays
  misc_feature (1)..(133): Ceres Seq. ID no. 12462545
MLQENVLQTFKLPRPALCIGGIVKIELLGRIQKQFTDDKYYICVCHVQVTGRSLSPDLMIDLSDPAGYSNLKYLPGAGNLRPEDLISIDAKDSPDWRSLVSRYRQMRQLAMVYMLLGPVQLQFMDEDEADLQM

SEQ ID NO: 24854 - DNA, 2424 bp, Zea mays subsp. mays
  misc_feature (1)..(2424): Ceres Seq. ID no. 12465500
caccaaaatgtaagaacacacgcccggcgctgtggacgcctacgctactagtcagtactcggtagtcacccccaaagctccgcctccgcacctcttcccactcgcccggccgcggctatggcggccaccacgtccacgacgccggccgtctccttctccctcccctcgcccccgcaccgccaaggggccccgcgccgccgcgcgcctttcctcctccgtgccgcctccaccgcggcgcccccctcccccgacctctccatccagctctcgccccgcgcgtccccgcccgcgtcgacaaacggcgccgccaccgcgcttggacgccccgtggccgcctccttcgcccgtgaccgcgccgaagacctgcaggccgaggcccgcgccatggcccgcgccgccggcgccacagtctacagccccgagctcctcgcctcccgttacggttcccgccccttcaaggtggcgctccgggcagcggaggtgctgtccaagctgacgtcgttcggggtgaaggtcctgctggacgagcggagaggggagtcgtcctcggagaggagacgcgccagagcggtggagttgcgcagcatcctcaccagactgggcccaaccttcgtcaaaattgggcagggtctgtccacacgccccgacctctgcccggtcgagtacctcgaggagctcgccgagctgcaggattcacttcccacatttccggatgaggatgcatttgcatgtattgagagagagcttggcttcacgcttgattcaatctactcgtcaatttcaccttcccccattgcagccgctagtttaggtcaagtttataaagcacagttgaaatactctgggaagctggtagctgtgaaggtgcagagacctggtatcgaggatgctattgggcttgatttttatctacttagaggactcgggtttcttataaataagtatgttgacattgtaaccagcgatgttgttgcccttatggatgaatttgcacggagagttttccaagagcttaattatgttcaggaaggccaaaatgcaagaaggtttaaaaaactatatgccgataagcaagatatcttagtgcctgatatattttgggattacacaagtgctaaggttctaacaatggagtggattgagggtgtaaaattaaaccaacaagcagctattgaaagtcaaggattgaaggttctggatttggtcaacattggtatccagtgtagcttgaggcagcttctggagtatggttactttcatgctgaccctcatcctggtaatatattggcaacacctgaggggaagctggcttttcttgattttggcatgatgagtgaaacaccagaggatgcgagggtagccattataggacatgttgtccacttagtcaacagggactatgaagcaatggctcgtgattattatgcactagatttcttgggaccggatgtagatgtttccccgattgtgcctgctctcaagaatttctttgatgatgcactaaatgcaacagtgagtgagctgaacttcaagacaatagttgatggcctaggtgctgttctctatcagtacccgttcaatgtaccggcatactatgcattgatactacgatcgctcactgtactggaaggtttagcactctatgctgaccctgattttaaggtgcttgctgcatcgtatccttactttgcgaaaaggctactcactgatcccaatccatacctcagagacgctttagttgagcttctattcaaggatggaagattcagatggaataggcttgaaaatcttcttgttcaagggcgccaagatagagagtttgcagccaaagatgcattacagcctgttctaaagcttctcctgggtcctgatggggaggaattgcgtgtgttggttgtgaaagaggcagttcgtgtaacagaagccatcactattggaacactgatcgattcatacaatgcatctccagcgtttttgaagccattaatttccagtggcaatccagccggacccttcaagtttagtgaggctgaacaagaacagatgttggagctccgagaccaggttttcagagtatggggtcttttgagatcctcaaataactttgatccgagccttttgcaaccaatcgttcaggtgctacaagaaccagaggcccgcgtcttgggttctcgtgtcgcaggtggtgtaacacagcgccttgcggcacgtctgctgcaacagcttctcaggatcccttctcctggatcttcgtaacagattatatagagatgggctcgtatgaagcatgtaaattgacacgatacttttgacaggaaactgaggtgccatttgattcaagaaatgtaaatatagatatgggctcgtatgaagcatgtaaattgacacgatacttttcacaggaaacaggatttcatttgattc

SEQ ID NO: 24855 - protein, 712 aa, Zea mays subsp. mays
  misc_feature (1)..(712): Ceres Seq. ID no. 12465501
MAATTSTTPAVSFSLPSPPHRQGAPRRRAPFLLRAASTAAPPSPDLSIQLSPRASPPASTNGAATALGRPVAASFARDRAEDLQAEARAMARAAGATVYSPELLASRYGSRPFKVALRAAEVLSKLTSFGVKVLLDERRGESSSERRRARAVELRSILTRLGPTFVKIGQGLSTRPDLCPVEYLEELAELQDSLPTFPDEDAFACIERELGFTLDSIYSSISPSPIAAASLGQVYKAQLKYSGKLVAVKVQRPGIEDAIGLDFYLLRGLGFLINKYVDIVTSDVVALMDEFARRVFQELNYVQEGQNARRFKKLYADKQDILVPDIFWDYTSAKVLTMEWIEGVKLNQQAAIESQGLKVLDLVNIGIQCSLRQLLEYGYFHADPHPGNILATPEGKLAFLDFGMMSETPEDARVAIIGHVVHLVNRDYEAMARDYYALDFLGPDVDVSPIVPALKNFFDDALNATVSELNFKTIVDGLGAVLYQYPFNVPAYYALILRSLTVLEGLALYADPDFKVLAASYPYFAKRLLTDPNPYLRDALVELLFKDGRFRWNRLENLLVQGRQDREFAAKDALQPVLKLLLGPDGEELRVLVVKEAVRVTEAITIGTLIDSYNASPAFLKPLISSGNPAGPFKFSEAEQEQMLELRDQVFRVWGLLRSSNNFDPSLLQPIVQVLQEPEARVLGSRVAGGVTQRLAARLLQQLLRIPSPGSS

SEQ ID NO: 24856 - protein, 623 aa, Zea mays subsp. mays
  misc_feature (1)..(623): Ceres Seq. ID no. 12465502
MARAAGATVYSPELLASRYGSRPFKVALRAAEVLSKLTSFGVKVLLDERRGESSSERRRARAVELRSILTRLGPTFVKIGQGLSTRPDLCPVEYLEELAELQDSLPTFPDEDAFACIERELGFTLDSIYSSISPSPIAAASLGQVYKAQLKYSGKLVAVKVQRPGIEDAIGLDFYLLRGLGFLINKYVDIVTSDVVALMDEFARRVFQELNYVQEGQNARRFKKLYADKQDILVPDIFWDYTSAKVLTMEWIEGVKLNQQAAIESQGLKVLDLVNIGIQCSLRQLLEYGYFHADPHPGNILATPEGKLAFLDFGMMSETPEDARVAIIGHVVHLVNRDYEAMARDYYALDFLGPDVDVSPIVPALKNFFDDALNATVSELNFKTIVDGLGAVLYQYPFNVPAYYALILRSLTVLEGLALYADPDFKVLAASYPYFAKRLLTDPNPYLRDALVELLFKDGRFRWNRLENLLVQGRQDREFAAKDALQPVLKLLLGPDGEELRVLVVKEAVRVTEAITIGTLIDSYNASPAFLKPLISSGNPAGPFKFSEAEQEQMLELRDQVFRVWGLLRSSNNFDPSLLQPIVQVLQEPEARVLGSRVAGGVTQRLAARLLQQLLRIPSPGSS

SEQ ID NO: 24857 - protein, 425 aa, Zea mays subsp. mays
  misc_feature (1)..(425): Ceres Seq. ID no. 12465503
MDEFARRVFQELNYVQEGQNARRFKKLYADKQDILVPDIFWDYTSAKVLTMEWIEGVKLNQQAAIESQGLKVLDLVNIGIQCSLRQLLEYGYFHADPHPGNILATPEGKLAFLDFGMMSETPEDARVAIIGHVVHLVNRDYEAMARDYYALDFLGPDVDVSPIVPALKNFFDDALNATVSELNFKTIVDGLGAVLYQYPFNVPAYYALILRSLTVLEGLALYADPDFKVLAASYPYFAKRLLTDPNPYLRDALVELLFKDGRFRWNRLENLLVQGRQDREFAAKDALQPVLKLLLGPDGEELRVLVVKEAVRVTEAITIGTLIDSYNASPAFLKPLISSGNPAGPFKFSEAEQEQMLELRDQVFRVWGLLRSSNNFDPSLLQPIVQVLQEPEARVLGSRVAGGVTQRLAARLLQQLLRIPSPGSS

SEQ ID NO: 24858 - DNA, 1302 bp, Zea mays subsp. mays
  misc_feature (1)..(1302): Ceres Seq. ID no. 12465516
aactcctactcctccctctatataaatatacgcatctccaccctgttcctgggtcctctcttcttccaccaccacctcctactccgctgcaaccccaaatctctccttcctcgcatacgcgcggaagcagatcgagatgctgaagctgaaggagatcctggacagcgacgccagcgacgtgaactacgagcggatgatgaaagacatccagctggacctcgtccatacgcctagccggcgagccgccgcatcctcacacgggcgccacaggaagaagaactcagtagccgcgacggcgcagtctgacgacaacaagatgctcgcgctgtggagcgtggacagggtgagcagcggcagccggcggcacgacatggacctgcggccgccgcagagcgaggctgccgagaccgagaagggaaagaagcggccatcctccgagccagtgccagttgtgaccgtgaaggacctcagcgtggacaagcaggaggtcctctcacggcccacggtgatggcagtggcggcgacggccaccacgactgagccacaccgggagtggaagaagaaggtgatcgaccggctatcctcggaggcgcagcggctccgtgacctccggaccatcgtccaggagctgcgcgccggcgtggaggcgtcgtcggacgcggagctggacggcgtcaaggcgcagatggccggcgcggagggcgccatcgcggagctggtcgacgcgaacgctaagctcctgaagaaggcggagggttcacgtcggcgggcgacggcggcggcgacgtggacctgcgcagccggagccagcgcaagatcctggagcgcgtgcgcaagatgtcggacaaggccgggcggctggagctggagctgcagcggttccagcacgcgctgctgcggcacgaggaggagcgcgcggcgcggcgcgcggccaaggcggcggcggcgagcaccaccgtgcaggtgcagcggcggtcgcgggtgcagcttgtggagtacctgtacgggcggcggcgcgacagccggcggcccaagcagaaggcccgcggcccgtcctgctgcatgagggccaaggccatcgacgactgacgtgacgtggcgtcctaggtaaataatttaattactggactgatcttagttacgtcggaggttctttttcctaccctaaagtaaagtaaggtcttaagatgtaaatcgtacgtaggcaactcttgtgttcctcgtctgcaaatttttcgcatgtaaaattccagacggtaatcttcggtctcgttgctttccagttcttanaaaaaaatattt

SEQ ID NO: 24859 - protein, 309 aa, Zea mays subsp. mays
  misc_feature (1)..(309): Ceres Seq. ID no. 12465517
MLKLKEILDSDASDVNYERMMKDIQLDLVHTPSRRAAASSHGRHRKKNSVAATAQSDDNKMLALWSVDRVSSGSRRHDMDLRPPQSEAAETEKGKKRPSSEPVPVVTVKDLSVDKQEVLSRPTVMAVAATATTTEPHREWKKKVIDRLSSEAQRLRDLRTIVQELRAGVEASSDAELDGVKAQMAGAEGAIAELVDANAKLLKKAEGSRRRATAAATWTCAAGASARSWSACARCRTRPGGWSWSCSGSSTRCCGTRRSARRGARPRRRRRAPPCRCSGGRGCSLWSTCTGGGATAGGPSRRPAARPAA

SEQ ID NO: 24860 - protein, 290 aa, Zea mays subsp. mays
  misc_feature (1)..(290): Ceres Seq. ID no. 12465518
MMKDIQLDLVHTPSRRAAASSHGRHRKKNSVAATAQSDDNKMLALWSVDRVSSGSRRHDMDLRPPQSEAAETEKGKKRPSSEPVPVVTVKDLSVDKQEVLSRPTVMAVAATATTTEPHREWKKKVIDRLSSEAQRLRDLRTIVQELRAGVEASSDAELDGVKAQMAGAEGAIAELVDANAKLLKKAEGSRRRATAAATWTCAAGASARSWSACARCRTRPGGWSWSCSGSSTRCCGTRRSARRGARPRRRRRAPPCRCSGGRGCSLWSTCTGGGATAGGPSRRPAARPAA
